United States Patent Application Publication US 2005/0228172 A9 - sequence listing, part 183

SEQ ID NO: 822770 - DNA, 526 bp, Homo sapiens
gggcacctcgagccacttctctgagtggcttcatttctttggtgtcctttctcggacaggttattgagagtttcagaggctgtggcaagtctgacttgggactctgcggggaagggacccagcctcctcagtttggcctcccctccaccacatggcagggggcgaaactgtcccccatatcaggcagacacacttctatggaacaacacttctgcatggttttggggacgcccatgcctcctcagaggactctaggcacacaccctcagttacaggacatctgctgcagccctgcctcgctcatggggagttagaccccactcctctgataggtgagcttctgtaggaaacacagcacctgctctttgtctatagaacaatgggcgcaggcacacctctgcctgataacargctcacccacttccactatatgacagtaggagcacccgtctcctctgtgtggtaacaggtacacctgatcatcctctgcagaacagtgcaacccccgcctctccactgggacatt

SEQ ID NO: 822771 - DNA, 645 bp, Homo sapiens
aaagctgcaaaagagacaaaaagcaggagaggaacagggctggggctgggggaggtggtggcggaaaggtagccgggaaaggtcagggctttctagccatcaagtggtaaaataaacagggagctgcgcggccgggcctgcacatcctcaaatcgtcttattcagtggagccgatcagagcagacggacgcgctgaaaggggcctcggtttatctgaactcttgcaagcggcctctgaggccacagagcccgactccgctcctccacccagccacagcacagcttttatagaaacccagcgtcttatgccatcctgggggacctgctggggaaggagggaaagccagggctgaaaaaattcaagtcaagcctcattacttcctcattacctttgcaaaagtggagggagagaaatttttatctggggagcgaggctgggatgtcattgtgctctgcctggttactgcacagccgaccgtggcatgcagccgccgggggactggagggttctcccgttcctctgcagcaatgatccactcgttagggtttttaaggcaaattgccattgctcatcactgtgtcagcccrggggcgggctcaccccacttcccaccctgcagatggatgggggagatgaaggaaatg

SEQ ID NO: 822772 - DNA, 655 bp, Homo sapiens
gcctaagaggggcaccatggagcccaggagtacacagacatcgggagaggccaaggcatgtggttctcccatctacaaagcattcatcagaaggcaaacacggtcattacagttgctgctatcgtaaaaatcattacaaataaaagcaaaacacgtttctgttattaaacaaaaaattcagctctctcaggtttctgacaaatgtctccacatatgttaatacttgcatataaaataagtgtctttgtcttttgaaggttcagaaacatgatgctttaatttaacgtattctccaaataaacatacttgaatattagtccaagactttttttttaaaagaatgcaatagaatgctgcaactcacaacttcttagagctaagtttcacactgagccagtgggagttggcagtgatggagaattaacacagggagagcctgtcttggtgcctggtgggtggaggaacagggctttcacaggggcggagatgggagtgcagggctgagagcaaacccttcctttagccattttgtttttgtgcaggagccccgagctgcttaatcaaatccatctcctctcaggacttcgctgttgtgaacaggatcaggggtccagtggggccgacctcygccctcggggcagtgagaagggggtca

SEQ ID NO: 822773 - DNA, 594 bp, Homo sapiens
gaaccttacatttccactaacagtgcccaaggcttccaatttccctatgtccttgccaacaattattattgttatcacagctaatgggcatgaggtggcatcctatctattgtggttttcattgcgtttccctaatggttagctatattgagcatcttttcatgtgcttcttggccttttgtatatcttctttggagaaatgtctattcaagtccttggctcatttttaattcttttttgttcttgagtttcagaaacactttacgtattctgtatattaaccccttaccagataaatatgtcaatatttatttccattttaggtgttgcttgttgagtctattgatagtgtcctttgatatacagacatttttaatttcaatacagttcaatattactactgttacttttgttgtctgtgtttttggtgtcatcttcaagaaatcattgccaaatccaatgccamgaagctttctatgttttcttctaagagtgttatagttttaggtcttatgtttaggtatttgatccactttgaattgactattttctatggaatagggtgaggatccagcttcattcattttgccagtg

SEQ ID NO: 822774 - DNA, 594 bp, Homo sapiens
gaaccttacatttccactaacagtgcccaaggcttccaatttccctatgtccttgccaacaattattattgttatcacagctaatgggcatgaggtggcatcctatctattgtggttttcattgcgtttccctaatggttagctatattgagcatcttttcatgtgcttcttggccttttgtatatcttctttggagaaatgtctattcaagtccttggctcatttttaattcttttttgttcttgagtttcagaaacactttacgtattctgtatattaaccccttaccagataaatatgtcaatatttatttccattttaggtgttgcttgttgagtctattgatagtgtcctttgatatacagacatttttaatttcaatacagttcaatattactactgttacttttgttgtctgtgtttttggtgtcatcttcaagaaatcattgccaaatccaatgccacgaagctttctatgttttcttctaagagtgttrtagttttaggtcttatgtttaggtatttgatccactttgaattgactattttctatggaatagggtgaggatccagcttcattcattttgccagtg

SEQ ID NO: 822775 - DNA, 598 bp, Homo sapiens
agctccctctgttgatgagatttgccatggggtccattyctcctgccccttcagagacacgctcggctccctggcttccccagccctcacctacctctgcgtgcggcttccttgtctcagccttctcttccctcctggggtctctcccagaagcctgccccagcctccctcctttcccactctgtactcccttcagacgacctcgtgcttcacagggtttaaatccttcttctgggcaggtgtgtgccacaccccatgggtgttcctagacagtctcctctgcattcattctggaggtcctgcattctgcttcctgaatcttagaatctggaatctttagccacaaactcaactttccagaaccaacattacctacatcttctatgaatggaccttatcctgatatctatatttttgtcaaccagtctgacaacttgccttctctctcaagctgaaaaaggaggctcatctttgattcttgtctctcacgtctacattcgaggagaagccatgtcttatctgccatcagttctaccttgaaacatttccagatttcacttccttctctctcctcaatgccaccagcttgtgccccaca

SEQ ID NO: 822776 - DNA, 636 bp, Homo sapiens
attaattaaggcagagtggggaggccaggcagacatcacagtagtgggatggatggatgaacaccrtgagaccctcgatccactgcactgagaacacagctccatttccatgctattcttgccagaaattcataatgccattctaataatgaaaaaatactagacaagctcacattgaggaacatgctacaaataattgaccagctacgttaagaacacaaaagaaaagagggttagtttgctgggactgtcaaaactaagtaccacagactggatggcttacacagaagaaatttattttctcacagttctggaggctggaagtccaagatctgggtactggcagggctggtttctggtgaagcctctcaacatggcttgcagacagctgccttcttgctgtgtcatcatctggcctttgttctgtgcctgtacattcctggcttctctttatgtgttcaaattccctctttttgtaagaatacgagtcttatcagattaagacccattccaacaacctcagctgtacctgtaacctcagctggtacttctgtaaagatcctattccaaataagatcacattctgaagtacttggggttagacttcaacagaggagttttgtgggtacacaactt

SEQ ID NO: 822777 - DNA, 636 bp, Homo sapiens
attaattaaggcagagtggggaggccaggcagacatcacagtagtgggatggatggatgaacaccgtgagaccctcgatccactgcactgagracacagctccatttccatgctattcttgccagaaattcataatgccattctaataatgaaaaaatactagacaagctcacattgaggaacatgctacaaataattgaccagctacgttaagaacacaaaagaaaagagggttagtttgctgggactgtcaaaactaagtaccacagactggatggcttacacagaagaaatttattttctcacagttctggaggctggaagtccaagatctgggtactggcagggctggtttctggtgaagcctctcaacatggcttgcagacagctgccttcttgctgtgtcatcatctggcctttgttctgtgcctgtacattcctggcttctctttatgtgttcaaattccctctttttgtaagaatacgagtcttatcagattaagacccattccaacaacctcagctgtacctgtaacctcagctggtacttctgtaaagatcctattccaaataagatcacattctgaagtacttggggttagacttcaacagaggagttttgtgggtacacaactt

SEQ ID NO: 822778 - DNA, 586 bp, Homo sapiens
gaaaatatcttttaaaaatgaaagagaaataaagatattttcagacagacaaaagctgaaagaatttatctccagcagacctacttcacaagattaagtctttttaaaagagtatttaaagtgaamttcaagctatttaaagtagaaatgttaaaaatgactgtggggcccagtgtgatggctcatgcctgtaatcctagtactttgggaggctgaggcgggagagtgggcaggcagatcacttgaggccaagagttcgagaccagtcggaccaacatggtgaaaccctgtctctactaaaaatacaaaaattagctgggtgtggtgctgaatgtttgtaatcccagctactcagaggctgaggcacgagaatcacttgaacctaggaggcagatgttgcagtgaggagagatcctgccacttcactctagtttgggcgacagagtgagatggtctcaaaaaacaacaaaaacaaaaaatgtactgtggggtttatagcatatgtagaggtacggcatatgacaaaaggacacaaagtgcaggagtttggtaattagaaatatattgttgtaaggttcatatattg

SEQ ID NO: 822779 - DNA, 619 bp, Homo sapiens
aggaactttttcatgtatcctagattccagtcctttggcaggttatgtgttttggaaaatattttctcctagtctgttgcttgcctgtaaactttcttaaccatgtttctgacaaaaagttttaaattttgacgaagtttatcaaattttttcatatggtgtttactttctgtgacctttctaggaaacttccacctatcccctactcatcaagatattctccaatgcattctattaaaatatgtatgatttttagtttttacatttaagtctatgatccatcccaaattaattttgcttaataaggtagagggccaggttcattttttttctatatgaatacttcattatcctagcaccatttacaccaaagacttggtgcttacttatatgtaaagtaagttagttggactaggactataagatctttaaattcccttcctcaatggattgctttggtaccttcttaaaatcacgactataaagcataggtctatttccaggctctctattctgttgcayggatttattgattcttatgctataaccacactgtcttactgttctatgtttatagtaaatcataaagttacgtagtgttaagtccatcaactttttc

SEQ ID NO: 822780 - DNA, 626 bp, Homo sapiens
agcaatcacctgtgtcaaatactgctaatcaaaaacagtatttttgaattagatctagcattgaatttcacaacrtagagtctactggagactttgataagaaaagtttaagtggaatggtgtgagaaagaaagattggtgtggatttatgggacaacgggaatagaggaattggactgtgagtacagataattcttttgaggacttttgttgcaaagaggagaaaataaatggggaagtcattggcaggggaagaagggttaatggatgattttaattttatttatttattttttagatgaaggaaataacagcatgtatgctcttggaaatgatctggtagagggtgaaaaaatgctaatgtagcagagagagaggagaaatgttgaagtgattccatgagtgtatgagtgctctggtttgaatgtttgtgtccctccaaaattcatgttgaaatgtaatccccaatgcaagagtattaagtggtggggcctttaggaagctactaggtgaatgggattagtaccctgaaaaaataaaatggcttgagggagcgtttttggccctttctacccttccaccgtgtgagcacacagcaagaatctgtgagtgaggaacaggccctc

SEQ ID NO: 822781 - DNA, 647 bp, Homo sapiens
tattaatcatgataaaaagaatacacattactctgctaccctgttcatggagagcaaaaactcaagtcacaaaggaaagtatttgcaacatgtatagctgacaaagagctttatatccagaatatataaaaatctttcaaattcacaataaaaaaagggagaatccccccttcaaacatttgaaaaagcattttataaaagaagatacccaaagggcaaataaacacacgaaaagatgtttaatttcattcgtcatctaggaaacgcaaattaagccacaaaaagatgcttctacgtaccttttagaattgccaaaatattaaaggctgacaaagcaagtgtggatggaagtacatatcatacactgctggctggagtgaaagctgaacactgccacagcctatgagccagccatcctacctctaggtacacacaataacaaaatgtgtgcacatgtaactaagacacccacaaaaatgttcatggcaacactgtttataaaattcaaaaacttaaaaacmaccacaagattcattaacagtaaatggttacatgtacatcaattcatagaactgacaattatacagcaataaactactactatgtactatgagataaagctcacaaaaataaggctgaactaaaga

SEQ ID NO: 822782 - DNA, 619 bp, Homo sapiens
caagaagaaagagaaaatgatcaactgcccatttagctgagaggcagtgtacgacgaagaaggaaggaactgaaaacctggcagcacagagcctactgacccccccggacaagaacagtgtcaggggacagtggagcagtccaggctggaggagacagagatgaaaagagaatggaagtcaacatgtctgtgattcttttgagaagttttgctttgaagacagcagcagagaaatggagagtaactgtatttattttattcacagataagtcttgacttgtgaaaggtaaagcattatttgggaaatgaaatcacatgctatacctgctagatttgtttttggcacagtaactgggtgtccttaattaagtcgttatttattaagtcagttcctcaaattctatcttcaggtttgcatttaaaatggtgctaaattaaaatactatattcattttaattaacaaagtttgtaaaactgaaacaaatgttccyaaaaagacattcactgaaaaagctttactctggttgagtaaaaaaataatactgcaagtcctcacctcccgcaaataggatttttaggagcatatacgacacaaatattcccattttaaatattttc

SEQ ID NO: 822783 - DNA, 644 bp, Homo sapiens
atatacaatggagaactagtgagccataaaagataatgaaatcctgttatttgcaacaacatggatagaaygggaggtcattatgctaagtgacatatgccaggcacagaaagacaaacaccacatgtctttacttatttgtagggaaaaatcaaaacaattgagctcatggagatagagagcagaaggatggttaccagaggctgggaaaagcagtgtgaacatacagtggaggaggggatggttaatgggtacagaaaaatagaaagaatgaataggccaggcacagtggctcatgcctgtaatcctagcacttcgggaggccgaggcaggtggatcacttgaggtcaggagttcgagaccagcctggccaacatggtgaaactccatctctactaaaaaatacaaaaattagctagaaattgcttgaacccaggaggcagaggctgcagtgagccgagattgtgccactgcactcctgtctggacaacagagcaagactcctgtctcaaaaataaaaataaaaatgaataaaacctagtatttgatagcacaacagagtgattatagtcaataatttgatgtaggtttaaaaataactaaaagaatataattggattatttgtaacagaaagcataaatac

SEQ ID NO: 822784 - DNA, 653 bp, Homo sapiens
gattaatatgattataataattccatgtaaaagaatgtcagatccatattttaatgttaaaattcaatgagttttttttttttttggcaaatatatgtgttactaagtgctaccctctgtgttgtttcaggataaagggagaaaaagacatacttggttcctgttctaatggatcttttattctagtaaaagtcagattaaaatgaagatcctagaaaagtaaacccaataattacgattagcaataagaatgcattctaccaacaaagggccctgatattggggtaggattaggaaagaatcactgaggatttgatatgttctagctaggagttacaggatgagagtcagtttgagaaggaggaaaggcatggagaaggcatccttagaagatggagcatttcattgaaccgatttctggagcttattaagattattccatcagtaataagcttaatatctgtgattccccaaattatgtagaattttagagctatgccatgagaaaacaaatcaaccaaataccaaatgyatcaatcatattttctttgctacagtcatgtatgaaaataggcagaaacatggatccagttctgggtaacacaggttgtaaaccttagttataaggaatgacccctttaactccattaact

SEQ ID NO: 822785 - DNA, 695 bp, Homo sapiens
tttaaagaacctttctaagagacaaagacttagctgcttctgttcacataacagargaagctaacaattaatttcagattcgatgctggaagtacctctcatgctatatgctatatgctatacaaatactattagcaataaagcatcaagataaaagattacttttaattttgtaccactgtgtaaatcattgtacttattttccaggctgattagatagcattgtgagagaaggtgaaaaagaagcctatatgtgaacattaaattaatgtaactttttttgtaaaaagaacattatggtggtaatattacatccccaactctgctctgtcatctctagcagataaaaaggaaaagaagtcccactgtttacagggagaagatcctgtggatagtccatcactattttgcttttgcttagtattttacattatcatcagacttcctaacagtagtttctgaaagatgaaagtggactctcactgagaatttcacacaaatggattaatttgcgccgccatttttggcacgttgccatggatacagccatccgaaggcctcagtgcagctgcgagttgattgacggtccattcacagtgtaaggctttacaaaaccagtcacataaaaggacactcattagtggacaaaggccttatatacacattttggtgatgcttccaaggctgaacattac

SEQ ID NO: 822786 - DNA, 656 bp, Homo sapiens
atttcagattcgatgctggaagtacctctcatgctatatgctatatgctatacaaatactattagcaataaagcatcaagataaaagattacttttaattttgtaccactgtgtaaatcattgtacttattttccaggctgattagatagcattgtgagagaaggtgaaaaagaagcctatatgtgaacattaaattaatgtaactttttttgtaaaaagaacattatggtggtaatattacatccccaactctgctctgtcatctctagcagataaaaaggaaaagaagtcccactgtttacagggagaagatcctgtggatagtccatcactattttgcttttgcttagtattttacattatcatcagacttcctaacagtagtttctgaaagatgaaagtggactctcactgagaatttcacacaaatggattaatttgcgccgccatttttggcacgttgccatggatacagccatccgaaggcctcagtgcagctgcgagttgattgacggtccattcacagtgtaaggytttacaaaaccagtcacataaaaggacactcattagtggacaaaggccttatatacacattttggtgatgcttccaaggctgaacattacctctcagtaaatctgactttcatatcaatat

SEQ ID NO: 822787 - DNA, 667 bp, Homo sapiens
tccattcacagtgtaaggctttacaaaaccagtcacataaaaggacactcattagtggacaaaggccttatatacacattttggtgatgcttccaaggctgaacattacctctcagtaaatctgactttcatatcaatatcaccaatgaaagttggaactataccatgaaaaatatatattcaaaaatactgtggagttaacatatttattcaatacatagctttattttgctttcattcaaatctagctaaaagaaggtggaataaaacacaaaccaaaaagggtttgtcttataaattctatattttgtttaaaaaaatcaaagaacaaaaagttatttctcattatgaacctacagactggtgtatgcttagattaacaaagggaataatttctgctatttactatggaatgggaaaaaaaagaacaggcttttgacttctttctgccttctgcatggcatagtccattgggaagtataatgttgacattttacattgtcacacacccaagtgtgtaaagatataactttattcctctgtacttaaacttagcccatgagactgttggtaataaaataccttcttctyatttattcaaggtaattctgtcaactctggtagaacactctggggtatctcctctaccaattcaggatgcatccca

SEQ ID NO: 822788 - DNA, 654 bp, Homo sapiens
cgctggatttgctttcatttgagctagtatcagctcttttcagatgtatcaacagataaaaagttaaataggaaagtggcttaattgctgtggcaccaaagcgtgggcggcattctctctytaaatgttgtctgggtacattgcaatacgcttaggagaggcatgagtattgtccctgttgagtatcatttgcttaggcgtattctttttagttatttcattttgttacactttttgataatgataaataggaaattattggcttcattttaaaacgtggtaggattgcaagtccgatgctgaaatttaaaattctcaaagatggaaagtggggaaataaaatgagtggttttcattcttcccaaattcccactccccttttctgcttcctgttctttgctttctcttctgtctgtgactcggtgactcttgtcttcttctctttccatcattctctgtcttctgttaagccagccaacagcaagacaaatgagactgattctctggcatgtcagttactctgttgcatgatctgattatttttccgttttggtttattatatatggctgaaagcttcatcgtcgtattccaatgactaaagtaaacagtatttatggtttttatgttaagttttatgttatataactacacag

SEQ ID NO: 822789 - DNA, 306 bp, Homo sapiens
aaggattgtcccacaaagtggtagctcttctataattttgtgttgtgcttcatgaacgctaatggttcatgaaggtttcccttgccaccyggtcagaaaaattactggaaaggacaccagagttaacagcaaatgcctgggatgaggcagtgccaggttacacctgtgcaaagccagcccacatagaactcgtcactgcatccagagctgaatgtgaggccaagggaacttggagcaggacacaagaggtgtcagatccacaattcttaaaaaatatcaaaagcttagcacctgagtcacatatgg

SEQ ID NO: 822790 - DNA, 490 bp, Homo sapiens
ggagaatgctacacagatagaactcccaagttctgcaaagcattgcctttcatattcagctcagtaagtaacatcctgtttgtgtgaggaagctctctaaatccagggaaagatcatccaatggaattagaaggaaccatacctggggctggaggcagagcctattctcatcagcccgaatggaaacttcataattcatagggttttcaggagagaactcaaaagagtcttgcctcagttgcaggaaatcattagccctagactaaatgtcactctgcttccacccaaaatattataaaagcaaggcctgaaaaaggtcactttctgctaacttagctacattccataaaaaagggtaaaaaattgttatcagggargaggacttcctaatactaatgagaattagatttatcccattagtcccagaatttgatttatcccattagtcaccagcaagcctggaacattgcaacttcccaggtacacacag

SEQ ID NO: 822791 - DNA, 624 bp, Homo sapiens
agaatggtcttctttgtcttctttttaacccattcttgactttaagtctattttatttsatataagtgtagttacttctgctctctttttattcccatttgcatggtatatgtccagaatactttaaagtcatgattttgaagatagtgattgatttaacaaaggaggcaaatgtaacagcaagaatcagaaaccttttgatatatattgtttgtaaagaacctcttaaaattattaaatgaattgatacagtgatttttaaatgtattggctaatttattaactaatttggtaattccacaaaaatatactggatgacttctttgttcaaagtattgtgatccagataaatgagaaagttgatagaatacaaacaaaaatgtaaaggaaatcacagagttgccatagaaatgtatagagaagaggcattcacttctcttgttgaaagtgttcttctggtacagtacaaatgttaatttggagctactgtatcatgttattaaaagttctagtgtgataatacaatctctcctttctgcctcaagtggctaagtgtatttgttctaagatttgtgtttgtttaattttaaaatttcattcgctatgctagtcactctggaatgc

SEQ ID NO: 822792 - DNA, 586 bp, Homo sapiens
tgcaaaggccccaaggcagataatagcttactgtyttagaggaactaaaccaagaccagagtaactgtggctcagtgaaatagatgaagtagggtagaaagagtggcactagggtagggctagagaggcaggtagtgtccagagcacagaaacttaaggagcttaacagctcgctgaagttttcacagttaataaggcacctctttaaacttgtgctctttatattacatcatatattcttcccagagttagaggcataattatagcatctagttatatgggatgatagaattaaaaaaattttttttaagtataatttccttcaattattaaaacaagtctctgatatcactaaggcaaacagtaatccatagaaacagatgagagatgtatgtacagggggctgactgaactagccaagatcacacagtaagtgctgcaacaggggtgtaaaataagtaaaactccacctgctttgaggtaggataagggtaagaagttgcacatggaccatgtatctactatgtgccagatcttggatattttagaaatgttactcagaaagatctttgacaatcacatctgc

SEQ ID NO: 822793 - DNA, 533 bp, Homo sapiens
cagactgctgtgctagcaatgagcgaggctccacgggtatgggaccctccgagccaggtacgggatgtaatctcctggtgtgccgtttgctaagaccattggaaaagcrcagtattagggtgggagtgacctgattttccaggtgccgtctgtcacccctttctttgactaggaaagggtattccctgaccccttgcgcttcctgggtgaggcgatgcctcgccctgctttggctcaggctcaatgcgctgcacccactgtcctgcacccactttccaacactccccagtgagatgaacctggtacctcagttggaaatgcagaaatcacccatcttctgtgttgctcatgctgggagctctagactggagctgttcctattcagccatcttggctccaccctcgatagacaggttctttaacttaccactagatgatagcactagcactaaacattagtaaattattttattggtctatgttgattgtattaatatgatggtatttatgaaggtatattttatactcaatgg

SEQ ID NO: 822794 - DNA, 634 bp, Homo sapiens
ttcttcagggtcaacacactggggaatgtaccagataaactaagattaaaggagcctatgaatgtaatataaatggagtgacaaacagataactatttcatattggaagctctttcagacctcttctggatgtattcaagtcataggaatctctcaaaaataataaattcctgctgatgttgatgagcacatttacgctcctgtccctatgccaaagaaacaggagaaagtcttatcttatgaggagtaacagaaggtaggaaatgtgtcagaataaatgacaaactgcccacagccataaatttggttcagagtgagttcgatttcactttcataaggcatttgtattgacaaagctgtaataattgtttttcttctgggttgaccaggtctcaaagaaaaacaaaaccaaaaaatcccaatcctctgctccaaatttcatcatattatgtcataaggaatacctaaagagaagattcagaaagccccaactcagttcccagatgaatcaagactttcatgaagacttgattaagactgcattcgttttgtttgtagrtttgctcttcttcagaaaaaacccttcatttcacttaattgtttggcagggcttccagtaaatctgataaaagtg

SEQ ID NO: 822795 - DNA, 612 bp, Homo sapiens
tcagtactaccttgaatttttaaagcacaaattaaagaatatatttcatggagaaatacatagagcaaataaacaatatgtgcatagctacacgtatgataaatatgtcatcaaacgcatttatcataacaatgaatgtgaatgcacttgtttcacttattagaagaaaacgatgtttaagagtgttgcaagtcagaccccaagtttcagctttttacaaggagcaattctaaaatgaaggttttgaaaagaccaaaaagaaattagcagaagtataccaagcaagtgggatcaaaatgagaacagaagtatcaatcttgttgtcaaaataggatacaagcgtcaatgcagtaaccatgataagaaaggacaaacttaattgctaagagctataatccataatgaatatgtaaatttattactacttatggatcaaaaaacacagcaaccaactctataaagctggtaataggagatccaaggagatattgatataaacatactagtaaaatcacwctttaatacatcactctcagtacaagacaaatgaagtggacaaaaaaaaataattgaggagataaaagatctaatcaatataataaatgtggtaga

SEQ ID NO: 822796 - DNA, 515 bp, Homo sapiens
gtgttctcattgttcaattcccacctatgagtgagaacatgcagtgtttgatttttttgtccttgcgatagtttgctgagaatgatggtttgaaaggcattctactgcggataaaatgctatcagtgtttcatgctacagagaaatcatttgtgaaaggaagagttaatcaatgtggcaaacttcattgttgtcttattttttaaaattgctacagccaccccaaagttcagtaaccacaaccctgatcagtcagcactcatccatctcgaggctagaccctccaccagataaaaagctgaggactcaatgaatactcaaataattgttaccatttctttagcaataaaatatttttaattatggtatatatatatatatatatayacacacacacatacatatattgctttttccagacataatgctattgtacacttaatgactacagtatagtgcaaacataacttttatatgcatcgagaagacaaaaaatttgcgtgacttgctctgttc

SEQ ID NO: 822797 - DNA, 502 bp, Homo sapiens
gctaaatgtactttcttgagacatcatgcatgcaagaaatgttctggccactagctatcctaagggtttttaattctacggtatgtactgatttacactacaaatgttatgcaggttgggtatattgaataaaagactaatttgcatataattattgattgttgctcaatctaagctaaatgcagagattttccagggcttcactgcttcattctatgtatttttattatatatctaatgtttacaacaataccttcaattcatatagatcatttattctgaggagctcaaacttattaatatgtgattatcactattttcccttttcaaaaggatagtgatctataatgtgtatatgaaaaacctatytaaataatctcaaatcaatgagagtataattatagccccttcccaaacagcagatctgagaatattgcattgcttattgggtttaaaatctatgcagctcaaataaatctgtagttctaagcgtgagcaatgt

SEQ ID NO: 822798 - DNA, 540 bp, Homo sapiens
tacttagtttattttagcatgatataattatgagaaatatttaaagcaatattgttacctgtggaagagatccgagttccggagacattggcggtkaatctgtataggtttgcagcaccctccattcttgccttctcataaggaattccactaaggggcataaggcagaaagagagaccgagtcacgtctcagaacaggagtgaaggcttattaaaaagttttagaacggaaaggaaacaaagggaagtacaacctggaagagggccaagcgggagacttgagaagccaagtacacagcttgacctcttgacttggggtttaatactttggcatacttctgggatcttgccttctcctcactcctaagatcttactgggaagctgctggtcagtttcaggtgttttccattagaagattgcctttccctgccaccggctgtgaccaattactactttagagaaacagttaacaaccacttgaccatcacctgaggggctcccagcacatttggtgtgtggaggaggggagccctctcctg

SEQ ID NO: 822799 - DNA, 652 bp, Homo sapiens
tgctttagaaatatgactggtgttactacatggcagtatatccatctttaaacatttgcggtactaatcccactgattagcttccattttaaatagtgacttacattcattaaggttctattatttcagtattwtggtttcaggcatggccatttcaaaacaacaattttggcactataaggaatgggatgttttaacaagagatcatttttgttccttctggcttacgtgtaataaactctatgtctatgcttggaaatcatggaaaaatacaagtctgtaacttgttaatttggtttataatatgaattgtgaagcaaccacaaaggaaaatttatcctctaattgttttttgagttacacactatttctattctattacgctaattggagctgatatttcaactagtatccttaacagggaaaagaaaatgatgaaacaagtgtggtacgttgatattacagaatactactcagtgataaaaaggaacaaactacttatatgcacaaaatcatggatgaatatcaaaaacattgtgttggacaatggaagccaaatacaaaaggattcatatgtcatgattccatcaatatgacattctagaaaaatcaggtctaacatatagtgtcagaaatcatatcagtggtttcc

SEQ ID NO: 822800 - DNA, 526 bp, Homo sapiens
tatagctaactccaaaaacaaaaaaaagaaaaaaaacaaactgacagcatcaaatgttggtgagaatgcagagcaatgagaattttcattcattgttggttgaaatgaaaaatggcacagccactggaagacagttgggcagctttttgactaagataaatattgtcttatcatataatccaactactgtgttccttaatatttactcaaattagttaaaaacctatgtccacaaaaagttgcacactaatgtttgtagccctaataactgtcaaaaactaaagcaacggagctgtggtgtgtccatacactgaatagaaatactattcagacacaaaacaaaacaagctatcatgccacatgaagacatgaagggaccataaatgcatattgtttaattaaagaagccaatctaaaaggcctcatactgcatgacttcaactatatgacattttttaataygcaaaactatgggactgtaaaaggatccatggatgccaggagttaggcaagagagagggattag

SEQ ID NO: 822801 - DNA, 540 bp, Homo sapiens
gtatcatctcacaaatctatcatttctttgtaattaaaacatttacattttattattttagtaactttgaaatatggaatacatgattattagctatagtcacartgctgcaatgtatcaaccagaaattacttctcttgtctaaccaaaactttttagcctttgaccaacatatccactttcttggtccactggcccatgctcactttctggtagccatcattccaccctctacttctatgattttgactttttagattttacatttaagcaagatcatgcagcatttgtctttctgtacctggcttgtttcacttagcataatttcctccagatacatccatgctgtcccaaatgacaaaattttctttgtaaagctggatactattccagtgtgtaagtacatatgccacagtttctgtatctatttaccgtttgagacatacttaggttgtttacatatgtttactatcgtgaataacgttgcaatgaacatgaacatacagacatcctttcaacatgctgatttcactttctttt

SEQ ID NO: 822802 - DNA, 356 bp, Homo sapiens
tccttgtattcatgttatttccaaaatgtcgcttgttattaatttctagttttatttcattttggtcagtgatgatacttgatattatttcaatgtctttaaatattttaagacttgtgacctaatgtatgctctatccttgagaatgatctatgtgctgaggacaagaatgtgcatctggcagcctttggataaactcttctgtaaatatttattagatcyatttggtgcagattgagtctgatatttgttcattttctgtctagaagatctgtccaatgcggaaaatgggatgttgaagtttctagctattattgtactgaagtctatctctctctttagttcagataatattt

SEQ ID NO: 822803 - DNA, 633 bp, Homo sapiens
tttttgagaattgcctctcacgctctaatgtctaagcaggtctaagtcacgctggaaccttcttcccaaatccttctcttcccttcacagcctcctaaatctcttcctccctttcttccctgctcttatcactctcctggcctttaaaatctaaactgacagtaggtgcaggaaaacaatgagagtggaaaaaccgatcaagtcagggatggagacccccgttcccttcgccgcgttgcccgacagtcgccaccccacacccgaggggtcggtgagcagcacggccccttcctctaacgtgtctgtctggttccggctccagagtaacgccagcctcagaatgaggtgggaagtgcctcctcttggcttctggaagagtctgtgtaaaactggtgtggtggagttcatgaagtcatttgggcctgaagttttctctgcaggaagattgctagttactaattcctctaatagatacagtgttcattgtgttttgacgtttatgtcttyggtagtcgatgtcctttagaatgtgtttatgtccttggtagtcgatgtcctttagaatgtgtttatgtctttggtagtcgatgtcctttagaatgtgtttatgtctttggtagtcgatgtccttta

SEQ ID NO: 822804 - DNA, 610 bp, Homo sapiens
actaacttgcagctgccacgtggagggacagagcagcaagtggagacccacatcrtgaacttttgctccaagaactaccgcaggaacataccaggaaagctgagagaattcacagaacttttgaaggaggtggattgccactgcaggctctgtgggacaactgaggagctgtgctttctcagctgggagacttgtggtctggggcaagttctcagccctgctcaccagttgcctggaaatatacttggtgctgttgcaggagcacagtaggagtgagaccagcctttcaggatgcaggctgtgtgggagctgggtgaggcctgtggctgctggctttccttcacttccctggtgatctgtgtgatgcaacagagacagccataatccccttgggagcataactacattggcctgggactcacacccccactccccacagcagctgtagcaagccccacccaaggagagtctgagttcagacacgcctaaccctgcccccagctgatggtctttctctacccaccctggaagccaaagacaaaggtcataatctctagggagctctatggccttgccccccacctgagaaactggaatatttatccaaaga

SEQ ID NO: 822805 - DNA, 444 bp, Homo sapiens
gctggcaaagaggatgtccccactaagagatcacttgtcctttgagcaggggttaactgtcaccaccttggtagagaccaagaagtttcagcttgtgatgattgcacatgacacagatcccatcgagccagttgttttcctctctgccttgtgttgtaaaatgggggtccattaccaaactatcacagggaaggcaagactgtgacatctaatgcacaggaagacctgcaccactgtcatcttcacataggttaactgaaaagaaaaaggagctttggctaagctaatggaagctatcaggaccaattacaatgacasatatgatgaaatctgccatcacagcggaggcaaggtcccgagctctaaatctgtggcccacactggtgctggaaaaggcaaggactaaaaaaatttgccactacaaactgggttaaatatatactg

SEQ ID NO: 822806 - DNA, 605 bp, Homo sapiens
tttctttgtttctttccttctctctttctttttttgcgacaaagtctcactttgtcacccaggctggagtacagtagtgcaatcatagctcattacagcytcaaactccgtggctcaagggatcctcatccttcagcctcctgagctgctaagactgcaggtacctgccatcacatctggctactttttaaaatttttttgtagagacaagtaattcctatgttgcctatgttgcctaagttggtctcaaactcctgggctcaagttatcctcatgcctcaatctcccaaagcactgggaatacaggcatggcccactcatttctctatatcctcatatcaaaggacaaaggttttaaagtaggtatcaaacaaaatagacaaaagcattacactatcaaaacatacacctgagtcaaagaggcataggaagattttaaaagtcaaaagccaagtaaataaaagcagaagacagtaaaatatgaaatagtaattctagaaaaatttaaaacaaaagttgttgcatagcccaaaaataatttttatatattgaaaatataaagttcataaacgtgtaagttatgaagatttagtagtgaataccat

SEQ ID NO: 822807 - DNA, 596 bp, Homo sapiens
ataaaatggggaaaatatttttaaagttggaaaatgtataraacagtttatacttgatattcaaactttttaaaaataaattattcatgagaaaggaatagttgacaatattttcattagttgtctttacatatcaatagcaaacattggcatgtatacaggttattaaacaaaacaggcagtggcttatctgccaaatttgagttttctcataattattttggctatctagatcctttgcattttcatatgaattttagaactaggttgtcagcttctaaaggaaattctgctgggattttaactgggattgcattcaatctatggatcaatataggacagttggcattttaacaatgttgagtattctcatctgtgaacacaactctctttcctgtaatttctatcttttaaaatttctctcagctatgttttgtaatttttcagtataaaagtcttgcataaaaactcctatgtatctacgtgttctatattttagtgctatcatatatgttgcaatattttggaaacttgctaatctcacattatgtctaacagttttttaatagatttaatcagattttcataaataaaat

SEQ ID NO: 822808 - DNA, 596 bp, Homo sapiens
ataaaatggggaaaatatttttaaagttggaaaatgtatagaacagtttatacttgatattcaaactttttaaaaataaattattcatgaraaaggaatagttgacaatattttcattagttgtctttacatatcaatagcaaacattggcatgtatacaggttattaaacaaaacaggcagtggcttatctgccaaatttgagttttctcataattattttggctatctagatcctttgcattttcatatgaattttagaactaggttgtcagcttctaaaggaaattctgctgggattttaactgggattgcattcaatctatggatcaatataggacagttggcattttaacaatgttgagtattctcatctgtgaacacaactctctttcctgtaatttctatcttttaaaatttctctcagctatgttttgtaatttttcagtataaaagtcttgcataaaaactcctatgtatctacgtgttctatattttagtgctatcatatatgttgcaatattttggaaacttgctaatctcacattatgtctaacagttttttaatagatttaatcagattttcataaataaaat

SEQ ID NO: 822809 - DNA, 592 bp, Homo sapiens
ttttaaagaaagaaaaagaaaccctgggatccatctgtttttgttgttgttgttgtttttgttgttgttgttgktggtggtggtggttcttaatttttaatttagtttggggaagtagcttgttttttttttttaaataaatatgttgatttcttgtcttttttttatttcttactttcccatattaggggtgatagccaaaggggttctggtaagagaaagggggacaaacagaactggtaaagaggcccccctggctccaggcctgtccatcaggaagtaaattttacagggcaccaagctttgccccctaaaatccattaggtgttctttgttcatgcaggcaggtttctgccgcatttgatgtggaggcagtgaagggcttgccctgctggcctctcatcccccttcttcccacaacccttgggcagggctggactcagtaattttgaggaaattgaagatgccatcttcccctgtgagtgacatgtctttaattttttaaaaaactctatttgaaaattggagggggaagaatgggaagggagttattgccaaatatgttaattatgggttggggtgcttgtatatg

SEQ ID NO: 822810 - DNA, 536 bp, Homo sapiens
taaagactacatagaggatatttatttatttattttggtttcaactttttattaaagtgtcacatacttaaaaatagacacatgcagagattgaaagtgagtgccttgagraaggatcacaaattgtgtcactggcacccagatcaaaaatctgaagcttaccagtcccctacaatccctcccttctaggtactatccacgccccatgggaaccacaaacctgattctaacatttctcccacctgaagttttatttgttccaattcggtacaattgcagtaaagttgacttaatttcatgcaaataattattcagatataattaagaggccaatagtattttgaggacaaatggcctaacacatcttgtattgcatttgtttatgattattttaaacaaggaagaagaaaacgaggccaggaagaaataccgtctctgattttcatagattgttagttactgggtacaattttcaaatactttttaccctaagccttgtaacaactctgtacagataagaattatcgtcatctcta

SEQ ID NO: 822811 - DNA, 587 bp, Homo sapiens
tcaccccatcaaatcaatttcaaacaacaggaacaatggwaacatttgaaacgttttccacttgacctatccatcttacagatccatcattcactagtttattctatctagaatttctagggatgaacatatcttcacagcttagctatagagggcaaaaaagcaagagcactaacatttactgagtgctttctcatgacaataactgtatatatatcatttattaatctaggctctgtgcctttaaaaaaatctctgccatttccccagagtgtaccataggacttgacatgtagtaggctctcagtaagtgtttactaaatgatttaattaattcacaccacaactctaggatgctatctgcccccattttacaaggagaaaattgaggcttacgcaacttgctccaagtcacaaggttacttagtggaaaactggggatttgaacccaaggacacatgacgccaaagtctgttttctttccattactccatgccaactccaacagcaaccaggaaaggtgggtaaaacagaccatcctacccctgtctagagatgttggtaaaacctggaatagggtcagagga

SEQ ID NO: 822812 - DNA, 533 bp, Homo sapiens
tgatggggggttacctctttggaaggggccacaaagatgaagggaggagagaggtgaagttttgcagctcaaggacaacattcatcttctcatctcaaattattcaggaatattactaacggaattatgttaacatcagctgccaacatatatctcaatctctgttgccctgaacacatgttaattgagattctttctatgacaagtaacaaaaagctaactcaaactggcttaagcagaaagctaattattgactttaatatctgggatctagggtattgcataccaaagcttcaggcatggctggatctgggtgcacttactcagtattctcaggaagctcctttttttgtcattcatgtagacttaacattcacatggcctttcaccttacggtggcctccaatagctccaggatgagctttacagctccaaatatagtgaaaggagaatttcttttctccaacaattctaatgaaaattctggcctaattctcaytggcccaagttcagtcatgtgcccattcctgagc

SEQ ID NO: 822813 - DNA, 597 bp, Homo sapiens
ttttctattgagtatctgtcagggtatgctatgagagggacaggagggtcagtggcagggccagtctctgtttagagatagtcaagctatttagttcctcagagtcagagggaaaaaggggactaggagacatttgtcaatgaggcaaggagcttgaggatctaaccaggaggaagcgtcctccagccatcaggacacaaaggggccctcagaacactgcatttccttcaactcagaatgtagctgcactaatctcgcctcagcatttctccagaagaagactgaagtttcaccgtatctttccttgattagaatatttgatccatagagaaatctgttgtcagctcagcaaagatacaacctggataaagaacttcaggagcttgggagatgacagatcagatgccacagaaaaggggtgccaccctgtaaataggtttgatttctgtaaaagtgttctctgagcctaaatgggaaagaagccttcctactgtgaggtaatactatgtgaatttttggaaaccatgcagtcastgacattggtgaagatttctaatttctctgggctcactgaaaaaaaatattttccttgtcggc

SEQ ID NO: 822814 - DNA, 590 bp, Homo sapiens
cttgtggtttgagtggcagctcagcctcagtacaacagaatgccaagtagacttctgaggttttagactttagaccgtttgtgaacggtacctctcgacccacctggggcctgggggacctccctggcctgaagggaaggacacaggcctggctggctttgccgtcgactgactgtagagcctaagggccttgagtaaacaggcagtagccagggagtggttagagcagaccttgagcgagatccagcactgtgctggcctcaggtcttacccggcgcaatcatagtgagggtggccacaggggtgcttgtgtcactccaccctcatctttaggtgactcagaacaaagacagaggctatgtatctgggagacagtaagggaagagaacaagagtctctacctggtaatccagagaattcttccagatcttagaccatcaaggtggtacctatatgaatctgcaagaaccacagcgttactgggctttgggtgcccctaaagcagatacagcttagatcacaacacccaagttctttcacrtgtctggaaagccttcccaagaaggatgggtacaaataagcccaaacag

SEQ ID NO: 822815 - DNA, 484 bp, Homo sapiens
ttttcttaatccagtctatcattgttggacgtttaggttggttccaagtctttgctattgtgaatagtgccgctataaacatacatgtacatgtgtctttatagcagcatgatttataatcctttgggtatatacccagtaatgggatggctgggtcaaatggtatttctagttctagatccctgaggaatcgccacactgacttccacaatggttgaactagtttacagtcccaccaacagtgtaaaagtgtcctgactgtcttaagtattttagacaatattattaaatctggtggtttttaatgtatgtctgcaaatgttttagcctggtttaccaacaaacacaatgcacrgaatttcacttcttcctcatgcagtctccccaagacagacttaaccctgttaaattgaattaaatttggcctaaaattttctccacacgtattttaagtttaaagatttctctgtacacagtgaactga

SEQ ID NO: 822816 - DNA, 564 bp, Homo sapiens
tttatttattcatttattcatttatttagagacggagtctcactctgtcaccaggctggagtgcagtggtgcgatctcggctcactgcaacctccgccttccgggttcaaacaattctgctacctcagcctcccgagtagctgggactacaggcccagctttctactttcttgacctcatgatccacccacctcggcctcccaaagttctgggattacaggcatgagccaccgtgcccggccaattttgtatttattaatgagctctttttgtttgctttcttgctagtagcatgtaagttttatgaggtaaagaacatgtttatctctattatattcccagggccaaggacagtgctatttctagtaagtatttattgaaataattatatatcagttgaagttttcaaatttaatttgcatttgtttttctgtcttgctaggcagagaaccaagcatttggaggtaacatacactaacatagaaatgtgttagtaratgtgagtggctagattttggctaaaccaaaattaagtcctctcaatgctacatgttcagacttctc

SEQ ID NO: 822817 - DNA, 584 bp, Homo sapiens
agagaacacagtcaactgatctcaatttctrtgttgtgttaattcatgccatcatactgcatgggcatctacaggacaaagttgcaagtatactaggatataaatgtttaaaaaaaacccaaaaaaaccccaaattatctcataaaatgttcttaagaccaacacagtatctgatattccaaccttaaaagaatcaaatataacatatttaaaaagtaagttttgcattaatttctattctgggaggttggttcctcacagacaggtgaagaaattccaggctacgctgtgaatgaaaataggtgattttagctatctcttcctagatttttattgcccacttgatgtcttgcagcctggctttctgacccgcactctactgaaagagcttctagggcctccaatgccttcgtagtttccagtcatggcctgttcttattacatttctataaactttctgaagcttttaaaaaaccattatcacattatcacctctataaaaattctccacaaccttttctctcctggatctaaatatttacaaaattctagtttatctccattcttcctctatgtttattttt

SEQ ID NO: 822818 - DNA, 584 bp, Homo sapiens
agagaacacagtcaactgatctcaatttctatgttgtgttaattcatgccatcatactgcatgggcatctacaggacaaagttgcaagtatactaggatataaatgtttaaaaaaaacccaaaaaaaccccaaattatctcataaaatgttcttaagaccaacacagtatctgatattccaaccttaaaagaatcaaatataacatatttaaaaagtaagttttgcattaatttctattctgggaggttggttcctcacagacaggtgaagaaattccaggctacgctgtgaatgaaaataggtgattttagctatctcttcctagatttttattgcccacttgatgtcttgcagcctggctttctgacccgcactctactgaaagagcttctagggcctccaatgccttcgtagtttccagtcatggcctgttcttattacatttctataaactttctgaagcttttaaaaaaccattatcacattatcacctctataaaaattctccacaaccttttctctcctggatctaaatatttacaaaattctagtttatctccwttcttcctctatgtttattttt

SEQ ID NO: 822819 - DNA, 535 bp, Homo sapiens
aatcctttctgtgtatgtctactttttcttttatgtcttttatttttagggtcctgcttaggaagcatttcttaccctaagataatatagtggaatataatttaggtattataaatctaggtttttcrtttgttcttttcataaatttctccttttttccatgaatttttcctttcatgaattttctccttgctccttggaactccttaagccagtggcttttattgccttggaggtggtggaaaatggtagctaaaccaaaaggatggcttagttttgaatttcaaattacttttaaaaggccatagaacaaaagacaaatcaagaagccatggcattttgattcacaaggctttttgacaaaatgaaaaaaattccatctttttaaaagcttatataactgaatttattcatctcttcaaagtttggattattgacttatatccctccagtgttagtgattttttaaaggaattgctgtaatgacttttgggattttcttttgttgttgttgttcccttattaaggatttcta

SEQ ID NO: 822820 - DNA, 535 bp, Homo sapiens
aatcctttctgtgtatgtctactttttcttttatgtcttttatttttagggtcctgcttaggaagcatttcttaccctaagataatatagtggaatataatttaggtattataaatctaggtttttcgtttgttcttttcataaatttctccttttttccatgaatttttcctttcatgaattttctccttgctccttggaactccttaagccagtggcttttattgccttggaggtggtggaaaatggtagctaaaccaaaaggatggcttagttttgaatttcaaattacttttaaaaggccatagaacaaaagacaaatcaagaagccatggcattttgattcacaaggctttttgacaaaatgaaaaaaattccatctttttaaaagcttatataactgaatttattcatctcttcaaagtttggattattgacttatayccctccagtgttagtgattttttaaaggaattgctgtaatgacttttgggattttcttttgttgttgttgttcccttattaaggatttcta

SEQ ID NO: 822821 - DNA, 620 bp, Homo sapiens
accgaagagaataagactctctgcctggtaatctagagagttctcctggatcttgtaaaagaccatcagggtggtacctcaatgagtctacaagaaccacagtgttactaggcttggggtttcccctaaagcagacacagcttagatcacaatatgtaagtcctttcaaatacctagaaagccttctcaagaaggatgggtatgaacaatcccagactgagaagactactaagaatccctaattcttcaatgcccagacacagaccaacatctacaagtatcaagaccatccaggaaaacatgacatcaccaaatgaactcaataaggcacaagaaaccaaccctggagaaacagagatatttgacctttcagacagagaattcaaaataactttattgaggaaactgaacaaaatgtgagaaaacacagagaagggattcagaattttatcagataaatttaactaagagatttaaatatttgttaaaagtcaagagaaattctagagctgaaaaatacaattggcatattgargaatgtatcagagtcaaagtagcagaattgatcaagtgcaagaaagaattattgagcttgaagacaggctatttgaaaatacaca

SEQ ID NO: 822822 - DNA, 531 bp, Homo sapiens
accaccagggccctaggtttcaagcacaaaactgagcagctgtttgggcagaaaaggagctacctgcaggagttttttttcataccccagtgatgcctggaatgccagtgagacagaactgtttactcccctggacaggaggctgaagccagggagccaggtggtcttgcttagcagatcccacccccatggagcccaacaagctgagatccactgggatgaaattctcaattgcagcactgcagtctgaagtcgacctgggatatttgaacttggtggggagagagccgaggcttaagtaggtggttttctcctcacattgtaaacaaagcctccaggaagttcgaactgtgtgtggaacccactgtagtgcagcaaagccgctgtagccaaactgcatctctagattcctcctctctgggcagggcatctctgaaagaaaggcagcagccccagacagagacttatagataaaactcccatctccctgtgacccagcacctgggggwaggggcagcagtgggctcacct

SEQ ID NO: 822823 - DNA, 648 bp, Homo sapiens
aattaaaaaaatactacttcatattctgactaattggtcaaagattttacataataaaacaaaattattagtgcctaattcaaaagggcgtgtttcttcctttcatttacaatgattttcattaacagaaacaaaacaaccatggatggactcaaatattccttttctgaaacaaaacaggcacatactatttactattcaggaataaaaatattttaaattgcatatatttcttctttttaaccctccagactttaacagtcatatccatctcctatgctagacaccactaggagaatagtgattatttattctttacttttataattatatccaaaagcgtgtagtaaatgcctaactaattgaataaagaacatgttttcagacacaatgcagaaataaactcactaaaaacttgcaagttcagttttaatttagttcttaagattgagaatgtaaactataattaatattccttcataacttgaatgaggtccaaattagaactttttaaataaatccttgactattcactagcttgcttaaccccattctatttatttttccatttccctaaagatagacagaatactaagatatgtgaacttgtcaagacrtccgtatgatcctttggagacatttttaata

SEQ ID NO: 822824 - DNA, 482 bp, Homo sapiens
gattctcctgtctcagcctcccgagtagctaggattacaggtacataccaccatgccccgctaatttttgtgtttttagtagagacggggttttgtcatgttggccaggctggtctcaaactcctgacctcaggtaatctgcccgccttggcctcccaaagtgctgggattacaggcatgagccacccgcgcctggctgacaatacatgtctatagtttgaagtcacccagtttgtgttgttttgttacagcagccctagcaaactaatgtataagtgaaagaagccagacttaaaaggcaacatactatgtgcttccatttgtatgacattctgggaaaggcaaaactatagaaatgttgcatagatcagtggtacaaggggtagggggtagggtgaggrgatgactacaaaggggcaagggagaattctagggatgataaactgttctatgtgttgattatgatggtagttatacaattg

SEQ ID NO: 822825 - DNA, 376 bp, Homo sapiens
tagatagtatttatcaatattatataactgtggctatgtgagttaggaaatatacactaagctaaatagagataaaggggtatgacatcctgtacttacaagtggttgtgtgtgagagaacgattgacaaagcaaatatagtaaaatgtaaacaatggaacaattggtgaatctgggtagaatatagataggaaagtcataattttggtgggttttttttttctttctttctttctttctttctttcttttttttttttttttttgagatagggtcttgctgtcacctaracaggagtgcatgatcttggctcactgcaacttctgcttcctgggctcaattgattctctcacctcagcctcccaagtagctacag

SEQ ID NO: 822826 - DNA, 624 bp, Homo sapiens
gaaaattttacaagccaattttgtactagagtttccttttattagttctaaatttagttttatttgtatcatctgctgttctcctattatggaaatgtcttaaawatggaaaacaatctgttttccagcattcaaaatttataactttacagcctccccatttttacaaaaaaaaaaaattgcttgcagcagaaattgttttacaaaactatcagcaaaatcctttaggtgcgttttctcgtttttgtgattaaattctttaaatgttctcttgcttttgtgattaaattcttctttaacctgaatataacaacataaacattatccatattctaattttaaatgttgcaaccatgagttgcatattccgtttaagctacagcaagaaataatgcctgagaatatttttagcatgaacatgtcataactgactcatgaagtctcaaattaattgcatttttttcaaatatttagaaatgctggagcatcttgtacaacactgaggtattatggaattaggaattctcatcaccagattgtaaaatgtttctaactggaaaaatacttccaataaaaatgtttctaaatcatccataacactcttctaaaaataactgcagaaat

SEQ ID NO: 822827 - DNA, 613 bp, Homo sapiens
tgaaaagtagatggatggaaaaaaatataccataacaataatcaaaagaaagcagaagtagctatattaatttcagacgagcaaacttcaaagcaaggaaagttaccagsgataaaaaagggcattacataactgataaaaggatcaattctccaagaggacataacaatcatcaatgtgttatatgtctatcaacagagtgtcaaattacatgaggcaaaagctgatagaacagcaagaagaaagagataaattcactatcataactggagactttgacactgctctatcagaaatggacagatccagcaggcagaaaaccagttaagaatatagtggaactcaacaataccatcaatcaactggatataactgacatctatagactactttatccaacaacagcagaatacacatttttctcaaactctcatggaacgttcaccaagataaatcacattctgggccacgaaacacaccgtaacaaacttcaaatagaaatcatactgtgtctattctcagatcactatggatttaaaccagaaactggtaacagaaagataactagaaaatcccaaaatatgtggagattaaacaacataattctaaataa

SEQ ID NO: 822828 - DNA, 604 bp, Homo sapiens
gcaagaaaaacgaaatagcatacaatggagttccaatatrtctgacagcagaattttcatttcatacttcacaggccaagagagaatggcatgacatatttaaagtggtgaaggaaaaaacttttactctagaatggtatattcagtgaaaatatccttcaaacatgaataggaaataaaggctttcccagacaaacaaaagcttagggattttatcaacaccagaactttctgcaggaaatgctaaagggagtattttgatcagaaagaagaggacattaataagcaacaaatcatctgaaagtacaaaactcactggtaatagcaaatacacaggaaaacacagaatattataacactgtaactgtggtgtgtagactactcctatcttaaatagaaaaatgaaataattaaccaataaaataaataaaaaataaccataacaagttttcaagacataaacaatacaataaaatataaatggaaacaacagaaagtcaaaaaaacagggggatgaagttaaggcatagagtgtttattagttttttgtttgtttgtttatgtaaacagtgttaagttgttatcagcttaaaataatgggtta

SEQ ID NO: 822829 - DNA, 642 bp, Homo sapiens
cttctttttgtcctttgaatatgtttcagtaagattataaaatggttgctgtttaaaaatcactgggaataattttttattgtggttctgttaccgtttgacatatagttaggttcatttgtttscatttattttagcttaggggcttgggatttttttttttccttttttttttgaatatataaaatacttataaatgtcataattatgtagaaatgtatactcggaagtccgcttccatttgtatctccttacccccatacccatagataacaattattattggtttatggtttattatcctgatttcatttttgtgaagataaaattctgtatatttttaacttccttctgaaataaaaattagcatactccatatgtcttatcctatacattgctttttaaacttaatatatcctggggatcattccacatcagtgcatagagatttcctcatttccgttttaatggctatttagtactgtcctatttggatgaactatgggcttttcaaccagtctgctattgatggacacttggactggtttccagtcgtttgctgttccaaataatgttgcagtgtggaatcttatgtatgtgttattttgattttatgaaagtgcatcttagaatagactccta

SEQ ID NO: 822830 - DNA, 604 bp, Homo sapiens
acatggtatggactcttctcccaacacacactcagacgcacacctcaggacaacacaaaaatgggctcaaagcacacagcaggcagggagtagtgtgtgctaagtactgcctggttggagctgagaacacttgctggggtcaggcggggaggggcgcatagcacacagtgaaacaggaggaggtgtagcatctccaggcatgtcttaaatatcctggaccagatattgttctcatggagccccatgggcaaaagcttctcgaataagagagcggggccaatttgctgagcttccgtggcagggcagcacttcagattaatttgctctgattgctaacacaacactgcagcatagggcatcatcttctcattttgtaaataagaaaatcaaggcccaaataaggccatatgaccatgtcataaggttagaaagtgccaaaccagagcctgatctgaaggctgttgatcccagctcacactaccacaggaggctgctctgatcccagagaacctctgagggaacccccaacctgcaacccacacctcagcctgcccttgccctaccacaggctgcarcacatgtccagaggaaagcccagctgtag

SEQ ID NO: 822831 - DNA, 649 bp, Homo sapiens
gtcccaatgcatggttgagaaggatgctatctggtttgaaatcatcatggatgaaatcatttatttattcattcattcaaccctcaaaaatgtgctgagtgcctgctayatgccaggcaatgcacaggaacaccttgggatagattttctctgccactaggagagactgaaggggacccctgggttctagagaagagcctgtcgccagctctcagcaggcttttgttttgtttttttggtttttggtttttttgttgctgttgagacagagtctccagctcaggctggagtgcaatggcactatctcagttcactgctatctccgcctcccaggttcaaactattctcctgcctcagcctcctgagtagctggggttacaggtacccgccaccatgcccagctaatttttgtatttttaatagagatggggtagcgccatgttggccaggctggtctctaattcctgtcctcaagtgatctgcccacctcagcccctcaaagcactggggttacaggcatgagacaccatgcctggcttctgcagacttttttaaatgttgctctaaactaaaggtgttggtcaaggcagactgacgctctgctctctctgtgagcactgtgtccataacaggtattccgatgcgggtc

SEQ ID NO: 822832 - DNA, 573 bp, Homo sapiens
gaagcagaattctgctttctaaagggtaggatgttttaatagttggagcagaccacctagcgagactctgaggttttcctcaatagactgttcaggcataggccctagtgtaattatttgcttcttaaataattaaccacccactcactatatgcctcttggtagtgggcatggagcagtaaacaatatatcagaagcatggtgggggtggatgcccttactggcaaataaaggccctgtaacttaagtgggcacttaagtgagaagccattaaggagagtgtgaggacctggattcttctctgaattgcttagctcagaatcagccacaggatttcaaaatgcacagtagattacctctagagaagagagcatactctttaatgtgaggtgtagtgtggcttgaagtaaaccactataggacttctgtattcagctctgtcatgtaaagagtgtaggagtcatcactcmtatccttataatagcaatattttaaaaactgaacaaactgaaaagcaatgacttttcttgacccattggagaactgaggttgtagggtaaattgccaccctga

SEQ ID NO: 822833 - DNA, 597 bp, Homo sapiens
gtgcaggggaagccagtccctggtgcatagctattctctatgaggggacygacacctgctagagttcataaccctggctttatgaccttggacaatcctttaacatcagtaagcctcaatatcatactctggaaaataagagtgattaggaaaatcaaagaatatattataaaatacacagtacataattagttacattccttttctctagttaggtagggatcattactatttaaataaatcacatgtaaagttttttaaaagcccacaagcctctccctagttgttttataaatagtcatgatgctttacccttaaaatccatctttgtgtatatttgcagttcatagacaagtatacacacatcctccttgaccttattttctatttactgctccttcctcccacatgcaccagccatactggtctattctcagtccttagaacatgctagccttattctggtgtcagggtcttcatacttgctacttactgcatagaattgtattctacacctccctttttctcatgatgcaggatttagctcaaaggccacttctactctgcagccttctgcctgacctggctgaaggtgct

SEQ ID NO: 822834 - DNA, 593 bp, Homo sapiens
gagagtcagcttgtcctttgaagctctgaagccaggtactgacttctctgctagctatgaaagtcgtagatggcatctttttccaatagaaggctgtttcatctacattgaaactctgttgtttagtgtaactamcttcatcaattatcttagctatattttctggagaacttgctgcagcttctacatcagcatttgctgcttcaccttgcagttttgttagggttgtggcttcttcccttaaaccttatgaatcaatctctgctagcttccaacttttcttctgcagcttcctcacctctattacccttcacagagttgaagagagtctggggccttgctttggcttaagggaatgttgtggatggtttgaacttctatccagattactaaattttcctccatatcagcagtaaggctgttcacttttttctcatttgtgtgttcactggagtagcacttttgatttccttcaagaactttccctttgcattcacaagttagctaattggtgtaggaggcctacctttctacctatctcggctttcaacatgctttccttataaagcttaatcatttctagcttttgatta

SEQ ID NO: 822835 - DNA, 602 bp, Homo sapiens
gaggggcgctgggcagttgcggcggcggaggtagtgcagagcaggaagcagcgcggaagcacagcgggaggcggagggggacgcccagcctcgtcaaggtcttcggccaccccgcccgggaggctcgaaactggctttggggtacctgaatgcctcgactcccagggagacatcgggagctcggagccactctccctgtggcgatggcacctgcctcaaggccgtctcgcttgctgatgcctggccgggaaggaggatggacgccgctggcatgtgccctggtaagtgtgtctgtttgtcatcagtgtacattctgcatgtggcagcagggcgagggggaggcgcacgtgtctaaagtgcacggagccttcctctacccctatgtatatacccttcagtcaatgttccaagaagcgggtcagggcggagggtatccatctggactctggaagggcgtgggtttgacatcggtaggtgtgacaggaaagtccagcctgtcagrgttgggctctacagtggccgaaatcaagaaaggatggacgtgtcggcccagggctggcctgtttccggatatgtcacgggggtgcctcgttcctcgaggg

SEQ ID NO: 822836 - DNA, 513 bp, Homo sapiens
aaaagagaaacaatagattactgaagaatgaaattggctatcaaaaacagtmcttttgaatgaggaagaaataaacacttggcaaatgaccaattactcataaatttgcattcaaatgaccaaacctagaagtaataatatcttagtagcaatgaacacacttagtgctcagatcgtggtttctaaatatcattcaccaatgaaaggaatctgggtgcctaagaaaactggttgattccaatgctgcagcagggaaaataaaagacgagtctgaccaccttgtgggaccagaagcagcattaaaaaaacaaaacaaaacagggttggtgcatgttaaatggatatacgagccaatctaacagagctctcaatggcccaaactgaaacaactggagcaagaaaataagtaacaatagtattatattataatccaaagaattaaataaacagccatgagtccatattgatagaaaattaatagtaactagataagggaaattcttccttacagag

SEQ ID NO: 822837 - DNA, 513 bp, Homo sapiens
aaaagagaaacaatagattactgaagaatgaaattggctatcaaaaacagtacttttgaatgaggaagaaataaacacttggcaaatgaccaattactcataaatttgcattyaaatgaccaaacctagaagtaataatatcttagtagcaatgaacacacttagtgctcagatcgtggtttctaaatatcattcaccaatgaaaggaatctgggtgcctaagaaaactggttgattccaatgctgcagcagggaaaataaaagacgagtctgaccaccttgtgggaccagaagcagcattaaaaaaacaaaacaaaacagggttggtgcatgttaaatggatatacgagccaatctaacagagctctcaatggcccaaactgaaacaactggagcaagaaaataagtaacaatagtattatattataatccaaagaattaaataaacagccatgagtccatattgatagaaaattaatagtaactagataagggaaattcttccttacagag

SEQ ID NO: 822838 - DNA, 606 bp, Homo sapiens
ccctggaaactttgtggccagtgcctaagtacaaaatgaatcattacctgagagagagatcattgttttaaaaacatgtagattgtcactgtaggatctgtagtctttcccattaaaackaaacaaaaaacttccctgaaatctttcatacaaaacacctggaaccaagcaaaaggtcatcagggagcatttcttgaactctctggcatttcaaggcagtgatgtcattcttattgcttgataaacataacattcttcaggagtctttttcctcccatttaatttaaaagggaactataacatagctgctgtactgttgggattaagtaataggggcgtgaggcccttgtatctttaggattctttcccatctcagctgtaggcagacacttttgggacatagccatcagtaagcatcagtaagtcatttcgcattgctataaagaaataatatattcatatattgccaagtaaagcttgagaagtcaatgcactaccattctcttaagaattatcgtaagaaatttcaaaggcgcattattaagagtggggcaatctcccatgcagtcagcatccacagaaactcattggttagcagtttggagt

SEQ ID NO: 822839 - DNA, 635 bp, Homo sapiens
atatatagtcagaggagaaaaaaataataaaaaggaatgaagagagcttatgggattagtggagcaacaacaaaagagcaaatatttgaattataggagggttaagaaaaagacaaaggaacacaaagtttaaaaataaataatagaaaagttttcaaatctgggaaaagacataaatatccaggtacaggaaggtcaaaggcttccaataagattcaattgaaacaagacagatgatatattataattgaactgttgggtcctgaaagcagcaagagaaaagaagcaaataacataaaatggagttccaaaaaggctgcagtttctcagcagaaaccttataggtgaagagagagtgggatgatatattcaaagtactgaaggaaaaaaaaattgccaaaaaaacccctgaaaccagcaaagctgtccttctgaaataaagaagagataaagacttttccaggcaaacaaaagctgaaggagttcatcaccaccaggcgtgtcttacaagaactgctaaagggagttctstgagctaaaagaacactaattaatacaagaaaacatatgaaagcataaaacttactggtaaaaataagtgcatagtcaaattcagaatactctaatactataat

SEQ ID NO: 822840 - DNA, 632 bp, Homo sapiens
atttgccagcctttcttgatcctccccttttctccatttccagcctctggtaacagtcattctagtctctaagtccatgagactgactttttttttttagctcccatatatgagtgagaacacacaatatttgcctttctatatctggcttagttcacctaacataatatcctctagttcatccacgttgctgcaaatgataacattccattcttttttatgactgaatatatatatatatatacacacacacacacatatatatataatggaatattattatattattatattccattatatatacatatatatatatataccacattttctttatcatctattgatagatccttaagttgattcatgtcttggctattgtgaatagtgctgcaatagagttctgatatctctttcatatactgacttcctttcttttggataaatacccagcagtgggattgctgtatcagatggtagatatatttttagtttttgagaaactgccatattgttttccatattggctgtactaatttacattactagcaccagtgtaccaacattctccttttkccatattcttgctggcatttgttattttttgtgttttttataatagccattttaac

SEQ ID NO: 822841 - DNA, 631 bp, Homo sapiens
attcactctttcactcaacaaagatatgtttataagtactagatcccaggcattgtctcaggaactgggctgggtctgtgagtaagtgaaagttccagttccacaagggagacatatatctttaaaaaattacaaaaatgattgcaattgtaatgagaattacaagaaaaaaattacaggctgagctacagtaatagggtcccaaattgaccaggggaggaagggaaggcttcccaaggaagtaattaactgttgcttaaaggccaaaagaaagttggataaataagagttgatttaaaaagaatcttcagttttccaccaggaaaataaatgatcctaatacaaaagaaaggaggggtcggggcattgattgactaagaggcagtacaagcatgtaagcagtagaaatagtgtgtgtcaggtgcccaggtgaagaattttgatagttagaggaataaggaaatgtagagaagccaagcatagagaataatgcaggaggaagcakgggagctcaagatctagccctttcctactcctcttcactgttattaaggctaagaattttttgaccaccttcatcagagcaatggataatcattaaagagtttaagcaaggaagtgacataatcag

SEQ ID NO: 822842 - DNA, 458 bp, Homo sapiens
catttattgtattatcttcattatctctgaatatttagccctcgtgtgaaacagttgataccaagaaactcatctactttctctgttttgccttctgttgcatagttaatactttccctgtcagttttgagaattgtatattcaattaagagattagaagggcgtcagggaaacagaactatgaatcggaagatgtgattatctctatacgctgccaaccagccatgtgaccttgatggtaagttccatgagggtaggttctcaattttattcacaatctactcaatatttgcccatcacatagtagtaaattggcaattgttcaattgtgtattggccttaaaaagaaaactaaaagtcaatagcacctcacatttttaacctaaaagtggcatagttcttaatrccgtactcaaatcacgtagatataatggtcattgaagtaatgaataagtaaa

SEQ ID NO: 822843 - DNA, 536 bp, Homo sapiens
ctcagcttctgtgagacttcagctttggccttatcatccctcatttcccattaaataatttcctgtatttcatagcaatcccaggctgtctgccttttgaccttggcttcctgakgctgctgaagttgtgtgaagattctgttcattttgggtctctagtgaattaggacgtgattctattcagttcatgcaacaaatgcccattgagtgtttctgactttttgggcactgttgcaggcacagcaggacttatattcataacatttaataagtggtaaggtctgggtaccaaccaccctggtactagaaggttgtcacagagggtttccagtgtgctagccattattacctttagttgctagatcataaggataactggaatattccagaaggttaggtagcaggggcactgaggagaagtcccagggttactgaagcaatgatttaccaatcgatacaaaattctttcaatatcatatcatcccatatggccctatcaggccaactagttgaaaacttttggataacttgctgct

SEQ ID NO: 822844 - DNA, 621 bp, Homo sapiens
agggaagagagcatgcctctaatacagaaatcaggtatttagggggaagaacaatctaataaaacactttggacagcccgtgatagtgttcagacacacagttctagaagagaaataagaaagcatttctttggccaaatgtgatctgaaccatccgggtttttgcctcacatactgtaagagacatttattctcttcactattcaattattttgccagcgagatgtgggaattaaagtagcagcaatcatgataacatgtgtgaagcatcaaaatactttgcactgagcagacagagatgccaattgtattttcagcttgggtttacatatggaaaatattgttattatttccttcaatgtcatcagtttttaatggctcctattccatccaatttttaagctgtaaatatagtctagtatttgaaaagaaaatctaagtagttctaatgccagaggctggaactagtttgccagcaaaattcatctttagtttacatgtatttggatgcttgattatatgtccccaaatccagtcataatttagcccagaattttaractaacagaacgcaagtgtagatacatttgtttgtctcatgcagtttaaaaaaaaaaatctg

SEQ ID NO: 822845 - DNA, 584 bp, Homo sapiens
tttgccgcaactctattcacaaaacggaaaatatggaaccaacattaaggcctatcaaaaggagatttatgaaatcaatcctggtttatcccttgcatatagttctacagttattaaaatggtgatgttcaggggacactaactcaacccgaggggtggttgcatcggctttttgcaagaaacaggccaagctaatggctaagctgtttggggagcacctgctcattgtagaggagacacctgcctttcagtttccatcacatccttgtaagactacagactcaatatcaccagattatcctcttcgcaggagaagctgcaaaatgtcctggcttttaaaacgttgtgcaggtcttggagggtagaaagaaagtatctgtgggctgcattttagctaacattcaggagttttgcaaactttaatgtggaactaaaattattgtcaggtaataatgctcagtacttataatcagtcttaaaacrtaagattaaaacactatatttctatttaggtaaaattatgtacatatgtttgcatgtgtgtttatgtgatgttgacacaaatgaatgcacaaatgatatat

SEQ ID NO: 822846 - DNA, 595 bp, Homo sapiens
agagatcattttccctaccagtagccttgatatatatgattgagaagtaaattgtaagataatacaaaagcagtctgaatacaggaaattaacttgactagtaatgaccaagakagctgtgtgaaaatatattttaaaagttcccacaaactcaccaaaagtgggagctggaaatgcaaagacagttttgacaagacaaagttttttccaagctaaacaaaaaagattacagacttttagaaactacatttttaaagaaaaaaaaaaaagcagataaggcaaatgaagcctagaaaaattaagagatttatttagggtaacttagccagttaatggcaggattgagactaaaacacactgtaaaatccaagtatggtcttttatatctatgatataacctgtatatatgtaagaaatatagcacttgtaatttgttaatctccaaatgttcatgaagttgaagtaaatgcattcattgtttcaattattcttaaagagaaaaatgcccaaagacatcttaattgcatgggtatgtatacacgaaatacacatggagatgtcttcaaatataatatgtgcatgtcttcattccttc

SEQ ID NO: 822847 - DNA, 554 bp, Homo sapiens
gtcttcattccttccctctgctctttttaaaaatgcccctttaaaaatttcccactcaccatctgttaggtaaatttcctaaaacacagtaaatgtggaggcagagattgttataragactattccaaatggcagtgacacctatacttattaaattataaaaagtgtaggttaaagttgcctttctaataaatttcaccaccgtagtaataccacaccaccctatgtgctcagctctatcggattacgatggagagagagaaaagaaaaaaaaatctaggtatttctgtataaaatattatcccaaaagtttgatattacattcaagtttcaattaacagaaggaaaacattgacacatttactaaagcatttcatttatgatacaaggtccacagacttagatttgcattatgctccgacaagggtagagttgaccgctttttccatctacttgctttgggaggaaaaaaaaaaaaaaatccacctgaatcagatgccattcaattccaagtctatagtgtagagcatgtcactacacaggaaatattattc

SEQ ID NO: 822848 - DNA, 556 bp, Homo sapiens
taaagagaggagagaaagaggacttgctaagcttatrtcttcaatctggtacaccagcagtcaaatgaaaattcaaagtcatagacactatttacatctgaggagtcattcttgcccaggtccaaatttccaggaaggaatttcattcctgactttgctgggggcagcagcatttgttacatctgttaccatctcatttctccctccttcccttcagtgctcagcaccccccatttaagtcgctaagtattccttcttctagcctacagtcttatctcactataaacgtatatctcaagtgatcggtttggcatggtccctaaagcaacctgcagggaacagaggaaaaagaaaactcaaatcactggaaagctagaaattcaatcatttggaggagtttcttttatgtaggacaatcttaattgaactgaacctagaaatccccgacaagattcactatatcctttttctctccctctaagtgtgcctttgaacaatgggtgtgtataccattattctctctactcattttgcaggcttatagacactggaaacc

SEQ ID NO: 822849 - DNA, 638 bp, Homo sapiens
ttatatctttcaaaatagctagaagaaaggacttgacatgtacacaacacactggtaggataaatacttcagtgatgtataccctgaatatcctgacttgatcattacacgttctatgcatagaacaaatatgcatatattatgtttgtaagtatttgtggggtacattctatgcatatttgttttatatatacataatataccaattttttttgttgaagaaaacaatacgagcttaactttttcaatatattatcgccatccacaaggagggcacttaaatatttccttaaaatcctaccattaactaataattacaagagctttgattatgaattgctttctatatgtgcctgggaccatgtttagcacctcacatgaattatctcatttaattctcataacttccctatctggcttatgatttttttatgtcactggagggagcagtctactaatcccaaagaagtccaacaggtactagcctacctggctgaaagggagccaagcaggtctacttcacaaatgytttgaagctaatcatggcttccttttgtatggactccacagtccctgagattattcagcaatcacctggtgagatgtgatgtgtgattttgatacaaatgtggggattg

SEQ ID NO: 822850 - DNA, 620 bp, Homo sapiens
ccgatctgtggaaaattgtcttccatgaaaccagtctctgctgccctaaaggttggggaccgctgccttacagcacgttttctacttatcaggggctaaaagttggttggatcaatatacctgctacattatagcaaaaagaaggagtgctgtgatcctggattggcaaggcaatttaaataaccacagcctagggcatctcttggtaacattctttcctagttttttgtttgtgtttgtttgagaggaacgggactttactggaaggcttggactccatatacacttacgagtgggataatcacatgggaaaacctcatgcaagaaagtgtcagcacattcaactctgcctcgatttcctctttctttctctctcttctcattttcctagcccagagttttcacttcactggggataggatcttcaggaaaggatatcagggagggatggtgagagagaggatgtgagtgcacagaagactatgtgtgtgttctagwgtaaataaagcagagaagagagtttatgaagctcagagcaattgcatattttaatcttgcagaagaaaatactaagccccatcagtctcagacggatctcactacgtgtctgagtcctagct

SEQ ID NO: 822851 - DNA, 662 bp, Homo sapiens
tcagtcaagctcctaggcattaatgataaatcagatatttgctcacatacactggcatggttggctaatcagtgaaatgatgtgttttattaggatagcccagagacctgagacatcaggtcagaacayattcttgaaaagtctccatcatgaacatttcatattgcccaaaggagtctgtccattctttaaaatctttgtttcaacactgatattgaacttgtgcatttcctcattagcaaaacacatcattccttactgctcaaagcctgtagagagaagtctgtgttctcttggattctgaaagacagtgcaggtacaaacggacccacaggctcagggaccagacagatcaggatgaaaattccagctctgccactggtggctggaaaagtgacacagtctctctgagccttatttcacagctccccatttgcaaaatggagatacaccaatgactttgcagaggctttgtttttttgtttgtttctttcccccagagaagattgtaaagctttattgaaagaatttaagtcacattttcaatataacaccaacatgtgtggcttcagcttgtcttctttttaacttatggctgcccagcacctgcttctgtaatttgagcattccctagattaggtggagtctcccctttcacatta

SEQ ID NO: 822852 - DNA, 589 bp, Homo sapiens
aaacatttcagctgggcagaatggaaggggaaatttattctaaaattactgataggcctggatttatctgtgacaattatattttgaaaggctctcaatatctctatattaagaggaattaaggtttctaaaaccattttgaaagcataattctttatgttttttgcattaattgtgcattcttatttccatttgttttcacaactaagatataggatctaaaataatttctgttccctgaactgttatatccctaagtaaattggttgtcccagaggttactactcaagatttcactttctgtggtaaaaaggatttgatgaatttgtttttaaactttcagagaagcatttgttcctcaaatggctgaaaggttctgataaatatgaggggagagggaataagccttccaaagatcccttggccagcgtgtgctaaaggcctatgcttgactgtttctaaagctatcttcaaattaattttagtttacagattatgattaggaraataataagttattttacaaaagtctttttgtaaagtggagctttagggagaactcaagaatgaaagttagaaagacctggat

SEQ ID NO: 822853 - DNA, 604 bp, Homo sapiens
tctctatccatgcaccaaactagagtttcaattataaaggctttataacatattttaataactgacagagcaagcccctctgtgccagatttgttgatttttaaagatttttctgaataatttatttcttccaataaaatttattaaccattatcttcagaaagaaaatctagcaacttggtggtccatttattgggtttctgttgtatttaaaaataaactcacctagaacagaagccttgctgaagttgaatcttcctatctgtatcttcgtttgctcaagtctacttttgcttctctcaatagtgtttaaagtttttctcacataggttttgaatgtttcttgcaaagttagccaagatgttttattcatttttgctattataagtatggtgttatttttcatgaatcattttactggtatttcatctatatataaaagctattttttgctacgttgtggctgttttactgttttccaactttctattatgaaaaatttcaaacattgagcaatgttaaaagaactttagagtgaacccactaactaaattctaacattaccattttactatatttattttwtaaggctattcatttttaa

SEQ ID NO: 822854 - DNA, 566 bp, Homo sapiens
atattcagtcttttgcaaatagtaaaattttgtacaagagccgttctccaagataagttaattcctatttctaaacacacctaatttttacaaatgtaatctataaatctattatttrtaactatccgaagtaggtatagtaaatatactcatgtcaccgctccctacaaccatagcagacatcaataatcaattttgaatcttcccaacacaaagagatgatacatgtttgagtggatgaatatgctaattactgattgatcactacatataatgtgtatcaaaatatcactatgtaccccaaaatatgtacaagtattatgtgtcaattataaaaataaataaaataataatcaatcataatactcagtcttaacaaacctggtctccagcctctttctagcttggtgctttaaaaagctaatattcttctgactttttaaaacatacaacttatatactatccttgatatgacatattttcaagaaattattcctgaaaatttactgtatataaagtggtattctcagatagaaacatttaaattaattaatagtaacaaaat

SEQ ID NO: 822855 - DNA, 681 bp, Homo sapiens
gaggaacttgttgggaattggatcaaaggtgacccttgctatgctttagcaaagagactgggagcattttgcccctgtcctagagatctgtgaaattttgcacttgagagagatgacttagagtatccggaagaagaaatttataagcagcaaagcattcaagacgtgacttgggtgcgcttcaaagcatttggttctatgcattcaagagatggtttggaattggaacttatgtttaaaagggaagtagagcataaaagtttgaaaaatttgcagcctgattacaaggaaagagaaacccattttctgaggagaaattcaaggcagctgcagaaatttgcataagtaactagaagccaaatgtaaatcaccaagacaatgtggaaaatgtttccagggcgtgtcagaggtcttcacagcaacttctcccatcactggcccagaggcctaagaggaaaaatggttttctgggctaggccccgggcctcgctgctttgcacagtctcaggacttggtgccctgcatcccagctgtgactaaaagggtccaatgtacaactcacactgctgcttcagagggtgcaagccccaagccttggcagcttccacatgrtgttgggcctgcgggtgcatggtagtcaagaactgaggtttgggatcctccatctagatttcagaggat

SEQ ID NO: 822856 - DNA, 636 bp, Homo sapiens
gcacacagatcaggaaatagaacctttccagaccctcaaaattgccttcttctttctctcaatcactaccctccttgccccaagtcatctccttggctgamttctacctccatatattcaatttgctagacctcattcttctcgtgttcacattcctgaggcaaagctctctttttgcaaagtaataggattcttatcacaaagacttcctggttaaaaaacaagctgaataagccactactgcattgtgcaaggttgctttctcttttgcctacagagggctttcaggtagcagaacaaaatcactgtaatgagacagaaatggtgcctgtgagcaaaggtatcatgtctccttcgctagtggggcaagcactagactcttggaattgttccgatcaaggatgagttaaaccctacattttaattcttcctttcatttattcattcattaaatacttaacgtagtacagagtacacagagtatcaggcattggcctgtgcactcagtgtgtcgacagttaggttagagataaaaagaggaaaataaatctctgaaataattttgatcaatgctactgaaaggttttgacaagtttcagaagtggaagcaaatatatattttctacttgctctgta

SEQ ID NO: 822857 - DNA, 616 bp, Homo sapiens
agtggtttcatggaccagggacaggatccctgtgctgtgtgaagcataggaaattggtgcactgcggtcccagcttttccagccatgactaaaaaggaccaaggtacagttcaggccatggcttcagagggtacaagccccaagccttgggagcttccatggagtattgagcctgtgcatgcacagaagtcaataactgaggtttgggaacctctgcctggatttcagaggatgtatggaaactcctggatgtccagacagaagtttgctgcagggcagggctctcatggagaacatctgctagagcagtgcggaagggaaatgtggggtgagagcccccaaacagagtccctacggaggcaccacctagtggggctgtgagaaaagggccaccatccttcagaccccagaatggtagatccactgacaacttgtatcgtgtgtgtggaaaagccacagaccctcaatgccagcccatgaaagcagccagaaggaaggctgtrccctgcaaagccacaggggtggagctgcctaaggccatgggaacccaccttttgcatcagcatgacctggatgtgagacatggagtaaaaggagctcattttggagcttaaga

SEQ ID NO: 822858 - DNA, 592 bp, Homo sapiens
tgagttagtcagcttaatgttgtaataacagaacatccgaggctgggtaattcataaagaaaagagataatttctgtcatgattctggggagtgggaagtctaagaagtaacacaccagcatctgcttgcctgttggcgggggcctcatgctgcattacaatgtcatggagaagcggaagatgaagcaggaatgtgtaaagagagcaaatacgagggccagccttaatttgctctgcagaaatgaattcagtcctgtagaagtgaggactcactcactcctgtgagactgttaatcccttcatgagagtagatccctcatgactcaaacgtcttttaaagcaccacctcccaacactgtcacattagggagcaaactttaacttgagttttgatggagacaaaccatatccaaaccgttgcattctgccccttgccctccactgtgaggaaattcacattctcctcayagtgcaaaatacagttattccatctgaatagtccccaaagtcttaacatggtctagcatcaacccaaagggtccaaagtccaggtgtgggcctgtgaaatgaaaaataagttatctaattccaa

SEQ ID NO: 822859 - DNA, 655 bp, Homo sapiens
ctgaaagaagagatagacattgtatagagggtttgaatgagagttatagttacagttgggagtcagaaaatgaaatctaggagaaaactgctggtatcgttctggaaattaggaagctgagttgtagtaacggttttcaagtaccagcaaccttatgaggcagaaaattatagttagctcattttcacgtcaacagaggacaggacaagaagtttccgatgcagctttaaagaagccgagtcaattgcaaagaggaattttgtgattgggaagtatttttttttaccttggatggtttcgtagtagaacagtcaggccagatctgatgaacaggtgctgggatgagaatgggagagaatctccctccccaggtatcagaaggaagtgggagtcctctgtatgccacacgtgcctcctttgtcttgttgctgtgcccttggtttcttgttttttaatcttttatattcatttttctccctgacttgactgttggagtccaggcaatagacaacaattctgaaaaccctcaccttatcacttcctctgaggactttagagctkaatgaatgattctgattctcaaaaagaagagccaaattttttcatgactgctgtgaaagattatacaatatttctttagaggcctttacaagta

SEQ ID NO: 822860 - DNA, 604 bp, Homo sapiens
catacctcatcttaatgtgttttgctttattgcacttcacacatactgcattttttataaactgaaaagttgtgaacaaccctgcatggagcaagtcaactggtgccatttttccaatagcatacactcacttcatgtctctgtgtcatattttggtaattctcacaacattttaaacttttcactattattacatctgttatggtgatctatcatcagtgatctttgatgttactactgtcattgttttgggtgccacaatctgtacccatataagatggcaaatttaattgttaaatgttgtgtgtgttctcagtgctctaccaaccagctattccctcatctccctctttttccttgggcctttctattccctgagatacaacaatattgaaatcaacccaattaattaccctacaatggcctctcagtgaaaggaagaggcacacatctctcacttcaaatcaaaagctagaaattattaagcttagtgaagaaggcatgtcaaaagcctagayaggccaaaagctaggccacttttgccaaacagccaagttgtgaatgcaaaggaaaaattcctgaaggaaattaaaagtgcttatct

SEQ ID NO: 822861 - DNA, 620 bp, Homo sapiens
tgtaaatgaatttgtgacagagttcctttgcatttctggcttatttgcctgcagcatgcaaggcagggagaaggggaaagaaaaggggttaaacactgggcccctctcagkcctgcacaatgttgctgctatagccatttccatttggcaatttgttaagaaaaatgaaaagtctcctcaaaattgccagctactaaaacagtaccagctgcaatttttgaattatcaatttttggttggaaggatagagggagattgctttttcatattctccaaacaggtttttctgtgaataaaggatgtgtgttaaaatagattactcggccgggaacagtggctcaagcctgtaatcccagcactttgggaggccgaggcgggtagatcatgaagtcaggagatcgagaccatcctggctaacacagtgaaaccccgtctctactaaaaatacaaaaaaaaaaaattagctgggcgtagtggccagcgcctgtagtctcagctacttgggaagctgaggcaggagaatggcgtgaacccaggaggtggagcctgcagtgagccaagattgcaacactgcactctagcctgggtgacagagcgagactccgcctcagaaaaaaaaa

SEQ ID NO: 822862 - DNA, 623 bp, Homo sapiens
ttactggtatcgctttttcttggaaaacttagaaggtaatctgatgggcttatgtgcctcagaagaacttaactcrtcgtctagatttgggttttattttgtatgttgctctcatttgagggtcaatgacttactaccagcatttgatgctacgaattatccatgaatgtaggtatggtactctaagagaatctaatatctatatctatacatctatatcaataaatgtgactttacatcataaaagaagttctgtattttttgctgtcattgagatttcaaagtgtatttcaaataattaaatttgccataaaaatacttaaatgtaaaaatatgctccattttctagaccaacgtattgcataacaggaggagtgtctcttttctttgatagtcattcgataaaaccaatatttctctaattactcaccttaattttggaagtgatagaggtgggaggtcttgagggagtctaatactttgaggaagaaacaacaacaaagtggaatagcctgccattatattttgggaggatataactctaccttggcaacaaagatagccaataaagacatagcaataaaagtctgcgcaggcacccaaattataaagcccatttcctc

SEQ ID NO: 822863 - DNA, 623 bp, Homo sapiens
ttactggtatcgctttttcttggaaaacttagaaggtaatctgatgggcttatgtgcctcagaagaacttaactcgtcrtctagatttgggttttattttgtatgttgctctcatttgagggtcaatgacttactaccagcatttgatgctacgaattatccatgaatgtaggtatggtactctaagagaatctaatatctatatctatacatctatatcaataaatgtgactttacatcataaaagaagttctgtattttttgctgtcattgagatttcaaagtgtatttcaaataattaaatttgccataaaaatacttaaatgtaaaaatatgctccattttctagaccaacgtattgcataacaggaggagtgtctcttttctttgatagtcattcgataaaaccaatatttctctaattactcaccttaattttggaagtgatagaggtgggaggtcttgagggagtctaatactttgaggaagaaacaacaacaaagtggaatagcctgccattatattttgggaggatataactctaccttggcaacaaagatagccaataaagacatagcaataaaagtctgcgcaggcacccaaattataaagcccatttcctc

SEQ ID NO: 822864 - DNA, 597 bp, Homo sapiens
caagaccaaggctccagcagatcttgtgtctggtgaggacctgcttcctagcttatgtagacagccccctttttgaggtgtcctcacatagccaggagagagatcatctctctagtatcttttgcttcttatatgggcactaattccatcatgcaggctccaacctcatgacctcatgacctaataatctgccaaagggcctacctaccttgccggcttgcaagttgtgcaaaatctcagactcctcacggacatactttgggcaatataatttaaaaaatgaagtattatgtaatagtgattatttagttctttgattctaacatccttctatgtgattccatcattcctctattttcatattattttagttctttctagcacagttagaaacaattgatgaataatgataaaataatttccagaatgataaaatagcaaaatacttcaagaatatgagatcaccaagatctattatgtatctgcaagacagaatgggacttactatrttttaaaaataaggaaaatctctatttgtgtcttcatagaagatctttttaagagggataaaagttttttatttgattttaagaaaat

SEQ ID NO: 822865 - DNA, 504 bp, Homo sapiens
agtaagggcttgattctgatactagagaacagcgatgtgagttgtgtggtctttgacaaactcagtcttctgagactggtttctttatctgtaaaatatacataagaatttgtatcttgcagagttgtagtgaagattaacagtgtgttaaacatctagcaggtgaacacttgataaattgcattttcttttcctttttggagaaatagagggcttttatgtatttatttatatttcacaggtatgaaaatgacaaaaagttcctctgagaaggagttctcaaattcaaaagttaaaagtaatccttaacactccagtaatatatttttttttttctttttaaggtaggaataccctctgttgggaaactgataaacaaaattttagaaatcggtcacaaataaaggatctaagtaaaattatttcacaaagtaaagccttttaaatgtacattaatawaaggtgtagtctctataggcctagggtttgcactgaagtttttct

SEQ ID NO: 822866 - DNA, 570 bp, Homo sapiens
atgacttgcccagggctggacaatttgtggcagattggacttrgaactcaatgctattccctttctacctaatcaaaaatgtaatgtttaaatatggaattatagagctgaaacaattcttttttatttttgagacggagtctcactctgtcacccaggctggagtgcaatggcacgatctcagtgcactgcaacctccgccgccctggttcaagcaattctcctgccccagcctcctgagtatctgggattacaggcatgtgccatcacgcccagctaattttgtgtttttagtagagacgggctttcaccatgctggtcaggctggtcttgaactcctgacctcaggttgtcagcccacctcagcctcccaaagtgctgagattacaggcgtgagccactgcgcccagccaacaattctttcaaaataaatatgaccgcatttaaacaagaataaagtcaggcctatctaaataagatgaggtccgtactcacacttaaaagtcataggctatggtactatcaagaaatacgtatataggaacccagagataatattgttcaggtgcc

SEQ ID NO: 822867 - DNA, 495 bp, Homo sapiens
cacatatttgaccttcacattttattaagtctaattttttaaagttttgtctgttcatttacatgtggaaggatgatagaaatataggaagagacatgacagaaagcttgcctaggactcagatcaaggattcagatttcccaattccggcttcagggccctgttctgtaacatcacatcagggaaaggaaaatgagagaaaagaagaaagaataagaactaatgttaattcatgtcagacacagtgccaaagatctttatttgcattattgttattattttttaaaaaataaatagactagcacgtagcctagcttacacacttctcattgtatagatgaggaaactgggaatcagttaaactttataaccacaccaagatcattgagctagtaagtggcaggcttgggatttaagaaagcttgtaatgatgttacatttgatggtttaaactgtsctgtgggaagggaatccaagaagataatcccatgtttc

SEQ ID NO: 822868 - DNA, 540 bp, Homo sapiens
ctatcccttggtcaatgcgctacttattaaactttattttcccactgaagaaagaaaatcctaccttcagggaataaaatagagattcattttctgacctcctagtataatgcyaaaggaaaagcatacaatctctttggggagggagctgttaggaaggccagaggcagctgtcttggaaacatacagaaaggtgctattgggacagagcataatttaaagtaggtgagattggaaaatagggatttttccttctcttttacatttttttttcctttcttgaacatatacagttcttcagttaagtgttagcctgagattaaatataacatttatgaagctcctttcaaaactcatccctgcatgtgaatggaccatttcctcctttataccactgcactgacttctaattacatgcatctttcatgaaaatgtttgtcagactgtctgatgttaaattgcaagataattgataacaagacccatgtcttaatcatctttgttggtgctaaatacgtgtttattgaatgaatgaacaaa

SEQ ID NO: 822869 - DNA, 764 bp, Homo sapiens
agatttactttttaaaaagcgttgtgctcaaggctatggcagatgtaagtttataatatgaccacttacattaatttgctaggtttgccctgacaaattgtgaaaaactgtggctgaaaacattggaaaatcagtttctcccagttcgggagaatagaaggccaaaatcaaggtgctgacagtgctatgctacctctgaaggctctaggggagaattcttccttgccttttcctagcttctggtggcggccatcaattctgggctttccttggcttttagcagcgtcactccagtccctgtttctgtggttgcaaggccttcttccctgtgcatatgtgtgtgtgagtgcatgtgtgcatgtgcacctgtgtgtgctcctgtctttacgtgacctgatacgaacactagtcttttatttggaacccaccctaatccaatatgacctcatttaaactaattgtatctacaacgattctatttgcaagtaatatcacattctgaggttccagggggacattgttcaacccagcacaacccttaaatatcctattgtcttgttggaggttattttatgggattcatttttggtgttccatggcttttcagaggaggctcagtgtccactgatagtctctgggaagactacgtaggcayaggtccgaccattgctatattttcttatatctatgaaatcctaagttaacattttaaactacagtctactgtgtgtcaagtgttgtcctaggctcttatttacttaatt

SEQ ID NO: 822870 - DNA, 600 bp, Homo sapiens
ccactgcgttccctccagtgtacttagtagagataggatcatgtgtatcgagagctcaggctttagaatcccacaggtctggaatgaaatctcagctctgacttttactacccatgtgactttggacaatttatgtatccactgtcagcccattagataacctttaaaatgggaataaagtagtgcttgctttgcagaattgctgtatggattaaatgagataattcaggtaaagcacatagttgagtgcaaaattaatttatcacatattattagaaatgtggttgaagattgttttgttatttagatgaatcatatttaaatctttcattttcaagtatctaagacttccaaggactaaaacttccctctgaattttaccactcatcccagctggagatctaagataactatttttgtgtttgtttgttaattatttgacatgtttcttctcaaattaagggaaaattcttatttcggagtcactgttcagaatgaaaatgtgagactaagtatttgttttgcaaagcgcaacagaatagagaagaaaagttgggcawtctgtagggcgacccatttggaaaaataaatcctacccct

SEQ ID NO: 822871 - DNA, 584 bp, Homo sapiens
tttaagagacgggcaacaacctaaataatcgataaggtgggctgaatacacgcaagctatgctcaaggcctatgttaggatgatgggamcaggatgccaagcagtgagtatatatgaaaccacagagcccagattaacataatttggtaatcaactagatgtgaagcagagggtgcaggagttgtcaaggatgcatctgaggtttttggcctagacttttagttttaggagaaccatgacaccgtacatatacagggtagctaagaaagcagattgctttttgtcatgtttacattgggaggggaagaggaggaggattcagaaggagacaagtagatgaaaataaagatccctttctatggtgggcttataaaactttttggatgctctggttttgggaattttaaatttgagatactaaaaatatttcccagtgtagctttccacaaaaacttatctgtaactcaggaagaagtttgaattcaaataaataggtctgaaaagcacttacacagagataagcttgtggcaataagggaaatctccaagagacaaaatataaaaggtcaggtgactaaccagcc

SEQ ID NO: 822872 - DNA, 611 bp, Homo sapiens
ttagttttaggagaaccatgacaccgtacatatacagggtagctaagaaagcagattgctttttgtcatgtttacattgggaggggaagaggaggaggattcagaaggagacaagtagatgaaaataaagatccctttctatggtgggcttataaaactttttggatgctctggttttgggaattttaaatttgagatactaaaaatatttcccagtgtagctttccacaaaaacttatctgtaactcaggaagaagtttgaattcaaataaataggtctgaaaagcacttacacagagataagcttgtggcaataagggaaatctccaagagacaaaatataaaaggtcaggtgactaaccagccacaatttggcgtgctgcagaggcaacactgggagggcagcaaagaagatagagaagcacaccgtgaggaagaagaaaaaaactgcagaattcgctgtcccagatgttgagggaggagttcgaggatgtcaacactgactctccaggatcagagcaaagaaagamagacagataggagacaagtagcacaggacaattacttcatctgtttcagtagagttggaacggaattcaagtggtaagata

SEQ ID NO: 822873 - DNA, 617 bp, Homo sapiens
actcacattttctagtttctagtttctagaacttacacattagctagtttactctgctgcyttaaatatatatgtatatcatacatatcgtacacatacacacatgttcctgtatgtttggtttatatatgagtctaataatgatggtaaggcccacagtaaacattccattttagtttaatttacatttttaattagtcaaaagaaaatgctgaaagcccctttttggcttttttaaaaggtgaaaatatgtctcacttgggcaggaattttcctttggcatttctagagtctcgtgtttttactgtggagacatctccttgtccaagaatataaatacttgccttggagcttgtataactccaattgaagagctctgcggaggatttagagagcgtgttaatgtggaaatggagcccagagtgccagaagcagagcttgaggaaatgaagggcttcaaccaggaatattttaagaccaagacataaagtaaacatttttaaaatgtttattgtgaaagagtactcagaaacctaagtctgaggctgagaacagcttggaaatggaagtaaagtgggaaagatctgctcccggtggcaaagagagccatttatttt

SEQ ID NO: 822874 - DNA, 617 bp, Homo sapiens
  misc_feature 580, 581, 582, 583, 584, 585, 586, 587, 588, 589, 590, 591,592, 593, 594, 595, 596, 597, 598, 599, 600, 601, 602, 603,604, 605, 606, 607, 608, 609, 610, 611, 612, 613, 614, 615,616, 617: n = A,T,C or G
ttcagatatattagatgtattaattgtgtattccttaagaatcttctccatgatgcttttgacttaatcaaatctgaaatgttttctttcaatgtctggctgccatcctgggctttttctctrtgctggaggctccattcaccttccttctccactgaatttttatttcctgtgacctatgtcttcctctttaatgggacagcactttctttagtagcatcctgaagataactgtatgggagataagtattttgagaaattgcatgtctcaaaatgtttttaatctgtcctcatatttgactaatagtttggtggatataaggttctggactgggaataatttttcttcagaatcctgatgcatttgtagcttttagtaatgctactgaaaagtctgaagtcattctgtttcctgactgtgtgtgtaatccatccccacatctcacctactcctagaagggggtgagtttttctttttgtcataagtactctcaaatgttatagtaatagtataaatctgttttacttcccccatattagtcaaatatcacatggtaagtggcagaattaactttaaacnnnnnnnnnnnnnnnnnnnnnnnnnnnnnnnnnnnnnn

SEQ ID NO: 822875 - DNA, 565 bp, Homo sapiens
gagttgggtgagtgggctcaagcatgggcatgaagaggcaaaacagcagagtttttagctggtatatgaccttcctctagaaacgcttgactggttagggaaaaatgcctcaagtgagcacgtgtacaactccaataaacacactgtacatgcagcccctcccaagtgctggcaggccactgcacatgctgatagcccactccaagggaggaatccggggagaaggacgcaagaccccggaagcataccaacatataaaaccccaagtcaaaggtcaaacactgcacttgatctctcaagtaacccacttggccctgttctaagtgtattttacttccttttgttccagctctaaagttttttaatcaactttcactcctgctctaaaacttgccttcgtctctcactctgctgccttatgtcccttggtcaaattctttcttctgaggaggaaagaattgaggccgmtgctaacactatcactaattagcaaatgtgataacctttctggacatctatttctctgtaataaggagagagctaaacctgatattctccaaggttc

SEQ ID NO: 822876 - DNA, 582 bp, Homo sapiens
gtggctcctttatttgggacagctgtgaacgcggctccaggagttgccttcatgaaatgaagcatatgatgacaactggaagaagaggacgagtacatattgctaarggtttaatggggatagtaatggccaagtggaaaaaaacctgtgggtggggatgaattggtgctgactggtcatgccacgaggtctgtatttcaggaaaccactaattggggcagctcctctggagaggactgggcctgagtcagatctgccctgtggattgcaagtcctctgtgaagtttgtgctctcaggtgcatcagaagcagaccctctccacagtgctggctcctcctgatggtagaaagcttaggcttgtgtatcatgatggttttttgtcttcctcgatggacatttattgagtttggatagtatgctgtggacattaagagtatatagattctggagttaggcttcctgggttcgaatcctggctgtatttcttattacctgtgtaagcttgggcaaccatttaagctgtttgtgccttgatcttttttacttctaacacggatgtggtaataataataataataatt

SEQ ID NO: 822877 - DNA, 556 bp, Homo sapiens
atgctttaagaccttaaaaaccttgggaatcaaagatgtttaagaatttctttccaaagctttcacattakttcataaactaagagattaatgcaaagaatacttaacgtactcttataatttcatattatacttataataaccatattaagggggtgttattcccaatttcgtagagaagaaatcagtgtgagaaggttaaatgactttttctgaatgttacgaaagaaaaaaataagagatagtagcaagtggtggtggttccattgacagctggtatcttgagctctggttcttaatttggttactgccatgtttgtcgtggcagagtggtctagtatcacaaatgagaatggcacctatctaagtatgcaatataaatttgtaataattagtaataaatttattttattatagctaatattttaaatggaattgataaggtcaaagaaaaacaccagctccaaatctatatatgccttttgctggagttacatagaaagcacatctttttactcaaagatttggcttcctattggaagactctgaagaaaac

SEQ ID NO: 822878 - DNA, 613 bp, Homo sapiens
aaagagttgtcgcttcactccttatttaagctcagttattttaagtccaagactattgcttttttcactaaagcacagatgaagaaaaaagtataggattttgagctatggtaaagttatgattgtttcatgtgcacagtggaaggagtatgaaaataattttacttattttactaacattgatcaaacatttacttctatacagggccttgtgttaggcattgtgaaggaaagagaaatgcacaaaaaatctcatggaggctgataaatcaaagataatacttaaggtactcttcataagagggataataaaacttctcagctgaatgttgaactgataaatgattatgttgatgactatggcaatgataagtgaattgtaatgcagttatcaagcactcatggcaagctcagctctgagtaatatagaatatcctcaaccagatgatcatgatgtatgtacagatcttggcacatacatcatgtgccatgggttctasgcacatgcatagtaccgagtatgttgggttataagcaccatgagatctttctcataatttatagaaagaagaactcaactagacaataactattttgactgtctttaggatcc

SEQ ID NO: 822879 - DNA, 556 bp, Homo sapiens
tgctgggctccatgcgggtgggatccactgaggaagaccacttggctccctggcttcagccctctttctagagtgaacagttctgtcttgctgtgttccagggaccaatggggtatgaaaaaaactcctgcagctagcttggtgtctgcccagatggcctcccagttttgtgcttgaaacccagggctctggtggtgtaggcacctgagagaatctcctggtctgtgggttgtgaagatcgtggggaaagcgtagtgtctaggccagaatgcaccatccctcatggcacagtccttcatggcttcccttggctaggggagggagttccctgaccccttgggcttcccaggtgaggcgacaccccaccctgcttctgcttgccctctgtgggctgtacccactgtctaatcagtcccaatgagatgaactgggtacctcagttggaaatgcagaaatcaccccttctgtgttgatctygctgggagctgcaggctggagctattcctgttcagccatcttgcccaggaatcccttttttttttttttttttttttta

SEQ ID NO: 822880 - DNA, 538 bp, Homo sapiens
gagaaaaactggaagaattccgaatccagtttactttatggataggtaacagtagttcaaggacaatgaaaaggactagaatctaataggtatactataatttttctctctacattcacctccatttttaccaaaaataatcatagtaacattggtttctttgcaaattaaaagtagtctcactaaacttcgagtatttatataagtgagcaagagtagcaattgaacgtataggatctgttaaagtccactttgctggaacttatgagatatagcaaatacaagttttaaaccctcttaagtttagaaagccaagccaaggaattgacattggacttcatctacaatacttattgacagagcaggagcatcgccatcttggacaagcactgccattttaaagttcaccttgatcaaaaactgcccaaatccaaagggcatcakcctaatggctaaggtcagcctgaccataaacgacaaataacatctctgaccagaaacagtctaaccataagataaaccccttccccaaccagag

SEQ ID NO: 822881 - DNA, 408 bp, Homo sapiens
ccataaatcaggttaagctctatctctcaaaatctaggcctactgaatacttactagtgaaacttaccaaaagctgtagttgtcatatttttcttccaatgttgttcttctcctagttcccttgtctttatgaataaaaacactcagatgagcagtctgaaagttaacgtcgttgccatctggcccttgattcctgagctttcatgcaaagttatgcaagtcactgactgcaaaacagcaccaggccaggggactgtctgaggctcaggtttcccaacaagcacaaaggtgccctggggtcaagcagcagaccatcccmacttacaaaatgatgcccaaatcctttagcagtagcctgaattgcagttctgtggtcggttatctcctttctgcttcagtcatagttta

SEQ ID NO: 822882 - DNA, 424 bp, Homo sapiens
cttcatgccaatcctctaagataggtgccgtggactgagttgtgctccccaaaatttgcattttgaagccctaacccccaacatgacagtatttggaaataggrcctttaggaatgtaattaaggtgaaatgagattataagggtgaggccctaatccaataggactggtgttcttgtaggtaaaagaagagacaccagaggcccaaaggtcaggccatgtgtattaatctgttctcacactgctataaagaaatacttgagactgggtaatttatataaagaaaaggggtttgactgattcacagttctgcatggctggagaggcctccggaaacttacaatcatggcaggaggcgaagcagaagcaggcaccctcttcacaaggcagcaggagagagtgagtgcaagcaagcaggggaaatg

SEQ ID NO: 822883 - DNA, 649 bp, Homo sapiens
tttcttaaaatatacgcccaccatgctagtaaagttagtctgaaacaagtcaaacaccaaataagtattacaaatacgagcaaatgtgtgtgtggtgggagaagtgtgrgggagaggaagggagggtgttgaggacaagagaaggggaagagagagacagagaggaagagagaattaattaaagatttttactttaaacattaagaaacattcagaaaacatcaagaagtgattcactcttgctacttttaaacaattggatgggactctatttaagtgaattgttcccaaatttcttcaccagaatatgctaagatatactcatcatttaatttctttcccaatgaggcaggaccatcattataaatattgcacaatgttggtcttggaaaataccaaagaatgtccagatatttgccctttatagtaactgaagtcagactaccctgctttttgagtaattctatctggttttaatatttttgggatcagctttcctcttttcaatgcctcatttcaataggaagactctctgactgtctatatctaaaccactatgcatttcaaagccatataatcagtttgttagaatcatgtgcagttgttagaattaaaagcagttgttgagaaagaattttagaagttcctg

SEQ ID NO: 822884 - DNA, 569 bp, Homo sapiens
tgtaagaaaatccactgatggatgctaaaataagtaggtgtgaatttgaggaacaacatatttgcatagtttcaaagtatctccccctacaacatgtactgattacactagaagaaatcataaaactggaagatctggcagacagcaccttcactgatcaaggttaacatcatcagtaataagacatacagacatcatgtactccttggtaagatacactaagaaggacacatcacttctgtggtattctttccaaaaatgtacaacctcaatctgagaaaacatcagacaaacccaagttacgggatattttacaaacaaaccagccagtattcttcaaatgcgtcaaggtcatgaaaaataataagtgactaagaactagcacagattggaggagactacgatatgaccactgcatacaatatgggatcctaggttagatcctgaacaaaaaaaggacrtcagtgggaaaactgatgaaatatgaataaagcctgtagtttggttaataatattgttctgatgttaattttgtagttttgacaattatatgattatagaaaatgtga

SEQ ID NO: 822885 - DNA, 537 bp, Homo sapiens
actccagcctgggtgacaaagcaataccttgtctcaaaacaaaacaaaacaacccatattttgtatgttaaatgtattatataatgtattcttatmaagtaagctagaaaaaagaaaatgttaagaaaagcataaggaaaatatttactactcattaagaggaagtagatcatcataaaggtcttcatccccaacctctttacactgagtaggctgaggaggaggaggaggaagaggaagagggattagtcttgctgtctcaggagtagcagaggtagaaaaaaagtccatgtataagtggacctgcgcagttcgaacctgtgttgtcagaggttaactgtactgtcattctctgtctgtatctatatatgtgtgtatgaaagcaggaaggaagaaaagaaggaaggctgaacaatgtaaggcatcaaataattttataagtttgtagttattctctctgtgccatgtaaccacatagtgaattgaaatgtcactaaatcatgagtgctaagacagaaaatctatcatctaatctgg

SEQ ID NO: 822886 - DNA, 639 bp, Homo sapiens
tgttgacaccaaacatgctagcttttggcatcagcctaccttctcctgcatttgtctacatctacattcctaatcactctaaaattatgaaatcagcaatgttaggagttaaaaaatacattttaaatggacagtttaagaagaaaagaaaggaaagaggtaacatattaaatctggttttgttcgccgttttttttttttttttaatatatccatgtcaggaagtatatagagcatttaatactaaaaggaaaacaaacaaacaaacaaaaaatgttctaaaatattcaggcagtgcttggggtgtaggaggtaaggcttatacattttatagaactaagtaagcgtcggcattttggttgatattgaaagtatcaccaagtttcctataaaatttcaagtccaatagatttgtttcacgtaaagaatttgaggttttaggtgccaaagttagatttctttgtgaatttaagatttctaatcatctttctttgcacaatgtttagcwttaattacctgcacacagcaatataccaactacacacagcaataattttatacttctgttgacaagagcttaactacactcagagcaccacaaaatccagcatctctaatcccaatggctctggaaaaata

SEQ ID NO: 822887 - DNA, 525 bp, Homo sapiens
aggacctcttcaagaagaactacaaaccactgctcgaagtcagagatgacataaccaaatgggaaaacattccttgctaacagataggaagaatcaatatcgtgaaaatggccwtactgcccaaagcaaattatagattcaatgctactcccattaaactatcattgaagttcttcacagaattttaaaaagacctatctaaaattcatatggagccaaaatagagcccaaatacccaagacaatcctaaacaaaaagaacaaagctggaggcatcacactactcaacttcaaactaactacaaggctgcagtaacctaaacagcatagtactggcacagtaccatggacatatagaccaatatgtgaacagacacatagaccaatggaacagaacagagaacccagaaataagaccccacacacaaccatctgatcttcaacaaacctgacatcaacaagcaatggggaaaggattccctatttaataaatggtgctgggagaattagctagccatatgcagaa

SEQ ID NO: 822888 - DNA, 613 bp, Homo sapiens
ccttccactttattattctttataaaacttatgttagctattgtaggttctgggcctttccatatgaattttagaatagcgcgtttatgggtgcaaaaaccttgctgggattttgataggaatttcttcaaatgtatagattagggagaattaatagttctactgtgttgagttttccaatccatgatcacaggttgtctctctatgggtaattaggtcttctttaacttctttcatcaatgttttataaatttcagtgcacagattctgaatctgaaatttctttacagtgtacataagtgttttattttctttggggcatttctaaatggcattgtgtcttaacttcagtttccacgtttattgtggagtaggtagaactgtgagtaatttttatgtgtcagtccacattctgcaacctactgagctgccttattagatctaggaggattttttttggtagatttcttgggattgtctatgtagatcatcatgttatctgcaaattggatagttttatttcttctttccaatttatatactttttatttctttttcttatcttacygtactggttagaatgtccagtgctatattcaataagagttgcaag

SEQ ID NO: 822889 - DNA, 577 bp, Homo sapiens
gacccacctgtcagaggggcctcagccttaaacgaaggtgtaaactggcctcggggagagtcctggggccagtagtaatgtctagcccccgttgcctgaggttgagacaaacgtgctttcctccttttcaaaacaaagtcgcaactctagcaagcatgaaattaaacgttactaaattaaaatcagagacatctctgtaccctcacatcctaccatttgcctcagccgacaacgtgctattcacactcacgtgtccataccaaacaacactgtttggatccatgctttcaccagctaccactctgagtctcagctcctctttacagcaaaacttctcaaaacagacttccatacacaccaatccaatctcctcctgccatttcctcgccaacaaaacactgattgggttttcaccactgaggtggctctgtccctgcagctgtgacctcccggtgcacccgcaatgccagtcctcagtctccatctctcttagactcccgggtgtctgatggccccrtgctctctccttggtgggacgtttcctaacacctcactttggacacgtctatcctcccgg

SEQ ID NO: 822890 - DNA, 566 bp, Homo sapiens
gggacaatgagtgaggcaagaggggctcaggcagcccagctgacggattaactgtgagtgcgtggggtgggagcggccagagagcggaggtgggaagcgaggcttgaggaagaggggcagccggcagcaggggctgatgtctctgagaagagaagcccatccgtgaaaggccgaaacttcaaatattcaacttgcatacctggggatccttgtgttcttttgctagcatttgttttaagtatgcagggcccactcccacattctctgaaccctgcctgtcctggacgccaggagctttggtctccatcactgggagaggtgagtcaccccatctctgtctccgtagccactgacccacggacttttatcattttcccccaagaattctgtgaaagtgtcccaatcatttttctgcctccggtctcatctttctcaaatgttccctcaacaacgagacctcttctgaaacacaaaccaccacactgcrtccccagagccgagatggcaccactgcactccagcctgggccacagagcaagactctgtctcaaaaaaaaaaaaaaaat

SEQ ID NO: 822891 - DNA, 613 bp, Homo sapiens
tggtaaaatgttgaataacagaattttcagtgtttcctttagactatataaattccacaagtgagagttcccaattcctgtgaattgaaggcttctgaccatttgatccatatttgtttctgmaaataataggttattagacacacaaatgcatttgagattcttattttgtagctggggagaccaagacccagaaaagttaagagttgaccacattgtacagcttgttcatgccacactgggaccaggactcaactctcccaattccaaatgctgtgtctccccttctatacctgcattttattatgaaaactttttaatgtacagaaaaattgaagaaattgtatagtgcacacccatgtactcatgtcttagttcatttttgctgcaataacagactaccttagactggctgacttaaaagcaaaagaaatttatttctcatgattctgaaggctgggaagtccaagattagggctccagcatattcagtgtctggtgagggttcgttcctcatagatgtcaccttctcaccatattcttatagggtgaagggggcaaagcagctctttggggccccttttataaggatcctaattctactcgtgagggc

SEQ ID NO: 822892 - DNA, 518 bp, Homo sapiens
tgttcaaaattaaaaataaaagagatgtcatgaagtaccacctcattagctgtcagattaataggacagaaaacagttgtcatagggagtcaggggaaaragaggtccctataggctttgatggtttcatgagtcttagagaaggggcaggaatgtacacactgaatgacaagcaggaatgggatgggaaaaagcaagaaaaatatgtgaggaaaggcatagaaggcagaagtgaaattgatgtatctgtgggactataaggaaaataacctaatagaagactggttatataaagactcgttgtgaatgtgatctaaatattcaccccctggttaaaatatttcaaagcaaagaatgtgaaaatgaaagtgatacaattttagggaaagtactaataaccacttcagctacaggtagctttccaaaatacatgctagtaaaacaaatgattaggaatatgccctaaatcaatattttacataggctctcatgtttgccaatgactcgaataagagaga

SEQ ID NO: 822893 - DNA, 595 bp, Homo sapiens
tccatgagtatccaacgtttagctttcatttattaagggagagcacgtgatgtttggttttttgttcctgtgttrattctctgaggataatggactccagctccatttatgttgctgcaaaggacctgattttattctttttttatggctgcatagtctcccatggagaaaagggaatacttatacactattgatgtgaatgtaaactagtttagctgtatggagggagctacctatccggaaaacaggagatttctaaaagaacttaaaacagaactaccattcgacccagcaatcccattactgggtatatatacaaaagaaaataaattgttctaccagaaagatacacgcgctcatatgtttattacagcactatttacaatagcaaagacatggaatcaacctaggtgcccataaacagtggattagataaaatgtgtttcaccagtgcaaccctcctccacaccaaaccccggcaaccatgtatatttttactctctctgtagctgtgttatcctagaatgttatataatcatataattggaatcatacagtgtgtagcttttcagactgtcttctctacttagcaatg

SEQ ID NO: 822894 - DNA, 511 bp, Homo sapiens
taaaaactctctaatgtcttgctttgagacttctttgggtaattttattttgtgtcaaaagcagaatgtggtgtccctgttgaggcatgcaaaagaatctaagaaaagcttgtggtctttattatttcacactgtttccgctgtccttatattgaagaacactaatttaagaaggagaaaaagggcacgaaaacttgtattgttatacatagcatgacatattgggtttttattctccaaaacggagagccaaatatatcatcaagacagtttgggtacatctccaaaaagaatacaccaaacacctctcagtgaacagaattagagctagcagtcttgacacctgccaccttcttctctccccacccaccaaccatgtgagcacaaagacctctccctccaccacctgccccacatgtccaaagattgcagaggtggatttaagagcattgtctgtgagtggcatctctgcggcttaggagaatacamctaggaaaaggaccacataaat

SEQ ID NO: 822895 - DNA, 625 bp, Homo sapiens
ctgcaatgaatgtacatgtgtatgtatctttataatagaatgatttatattcctttgggtatatacccagtaatgggactgctgggtcaaatggtatttctcgttctaaatctttgaggaattaccacattgtcttccacaatggttgaactaatttacattcccaccaacagtgtaaaagtgttcctatttctccacaacttcaccagcaacttttgtttcttgaccttataataattactattctgaatggtatgagacagtatctcattgtggttttgatttgtatttctctaatgatcagtgatgttgagtatttttcatatgtttgttggtcccatgtatgtctttttttgagaagtgtctgttcatgtcctttgcctgctttttaatggaattttttcttttaactttgcttaagttccttatagattctgaatattagatctttgtcagatggatagattgcaaaacttttctcccattctgtaggttgtctgttctctctgatgatagtttattttgctgtgtggaagctatttaatttaattaatcccatttgtcaatttttgcttttgttgcaaytacttttggtgattatatcataaaatctttgccctatgtc

SEQ ID NO: 822896 - DNA, 591 bp, Homo sapiens
aaaggtgctttcaaaaataatacatggtaatggtacaaaatatgaaaaataaatttcaaggaaaagattacaatcccccatcaagaagatataataatcactgttagactgctagcataattccctcaggtcctgtaaccatgagggtattatgtaagttaaaaatgaatatcttttattcaacaaatatttcttgagtgcaaattctaggccatgctctgttctacatgttgggatacaataagcaaaacattctgcacatggccagcttacattgcattgagggagacagaaaagccacatgaaaactaaacttcataatgagttagagataaggactaaatagcaaagagttaaaggaaaattttggaggaagggtgccattttagatagcgttgtaattgaatcctcaatgagaatatacacttataaagtgcatattaacaatttataactaattagatttaaagtaagtcaaataattgatttcaagtcctttattatgtttcccygctaaaaaatgaattgacttctacttccgtcatccagatagtatagggtcacattgcctgaatacattccatgacctga

SEQ ID NO: 822897 - DNA, 622 bp, Homo sapiens
ttcctgaggtcctgaccagaagyaaatgttggtgccatgcttcctgtacagcctgcaaaactgtgagctaagtaaactcttttctttataaattacccattctcaggtattcctttatagcagcacacaatggactatacaatctgtatcctaaatcttaagttacattccaatgctctctttttggtggcttcacagtggttgtctcagagggaaaatacaatgactttcattttataatttgaggactctgaacatgacttatggggttcagcagacaccatcattgaggatggcgggacagtggtccactgtccaatcaggaagaggcaatatataagggttaaaataacagatgaagaaattaacaaatattagttacagcaaaaataataatcttggccaattttggtgttgctaactcaactgtttcagtaggtcataagaaaggatgtctaatggtcattaaatacttaggcagatacttgggcaaagactgattttagatgcagaggtaaagaagaagaaaagaaaatattttcttgcacttcaatgcaaccattccattccagtttttttcattcaatttcattttaatttattccattcatcttgagctcag

SEQ ID NO: 822898 - DNA, 634 bp, Homo sapiens
ccaaattgtaaagaccatcgatgctatgaagaaactgcatcaattaatgcgcaaaataaccagstagcatcataatgacaggatcaaattcacacataacaatattaactttaaatgtaaatgggtaaatgtgccaattaaaagacacagacaggcaaattggataaagagtcaagacccatcagtgtgctctattcaggagacctatctcacgtgcagagacacacataggctcaaaataaagggatggaggaagatctaccaagcaaatgaaaagcaaaaaataaaaaataaaaaaataaaaaaataaaaaagcaggggttgcaatcctagtctctgatgaaacagacttcaaaccaacaaagatcaaaagagacaaagaaggccattacataatggaaaaaggatcaattcaacaaaaagagttaactgtcctaaatatagatgcacccaatacaggagcacccagattcataaagcaagtccttagagacctacaaagagacttagactcccacacaataataatgggagactttaacacccaactgtcaacattagacagatcaacaagacagaaagttaacaaggatatccaggacttgaactcagctctgcaccaagtggacctaat

SEQ ID NO: 822899 - DNA, 450 bp, Homo sapiens
cagcagattccaatgtgtagcccagattaagaaccagtggtttaaaccacctgttttggttgttaatattttttgttattcccagctggatacatttgtaattaatacatgttttgaagctatattcaaaaaattgaagcatgtaagttctcccatttccaaccagcttcatctctactcccatccctagcagaatcataatcctcagattgctgtacctctttcttcaaaatttcttctctgcatctacaaatgcatattagttttctactacaaaaatccttccaggggctattcaagtgaggccagagaggtgacattgccatataagttagaaaaaccaggacagtgctgacttcaagttttctatctccataagccaccagaacacctggaaaatatcaatgttttagcatccaaactataacttscagcctgccttttgtagtc

SEQ ID NO: 822900 - DNA, 601 bp, Homo sapiens
tgttcctgtgtggctctttttaaggaagcctatttttcctccatgttaaaactaaaatctgtggtctagctcggagcagatgttaagagcacattctctctaagagtgtgggctggagtgtgggcaatggctatttatcaccgtttccttttctttgtgtttctctgtggttattgaagtttttggtttggggaaaaacaacaaaaacaaaaatagcaacatatttatgaacaaagaagagagctaaaacttaacatctggaagagaggaaagaggggagtaaggtgcctgaaaataatttcctttaggagtgactggaggcttcagggggatcacagcactcctgtggaatttttacagaactaaggaaggctggagtcagccaaacttttgaaacctcagcatcctaaacctcaactcttgctgccctgagaagagcatgagccggccaagccctggtggcggcttccccaggacctcccacttycttcctgatgtgcctgcagtcctggagctgtgatcgcctcttctttagcttcttagaaaagaggcggcacaagaaaaacgctcagtcatcttgcagagacttggcatctctcag

SEQ ID NO: 822901 - DNA, 610 bp, Homo sapiens
agaattaacattccaaagcctgtggccccagactaattatgacaccacaggcacatgcacacccttgcccccaggtctgcaaggagaaaacccaggcacagcctccttccccagggatttgctttggctctagtaactgccaggctgactgcaccagccctctcactcagaagtgttcagtgtcccaatagttccagactctaggttctcccagccccttcctcaggttctactggccaaatctagttagctcctgtccctccccacgtcagggcagtgctggtagaatcactgcagcatttggtgtaaacctcaagtatttcgttttgcatcagcactgactaggaggagggtgggcagggcagagggtggtatgtcaaaggagattctttcatagcttttcagttgcagatatattgttgcagttaaaagtgttctatttggcctagcgtggtggctcacgcctgtaatcccagaactttgggaggccgaggcaggcggatcacgaggtcaggaaatcaagaccatcctggccaacatggtgaaaacccatctctactaaaaatacaaaaattagctgggygtggtgacacatgactgtcatcccagc

SEQ ID NO: 822902 - DNA, 631 bp, Homo sapiens
acaagcagagatcaatcaaatgcgaggtacaaaattctatgcctggggaagctgggccaaggtgaaggggagtcaccaagtgaaagcaggggatgggcatttgatatggtttgtctctgtgtccccatccaaaactcatctcaaattgtaatccccacatgtttccagagtggcctggtggtaggtgactgaatcatgggggtggatttcccccttgctcttgtcgtgatagaattctcataagatccagttgtttgataagtgtgtgactcttccccttcactcttgcgctctctcctggcaccacgtaagacattcctgcttccccttctgccacgattgtaggtttcctgagacttccccagccatgcagaactgtgagtcaactaaacctctttcctttataaattacccagtctcaggtatttctttatagcagtgtgaaaatggactaatacaggaaattggtgcctggagtttggggcactcccataaagatacttgmaagtatggaagagactttggaactgggtaatgggcagaggttgggacagtctagagggctcagaagaagatcagaaattgtgggaaggtttggaacttcccagtgacttactgaatggttttgacc

SEQ ID NO: 822903 - DNA, 582 bp, Homo sapiens
ctcacctggttaaacttctactcaagctttaatctcagagaagattgtttcctttgaaaggtctttcttcctcccgcttscagtataagttgaatcctctaattttatggttccattatggcctatatctcccttttggtaaaacaaaacaagacaaaacaaaaaaaacaaaaaaacacttacagtcccctcccctttaatacttgagtttcataaaaattgttatatccttaggaaaggggccttgtctttgtgttagtgctttatcttaggaatttagcacattgcttggcacatactagatgctcaataaatatttgctgagtgttggtggaattaagcttaccgatgatgcctgcagagaaatgaccatgctgtcttttgaaccaccctccccaactgtattttcatacagctatgtacgtagcatacacgccatgtctgaattccttttaataactgcagatcatggcactcctatgctgcagatcatggaactaaaaagctctgaaagactgagttggacttcgaattgcaatttaaaaaaatctaccttagtcatcagtttgcagtcatcagatt

SEQ ID NO: 822904 - DNA, 611 bp, Homo sapiens
gtcatggtgaccaagccctgctggcttggttctcaggagtcatttcactggaaatgtagtttattgaccttagttcaaaccattccagataggtctacagaatgtagcccaaatataagctggggtcttgattgagaccctttgcctagacaggatatgacctcatgctttctgtgagttgtttttttttttttttaagctggattctcgctctttctccaggctagagtgcagtggtggtgtgatctcgactcactgcaacctccgcctcccaggtccaactgattctcgagaggcctcagcctcttgagtagctgggactacaggcatgagccaccaagcccagctaatttttgtatttttggtagagacggggtttcattatgttggccaggatggtctcaatctcttgacctcgtgatcctcccgccttgtcctcccaaagtgctgggattacaggtgtgagccgctgcgcccggccgctttctgtgacttttatgcactgacttccatttccatcacccatgcctgctgggagccagcgtgaytcacccttgccagttcagtctgtaatctggttctcctctccctatgcacaaaggatccctatc

SEQ ID NO: 822905 - DNA, 584 bp, Homo sapiens
tccccctttgttttctgccatgatagtaagttttcttgaggcctccccagaagccaagcagatgctagaattatgctttctgtatagcttgtggaactgtgagccaattaactttaaacttcttttctttataaattacccagtatcaggtatttctttatagctgtgtgagaacagactaatacaaacggtatgtaaaacattttaaaaattgcttccctttttttttcttttttgagatgaaggcttactctgtcacccaggatggagtgcattggcatgatctcagctcactgcaacctccacctcccgggttcaagtgattctcatgcctcagcctcctgaacagcagggattacaggcacctgccaccatacctggctaatttttgtatttttagtacagacagggtttctccattttggccatgttcaaactcctgacctcaggtgatccacctgtcttggcctccccaagtgctggattacaggcacgagccaccgtgcctggccaaaaayttgcttctaattgttgatgacgtataagaatacaattgatttttgtttatagatttgtattcaccc

SEQ ID NO: 822906 - DNA, 552 bp, Homo sapiens
ctccatttattgaatagggagtactttcccaattatttttgtcaactctgtcaaagaacagttcgctgtaagtgtgtggctttatttctgttttctctgttctgttccattggcctatatgtctgtttttgtaccagtaccatgctgttttggttactatagccttatagtacagcctgaagttgggtaatgtgatgcttccagttttgttcctttgtttaggattgctttggcaatttgggctcttatttggctccatatgaattttagaattcttttccaattctgtgaaaagtgatattggtagtttgatagggatacttttcaccagatacaaaaattaacttgaaatggattaaagatttaaatgtaagaccttaaactataagaagactagaagaaaacctaggaaacatcattctggaggatggcrttgggaaagaatttataactaagtcctcaacagcaattgcaacaaacacaaaaactgaaaagtgaaatttaattaaagagcttctgcacagcaaaggaaaatatcaatagagtaaacag

SEQ ID NO: 822907 - DNA, 615 bp, Homo sapiens
atcattgtaggtttattagagatgcatgatctaaggcaccacggaatataagtccccaacctaatggatcagaatctacattttccatgatcccaaaattactcctaaaatttgaggaagcactaagytgaaatattatcggaaacctaaaacacaaaattaaagagattatcttaacataactgaagtttctgcagcagagtaaatatttggtccaatctattttcacccgtcagatcaccagcactactactccttgttccctgttctccattttcaaaatatgccttgttctgttaggtaaatgaagcacaaatagagcaaaaaggtctattgttggtccctttttggactttaaacaatgacattttctatcacaaaaatcaataagggatactttggattatacaaagcgggaaaggaaagcaaatggagactgtgggggtcccagtttccctttgcttcagatactctccagttttactcttctctattttaattaattggcttaccctcctccggtgtgacatgctaatgtcataaattgaaatgaaatgcatttaaactctttctgtttctatattttattgtcctcatgtaattttgctatgaaaa

SEQ ID NO: 822908 - DNA, 615 bp, Homo sapiens
atcattgtaggtttattagagatgcatgatctaaggcaccacggaatataagtccccaacctaatggatcagaatctacattttccatgatcccaaaattactcctaaaatttgaggaagcactaagttgaaatattatcggaaacctaaaacacaaaattaaagagattatcttaacataactgaagtttctgcagcagagtaaatatttggtccaatctattttcacccgtcagatcaccagcactactactccttgttccctgttctccattttcaaaatatgccttgttctgttaggtaaatgaagcacaaatagagcaaaaaggtctattgttggtccctttttggactttaaacaatgacattttctatcacaaaaatcaataagggatactttggattatacaaagcgggaaaggaaagcaaatggagactgtgggggtcccagtttccctttgcttcagatactctccagttttactcttctctattttaattaattggcttaccctcctccggtgtgacatgctaatgtcataaattgaaatgaaatgcatttaaactctttctgyttctatattttattgtcctcatgtaattttgctatgaaaa

SEQ ID NO: 822909 - DNA, 567 bp, Homo sapiens
ggcaggagtttgaagaagtgatattttttytggaacaaaatgtgtcagttgtgatgtgactatgaacttcctgctaatggatatgtaattttgaggccagtatgctcgcaatatcctacgccccggcaccactgattacaatggactccacttgttgcaaatagaccatcacacactaaattctcttttattcctttttcattagacaactgcaataaaattacttctattgcctctgttacttttttttatgatgtcaaaccaatgtcttacattattaaagaacttaaaatacaaagtttcattctgtggacagatcttcaattgctatttattactgcaaagaaagtacatcattattactggtaatgtaatatagtcataagcctgaggcgactttggtcaagttgacattaaaatatgccctactaatgtcagtcatatttgcttactgatacattaatagttaaatattattactgtgaatattcacttggcatcaaaataatcacaaatgccaatcaaacacagtcattgaagttatgagataatctctgctaattggtt

SEQ ID NO: 822910 - DNA, 593 bp, Homo sapiens
ctttatacttttcacaaaaattaattaaaaatggatcatagacctaaatataaaatacaaaatcataaaacttctaaaaggtaacatagaagaaaatctatataaacttaggtttagtgatgacatcttaggtacaacactaaaagcacaatttatgaaaaaagaaattggtaagttgtagttcattaaaagtaaaaacttctgctctgcaaaaaacactactaagaaaatgaaaagacaaaccacacactgcaagaaaatatttccattatatatatgataaaggattgatattcaacatatagaaactcttaaaactcaacaataagaaagcaaacaacctaactgaaaaatgggcaaaaaacctgagcagacatgtcaccacagaaagccaccacttcttacctattactatggccaaaatccaaaacattgacaacatcgaatactggtgagcatgtagaataacagcaatgctcaatcattgttggttggaatgcaaaatggtatagctactttggaaggccatttgrcataacaaaaactagatattctcttaccataggatccagccatcatgctccctgctattt

SEQ ID NO: 822911 - DNA, 496 bp, Homo sapiens
aactgagttaattttattagtgtttgcctgggacatatacctattattagggtaggcaggacaaataagtaaagtctaaatgttaaattacttaaagcttcttttcccataagcctttcctaaaatttgtctaaagaatattgctttgtagaagatggagtttgtgattaatgtgtcaattattgtaaataatgatggcatagttttaaatgttagttttaggctgttcatcttattacacaagtatataatttaatctgaataaaggattcccaaaggtaagtgtaaagcctctagtttctaaagtagagttagtatttagtttttatcaagtggttttatatgttaaagcaaaacaaatctttgcttggyataccgtctacctagtctttgaagacaaaacaaaggagggaggagctgttttgatcaaataaaaccaatagcgtgtttaattatgtgttaacatatgtgaatgaccattacagagacagtagag

SEQ ID NO: 822912 - DNA, 621 bp, Homo sapiens
gattgtattttatagtcctgccctcagcaattcagctgtgcttcattccaagacacatttttgccttatgtgccataataaaagcaaaccttcttgccccttagaggggcacatttagaagatcaagaggagaatgtacttgggccacagtctctcctaggacggctgcaaggcaagctgtaatagaaaccaaaacagggcacatctaaccggttctgggttttctcctgaaggcaggatgtagaccaggttttttgcaagggtcactgaagtttgcaaaactttttctgctcctggctgattgagcgagccagagccagctcatagcttggattggaaatcatgtgaaactcatttatgccattttgtatttctctctttaactccctatcagacattgagccgagtttgcatccgagtctggagttggtttacaagcatactggaaataaaactcaattgggagtgagaatccaggtgaaccgaagtaaacgtgaactctttgtgaaccaaatactrctgtacgcctcttcaaagcctacaggcgcctgaaaatctcccataaatccaagctgcattgaaaggatttgctccaagccttctaccagtagcttgcatcca

SEQ ID NO: 822913 - DNA, 619 bp, Homo sapiens
ctatttaacattatctatggcaacacagtatcaccaagtaaccatgtgtacccctacatttctcagttctcttgtagctagtatgccaaaacttttaagagaccatgtgcaaccctccagagccctatttgttggctacaaggacctggaagccacatgtggagatggtggaatcacaggtgagattaggctggattataagagttacaacatgggggatgtcacctgacccacatgtgcatgactgagaaataaacgtttgacgtgttaaccactgagatcttaggaataactcatgataacagcattgactaatctagcctattaagtctgaacatggtagcactaattattctacaaggcacaagactaaaagaaaccagcaagctgcagaacaatacatacagcagaagaacatatattagacacacatgttcacacatgaagcaataatgtgtatcttctaaggacagatacatgcataagtaaatgtataggaaaaggtccagatgatgttcaccaagctattgccagtaaacttgggaagggcagaccaagaaatttcaacctaatctataatttaaaaaaawttttttaataatgaatttttaaataaatt

SEQ ID NO: 822914 - DNA, 345 bp, Homo sapiens
atttagtaagtacttatgtgtaggataaatgatttaaatatggttttgtgggaaggcatcaagataaatgtccattcatttgataaacccttttaaaactaacaattgtgccaagcaccttatgtataaagatagatggcaaaatccttgctcgcaaggcactcctagtcgcaaggattaaagatgcccagcacttgtaccaaccagtgctcccacaagctgaacctatgacmgacatcactagtcaatcgtctccttttcccaaaagaatgacctcagcctcacaatcctcattacacagtgttccacatggataccatcaacaggagttgaaatacaaggtga

SEQ ID NO: 822915 - DNA, 549 bp, Homo sapiens
ttcagtccttctgcatcattttaaaattcatgaggataatctgtttacaacttcaccatctcaaaatttacttagtttttctaatgtgccaaatagcacgtatatttttttccatggtaattataaaaaagttaaaagctgaaaaattccttttttccctgtattgttggctttcaattttaatgatacatcactttaaaagagccctgaatcttaacaaagaaacactcatcattaatagtttattcccttaatcaaaaataattcataactctccactttctattacttattaaaggcccacgtaagccctcaggctggaatgagaatgcctatgagaactggttttccccctttctttcaaaggtaggaaaggacttactaactcaaataagtccttcaagtccagatggtatagcayagcatctcaacaacaggtaagagagtacaagcagaagctggggacaaaaagcaaaggataaaaaatagttccttataaaaatgtgaagagatctccattgataaggagaaaaccttaatattttctgg

SEQ ID NO: 822916 - DNA, 644 bp, Homo sapiens
gattattcaccttgggcagggtcctcacacattttctacttttgtcaccatttgtgaacctaaaattcccaggatcatctggaaattctaatataactactaggaagcattctcccrgttaaggttgttaatgtattaaatttgacaaatatttatgaagcatttactatgtcccagacattattctagacatttggtattcacaaatgaataaaacaaataaagaaccttgccagcatagagcatacattctagtcagggggagggagagtaaatagtaatagaaataaactataattataaaataataaataatgcatgttagaaaaagaaagaccagattcagggggaaggggagtgcaaataatgggaaatgaggctggaagatgatctgttatagatagtaggaactcatcgttctgtccttttaacgcatagcaccttgcacttcttatttgtagccacgtttgtatttttttctatcaaaatttttattgaaataatttaggatagtagctaagcatctgaatttggagtctgacctaagatctaatccttggcccactattcattagctatgaactttgggcaagttatttaacatctctaaaccttattttctatcaatttttcatagttttatg

SEQ ID NO: 822917 - DNA, 488 bp, Homo sapiens
ctaaatcatatagtagacatgagtataatttaacacaatttgtcttttatatgactgatgaaattagccccgtgggtttattttcaatgccttatacatactaaagttatgcmaagtgtttctatttttgaatgatttttctttccttattttcattgttttcccctgcactgttgctgataaccttacaaataaagattgtaaaagaccaggagaaagataagcatgccaatcataagttttggttctgtacagttttcctctttgacccattgatgcttttcagctttcccactataattcttcattaatttccaggtttgtcccacgcattgaattccatggtttttagtgtagtttcttgccttttagcctgggaacttttgggtggggagaatatggtgatgtagttcaagtcgaaatactagcatatgaatactttcagaagcccatacagttgtgtgcacattaactatgtttttagcagt

SEQ ID NO: 822918 - DNA, 578 bp, Homo sapiens
gtctggcctcacaatgaagttttaatattgatttttgtattcagcaacctcgctaaactctctcattgaatataatagtttatctgtggatygctttgcatttttcatatactcgtcatatcatccgtgaatgataaagttcatttttatctttccaatccttgtatgttttattttatttattttccttggtacacaggccaggtcttacagaacaagagtttaacagctgtggtaatagtgagcttccttatcttgttgccaatctccaaggaaaagtttttaacagtttcacctgaaagtatactatctgttgtagtgtttcatatacctgtatattagatcagatattatcagatttagggagttcccttctgtttccagtttgctaagggtttttgtttgttttaaaatcatgaatgaatgttgaattttgtcaaacatctctttgcatatattgcgatcattattagaattttctactttgatcttttaatgtcatgaattacattactttttttggtaatgtaaaatatgtattgcatttgttaaacctaacattatccttttatatgtta

SEQ ID NO: 822919 - DNA, 389 bp, Homo sapiens
tctccacttctggggtcagggagcaggatcctggctcttttcctgatttcagtttatttttcttttctttccttttttttttttttttttttttgagatatcatggctcactacatacagcctttaactcctagkctcgagccatcttcctgcctcaaccttcagcctccaaagtagctgggaccacaggtatgtgtcactacacctagctaatttcttttcatttcatagagacaagggccttgctatgttgcccaggctgatctcaaactcctggcctcaagcagttctcctgcttcagcctcccaaagtcctgggatttgagctaagctctgcctcaggtggaattaagggaaagaaggctggtgtcatctgaagactgcagtggc

SEQ ID NO: 822920 - DNA, 521 bp, Homo sapiens
taggtaagattgtatcaacagctccagatggaccaatctctaagaataatttcacttccccttatcattgacaggaatcacatttacatattctactggtgagtgagataatgcagaaatgattaatgtccctcgatgtacagatacctgtagactgtttgatcaatgtctccccagaaagtctttcattctggatgctcaaagtccaaaaacgctctgtgattaatgtaaccaaatgtttggggtcggcggaagctgcaggcttcgtttctgtgtccccgtcacactaaagagaggtcgcaggagactggattagtcatgtggagaaaaagtctatggggctcatgtttgcatgggatttcaaatgtccttttaaagaaaggagtagaatcccccctggaatgtctcctccagaggctctgtagagagaacaacacacttagtcttttaatgcaaatctaatttccatttagaaaaccaagtgsgtctgattctgtgtgtgtgttgtattggaattggga

SEQ ID NO: 822921 - DNA, 642 bp, Homo sapiens
ggtcccaccaggggcaaagaagctggggcatttacccaccatctcccagccctctctgggtgagggtctttcctgaaactttaactttccaaactgttcctcttgcagttctcaagaacattctcaggcagagcctgagatgcaaagccattggcaagtaaggaaactgacaacaggggacctctccagtgggccaggggttatagtcagcaccccaacaatggctcctgcactccaggaagctctctgaagccgctattctttgtatccccattttgcaggtggagaagctgagactcagggagactcacagtcacacaggtagaaggtggaaaagctgggacttgagctcgggctctgacctggtgggctccaccgcctgtcccgtgtcgcactctccaaacacaatgcaatgaaaaatgatggaagatgaaaatgaactctaatggcattcaaaaaaagaaaaataagaataaaaaaattatcaaaataaaataactcctgtctcattaccatgaaacaagtgcttgacacacagcaaatgctcaacaggggtyagtttctatgcttccaactctttgaacctcttttccaaccacgcattggatgaaaaggcagtggctcagaactaggagcctggca

SEQ ID NO: 822922 - DNA, 582 bp, Homo sapiens
caataaccattgtttatttttttaaaactacctactatatcaggcagagctattttctggcaagcgacaataactggatccaaaaaaaaaattaaccatgaggaattggttgactcacctgacctaaaaagtagctagttttagtgatgactccaggaaaagtacaaaccttctaacacttgtttcctcatgtcactgcatatcaggttcttcttcagaccagcattctcacaatatagaagtcctgaatacaactgcttaaaactcagtgttctttcctttctgcttatactattcaaagctcaaatttaaaataataattacaagaagaagcatcaagaaagggctgctgattgggtccagtgataaacaagtgctctaggttgggccaatcatgctgatcaggagattaaaatggtctcattcgtgagtctagaaagctttagattgattggcaagttctgtagaatcccatgaattgaaaagaaagatgtgygtgtgggtatgagcccttctgcacacaaaaaaatcaataaatatccattatgactacctctgtaccaggaaatgtggaagacgtaa

SEQ ID NO: 822923 - DNA, 379 bp, Homo sapiens
agaaaaaaagctttttgtactctggaaaacagaatataaaaattattgataaggcttcagtgactggaggaacaccagcgtccttggttttgrgctgatttagataaaacgacatggatatacatggaatgatttgaaggagcggagagtttaaaacgcaagaaagaaggaagaagctcccctgtacagagacagagggcggggggctccaagttgagagaggaaacccccagtgcaatggcaaacagccagttatatgaggaggctgaaggaggtggtgtttgatttgcgtagggctcaggggtttggtttgctcaggcatgtcattcacgtagaggcgaagaaactggccctctcaccctggccttttaatatgcaa

SEQ ID NO: 822924 - DNA, 647 bp, Homo sapiens
ttgggaaaggaaaaatcttaatcttgctatgcataaagcatagatatgtaaacagtaagtaaatagatacataaaatgcctgcagtattaaaatttcatgagagacaattagagaaaaatgtctaaaagctattcttaggaagttgatagtgaaaaaacaattattgagaaacattggtctggcagaagagtggtgaatgtgttgaacttcagaagagaagagactgggcaaggagaggcaagggtatcaatgtggaggttaattcagctgatgcccagatcaggtatatcatgtaattaaatgaaaatgctgcttcttttcgtttagaattggcttgtatgtgatttttcagttattgtctttttgttggtggagttagtaatcactgaaaacaaggcataaagtttctcaataactattgtagggaaaaataacacataatatttatttaatcatgttttccaaagtcaataatatttttgaaatgtactgcttctgtataacagcattcctcatacttcacaatggytttatgttgtaacttctccctagcttcacagacattttctggataggtaaagttcctgggttattggaaaacaaaggagtcagcactgtgcattctgtgattctatgtacagaaaac

SEQ ID NO: 822925 - DNA, 607 bp, Homo sapiens
ttaattttactgtactcaggaacattcttcctaggtaatattaccaatctycatggtctcaatgataatctctgtgttgatgacacccaaacatttattttcactttctaaagtgacaaatatctatttctaagatccctcttcatttatctacttgagaatgcttcataacatgttagcttttcacaatgatgaagctgtctcctgtaatctcaatttcagttcatagactcaccatctacctatttttttaagccctacttgtgacaacattggcaccttcgtatattcacccctaagcctgtctgtcatcatggtagactaatcattcttcagcttagcatgtgttagacctactaggtacctacagattccaatccttcctctctctgccaagattttgatttatttggccagtgttggggcccaggaatgtgtaattttatcaagagtctcaggttgtttatacaccagatcgtgagaaaaatgacatttagaccacaaaactattggagaaaaaggtaatcacttattacatttgtgtccccagcatttaggaaaatgtttaatacatagtgagtgattaaaatattggaaaaaaactgaa

SEQ ID NO: 822926 - DNA, 597 bp, Homo sapiens
caagagcagcacaaaaaatcagcacctggatcaagaagggtgacctcagcaggaagggaatacttcatccacaacagagaaatcctaaagcaaagttcaccttattagaagctctgtgtggaatctatggctagagggtacttggatttttaacagaaaacagaatacatctaaaagcagatggcaagacacaattcccaaatggacaagacagtcaggctacccttttatgtacctgtctctacattcctttcttggccgatgctagagaagaaagcactttggcatcacgttgtaaaagatacaattaaaaatcaaaacagattggcaaagttcggtattttaatgaaaagaatggctcataattgtatcctggtaatagtttctgaaatggaagaaaagtaaaagagcttttttcattgagataaattctttttaggcctgaggcatgtacacgtgctagaaaaaaaaaagtaacctatatgtttctatctacacagagagggaragttgagaagaaaaatgtgtttacctttatttgtcacacgggaatcaaaatgctggcctgggactctcaaatatgttatcaaatatgat

SEQ ID NO: 822927 - DNA, 653 bp, Homo sapiens
gaccacatttcacaaatcccatatcaggaggatcacagacacttctgtttccatatgtaaaaagatacaagtgtattggaacttctagaatattcttatgagtgatatgatcaatgattaagggtaggaaattaaaacctttccccccaaatttgggatttgtaatttctataacaagttggcctagaatgtatgatatatgtgtatacatatatctatatgtatacacacacactatatatacacatatatagtacatatatagtactatatatacatatatacatatatagtacatatacatatatgtactatatatgtatatacatatatgtatgtactatatgtatacacacacttatatacacacatatatacatatgtatatatacacacgtatacgtacatatgtatatatagacacgtatacgtacatatgtatatatagacacgtatacgtacatatgtatatatagacacgtatacgtacatatgtatatatagacacgtatacgtacatatgtatatatasacacgtatacgtacatatgtatatatacacacgtatacgtacatatgtatatatacacacgtatacgtacatatgtatatatacacacacgtatacgtacatatgtatatatacacacatg

SEQ ID NO: 822928 - DNA, 653 bp, Homo sapiens
gaccacatttcacaaatcccatatcaggaggatcacagacacttctgtttccatatgtaaaaagatacaagtgtattggaacttctagaatattcttatgagtgatatgatcaatgattaagggtaggaaattaaaacctttccccccaaatttgggatttgtaatttctataacaagttggcctagaatgtatgatatatgtgtatacatatatctatatgtatacacacacactatatatacacatatatagtacatatatagtactatatatacatatatacatatatagtacatatacatatatgtactatatatgtatatacatatatgtatgtactatatgtatacacacacttatatacacacatatatacatatgtatatatacacacgtatacgtacatatgtatatatagacacgtatacgtacatatgtatatatagacacgtatacgtacatatgtatatatagacacgtatacgtacatatgtatatatagacacgtatacgtacatatgtatatatacacacgtatacgtacatatgtatatatasacacgtatacgtacatatgtatatatacacacgtatacgtacatatgtatatatacacacacgtatacgtacatatgtatatatacacacatg

SEQ ID NO: 822929 - DNA, 614 bp, Homo sapiens
gggatttgggttgcctcctgcacagtcaaggagagtgtcactcaggctagtcatagatggcatacctacaggcttgggctgattttagatagttgttcagagcagtcaggcaggcgccagaggcacaagccctgtgagaggtgtgtttggaatcacttggtatccaaatcacatgtcatccctaggagcaaggagaccggttggatttggggctggtctggaatgaagaagcatctctcagcttccgaaggctgcatggctcacggcagtatctcaatcatgccctgcccgtttgcacatttggtcctgttggtagttacctctctggtgactggcaaagtcagcaaggatattggggtggagcaccctggctaagcaccctcttgattatagagctatggagtagaagacagatggagaatgagaggcctgtgagaacaatcagtcagttgccatctttcagagctgctcgagttcaaaagtgtgtcatacagggtattttamcattgctacctttaagggattcaggtgggaaccctaggctgtggcttcacataatggaacttgggtgccatcctaccctgtgatgttgagctggccagcactggtgtagg

SEQ ID NO: 822930 - DNA, 600 bp, Homo sapiens
cacattgtctgtgctaagtactagctattctaattcatcacattatctttttataccattcttaaaatacaatattattttatgtttatttttattaaagttatttttctgcctaatctaaatatttatgaaaattatgaggtctattcagtctacactcttgataaaggtcagtttttgtcctctttattaatacgctagaggatacaaatgcactttcattacagggacatgtcacatagtgatttaagtatgaacttttggtgtaaccatcatctgaatggtgcttattgtcccaattagatattttctcatttctaacccctctaccaacctcccatctttctgagcctccagtgtctatttttccagtctatatccaagtgtgtgcgttattgagctcccacttacaagtgagaaaatgtaatattttattttctatttctgagttattttacttacaataatggactccagtttcattcatgttgttgcaraagacattattttattcttctttattgctgaacaatagttcgtggtataaatgtgtagcaaattttcttttttcaatcattaattgctaaatttaaattgact

SEQ ID NO: 822931 - DNA, 630 bp, Homo sapiens
tgactgacatattcagatggcataaaaatcagacccagaagcacagaacgtttaattcccccagccacagctgctggtctgcacatttagtgggtaacccaagctggctcaatcagaactaatccttagccatactaagatttgcctgatctctgttttttaatttttctccctctctttctctctatctcaccaaccctatgactcccctttgcttcctgcccctgatagttgttcagaagaaaggatgttagcccagatctgctggtgatgcatgtccacgatatgtgtaaaaacacaccaaagaccagaggaaatatcagaactgataagaaaatagaatttacatatgaaaacttgaagactaggcctagatgaattttttgagcttctgaatccagctatgtctaatgacacctctagatttttcaggtgcgtgagttaatacattaatttaataattttgaaagaaccattttaaattagattttctttyctttatgtcaggaagaatgctactcactggaaaaagtaacttaagagcattagagaattacttatgtttatgatgattgtcttttcacacaaacacaaaacaaatacttttaagagaagactaaaatactttgg

SEQ ID NO: 822932 - DNA, 630 bp, Homo sapiens
tgactgacatattcagatggcataaaaatcagacccagaagcacagaacgtttaattcccccagccacagctgctggtctgcacatttagtgggtaacccaagctggctcaatcagaactaatccttagccatactaagatttgcctgatctctgttttttaatttttctccctctctttctctctatctcaccaaccctatgactcccctttgcttcctgcccctgatagttgttcagaagaaaggatgttagcccagatctgctggtgatgcatgtccacgatatgtgtaaaaacacaccaaagaccagaggaaatatcagaactgataagaaaatagaatttacatatgaaaacttgaagactaggcctagatgaattttttgagcttctgaatccagctatgtctaatgacacctctagatttttcaggtgcgtgagttaatacattaatttaataattttgaaagaaccattttaaattagattttctttcctttatgtcagraagaatgctactcactggaaaaagtaacttaagagcattagagaattacttatgtttatgatgattgtcttttcacacaaacacaaaacaaatacttttaagagaagactaaaatactttgg

SEQ ID NO: 822933 - DNA, 528 bp, Homo sapiens
tcactgagtgaaatttctaggtgttcagtggtctagggcagggtttggcaaacaatttttaaagagacaggtagtaaacattttaagttgtatcatacatctctatcacaactactcaactgtgtcattgcaacatgaaatgagcacagtcaacatgtaaacaaatacatgtggctgttttgcagtaaaactttatctataaaataggcagtgaagtgggtttggcccacaggctatagtttactgagacttggtatagggcatattgtcatatcccttctaaattaaaggaaaagttgctaaatcttgtccttcctacatctaagaaagaagtacaaggacatatggcctctttgcaattttgggggccaagcctagacttatttgggcaaatttccataaccattttgttgagtaacctgagaagctaattttgagtaggcacacagtaagaragttttgctttggttccacactgccatgaaagctgtttggccacgtggaccatgtgacccagtagattcaatg

SEQ ID NO: 822934 - DNA, 602 bp, Homo sapiens
cttatgaggtatataaaatgtcaaaatcagagaagcagaaaataaaatggtgctggccagggattgtgggggagaaatagggagtaaaattttacctttgtattcattacaaaatkgaataaaagtgatgggagtgaaaatccttaccttgctaccaatcgcaggtgtgtggaggggtgctcattcagtccttcctcattaagtataacacatgtaagtcttttgtggaaactctctatcaggttaaaaacgtttctttcttgtttggttggaatttataacttaaataattattgcattttgcaaaatacttttttggcatctattgaagtgataaaatagtttactccatttgtttttctacgagtgtggtgtgttaaaatattttctgttgataaaacaaacttacatccctggtataaaccacacatgcttatgatgcactatcctttttatattttgctaattgcatttattaaaatttaagaatttttgaatatgtattcatggaaaatagatatgttttgtctgttttaaaattatgcccttgaaaataaattggtaagtgccccatcttctgtttcctaacagactgatagaga

SEQ ID NO: 822935 - DNA, 409 bp, Homo sapiens
tgttttttattctctttctattccaaattatctgcatctcctgagtcaagttcttgctggaccaggaagggaggcgcgtgagaatgagggatggggtctgtagggatctgagcacatgcacgctatttcagtttctgccctgaggcccagcagcccacagactagtgtcagagagctcacggaggaagatcagaaagcagcagaatattctcaagtacacagaaataattttgctggatccatctggaatcagcagaaagcaaggcattatttaaattagtaagcacatactgcctgcttctgatagaaagaattcaagtaaagcaggrttcagatataattatttctcaatctccaggggtataattgtggccactgtgccaagacataagtgggaaaaactacttca

SEQ ID NO: 822936 - DNA, 626 bp, Homo sapiens
aaggtttaaaacacttgatatcacaaaataggatcccaggtcattgtaaaataagtcattcatttaaccaaagtgataactcaaggatttttttttwaaaaaaggcaaaaacctttattctttgagaggagacttaattttccaaacaataagccttaacaaaaacagcctgaagccaatgaaattgtaaagaatctataaattttaatttctaccataagataaaacttccataagccttttataacctttataacctctattaaggatttagctaattcttcaagaaagtcttgttaatctgacaaaggggcccatacgctggtctgatataagcatgcctttgacattaatgattaatttatagagaaactgaacttattttatctctcaatatcggctcttacaatctcacatgcccacctcttctgccatagtgcctgagccttgagttgaatagctttcattgctggccccctgtctcaggaatgcagtttcttttgattggcatcttctactgtgcctgaggacgagaccttaattgctgtcagtgtttaagatttagcaggatattaggttccctaaagtccaaaatgacatatttgggttatttggtcacacaaggc

SEQ ID NO: 822937 - DNA, 548 bp, Homo sapiens
atacagaaaatattctgtttaatggtagatacatattatcacgtttrttaaaaaaatcagagaatgtacaccaacagtgaatcctcatgtaaactatgaactttggataatactgatatgtcaaccgtagcttcgttgattataacaaatgtaccactctggtgagagatgttgctatccagggaggctatccatgcgtgacgggggcagtacgtgtatgagaactctccatactttctgctcagttttgctttgactctaaaactgctccaaaatatacaaaaattgtcttttaaaaatgattgcctctattaaaatattttaaaagccactgaggtaatcatgatcagtatctaccagcaacaaagtggtaggctgaaaactaggccctaggtttctgattcatggggctgtatttgttacattctagttaaatgacaggtttcttttttttttttaatatttgcaatagttaccaacattggcaaaaatcaagagttctattttaaacctacttatccatttacatataaatataaatgacaatt

SEQ ID NO: 822938 - DNA, 590 bp, Homo sapiens
tgcatgcatttttagttattacatttgwgtaatattgtcacaaaaattgcttggtagagagagtgtataaaaattctcttgggaaaacttcagaattttaagtgaaacaaaaagcaagatcattagatgaatctgagaaaagaaaaaattaataataacaaaacattaactttttaaagcagaggttttgtatgtcatattataacaccatgaaatcaaaattttaaaaataatataaatactacctggaaataaagaaatgtactcagaaaatctttagataaaaatagaaaataaaatggagataaaaatacataaaatataaagcaaaaaacaaaattgattataaaactgacaggagaatatggttaaaatatggtattaaacaccttgattgaaaaaacataaaaaagtaaagtgaaataattatgttttagttaaataaatgagtaaaacaatagtgtaaaatattataagtattataaaaacatctagcaaaagaaaaattggaatgcacaaaattaaagatttaattagtgcatgtgaaaacaataattatgcaataattatgcaaaaaaattatgaaaaaa

SEQ ID NO: 822939 - DNA, 590 bp, Homo sapiens
tgcatgcatttttagttattacatttgagtaatattgtcacaaaaattgcttggtagagagagtgtatraaaattctcttgggaaaacttcagaattttaagtgaaacaaaaagcaagatcattagatgaatctgagaaaagaaaaaattaataataacaaaacattaactttttaaagcagaggttttgtatgtcatattataacaccatgaaatcaaaattttaaaaataatataaatactacctggaaataaagaaatgtactcagaaaatctttagataaaaatagaaaataaaatggagataaaaatacataaaatataaagcaaaaaacaaaattgattataaaactgacaggagaatatggttaaaatatggtattaaacaccttgattgaaaaaacataaaaaagtaaagtgaaataattatgttttagttaaataaatgagtaaaacaatagtgtaaaatattataagtattataaaaacatctagcaaaagaaaaattggaatgcacaaaattaaagatttaattagtgcatgtgaaaacaataattatgcaataattatgcaaaaaaattatgaaaaaa

SEQ ID NO: 822940 - DNA, 554 bp, Homo sapiens
atactgagtgagttcttacaagatctgatggttttacaaggggctttacccccatttcgctctgcacttctccttgttgctgccacgtgaagaaggatgtgtttgcttccccttctgccatgattgtaagtttcctgaggcttccccagccctgcggaactgtgagtcaattaaacctctttcctttataaattacacagtctcgggtatatccttatagcagcgtgagagagaactaatacaatgatttcagaaactgaacttgaaacttgttttggctaccttctactttttaattcagtgcctggttttacttttccctggataaaacaaattcttttctgttttttatgctaagtaacttggttattctcaaggactatgcaaaatgtgcatatgtgaaacctctaatgcactgggaaaaaaagggagtaatatggagagcattccatataacaagattcttcccacttaacacacattttgttcctgttacattagaaataatagtaaagayagaaaacaacacatactagcattaacagactcctgtt

SEQ ID NO: 822941 - DNA, 603 bp, Homo sapiens
tgttaatatcttactatgcctaatttataaattaaactttttcataggactgtatgggaagaaacatagygtatatagagttcagtactatctgaggttccaggtatctattgggggtcttggaacatgttctctatggataaagggggaccagtgtattattaaagctacatacatgcctatcatttagcccaacaattccactcttaagtatttacctaagagaaatgagtgcatattttcactataaagcttgtataagaatgtttgtgacagctttatttataacagctccaaacaggaaacaattcgaatgtccattaacaggagaatggatgaattttgttatatttaaataatggaatattatagggcaataaaaaagaatgacttactggtacacagaacaacactgctgaatctcacaaatgttatgttgagcaaaagaagctaaacgctttacacacacactatttgattccatttataagaattttaggaagagacaaaactatctacagtgatagaattcagcatagtaggaggtaaggtactaattgagaaaggtgcaaaaaaaaaaaaaaaaaaccttaaaaataatgc

SEQ ID NO: 822942 - DNA, 603 bp, Homo sapiens
tgttaatatcttactatgcctaatttataaattaaactttttcataggactgtatgggaagaaacatagcgtatatagagttcagtactatctgaggttccaggtatctattrggggtcttggaacatgttctctatggataaagggggaccagtgtattattaaagctacatacatgcctatcatttagcccaacaattccactcttaagtatttacctaagagaaatgagtgcatattttcactataaagcttgtataagaatgtttgtgacagctttatttataacagctccaaacaggaaacaattcgaatgtccattaacaggagaatggatgaattttgttatatttaaataatggaatattatagggcaataaaaaagaatgacttactggtacacagaacaacactgctgaatctcacaaatgttatgttgagcaaaagaagctaaacgctttacacacacactatttgattccatttataagaattttaggaagagacaaaactatctacagtgatagaattcagcatagtaggaggtaaggtactaattgagaaaggtgcaaaaaaaaaaaaaaaaaaccttaaaaataatgc

SEQ ID NO: 822943 - DNA, 494 bp, Homo sapiens
ccctggcctcccctttcactcactccacttccaatccatcaagaaatcctggcagccccacctgcaaagtcrgtccaaatctgaccactctcacctccaatgctgccactgccctaatccaagccccaacttctctcacctggaagctgcatggatccccacagctgccctccagcctgttccctgccagcagcagtgtgggggaagggacctttaggatctcaattagaccccacccctccccaaaccagaatccaccagcagctcctcatcacacccaatcacctgcacctgctgtgagtgaggatcacttgaggccaagagttcaagatcagcctgagtaacaaagtgagacctcatctctacaaaaaatagaaaattagctggctggtgtgcgtctgtagtcccaactacttgggaggctgaggctggaggatcacttgagcccaggagtttgaggctgcagtgagctgtgatcacaccactgcactcca

SEQ ID NO: 822944 - DNA, 494 bp, Homo sapiens
ccctggcctcccctttcactcactccacttccaatccatcaagaaatcctggcagccccacctgcaaagtcagtccaaatctgaccactctcacctccaatgctgccactgccctaatccaagccccaacttctctcacctggaagctgcatggatccccacagctgccctccagcctgttccctgccagcagcagtgtgggggaagggacctttaggatctcaattagaccccacccctccccaaaccagaatccaccagcagctcctcatcacacccaatcacctgcacctgctgtgagtgaggatcacttgaggccaagagttcaagatcagcctgagtaacaaagtgagacctcatctctacaaaaaatagaaaattagctggctggtgtgcgtctgtagtcccaamtacttgggaggctgaggctggaggatcacttgagcccaggagtttgaggctgcagtgagctgtgatcacaccactgcactcca

SEQ ID NO: 822945 - DNA, 489 bp, Homo sapiens
gttaaaaaaaagggatactcattcgtatccagtccaaccccacagatagcttcacagaggccactgaataataactcagccaaggtttcacagctcaaggtaataggagsagctacactttggggacagtggtgcccccagggttgaacacttgacatgcccattcacaggtagggacaagggggctgggagaggaatggagcagcaagccaggcctccctggtctctaaagccctaaaagcccccacaatgctcccagtagagccctatgctgatgatccccagccctgcagcccccgctcacccacacagttgctttcaggatcctgcaggaagccatccatgcagcgctgcctggcctggcagtagaaggagcccttggtgttctggcacaagaagcccggctggcaggtgtgcgtgcccatcgcacactcatccacgtttgcagcggagaggctgggtgtcaagggctggggggcaggtcctgcc

SEQ ID NO: 822946 - DNA, 471 bp, Homo sapiens
tccctggaacagctcatgatgagcctgtcacttgggaaatgaactaaactcttggagccagttggwtgcaaacttagaaatccactaggtcagcccctcatattcacaggtgcatctgaggcctgcagaaggacagtgccttattcatggaccttggctgtccagttgggaccatcagggtttcacacccttgcctgggctcaatccattgcactgcctcacatggcagaatctctgattttcagcatttacccagaagtctcagggagcctaacaaattcaaaacaaatgttcaaggaattctaccaaagcaaagtcccaaggaacttggaacagagtcatcccaatcctaagaatgctaactggaaaagcaagaggcaccttgtccctcaaatgggtgggatggtctgccctaggtgggcctgggtgggctctcatgatggatctgggctaccccaacaggggatgtgg

SEQ ID NO: 822947 - DNA, 587 bp, Homo sapiens
aatttcctttctctactcctcactcatttttgggacagcaataatccaaagagtggcaacagaaagagcggagggccatcagccagtctcctctcagttcctttcatgggccacaaawtgccttagaactccttcttccccagaggtttccctaaattgccaggacgtatagagattcagagaaaactccaacgatgatggaaaacctttaggcttactccagcctaactctttccccactgttagctgtctacatcacctaactttcagaggagaacgtagaattattgggctttttgtactcatccacctgcactgtgctgtttgcaagactgtgtgggtaatggaagtgatgctggacttagacacaacagacataggttctggttggcctctcagatatcagacaaatcactaaacattaactggggagtttggtctagaggaactttaagtcctttctaactaaatttctattcagatatactcgtagtgggcaaggggcatcaggagatggtagcctggtgactacttactataaaaggatataggtaatgctctaaggttagattatatttttaaaaacc

SEQ ID NO: 822948 - DNA, 587 bp, Homo sapiens
aatttcctttctctactcctcactcatttttgggacagcaataatccaaagagtggcaacagaaagagcggagggccatcagccagtctcctctcagttcctttcatgggccacaaaatgccttaraactccttcttccccagaggtttccctaaattgccaggacgtatagagattcagagaaaactccaacgatgatggaaaacctttaggcttactccagcctaactctttccccactgttagctgtctacatcacctaactttcagaggagaacgtagaattattgggctttttgtactcatccacctgcactgtgctgtttgcaagactgtgtgggtaatggaagtgatgctggacttagacacaacagacataggttctggttggcctctcagatatcagacaaatcactaaacattaactggggagtttggtctagaggaactttaagtcctttctaactaaatttctattcagatatactcgtagtgggcaaggggcatcaggagatggtagcctggtgactacttactataaaaggatataggtaatgctctaaggttagattatatttttaaaaacc

SEQ ID NO: 822949 - DNA, 529 bp, Homo sapiens
gcagctttgataccaatataacttacaacttctgctataatcaagtgtgtgcttctggttacgaagctctgtgatccctggtgaaactaygtctgttctggatctgggaacaatctcattcaatggtcagcttctgatcctggccctgctactcctaccactgtaatgctgtttcttgtagcgtgacaggtgtcaactgttccatcacattggggttgtatccatcaaggtcccagcaggaaacagatggtgtgtttgaaacaggctaatccaatgagggtttcttcatccatttgaaatgctctgtttaatgaaggtgtggtagaggggaactgcagggcatggtgtcataacctgaggctagcagcagagttgttaccagcctcaggcatgcagaacttacagactggtgtagctttagtcatcttgggaaaagcagtaacctttagatggtggggcatctccagcttgagatgatcttgcagggagagagcccctactcttcacagaatcacctgaagtccccatt

SEQ ID NO: 822950 - DNA, 582 bp, Homo sapiens
cactgaaccctgtgctgttgaaaattgatgtataacttttgactccccaaaaacttaactactaatagcctactgttgaccagaagcttaatgtaaatacttgattaatgcatattttgtatgttatgtgtattatgtacagtattcttacaataaagtaagatagacaaaatgaaatttcactaagaaaatcttaagaaagagaaaatatattttgtatctaatacgtgcaagtggatcatcattaaaggtcttcatccttgtcacctcacatttagtagactgaggaggaagagtaagaggagtggttggtcttgttaactcagggattttagaggtggaggaggtggaatgggaggcaggcatatttgatgtagctttgaaaaaatccacctataagtggacctgcacagttcaaaatctgtgttattcaagggtcaatcatagttgcartcatatagtatgtagccctttcagattgtcttcaattagaaatatgcattaaattttcccctgtatgtctttttgaggcttgatagctcacttatttttattattgaataatattccattgtatggatg

SEQ ID NO: 822951 - DNA, 489 bp, Homo sapiens
cttctaacatcaacccaaaaggcaggtgatttctgcatttccaactgaggtacgcagtctatcwcactgggactggttagacagtgggtgcagcccacagagggtgagccgaagcagggtagtgcatcacctcaccctggaagcacaaggggttggggaacttcctcctctagccaagggaagctgtgagggactgtaccgtgaggaacagtgcattctggctcagatactatgcttttcccacagtcttcgcaacccacagaccaggagattccctctggtgcctacaccaccagggccctgggtttcaagcacaaaactgggcggctgtttgagcagacaccgagctaggtgcaggagttttttttttataccccagtggtgcctggaatgtcagcaaggcagaaccgttcactcctctggaaagggggctgaaaccatggagccaagtggtctagctcagtggatcccacccccatgaagcctagc

SEQ ID NO: 822952 - DNA, 555 bp, Homo sapiens
gtctcctatgattataatactatatttttattgtactttttctgtatttagatctttttcaatttcatttgctagagaaggggtctccttctgttgcctaggctggagtgcagtggcaagatcatagttcaytgcagccttgaactcctaggctcaggcaatcctcccacctcaacctcctgagtagctgggactacaggcacgtaccacaaggcccagataattttttatatttttttaagacattgggttgctatgtcgctctggctgggctccaactcctggcctcaagcaatcctcctgccttagcctcctgagtacctggaattaggcacaagccactgtgcctggcttgtatagatacattggatccacaaatgcttgccactgtcttccaattgcctccattactcagtacagtaacatgctgtacaggtttaccgtccaggagcaataggctataccctatagcttaggagtacagtaggctataccatctaggcttgtacaaatatgctctatgatgttcacttgatgacgcatttcttagaatga

SEQ ID NO: 822953 - DNA, 625 bp, Homo sapiens
ttcctgcctctgattggagccacacttcttactcatcgtctgcagttttggagttgtatacattttctagtgttacataaaatgttgtttgtggggatttttttttgttgtcatatttccacattatttctttgtatagtattcaagagaagtgggaggttcagaacaaaattttttatactcttaatagaaccagaagtcctgcaaatgtattttaaacatttatttctttacagaaaaattcttctgtgtagatatgatagattgacaccttgcatcccttccaaccttcttctggcgcatcttcctgtactcctggatcccttgcaaaagggttctttctggttgctagcttgaagttctggctatcagaagtagtcatacaggattttgaaggccagtgaggcataggccatctgcctgctgttcagcttttcagctgggaagcacaatccttgagacctttgggtttttcttcatcagagatttagcagccagtcacttgctttattggtggtgagatgcagctatggcagctgcagcaycacgtcctcttctctggatctagcttaaggtggtgtgcttttgggttttttgtttgtttgtttgtttgttttgttttgag

SEQ ID NO: 822954 - DNA, 625 bp, Homo sapiens
ttcctgcctctgattggagccacacttcttactcatcgtctgcagttttggagttgtatacattttctagtgttacataaaatgttgtttgtggggatttttttttgttgtcatatttccacattatttctttgtatagtattcaagagaagtgggaggttcagaacaaaattttttatactcttaatagaaccagaagtcctgcaaatgtattttaaacatttatttctttacagaaaaattcttctgtgtagatatgatagattgacaccttgcatcccttccaaccttcttctggcgcatcttcctgtactcctggatcccttgcaaaagggttctttctggttgctagcttgaagttctggctatcagaagtagtcatacaggattttgaaggccagtgaggcataggccatctgcctgctgttcagcttttcagctgggaagcacaatccttgagacctttgggtttttcttcatcagagatttagcagccagtcacttgctttattggtggtgagatgcagctatggcagctgcagcatcacrtcctcttctctggatctagcttaaggtggtgtgcttttgggttttttgtttgtttgtttgtttgttttgttttgag

SEQ ID NO: 822955 - DNA, 611 bp, Homo sapiens
aataataaagaccattcccttttgtggccaaaaaacaaaccaactccwtctagcgatcaaataaggaagaatattcaggagtaattataagaaattattgccttataaattggcttcagaacgtaagttttgcaaagaggtgaatccactgtagagaaaattataacaatgaaagaatggtaaagtaacttagtcattttgtgtggaggagacataatgaacgacagaagtaaatctggttgggaagatgcagttagtcaaggacaataggactcaaattttgtggctggagcagcaaaatcaaagcaataacaggaaataaatggtgactgtatgaattaggatattctatcctccaactaacagaaatttcaatggctaagactaatcaggggccacccctgtaaggcgttagcttctcagtaataatacactgctgcatggaggaagggtggaaactctgccaaatctcgattcaactgcgaaagatgaaggggaatagatgatgggtgaccaacaaccctactgtgcatgatgaattgtgtatggagggaaaattctgtgaaaggtgaaaggactaaatatactatgacaataattgtattaattta

SEQ ID NO: 822956 - DNA, 594 bp, Homo sapiens
aatgaaattattttcattataaattacccaggttacagcaacaaaacatgaactaagacacattataaaaagaaaagctgaaggataaattagtagtcatctcacccaacaggcagtgctattcttggagcagagtatggaaaattaacagaaagccaaagaaacgtgaaagaaaccaaggttaaggttccaggtactgagtgtctagtacatgccagaaagcagactaggttctttatatctactatcttaaagccctagcagccttaccaaagttcctacaagaagaaagtggaagcttcctttggtggagcctatacgacagctttggtgaagcatatactcagcagggattctggaagaaggttgtggtcagctgagaagttcccatgagataagtgctatccaatagaacaaaaacgccttaaatatatgtacagttgacctttgaacaacacaggggttacagatgccaacrccgatgcagtgaaaaatctgagtataacttttgactcttcaaaacacaattactaatagcctactgttgaccagaagccttattagaaacaattaacacatactttgtatgttata

SEQ ID NO: 822957 - DNA, 539 bp, Homo sapiens
gggcccccctcggtggcatatctcctgtgtagaataaatctccatggcaaaggttcttaaaaacttagaccttgggaccaacgccctgatagaaatgggaggtgctaatgagacaattagtacaacgtgaatctgtctttgcagcccccgcaggtctctgttctgcacagaacttggagcattaccagaaaatgttggtgatggagtggggcattttccatttggagaagtgatttttattattattacaggcttttgtcagtattacagaaattggggggagaaaaagaaaagggactaatcacaaatgctatttaccaagccacattagtcaaaatactgcattttaaaaccccttaagttgttatacatcatcatataagtcatcgccaagtagtaatacaaattcttgagagttatgwtgacatggaatttgtcagccgaagtgctggaaaatttacctctgctcatatatctgtagtcatatcctccaaagaaattaacatataataatgctaatatttcaaggtaatgttttc

SEQ ID NO: 822958 - DNA, 601 bp, Homo sapiens
atcattgtaactttacattttttgtatggtgatttcactaacctctgcttcacctacaaaactgtcagcaccatatgggtagagatcctgcctgctttcactcaatgctgcrtccctcttccttgcatagtgctggatactgtagtctgtactcagaaatatttattgaatgagttgaagggtaaataaatgaatgaatgattgataaagatctataaaggaaaactattttgaatatattttatgtgagtttaatgtactgtgtagacctctaattagaaagcatagcatagaacttggttaccagtttcttcaggattttgaagacgaattgaacaataaaaagttaagagctgatatcaaggacctaagctgtattttcatttcatcaccttgaattgaaactttggaactgtgggacatggaaggaccaacaatgggcaggcatttctcaggggaagactataaataaaaaacatgaaaagggtttgttgtttctttactaaactgcttatatgagccaactgatgagttctgttttacccataacagccttaatttcacatagacagcattatattattgatccacatattttatt

SEQ ID NO: 822959 - DNA, 614 bp, Homo sapiens
gacctggaatatttacgttgctgggacccaggttttaccaggcagatggggacaatgcattaggggatgactgagcaacaagataggaggaacatgattctcctgtagagaagagttgccctggctggactgctatgagtaagagaaaggcatctctgtcttatttaatacccactttatgtgtgtgatattgttccacttttaaccctaaacataacgatcatacctgtctctaaatatttcactacatgtaacagaagtatcattctgcccaccttagtaaggatatccaattctgagaactcagatgctccacttctgttttttaccattttcttcttttcctttcccttccccctccttttccacttcctcgtccttcacgctgtactgagacatcatttagttcatcttattaaaatgtacaattaaactattaatagtaagtttacagagttatatggccatcaccaaaatccatttgtagaacttttccatcacccaacaagctctctcaagtccaatcaattgacagttccatactaccttcaagccaaccacgaattgtttctatagattagcmtcttctgggcatttcattaaatggaattaga

SEQ ID NO: 822960 - DNA, 627 bp, Homo sapiens
gaatccaatggacacgcagcaggtttctgtttatatgagaccatttgggaattatgttgtggttcctggcattccaggcatttaacattcttcacaatttggttcttctttttctagatcttggrtggcataacttcaaaaccaagggagatggaggagttttagaggagtagaaggctgcaagcaagaactgatgcattacatctccagtcacctcactctaagattgtcctgtagctaagactgttgaatgagactgttgttcttcagtttgcagccacaaagcacggaggcatctccccaagaatccactgcagggaggatgaacagcccttacctggatttttgctttatctaaaaatatatttgtagaagaaggagcattctagtttccaaatacaaagggcaatctccttctctgtgtgtgcacgtgcaaacaaacacacttctacaagtaagcattcttctttattatcatagtcatcatcatcactgggttggcaactaaaaacaaaactacaaaactctcatgttagcagttgagtaacttttaataaccagatacaaaccattcttcattgtttacaaggggcattaaaaagaaaaggaggttgaactgcaatgtga

SEQ ID NO: 822961 - DNA, 588 bp, Homo sapiens
ctacattcctcaaatcaacatgatttacttaatgtyagtctatcgcctgcttttaaaaactttttctctccttttgcttttctttctctcttacttactttttatttctcagagaatttttgtttcttttatcatttcatggatttattttgttagttttagttcattcatttctcaaacatttactgcatacctgttatgtgtaagatcatattctaggtattgtaaaagacagaaagtaggtgaacatatcatttccatatacaagactcttacagtcttgtaagattgaagacaaattcacaaaaataacagaatgaatctttattgcatgtcagaccctctaccaagtttttaacatgttatctcacttaaacctcatgatatctcttgttaacttcattttacaggtgggaagactgagatttaggaaggatcaataatttgtctaaggttaaacagcttgtgtatgcgggggctgagaatccaatctcagtacatttggccacagagcctgagatatgcttttttagacttgcagtaatattaggcaaaataaggcaagtgttaaatatagaggttcaaagt

SEQ ID NO: 822962 - DNA, 568 bp, Homo sapiens
ctatggaaatgcagcttcatgacaaaaaccttgctttctactatctgccatctctcagaaacttttaaaaagacatgtgaaatcactctatttcctccaaataaactgaattatcaatgttaatgggagacagggataaggtaaaataaagctcaagtaattaaactattttattgtaaatattcatattacctccgagctaatttttactagaggtgctggcaaattcaaaacaaaataaaaattagtttcagattacttcttactcactagctaggtgacttcctaaccaatcaacttactcattctcacatcaaattcagaattcaagcttgtgtctcagcaaaattacaaatttaatggacctctagaatgctttaaatatagtggaaccacaaatgttacatccacatatgccaagagtttattttaaggscttcatcacttaatgatgaagtcattggtttgactctcagacaactgataggataataaatatgtagttaacattagttcaattcacacctcatctgaaagatcttttgtttcactcccattttagaagtcc

SEQ ID NO: 822963 - DNA, 622 bp, Homo sapiens
gcatgtgatgcctagcacacatgcccaggcccactgaaaatagaagctgtcctgatcaactatccaggcagaactttcctttggtctcaaaattwttctggcgttgttactaggctatgactgctgtatatctgtttagatagagaaattttaaaaaaaagtagtttaagtttaatagatttaaacctgccacaggatctacacaaacatatatacatattttttactgccttggctaataatcagcaacttaatgaaaaactgaagtatttaacactaggatagtaatagcactgaattagagattttatggattttttttttcatgtaccatctatacatcctgtgtcatcttcccatagactgcacaggggtagaagtttttgtaaagtgcctaaaacaatgttaagcttatagcagtgaccaataaatgtttgtggtacgaatggaataaatcttgaggtaccttgaaatttagcctaatgcaatcaatcattagaaagatgattagaaaactgtgtaaagatatttaaaaatccctttgagcaaaattaattgaaaaaatcagaatacagaattaaatacatactttgactacaatcaagtgtgaaagtaaaacatg

SEQ ID NO: 822964 - DNA, 553 bp, Homo sapiens
aatttggttaagccagatagatagtaccatcagcactactgcagagcatgcaaagctttatgcatttcacaataatatcacaatagggcacctcatggatcaatgaatgtaccttgcttccttttgtttttaattacttgcagttatatgtattcaatgtgatatatctatacacacatacataatttaatatatacatacatatatacatacacatatatatttgtgtatacgtatatatgcttccaccatctaagcctgtaccaatataattggtggcagaacttttttttaacaaacttatttggacccagacctggctccagcactggtgtgggttttttttgttgctgtttgtttgtttgtttaagatttagggggtacatatgcaggttggttacacagacataaggatataatgaatakattgcataatgtgctttttgtgcttgtattgaacccaaacagtgaacgtagtacccaaaaggtagttttacaactcttgcccccctccctccttctcttcttttgaagtctcctgtgtctatttttt

SEQ ID NO: 822965 - DNA, 620 bp, Homo sapiens
ttttaaatgaataaaacatacattttaaccaactataaatattgaaaaaacaaggctccatttcacttattgcttatcaataacttaatgaaataaaaaatttgaaaagccataaacagaagagtcatatcaggatgaatgtaaatgccttttagcaaaatatacctctaatatatcatatatatacgctgatcgtgttttcataaacgtatgtgatatatcagttcaatacgtgcaatactgtatataaagctatcaagagaaaggtagaaaagccaggcaaatcatctttatgggaataagatgttattttccctgaatttcattcagtatacctaattacatttcagtaagaaaaaatatagcatttaatttaaataggacttacatggtgaatgctgatatgcattggaaataatacgtaaaaaaagtttgtgttaccattttttaggaatacacttttacataaatatatattctcaagttgttgatactaccagaatatgaataagagtaagagtaaaaacaagtgtcaattttcaattttatcattttatccatgtcactaagaagcaataatatctaatacaggtgggmatggtcaagggatgtaaaggcag

SEQ ID NO: 822966 - DNA, 548 bp, Homo sapiens
tcctttgtcagatatttgatttgtaaatattttcttccaaactgtagcatgtcttttcatcttttcacagggtcttaaaatgcacaaaagtttccctttctgatggtgtccarttttcaatttttaccttttatggatagtgcttttggtgtcaactctaagaactcattgtgtagacttaaatccctaacattttatcctttttttatcctaacagtcttacattttagattttatatttaagtttgtgatccatgttgagataatttttgcatgaagtgtgagactgaagttaaaatttttttttttcccttaacatttggatgttcagttgcttcagcaccatttgttgaaaaagctatatttttctccattggattacctttgctcttttgtaaaaaaatcagttggtcatatttgtgtgggtatattcttgattctctgtccatatgagatatgtgactatccctctgcccatactacacagtattgattactgtactgtataaagtctttgaattgggtagattgattctttctactttatt

SEQ ID NO: 822967 - DNA, 535 bp, Homo sapiens
atttcagacagagcagacttcagagcaaggaaagttatcagggataaagaggagcattatataatgatgaagaggtcagttctccaaggagatataaaaactttaacatatatgacaacagattgtcaaaatatgtgagacaaaaactgatagaactgcaaggaaaaatagatgaattcactcttgtacttacagactttaacactctgtcagaaatgaacagatccagcaggcagaaaatcaataaggacataatttaactcaacagccccatcagtcaactgtatataattgacatctatagactactacatccaacaacaacagtttacacatttttcttaaattcacatggaacatttatcaagatagatcaaattctgggctgctgaaaatacacctttagaaatttaaaattacagaaattaaaaaatgtctgccctcagaccacagtggaattaaactagaaatkgacaacaaaaaggtagctgggaaatccccaaatacttggagattaaacaacatgtttctaaat

SEQ ID NO: 822968 - DNA, 599 bp, Homo sapiens
gaggaaataggtatgtgagtttcactcatcatcaccagttcttttagttatgtcacttggactcaaaagtacattttccataaaaaaatgaaacaaaatccatatttttaaatggagaaatgtaaaaagatgtgatctacaaaattattacttcttgttttctgccaaacagccagatttgtttttcaaatgtataattaattctaattaatcttgtgttcttgaaacactaactgctggagaagtttgagaaaatacaccagtatgcctgtctatagtctgtagactaaaagcgctgttcagaagagatatatctgccacaggaatctcatgtgaacagagaggagagttgtgagactggaaaggatgaggaatcttctctgatgcattgtggatggcctgtgggcatagggcctctccttttaggtttatgttggtttccagccttagtgcctaagacctcagagaaaaaggtattctttsttttctttctttctttctttctttcttttttttgagacggaattttgctcttgttgcccaggctggagtccaatggcacgacctcagctcactgtaacctctgcctcccaggttca

SEQ ID NO: 822969 - DNA, 600 bp, Homo sapiens
tctccattttacagatggtacaactgaggctttctctaggtaactggtgctaggaggaaacctaaatttcttagctccagatgcaaagcactgttgtttctgtggatttggcttcttgtcacatttacactcttgaccgcctctgaattacagtaaagtttatcattgtgttaacagaaaatacttttttctttttgtgtccatagaaagggtttaacttaccgttttttgagtgacattaagaattagcaacatagaaaatgatttcccacacccccactccctgccatattgcctttttcctgggattatgtctcaaactgaatagatttacgaagtgaggtggagaagggtgttttgtgggagttacaccctcctccaaatacttctaggttgtagtgttttcctctgaagtagatagctaatacttaacatgagaggaaaagatattaaatattataattagttttaaaaaatataaacagaaccaaatctttagctctttgcaaagtctatgttttctaataagcttattcccccatctagagtttyccatcagtgggaatattatactcttcccatagtatagaccctagtgtg

SEQ ID NO: 822970 - DNA, 627 bp, Homo sapiens
gacattctctgttaaacttgtaccttagagaatttctctctctgttttctccttttttctagtagtagattactgttattatttacttggtacttgctttcctggttggcgggggaggtgacagartgctttctgaggttctgttttagtttgagtcctaggcatgtgttgtgtgcccgggtcttgattgtggagtcttagtaagcctgcttctgagcagcttagctgagcagggaagtctcagttttctagggctgctgaaacaaattaccattcactggcttaaacaacagaaatttattctctcaaaatcctgaagactataaattagaaataaagctgttagcagtgttgattccttttggagacgctgaagaaagatatgttctatgcctctctcttggctactggtggttcccagaatccttggtcttcctcgggttgtagataaatcactccaatctctgcctccatcttcatatagtgttgcttttctttgtgtttctgtgtcttcacatggtcttgtttcaaggacatctgtgatgatatttaatgcctaccctaatccactatgatctcatcttaacttgattacatctgccaagaacctatttctaattaagatca

SEQ ID NO: 822971 - DNA, 634 bp, Homo sapiens
tagaagctgggaatgacccctggcttacagtgagtgagaaaatcaagaccccagtcctataactacgagaaactgaaatctgccaacagcctgaataaagacaaaacatgcttccctagaataaacaggaaacatgcttccctagagcctccagaaaggaaggcagcctgccatcatcttgagagtatattgagacccatttcagacttctgatctacagaactgtaaggtaatatatttgtgttattgtaagctactaaaatgtgatgatttgttatgctagcaatggaaaatgaatacattgatgctttaattttctttccaagataagaagtaaattggagcatttaattttttatttacagtgttattgaattgtgattagaaaatgtgatctgtttgtttttgtttttaaattttatcaatatttcctatgggccctaatatgctaatgtagtttttatctcctgacaggaccctgattaacattctagtgtatgtaaatatctcaatttttatttgaaaataatacacattcaccatttatcgggtataaaatgcaaygttgctatgtggaactattaaataaaacttagttatttaaatcctttatatttttacttaatttttttca

SEQ ID NO: 822972 - DNA, 640 bp, Homo sapiens
acaatattaaactttttgcttctagttcccacctgctcagcttgcatcttatttccttgacaacaagtttaaaagaaagacagcaatgagaaatggaatgtctggggcagatttttggacayaggagataaactccaagtgtctaaatttgcacatatatcagcctgtggtctcgttctgatcttcatagtaaaagtacattcctttgttttatcctcactcaatctcttcttccatttccccactgaggactgatcagactctacttcagccatagcctcgatagcgaaatgaattccatcgtccttttcagtgaggtgtcatttgtcaactgaaataagggcctcaattgtaagggggaagcccttaatatcgatagacaacctccggctatcaacgcctcactcttaccctgcaccggacacccccgcccggctagctaggtgtcagaggtaacattcctctcggaggattcaataccctccgtggtgaccccttgactctgtttgatgactttcattacttatctctggattttgaggaaggtgagattcttaagcttagtgggggtgatggagggagcaaccaattggatgctgctcagcgctaaaaaagaaatggattgaggatgaccttattt

SEQ ID NO: 822973 - DNA, 649 bp, Homo sapiens
gccttgttttcacttaatcatctctttaaaggccctatcttcaaatacagttacattctgaggtactgaggtttagggctttgacayaggaattttggagggacacgattcagcccttaacagccacccaaaaattttgaacacctttcctgtattttggggagtttcccacttcaggagtgcatactttgagatggtagaatccagaaactgacattttgagcatatgccaggaccctgcaaactcctatgcttgttgtgtacaacctcagaagatggcttgcacataaaccacaatgagaaggattccttgcagggtttttctgtgttcagcttgtccagcatatgacatagacccattgttttccatcattttgaaactactgtcacagagcaggtattgcagctgggctcactgggcagtggacagggtcactcaagtttctgtctctggaagttgcacagtcctgctcccaacagcactgaaatggatttctgctttgtgacagtagtttcaaatggattggtagatttaaatgctatctcactgtgattttaatttgcattccctgatttgtcaattagatttagcatcttttgttatatgtgtattttgtttctgctccagtgaaattcattttttttctat

SEQ ID NO: 822974 - DNA, 641 bp, Homo sapiens
tctattccttcctaattcctactgctaccactttaaccaatgtcttgtaatattgtaatattccttcccygttgcttccagtctttcatcccctgaattatttaatttaagtggctgattttctcattagtatgagtgctttgcacataggttttcacacatttttttctaatgggtgaatgaaagtcatcgcttagtagccttttggaacagactgacagcatgtcaatgaaccttgcaaaatcctgttactcaaaaataataataggataattagcctcttgattgagtcttccatctcaccccatattaaagaaatagtggctagcattctcctcatttggattcctgaaactggattctgtttttaaatttccttggaggagattttcttataatactcattcttaagtgtttgcagtcttaggctagtgaaatagtacaatctaatgacctgctcgagagttttctttatctcaccctgggtaagttattaaataacttttatattttttcttagatatcttaatgcaattcagacaatgtgtccacacattcttcgctatttgactacagcagtcataacaaacaaggatgttcgaaaacgtcggcaggttctaaaagatctagttaaagttatt

SEQ ID NO: 822975 - DNA, 649 bp, Homo sapiens
gccttgttttcacttaatcatctctttaaaggccctatcttcaaatacagttacattctgaggtactgaggtttagggctttgacacaggaattttggagggacacgattcagcccttaacagccacccaaaaattttgaacacctttcctgtattttggggagtttcccacttcaggagtgcatactttgagatggtagaatccagaaactgacattttgagcatatgccaggaccctgcaaactcctatgcttgttgtgtacaacctcagaagatggcttgcacataaaccacaatgagaaggattccttgcagggtttttctgtgttcagcttgtccagcatatgacatagacccattgttttccatcattttgaaactactgtcacagagcaggtattgcagctgggctcactgggcagtggacagggtcactcaagtttctgtctctggaagttgcacagtcctgctcccaacagcactgaaatggatttctgctttgtgacagtagtttcaaatggattggtagatttaaatgctatctyactgtgattttaatttgcattccctgatttgtcaattagatttagcatcttttgttatatgtgtattttgtttctgctccagtgaaattcattttttttctat

SEQ ID NO: 822976 - DNA, 217 bp, Homo sapiens
cttaagatagggaaaatttagttcttgttcatgatgtccaaagaagcttagttcatcataatgactcagggcctcaggctaatggaagctccatctgagcacatgttttgatggttgaccaggcaggaaaaagatgtgcaggatcatgcactgaaatgacacactttattctgyccacattttattggtcatagccactcatataattgggcctaat

SEQ ID NO: 822977 - DNA, 585 bp, Homo sapiens
ttacccatagggtttttctaaatttcaagccccaccttcagatattaggaagccacatactttacctttgtctcagtaagagccagctatcakgcactacctctagtctttctcaaaaacatttggtgaaggcttgcggacaaaaatgttggtgcagatatcatttgttcctgtcataacctgggattctagactgccactccaatatgcattcagactttcactttttgaaatgtatttggttgctttttatcagcatttacagaattttctacccctttcaggtgctctgtcgaggagaaaagcagagatggcttccttctttctcagtaggggtttggcatttttttgaattttttttaattcagctttccaatgggcttccataaactgtgattttgtaggttagaatatttttattatttgggtgggagtgacattctcttgtgactttctgtatcctacagggaaagatgaagctggcagattggaatttttatacaactttgtttactactaattgctttcttacctagtgtatctcacaaagtagaaatagtcatagcaaacatatgtttagtaata

SEQ ID NO: 822978 - DNA, 637 bp, Homo sapiens
gagaagaaaaatagtagggagaaaagattcaaattaataaaatcaagaatgaaataggggcaygggggtggtcatcactactgcgcttccagaaataaaaaggatcataagggaatagctctataccaactaattagataacttagaaaaactgacactttcctagaaaaactactgaaactgaactgaaacgggaatagaaaatctgaataaatctacgaaaacaagagatcaaattagtaactaaaaaattcccacacaaaataaaagggccaaaatccagacagcttcgctggtaagttgtaccaaacatttaagaaaaattaataccaattctcatgaacacttcaaaaaatagaaaagcaacactccctagcttattctatgaagccagtgttaattttcatgtcaaaacctgaaaaagacaatcacaagaaaaataaaatacagattaatattgcttatgaatatagtttcgaaattcctccactacctaacactgccaaacaaaatctaacatataaaaataattatacaagatgaccaagtagaattgattccacaaagtcaagtgtggtctgacttttaaaaatcatttattgtcatatgtcatatcaatagagtaactcacaaaacc

SEQ ID NO: 822979 - DNA, 293 bp, Homo sapiens
agttcagggcccttcacaaaaaccagctgcccctgttccttctgtctttctgccaattagtttcagaggaataccatcatccctggggatgcctcctgccctaacagtcatattccatgagggatggaggtgctggtgatcatcatggcatcctcaacccttcttcttggagctcctctccagccagtcctgactctgtcatggtcttaaggtggtgattacaaagcaggacaccaggttgaaaagtgacatgtgaatgggggtggsatcctgtgaacttaggaccttgggag

SEQ ID NO: 822980 - DNA, 642 bp, Homo sapiens
aacataaagaaagtcaggaaatgagttgccaatcagaaaaaaataatttcaacagaagtaagccatgagggtttgtatcagactaaatttttaaacctttataaaccaataagaaatagacaaaagtgcmcactatgaacaaaataaaagccacaaacagatatttcatggaagaaactgcataaatggtaaattaacatatgaaaaaggactcaacctcatcagtaatcagggaaatctaaattaagtctaccatagagtactattttataactacaaaaatggaaatggggactaagaagtcttcttacattatataaaccaaaaataaaattgtaagaccccccaagcatcttaatggacccctcctcttggccaagggcattccaaagtgaacctgaaaaactagttcaggccatgatgggaagggggagctgaacatgcctcatcataccctcctcccttttggaattactggtagaacagactctaagtctgataaaaaaaaataaaataaaaaacatttacaatctattctctctgaagtctgctgcctggatacctggaggcttcatctgaatgacaaaaccttggtctccacaaccccttatcacaagccagatattcctttctattgataat

SEQ ID NO: 822981 - DNA, 642 bp, Homo sapiens
aacataaagaaagtcaggaaatgagttgccaatcagaaaaaaataatttcaacagaagtaagccatgagggtttgtatcagactaaatttttaaacctttataaaccaataagaaatagacaaaagtgcacactatgaacaaaataaaagccacaaacagatatttcatggaagaaactgcataaatggtaaattaacatatgaaaaaggactcaacctcatcagtaatcagggaaatctaaattaagtctaccatagagtactattttataactacaaaaatggaaatggggactaagaagtcttcttacattatataaaccaaaaataaaattgtaagaccccccaagcatcttaatggacccctcctcttggccaagggcattccaaagtgaacctgaaaaactagttcaggccatgatgggaagggggagctgaacatgcctcatcataccctcctcccttttggaattactggtagaacagactctaagtctgataaaaaaaaataaaataaaaaacatttacaatctattctctctgaagtctgctgcctggatacctggaggcttcatctgaatgacaaaaccttsgtctccacaaccccttatcacaagccagatattcctttctattgataat

SEQ ID NO: 822982 - DNA, 660 bp, Homo sapiens
atctctgttagtgcaccagaggactggatccaacctgatcaaattcttggaccttggacaggcctgattgtttaggtcatggtagacaatctttggcacatgattctagcaagagcctttaatacccattcagacttatgcaagtattacaagaaaaatgcaagtatatactaccaatggcctcttctcttttttttgttttcttcagaaatcaaggtaggaaaatttgatttacctggaatttgtagaagatttcctctttcagttacgatggagttttgtggcaaaccagcactcccttcgaaaagaagtagataaaatctggtttaaaggaattctgtttgaagtctttgaaaagctaggacccacagggccagctacagaaagcgggtggagagagagagagagagaaagaagatcattggaatgaaacaatttttccccctcagggtatttgctagttcttggcaagggacaagaggctgagaagctggggagagggcagtggttaaaaaccagagaaaacagcagcactttaagtaacctcatgggggtggggagtgggtagacrtgtggagctgtccaggtattttgacttgaaaagccaagattctagaatgaattgagatgtgaactgaacacttggtaaaggttttcccc

SEQ ID NO: 822983 - DNA, 628 bp, Homo sapiens
ctctatggaatttcctcagctgactaagaaagattctttccaaaagaattgctgggcacggtggctaatgcctgtaatcctagcactttgggaggctgaggcaggaggatcacttgaggccaggagttcaagaccagcctggccaacatgacgaaacctcatctctattagaaatacaaaaaattagctgagtgtggtggcatgcacctgtagtcccagctactcaggaagctgaggcaggagaattgcttaaacacgggaggcagaggttgcagtgagttgagattgtgccactgcactccagcctgggtgatagagcaagactccatctcaaaaaataaaataaaataaaataaaataaaataaaataaaataaaataaaataaaataaaataaaataaaataaaataaaataataaaataaaataaaatagaaatgcaattgccttaaaactccctccctaggaatctcatgaaataaccaggaaagattaaccacaagagaagaaactagkagtcctcaccttgccctgacagacttttcatgtattcctccaagggcagctcagagagagtacctgagaggctttatctgaataataaaacaacctttgttcacagtaaagtt

SEQ ID NO: 822984 - DNA, 559 bp, Homo sapiens
ataataataatcttgagtctactgataacattattgatcgagcaattattaaatctaggcacatcctgcaaatgcgatattattaccatcctcatattacagttgaaaaaatattgaggtacaaatagcttgtcaatagcccaaaggcacaaagagaagcaagatttcacccagaacccgtgaacagatcacacaaaatttctcttgttccctggtccaaggaacttctgtaccttccaactacatttctttccaacagagaccttcttggaggatgagaagcagccactagttgacaggaggggaagtgaggcatgtagtcttcaagggagcagaccaccgtgggagttataaaagatcagcgacgcctctgggtgggttcaaaccaccaaccttttagttaacagccaaaagcgctagccgattgcgccacagagacatggctgagctcctratttcgttctaaaagagggtaagctgtcactaaacgctagctagcaccatccgccttttgcaaaatgactgggtaatctccaaagcctcggaaagccggagcagt

SEQ ID NO: 822985 - DNA, 547 bp, Homo sapiens
gggataaaaatttattaggataaaacctaatgcaaacacaattttctctggaaacaccaacaagaggagcaaaagaataagcaaagatgattccaaagaaaatgaaagcgattgcgattaatggttggggaggaagggaggaaactacaggccaagaacaaagaacaagaaacctctgaagcttgctacaaagggagctcttgaccccctagttgaagtcattattatttcatgcctactagggctgccaaacgggcctctctgaacttgagctctgcttttttgaataatacactcccatcatcatgttgattagagtacaggctaggagcatggtataaggtagaaccttttgggatcagacagacctggagctgtatgagttatttaacctcactgtgccacaatttccttgtctgtacaatggggatatgatactacctgcyttaaatgcaatcatgcttgtgaggtacctaacacacttatccctcaataaacgatattattacttctcttagcactatacttctttcacaccacttccctg

SEQ ID NO: 822986 - DNA, 547 bp, Homo sapiens
gggataaaaatttattaggataaaacctaatgcaaacacaattttctctggaaacaccaacaagaggagcaaaagaataagcaaagatgattccaaagaaaatgaaagcgattgcgattaatggttggggaggaagggaggaaactacaggccaagaacaaagaacaagaaacctctgaagcttgctacaaagggagctcttgaccccctagttgaagtcattattatttcatgcctactagggctgccaaacgggcctctctgaacttgagctctgcttttttgaataatacactcccatcatcatgttgattagagtacaggctaggagcatggtataaggtagaaccttttgggatcagacagacctggagctgtatgagttatttaacctcactgtgccacaatttccttgtctgtacaatggggatatgatactacctgccttaaatgcaatcatgcttgtgaggtacytaacacacttatccctcaataaacgatattattacttctcttagcactatacttctttcacaccacttccctg

SEQ ID NO: 822987 - DNA, 536 bp, Homo sapiens
  misc_feature 1, 2, 3, 4, 5, 6, 7, 8, 9, 10, 11, 12, 13, 14, 15, 16, 17,18: n = A,T,C or G
nnnnnnnnnnnnnnnnnnacagaattgtagccagacagccaacttccaagagcagaggtgtccgaggtggcaggaagcttaaggcccccatggggccccctctcacacgcatggccctgtcacaagggcagtcaattgcccatctcctgtttgctttatggggcgcacccagctgaggaggaatgatgggtagaagattcatgtggccctaaggttatgggcaaggaaggaagttctaatttgggactccagagtttgctcgtggcaactgaaaatatttcccgtgaaaggcaaaagaaaagctgaactgacagatgatccctttttttcatggactctgcacccagtcaatgtcactgcctcctcctctgtgaggaagactcttggcagagctgccccatactatccttttgaawgaagactctgttaattaaaaacccctgtgcttccaggagacattttttaggcaaattattgattccaattcaactcgaaggaaatgttccctgcaatcttgggaggactccctgagatgg

SEQ ID NO: 822988 - DNA, 536 bp, Homo sapiens
  misc_feature 1, 2, 3, 4, 5, 6, 7, 8, 9, 10, 11, 12, 13, 14, 15, 16, 17,18: n = A,T,C or G
nnnnnnnnnnnnnnnnnnacagaattgtagccagacagccaacttccaagagcagaggtgtccgaggtggcaggaagcttaaggcccccatggggccccctctcacacgcatggccctgtcacaagggcagtcaattgcccatctcctgtttgctttatggggcgcacccagctgaggaggaatgatgggtagaagattcatgtggccctaaggttatgggcaaggaaggaagttctaatttgggactccagagtttgctcgtggcaactgaaaatatttcccgtgaaaggcaaaagaaaagctgaactgacagatgatccctttttttcatggactctgcacccagtcaatgtcactgcctcctcctctgtgaggaagactcttggcagagctgccccatactatccttttgaaagaagactctgttaattaaawacccctgtgcttccaggagacattttttaggcaaattattgattccaattcaactcgaaggaaatgttccctgcaatcttgggaggactccctgagatgg

SEQ ID NO: 822989 - DNA, 536 bp, Homo sapiens
  misc_feature 1, 2, 3, 4, 5, 6, 7, 8, 9, 10, 11, 12, 13, 14, 15, 16, 17,18: n = A,T,C or G
nnnnnnnnnnnnnnnnnnacagaattgtagccagacagccaacttccaagagcagaggtgtccgaggtggcaggaagcttaaggcccccatggggccccctctcacacgcatggccctgtcacaagggcagtcaattgcccatctcctgtttgctttatggggcgcacccagctgaggaggaatgatgggtagaagattcatgtggccctaaggttatgggcaaggaaggaagttctaatttgggactccagagtttgctcgtggcaactgaaaatatttcccgtgaaaggcaaaagaaaagctgaactgacagatgatccctttttttcatggactctgcacccagtcaatgtcactgcctcctcctctgtgaggaagactcttggcagagctgccccatactatccttttgaaagaagactctgttaattaaaaaccmctgtgcttccaggagacattttttaggcaaattattgattccaattcaactcgaaggaaatgttccctgcaatcttgggaggactccctgagatgg

SEQ ID NO: 822990 - DNA, 627 bp, Homo sapiens
tctgcttgttctaggtaccacaaccaaattttccractattacagactttggttgcttgaggatttcatgtctatttggataaaacagcacaacttttagaagcaattgctttatcatggatgttagtgaaagagagagagagtcctaaatttaaggcaaaataagttgttaggaaaatacagtgacttctcaggaaggttatacaactacatctcagactcaaggacaagaccccagtttatccgatttttaatcgctggtgctcactgcagtatctgtcttcacatgtgttcacagggagcagaaacctgcataaatgaatacatttaataaaatatatttactttcatctaaaaacggcagggttgtaccttacagtttttgcttttaaaaatatggttaacgccagggaaagcaaacaaacttattgcttcagaggggagaagtgacatcacagaggacaatttataaaaagaaataaaacatacactaaaatgagatggaagatgtatgtcatgataccctaaaccattaatttgtcccattctttaaaaatcacagagttggtgatctggtgaaatccatcgctgtttactctctaccctctctaaattgatggcgatggc

SEQ ID NO: 822991 - DNA, 609 bp, Homo sapiens
aattcctcctctcaaaagtgccactgatgtctgagggagttggttgaggttttcctgaagccctgattccaagctcaagtatgattactcatcccattttaactgccactcattttccataagttcaactttaagctgtaggttcaccatctttctctgagccagttgtgttttaaccacatctcctaatcgtggcccagaacacacaatggtggtgcatcacttcagacaacttctagatctctggagagggaggagtgcaaatgaaacttttggtataactttacccttggtttcttcttcttttgtcttatttgttcactttttcctagtttatgcaaaagagaaagagtctagctttgggtaatgaaatccaggaaattactgtcatgtcctattgtgttatacacgaggagatcctgcagaggtttcccagcctggccatgcatcagaatcacctgggaaacctggccaaagtgcagattcccagactcacctcctggccactgggaatcaggtggtctgggctgagacccagratcatacacttctataggcaccccagatgattctggggaggctagtcatgtgtttaggaactactgctaa

SEQ ID NO: 822992 - DNA, 474 bp, Homo sapiens
atagtaagaagaacctagaattggagaagaggttttcaggttcagcgctaaggggtgactttagatctggctcctggtgcagctagaccaggcttattggtacttctcagccatggggagagcaggaggtgcaggtgtctgtggagagcacttacaactccaatcttggggttgggatcccaaaggtgcagaaggaatgaaatcaggctcttttttatttcttcagcaaaaaaaatcttccaccttcttcctgttaggggtgccaggtcctcaaataagaagatggcagtcaatctcacatcatcctgctcctgtggtgacgaatgcatgtcgtggtgaatatcctctcagaggccattccctgctagcacactcttggctctcatcccacccttcccrcttcagcaaaagaaggctggaacccaggcacttgtccatcatagtcacggcctctaaatgttccaagaacttgct

SEQ ID NO: 822993 - DNA, 649 bp, Homo sapiens
ttagacaatcttggacttccccgcatcttgaactgtgagaaataaatattttttgtttataaaacatcattttatgctattttcctttctatatggtgyttttaaaggattttaaaagcatgctccatcagcatacagctttttctcattcatataacagatacatttctgtttgtgtacagcaaagggttagaaccctaataaacttatttatgatttcagaagtgtgctattttagaaatgcacttcatagaacttacttcactgttccatggtattttgctatagcagcctgaatgaactaagacaccgttgcagcaagaattgatatctctattgctttctcggaagcaatccagtctctgtgtccctctccagacaaccccaatccaagcttttggtggctgggttaacttagggaaaactgatttaacctatcttgtgtttattataagttagaggtgattttagaaaaaaaaaaaaaaagaactgagaaaactagaggctgtaaaaattatcaataaaagtgataagattaaaatatgacttcaaaatcagttatttaattgaattccagttatttttaatttttttaaaatttatttatttattttttactctactcctgtgacagattaaggatcctaat

SEQ ID NO: 822994 - DNA, 629 bp, Homo sapiens
atatgttgtgcactgcttgggacacagcaaagtacaagtcacatcttatgccttccaaaacttcataatctagtattgaatctgcttgtttctaatgcgtttgctgttttsacattaaatctcctaccaagacaaaaaaaatagaaagactgtacaaaattaaaaggaaaactatttctgaaagaatcagagcactaacaaggcagtgcaagtttgaaagtccaagatttcagagagaagggaagtctaatgtggtgattacatttacatttggtaacacatttttccttgaggtatttgtaaattaaaaaaaaaaagaaaatatgctgaaaggctgctaaactgaagagaaaaccatagctcagaggctaaaaagataaacagcttttagcagtctcacaggaccagggttttaaaaactagagtccagtcctgtcaaaaagaaggggccaggtagaaagcccataccttcagttggaatcccttaatggccacatccttggaatagagataacccagacataagccagcctcactggttgccataaacaaaagttagtcttctctagaggaagatagcatcatccaatttttaaattttcatacgtaaagtctgacattcaattaaa

SEQ ID NO: 822995 - DNA, 653 bp, Homo sapiens
cagacataagccagcctcactggttgccataaacaaaagttagtcttctctagaggaagatagcatcatccaatttttaaattttcatacgtaaagtctgacattcaattaaaactaatttaacattcaaaaagacaagaattgaccaaattccaaccaaaaaaaacaatagaaacagacttacagtaacagacttacctaaagaatgaaattaacagatacaggccctgaaacaactgaaattaatatatttttttaaatgacaagatggagaattacaacagagaattagaaaatataaaacagtaaacataaatgtttgaagtaattgatgttatttactctgatttgcttattacacactgtttacacatatcaaaacatcgcttaaaaactatattttaagtgaaaaattttaatatttttaaatataataatgtaagaatataggctcattcattataataaatataccacattaatggaagatgttaatacctaatagggaaactgggcgggaagtaaggaagtagatgggcgctctctgtactttctagkcagttttttgtaagctaaaactgctctaaaaatgaagttattaatttaaaaattcactatgcagtaaaaaagtagacaaatgaaacctctaaaat

SEQ ID NO: 822996 - DNA, 653 bp, Homo sapiens
cagacataagccagcctcactggttgccataaacaaaagttagtcttctctagaggaagatagcatcatccaatttttaaattttcatacgtaaagtctgacattcaattaaaactaatttaacattcaaaaagacaagaattgaccaaattccaaccaaaaaaaacaatagaaacagacttacagtaacagacttacctaaagaatgaaattaacagatacaggccctgaaacaactgaaattaatatatttttttaaatgacaagatggagaattacaacagagaattagaaaatataaaacagtaaacataaatgtttgaagtaattgatgttatttactctgatttgcttattacacactgtttacacatatcaaaacatcgcttaaaaactatattttaagtgaaaaattttaatatttttaaatataataatgtaagaatataggctcattcattataataaatataccacattaatggaagatgttaatacctaatagggaaactgggcgggaagtaaggaagtagatgggcgctctctgtactttctaggcagttttttgtaagctaaaactgctctaaaaatgaagttattaatttaaaaattcactwtgcagtaaaaaagtagacaaatgaaacctctaaaat

SEQ ID NO: 822997 - DNA, 501 bp, Homo sapiens
gtggaaaactaaaaattggcagaggctgaatggacaggaatttatttaaatgcatcccctgttcatttaggccatttttcaagcacacaaccaaggaggacaatctgagcttaaacagctccactaaaataaagyacatgtgaaaatggagagttgactctcatacaatgctcacattctggtcatgtcatatggaaaagactacctgagtcagctttaagagactaaggaaggcttgcctaaaatgatgctctacgaagaataaaagaactagtattcctgatttctggattcccagcacattcctcggctgggcaatatcttgagtcaagatgattcttgcatgtcttaagagggtcaggttactccgaaagtaatgactctcattctatagtgtgtgcctcggctgcttttacagggccaatcttgccaacctgtggttttcgtatggtactaatgatcaaaatacctaaatacttttgactcttgaacaatctgaac

SEQ ID NO: 822998 - DNA, 607 bp, Homo sapiens
tccctgatttactggtggttttgaagttttagtctctcatgattatgttatggccatagtgcaggccattggtcatctgagtggtgccagtggtttcgttggatcccagaggaccaaggccactcaataatagccactccttgagctgtctaacaggaagatcagcatttccagagaggaaatggcattcattatgtaacccaggatggaaggcaatgatttttcttaaagacatctccttattagtgttgtataaggaagttcaattgtgactgctcactattctctgattgatttcaaaaatgaaaaaaattgctcgtagcagacttctgtaaagggatgttagtggagaaaatcattgactattagactattagagctggaagcaccttagtgatatcatctagattagtgtttttcagactattttagtaacttgattttttcctccaagtgcaattaatcatatgaccaatcccaataagtaaaataaaaaaaaatctgcttaaacttctttccttctwctgctaagaaaccctctatctagtccaacattctaaaactaaggccaagagaaaggaactgatgtatcgagagtcacccagct

SEQ ID NO: 822999 - DNA, 529 bp, Homo sapiens
acccaccaattctggacacartggtgtctgcagggcttctccacgattacactactcattttcctttgcacttaataagcatttgatggagaagtgctttgaattcgtataagttcattcatcaccaaagtttttctttagagctttgttaccaaaacaccagggtttcagtctacatcctgttgattgctgcacagaaagccaatcgctgagatgacagatactgctgaagaagactttaatcgggtgctgcatctgagaggatgggaactcagcctcaagtccgtctccctgttcactaaaactaggggcttagatagcagggaagaaatgtaacaatgtgtaagaaagtaggaactagggagggggcaatgaggcatcaggtgctgtgatctggtgagtttcggttcttcagtactattttttgagaggcctgaaagtcctttcctgaggaaggaactaggataaaacaaatacaggtttcacgctttaacagtagaagggtcaatttctagtctatgtttatcca

SEQ ID NO: 823000 - DNA, 594 bp, Homo sapiens
tgatttaccctgtgttctcacctttcttatggatccaagaagagttgttgattttttcagtctgttcacttttatttgttaggagaaattgatgacttccaagttccttacatgtggaaaggctaacttyttaaaactaaattgttttttgtttaacaatatataatttttggaagttatttttttgaagatgctgatttaaatatttagttctgcattatccaaatatcttgaatataactactttgcatttatcttaagaagttcactaatgggcatagacatgggaatacctgagaggtgcaggcaggctagctcttgaaaccaggctatgagggcagaaaagaatcttagagatcatgaatttaaactattttcatgttaaaagaacaaaaacaacaaccaaaaacaaaaacaaaacacaaaaaaccctcagaggcctaggtaaggctgactctcttccttcaacgaccagtactcgtctcatctcattgaataccctctccccactgtcagaacctcatctagcacagctgacacacttgtgtctccccagtgaatggtttagaaattcagatctacagacactggagg

SEQ ID NO: 823001 - DNA, 472 bp, Homo sapiens
ttaatttgcatttccctaattgctgatgaaatttgggatctttttttgtatgttcattggacctttgggtttatacttgtgtgaattttctgtttatttcttttgcccatgggttgctcatggtttttttcccactgttctcatgcttaagagtcctaatttcctgtaggttatgtgcattgcaaatatccttttaccatcttttttggctatgtactggtcttttaattttgtgttcatagtatttttgttttacaaaagtttttaatatttagtgtaattcactttatagccatttccctaattttaagatagcttatatgttttccttagaatttaattgtatatggtagtttaaatttttgtcattcattaggacaatatccacacatgtgcttctccactaatattttaatagtattttctgcartgaaaagtagtgtaagaaattgtgcggtaatgacttccaagg

SEQ ID NO: 823002 - DNA, 583 bp, Homo sapiens
gatggaaaaggcacaaagtttgtcagggcaagacatgaaaagaaatgtgttcctattgacggcaattgcgttcggtactatccgaggtttcaggyatccactggggtcttgaaacatatcccttgaggataagggatgactatatgacctagtgtgggtagaactagagccctgggataggaaccacgagacccagaactgaaaaacaaatcagagtgtaggatttaataggcaggacctggtggagttggaggggatttaccaggagaacacacagcccaagagcaggatcacagtcctgctgagcagtgggcgtgcaggaggagcccgggctcctgtatcactggaaggaagatcctagtaggggtgagtggggtgggggatgagaactcctgtttcctctccctggtaagattcaacgagatacgatctttaaagacgcatcaaaatgacaaagggaattttaaaatgcatctttgtcaggggtgcggatggcccacagacatattttgaaacaagctatttgttgtgagctccccggatcctgacctgggatgactctactttgtttcccaagggtaag

SEQ ID NO: 823003 - DNA, 518 bp, Homo sapiens
tttctggaattttccatttaatattttcagactgcagttgatggcaggtaactaaaacaacagaaaatgaaaccctggctaaggggggactactctattcttactcacactttgattytaagtcaggaagcagactaatccgcataaagcaattagcaaactgtccatgacaagcagagacagaagttcagaagagaaaacgcagcagtggtcagagtcaccagggaagtttctaaaaagcgtgtacttggatgagactttgaaggacagagaaggctggggaagtgagggggaagaacaagcatttccggcccacgaggggagcagcttgaatgtgatttctctgcacactggtcaggcttcatcacttactagctgcgtggcctttggcaaattacttaacctctgtcaaccttcttttccctaactgcagcaagatcatattggtacctgtctgtaaggctgtactaatgtaattcttatgatgttcttaccacagtgcttgggtcatataaagc

SEQ ID NO: 823004 - DNA, 588 bp, Homo sapiens
tatccattcccagtcttggtaggcataagtaattaatcccagatgtggcttcagaatccttctcaacatactgttccagtaaactgctaacacttgattgaagttgacatgtaagacacacttatttaccattcctatttgaaaattaatgttttcctgtcctaaatgttaacatattttatatttatcacatcaacccaagtaattaatatttaaaagtatataaaaggctttaatattatccacaacccaatagaaatctttttttcatcacctctccatttaggtaatggtcttgaattatgcattttgggagttgaccttccaaatctagtggtgttaagtaaataactattatctaattacatttcctttactagattaaaatataaaaataaacatctagatttcttccttggtggtggtgtcaatgccacctcaaaaataaaaaggttgggggagtatctttaactgactcaagtttggttgattcaagcctgagataaaaaaaaatgrcatattaaattccaattctagtttagctattctcattttttaaaaaatattcagctcttctttattaagatt

SEQ ID NO: 823005 - DNA, 529 bp, Homo sapiens
attatggaaattaaataattatatataaatcaaatattttcacttctatttaagacctaatacagaaagcttaaatgttcatattgtaaagaggagttcccagtaatgcaactattttgagagmcccaagctaaactggggtttcagtaccacatccaccagcagccctgacccactaggaaatgaaggggaggtggatccacgtgttcacagcgtgcctttcacagctctattacctggtggatggcctaatgtctggttgtctcacccacgaccagaaggtgactcacaaccacgaccagaaggtgattataccagcagatgcccttatcgctcttgtctgacccgtgtgcagtttatgcctgcctggctctccctctggtgccaggagcctgaccttgtgttctccacagctagggaagtccctttttcttcggatggaaggtgcaaaatcaacccaccactacagcagaaaatgagctcaaggatttattactttcagattctgggaaaggagagtgtaatgagt

SEQ ID NO: 823006 - DNA, 601 bp, Homo sapiens
ctcattctttgtatttatcttctttcagtaaccgagtcctattgattcttcttttgaaacgccttctatcttttcattcccacttccrtgactctagaactgcattagttacctatttctatgtaacaaattaccccaacatttagttcttaaggaaaacatttattattttataatttaatgagtcaagcgtttactcatgaaataattggaagtggcttatctgggtgaatctgacacaaggtctttcatgaagtagcaatcaaaatgtcatctgaagacttaatgggagctggaggatctgcttccaagattgcttacacctccgtggatagaaggcctaagttcctatttatggccagatacctcacttcctagccctgtgacctttccacagagaagtttggtatcctcatgacttggcagctgtcttccctcagagcaaataattcaagagaaagcaaaaagacgtaatgctttttgtgacctagtctcctaagtcacatttttctattcattagaagtgagttgctaaatccagaccacattaacagtaaggggttttagggcctaccttctgaagacatgaatctccaagaat

SEQ ID NO: 823007 - DNA, 601 bp, Homo sapiens
ctcattctttgtatttatcttctttcagtaaccgagtcctattgattcttcttttgaaacgccttctatcttttcattcccacttccgtgactctagaactgcattagttacctatttctatgtaacaaattaccccaacatttagttcttaaggaaaacatttattattttataatttaatgagtcaagcgtttactcatgaaataattggaagtggcttatctgggtgaatctgacacaaggtctttcatgaagtagcaatcaaaatgtcatctgaagacttaatgggagctggaggatctgcttccaagattgcttacacctccgtggatagaaggcctaagttcctatttatggccagatacctcacttcctagccctgtgacctttccacagagaagtttggtatcctcatgacttggcagctgtcttccctcagagcaaataattcaagagaaagcaaaaagaygtaatgctttttgtgacctagtctcctaagtcacatttttctattcattagaagtgagttgctaaatccagaccacattaacagtaaggggttttagggcctaccttctgaagacatgaatctccaagaat

SEQ ID NO: 823008 - DNA, 599 bp, Homo sapiens
tagtctaatgatcttccctttgtaggtgacctcatctttctctctaagatgtctttaaaattttttgtttcattttgaccttgtaaaatctgatgattatgtgtcttgyggatgatcttcttctaacttatctaactagggttctctacatttcctgaatttgaatgttaccctctcaagctaggttgggtaagttctaatggatggtattctgaaatgtgttttccaagttgcttcccttctccccatgtctttcagggatgcctatgagtcatagatttggtctctttacataatcccatatttcttggaggttttgttcactccttttcattcttttatttctattcttgtctgattgtcttgtttcagaaatccagtcttcaaactctgagattctttcctccacttgatctattctgcttttaatacttgtgattgcattataaaattattgtagtgtctttttcagttctatcaggtcagttggtttttttctatactggctatttttgctgggcagctcctgcattgttttatcatcgttcttagcttccttggatgggtttcaacatactcctgtagctcaatgatcttcg

SEQ ID NO: 823009 - DNA, 607 bp, Homo sapiens
acaatgatagactggattaagaaaatgtggcacatatacaccatggaatactatggagccataaaaaaggatgagttcatgtcctttgtagggacatggatgaagctggaaaccatcattctcagcaaactatcgcaaggacaaaaaaccaaacaccgcatgttctcactcttgggtgggaattgaacaatgagaacacagggacacaggaaggggaacatcacacaccagggcctattgtggggtggtggggggggggagggatagcatttggagatatacctaatgttaaatgatgagttactgggtgcagcacaccaacatggcacatgtatacatatgtaactaacctgcacgttgtacacatgtaccctaaaacttaaagtataataaaaaaaaaattaaaaaaaaagactgcacccttgtcccccttcttttcaggtctcctttccattcattttaatccagacagctttctttacacatcaaatctytatgatattaaatacttattttatgtataagagatttatcaatcctgtattataatgctagtattttacatatatgtatagatatgcacatatatgtacacacacatacatac

SEQ ID NO: 823010 - DNA, 606 bp, Homo sapiens
ttaatgttcttgagtttctggaatcatgaagctatccacgcaagaaggaagcattgatgaaacattagcaaaatgaaaattattttcataaaactttaagtgtgtttggcttttgaagaaggcattgctagtttgtattgtcttgcatttagagaagtttcagacaagatccggcatgttcagggtggtatggcctggcatacatttatttacctaagtaacaaaattccacgtcctgcacatgtatcctggaacttgaaaaaaaaacaaaaaacaaaaaaaacctttcagtattattttggttgaatacataattgttaatattcataaaatgtttaccaaattttataatatttgtaaaactagcaaccatatacaattcaacataataagcataaatacaaattggctaataaatatttaggtaacatagtgtttcacataactgtgttttgcagaaaatttgagctcatcacttcaggtgttgcaactgctatattaaccagatgagttgaaactatttctaaatayagtatttttttcttcttaaggagagcacacatactcctttattgaaggctcaaaatcattactgcaaatgacact

SEQ ID NO: 823011 - DNA, 576 bp, Homo sapiens
agatagggaatggacaaccttaagcacagcacttttattcatagatgtagcaattctatactgaacacctattatgttccagacatggttctatgtgctgggaaaacagtggtaactgagaaaggcaaagcctctgttctcatgcagcttacacctaaacaaagaaaacatcaggttatcaaataataaataagaacatatcccatatgagtaagtgctgttgaaccaggagagaacattaaaaccagctggcagaatagaaagtgagtaggttgagaggtcaggaaagaggtctctaagaaaagaagttaagtaggagtttaaattacaagaaggaactgaccgtgagatgtttagggtaaagggcaccttgggtggaggaaacagcttatgcaaatacgccaagctgcgaatgagcttggcatccttaaggaacagagagaagggtgtggytgctgaaacatgctgagccaggagagacttctgggagacattttcatggataaagtccggggctacagtatgtgaagccttatagctggggtaagggatttagatttcagtctctttgccaga

SEQ ID NO: 823012 - DNA, 644 bp, Homo sapiens
catattttatttacttgttggagagtaaaataagatagggaatggacaaccttaagcacagcacttttattcatagatgtagcaattctatactgaacacctattatgttccagacatggttctatgtgctgggaaaacagtggtaactgagaaaggcaaagcctctgttctcatgcagcttacacctaaacaaagaaaacatcaggttatcaaataataaataagaacatatcccatatgagtaagtgctgttgaaccaggagagaacattaaaaccagctggcagaatagaaagtgagtaggttgagaggtcaggaaagaggtctctaagaaaagaagttaagtaggagtttaaattacaagaaggaactgaccgtgagatgtttagggtaaagggcaccttgggtggaggaaacagcttatgcaaatacgccaagctgcgaatgagcttggcatccttaaggaacagagagaagggtgtggctgctgaaacatgctgagccaggagagacttctgggagacattttcatggataaagtccggggctacagtatgtgaagccttatagctggggtaagggattyagatttcagtctctttgccagaaagccactctagggaataggggacttgtgtgatctg

SEQ ID NO: 823013 - DNA, 512 bp, Homo sapiens
attttggatattaccccttatcagatgtatggtttgcaaatattttctcccaattgtgggttatcttttcactgtgtttttgttgtttttttttgtttgttttttgctgtgcagaagctttttagtttgctgcamtttcatttctctatttttgttttattgtctgtgcttttggggtcctatatgataaatcattgtccataccaatgtcctgaagcttttctcctatatttcagtagtatcacagttccaggttttacatttaagtatttaatctattttgagttaatatttttgtatatgatgtgagataaaggtccagtttcattcttctacatatggttatccagttttcccaacactttttattgaagacactgtcctctccccatggtgtgttctgggcacctttgtcaaaactacttctggggatatatataaaaaattaaattagtatgtcaaaaagatatctgcatttccatgttcatttcatcatgattcacaatagccaa

SEQ ID NO: 823014 - DNA, 618 bp, Homo sapiens
caagaaaagaaactttaaatcataaaagcatttctattcctttgcaattattctcacttaccagataaaaagtttaacggcagccttcttggcaccagtcccctgggatatttagtccaggcttcctcataaatttttagccgttctaacatattagctgcaaacaaagaaaaattctttgttatatataatcataaattgtatattttttctggaaaattacgaacttctcaaagtatattaaaattctaatatttaaaagaaaattggaattatttgtaatcttacatctactatttcaacaattattttagactatttcttttcaattttttttatcttaagtacataattatctttatcctgttctgctttaggtaggcttttaaaacctgagaacttctttagttctgaaaaagccttggttatcatgtttccatatattgcttctcctactattctccttagcttctcccctctaactcctctcctctgattttggccatggcctctcttccattcaaktaaaatttttattttagtaagtaggtttttcatttcagattcctaattggtacttctcctaactattcatgtttcatggcagcaattacgtct

SEQ ID NO: 823015 - DNA, 601 bp, Homo sapiens
attaaatatacaagaaaaagatgtcagaaatctatcattggcaaccaaaagattaaaagagagttaaaagaaatattaagttttcagaagaggaaaactaaaytctaattttatatgtatcctatgaagcctaaaggaagtgaaaacattatttgcctaactttttaatttatttgattgatttctcttttagactaaaatttagactttagagagaaattaattaggcacaaaagataaggattaaagatataatcctgaggaagaatcaacatgtaccgtttaaaaatacttttggccaggcacagtgcctcacacctgtaatctcaagacttcaggaggccaaggtgggcagatcacttgaggtcaggagttccagatcagcctggccaacatggtgaacccccgtctctactaaaaatacaaaaatagccaggtgtggtggggggcacctgtaatgccagctagttgggaggctgaggcacaagaattgcttgaacccaggaggcagaggttgcagtgagccaaaattgccccattgcactccagcctgggcaacagagtgagactccgtctcaaaaaaaaaaaaaactttcaatga

SEQ ID NO: 823016 - DNA, 601 bp, Homo sapiens
attaaatatacaagaaaaagatgtcagaaatctatcattggcaaccaaaagattaaaagagagttaaaagaaatattaagttttcagaagaggaaaactaaactctaattttatatgtatcctatgaagcctaaaggaagtgaaaacattatttgcctaactttttaatttatttgattgatttctcttttagactaaaatttagactttagagagaaattaattaggcacaaaagataaggattaaagatataatcctgaggaagaatcaacatgtaccgtttaaaaatacttttggccaggcacagtgcctcacacctgtaatctcaagacttcaggaggccaaggtgggcagatcacttgaggtcaggagttccagatcagcctggccaacatggtgaacccccgtctctactaaaaatacaaaaatagccaggtgtggtggggggcacctgtaatgccagctagttgggaggctgaggcacaagaattgcttgaacccaggaggcagaggttgcagtgagccaaaattgccccattgcactccagcctgggcaacagagtgagactccrtctcaaaaaaaaaaaaaactttcaatga

SEQ ID NO: 823017 - DNA, 455 bp, Homo sapiens
tcaagtcttaacttacttaactaaaaaatgtctgtcattttagtcccaaaatctcactattaaaacctttgtcttacagggtttacctggagggaatggacatggggactgggaaggaaaatatgcttttcactttatatatgtctatgttgcattttttagaaacttatgaacaaatatgaatttttcaaataataaaactgtgtgaaaatttaaaactaacaaaaattatggagacagtaaaaagattgggaggagagagggagaaatgagtaggtggagtagagggatttttagggtgatgaaacgactctgtatgatactataatttattctggatgatattgtaatatatttgtaaaaacagaacatacaacgcaaagagtggatcctaatgtaaaccctggactttagttaataataatatatyaatattggcttgtcagttttaacaa

SEQ ID NO: 823018 - DNA, 548 bp, Homo sapiens
ctatcaccctttaatactttctacacaattcctacaaaaccacagaacaaggataaaaattgggtaattaacactgatgtattacttccatctaatcttcagataccctttaggttttgccagttgtcccaaccatgtcctttagagcaagacttccagatcagagtcaggcattgcattgagcgaagatctcttcagtatcatttagactaggacagttcctgggacctttggaagattacaggtcagttatttcgaagaaagtccctcactcaggcctgtctgatgcttcttcttatgattgactcaggctctgcttccttggtgatgccatgtctttctgtgtgtcctagaagatggtagcaataccagtttgtctgatgattattttgaccccttgaaattgatgtcggccaggtttttccactgaatggttaactcttttcccctttataastaagtattttctgaagagaagctttgaaagtaggtaagtattctgttcctcatcaagcttcccatttaaatgtcagcacaggccaggcgcg

SEQ ID NO: 823019 - DNA, 589 bp, Homo sapiens
gaacagagtggcagctagtatagtttggtgccactgctttgaggtgtgctaaaacacaagcagttgtaccaatcattgattttcatcatcagtgaaaacagactcagtgaaaaacacaaatattgtcttaaaataaaaagaaatcaaccattttcttaacatcaaagacccctcaaagggtctaatcaaaccccacagtctatagagcacacgttgaaaactattgttatagagaatatacttattttgacaatttaagtataggatttataatgtttacatcattcaggaatgaaagaaagatgtataggacttgtatgtttttctttgcgtggtttcaataaaatgtttcttgtatctaatatatcttatttagagatatatacacacacacacacacacacacacacagagagagagagaggtgagcatatgaatatttacatattgttaggcaggcagaaaaaatatgattaattttacctccaattgatcagctatttcttataaayttcttcaccctagatatcaggtaaatcctacatttttagtataattaaataaatataatctaatccaacaatttaaa

SEQ ID NO: 823020 - DNA, 626 bp, Homo sapiens
tttatgaatatctgggcctcggtgtcacagcttggattaggaatgttgttcagtgccccgggaattgcatttgccaarctaaaggcatatttctgtgcctaggatgagaatggaaaccagtttttgtatccaaatataatctagacactagatatttagcagaagcccgtctgcaggtgatacattagtcctgggattcagcacaggatgaaaaaacactgcagtggcaacatttcctgtgaccagtggtcaacaaaaagcacatattttcatgccaggctactaggagaaaggactgaaataataatgcagggactctgaggttaatactgagatatcctgtcgttaaggtgattcaccattaggaatccatgtgtgaagatgatgatttttgattattcactctctgtggtttttattgttcaagaaccaggaaggactaaaacaaagaaagtcacattttctggggaattactgctaaattcacagaaatgagccaggtatgacataaatattgagtatctaatttaccgactaatactaacttcttaacaacttcaatttgatttctgtctctttcatacttatgtataatacattgcacttatgttcgtattgaatttccc

SEQ ID NO: 823021 - DNA, 510 bp, Homo sapiens
ggatacaaaatcaatgtgaaaaaatcacaagcattcctatacaccaataatagacaaacagccaaatcatgagtgaactcccattcacaattgctacaaagattataaaatacctaggaatccaacttacaagggatgtgaaggacctcttcaagaattacaaactactgctcaaggaaataagagaggatacaaacaaatgggaaaacattccatgctcatggataggaagaatcaatatcatgaaaatacccatactgccaaaagcaatttatagattcaatgctgtccccataaatctaccattaactgtcttcacagaattagaaaaaaactactttaaatttcatatggaatgaaaaaagagcccatatagccaagacaatccaaagcaaaaagaacaaagctggaggtatcacactacctgacttcaaactatactaccaggctatggtaaccaaaacaccatggtactggtaccraaacagacatatagaacaatggaacaga

SEQ ID NO: 823022 - DNA, 604 bp, Homo sapiens
tgctccaaaggacaatgttaggtcaactggcaaattggaatatagacagtcaatcagataagaagtatactttgattaagtaaaaaaaatccctattcttggaaaatacacaataaagtattttgaggtaamgggccataatgtatgcaatctactctcaaaaaattcagaaacatatatttgtgtgcatttgcatgtgcaacagtacacacaaacatacataaagagagcaattgataaggcaaataaggtaacatttaacaataatctgatacacataaatagagaaagagcaattgataaagtaaatgaggtaaaatttaacaataatctgagcaaaaggtatatgtgttttctttgagacagtctgattcttgcaacttattctgtaagttggaacttatttccaaacatgattgaaaaaaaaccccgcacttggcaacttcttctctttttcagcctagaaatgtctgtgttaagtggttttttatttattgttgttgtttgttgttattgttgttttgttgccaggctccaactcacaaaatacgagtttaaaaactgcgttgttatttttagagatttgtgataatacaacttgtta

SEQ ID NO: 823023 - DNA, 601 bp, Homo sapiens
aatgaaactggatcctcatctctcaccttatgyaaaaaatcaacttaacgtggatcaaagacttaaaaatctaagacctgaaaccataaagattctagaagataacattggaaaaacccttctagacattcgcttaggcaaagacttcacgaccaagaactcgaaagcaaatgcaacaaaaacaaagataaatacatgggacttaatgagatgaaaaagcttctgcacagcaaaagaaacaatcagcagagttaacagacaacccacagagtggaagaaaatcttcacaatctgtgcatctgacaaaggactaatgtccagaatctacaaagaaatcaaacaaatcagcaagaaaaaaacaaacaatcccatcaaaaagtgagctaaggacatgaatagacaattttcaaaagaagatatacaaatggccaaaaagcatatggaaaaaatgctcaacatcactaattatcagggaaatgcaaattaaaaccacagtgcaataatactacctcactcctgcaagaacagcagcccttgaatcctagatcttccataagaatgaccataatcaaaaaatttaaaaaaaatattagatgttggc

SEQ ID NO: 823024 - DNA, 635 bp, Homo sapiens
tttcaagatttagagctccttttagccattgttattgtggtggcttggtaatggcagattctctcagcatttgtgtgtctgaaaacgaatgtatctttccttcacatattttgcttagttttgctgcatacaaaattcttggctgataattgttttgcttgaggaggctgaagattgggctccaatcccttctagcttgtagggtttctgctgaaaaatctgctgttgatcagatagttttcctttataggttacctggtacttttgtctcacagctcttaagattctttccttcatcttacctttagataacctgatggcaatgtgtctaggtgatgatctttttgtgattaatttcccaggtgttctttgtgcttcttatatttagatgtctaggtctctagcaaggccagggaagtttttcttgattattcccccaaatatgttttccaactttagatttctcttcttcctcaggaatgctgattattcttaggtttggtcacttaacataatcccaracttcttgggggctttgttcatattttcttatttttttctttgtctttattggattgggttaattcaaagaacttgtctttgagctctgaattttttcttctacttgttcaatc

SEQ ID NO: 823025 - DNA, 646 bp, Homo sapiens
attttaaaatactttttaaaaagaaaacaaaaaggcaagatggtaaatttaaaccccraagagtatacactacaataaaatgttaatattagaatctgagtatagacatatggatgataactgtaaaattatttctgctttattgtatatttaaaatttccataataaaatgttggaaaaatgcatttcaaccagaagaaaatatatttatattgtatgattaaattcatgcaaagtttaacaggcaaaagtaatctttacataaggtggtcagaataattgttacccttggggatgtggtctgggagagtgcttcataaagtgtttttgggttgctagaaatgttctatatcttgatctgagtgatgcttatgtgtgtgtgtgtgtaaaatttattattagattttacactttttagtacgtgagttattccttacttttgaaaaatcctaccaggttaagttcagaggtcattgatgatatttaaaacccattatttttccttacttatagaaatatataggagaaagcagattctttgctcagtttattatgagaataaaatcaaatctgagtaatttagtgacaggttggatttcatattttagagtgtttggggtctaagttattcagaatctcttagttt

SEQ ID NO: 823026 - DNA, 640 bp, Homo sapiens
gatggtactggtcatcctttagctatgaaggaagccaagctggttatagggaattgttactactatrcctagattaacccatggtattcaattttcatttttttaactagtagattttatataccaaaagcattaataatagtggagaaaatgcaggccattatggctctgtctatatagctaattagttttgtaagttctttatcccattcaaaacgttaaaggtgactgagtaacatggaagaggatgaggtgaggagtaaatgtactggtttaaatcttattgattggttaattagtccacataactagtacatgctattaaaaaccagtcaaatccttatcaatgttccaatgaagtgaccagtcaaattaatgatcctgttcaggctgcttatgtcacagtaaggcatatacaatttgggggaaagtatcaacccatgattctcgctttcccatcatctgccccagatctctgccagggcccagggacgtttggactgaccacttttattattgtttcacagtcgtcagaccaataatagtgctgaagatgttacctatatgatcaatagaaatggccgagctttctgcctaagcattccccacctgccaggataaaaggaagggtataggtagg

SEQ ID NO: 823027 - DNA, 430 bp, Homo sapiens
tcaacatcttttttaagaatgtgtgggccgggcgtggaggctcacgcctgtaatcctagcactttgggaggctgaggcgggcagactgactgagctcaggagtttgaaaccagcttgggcaacaaggtgaaaccccgtctctactaaaaatacaaaaaaattagccgggcgtggcggcgtgcccccgtagtcccagctactcaggaggctgaggcaggataattgcttgaaccagggaggcggaagttgtagtgagccgagatcgcgccactgcaccccacactccagcctggggaacagagcaagactccgtctcaaaaaaaaaaaaattatatatatatatatatatatatatatatatatatatatakagagagagagagagagagagagagagagagagagagcgtgtgtatgtgggagatgaggg

SEQ ID NO: 823028 - DNA, 644 bp, Homo sapiens
tctgatttgtcttattctcacattttgaattgctcccttgttttcttcatttctttcaaaaaaggattcatggccacagtctattatgttcatcattctactctcatcktctagaagagtgcccagtattttgtaggccttccatgaatttgttcaataagtagtcataccttgcaaattgggtagacttttccagaagtgttggtggccagaggtaagacttccttggaagaaaagtaagaactagaaaaaggccactacagttaaaatacatgtagactggataagaaactgggctgagggcttcagcaaatcagagctttaccagctcatcgaaaaaaacagattcaatttggtagaaggtgggtgcatgcaagacattcagttagaaagtggcattgatgtaacaggcacaggaaatgagtgtcttctccactaaaacccaggagaggagtttcattgctaaccttcactggagagactccatgcactaaaggatgcatgatgacctctgtaagaatcagcaacaaaagtttgcaatagaacagtgtacagatgcaggaaccatgaaatagtccatactccatgggaatgaaatgccctggctagaagctcaggctgtgtttttgtccatctggtctgtt

SEQ ID NO: 823029 - DNA, 626 bp, Homo sapiens
ttccatgttttaaaatgcaccattagctaaaaggctgtgtagggtttcctccaagggcactatatcatcagcaatatgtaaatgttgtctttgtcagtttatttttccaggtgaaaactcttcctgtctgtgaaagagggcttttgtgaccacatctccctggtttgcaataaaatcagaagggatcaaattcctttagaaaacgtgctgtctaaacttgaaatctgaaatcgacttgtcagagcaaggggctgataaacaagacctactttaagttaggtccttatctcattttaggaagggatggtcaggggcctgttcccccaaggcatggagcagacacttagagaatattcttctgtctgttgactttaacctgcgctccctcattggaaggtaaacacagactctggtttgggggcatagatagcaattggcctctctccttcgtaaattctatttgtggcaacagtttttaatcaaactatccacaatcatgtcattcaatctcttttccttctagttaaatttttttatggagaataccaacatgggaaaaggtkctggtggcatttaagaggcaccctgggcaaagggccatagaacagggctttgtgttccaggaa

SEQ ID NO: 823030 - DNA, 643 bp, Homo sapiens
ttactaattctttcttttgtgataggaatcttgctattgagacaccctgataattttttttcagtttgtcaattgaattttttagctccagcatttctgtttataactattattattattattattttaatctctgtgttaaattacactgataaaattctgaatttcttctctgtactatcttgcggtttgttgtgctttctcaaaactgccattttgaattccctgtctgagatgtcacacatctccatcactccagcattgggcactggtgccttatttagtcggcttggtggattctgtttttctggatgttcttgatacttgtggatgtgtatctatgcctgggcattgaagagttaggtatttaattcagttttcactgtctggccttgtttgtactcatacttcttgagaggactttctgagaattcaaatgggcttaaatattggtacctaagcttgcggtcactgcagctgtttcagcactaggcggtgcactaagctcaagtatgctaagatccttgcagatgcctagctgcacatccttggtggatctgggttaagataaaggataattccctgggtccayagatcaagtcctttgctctcttccctcgttttccccaaagcagaaagagtc

SEQ ID NO: 823031 - DNA, 613 bp, Homo sapiens
ttatttgtttgttttttatttgttagtttttattttaaraaaaaactaactagaatgaagataagacaagatgatccttaagaatttaaaattaaaaatgtagagattaacagtagggtgcaatgtaaatctatcatgaaagtggcagcctataaagtctgaatccctatacatagcactcaaagcttcatatatgagggctgagcatggtggcttacactcataatcccagcactttgggaggctaaggcagacagatcaactgaaatcaagagttcaagaacagcttggtcaacatgacagagccctatctctactaaaaatacaaaaaaagaaaaaactagccatacctgatgggggatgcctgtagagtcccagctactcgggagactgaggcaggagaactgcttgaacccaggaggcggaggttgccgtgagtgaccgagcaaaactctgtcaaaaaaaaaaaaaacttcatatatgaggtgtttcatgtgggtacatatttctcacttgcattaactcactaagccacatactcctggttaaatatattacgtgcaccacagtgactattcatgaacaaaaaatacatttaaattttcatacattt

SEQ ID NO: 823032 - DNA, 630 bp, Homo sapiens
tttgatgttaaataaatgatagattagacttgcacaatgtttgtcaatttaagaatatataatgaagtttctgtaggatggaaaaaatctgtagtaatttattattttcaggctgtttgtattatatttggaaatttttatattcatttataatagtggatggaggattatcttaattctaaacatataaagcagaaaggttatatttcagaaacacatgtagtctaatctatgctggtatctatttagtgtctgcctaatatcatgtgatgcttttcttctacttcgaattgtaaatgtatagctatagatttggacacataaactgccaagtccttccacaggtatttattattctgtagctgaagaataaactgcagaaaagaatagttattcacaattatatatccttattatagaaaatagaactttacatacacatgtacatgtactttacatacacatttacatgtgctttacatacacatttacatgcacagtggtcactcctgtgatcccagcacttcgaggggctgaggtgggtggatcacttgaggccaggagttcaagaccagctttgccracatagcaaaaccccttctctactaaaaatacagaaactagctgggc

SEQ ID NO: 823033 - DNA, 521 bp, Homo sapiens
atcatttgacaaggttaaaaggtcaggaaagaatttttaattccccccaatgctagaaaataatattttttatttctgctcatagtaactccatgtcagaagaaacacatttaaacataattaacacaactaacagatttgtaacattactttctacgtcataagcatttttcactattgttcaaaaaggaaaactaggaacaactacacaataaaataatgtaatctaaaatgacagcatgcaacatttgttcatcaattctagtattttccttttcttcccccacagcaatctatggcaacagagagtaaaatcttctgtcattttgcaaatcctgaggtgccatttttattttatggcactactctttttaagagatacagataaggaaaaaatttattctaccctttctttaacctaattgtgttttcccagttttatttctaayatgccaaagtcaaacaagacaataattcacaaatctaatgtgaaagtttccagcaaactctacttacattac

SEQ ID NO: 823034 - DNA, 362 bp, Homo sapiens
cttgcagcccttctggaaaagtactgggagtcaagtccacgcatctgatgaccaccatgctgtctctctcatctcattgtgaagtggtcatcagcagagtcatatcatacatcacaagacatggtttcacatttgctttgcctcaatttccacatgtcctggccattgctgccctggacttatcttccaaataaatgttatcactttaacatcagacattggctctagttctagacacccaaggstaagatactcgtttagtgttataattgttatttatgcatttttctgtgggtttttaatatggcaatttaaatgttcatttagaaagggttttaaaatattctataaaagtcacgttt

SEQ ID NO: 823035 - DNA, 566 bp, Homo sapiens
agtccatggccaaaatgagtctatctttggccctactctcacattcagatatattctacactttcacctgaacttgggatactccatggattgctggtcctacctcaattatttttcctgcttgttctctgccttatttgtccttctacttcctgagcccctaatttattcatgtgaaaaagcaaaattgcacaatgtaaattctgtgagaacagcttcactctaaggtaaattataatgtcttgtattattcaggaaatgactggatgttgatgttcatatatatcatctactaaaatgatagaatgaatgctttagacactttagaaatagattgttctatttttctctacttgactgatgatttcttgggatcagaacagatattcacaatattaaaaccacagtaaatggttttgtggttgaaaccaatgacaaataattttttgtctttgaatctgatgtcctccacatstactctctgggatggaaatttctttagtggtactgtcaaaagaagcatcagagagacattagacagagatgacctttccatgaattttaag

SEQ ID NO: 823036 - DNA, 622 bp, Homo sapiens
aggagtcttgctctgtcacccaggctggagtgcagtggtgctattttggctcactgcaatctctgcctcctgggttcaagcgattctcctgcctcagtctcccgaatagctgggattacaggcacctgccaccatgcccggctaatttttgtatttttagtagagacggtgtttcaccatgttggccaggctggtctccatctcctgacctcaagtgatctgccctccttggcctcccgaagtgctgggattacaggcgtgagctaccgcacccagccaaaccttaaaatttaataagagcatgggagataaaataagaacaaagcagaaattaataaataagaaaactgcaaacacatgataatcatgttaaatatcaaaagggcatttgataagtgtgaagatctgttcttaaccattactctcagcaaatttggaacaaaacgatatttccttaactaaaaaaaaaatatttctcaaaccaataatcaatatcctattaaagagcaaagtaccagattttttaattcatccaaatagcttttatgytcttacaaatttcaaataaataattgctatatacttacacttataaagtcaatttaaaaacaaaaaaaaagag

SEQ ID NO: 823037 - DNA, 652 bp, Homo sapiens
acaaattaataaattcctgctggagaaaattgtgtccagatgttgtgcatgacttcatgggatttatgacagagccaattaaggaagtcataaaagagattgtgtatgtggcaaaaaggtggggggtgaaaggtttcaagatatggatgttggagaaatccaagagctgagagacaccacaccagaggaattaacagaagacaaattggtagagatgagtgcctctaaagcagtgccagacgatgagggagaagatgtagaagagccagtgccagaaaacaaactgacattagaacatctggcagaagaattccagttattcaagactgcttttgacttcatttatgacatggacccttctatgatatgggcactgaaaccaaagcaaatggtggaagaaggattggtaccacatagaaacatttttagagcaatgaaaaagcaaaaacgtcagacagaaattaccacgtatttccataaaattacatccactatgcctgcttctcctgcctccccttccacttcctccacctcttctgcttctgccacccctgagacgtcaataccaactcctcttccttcktctcctcctcaacctactcaatgttaagatgatgaggatgaagaattttatggtaatccacttccactt

SEQ ID NO: 823038 - DNA, 627 bp, Homo sapiens
cagcatgatgccatgggacacaaaagatatgcactaacacttcattatatggttggtgtttttacctaaagatacaatatatataagtaattttaagagcacagaaaatagtaaaatrtgataaagtgataaggaagtaataagtttgagaaatttattacttatattttaaatataaataatttgttactttatatattttttgtaatggttgtgattaatgatcatctcacataattcctgaaacctaacaatttgttctcattaactagcataaggtggttccacgactctgctggataataattttaaatgatggcttacacggggacagcgataggaaaagaaggaatggaaatgtaggatgagtatggtatatgcgttcagaatattagagaagaggagacgatctgacttctgacaagaagagcagcaccagatgtctgccatttcactagatctagttttcaaagtgcattcaatcaccaactatgtgtaggtgagtaaaaccaagaaaacctggcaccttgttattaggcatatgacagatatttatatgagtgaagatatatatttcaatgaaaacgctaataacagcaacaacaacaaaagcaacatgaggcttat

SEQ ID NO: 823039 - DNA, 562 bp, Homo sapiens
tggaggcaactgtaacacaatggtaagcatttatgtatctaaacatagaaaaggtgcagtaaaaatatgggataaaatataaaaaatggtacgcatgtatagggtacttgccatgaatggagcctgcaggactcgaagttgctctgggtaggtgagtgagtgagtgagtggtgacagaatgtgaaggcctaggacatttctatacacttctgtaggctttataaacattgtacacttaggctacactaaatttataaaaactatgttcctttcttcaataatacattaattttagcttcctgtaactttttaactttatatacattttgattttttaaactttttgactcttttgtagtaagacagcttaaaacacaaattgcacagctatacaaaaatattttctttatgtccttatttgatatgcttttttctattttaaaatttattttattaaaaaaaaaactttgtgttaaaaattacaacacaaacacagatattagccaggcctacacaaggttaggatcatmagtatcaccctctttcactcccacatcttgtc

SEQ ID NO: 823040 - DNA, 618 bp, Homo sapiens
tttcttttcgaatttattaaagaaagaatatgttgatcaccactacagaacttacagtatttatttgctttgctacctgagagaaatttctgtctactggaatgtaagaaaatatttgkaaagaggtaattaatgtcaagaacaaagccatggtgtgtaattttgcctttacagcctaagtctaatatatttagttgtgatatttgtatgagaaaaattttataactaaaacatgcagctgcagtatctcaatgagaacaactttctaatggccagtatggctcacttaaatgacatattatgaaaagggaaaacaattaaattgtttattaacaattatattcagctaacagggagggcatataatcagaggactattcctaaatctcataacattataagaacttgaataatataacaaggtgcaaagaactgaagttaagcaaaaaaaatggtattatgaataaaatttcgccatggtaccaaaataaatctaaaataatgttgttgattcaaactgatggacttttaaaattcactaacattttaagaataattataatcatttaaaatattcattatgtcattgaaatagttcagcagctgaaaattaggcag

SEQ ID NO: 823041 - DNA, 611 bp, Homo sapiens
taaaatgtttggctttggaggtcatccaaagtagcttccaatggttgagcaggttcagacayagttcagataggcatcagtgtcaggaatccctttcagtgtccagaaggggcactaagacagtccagctagagggccacaaatagaggacagcatattttacgaaatctgtccatcttccacagggcatccaaagaaggtactggagagcattaggctcaaatcaagaatgctttgggtgtcctgtcatggaactgggctggatggactgggtgtagccatcagagagactctggctttagggtcaaggtgcatgactgagccagtactagagaatggggactgttctgtctgggggaattcatgtagacactgacctcatcccagcgaagtcatcctcatgtatttggctgatgggatagaggcagtttctgcacaggtgtcccattgcctacttactgagcctgtccctgaattcagacccacatccccaccctcctgggtatctcatcagctgacagttctcagcctcaagctccaacttttcctgctgatttttcaggccttacttgtctcagccacagtggtccaggccatgcttttactaccta

SEQ ID NO: 823042 - DNA, 495 bp, Homo sapiens
cccctcacagccacccccgccccgaccgcgccccgcgcggctcgaagcaccttcccaaggggctggtccttgcgccatagtcgcgccggagcctctggagggacatcaaggatttctcgctcctaccagccacccccaaatttttgggaggtacccaagggtgcgcgcgtggctcctggagcgccgaggccctccctcgaggccccgcgaggtgcacactgcgggcccagggctagcagccgcccggcacgtcgctaccctgaggggcggggcgggagctggcgctagaaatgcgccggggcctgcggggcagttgcgcaagttgtgatcgggccgctataagaggggcgggcaggcatggagccccgtaggaatcgcagcgccarcggttgcaaggtaaggccccggcgcgctccttcctccttctctgctggtctttcttggcaggccacagggccccacacaactctggatcccggggaaactgagtcagga

SEQ ID NO: 823043 - DNA, 520 bp, Homo sapiens
acgtctcactatattgcccaagctggtctcaaactcctgggctcaatcaatcctcctgcctcaacctcgcaaagtgctgggattgcaggtgtgagtcatccagcctggcctacgagcaggtttttgagctgaaaagagtctgtcctttctggattctccctctttgaggcacctcattcacctcagtggaattattcacagggttccaccagtaatccttgggttccctgactctccaaaaggcatctaagcttcctggcttcatattgcctgactctactccctcccacatttctttgtcccagctatttaacttcagcactggaggaatctccaaggtgcttgaagagttctgcccagcttcccgcaaggctgtgccttctcaggtcatcgagcaaggaagccatccctgagagtctcatccgagatcccttgcagtgggcatccaaggccataaatatttgcatgcctgtgaayccagctttcagaaatgatcttaaggaaataagcatgagtattt

SEQ ID NO: 823044 - DNA, 605 bp, Homo sapiens
tgaccatgacatatttgtaagtgggaaaaaaatgtagactatcacaacagcatgcacagaatgatcccacggcaaattgtgaatgtgtgtgttcatgtgcacacacacccaatagaatatataaaagggattcactaaaacatcagaagtagatttggggagattttaatgctttggtctggttgagtttttaacaatgagaatataatatgttcacacacagagatacacacaagatattgtaaatttgtagaaagacagtggtaaataccatttagtggtacttacccaataattttatattggaaagcagtaaaattgatagtgaatatataattctcataaattccatgaaacaagttatagtgtactaaaatatgtataaagctaaaactgaaatacaagaagaaattcataagaaaaaattatattaggataattctttaataaacaaattgtcttcatcaggtcaaacagccaaaaaatagagaaaaagctaaataattgtattaatrtaattactaatctggataatgactcttcattatatcattacaacataattaaattaatttaataaatacattgacgatacatatgaaaac

SEQ ID NO: 823045 - DNA, 618 bp, Homo sapiens
atccagccctccagcaagtgtttccatttcctttgcctggatcccagggtaacatacctcttctgttgtacagtatcattctgttgtacaggtagtgggaacctcaaacccaaacaacagcagacctgcagggatgaagtcttcaaagagatttgtatttcctccacccaaacccaggattaaaagataattaacttattttttcttttttctttttttttttttttgagatggaatttcactcttgtcacccaagctggagtgcaatggcacaatcttggtttaccacaacctctgcccgccaggttcaagcgattctcctgcctcagcctcccaagtagctgggattacaggcatgcaccaccacgcctggctaattttgtatttttagtagagatggggtttctccatgttggtcaggctggtcttgaactcctgacctcaggtgatctgcccacctcggcctcagtgctgggattacaggtgtgagccaccrtgcccggcctaacttgttattttttcttattgctggtgagcagaacttcttttagcgtgctcctacatgagggtcctagatttatgcaggggtttcacctgcaacttcccagttaacttgag

SEQ ID NO: 823046 - DNA, 607 bp, Homo sapiens
ccctgaggacatggcctcaatatagccagaatttcaaactgcagtcttatctcttcccacagtgcatttggatctctaactcccttctaccyctttgatgagtttgtattaataacccctgcttaagtaaggagctgggccattgagagctggccaaggcctgttcccgagccccaggccatgattcgcttcactctggacttcagttccagagagagaggtcaatggcagggcatgggaacaggatcgatccccaagcttgttctgtccccagaacagaagtccctaaaaacactatgggtgggacagaagttaaggccagagagcagggaatcgcatctgctaagtgaggagagttttccaatgaaaacaactccacaaggccatcggtcccctgggaagatttccttctgcttatgcacactcagttcctcctccctcctcctctgtctccttggggttggactagaagtcaaagcacttctgaccagcaatgtcctccaaaccctgggcaagaggcaagaccttgacctacactctgggccaactgcatctcagatcaataagatcttaactcacttacctgtgtttgacagggaagcaacaa

SEQ ID NO: 823047 - DNA, 542 bp, Homo sapiens
tacccatcacccgggcagtatacactacaccctattcatagtcttttatcctttgcccgccctcccaccctccccccccatgtccccaaagtccaatatataatggacatttaaaatataaccataaaagttgtatttgcaaagaatatttgatgatttagggaaaggtccttaaaatatctttaaacagcacaaaggctatgaaatagtatgtgtacagtgtaatttcatttccataaagtttatgcatgtttgcacatgcatataataaaattttgggaggacagccattcaaaatgttcatagtagttatctttgaatgataggattgtgggagatatgcatttctttctttaaatgttttgtctttcaaattttacaccataaatatatactactttaataataagaaaatattatttttaatttttctgtattctgtagatcttggcagaaatctaagcaaagatttgtaaaatctttcttctcctatcactgytctctcccggccactttcattttgcccatgcatgtgaaatatt

SEQ ID NO: 823048 - DNA, 542 bp, Homo sapiens
tacccatcacccgggcagtatacactacaccctattcatagtcttttatcctttgcccgccctcccaccctccccccccatgtccccaaagtccaatatataatggacatttaaaatataaccataaaagttgtatttgcaaagaatatttgatgatttagggaaaggtccttaaaatatctttaaacagcacaaaggctatgaaatagtatgtgtacagtgtaatttcatttccataaagtttatgcatgtttgcacatgcatataataaaattttgggaggacagccattcaaaatgttcatagtagttatctttgaatgataggattgtgggagatatgcatttctttctttaaatgttttgtctttcaaattttacaccataaatatatactactttaataataagaaaatattatttttaatttttctgtattctgtagatcttggcagaaatctaagcaaagatttgtaaaatctttcttctcctatcactgttctctcccrgccactttcattttgcccatgcatgtgaaatatt

SEQ ID NO: 823049 - DNA, 668 bp, Homo sapiens
ttaccacagttttaattttttttaataatcaaaaaatgaagaattagcccatattgctgagaggttaaataagatgaggacggaactctccrtgacaagacagagcactgaagcctttgttaaagccatttcagtggagtgagtcccagaagccccattgaaatgtcagtggaagagagactgggagatgaggaaatggagctcatgggaatacagaactttccagcttgaaaagaagcacagagatgaggcagagcaggaggaggggatggggtcaaggttggcagggccaagatgagggctataaaagaatgtttgtagagaactgtggtagggccaccctgcggtgtagggtggccatttgagatctgtggtcttacatttgaaatgagccttgctggcatggttgtgttttctacagcactgggaagctgcccgtgagcaggtgcagagttggtgggtagcaagctttaaccagcactgtgtgatttttttctaggcaaggaccatagaggaaagagagaggcatgagctttatgggaagtaagggcatgagaagagggtcctggcagtgaaggagaggctgcattcaggctgggacttaccagagtgggagcattaaatatgtgagttggaactataggaggggatcagggagcaggatggtt

SEQ ID NO: 823050 - DNA, 602 bp, Homo sapiens
tgaaggagaggctgcattcaggctgggacttrccagagtgggagcattaaatatgtgagttggaactataggaggggatcagggagcaggatggttgaaatctagatttcagaggtggggcagttatcgtcgatgacttagtcaggttgagcaaaatgtcttcagagctaaaaaggtcaaggaaataaagagttcccaatattgatcggatcacctacataaatgctgatgttgcccccaaagaaaggaagagaatagggagtgaatgtggagaagagggggaggatctgaagcaaggggaacagtgtgtgcaaaggacagactctcactgtgaggagcagagagacattcatgaaggatggagaactgataccatggggtagataaaggtggagtggaacgcacagctatttttgtgaagactttgaaacacacgcgaaggaatttgtatcttattgtaaggaaagctattgaaggattttaagcaaagggtacacaatcatatttgtgtttttaaaaaatgctctgataaacaaactgtgttatatccagacaatggcatattattcagcattaaaagaaataagctaccaagccatgaa

SEQ ID NO: 823051 - DNA, 509 bp, Homo sapiens
tagatgcaggactccaatctctgccttcgtcacgtggcatcctccctgtgtctgtctctgtgtgtcctttcttctaggacacctgtcatattggagtcaggacccatcctgatctcaggacctcatcctaacttaactaattatatcttcaaagacactgtttccaaaccgggctacattctgaggttccgcatggacacgaattttgaggtgacactgttcaacctagtacagtctactcactggtacccaaaattcacacacaccccatgtgaacaatacgttcaccctaccccaagacccccaaaagtcttaacccttccagtgtcaactctaaatcccaaatctcatttaaatatcaactcgagaagtcccaaatctcctcatctaaattatctaaaaaggtatgggcgagactctgggaatgatccatctttcracaaaattcctctctgttcatagacctgttaaacctagaaaacaagtgatctcttttctaaatgcaatgg

SEQ ID NO: 823052 - DNA, 645 bp, Homo sapiens
tttcagaagattgagagatgcaaagcacctagatctgayaagaggagaagcagctgcatacaaccatgctgaagtctgaccaaattggaggggaaaggtgatggtgtatttataaaatgactagaatgatagatcttggaatccacatttggtaaggagagaagtaaaaacaagaagacctaataaagaagaagtaaggaacagtcaatgaactgaggttttgataaaattcaagaactaatgcagggacttctgtttaaaatgactaaactaactgattgaacacagctgtctgctttcaggtccttccaaaaatccaataaaaatcagagtaaagatcttttttaaaaaaggcaaaaacacataaagacaaagaaaatggaaacaggtgacagatatcaatagaactgtggaaactggaaagctaaaggacagtgttaactgtcttagcagatccgaaaaggctgatatttgcctgggggtggggagggaggatgagacgagaatagggaaggcaagggacaaactattcatgttgcaaaacccaggaagactggggaattggaagcacaggtacatctgaaggcagatgcacaggcggaacaaaaaataaaggagtggagctggatgtggtggtgtgcacct

SEQ ID NO: 823053 - DNA, 621 bp, Homo sapiens
atttaaatctggaatctatctggaattttggtattaccacatggaaaaaggatccaaccttattttccaaaacacaaagcactgayttgtagttttctctgatttacatgttgtcagtactactgccttggctaatttcaagctaccaaggctttaacaactggtttgcaaaattctcaaggatttgacagttgattctcaggagccagtatgagctggttgcctcacactttgcttctaactcttgggggcaatgctttccctccactgttgtttctttccctttggaggggagtaagtgatgtaacacctgcttctttccacccctttattatttgctatcccaggggagctaatagtcatacccaagctcttccttttttcatcataggagttaggccaggtgcagtggctcatgtctgtaatcccagtgctacattgtaggtggtcgaggtggaaggatagattgaggccaggagttggagaccagcctgggtaatatagtgagaccccatctctaccaaaaattttaaaaaattagtgaggtgtggtagtgtgcatgcacctgtagtcctacgtagttgggaggctgaggcaggagaattgcttgagcccaggagt

SEQ ID NO: 823054 - DNA, 564 bp, Homo sapiens
tacagttttatttttattttgccataaaataaatgcttattaatttccataccacgtatggagagagctgccacatgtgaatttcttttagcaataattgccgtgcctgggactccttaagttatatataccgcgggaatagtttccaaataagaacccagagagagggagagattcacagacaatagcttaaaaagtctagaaattatagaccgattgaggtcagcaagaaacaaattattcaatatatcccctgagggctagagccagactttcccctatgattccaaaattacttcgcagtttcattagggtgaaaggcagtgcagtctcatgagttcagaaagtaaaggttgttccttaaaatttagatagacttgacaaccacttaggatggcattttggcattctgtccctgctcatcaaagaagttgctcaaatttgtgggatagaggaatgagagcaagaagtattttaattgcaataccttrtgttgtatatatgtaatacctctatgaaaattcaggaaatcagtactgctaataaacctgatgtacaggcaga

SEQ ID NO: 823055 - DNA, 554 bp, Homo sapiens
aaataaataaataataataaatagaagaagaaactttcagacaattccaggttttctaggagtgccatgtgaattagtgagctccccagcacagaggtggggaagccactggtggaggggaggcacgccaggcctggacccatggtaggatggcttctgcctgtccctcaccaacgccagctcagtccctgggaagtagcagagcactcatgctccagaatcatgccttgggagagagctgagaagatggagtgcttcaaaatagagcagtctctcttctcctctccatcctgctctcttgtcttacctctctctctcttttcttatggtactgttattttttcctttgagacaatagaccctccctgtgttccatgttcctgccccctctctacaaaaaaaaaaaaaaaaaaaaaaaaacctcacaaaaacacccctgcttctggggttttgtcatgtagctggacaggctttggatctgcaagcgactgtttattgaattcaascctgtgtctgctgcaaacaccagctggatcattgcatcacaaagtgct

SEQ ID NO: 823056 - DNA, 619 bp, Homo sapiens
cactgcactccagtctgggtgacagagccagattccgtatcaaaaaaaaaaaagaaaaaaaagaaaaattattttgtttcttcctgctatatggcaagttcttctattgccaggagtacactttagcaatcatctttaccatatcgattagaatggcacaagaatcaagattctatcgttccagaaccaggtaatcacattgatccaattttatcaataatttaccatcaaggattaacactcacatggtgctctgtccttaccaagagttaatatctattgaacattcaatttacttaccacttttggctttgctataaagtgtaacttaaatattaagttgttttgtacatttctgaaattgcttaaaattaatagccaacattagcaatatcggagattttactacaactattgatacctccaataattcggatgaatttccaagtcttaacaagccaataaacaaacttacccatatctgaagtaagtgctaaactgtctgcagaggcgatgggcaagctctcgtttcccacaagcttcaggaccagctagtatcagcatgggataaggrgcatccaggctgggaagagtgctacaacacaggaccagagtcagt

SEQ ID NO: 823057 - DNA, 681 bp, Homo sapiens
agagtattacaagggatccttgtgataaaaytgctctatatcttgactgtagtggtgctaagatgaatctacatgtgataaaattgcacagaggtaaatagaactaaagacaaaagagcacatgcaaaactggtgaaatccgataaggttggtggatttcctggtcaatttccttgttttaatgttctgctatagctatgcaagatatcaacattgaggaaaactggatgactggtatatggaatttctctgtattatttcttacaacttcatgtgaatctacaattacctcaaaatatattttttcaaaaaaataactaagaaaaagaaagtgacaaatattgaaaataagcaaaagagagcttcttcctgaagatgaaaaccaaaggaacagaaaacagaggctatacttcaaaaaaaccttccctgaaattaaaacaaacaaacaaacaaacaaaaaacactacgcattgaaagggcacacattatacctgaaatatcagctcagaactaaaccaggacatagtctagtaaaattacttggctttaaagaaaaagaaaaaaacttccaattagaaaaaaaaaaagcacattacatataagggaaagaaaattaaattatcatcagattttgttttatgccaaaagacaatggagtaacatttttaatatattcaagga

SEQ ID NO: 823058 - DNA, 590 bp, Homo sapiens
aacactcctttcaagaaggccataaatctgtattgatttcccagaatcttcagcattgttaaaataataggttccattccagcaattaaatggagtgacatagtaataatagtaaacatatatttactacgtgcaaggcgcttatatttatttagtcctcatgaaaaattgttgacaagaaaatcatcctcattttacagataagggatctgaggctcagatgagcttcctaacttgcctcaattactcttatattttggagccgggatttgagcccatgaaatctgatttcagaatgcatactgttaaatccctgcattatgccacctcaaaaatctcagtaatgagactacagtctccctttgccctgtgtgtccctgcttggtgtagatttttatatgctaaatatcatcaataagtcttgcgtctgttatgtcatcatgtgtctgaataattcatgtcctgtttcctaagaacttatgatctgttctgtagtacaggtgtrttagtctgtattcacactgctgtaaagaactacctgagactgggtaaatttatgaaggaaagaggtttcattgactcacacttcc

SEQ ID NO: 823059 - DNA, 569 bp, Homo sapiens
attttgctgagacaatagacataaactgggacagccaagggcagaccaaggtgcatggaactctcaacctacagggacacttctaggtcttcccctcccccagcattcccacacaccatgaaatgcagagctgcatttctgggatttcctaatagatcttccataccttccaaacctgtctgggcaaacaaacttataaaaggaaaatagctcatgtttatatggagcatcgatcatttgacaagcgctttacatggacagttcaaggggaatggggcataaacttcccttgaatgtagatgtagcctcttccaaaacgggtatggtgtagctatttctgcttctcccacatttttgtgagtttctctgtgccccaaacccggtggtctctgatatccttcccgttggatttggggccagtcttcccaacagcatgcaggaaggaaaggtcagagaaagcatccactggcgatgatctctcygcagtcctggctgactggtgaaaaaaaaacatataaccatagggaagtggtactggagaggcccctggcaggctgtcaacttgctcc

SEQ ID NO: 823060 - DNA, 589 bp, Homo sapiens
ctagcttaatcatcacaagactcttaataagmaattctgttagttttataaatgatagtactgtcattcagacaaagtaatattcatttcttatactttttgccttatatactttgatgtcatgttattcaactcataagggcttataactgttattatatcttaataatgggatgtacctgacttaatgtaaaaggtattttatgtatcatttaatgatttttgtcttgacttctactttgtctgattataatattcctacccctccttgctttttatttgtgtggtatttacttctgatgcctttgtaagcatttcttacgtaccactgacttttctacaaccatccagcaatacaggaaggaagggagggaggtaaggagggaaaggaaagaagagaagggaacagaaaccctatcacagtgagaaattttttgacctatccatatgaataagtaggaaaaaatgaaaaaggaaataaatggtttgaataatacaatgaatatgattgaattaatacatactgcaagtgtttgtaccctacaaagaaaacaccctcttatcaatacttattcatggtaaaactctt

SEQ ID NO: 823061 - DNA, 589 bp, Homo sapiens
ctagcttaatcatcacaagactcttaataagcaattctgttagttttataaatgatagtactgtcattcagacaaagtaatwttcatttcttatactttttgccttatatactttgatgtcatgttattcaactcataagggcttataactgttattatatcttaataatgggatgtacctgacttaatgtaaaaggtattttatgtatcatttaatgatttttgtcttgacttctactttgtctgattataatattcctacccctccttgctttttatttgtgtggtatttacttctgatgcctttgtaagcatttcttacgtaccactgacttttctacaaccatccagcaatacaggaaggaagggagggaggtaaggagggaaaggaaagaagagaagggaacagaaaccctatcacagtgagaaattttttgacctatccatatgaataagtaggaaaaaatgaaaaaggaaataaatggtttgaataatacaatgaatatgattgaattaatacatactgcaagtgtttgtaccctacaaagaaaacaccctcttatcaatacttattcatggtaaaactctt

SEQ ID NO: 823062 - DNA, 729 bp, Homo sapiens
acaaaatgattaatctcaaactatgactaacagaacaagcagaagaacatttttatctatatctagggttcaaaagttacccttgtattgtcataaatctatggtagtttattacagtaaaactgaataagatttcactgtgttattaaataagaaaaagaaaaagcattttcgttgcatctgaggctgctagttgcccaatatccctcttgtgttagacacagaatcgttggacactatgcccagctgcaaagctgcacctactaatgaagtatttaaccatgcaaatagggtagcccttaagatataataaggaatagtttggagagactcctggaaagtactaaaagggacaaatccttctgatacttatccttttccttcttccttttagaagattagcatgacatgatgattggaacctaagtagccatcttgtcatcttggggatggaaacccatgtgctaaagataatggagcaaaaaaccagatgcagccttggtctctgatgatttcatgcagtttccaagctaatcttggactgcctcatctgcatttttcatgtgcaagaataaagccctggtttgtttaagctaccatagctaactttctgttactaccagctatacaagattcgtatattagataaaggaaaacataaaaattgtaactctgggagcagtcctgaaaaatcatttgtttggatccrcgctctcagacaactacttt

SEQ ID NO: 823063 - DNA, 551 bp, Homo sapiens
cacaaccagcattagtgaaaaccagtgcagcaatcaaaactacaaccagggtcccacctcaatcccctcctacctctactggaacaggtactggtatccatgcctgagagaactgaagacagatcacatcacatgactctttgcagatactcccttataccagcccagaaccccgtagctctgctgggtggctagacccagaagagcaataacaatcagtgcagtccttctctcaggaagccccatccctagtggaaggaggagagcaccacatcaagggatcaccccgtgggacaaaagaatctgaacagcagcccttgagcccaagatctttcctttgacataatctaccccaatgagaaagaacccagaaaaacaattctggtaatttaacaaaacaagtttctttaacacccccaaaagatcaaaaaactcaccagcaatggatccaaaccaagaagaaawctctgaattgccagaaaaagaatttaggaggctgattattaagctactcaaaatacaagaccatgttaatgtagactgagagtgta

SEQ ID NO: 823064 - DNA, 620 bp, Homo sapiens
aacttgttcaaagaactaaaaaaaaaaaaaaaaaaggtaagtggctaaagatgagtatgactctcattctacaaagctcttctaagacaggaaaaccagaaagatttttcctttctaacctaatccttaatttatataacccctcaaaatataaaacaaaaaaaactgtaagttatattaccagtacagaaacagttaaagataggtttgacaccaatggatatctatttatttaaaatagtaaattccaaaagctatatagagggtagaatgctgtgttaatcaaactagaactactttggaaaacactattaaagatgaatttaaagattacaaagtatcttttcttcaattctcagtgtaaacagtaacctaacagctagacctaaacttggatatttcttgttggtgtcaattttctaattagaatatctaattatttatttgcagagaaggtatgacatcaaaatatgattatttatctcatctccaaaatattacccyccagtactgttctgtgtgtgattatattgcatgatgagaactaattttaaccatattcctggctttgttgtataattttgtaaatcccttgagttatactaaatatatgcaacgtt

SEQ ID NO: 823065 - DNA, 344 bp, Homo sapiens
gagagagagagagagagagagagaggcaatctgtacagggccctgtgctatgcagggcttctaaaaaatatgaagcctctctgtcccagagagtttacaggttatttgttaagagagaatttactccctttcaccctggaattacagccaagaccaaggccaactttaaaagaggttaagtgctcctgagtttgagagagttggcagtagttgggagaatgtactcctccattgaccctcatcctatgccttgaggtggagaggaaataaggggatctggtattttctctttttcaarctaaggaaaggaggtcagtgcagggaatgatgagagaatcatctat

SEQ ID NO: 823066 - DNA, 639 bp, Homo sapiens
aggtgttgacctttctcactttgcaaaaagtttacaagttgatagtctaggctgaggcagatgctctagaatgttgtaagcaatgggtttccttctggctttccamctccaggtttgctgaggaaatttacgtgactaccacaatggttgcaaaatggctcctgaaactctagtcatccagggaagatataaaggaaaggtacaaaaagaaaaaggactttccgctagctatgttttgccatattttattaaaaaactgtgactctctaattctttgattagaactttattttttgggctgtgaggaaaattgctgaaagataatatattgagctttccagccattattgtaaaaactggcctgaaaaaaagtggttgagcaaggaagttgaataagaaggttttcagattcctaaattaccattaacgtatctcatgcacaaaaaatacatattctagatacattaaatacttaactatatactatagaaacctacaagcactctctaaagagactatatgagccatcttggtaagaaggaaacattctaaaccaaattctaaaactagaggctaagaaagaaaatagaattttaccagtgtctataataaatgaaatattttatttggcaaaaataa

SEQ ID NO: 823067 - DNA, 603 bp, Homo sapiens
catcctcatagtttagctctcacttataagtgagaacatacgatatttggttttctattcctgagttacttcacttagaataatggcctccagctttatccaagttgctgttgttgcttttaatcacaaagcratgctgggttttaccaaatggttttactgcatctattaacatgatcaaataacttttgtttttaattctctttatgtgatgtttcacatttattgacttgcatatgtgaaaccatctctgcatctgtggtatgaaacccacttgatcatgatgtattatctttttgatatgctattggatttgatcagctagcattttgttgaggatttttgtatctatgtttatcagggacattggtctctagtgtctgttgttgttatgtcctttcccggttttggtattagggtgatcctaacttcatagaatgatttagggaggattccttctttctctatcttttaaaatagttttattggaattggtagcaattcttctttgaatgtctgatataatttagctgtgactccatctggtcctggattttttttattggaaattgttttattacttatttaatcttgctgcttgtt

SEQ ID NO: 823068 - DNA, 607 bp, Homo sapiens
tagaatgatttagggaggattccttctttctctatcttttaaaatagttttattggaattggtagcaattcttctttgaatgtctgatataatttagctgtgactccatctggtcctggattttttttattggaaattgttttattacttatttaatcttgctgcttgttattggtttgtttagggtttctatttattcctgatctaatctaagaggattgtatatctccaggaatttatccatttcctctagatttcttagtttgtgtgtgtaaaggtgttcatgatagtccggagtggtcttttgtatttctgtggtatcagttgtaatatctctactttcatttctaattgaacttatttggatcatctctcttttcttggttaatctcactaatgatctatcaattttgtttatcttttcaaaggactagctttctgttgcttttacttttttttgtttgtttcatttagttctgctcttatyttttgtatttcttttcttctgttgggtttgggtttagtttgttttgtttctctagttccttgaagtgtgatattagattgtctatttgtgctctttcaaactttttgatgaaggcattaa

SEQ ID NO: 823069 - DNA, 661 bp, Homo sapiens
atttttgtaattgttttaaaataaaaagaaatgggtggggcgcaatgaytcgtgccggtaatctcagcactttgggaggctgaggtgggtggattacttgaggccaggagtttgaaaccagcctgcccaacatgttgaaaccccatctctactgaaaatacaaaaattaggcaggcatggtggtgcacgcctgtaatcccagctactcaggaggctgaggcaggtgaatcgcttgaacccaggaggcggaggttgcagtgagccgaggttgtggcattgcatacagcctgggagatagagtgagactctgtctcaaaaataaatgaataaaataaaataaaataaaataaaatattaaaaggcaccacctggcactgaatgacacaaccaaatccccctccaaataaataaaaatcatcagaatcttattcatcctaccctcctaactcttcgcgttcctttctttcaaaattattattcaattaatataatttactttgtcctacttaagtctgaattatataagcttcaacatgtcttgatacagtatctggaatattagttagcatataattatttttgcattaacaaatgtaaaaagatgttaaaagggactctacctgtgataaaataactgaaactgaatggtattaggtaatca

SEQ ID NO: 823070 - DNA, 590 bp, Homo sapiens
agagtagggagctagtatattcaccaggcttagggttcactatatgagtgaaatggagtgagaagggagcaaaggagttaaagattttttgaagagagtgagtataatgatgagatgtaaactgtaaagggaaaggtaaggacatgtggaagcaaggtcaatgaacttgagatctttattgaaggtgaagaattgctcatataggagtacttatttaggtaagctgagaaaatagaaacagttttccaaaaactaaattcttaaaatagtttttgtggtgacaaggccacagatatggtcatggtggtgtacgactgagctagaatgaaagaaaagccctttggagatgaggaggtcaaggaacttggagtccagcaattatccttaatctgtcaattctccaataactagggatgaagatatttaaataggatagagaagtacacacgttttcaataaatttataggttacttttcctcttcctgtgaacaactttgagtttccatttcyagctttagcatagtctacccacttgaagttctgaaccctaatacatattgtatgtgtgtgttcgggtgggggggcgctg

SEQ ID NO: 823071 - DNA, 410 bp, Homo sapiens
gggaaagctgagaaggagaagaccggagatgaggcgtgggagggggtaaggaggggatggaaaagggtaaaggtggaggcagaaaaaagagggaggaatgaggaaaatcaggaaaagagtgagtcaaggaggagcccgggagcctaggagtgaaagggagcaaacgcagagaccgcagggggccaggaggagaggagacagaggctcagagacctgggaagacaagcagggtgggagggggagctgtgcagagggcgcccagccctgcccttccaycgctctctcttccttgcctgcatctctgacctcagcctcgcctcctagcctcctgccacttcctgtaccgcctcctgtgcaccatcttgtggctttctcctcagcattcaggaaggggttatggtggtcatcag

SEQ ID NO: 823072 - DNA, 637 bp, Homo sapiens
tgtgcaaagagcgtgcaaagaggcagggagagaataagaaagtgacagagagggaggtggtgacagggatgagagacagagaagcggagcaggggaatcagagatcaatggctagatggagagaaaatgatagaaacagtggcacatgcgcagccagcgacatacagagaaaacaacggatgggggcagacagaggaagagactcgacaaagagcctctgtcaggcccagggagatggatgggagagaatcagagtggaggaccgagctaggctgaggctgagagatggatggacaggaagagacctggacacggagggagagagaagcggagatgagaaaaacaaagacgtggagggacagagagaaagacggggcgaggcagaaaccctgactgtcagaagcaagtgaagaagaggaaggagccaggcagtggaagagacagacatggagacagggtcagagacagaggaacaggagggaatgaagattcagagaaaagagacaggaggtccagagagcaaggcrgtaacttcctgcacgtggagagttcagtgcaaatggatctttgtaagacttcatcgccttgacaggaagtgaggtcctaatagacatcgattataaaataaaaagcgtgt

SEQ ID NO: 823073 - DNA, 631 bp, Homo sapiens
tcaaaccatattctttttgtcccaaccccaactgtaagcataggtggccagtgattctgccttgtttcttttaggatcaagagggaacttgagaaaatgagtgagaaggtagggaagggataggaagaaaccctttccatagtttggccttagaagtggtgccgtgtcaatcaagactatgtagaaagatgttagaggaagcagactaaaagcatgcctgaaaggcacacagagaaggtagttaaaggtgagcgtgctgttatgtatccaccctccctcccatataaaagtataggtcccacctcctccaagccccgtcctcccacccacctccctccccagccactcctggtggtgttaaacctggctgtgtctctgcatggagtttaaagtatctaaaagataatgaggctttcctctgtgccagtttgcctcctgcctgcagagcccctgtacgttattgtgctaaaagagcttttctttctttcccacctttrtgattcctcattctcccaatgactttctctctacattatttgtaagccttaggaaaggagagttcagggaggacaagaaaaacctgccctgctgcctgtgtaaagcaggaagcatagtgactgctttgaacata

SEQ ID NO: 823074 - DNA, 655 bp, Homo sapiens
ttctggttctacagaggacccctgccgttggcctatctcttaacagatgtttgctsggtgctggccatgtgtcaggcactatgctaggtgctgggaggattccgaaacaagaaagcatgcaagattcctgccctcctgggccttaaaggaaagtagggaagccaaacattaaataaataattataccaataagtatctaattacaagttttataagtgttaataacaaaaattgcagggtttgctacaaagcatgtaactgaggacctaatcttgtattaggggccagccaaagtagttctttgaggagatacatttaatctgacacctgatggatgagtaatagtcactaaaataaaagccaaataaagaattttatacactcccaaaagagatattttacagctttacaaggctcaaatccaactaattcacccctgtctctgggtagtactggatgttctattttaccacttatgagacaatgctttggaaagccaaaaactaggcaatcacacttggtatctacccttcatccttcctgcgacagtttgaagtgagagttgagtgttctggatgatgaatctaattgcaacttattctgtgctaaaacatagttatggtcaaggtaaaattactaacctttggagatattc

SEQ ID NO: 823075 - DNA, 641 bp, Homo sapiens
gaaggatataatacagaattaatctaatataatattamaattcccattactattactgtaaatttatttttgcaaagtagcatagccttaaaagatgatgactagcttaagatctttaggaaataattagtagacatagtcatgaaaggtactagaggctatctttagggcccagattttcatatattttttgaattatataaactgctagttttgatattttccatgacaagccttaatatttcatttagagcacacataatatgtggattataagtgaccgatcaagatattaaagtatcttaaattgattgattttcattatcattttgagcatctagactatctcaatctttgagcaaagttgtagatattatttagggatttagatttttttaaaaacaaaaccaaaaaactgctttgcaagtaagttttttgttcagttctcagtaaatagcaatttctatcccatcaaattccatcatgttgctgcaaagaagagtagagcttccagcatccctttgtgttacacgtggggagagacaggatatctgaatatatacttatggaatgagcatgtaaatgtgcttttagtcttttcacgtgtgtgtgtgtgtataggcatgaccatgcatttgggc

SEQ ID NO: 823076 - DNA, 596 bp, Homo sapiens
ttttaactcttgttttctcccagtttaccagctccctactgtcttctagcccttcyatccaggccctacatgctttatcacgaacctttaatgtctttgttactcaattctattcattccactcttgctaaactttctcagagctgttcacatgtgctgaagagaatttcccaattttagaggctggtgtgctacaaatccacagtgcccaatatcaattgatcctttgacagtactcagaaataattctgcatatcacacatgtggttattctctcatttatctcaataactatttaaaatcttcattgggctgggcccagtggctcacgcctgtaatcccaacactttgggaggccaaggcaggtgaatcgcttaagcccgaaagttcgagaccagcctggataacatggcaaaaccctgttgctacaaaaatacaaaaaattagctgggctcggaggcgcacacctgtagtcccagctacttgggagtctgaggcgggagaatcccttgagcccaggaggcggaggttgcagtgagctgagatcacaccctaatgtactccaacttgggtgacagagcaagaccctgtctcat

SEQ ID NO: 823077 - DNA, 568 bp, Homo sapiens
cacaagattttggagtacatggaagccaaactattgaacaaagctcacccttcatgaaagcatcttcaaaattctagtaacacaagtccctaagggggaatgggaattgcgagcttctaaatatacttgaaaaagcaaagcactcgaataagaccagtgactggagctgccgttgtctgaatttctaaacattgctagcaggtggaaagatctcaagaaaccttttctgagaaagaagtcaatatgaggacaaagacttcctcttgcaaacatagtaaatgcagtgtccaaaatcaagctcttgtgagaacatttctgtcaaccgtgttcacattcatggattgtgacttcaggacaaatggcagctactaatcgacatgctgatgaaactaaaacttctctcaaaggccattaagtttctgggtaccatctgtgccaacastaattcagataatgcagaaggcttgctaaattttgggatttcttttctgttcgagttctgaacaatttgagaaaatgtgatatagagaactaaaatacgaggagagactaagttagagtgactagt

SEQ ID NO: 823078 - DNA, 619 bp, Homo sapiens
agctgaagagttaaaagtggttgcctccaggcaatggacctgggatgggagagatggacctgggttggattttatccattatcagtctttcgatagtttgactttttttaaccatgtgcacatattggtttgataaacatataaaaacctcaaatcaaaatgtgctcagtggtcaggcatggtggctcatacttgtaatcctagcactttgggagaccaaggcagaaggattgcttgagctcaggagttattgaccagcctgggcaacgtagtgagacctcagctctacataaaattaaaaagcggtccgggcgcagtggctcacgcctgtaatcccagctctttgggaggccgaggtgggtggatcacctgaggtcaggagtttgagatcagcctgaccaacatggtgaaaccctgtctctactacaaatacaaaaattagctgggtatggtggcagacgcctgtaatcacagctactcaggaggctgaggcaggagaatcgcttgaacctgggaggcagaggttgcagtgagccaagattgcrccattgcattccatcctgggtgacagactgagactccatctcaaaataaaataaaataaaagcaaatgtggtaa

SEQ ID NO: 823079 - DNA, 633 bp, Homo sapiens
agtggaagtgccagatgccaagagagaagttgggggaaaaaatggtggagggcaaatgagtcagcagcaagtttaagcaatgaaccattgcatcacggggtgtttctcaaattcttgtctacttttagaaaaagtacgcaatgacattcagtgggcatcttgattctgaaatagctaaagaaaatgttaaaaatgcagtgggtgaagatgtgcccacattaacctcttttctaaaacaacagttgacaattgtgctacatgtccttaagcaaatcttttagcctgcctgttccttagtttcctcatctgtgacatgaggggaatgtatgaaaaatatctctggagattccttccagtctaacattctgtggtttgatgattgatactatgctcacattcttaatactcaggctgtgtctacacagtgccaagacaactagctaattcagtgagtatggacaaaatgttcttccaatcaattctttggcacgctgtagacaaattggcacttcttttcattttacaactggttgctccggcttcttcttgaccagtgcttcttcaatggtggtatcctkacatgctgtatgcctggagcacttaggaggtgtgtcctaggcagttggctatgga

SEQ ID NO: 823080 - DNA, 609 bp, Homo sapiens
caacccctccgcctgcccccactccccaattctctctctttctctctttttttttttttycagagaacttagcagtaaaggctaatttatgaagtccctaaagatttgaactttctgcagaactggctgcagtttccagtgggttagagtctacttggagtagagcagaagctgtgagctgtgctgccgagaggagggaaggaagaagccacagcccaggacccacacccgtccagcatccccaacagccttcctcccctacagagagctcaaagatgacaccgactgttaggtgtgggataagagggacacagggtgtgggatgagatccagaagagcaggaagggggaggggtcaggagctctgtggttggagggaccacctccgttactaacatcccagtcaaattcagaaactatccaagccctggaggctcctaaaggcgcttgctccacccttgtaccatcccagttccctcctaagtttgcaagatcaaatccagtttaaggctactccttcgattttctcatgtcatgagctgacacccactgctgggaccaaatattcatttccctccccatgaaagccaaagctctattcggtaaggat

SEQ ID NO: 823081 - DNA, 509 bp, Homo sapiens
tattgcccaagctggtctcaaactcctgggctcaatcaatcctcccgcctcaacctcgcaaagtgctgggattgcaggtgtgagtcatccagcctggcctacgagcaggtttttgagctgaaaagagtctgtcctttctggattctccctctttgaggcacctcattcacctcagtggaattattcacagggttccaccagtaatccttgggttccctgactctccaaaaggcatctaagcttcctggcttcatattgcctgactctactccctcccacatttctttgtcccagctatttaacttcagcactggaggaatctccaaggtgcttgaagagttctgcccagcttcccgcaaggctgtgccttctcaggtcatcgagcaaggaagccatccctgagagtctcatccgagagcccttgcagtgggcatccaaggccataaatatttgcatgcctgtgaayccagctttcagaaatgatcttaaggaaataagcatgagtattt

SEQ ID NO: 823082 - DNA, 494 bp, Homo sapiens
cccctcacagccacccccgccccgaccgcgccccgcgcggctcgaagcaccttcccaaggggctggtccttgcgccatagtcgcgccggagcctctggagggacatcaaggatttctcgctcctaccagccacccccaaatttttgggaggtacccaagggtgcgcgcgtggctcctggcgcgccgaggccctccctcgaggccccgcgaggtgcacactgcgggcccagggctagcagccgcccggcacgtcgctaccctgaggggcggggcgggagctggcgctagaaatgcgccggggcctgcggggcagttgcgcaagttgtgatcgggccgctataagaggggcgggcaggcatggagccccgtaggaatcgcagcgccarcggttgcaaggtaaggccccggcgcgctccttcctccttctctgctggtctttcttggcaggccacagggccccacacaactctggatcccggggaaactgagtcagg

SEQ ID NO: 823083 - DNA, 518 bp, Homo sapiens
acccaagagctctgatggagatgtacaaagagattaatgttgttttcatatgtaacacaatatccattctgcagcccatcaatcaaggagtaatttcgactttcaagtcttattaaraaatacatttcaggccaggcatagtggctcatgcctgtaatcccaacactttgggaagctgaggcagtcggattgcttgaggtcaggagttcgagaccagtctgggcaacatggcaaaaccctgtttctacaaaaaatacaaaaaaaaaaattagctgggtatggttgcacgctcctatagtcccagctactgggaagactgaggtgggaggatcgcttgagcctgggaggtggaggttgcagtaagcagcaatcgtaccactgcactccagcctgggtgacagaatgagaccctgtctaaaaaaaaaaaaaaaaaaattcataaggctataggctatagctgccatagatagtgactcccctgatggatccgggcaaagtcaatcgaaacccttctggaa

SEQ ID NO: 823084 - DNA, 632 bp, Homo sapiens
gggctctgaagacgagtgactaaaaacagctgtcaagcccgtctgtccagtgtcagggtaatgtgttcggccatcttgtactatttagggcaggagggggtccctccttcaatggggtgaataacggtgatcagaacaagcccccactctccatcctgcccctcgccgtcccctgcttggtttcctgcccaccactcatcactgcctgaaatctcattagtcacggacatgcctccgtgtccctttctagaatgtctatcaaagcagggtcttggcctgccagtgtgtaagccctagatccgttcctagtacacagggaatgtctaaggaatgaatggagggagcggtgagaactcaacgaggacagagtgcttagccatctcagacacaccgcaagcgatctacatattttggctcttattatagatgcttggttattcatctttctagctagactataacctccatgaggtaacaggtggtatctacagtctagcagagtggagctgggcatggtggcgcrtgcctgtagtcctagccacttgggaggctgagatgggaggatcacctgagcccaggagtttgaggctgtagggcagtatgcccatgcctgtgaacagccctgcactcca

SEQ ID NO: 823085 - DNA, 574 bp, Homo sapiens
aggtggcattgccagagctgatgttggttcaggtaccagcctggggatcccgatgtgtcttaccaaccgcctgctcaaacagaagarccaaaaaggctggcacaagttctgccaggatggcgatgcagggaggaccctccctctgcaggtgtcaccagccgcactgagagaaaaggctcgcgcctgagttttaagacctgggcttggatggcacggtgacacgcaccccgcgggctggtttattttcctccttcccacctcttcacatctccttcaggtgctagacacggagagggccaagagaaccacttgggaaggggactgacaacctcgctggccattgtatggtcatcaataccatgcgcctgctgtcccgggctctggcaggtggggtgtgttgaggatgctgtgggggcccagagcccacacctaacccaggtggagaccaggactggggactctggaactaagtcctgaagggcgttacccaggtgaagcgggagagcgggagggtgctcattcaaggcagaaggcagggattgggacaggaagagtggaaatagtgattctcagt

SEQ ID NO: 823086 - DNA, 619 bp, Homo sapiens
tccttcgggcaggttgcccaaatgctttattcttgctaaggtgttcattacacacaacaccatgtggccaccctgggcgtgggcatccctgcaaaccacagcacaaggttctctgggccccttcgcagtcgacctcaaagcagccactcttggtgttctttacgtcgacttttttttgcacagcaggatgtcttgagggtccccaggccattgtgtgcatgaagtgtgctcgtccctctgcaggtgacaccccggcttgtggtgaaaccctggctagtggatatgccggcatcccctgggattccagtccatcaaggtggccaccggccaccagggcttgtaagaaaccctgctggggcttctcacctcctcacctcctactcaccccaccaggcatgggatgcagcttgcgtctcttcctttgggggcaggctccttaccttctagactctggctcatttaggttcttctgggtcctcagtgttcccacaggctgtaggagcctatgatattagagacgatctgamtgttcctcactgttaggctgtgtatgtctctctctatgatgttttatatcctaaccagaaggaaaaatctccaaatacctgaatatatacat

SEQ ID NO: 823087 - DNA, 322 bp, Homo sapiens
tataactaaaatcagtgggaactgctagaatatttctgcatggtaataacgcaatgaagtattatatttttaagtattaaaggttcgtaccctttggaccagaatttctatttcattttaagaaaaccgtgatacaaagcaggcaaagatacacattcaagaaatcatcctgacattgcttacaagaacactaactgtgaatgcaacatgtgtgcccaataatcagggtattgttaaatcattgccttgcayccatgcattggtaaattatgcaaccattaaaatagttctaagagcaatgtctattgatgtgggaaaatat

SEQ ID NO: 823088 - DNA, 630 bp, Homo sapiens
aagctaccaatgactttcttcacagaattggaaaaactactttaaagttcatatggaaacactctctttatagtatctgcaaatggatatttggagmgctttgagacctatagtggaaaaggaaatatcttcacataaaatctagaatgaagaattctgagaaacttcctggtgatgtgtgctttcatctgacactggtgaacctttcttttgattgttcagctttggtacattcattctgtagaatctgaaagggaatatttgtaggcccattgaggcctctggggaaataggtaatatcttcacataaaaaccagacccaaactttctgagaaactttcttgtgatatgtgcatgcatcacacagagttgaactttcttttgattgggtagtttgtaaacagtcatttgtagtatctgcaaatggatatttggagtgtattgaggcctatggtgaaaaaggaaatatcttcacataaaaatcagacagaagcatctgggaaacttctttgtgatgtgtgcattcatctcacaggcttcaacctttcttttgattgaacagttttgaaacagtctttttttacaatctgcaagtggctatttggagcactttgattcctatagtggaaa

SEQ ID NO: 823089 - DNA, 633 bp, Homo sapiens
ctttctgctaaaatctgctattagcaggaaccttgggactatttccagtagctgtagcctggagcagaattttctgcctttaaagaggcctagtgcagcagrttagatgtctgcttttagtgtgataaggcaaagatttcctttgtatggaattatctgatactaacactgtgtttgtgtgtgtgagtgtgtgcataacattttcatcacatcattgggtgcctatgtgaagatccaaccagagaaatatggaaattcagttacattgaattttattgaatatccagtttcagctcaaaagttcttcaatcattgcttattttcaagccacataatcttttatttacctcatcttttattttaagaaacttgtggagtgtcatgttagtttggactctcccatgaagatgctattacacctcctagaagaaaaatacataatctgattgttttcattagaattatgtgactttaagaaatgtgagtctttagttactaggatgagtatacatagttctaatcagtatgttgtcagatttattcaggcactattttattttatttattttttattattatactttacgttctagggtacatgtgcacaacgtcgaggtttgttacatatgtata

SEQ ID NO: 823090 - DNA, 499 bp, Homo sapiens
taaacatgttgtttactccgcacatcattttccccatagagggagaaactgaagttcaaagaggctaaggagcttgtctgaggttacagggctggcaaatgacagagcaagggattgaagctggtataactccagagcccgtgctcttcaccacttgaatgaggccaataatttcacaaatattaagccattatgttttcgttgctcccaaaacctttcagctgccacttctaggtgtgagtcaggaggctgaagatgccagggcaggcaagggcaggccattaacctcgttagcaagacagcaggggagacagctcgccccagttcccatccccctccagcgtatcaacagcaggcctagccgatgagacacagagacttctagaacggaggcagagtcaggaagaggaagggragaagcacctgctcaccggagacagggagactgcagaagatgagctcttgtgggaatggtgggatagtgtggggcagagacatc

SEQ ID NO: 823091 - DNA, 529 bp, Homo sapiens
ggagctcccttcagcatcattttggatattaacttgcttttatgttggatcctcaatttcctggttccaacttcttcctttttgttggtttattctttcattytggtgagacgtatcctctagtacctcactctcaccgtgtggtctacagatcagcagcactgatgtcacttgagagcttgtcagagtgctcaggcctcactctagacctgctgaaccagaatttgcattgtaacaggttcccaggtgatccatggcactttaatatctagaaagcactgttctggtagctcatgagaaaggctaaaaaaaatttgagtccttgcatttctgtatatgcctatacactactctcacttttgactagcggattgattgggaaaaaaacttctaagttgtaaataattttctgtaagaaatttcaagacatttttccattgtctcctaacttccaatgttgctgttaataagttcaatcccattatgatttttagtccttggtgtgtgacctttttatttccagatttct

SEQ ID NO: 823092 - DNA, 591 bp, Homo sapiens
tcttaagaaatgcctcctctgtgaatctctttccakatatcccatttagattccttttctgcttcataacttgcgacatcttatttcctagtccccagacctctggacagttgtgtaaggaggaggttacaaataggctgggaggaattacaatttcccacttaacataaaaaaattcaggttcacttttggattaaactcagcttctcttaggaaatgctcattttggagctctctctaccccacccttggagccgagatggcagctaagcatgcgggaccctcagtggtcttgggagggttgtagtccaggatctatgtggggtgttctgaccaggcctttggactcctgcttgtatgcacagccaaagccacagctgacgggaccgctgttgcgttccacgctgggccaggtcggggcaggccctggctcaagctgaccatccccagcttctgcctcacctcacgccacccatggcagcttcaggcaggcctcttgctgtcagctgagctacctccacacccccagtgggagcttgggaacacttctggatccttctgtcacacaagggggcctaggaagatgagagg

SEQ ID NO: 823093 - DNA, 584 bp, Homo sapiens
atggtctgtgaaaggaaactctgggaatttagaaaagtcttcattttcctcacagtggtcagcctttaagccttgtttctggaacgttggctctgagatttgaggcagaaggaggccccctgctccccyttttttttttttttttttttttttgagacagagtctcactcggttgcccaggttggagtgcaatggcacaatcttggctcacggcaacctccacctctatggctcaagcgattctcctgcctcagcctcccgagtagctgggattacaggtgtgcgccaccacacctggctaattttttttgtatttttagtagagacggggttttgccatgttggccaggttggtctcaaactcctgacctcagttgatccgccagcctcagcctcccaaagtgctgggattacaggtgagagccactgcacccggccaggagggcccctttctttctctcatctccagctttaacagttggtgccattggctgaagacgagagaaatgaataggaggaaggggcaaaacattaaaagcacattcacatatgcatttcaaatcctgtcatgtgagggaagtcat

SEQ ID NO: 823094 - DNA, 514 bp, Homo sapiens
aaaaagatggtctctgagtggtgggattatagaaactttttttttcttcgtatcttgtttctcctgcccccaatcccaatagtatttaaagagagaagaattgaatcctcttaaaaaggtataaagtgattctggcaacacggagtagaacattcagggtcgcatgtcgagggtgccggttcagacgcttctataaatacagacattcggttggtaggcatttaccgtgagctcaggctgggaatggacgacaacaaaaactcttctaagcgtgggtaaaactctcagcgaaggggcttcaagtcatgagttccaacaggaaaggcatgaaccaagaacagaaccaggacacctgaagagaaccggcgcgaggctgccccttcccgggtgtgcsggctcagagtagaaacgcgcctcacctctgcagccttgggcccctagggaccagaagaggtttccagagtccaggagcatgactgatggcggggaagcttctggagccagccagaggccc

SEQ ID NO: 823095 - DNA, 608 bp, Homo sapiens
gagctaaggagcctcgaggaatggcagcagttaaaagagaggccagaggaggggctcccacctttccaggggaagaaacccgagacagaaggtgttcagtgaacacgacttcttcccctctgtgkctgggttgggagcccttcctatgcctcttctggacacagctaacatgcagctttctcttcatatcacaagggctctgttttacatgagggcctcccacatgggaccagaaggaacctccttaaagtttggaatcaattgttaattcttcttgtggccccagtgcctacaacagtgactggcatgtaatgggcaggcagtagttatttgcaagctgaactgaattgaactgcttttggcaaggaagtcctgggaagggaaggtttccagaaggagggagtggtctgcggtgcaaacactgagaacaatcaagtcagataaggcctttacaagactggtgggtttggctcagtgcatctggcaatgaggaggccattggtgaccttgaggagaagtgttttcgtggggaggcagcggggacagggtaactggtgtgtgggagcgggtggggtgctggttgctcttttgggaagaaagggtggaga

SEQ ID NO: 823096 - DNA, 646 bp, Homo sapiens
cccttggctctgcctctgagtcgagttttctgggggcccagcctcttccccaggctttcctctccacagatgtgtggggagcctgtggctatgagaccaccttctctataggaaagcacttgaagaaactctagtgggtataaaaccccaacagagctcctctctctctctttctgactttctcaactttttaaaattttttacttttcgttagaaagcccaggccaacctgctcacacccattgccggagagcagagctggctgcgtagtaacctggtcagccctgaggggtcctgcacctctgatggtagaagctgacacagaacaggggaggctccctggggcctaggagggacactggcccttcaggcgcttcttcttctccactgcgagccgcagagcctggaggagagtgtccttattattcaggatgttatactctgagagtttcaccagcttgtcaaaggtggcctctgtgtatgtcagctccttggtggcatagggagttttgggaccataaatgtccacctggccctgctccagctcctcagggcttcgctctacacctgygggcagcaggatgacttgttatagactctgtcatgttaggttggaatgacttgtttccacatctctccccaaggc

SEQ ID NO: 823097 - DNA, 530 bp, Homo sapiens
gtttactgaaagaatatcagaaactgtatgatcattcacttttattactggaactagtttgtccaagggccaatagcaaggccacttccttgctatctaataaaatagacatatgtgcagtgaagtgtaagactgctctagtaggaaagtgtgtacatcacagtcatcaaaaaaggaacaaaataatgaatttggaaaagccatatgtaattaacattctgaagtgttatttgataaagctataaggtgaacatctttcgtgtctaaatttccatagtttcttcctaaaatgtgttttttcctgagttctaaaaacaggtaatatatatgaataaataaaaccatgtagttatggacaccagtaaaagtaaaattaaaacattatgcaaactaataaggcaactatcaacaatctagggatatctttgtctgaccatcccattgaaccaggatcagtggtttctacattccatctcttcatgaagctttccctaaacttgcctgcccwtaccaacctgattgtttccaat

SEQ ID NO: 823098 - DNA, 535 bp, Homo sapiens
tcattttgtaaatattcattaagctcctccagcgtgtttagtgggtgcttacttgtgtgccagttttatyataagactagcagaaataccttcttagaggttcatacaccacctggttcattataaaattcttttttttaatgctgttcattaattaaagtataaatatatatcgtgaaatacctaacacgttttccatacttgtcggtacacttatacctggaattcttggggcattttaaatgaaaatctgtgcttcctcaggtttgcattataatcatgatttactcgactaaatactaaagaatttacaagggcagtacttaattttttcttagatacatggcaaactgtgatgaattgtcattaatatttctattcagctaatctgagaaggcccacttctggttccatggatgatggcggttgagcagatgccaaaaaaggattggtacagcatcctgggagcagacccatctgcaaatatatcagacctaaaacaaaaatatcaaaaactcatattaatggtaagtct

SEQ ID NO: 823099 - DNA, 528 bp, Homo sapiens
aaataggtgttttgagtgaaatttaagataacgcagagaagcctttcaaaatcctatcarataaatttaacagaaagatggaaataattaaaatgaatcaagcagatattttggagctgacaaatggaattcatatcctgaagaattcatcagcatatcttaacagcagaattgatcaagcagaataaagaattagtgagcttgaagacaggctccttgaaaatacagtcacaagggacaaaagaaaaaaaaataaaaaaagaaggaagcatgcctacaagacctagaaaatagcctcagtagggcaaatctaagagttattaaacttaaagtggaggtagagagagagaggcgtagaaagtttattcagatggttaataacagagaacttctcaaacctagaggaatatatcaatattcaagtacaagaaggttatagaacaccaagcagatttaaccgaaataagactacctcaagatatttaataatcagattcccaaaggtcaaggacaaagagaggatcctaa

SEQ ID NO: 823100 - DNA, 574 bp, Homo sapiens
agatagagatatgtgaccttacaaatagagaattcaaaataggtgttttgagtgaaatttaagataacgcagagaagcctttcaaaatcctatcagataaatttaacagaaagatggaaataattaaaatgaatcaagcagatattttggagctgacaaatggaattcatatcctgaagaattcatcagcatatcttaacagcagaattgatcaagcagaataaagaattagtgagcttgaagacaggctccttgaaaatacagtcacaagggacaaaagaaaaaaaaataaaaaaagaaggaagcatgcctacaagacctagaaaatagcctcagtagggcaaatctaagagttattaaacttaaagtggaggtagagagagagaggcgtagaaagtttattcagatggttaataacagagaacttctcaaacctagaggaatatatcaatattcaagtacaagaaggttatagaacaccaagcagatttaaccgaaataagactacctcaagatatttaataatcagattcccraaggtcaaggacaaagagaggatcctaaaagcagcaag

SEQ ID NO: 823101 - DNA, 637 bp, Homo sapiens
atattcagattcattagagaattacaactgcacggtcttaacagcatttcctcaccaactgtttaatagctgcttcaaaataacagtgatttgcaataatgaaaatcaaaaattatctcagaggatatgtgtttcttttttttttttattttcccccgagatggagtcttgctctgttgcccaggctggtgcgatctcagctcactgcaacctctgcctcctgggttcaagtgattctcctgcctcagcctcccgagtagttgagattacaggagtgtgccaccatgcccagctaatttttgtattctcagtagagatgggatttcatcatgttggccaggctggtctcgaactcttgacctcatgatcctcctgcctcggcctcccaaagtgctaggattataggcgtgagccaccacgcctggcccaatatgtatttcttggtatcctaagaagcctacttaggcctttatttcaaaaatagtgtattaagttcattgactttaactacagttattaaatgctttatttttcttcttttactcttttttttttccctgtcagtattaaggtcacctatcttgtttattgagcttcatttagttgactttctstcatcattaggtatttagaatta

SEQ ID NO: 823102 - DNA, 541 bp, Homo sapiens
atgcatctaatttactgttcagaactgtttttctgagagcatgagaaaactcattattgtaatacttaacaccattttctactacagtctgaaataccctttgttgaattaagttgggctcatcctttggaaggaaagcaagtatatagatcaagctgtattaaaatgaaagtgcagagatagtcttagaatgagaatataaagtgctttttttaaatccaaatctcaaaatagcaggtaacattgtatttacaaagagacagaggtaaaacacagggacaatagtattgggaggcatggatagaaaggcctataaactggcttcagtcccaaccctcttctccatctcctacattctgactagttggtaaatggttctgaagaagtggatgcttgataagggcctaagcattcaatatttaataaacattgcttgatgagcatgcccatttaagttcgagaccagyatagtgaaaccctgtgtctactaaaaatacaaaaattagccaggcgtggtggtgcatgcctgtaatcccagcta

SEQ ID NO: 823103 - DNA, 634 bp, Homo sapiens
caaaagttcaatagtggagttccatctcccatctatcaagaaaatagtgaagggcagaatttatagggaattcctaayatcctggataacatggatttttttttacaaattgataagaaataaatgatttttttgtcttcctcagatggagagcacaccaaatcacacagttatatcatagtgaaattacacaacaccaagataagacaaattttaaaagctaagagaaaagctattataaagcaacaacattagaataattaagactattaatcagcaagtataagattcagctaacaaaatacagctaaatatagatatttaagaaaatttaaaatgtgggctattatcacccatacggaatgtcatagttgtctctgagcagggaagaaattagacctcacaagagtaaaagcaacacatgtcaactttatctgtagtcctttttgtttattgtggtaagaaaatttaaaatctactctcttaaatttttatttgcacaatacacttttgtgtgcactatgggcacaatactacacagaaaatctctagaaattattcatcttggacaactaaaactttatagctattggatagcaaaccctccatttctaactcttccatcccttttaac

SEQ ID NO: 823104 - DNA, 634 bp, Homo sapiens
caaaagttcaatagtggagttccatctcccatctatcaagaaaatagtgaagggcagaatttatagggaattcctaacatcctggataacatggatttttttttacaaattgataagaaataaatgatttttttgtcttcctcagatggagagcacaccaaatcacacagttatatcatagtgaaattacacaacaccaagataagacaaattttaaaagctaagagaaaagctattataaagcaacaacattagaataattaagactattaatcagcaagtataagattcagctaacaaaatacagctaaatatagatatttaagaaaatttaaaatgtgggctattatcacccatacggaatgtcatagttgtctctgagcagggaagaaattagacctcacaagagtaaaagcaacacatgtcaactttatctgtagtcctttttgtttattgtggtaagaaaatttaaaatctactctcttaaatttttatttgcacaatacacttttgtgtgcactatgggcacaatactayacagaaaatctctagaaattattcatcttggacaactaaaactttatagctattggatagcaaaccctccatttctaactcttccatcccttttaac

SEQ ID NO: 823105 - DNA, 619 bp, Homo sapiens
aatctctagaaattattcatcttggacaactaaaactttatagctattggatagcaaaccctccatttctaactcttccatcccttttaactgctactctaccatttcttcccatgaatttgactattttaatgacctcatataagtgagattatgtagtattcgtctttttgtaaatggttgtttttcacttgacatagtgtgtacaaggtgcatccgtattgctgtatataacaaaatttccttcatttattttaatagagcagttttaggatcacagtaaatttcagtgaaaggcacagagatttttcatatattccttgctcccacacatggatagccttccccattatcaacatcctccaccagagtggtacaactgttacaattgataagcctacacagacacctcacaatcaatcagagtccacagtttacattagggcttactcttgatattacacattctatgggtttggaaaaatgtgtaatgccatgtagtcatcattatagtatcatacagaatagtgtcactgccctaaatatactctrtaatcaaccttttcattcctctcaccttcgtaaccattatcaaccactgatcttttcattgtctcca

SEQ ID NO: 823106 - DNA, 598 bp, Homo sapiens
ttttttttttttttttgaggggagtcttgctctgtaacccaggctgggatgcagaggcacaatctcrgcttattgcaacctctgcttcctgggttcaagcaattctcctgtctcagcctcccaagtagctgggattacaggcatgcaccaccatgcctggctaatttttgtagttttagtagagacagggttactccatgttggtcaggctgatcttgaactcctgaccttgtgatccgcccccctccccaggcctcccaaagtgctgggattacaggcatgagccaccacgcccagcccatttttcttttttctttctcctttctgcttctcatactaggtaattttaattattctgtcatcaagttcactgattctttcttctgcctgttcaaacctgctgttaaatccatttgaatttttttattttaggtattgtgctttttagcatcagaatttatattaaaatacattttctactttctatctctttgttgatattctctacttattcttacatcattctcctgattttctttagttttgtccacagtttcttttagttttttgagcactttaaaagcagctgaaatctttg

SEQ ID NO: 823107 - DNA, 653 bp, Homo sapiens
ctttcagcccagacacttccagccctaggtatctttatttggggtctccagagacctttttataaaattcgagtaaggaaggggaaaagttgaagatacttttcctcactstaactcagtacttttctactctttgccctttgcttttctctcatcccgtcccaggtccataaaactgcaggattttttttgtgggggagctccctgggcgttgagatgacccccgtgtctgtgctgagccccctgaccttcaactggtgtccttggggagaaaatggaataggggtggggctgggggttcagcataatctctggtattagccttctgcttatactatctcaatcagaaattaaaggtctgtttgttacttttattttgggtttgttgctttgattggctacttgagcatctgagatttcagctctcctcagctcagcggagctcctgacacagttacataagttttcttcagagttttcaaaaaataattcttagtgtgttagtcactcatttagattctgtctcttcacttagcagatatttaaggagcaaacccaccgccctgcagtatgctaaggtgctaagttgtgtgctgcaaaacaggagaaaccaacattgttacccttgaggaagtgtagaaagtggagaaaag

SEQ ID NO: 823108 - DNA, 653 bp, Homo sapiens
ctttcagcccagacacttccagccctaggtatctttatttggggtctccagagacctttttataaaattcgagtaaggaaggggaaaagttgaagatacttttcctcactctaactcagtacttttctactctttgccctttgcttttctctcatcccgtcccaggtccataaaactgcaggattttttttgtgggggagctccctgggcgttgagatgacccccgtgtctgtgctgagccccctgaccttcaactggtgtccttggggagaaaatggaataggggtggggctgggggttcagcataatctctggtattagccttctgcttatactatctcaatcagaaattaaaggtctgtttgttacttttattttgggtttgttgctttgattggctacttgagcatctgagatttcagctctcctcagctcagcggagctcctgacacagttacataagttttcttcagagttttcaaaaaataattcttagtgtgttagtcactcatttagattctgtctcttcacttagcagwtatttaaggagcaaacccaccgccctgcagtatgctaaggtgctaagttgtgtgctgcaaaacaggagaaaccaacattgttacccttgaggaagtgtagaaagtggagaaaag

SEQ ID NO: 823109 - DNA, 598 bp, Homo sapiens
ttacttcttttctcagtctctcatctccacctgatgagaaatacccacacgtgtggaggggcaggcccccttcaaagaaaggtgggtaaacaggtgcaggactgctamatcggtgagcataactaatccgataagcagaggtccatgggtggttacacaccctggaaagaaataagcattaggaccatacaggacgctctatgactaatgcttaccagaaaatgactaggggtgctggcatccctgtgttcttttttcagatgggaaatgttccccccaaggcaaaaatgcccctaagatgtattctggagaatcgggaccaatttggccctcagacgctaacaaagaaacagcttatattcttctgcactaccacctggccgcgatatcctcttcaagggggagaaacctggcctcctaggaaagtataaattataacaccatcttacagctagacctcttttgtggaaaagaagggaaatggagtgaagtgccatatgtacaaactttcttttcattaagagacaactcgcaattatgtaaaaaagtgtgatttatgccctacaggaagccctcagagtctatctccctacccctg

SEQ ID NO: 823110 - DNA, 644 bp, Homo sapiens
ttagtttactgataggttttatgctgctaagaatccaaccaacagcctcacttaacagaggaggtaaagggaggttttcactgtgggtgttactgcaggcctccaactgggatgaccagcaatgagaaagattttgggaatgtgatcattcagaaaagacaggtcagcagggcagtcccctcaggttccagccctcagcagggacaagacatcagggatgttggtgtctgcttatctacagccctaatctgctgattgaacagtgaaaatcttttggcagctagatccatactaggcacagagctttctatttaggtcagaaagctttgggatgaacccctgccagccagaaggggtgtcctgcagtgccaccagaagtggagcctggatggacaggagaggtttctcttttctcctcatttccaaagaaacaggattttatggagtgatggcccgggacgtccggccttctgtggggcagagaggatagggaaccactttgatatagtcatctgttttggccacktctgttggccatgagtgtcttggtggagaggtggggatgtatctgacagcagcagccttgccttaatttatatctggtctcccgtccagaagtgtttggcccgtggtgtagatgagct

SEQ ID NO: 823111 - DNA, 539 bp, Homo sapiens
gacagacctgtcaaaggctggcttcctgaacattrccaccagagccctttaataagcaaagcagagagtattactcaccatagtacagaagagcaaacaccatctaggcagagctttggcaatgactcagaggagaaaggtgacatcagaatttcttgaaaattggaagtttgttagcagtaagatcagtggaaagaggaaggtggggattccgggaggagggatacaaaaaatcttagggtgaaatgatctgctgatgctttcctttgaagggttgaggaattttttgtgaagtttgggcagcggtcctgcaaaagcaaagtcgcgttaatgtagacagtgagaagtgctttcagctcttggtgcccaggctgagtgtggagtagattgtcttgattctcacacctaggagaagatctgcttccctggggctggagtcctggggacttcttttgtcacaggcttcaagttgcaggcgtgttttgattgggttggactaatgctgttttgctttgggctggtctattgccaccatgaac

SEQ ID NO: 823112 - DNA, 572 bp, Homo sapiens
cacacacacacacacacgtcggggctccatagtcctaccatttgtgttctcaaagggaagagttggcgagggtgagctaggatgaccactagatgacagtatataaaacacctcttaggtgctcaggtgaacgaagtttgaatactgcccagagctgcgattcccagattctgatctgtaaaattttttaaaaaggaaaagaaggcccagtgcctgtaataccagcactttgggaggttaaagtggaataattgcttgagtacaattcgagaccagtcatagtgagaccccatctctacaaaaaagaaaaaattagccaggtgtggtggcacacacctgtaggcccagcttcttgggaggctgaggtgggaggattgattgagcctggaggttgtggctgcagtgagccgtgatcacactgcgtgggcaacaaaacaagactctgggcattccagcttgggcaacgaaatgacaccctgccttaaaaaaagaaaaagaaaacgaaaacaggagaragccattggcttgccaagtttttatcttgccaggggacatcattagatataaatcaa

SEQ ID NO: 823113 - DNA, 342 bp, Homo sapiens
tctccaattttgttctttttaaaaaattatttagcaatttctgcaaaacttttaatatcagcttgtyaatttttaccaaaaaaaaaatgtctattgggattttgattgggattgccttaaatgtatagacccaagttggggaaaattgacatcttaacaatgttgaattttccaatctatgaacataggaattttctccatttagttagatcttttctaatttccctcagcaatgttttgtagtttttagtgtagagatcttggacttgttttgttatagtttttacttagaaagtattaatatattattaattttgttacatttattatatattatatatg

SEQ ID NO: 823114 - DNA, 667 bp, Homo sapiens
cagagtcataaagaatgcacagcactgtgcactgtgccaaaagccctattgccttcatttcttttactcctcaccagaatcctatgaggcagggaacatcactgtctcaatttcaccactgaagaaactaagacttaaaagggtaggtatcttgcccaatatcatatagctagtatctgtttctccattcacattaattaatcattcattcattcaacaaacattggttgagaatctactatatgctttggcaatgttgagaaaatttgatagctgcccttaaaaactcacagctcaatgggggaagaagtcaagcaaacaggtctactgcagtgtgctgtgctgtgtgagggagctgtgctctgcggcgataacagctagcaggtcggtctctcacctggttgaagagtccagtcaggctcctgattagcacagtggcccctatcggtctctgttgcacctcgtccctccaatccacccaccaccctgcatctggagtgatctgtctagactcacagtcaagatctgtctagactgatctgtcgcattcactcatttttcattcagctaacaaatatttttgagtatctactttgttagcccttggagayacaatggtgagtaaaccagacttggctgggaccttcacagagcttgcaaggcaggt

SEQ ID NO: 823115 - DNA, 391 bp, Homo sapiens
cttccacattgtggaagctttgtactgtcactctgctcaataaagcctacagtttttttctctcagtccaatcagtgtctctctctcaccaccggctgccgccacaccaaatctttggmgtggctaaggcaagaacctttggtgttacattataatccttttaccaaaagtatattttactttccttacacaccttgcacataaactgtttctttaatagtttcacattcaggaggcctaattgcttttaaatcatacaacatttcttgcataaattcccttctgtaacttttttttccacgacttttacagacaattcttcaacatgcctcaactttctgacttgttgcaaacatcgttttctttaaacaaccagttaatttattttagg

SEQ ID NO: 823116 - DNA, 591 bp, Homo sapiens
ggattttattgaaattcttttttgtgtctattgagataatcagatgktttttgcttttaattctctttatgtggtgaatcaagttattaatttgcctatgttgaaccaggcttgcagcccagtaataatgcccagtagaatcaaataattctatttgatcatagtgtattaactttttgatgtgctgctgaatttggtttgttagtattttattgaggatttttgtgtctatgtttattgtttatcaggtatattggccgaatttttttcttttttcattgtatctttggcagattttggtatcaggctgatgctggttttatagaatgcattagggaggagccccttctgtttttattttttggaatgatttcactaggattggtaccagttcttctttgtacaactggtagaaattgactatgaattcactggtccaaggttgcttggggttggtaggtatttttttattgattcaattttggaacttattattggtctgtttaggttttcacttttttcccagttcaatcttgggagatttagtatttccaggaattttttcatttcctctagattttctaatttgtt

SEQ ID NO: 823117 - DNA, 529 bp, Homo sapiens
tggtactggtataaatgtagatacatacacagatagaatgaaataggaaaacagaaataaagtcaaatacttaacaaccaactgatctttgacaaaaattacaaaaacataaattggggaaaggacacgctactcaataaatggtgctaagaaaactggatagccacaggtagaagaatgaacctggatccctctctctcaccatatacaaaaatgaactcaagatagattaaagacttaaatctgaaaccataaaaatcctagaagaaaacctaggagaaactcttctggacattggcctaggtaaagaatttatgactaagaccccaaaaacaaactcaacaaaaacaaataaattggacccaattaaactaagaagcttctgcaaaacaaaatttagcaragtaaacagacaacccatagaatgggaggaaatatttgaaaactatgaatccaacaaagaactaatatccaggatctacaagaaactaaaacaaatcagtaagataaaaacaaataattccatgaa

SEQ ID NO: 823118 - DNA, 560 bp, Homo sapiens
gttctctgcttgtggatctcaacaactacaaaaacaaagcctttgagtaagatgaagagaagccaccatgctaaaaaggattgaaagaaaaaagtattccagctggggaaacagcaagaagaagagcattttggcagaaaaaactcttggaatattaagagagcttgtaatattaagggaggcaacaatggttggagcttagcaaacaagaagagtgtagcacaagacgtggctggagaaataggtgggccagattatagaggacattgacagccctggtaagaactttggaatgtactctaagtgaaatacagtgaaggattttaggtagagaaatcacacattctgtttataattttaagatactattctgcctgctttgtagagatttgcaaacaaggatgaagctcagtggtagaagactacagtaaccaaaacagcatggtactggtaccaaaacagacatatagaccaatggaacagaacagaggactcaggaataaygccacacaatcacaactatctgatctttcacaaacctgacaaaaacaagcaatggg

SEQ ID NO: 823119 - DNA, 560 bp, Homo sapiens
gttctctgcttgtggatctcaacaactacaaaaacaaagcctttgagtaagatgaagagaagccaccatgctaaaaaggattgaaagaaaaaagtattccagctggggaaacagcaagaagaagagcattttggcagaaaaaactcttggaatattaagagagcttgtaatattaagggaggcaacaatggttggagcttagcaaacaagaagagtgtagcacaagacgtggctggagaaataggtgggccagattatagaggacattgacagccctggtaagaactttggaatgtactctaagtgaaatacagtgaaggattttaggtagagaaatcacacattctgtttataattttaagatactattctgcctgctttgtagagatttgcaaacaaggatgaagctcagtggtagaagactacagtaaccaaaacagcatggtactggtaccaaaacagacatatagaccaatggaacagaacagaggactcaggaataatgccacacaatcacaacyatctgatctttcacaaacctgacaaaaacaagcaatggg

SEQ ID NO: 823120 - DNA, 352 bp, Homo sapiens
aaatatctgtggtagttaaagaaaatcgaactaaaattatgtcctgttcaagattttaaagagactgccacacacgtgcatgcatacacrcacacacaaacacacacttcacatcaatctttggattccataattaaaatgtgatttattgtctaataataacaacagtagcttttgttgtgttaactgctttctctagatcatataatttaaacttcaaaatatgtcattattttattttattatctgcattttgctattatcaacactttcagaggaaattgaagcagagagagattaaatagctttgccaaattcacttggccaaaatgtggcaaactgggatttgtga

SEQ ID NO: 823121 - DNA, 487 bp, Homo sapiens
tccaaactgaagagataatgagccatagctataaaaaaamcaaaacaaacatttaaaaagacaaaaaaaaccacaaaaaactatgaaccccaagtaggaatccttaatccaactctcgaataaaatcaatgtactcaactcattaaatattttatataaacgttcttatttataaaatcagtatttgacaaattaacttctagaactatttcgggtaacaattttataatatctgtcttgagtaacatatttttgtggtaatcttcatcaccaatattatacgttgacttctgtttctagatttaatcttgatacactttaaaaaatcggcaaaatacataaagcaacaatttcatggacatcagacaatgattattagttatccttgagatgcaggaaacaaatgagctatacgattgtacaacctaacatccatgaaagagtttcaagccaaggtgcaagaatgggaaactcagacagaactagc

SEQ ID NO: 823122 - DNA, 487 bp, Homo sapiens
tccaaactgaagagataatgagccatagctataaaaaaaccaaaacaaacatttaaaaagacaaaaaaaamcacaaaaaactatgaaccccaagtaggaatccttaatccaactctcgaataaaatcaatgtactcaactcattaaatattttatataaacgttcttatttataaaatcagtatttgacaaattaacttctagaactatttcgggtaacaattttataatatctgtcttgagtaacatatttttgtggtaatcttcatcaccaatattatacgttgacttctgtttctagatttaatcttgatacactttaaaaaatcggcaaaatacataaagcaacaatttcatggacatcagacaatgattattagttatccttgagatgcaggaaacaaatgagctatacgattgtacaacctaacatccatgaaagagtttcaagccaaggtgcaagaatgggaaactcagacagaactagc

SEQ ID NO: 823123 - DNA, 600 bp, Homo sapiens
ctcttctctcctttgacttttccaccagagtttactgatgtggccaaattctcccaggcaagtccctgaaactcagccttcccattggctttgcaccctggtttcctcctccatttccacatgaatctcgggacgattccacatcctacctatattgctgtcaccagagagggtccagatatccaaactcataagttgctttacaactagcatcttttcctgggagcctcttttctttccaggtgccctctcttctgtttttgtgcctatcccgccaccagtccgcagcctgtgagctccttttacatcctctgcctgccttccgcagtggtgatcattcccaggaacccactgccagctcccctctcattctctcagcttcgcgtatgtgctgaagaccgactttgccaggccactggacaagatagtggtcctaaagaggaatacgatgcagtgagtcatctcgagcagttttcagacaaacgacagaaaagagagctagcctctgcatttycatgcaatccatggtcttcaactgttactctgagagtctatcattattccaaactctcgcattatcttgactggatagcactcaac

SEQ ID NO: 823124 - DNA, 542 bp, Homo sapiens
ctagctaatttttgtatttttttgcagagcggggtttcgccacgttgcccaggctagtctcgaactcctgagttcaaagtgatscgcctgcctcagcctcccaaagttctgggcttacaggtcactgcatctggctgagaacagtgaaattcctaatcagccttctcttactctttttcctgtactccctccttcctctcatacttaattcattccatatttcaattaacaagcatttattgaggtctgttagatgccagattttattcctgggctggggacaaagagctggaaagccacagtcacttctagctaaaccattcaaggaacttattagcaaacaggaaagcactctatagtgtgagcagtgctgtgctagagaatagagaataggcttctggaggtgcagaggaggcaattagtacataggtccaggtgtgttgaggaaggatttgcagaagtgatgtcattgacctggggcttaagagtctaatgggagtaaggtaagaatgcctgggaaaggccaagagcactgcatcaaa

SEQ ID NO: 823125 - DNA, 590 bp, Homo sapiens
atatatacttagagattgatggtagtatactgactgcataataagattcaggacagaaacaacaaacgagaataaaaacatarcattgtttcatattacagaaggtatgcagtaactggatagagacatcaaactgtatgtgttacaaatatgaagatttttaaatgtttaattgttgggatgataaattattcagtattttccagagaaacagaaccagcaggatgttttgtttggtttttaagaatttgctcacacaattttgcaggagtggttagtccaaaacctgatgggataggctagcaagctggaaaaccaggaagaattgcagtttgagtcaaaaggcagtccagtgtcagaattccttcttgatcagcagaaatcaatctttttactattaaatccttcagctgattagataaggcccaaccacattatggagggtagtctacttcaaagtccactgatgtaaatgttaatctgatctagaaacaccttcacagaaatatccagaataatgtttgactaaatatctgggcattcgtgtgcagccaagttgacacaaaaattaatcgtcacaagtccacctt

SEQ ID NO: 823126 - DNA, 641 bp, Homo sapiens
aaatagcaagtaatgccacttccatttccaccctcttgatttctgggcccatgaattctggctatgggagaaatggcaccatttattagacactgattcagagcatatacagcctcctcaagaagattcttcaagttctgtaaggaattgctacctagcaggtactgtaactgagtcttcagaaaatcatttcattgtactatacagtacctagcaggtactgtaactgagtcttcagaaaatcatatcattgtactatcaccagctgcttcaggatggtaaattccattagaatggcccattgtcacatcccatttgctgtgaaataagttctttggtcagaattaatgctgagtggaataccatatggtggataaggcatctgtgagtccactaatggtagttttggcagaaacattgcatgcagggaaggcaaatccatattcagggtgtctattccagtaagtacaaaacactccctttttcatgatcaaagtggttcaatgtaattaacttgccactaggtagmtggctgatcatcctgaagaatggagccatactggggttccgtgctggtctctgttgttagctgactgggcacaaagcggtggctgtaaccaggtaaaccttgatgagtggaa

SEQ ID NO: 823127 - DNA, 641 bp, Homo sapiens
aaatagcaagtaatgccacttccatttccaccctcttgatttctgggcccatgaattctggctatgggagaaatggcaccatttattagacactgattcagagcatatacagcctcctcaagaagattcttcaagttctgtaaggaattgctacctagcaggtactgtaactgagtcttcagaaaatcatttcattgtactatacagtacctagcaggtactgtaactgagtcttcagaaaatcatatcattgtactatcaccagctgcttcaggatggtaaattccattagaatggcccattgtcacatcccatttgctgtgaaataagttctttggtcagaattaatgctgagtggaataccatatggtggataaggcatctgtgagtccactaatggtagttttggcagaaacattgcatgcagggaaggcaaatccatattcagggtgtctattccagtaagtacaaaacactccctttttcatgatcaaagtggttcaatgtaattaacttgccactaggtagctggctgatcatcctgaagaatggagccatactggggttccgtgctggtctctgttgttagctgaytgggcacaaagcggtggctgtaaccaggtaaaccttgatgagtggaa

SEQ ID NO: 823128 - DNA, 630 bp, Homo sapiens
agaccatccgaaagttaacattgagtgtaatgaataatttagatttaggttagtaatgctgacttgtaagtagatttagagcattcctctttctgtagtgaatactrtacaagctagtttaatctgaagcagttatactgctatgctttgataaatcaatccattaatcttattcatataataaaaatcttacgttcaataatcacaaaagcaagcagctcatttatacagatgttgtttcagctcaactatctgtgctcaaatgctttagaatcatatgcctgtaaaggattcaaggtaatcttgtctatcattctgcctggagctgtgctgtatatactgtaacaatattagaaatctaagataacctttttacttgatcaaaaaactgaattttttaatgtactgactcatcttttgttgatttttaatattgtattcactatctttttttttttttcttttttgacagagtttcactctttttgtccaggctggagtgcaatggtgcaatctcagctcaccgcaacctctgcctcctggcttcaagtgattctcctgcctcagcttcctgagtagctgggattacaggagtgcaccatcacatctggctaattttgtgtttttagt

SEQ ID NO: 823129 - DNA, 630 bp, Homo sapiens
agaccatccgaaagttaacattgagtgtaatgaataatttagatttaggttagtaatgctgacttgtaagtagatttagagcattcctctttctgtagtgaatactatacaagctagtttaatctgaagcagttatactgctatgctttgataaatcaatccattaatcttattcatataataaaaatcttacgttcaataatcacaaaagcaagcagctcatttatacagatgttgtttcagctcaactatctgtgctcaaatgctttagaatcatatgcctgtaaaggattcaaggtaatcttgtctatcattctgcctggagctgtgctgtatatactgtaacaatattagaaatctaagataacctttttacttgatcaaaaaactgaattttttaatgtactgactcatcttttgttgatttttaatattgtattcactatctttttttttttttcttttttgacagagtttcactctttttgtccaggctggagtgcaatggtgcaatctcagctcaccgcaacctctgcctcctggcttcaagtgattctcctgcctcagcytcctgagtagctgggattacaggagtgcaccatcacatctggctaattttgtgtttttagt

SEQ ID NO: 823130 - DNA, 642 bp, Homo sapiens
aattctttcattctcatttgcatcactaaagaaccagattgtctattcaccctcagagatatcacaaggtgacaagcaagaaagaatttctcaaaataggggaaacagagacaaaagaacattgtattatattttcttgttataactgaattaaattgcatcataggaatggaatggcttaagcctggctctaataggctcttcttgtaataatttaccaatttcaaatattcatagatgataaagtattgttacatggaaaaggcctcaaatccctcagtccactagatgcaggcttattcaagtgtccctggatatatctctatttctatctctatctctagttctgtatgcatgtatgtgtatgtacatgtacacacaaattcaaacatgtacataaacacatatatgcacatatgcacataatacatatgcatcatgtttggaatgtgtactaatgagagagcaggtgtactagtcagtgttttccagagaaacaaccattaggatgtgtatgtatgtacagatagatagatacgtaggtagayagatagatagatagatagatagatagatagatagacagatagatagatagatagatatttttaaaaataaattgaagttgacaattctaaaatc

SEQ ID NO: 823131 - DNA, 356 bp, Homo sapiens
tctaaaatgtagttcaaatccaatatttctttactgattttctgtatggatgatctggccattgttaacaatcttgttttgaagtctcctagtattactgtattgccccaatttgttaatatttgctttatacagttaagtgctttggtgttgagtacatacatatttataattttatgtcttctggatgaattgattcctttgccaatatgtaataaccttttctatttttaaaattttttacttaaagtctattttgtctgatataaayataactacctccgcatcttttggtttctagttgtatggaatattctttacaacttttcatattcaatctgtgtttgtccttaaag

SEQ ID NO: 823132 - DNA, 510 bp, Homo sapiens
cagttcttgctcacccatctctattattctgacattctttgattcattgaattcaytgttcctccccacagaaggtaacagggtaccaccatttatcaccaattaatgtcacattctcagcattctcttccttcataccgataactaaaaggacctgaaaccaaccactcagcttgctttctaaatttactgaatctcattctcacggtccaccagatcatatctacttgataacacatatgctttgtccattatttctttggacactcaaggaacccatttgtgctatatttaaactggtatactgaaaaatttactgataatttaaaactatttttacatgattgctatttaatttttcagtaaaaatggtcattttaatttattaaagtcatttgtcattttatattaaaatgatattgtaggtatttcttctacccaatgtcagattacttgtaaatatataataaaattatttgcattaaacaatgtctcttttgttattaaaat

SEQ ID NO: 823133 - DNA, 616 bp, Homo sapiens
cgttgttttccagaagcttggctayggagctgggggaatacctggtgtgggagaaagatggagccaaaaatgtataccactaacagggtgtaaaaaagttttgcacatggacattaattaatgaaaagatatgccctcaatcctcaatttctcattatccaaaatgaataatttcctaaatatatctaatagttaccagtcatgggtatgaatattgcaaatagatgttccattgataaactacattttgtagtgattgataatttatttatatcatttttatgatacttagtctggaactaaaaataaattttagtattatatttatttttaagtaaacaccctgcaagcataaaaaatactttaaagacatgagtagcactatggttaaggaaatagaattctatatttacctcatcattatgaaacttctgagtcttactttctacattagtgaaattggacaatgactgtcctatcaggggatgttacggagatgaaaaaggttttaaatgcaaaaatatttgaaaacgtttcaaagtatacaaaataaaagtaatggtggtaatgatatgataaagagtcaatcatcttattttgggaatcaaattcaaag

SEQ ID NO: 823134 - DNA, 572 bp, Homo sapiens
ctgccttcccactttgagtcctcccatggcaaactacaacctaactcagtgtgtaaacaaacttcagcctaactgaagagttgattcctgtaacaaacaggtgagtcttggccaatcacagatcacagattgtcagctgatcagaccatgtcaatatagggtaaatgctttaccacaccatccctaagtaaggcaaattccaagctgtaaccaaccatgctgtttctgtagaacatttcttttctattaatactgcccctgcccccatgttgctgggtggagctcccagtacctttcctagttctgattactgtccaattcatgaatcattctttgctcaaataaacacgctaaatttaatttataaaaaaattttcttttaacacttcatttttttaaattttgaggttcagggttatatgtccaagtttattatataggtaaactgtgtgtcacaggcatttggtgagcagataattttgtcacccagrtaataagtatagtacctgataggtatttttttctgatcctcttcttcctcccattcttcacactcaagtaggccccagtat

SEQ ID NO: 823135 - DNA, 495 bp, Homo sapiens
ttgttttgcattcatatttaatgtaattaattacttgagtaaaagaacaaaaaatgatttagtgtctcagtggatgaagagaggaacagtggtttccaatccatgctaccataatccctggagagccccaaaagtaataattggtatctcagacccagatgaaatatttcaaaaatgtaaatgatattttaccagaagctaaataatataccaaatttctttgcttttgcttgatgcaaaaccacgattacttttgcacgaacctaataatgctaactcatttgtgagttagtatctgtgagttagtatgggttagtttttgctcaattggcagttagttttatatgccttgaaaaattaaaattggaaattatatttactgcttaaaagatgaagttcctttggyagaaacagttctttcataagatgaagcctgcataagaaaaataattgaagtagccctttagtattatttattccctatacctctggtta

SEQ ID NO: 823136 - DNA, 562 bp, Homo sapiens
tttcattttttttgtgggtgctattgtaaatgataatgtgtttttaagttcaaattccacttattaatcagtggtatacaggaaaacaataggcttttgtgtaatagctttgtatcctgcaacctttcwttaatcactttttagttccagtagttttttttttgtttttttgtttttattcttttgcattttctacacaggcaatcaagcagcctgcaaagacagttttacttcttccttctcattcagtacaccttttacatcattttcttatgttactgcattagctaggagtccagtacaaagtagaaaatgagtggtgaggggacattcctatcttcttcctgatattagtgagaaaacttctagtttctcatcactaagatattaaatgtagtttttttgtagatgtttatcaaagagaggaggttttcctttattcccagttcgatgagagtttttcatttatttcagcttgtatagatattggattttgtccatgctttttctgcatctattgatataatcatgtgatttttcttctttagcccgttcaggtgac

SEQ ID NO: 823137 - DNA, 598 bp, Homo sapiens
tttgtttttgttgttacatgtacttttgttgccataacaaagaaatgattgccaaatccaatgtcataaagyttttcttctatgtcttcttctaagagttttacagttttaggtttagatttgttacctattttgagctaatttttgtatataatgtacggtaacagtgcaaccttattctttgcactttgatatccagttttctcagtaccatttgctgaaatgactatccttgcctcattgaaaggtcttggcaccctcattgaaaaacatttgcaattacagcagggtttatttctgggctttctgttctacctgtatcttttttgacgatttttcatgcactcagaaactgtatatgctggtactatacactatgcaagaaaaaaaaatcagagaggaaaattagaacctttaaaagatggtgtctgttactgcttgctgaatagtatacccacaacaagatgaggagctactttaagaactagaagcaaaaaagaagtgactctcacttaaaatgaatgattctttaagaatgtattgagcattgccaagtatccaacccttggtgttgaactgattgctcttcctacattac

SEQ ID NO: 823138 - DNA, 592 bp, Homo sapiens
actcagagagcagagctcggggaagatggacacagactcggagaggagagcccagggaagatggacacagactcagagagcagagcccagggaagatggacacagrctcagagagagcagagcccagggaagatggacacagactcagagagcagagcccagggaagatggacacagactcagagagcagagcccagggaagatggacacagactcagagagagcagagcccagggaagatggacacagactcagagagcagagcccagggaagatggacacagactcagagagcagagcccagggaagatggacacagactcagagagagcagagcccagggaagatggacacagactcagagagcagagcccagggaagatggacacagactcagagagcagagcccagggaagatggacacagactcagagagagcagagctcggggaagatggacacagactcagagagcagagcccagggaagatggacacagactcagagagcagagcccggggaagatggacacagactcagagagcagagcccggggaagatggacacattggcaagggcgtttgtagggcaca

SEQ ID NO: 823139 - DNA, 577 bp, Homo sapiens
cagagaaaatcaccatcacaaaaaggacgactggaaggaagaaatggaccattgaatgtaaatggactaaactctcttatcaaaagccatagagtggctgaatgaatgaaaaaacaagacccaatattctgttgcctgcaagaaacacacttcacctatagagatatacatagactgaaaataaagggatggaaaaagatattccatgccaataaaaccaaaaaagagcaggagtagctacacttatatcagacaaaatagatttcaagacaaaaactgtaagaagagacaaagccattttacaatgataaaataatcagttcagcaacaggatataatgattgtaaatatatatgtaccccaacactggagcacccagatatgtaaagcataaaaaagagatagaccccaatagaataatagctggagacttcaacatcccattttcaacactgaacagatctcccagtcagagtatcaagaaacattggaattaatttgcactatagaccaaatggacttaatagatttttamagggattttttaaaaattatactttaagttctagggtatatg

SEQ ID NO: 823140 - DNA, 597 bp, Homo sapiens
ctccgtcccttcaggaagagccagggagcaactgtgtaagaggagcctgggtttcccactgacccctgagatttccatgggcctggtcttcccagagggcccctgggctttccacaggcatgcccagatttgccragaatgctgtgtgcacactcatctcagcagggcaggcccatcagggaacacggccacctttaataaccctggagcgggaggtgggacaatcaacaagcctgcctgctgcagctggttgggcctgggttcatgttcctcatgagaggtggctggagctcgtggagagaccaggcggggggcccacagcctgcagcccaccctggcagtgccagtcctcagcccagcaactctggtcagcccgtgcaatctctctgtgcgtccatttcctcatttgcaaatggagtagttgatgcactttgtgttgaaattgaataagatggtgtgtggtgtgtgtggccaagagcagagctctctcctctcccggtgggtgggtgggtgctggtgcctttctcactgccgtgcacacctggaacacctgccttcttcattcagagccagggcctctgcgctcccctgagagcc

SEQ ID NO: 823141 - DNA, 624 bp, Homo sapiens
tcacatgtttgccatttcatacaaaggaaamtgaccttcccttttccctgatgtcattagctgagtccagaaactgcagtgacatcctcttagcagatctggttgccctacttgggactcttcctgaaatccttcaacccatgtggaaatggtgcctcaagtcaaagtctctcgaaattttctcttgtgatccaagtatccaagtttaaaaaacaaattatctaagttaaaaaaaaaagatttccttacatcttcttgcccgtttggccatgtagaccacatatgcccatcagcctgctgaaaaaagtgggagttcctagagatgagaatggtaataatgcacactgtcagcatcactctcttcaaatcattggaagcccttttgctttctggaaagtaaatttgaagcatgtgagagagtaacttctggcaatggatgaggtaaatggtgctcaggctacagaggcaggtctgcaggtgaaaaggccatggtgccaagacagatgggcccatgccccacccaggtgcacagagttgggtggggggtggctgccaacatggtcagacagatttgagcaaagacatcctcaaattaaagcaaatccctgcctctggggccttgtc

SEQ ID NO: 823142 - DNA, 564 bp, Homo sapiens
agttcatgggttgctataagagttgaatgagatcttcatttaagatgcttacagtatcctctggcacatagcaagcattcagtaaacgtgagctgacatcactacacttacagctgttcccattggccagggctgctgagaacccagcctacttcatacctccactctgatgaaaggccaagaaaaaacttttctaactgcttttcattctaatgctagtttttgccttttcaccctcctcctttacctctatcattttcctgactcattttccctttgctacggttgcctggcttactgttaatagccattctcaccacctccaccaccatcacctccacaatcatttactgacctacacattttgtatccttatgttgtatgttcatcttgaaacaaggtagggtataaacatagactatagaaaagcataaagacgatacaagccatctaaactgggctataaatctccgtgattttatcaaragtaaattagaaaataatgctatgtattactggaagtaaacacgcatgaaacttccttttttccattttttgttaatg

SEQ ID NO: 823143 - DNA, 521 bp, Homo sapiens
atgttgtacacacattaactgtttccaatttactaaatacctcctctataccagtcactctgccagggactattgacactgaatatatycagtcaccacttatacgaagcgtatagtctaatgaggaaaacagaccacaatgatgaaagtggatagcagtgttgtgatagttggaaacgcggggactccaggagcatggaggaaaaagcactggaccaaatcaagatggtgaaggcaataaggggcagacccaagaagcttccccatggaatctgacatctgagttaatcctgaaaagttgaatacaagtttgtcaggctaaaaaggagaaagaagttgtcctggacagaagaaacctcataggcaaaagcttggaagtaacagtctggtttactctattccctatttcccttttaaggactttccaccacaagggctctttaaaaatgataccatttcagacaacacctgctttccattcagcacaacaagttgtttaccccagaacaccctcaatcaat

SEQ ID NO: 823144 - DNA, 434 bp, Homo sapiens
ttgcccccggatccatgccacaccatccttccaccctgttctatgctccagaagcctgacctgcagcaagggcttcccctgcccatgactctcagctgtgttggccaaaggtgaacaratggccaagtgtgagcaggtgatgggaggcagggaagagagtaaggctgagatatccatttccctgagactccctccctgtggggtcccacagattaactgcacccaacagaggagatcaccactcctgctgggcctttccacacagacctctctgtttctacctcctggtgatggtgacttccctttgtgacttctctattccctgcccacacctttgaaatagtcttcttattcacctctccctagataatcccaccttcagggtactgcttcccaccaccctgccaggacactgacaaatattggaagttttg

SEQ ID NO: 823145 - DNA, 640 bp, Homo sapiens
aaacattttcttttattaagctttgcattctctcaaggtaggaaactcagcaaacaccttcatatgctaatttccagaatgaaagagcagagataaatgactcctcttacgaaaagaactgtaaacaaacagggtcttcacttatggtttcattacctctatttagtctgttctgtgcagcagccaacgtgcacctgtctacatatctgaggcgtgcattcatgcattcatgcgcacttagctgtgggattcatcacatgctcttcctggagtcctcagttggctctaggctgtatttgatgatccaagtgcaggcttccttgaaggcagggagcagtatttttaaaactggttggtacaggttaccatcttgaggccagagcagtactgcagctgggtagccacctggttgtgtgatcctggaaaagtcatttcatttttctgtggtatcgttttcagagaaaagtccagagatgtcctttgtcctccactgaaggacccagccattctygctctttgttcaggtctctctgctcaaaaccaccttctgtctagcaatatctctctagctcccatctccagcccgacttcattgttcatgacacccatcacttcctgacattatgctacgtaattatgt

SEQ ID NO: 823146 - DNA, 630 bp, Homo sapiens
ggatttttgaaaagtttcctgatgagagaaccatgaccttttcaagggtagtgatggattgatcagggcaagcaataggtagattttttaaaacaagcctggcgaaaaaaacaatgatatatatctaccaaagttggctggaatacccggctggtgtcccagtcaggaaacacaggaaaaggttacatctgtagaaagaaaaacagcttgttaagcaaaacaatgcagttaaaaaccaagctcactgtaagaaatgccgcgtgggccagtggggacggccatgccgaaagcgctcagtgctcctgaagctgggtggccaggtgttttcacacaaaaaggccttccctgctcgggccatgggataagcctttgagtggagacctaggaaggagctgaagtctgcgttgggggtggaaggtggcaatcccattagacagctctccctcgtgtgaatttatgaagccccacgcagactgtgacttttaaaataatcacttagttggttttagcacatggcgcagatttcattacaggccgccccttaacgagcattgtaacctggaggaaagaatccaaattctttagtcaccacctaactccacattcawtaccttgttgcccagggtggag

SEQ ID NO: 823147 - DNA, 630 bp, Homo sapiens
ggatttttgaaaagtttcctgatgagagaaccatgaccttttcaagggtagtgatggattgatcagggcaagcaataggtagattttttaaaacaagcctggcgaaaaaaacaatgatatatatctaccaaagttggctggaatacccggctggtgtcccagtcaggaaacacaggaaaaggttacatctgtagaaagaaaaacagcttgttaagcaaaacaatgcagttaaaaaccaagctcactgtaagaaatgccgcgtgggccagtggggacggccatgccgaaagcgctcagtgctcctgaagctgggtggccaggtgttttcacacaaaaaggccttccctgctcgggccatgggataagcctttgagtggagacctaggaaggagctgaagtctgcgttgggggtggaaggtggcaatcccattagacagctctccctcgtgtgaatttatgaagccccacgcagactgtgacttttaaaataatcacttagttggttttagcacatggcgcagatttcattacaggccgccccttaacgagcattgtaacctggaggaaagaatccaaattctttagtcaccacctaactccacattcatwaccttgttgcccagggtggag

SEQ ID NO: 823148 - DNA, 594 bp, Homo sapiens
gcaggggagcacagcagaaagaagcatgggtgaagggatccgagagtcaatcctacctggcaaataggagtgtgatcctggcatccagtttgtrtctcagagtctttgttcccaggtagaactgggagactgagctagatcaggggttcttagaaaacagttgagggggatcatgaacttaatgaaagaatgaatctttatttcctataatctttaactaaaatgtatagcacttcctccaattatgaatgtaagtcataaaccacaatactactaaccatacatgttatattgttccaatacaaattacagatattttcacattagtataatttttagttatctcagaatatcatttatgatcactagctcttcaaatttacaaagatcatctcagtcacagctgtttccctttacttaatgcattgggaaagaagcacatgcatgactgtatcaaaacatccttaaaaagtattgattagtgtttgagcataattggcttcctctataatcaaacgtgtgctagctgacgctttctgaaatgtttttcttagatgtgactttatcagactgcctatatggtccccttagaca

SEQ ID NO: 823149 - DNA, 613 bp, Homo sapiens
taatatcttatttgtcatgagtataaaacttctaagaatataagcacattattatattgattgtcacacagagcacaatgcagaatttagtggggatgaatgtaattaatctatgaggctatgccatgccacgcctgtgactggtggtggggggtcaggagtctgaacaaactgtgtgctaaaaatggggagagagagaaggaaggaaagagagaaagagagagagaggtgggtacttgtaatgtacagagtacaggtctggccttcccctcacccctcagggccccttaagggaaggggaatggggaagtgagaatgaatgtcttcaagagcccaccaggtagggaatgggaggaatgaagggccagggccagggcctcccccactgcatgggaaaccacacttgccacgggaggagcttctcctttatggatactttgagactctgcattattttctaattcaggataataaatccagctccctcaygactttccctcatattatctgcctttcgtaatcccttgtgtcatgttacatgtcacttctcttcctaatctccatgctccagaaccccccaggaattgtcatttgtgaatccttggttaattaa

SEQ ID NO: 823150 - DNA, 544 bp, Homo sapiens
atccacttaagcagagatgccttcaagaacatcagtgagctctttgccaatcagtccaggaaggacctggacccaggcatggacctgttagtgctgtctcagggacaccagaccaacatcctggacatcatcctcgtacacaaggaagctcttaccaaagtcacggacaacaggcaacatgtggcagaagggaagacagaggtacagaggctgatggtgtcattatcacaggaacaggatttctttggccactttggctgaaattcaccacttccatccaattcactcaagtgagagacttgaaatcacagatggagcatttcttgcaacaagagatactattttttcaaaaagtcacctaaaatttgatagtgttgaataactagttattcgattgtgaactttttccagttcacaggtactttctacagcagaatgataacagtatcaaagagctagtgccagctatcggtggtagtacaaggatgattttgtgctcaastgaaacccagctgaatatagaattgtgtaggatagtgttaat

SEQ ID NO: 823151 - DNA, 601 bp, Homo sapiens
tttggttgtaggtgggcatcttccatgtgctggggcaggcagcttgtgatggcccaagcacactcttctagcactgtcatcccagaagaggccacctatgaacacacccatttagcactgtcaccccagaagcaagaggccaccttctgatggcctgaacacacccttctagcactgtcaccccagaagcgagaagccacctgatggcctgagcacacagtaccatcaccccagaggtcaccttcctcagcagctccatgagaaaagtcctggagaagggggccagtggctttgctaaagtcaggcaagcagctgagatgacaggaggagggagacacacgccaggcctccaggggacaaacggccactccagcagtctacaggcattggagccccttgccactaagaagaaaggaaagctgtagtcagctagatgcgttactgatgtctcaccttttctgtcttttttttttttttttgagacggagtctcgctctgtcgcccaggctggagtgcagtggcgcgatcttggctcactgcaagctccgccttccagkttcacgccattctcctgcctcagcctcctgagtagctgggacta

SEQ ID NO: 823152 - DNA, 633 bp, Homo sapiens
gtgagcagcagcaatatttattgcaaagagcaaaagaacaaaccttccacaccactgaaggggaccccagtgggttgcygctgctggctcaggcagcctgcttttattcccttatctggccccacccacatcctgttgattggtccattttacagagagaagattggtctgctttacagagaactgattggtccgttttgacagggtgctgtttggtgcatttataatccctgagctagacacagaatactgattggtgcatttataatcctctagctagacataaaagatctccaagtccccactagattggctagacacagagcactgattggtgcgtttacaaaccttgaactagacacagagtgctgattggtgcatttacaatcctttagctagacacagggtgctgattggtgtgtttacaatccttgagctagacacagagggctgatttgtgtatttacaatcctttagctagacataaaggttctccaagtccccaccagattagctagatagagtgctgattggtgcatatacactcctccagcaagacataaaagttctccaagtccccacccaactctggagcccagctggcttcgcctagctggatcccacgccagggct

SEQ ID NO: 823153 - DNA, 517 bp, Homo sapiens
cctgcttttattcccttatctggccccacccacatcctgttgattggtccattttacagagagaagattggtctgctttacagagaactgattggtccgttttgacagggtgctgtttggtgcatttataatccctgagctagacacagaatactgattggtgcatttataatcctctagctagacataaaagatctccaagtccccactagattggctagacacagagcactgattggtgcgtttacaaaccttgaactagacacagagtgctgattggtgcatttacaatcctttagctagacacagggtgctgattggtgtgtttacaatccttgagctagacacagagggctgatttgtgtatttacaatcctttagctagacataaaggttctccaagtccccaccagattagctagatagagtgctgattggtgcatatacactcctccrgcaagacataaaagttctccaagtccccacccaactctggagcccagctggcttcgcctag

SEQ ID NO: 823154 - DNA, 510 bp, Homo sapiens
gctcctctgacttttcattttgaggtgccagattgggttcctccctatttgtttttaagggaaaaggagggcaggtccttgcctccaacaaagggcatagcctagttcttgttgagacactgggcttttatcattaacatatcagattagaagctgacacattacatcctcatttgacccaaactgtggccagaaaattgagggtctgaggatgggtccctgagtccaaataaaacagcaatattttatcatttgttgctttttcctatgtttcatcctttcattatctttccagtgttttagcatgagacctagggtgttatctgggggatatatttgttaccatctttattccccttgctccctgtcttgcttggggtatttcccatcttgatggttttggggtaaggttcaagtttcaatttcccttactggaaatttctcacyttttggggtgaggctcaatttcccccactggaaatttcttgccttttggtgtgaggctcaatt

SEQ ID NO: 823155 - DNA, 377 bp, Homo sapiens
aaagaggaagagaggggaatcccagggggagaccatgtgaccacgcgtggcactggccaatgccacaacagttggtgttaatgtgtgtcatcggaggcatacggggcgacggcgaaacgaagggtggggtccaggcatgtgccggtggaagggggaaacgggtgacctttccgtcaatgccaaggaaaatcaaacaacacctgggaccccggtggtgggggggccgcctgtgcccgacccaagccacgttttctactgcctacgagaggagtaaagaggtttctgcaaaattcgcaacacccccawtcctccaccgacctggtagccctgacgcaacttcggctggcacaaacccacaaagagtgggaaagaaacac

SEQ ID NO: 823156 - DNA, 682 bp, Homo sapiens
accacaggagaatccaatggatccttacaggttgcttaaaagggatagtttgttgtagtcctgaaataataaagtaatgtcctattctccacttaccatgtagtattgcttttgttaaataatmcattggggcttgggtagtttaggtgggtcctttaggcaggatatgccccactgttatggcttgaattctgagttgtcaaagagtatgtccccttaggcaatggtgatttttgtgttacaagaagtcggggggtcaatgccaataatgcactcacaagtgagaaccatggtcactaacatccaatatggaccaaagccacatcacaggtagataagcactactggtcaatgcattcattctaaaaccttccagtgtcaccagtttttctccctaagaggacctggaaatattatgtggactcatgtatcaaaaaaaaaagtctgaatttctttcttttctcctcttaccttgacagaaatataaggcctttggcctccatttggggaccctgagaccttggtcccatttctgactctgccattcagcccaagacattggatttgcaatgtcctttcatcaaagaaatatacctggcctttctctatatctgtcctttagataatgagtctccctttctgtgaaggcctttatcacatgtattgattccttctcagatgc

SEQ ID NO: 823157 - DNA, 592 bp, Homo sapiens
ctcacctcgtgccctgtctccactgggagacatcacagcatgttttttgaagtcttcttcttgttttctctagaagttctgtaaaaaaaaaaaaamaaaacgccattgataatgatagctaccttgcattttataccatcattttttcctataattttgtaattaaaagttcttattatatatgcaattcactgttgttaaagatttctaataggtaaaaaacatataaagtaaaaaagtaaaagtctttgtttcttttagtcttttaatttttaagtcacttggtattgagcaagtacaatcacctcagtattcatatgtttgggggactaataaaaataaatttctatgtatttaaaaacatagctcgagaactccaacatggcttagggggctttgctgaatcagaagagttcaaagcagttgatatgaccgtaaaatattgaaagccacaaatctagagtcttttctaatattccacattaaatcacctacttcaagtgacaagtgaaatgtgtttgtaataggtttttctttaagcgccaattgaagtgatctatactcaaaattaagaacaaatctatttagaaaa

SEQ ID NO: 823158 - DNA, 460 bp, Homo sapiens
acataagtttcaaaattatggaagaaaaagactgaatagtcagaataagtggatgacagatatgatttcatsgaaaacagatcccattgtggtatctcaattaggtctttaaagtttcctgctcttgcttaactatggaatacaatccaaagagaatggcaggcatgctttgcatgctgaagacatgaaaggctgacagctgatatacaatctcagattttacagccaagcccaacaggcactacctttaaaaccacttttctgtattcattaactatcctgttaaatgttttttcccaaattaaaattttatatctaatacatagaaattaaatgcatgatttagcaatataaaaaaactgttgatatgtgagtatgcaaagaacaatgttacacatttgtgaaaaaagagaatacgatgaatgaattaagagtcccaaatcctggcttaagccccaga

SEQ ID NO: 823159 - DNA, 598 bp, Homo sapiens
ccacctgcttcagaatcagtctggcctcacttcagattcattaggtctgagcttaatgcttacataaagcattaagataattgggagtctattggctatttcaataagtccctaaaataatatttaaacagtatttattgcatgattaatcatcaatgtggaatgagagataccagggaaacacatgcacacatacacacagcacatcgtggtttttgttttgcctcgccattctaacctcaggatctgctggtccagatatgtttttaagccacttcaccatcattactcattagtcaaatagagcaagggatacctgcatgagttctttagaagaaaacacaaattaattgaactgataatctgagggattaagaaaaggatgaatgaaggatgaagctgaagttttcaagctgagcttaaacactgtgacatgtatttataagtgtgacctaaaaagctagggaagaatatagttcatgagwattatgaatctgtaacatattctctcacaatagttacacaaaatgtataagttgggcagctggaaatataaataggagggtcaacacatttgaagaatatgaacttcatctta

SEQ ID NO: 823160 - DNA, 632 bp, Homo sapiens
ctttgtttggctgctgggatagataagcacgggcttaaaaaatgtgttcctaccagttttcttgcctttcctattgtactctgaatttccctccctacctccctcactgtcttcctctttcctttctttcctttctctctaccaggccatttttcaaatttacatcaaatatacctcaagtgttggtatatgagaacatctgtcactcctcttatctgagaagtgaccgtttatttttaagatgatgacagacctatttttagatatgttttcagtacaattttgaacagcaaccttttagttaaacatcttccagtgttagcaaggtgagaaatgttcataggcgagcctgctgttctatgtcaccatgttttgtatccccttgtcccccaggaactctttcgtttcccctctagtttttgggtgtgcatgcttggagtctgcagtgggtggtttgtaaaactggaccattctgccttgctatgagttgttcataaaagcctcattcttttctctgaccctttagcttttgcattcaccctccttcccacctacctstccagggactatcgactgacataataatcccgggagaatgactcccctcatagaaagactaaagcatccatccc

SEQ ID NO: 823161 - DNA, 557 bp, Homo sapiens
acagctagtgggaggcagggccaggatccatccccaractggaatctggctgaccccaagagccggtgcttcctgtagcataatcccatgtaacagctggcaaactttctgcaaggggccaggcaggaaatatttgatctctgtgggccacacaaactacacacacagctttgccacggcagcctgaaagcagccgtagacaacgtggaaatgaacgagcatgactctgtctcaataaaactttctttctaaaagcaggcatcaggcaggattgggtctcagggctgtggttgccaatccctgctctataacatccaggactggctgcggaggggagctgagatctaggacacactggcaatagcagaacctcgaaagcctgaggcttgttcgtgccaaaaacaaaagccacagccagaaccccagctgcaggtgggcagggcagctccctcttgaagggctgcgtgtgaggacatgaatgaattcacgaaagcacttcgcccagccagctgccccataagtgttctctattatcatccacaaagagctccttgcgg

SEQ ID NO: 823162 - DNA, 578 bp, Homo sapiens
aatcccagcactttgggaggccgaggcgggtggatcacttgagggcaggagttcgataccagcctggccaacatggtgaaaactcatctctactaaaaatacaaaaagaattagccagccgtggtggtgggcacctgtaatcccagctacttgggaggctgaggcacgagaatcacttgaacccaggaggcagaggttgcagtgaaccaagatcgcgccactgcaccctagcctaggcaataagagcaaaactctgtctccaaagaaaagaaaaaaatgaagcccaggtccagcccttgctccatcacttcccagcagtgtcccctcctccagccttcaatctactcatccctaaaatggaaacaagagcaggacaaccatgagaacaaaaaaaaaagccacgtacttggcaccctgcctggccacggaaacactcgtgtgtgacccagggtcccctagccttggcgctgctaacactktggtcattctctgcggtggggctgtcctgtgtgtcaggcaatgtttagcagtgtccctggcctctagaccctgtagcacccccagcttctatgaccaaa

SEQ ID NO: 823163 - DNA, 578 bp, Homo sapiens
aatcccagcactttgggaggccgaggcgggtggatcacttgagggcaggagttcgataccagcctggccaacatggtgaaaactcatctctactaaaaatacaaaaagaattagccagccgtggtggtgggcacctgtaatcccagctacttgggaggctgaggcacgagaatcacttgaacccaggaggcagaggttgcagtgaaccaagatcgcgccactgcaccctagcctaggcaataagagcaaaactctgtctccaaagaaaagaaaaaaatgaagcccaggtccagcccttgctccatcacttcccagcagtgtcccctcctccagccttcaatctactcatccctaaaatggaaacaagagcaggacaaccatgagaacaaaaaaaaaagccacgtacttggcaccctgcctggccacggaaacactcgtgtgtgacccagggtcccctagccttggcgctgctaacactttggtcattctctgyggtggggctgtcctgtgtgtcaggcaatgtttagcagtgtccctggcctctagaccctgtagcacccccagcttctatgaccaaa

SEQ ID NO: 823164 - DNA, 347 bp, Homo sapiens
tagcaccagcgccgatgtttgcccagctgtgctgtagaaaagyaaggctgatccgcgttgccacagggttgctgcagtgttgggctctcagtgaaccggacgcttcatcaaaggctggggttgctctgtgggtgggggtgggtgcctctttggagcaaatccagagtgaggatttatgttgaacccaaaacgtcactcccctattcttattttttgtctgttcttctttaagtacgtcctgggggaatggttcctaatgtctgcagtttatttttcatttatttttaatgccaaagccaagcatactgattaaaaccaacgataaaaaagcttcgtgaatggctccc

SEQ ID NO: 823165 - DNA, 670 bp, Homo sapiens
cccacagtgcctgcccggtttggatcctctcaaccacatggattgtttgctttgaattktagtgatttgtgcacctgtcaaaacttccccaccagggaggccactggcttcttcatagctcctgagcacctagcacaccctgtgcacgttcgttttcttttttctttctgaaatggagtcttgctctgttgcccaggctggagtgcggtgttgagatcttggctcactgcaacctctgcctcccaggttcaagtgattgtcctgtctcagcctccccactagctgggattacaggtctcagcctccccagtagctgggattacaggtgcactttgccatgccagggtaatttttatatttttgatagagatagggtttcactatgtcggccaggctggtcttgagctcacgacctcaggtgatccacccgcctgggcctcccaaaatgctgggattacaggcgtgagccaccttgcccggccattttctgaacagccatgtcaacaggttagtcctgcttcaaggaccaagtagaacttcttccatgtcctggatttgccccttggcagtgtctcgtccttgtgtcccaatgtgagtgctacgtaaatggcttcttctcactgtgtgcattgactcttgcctgggactctcctttcctacccacccccca

SEQ ID NO: 823166 - DNA, 671 bp, Homo sapiens
gcatttgcagtcactcctcattttctttcaaactccctagccctagctaatcactgatgtactttcygtctattgtatgaggggaaataggtattggggaattgggtgattgttgaggcgtgttttgcccaatagtcagcctcccagtaacctgaaagaaagctcctccacctctctgcgtgtctctttccaatgtagcaaccttgggcaccgggcaaagccttgtcctaaacctcggcccctcccaccaaaccatgaccaacttctggtctctggggacgctggacaatggactgccccctacggggacacctcccccgttcaggtgcagctcataatgaagccccctaactaagacaggaggaaatttcttcactgctggcgctgatcaaggaagactgagggtgcccgggattctttgccccacatctagtgagtccactgaacccagggtaattgggacagcatccggtaaaatttttttctttcttttgaataatggggcatgcctatcggtattaactgaatataaaggcccattagaatgattatcggtttctgttgttggcatgaagggcatacaagaaaccccatacaaaacaccacctgtatactgctcatttcagggagttacccacactcactctttcttggtcattcctcactgtccc

SEQ ID NO: 823167 - DNA, 600 bp, Homo sapiens
ctgcctctggccttggctgtaggccacacttcccagcctgtcataatggccaccttgcagactgcaaacctatataagaaataaagctctcttttctaaatttataaaattgtgtgatttttyagttgatgctctctttctacacacacacacacacacacacacacgcaatttatacagaaggaaatctggagaatatatgtgggaatggatattaagtgtgtggcaccatggtggaagtaacataaagttggattaggctaaatttattaatgttggcccactaaacagagattctggactcagggttgtaggtcaaagctttagaaagggctccaagggttggtttgatcggttacttggttggttgcttgcttggttggttggtgcttgcttccttgcttggttgtttggttggtttgttgcttgcttgcttgcttgttggttgattggttggctgtttgcttgtttggtgacttggttggttggctgaaacagaatcagagtttacctaaggtacataaagttgagatgccacaacttccttggtttatgtgtacagaaaggtatgcaaaaactcagggagactggatttattat

SEQ ID NO: 823168 - DNA, 613 bp, Homo sapiens
ggtctgggggtaagcaagcctcttgctgagcaatggtgtgagccagtggctaaggtaacatttgggagcmgccctgttttgaaacaggttcttatttcagataaacagtcctgcaagtgacatgataaaatacatataagggtacattttccaagggctgcccagaaagcaatgcatataggcccagagactgttaggtcattttgacccattactcctcaagtacccacttggcaaattgatggagtcacatttaggacccatgtccgctttggtggaaaccccattttgtaccttgatggaggctcacagatagtggcttctaaattccaagatctggtatgaaggaacagcttctgggaaaatcagtttaatttacccattttttaaaccaaatctaattaaccaaatttaattaacccatttgctgaggttaatgaaacccttgttaacctgactcagaaggaggctggaaaggagaacttttaagctaagattcctaataggctccatgcctcagggagccacgaacccgtcagagagagggcaccaggtgcatgctctgaggctgctgactctgtcctggaagcccgcaaggggctgatttgaacag

SEQ ID NO: 823169 - DNA, 623 bp, Homo sapiens
gaggccacccccagcccccattcattgatttcgtgtcttaagttgtttgtgttttttattttatcacaccctcctatttctggttcccagaatgtaagtagttctccctccacaatgttcaacagtcctcaataatgcccggctatgtgaagatggaaagatgagggaaaattagcaccataagcagagtctggaaaggtacacagacatttaacagatggaaacaggagggctgccattctagaaagatatgaggactgctcatcagcctggcttccgctagaggagatctactttggtgtctagccaaattttgatcctttgccttaaatcttttctggaaagagatgggctatgaataaatatttggatttaggaggaattagtttagtttaaacatctctgaaaaataccacattatctcttcttcagatgcaaatcttttgagtacctaagagtggattttcctctctctggagtcaaccccaaaaccaagcctaactttgccttggttctctgattgtggctcccatcacctctggaaatgtggggtgactgggaatggaaagcgtaaagcygggggatgcaaagaaagatggttctcacccagtctctgggcattt

SEQ ID NO: 823170 - DNA, 633 bp, Homo sapiens
ttctgagttgtcccgaaataatataaacttgcttttattaaatccccggttgggaggggcatctgagctgtgaggtgcctgggttgctcttccaaacacacatgcctttctctttatctcrtcatctctttattggctcttactcacgatcccgtttactttattagtttgagagtgtagcaaactgttggtcttttagccagaaattgttggcctgtgactatggctctatcatctcagatatgttatatttaaaattttttatttacttagtttatggtcttaactgacctctgtgttaattcctctatttacttgtactcaatggcttcttgatgattcatcatcttagcagcttttctcagggctgttggtagcatgcagcaatgaaagcattttgtctgcatttacgttcacttgtttacatcttcttcactacataaacaagggctcttttattaaacccttgcaataattttagtgccaattatcctatcttggctcactacaccagtcttcacactcatcaaacatttgctttacttaagctataactatgataaattaaaaaaaagaagtacttggtgtctctccctcagcctttgttgttgggtctttcctaaatgatttcat

SEQ ID NO: 823171 - DNA, 478 bp, Homo sapiens
attgtaaccattcactacactgcctttggggtatgctttccttccaaaagacggakccattcatatcacctccttgcttcagaaccttctgtgattcctgatgtctaatagaataaagcctagatgtgttatcctggcattcaagacaattcatgttttgatatcaacctaactttcctgtctcaagttctgccaatctcagtgatgcactcctgtcaccactaactacttactgtcctttgagccctttactgttcttgcccctctagccacccatgcttgttgacttgcttctttatgggaaagccctcttgtctcattttctgctgctatgtgaccttacactttaagacccagctaaattgttacatttgggacattttttctgaccctccctctcaaaagttaattggatatgaccttaacatggtgcacatatttctgtagaagctcatgtacatatctctctcgaagcagg

SEQ ID NO: 823172 - DNA, 535 bp, Homo sapiens
ggacacatgagcaaaatgttgaggatttagaattccaggtgcctctcagtgaaagtggcaatggttaattgaatagaatacataatcaaatagtacaagtaggcccrgtgcggtggctcacgcctgtaatcccagcactctgggaggccaaggtgggcgatcatgaggtcaacagatcgagaccatcccggccaacgtggtgaaaccctgtctctactaaaaatacaaaaattacctgggcatggtggcatgtgcctgtagtcccagctactcaggaggctgaggctggagaatcgcctgaacctgggaggcggaggttgcagtgagccgagatcgcgccactgcacttgagcctggcaacagagtgagactccgtgtcaaaaaaaaaaaaaaaagtacttttttttctttagaattcaacatcagctaaaaggcttctactgtttatgttttattacctggtttgttacacatctattgtaaagtgctattaaattataataaattagttttccctccacagaagtgtcacctg

SEQ ID NO: 823173 - DNA, 605 bp, Homo sapiens
caaaaaaaaaaaaaaaagtacttttttttctttagaattcaacatcagctaaaaggcttctactgtttatgttttattacctggtttgttacacatctattgtaaagtgctattaaattataataaattagttttccctccacagaagtgtcacctgaacatacttagctggctcatcagtgccacaaatatgtaattatttatcttattaagcagttttgttaccttttacacattgcatagtgctttttcattagctttacctgaaaaaaaaaagaagaagtaaactattgtaaagtgagaagttcttagccatggttatatactcactaaattctaaagtttcttgagcctctggatcctgctaagaattttgcctttgatctacagatcaaagaccacagcaagaatctcattaaagctatgaaacttctctctagaaaatgaatgtaaacagagaatgctatataaaatttcaggggttttatggatccccagaaagccagtcggtggaaccycagattaagaaactctggtttttaaaaggattttgaaaattcttgataaattatgtacaacaataaattttctgatactctacactt

SEQ ID NO: 823174 - DNA, 605 bp, Homo sapiens
caaaaaaaaaaaaaaaagtacttttttttctttagaattcaacatcagctaaaaggcttctactgtttatgttttattacctggtttgttacacatctattgtaaagtgctattaaattataataaattagttttccctccacagaagtgtcacctgaacatacttagctggctcatcagtgccacaaatatgtaattatttatcttattaagcagttttgttaccttttacacattgcatagtgctttttcattagctttacctgaaaaaaaaaagaagaagtaaactattgtaaagtgagaagttcttagccatggttatatactcactaaattctaaagtttcttgagcctctggatcctgctaagaattttgcctttgatctacagatcaaagaccacagcaagaatctcattaaagctatgaaacttctctctagaaaatgaatgtaaacagagaatgctatataaaatttcaggggttttatggatccccagaaagccagtcggtggaaccccagattaagaaactctggtttttaaaaggattttgaawattcttgataaattatgtacaacaataaattttctgatactctacactt

SEQ ID NO: 823175 - DNA, 635 bp, Homo sapiens
tgtgttgttcccctccctgtgtccatgtgttttcattgttcagctcccacttataagtgagaatatgcrttgtttgtttttctgttcctgcattagtttgctgaggctaatggcttccagctccatccatgtacatcttctaaagtttcctttagttacagtctgctattggcaaaatacttaggttttttgtttgtctgaaaatatctttactttacccttgttccaaaaagatcttttccctaggtatagaactctaggtttgcagatgttttgtctcagcacaataaagatatctttccaccatgtatttactgatccataatataaatacaatacatagtgaagaaggttatttctgcatctgtggattagcacttttcatcagttacacaatattctgtctttatctccatatttcctaactactatctcctagtttttatttctttgtgtctttgtgtgcattctagataattctgtctaatctaccttctagttcactaatttccagttgagtaatttccctcctcaggtatgtccaacctgtggttaaatgcatccattaaattttcatttcaattgttacagttctaatgtttataaattcttctttcttcatgttagttattttt

SEQ ID NO: 823176 - DNA, 617 bp, Homo sapiens
tcacaagttagtgtgaatttgaactgcaaacttctgtgaggtttccataaggcccagtttattattggtacattctcaagtgagacttttttccttttcactcaggccaaaatgtataataggcaactgttactgtttgaatgtgtcccccaaaaagcatgtgttggaaacttaatctcccatactgcagtattgggaggtggacctgatgagaggctattggaccatgagggctgtgttctcacaaatgcgttaatgctcttaccatgggagtgggtttgttattacagcagtgggttcattaaaaaatggtgaatttggtccctttttctctgtctctcttttgccctctctttgcccttccaccgtgggatgatgcaacatgaggttcttcaccagatgctggcccctccagcttagacttcccagccctccagaaccatgaggcaaataaacttcttttaatttgtattataaattacccagtcttgatattctgtcctagctgtgtaaatggactaaggcaacacttttctttacaatcccttgggaggggtcctgtgtgtttcttgttcactaagagtatagccgtcrggttcccagcttcattctcgtgg

SEQ ID NO: 823177 - DNA, 575 bp, Homo sapiens
gaaaattatagatgatgtattattatatgtgcaatttatgggaaagagaggataaaagatcttttgaatatggttagatttacatccayctaaaaacatgtctgtgttctgcattcaaaatagtggagaagttttaaggtaaaataaaatgatgtttgcatacttcaattttttaatgattccacactttaatagatttttttcaattaatccactaaatagttgtctcagataatataagttaacagtgattctagtgtataaaaccataaaattggcaagtacagtcaaggaaatgagatacatgaaagtcagaactacttatgaagacagcttaattttgcctcaaggcatcttttttccctgtgcattctatatagtgccaattcttgctatttggtgttttaaaggtcactcagaacctggaactatccatcgtagccattccagcctttagtaatgtcaatcatcatatcactcctctcttactattgactgctgaacatgttagaaaaagtcatgcagtgatggcagctggaatgacagccaatccatgttatctaacatcagctgcc

SEQ ID NO: 823178 - DNA, 607 bp, Homo sapiens
ttccatcaaatcattttgcggagcatattaaaaatagsgttctaaagcatagagttaacttgatttttctccttccttagatccccaaggagcctaccgtcctagttttctttcttttttctctttgctgtctcttgctgtggttgcttttcctctagtttcataaatataagtgttacttaatgctctgtcatatagctcagttctccacatttttccctgtgtgatctcaacaacttctcacctcttccaccatagcactgtggacatgactccccaaatctgcgtctctcaccctacgttctcttctaagctccaggcctgccagctataaatctttattaaaacactataaacaatatgtatctgtttaataaaatactctgaacaatatgtgtctgtttctcccgtcttgccctcaaacaatctcctcctgatatttcttgacattataaatacctcttttaggtgccatagccccaaatctcagaattatttttcattccttcccctccttgtatcccacatcaaattagttccatccttcgggttatttctagagtttcctatttttttcttcctggtcttttctagtccagctgtcata

SEQ ID NO: 823179 - DNA, 391 bp, Homo sapiens
aaaagttggagttcaaaaaaatagccagataaaattttagcaaaaattctcagatgattggcatatgagtggcaaggtattacaaactacttaagggtataagaacacaataaaaatagtaagctcttcagatttttcagaattaaatacttgtctaaaatccatcttattcccccctaccattcatctatgtgaattttattaaccaaagtaacacataaaacggagggaaagagacaaagaacgaaggatgcagtgcaagataacaaatgagtactcattacaggattgcaacgmaaactaatgttaaaacctaaatctccatagcatgaacttcgggagatttgcatggtatcaagaaatcatttattattggtttttctgcacttat

SEQ ID NO: 823180 - DNA, 491 bp, Homo sapiens
attctaaggtttacattctcatttaatgctcaaattccactaggtaattattggtgttagctttattttatggatgagraaaccaaggaaaagatattaagtttcaacttgagctgacagctcattcattaaatgttcatccaggccaggcgtgatggctcacacctgtaatcccagcactttgggaggccgaggcaggtagatcaccagaggtcaggagttcgagaccagcctggccaacatggtgaaaactgtcctactaaaaatacaacaagtagccaggaatggtggtggacacctgtaatcgcagctactcgggaagctgaggcaggagaatcacttgaacccgggaggcggaggttgtagtgagccaagatcatgccattgcactccaacctgggcaacaagagcaaaactccatctcaaaaaaaaaaaaaaaaaaaaaagttcatccatatttttttaacacctactctttcaggcacttaggt

SEQ ID NO: 823181 - DNA, 520 bp, Homo sapiens
gtgtgtccaaaatgtctatctctgtcctttacttgccctttaaactccagttatgagtgtgcagtgatccaccaaacatgtccacttgagtgtctaaagtcatcyaggaattaatatgttgaagaagaaagtattgctttccaccttaaaacctgcttctcctccagtattcttctgctgtcagtaagtagcaccaccaaccactcaactagacaagccccaaacctaggagtcagccttggtttctcttctgttttctcccttgtcttcccaattcatcagcaaatattctcaatagaactttttgggcccatctgaaatccatctatttctctgtgtgttcactattctcatcctagcccaaaccattgccatctctcaagaaggttcctgctacaatcttctaagtcgttctagttttgtcttctctaattttgcttttaaacttctggttttacctctctaaaatctgttctctacacatatgcaagaatgatcttgttataacttgtattagtta

SEQ ID NO: 823182 - DNA, 625 bp, Homo sapiens
aaaggatctcaaatatacaacacacatacacacgaataaaaggctaattaaatattcatcaaaatgttaacaatgatgaactttgtagttacaaacgtgcactattttacaatctaaaaagtttatgtttaaaatttagtctcaatgcaatccaatggagaaaagataatcttttgaataaatagtactagaacaagtgacattcccatgcaaaaaaaaaaaaaaaaaaaaaaaaaaaaaaaaaaaaaaaaaaagactctatacaatagcttacccttttcacaaaatttaactcaaaatagatggagacctgaatgtaaaatgcaaaattaaaaaacttctcaaagacaacatagaaaaaaatctaagtgatcttggatttggtaatgattattagatacatcaccaaaagcacaatctatgaaaggaaaaaattaagttagatttcattaaaattaaaaacttctgctctgtgaaagacactgttaagggaatgaaagacaagccacagattgcaagaaaatrtttgtaaaacatatatgtgataaagcacttgtatccaggatatataaaaaattattaatactcaacaattaaaaactgtatagacacctagagccaaaga

SEQ ID NO: 823183 - DNA, 631 bp, Homo sapiens
gtggaagaagattgagaaaattaggatttttggatggaaatgtagtcatgcttgggagataaaatgagagaaaatggtagttaaaatagcaggtaaaaatgtgcaagacatattttctgaagaccgtgagtctaagctcttcaaagacacaatatcttactatctctgtatcctcagcccaaagcaaagtgcccagcacagagcggccaagcaatgactatttgctgaataagggataaacagaattatttggagacagaatatatgtggctaagcatgctcccctttaggcagacattgtgctggagagcttttgtttgtccctctagagtcactttcttgcctaatctgtgtcccagcaggctgaactaatggaccccatcaataagctccctttctttgaggcatcctaatgggaggtgctaataataagaaatactgccaggtaattagagggtgagaggagactgaggtcagggtatttattcccttagtccccgtgatgggttctgaagttggctacattcctctagcgaaggccacaggtgctgtgaagtggccctctccatmcttacagcttctttctctttcttctttctttccttctttttctgtctttctctccctccct

SEQ ID NO: 823184 - DNA, 621 bp, Homo sapiens
atcgacagatgaacaggctgaggcttccaaataggaagatgtttaatgattacatcagtagttaatttgattcccagtctgtgactttttaatgccaaacttgttaatcagcactttacccagtggtcscttattgctcttaaatatagaaggggcctcaaataaagatgaccaaataattaagtgcattaatcttaattcatttctatgcatatctgtgcttcctccaaatcctctcagaggtgtgcaatcctgaggtaagtgtcctccattgcttcccttataagttttctctaagtgttttcagagcctttatgtctgaattttccagaatgatgaagccagaaagaactctggaatccagtgcatcttctcattttacagatgtggagaatgaaatccctaagaaagaatgacttacagtccctgggtttctgcccagcaggtaacatggcttgaacccatagatgaattcactacatgattctcaaaacaaggtgagggcaggaagggatgcagctaagtctcaagcacaactgtgatgaacaactcccatgacaccaagaatttctctattgtccataattgtttctgactcaatgttcttttcttcaacaaagt

SEQ ID NO: 823185 - DNA, 611 bp, Homo sapiens
aaatcttaggtgagtccacttgacctggaggctctccagccctcctgcctaaggaaagctgggaggcttttggagcagaggggaaggggttgtcagtgtagagtgtgatttctggtgggcagacctagygggtgcccatatgatgtattaagttttctttaacctgtttatcagcaaaaaatatttcaggagctatggtcaggagttcgagactagcctggccagcatggcgaaaccctgtctctgctaaaagtacaaaaagtaggggggtgtggtggctcatgcttgtaattccagttacttggaaggctgtgctatggtcagttgaatattaaacttaagaaagagtcatgaaattaagagagcacttttttttttttgatagaggaggataagaacaaaacacagtgtggcctgtttattgaggagtcccaaacctgccgtacagccttccctgatccctgctcctcaagctgagatctagttcttaattcttggttcatgccagccctgggatcatcgcctttgtcacatcattgctgaactctttctacttcagactgttcgagttcatgccttttcctctccaatcagattctaagcaggatcca

SEQ ID NO: 823186 - DNA, 489 bp, Homo sapiens
gtattaagttttctttaacctgtttatcagcaaaaaatatttcaggagctatggtcaggagttcgagactagcctggccagcatggcgaaaccctgtctctgctaaaagtacaaaaagtaggggggtgtggtggctcatgcttgtaattccagttacttggaaggctgtgctatggtcagttgaatattaaacttaagaaagagtcatgaaattaagagagcacttttttttttttgatagaggaggataagaacaaaacacagtgtggcctgtttattgaggagtcccaaacctgccgtacagccttccctgatccctgctcctcaagctgagatctagttcttaattcttggttcatgccagccctgggatcatcgcctttgtcacatcattgctgaactctttctacttcagactgttcgagttyatgccttttcctctccaatcagattctaagcaggatccattcaatttatcttagttgttga

SEQ ID NO: 823187 - DNA, 624 bp, Homo sapiens
attatgtcattagggtaattctttttaaacatttatgaaatgcctaccatatgrcaaatgttaaactaagtacaggatttgaacaaactcatggttgataaaagaaagaatgaatttaatagcctcaaatggctttaatgtagcatctaggaaggtcacattgacatcttctttttggtctcgacttccctggacttttccattgaaggaatttccttgatgtggacacagctttcatctgaagtctactctggctgatggctggccaccctctgaccaagaaccagcctccctccttacctggtgacattgcgatttctcttctgggtcagggaaggcttttgtagcagcattttgacttctcaaatagggttgacttcctggtttccacaggacgtttttcgttgcagacagaggaagggacctacacacaagaggtgggagagtggaggggagagagtgctggggagactgcagggggaattgagcgacatctgtgcagtcaggtcgtggaggaataagcctcatcgttttcacttactaggtccctctctctctttctttctcttactccttcctttattaaacccctctttatcacgttttccttttctactctctttc

SEQ ID NO: 823188 - DNA, 595 bp, Homo sapiens
catggtgaaaccccgtctctactaaaaatacaaaaattagctgggtgtggtggcacgcgcctgtaatcccagctactcaggagtctgaggcaggagaatyacttgaacctgggaggtggaggttgcagtgagccgagatctggccactgcactccagcctggtgacagagcagactccgtctcaaaaaaaaaaaaaaaaaaaaagtttcaaaatttatttctaatggacttaggtttcaaatatttttaaaagtaaaagaaaactagaagagagtgtagattaactgtttttcagatttcagggtagataaacatttataaccaaatgaggaaagggcagagtacaaaaaaatgttgatattgcaacagaataaaaatgttaaagttttgtaggcaaaaacacaataagcaaattgaatagcaagtgacaattcagataaaaaacctatcagaaaaacaaataatggaaattcaaaaaagaaacatgcaaaagcaaacaaatatatacaaattgttttgtatatattcaaataaatatacaattaaagaaaatggaatcctcttttctgtttatcaactaatagcaatggaaaaa

SEQ ID NO: 823189 - DNA, 585 bp, Homo sapiens
ttccacactgctgaggagaccccaggaaacttacaatcatggtggaaggtgaagggaaagcaaagcacatgttacattgctgcmggcaagagagtgtgcacaggggaaactgccacttttaaaatcatcagatctggtgagaactccctcactatcatgagaacagcatgggggaaaccgcctccatgatccaatcacctcccaccagttccctgtcccctgcacatagggattacaattcgagatgagatttgggtggggacacagagccaaaccatatcaaaagcaaggcatttctaatgtattgttaaatccaatgactgtccccagaatatgtaacactttatagttcttctccttatcattgtgtgaaatcaggttaaaaattaggagttccaaaagcaatttcaaagggaaaaagaagtaccccaacccccaccaaaataatcctaatctagaaaaaatataaaaagtggatctgaactatgatgatgggaggtttatatgccaaataaacctacatgaacctcagattccttctagaaattatatttctgattataagaggaacacaatcttattttg

SEQ ID NO: 823190 - DNA, 630 bp, Homo sapiens
tctggaggctaatcttgaaacaaatcacgcacggagccctgactgctgaatccacttgcttagggagagtcacaattagtccatcaccatggggtagaagtcaagataatgccaaccagacttccagaygggtaattatccaagatagccaacagaactaagtcacacagccccggcaccctgcaccactcctgcatgtctcccaaaccaagtttccctttaaaaaacctatgataaatttttaaatttgaggtggttctttagaacactagctcaccaccttcttggtttgctaactttcctattaaacttgagtttcctcctaccaacccttgtttctcatgtttggcttttgagtggtgagtagctgaaattggttctggttacaactggagttgagttattatcttttgaaagttgtctgtctttgtaggttcttgctttcctggtcctttgattaaaggcagtgcaggctcttttgggctctttttctctgcacttgttagtgtttcttggttgctagctacttcatttctaagtgaaggatataagcagcaaaaaagacgactcagggaagtcactaccgtgctgttccttatgtgctgagggctttagcacattttcttcttc

SEQ ID NO: 823191 - DNA, 641 bp, Homo sapiens
gacaccatgaacgcaagtgaattccgaaggagagggaaggagatggtggattacrtggccaactacatggaaggcattgagggacgccaggtctaccctgacgtggagcccgggtacctgcggccgctgatccctgccgctgcccctcaggagccagacacgtttgaggacatcatcaacgacgttgagaagataatcatgcctggggtaagtgtgtatccaaggtcagaaaacaggagggctagaactcacatagcacctacttggctctgagcaattcacatactttgtttcaaggaatccctatggcagtcaggttggagagaaattttgtcatttctattttacaactgaggaaactgaggctcagagaggttaggtggtccacctcaggtcacacaggtagtacacgatgaagtcaggattaaaatccaaatccaagggcagtgaggctctttcccccaggtcccctgagactcagtccctgcccagagacactcggtacatagagcgtgtcctcatatacattaggaagcaagacactggtggctgctttcaaataagtcaattgccccaaataaagcacacttccaccatccttgggtttagcaataggtaattagcatatgtggaagaaacgt

SEQ ID NO: 823192 - DNA, 503 bp, Homo sapiens
tagaagttgtccaggaactgacctcggaacatccttgcacgtgacattccctgaaaggggaacaataaatgttaattatctacaggttgtgtttgctccaggttttcagcattgtgcttgcactcaataaaagcaagctgctccagcttctcagggctgctctctggccactagagccaggcagtcacttagctgctcttacactgcatacctgtgtctgagcactcatttcctccatcggccagggtctgcaggacagatccagcagtgagccactgcacccagactgttcccctcattttgaccctccctagcatttggtgagccctgctgattcaagactcagctctgtgcagtgtggagatttttcttctactgtatgttagttattgtgggccacgtcactctttttcagggacttcaattttccacagattgggtacctcttccatgatttctctcttyctttcgatatttcccttttttgttatcttctatatttt

SEQ ID NO: 823193 - DNA, 635 bp, Homo sapiens
acatccggtgtgggattgtcgccaggrgtagatgagttaatcatgttttaagggcttaaaaacagtgcctggcagacagtaaatactgaaattgcattaggtgcttttgtgattttctactacgtcttagaaaaactttcccttgacagcttcctctgcttgcatgtcaggtttgctaatcactattctaattacaactttgaattctcataatgctgtaataccagaaaagagggtaccagaggtatagaatacaaatgtccccatctttggaaagaataatcctcttactactaatcaatgaagtagtattctggtttatgtctgcatcacaatcattcactcattcattcaataattacttgttgagtacttaatacaacctaggacttacatgatggatccttgggggtaaatggagcttccaaagacctatgtacgcactggagagagggtatagtatatgagaagttctcataatgtgatgccagtacccagctgatatagttcattgccggtagctagtttggtgcgtgtttggtgctgggaaacgaagagtaaatctctgtatcatataaatgcatggcatgatggagataatctccattatttgaaacatctgtcctgggacagtt

SEQ ID NO: 823194 - DNA, 666 bp, Homo sapiens
gtgtatgtgtgtgtgtttgcctcattttaaccatttgttctactttatattagctctggtaatgattttttaaaattatattttcttacatatggggaaagatagtttttgaggtgttcacttatttttcccattttcttttcttctttcccttcccataacagatagctaagtctgtagtttcttttctgggaggatatttaagacaggcttcttaaatctaataaagacaataagatgtgagaaaaaggggtgcctgaagaaaatatggagaggacaggggattcccttcagacaaaagcaatgcttccttggattggaggaaggagagagagagaaagaaagggggtgggggaaagacggagaggagagagatggagggagagaggaggaagagagaagggtaaggggcaggggagagggggactgatccactgtcgtagctttttggcagtgccctaaggcaacgaatgacagggcttcagagctggggccacaatacaacaggaagaaccgattttacctcaccaagggttcctcagctcagcatggccccgagcaaaagagccagcaaggccagaaggaccaaggagaggtcatcatcagtggacagatggcagctggtgcaggggactcttggatccsagccctgtgtgaggccctgag

SEQ ID NO: 823195 - DNA, 552 bp, Homo sapiens
gtcactgtttgctgccaatatgattgcttgccttgaaaatcctaaagactcctccagaaagctcctaaaactgataaaagaattcagcaaagtttctggatacaagattaatgtacacaagtcagtagctcttctatacaccaacagcaaccaaactgagaatcaaatcaagaacacttttataatagctaaaaaaaaaaaaaaaaaaaaaccttaggaatatacctaaccaaggagttgaagacctctaccaggagaactacaaaacattgctgaaagaaatcatagatggggccgggcctggtggctcacacttgtaatcccagcactttgggaggctgagatgggcggatcacaagttcaggagatcaagaagatgctggcgaacatggtgaaaccccatctctactaaaaaatacaaaaaaattagccaggcgtggtggcaagtgcctgtagtcccagctactcaggaggctgaggcaggagaatggcatgaacctggaaatgtgaaggttgcagtgagccragatcatgccactgcactccaccctg

SEQ ID NO: 823196 - DNA, 626 bp, Homo sapiens
ttgtattaacaataagatttttcaggttttctatttactcttgagtcagttttggtatcatgtttkgttgtagttattgaatatatgtgtttatgggcaattcttggcatgatgttactcataatgctcccttactattttcggaaatctctgaagtatctgtaattgtgccattgtattttctactacaagttaatctgtgttttctttatttttgacctatctttccagagatcgtttatgtaattaggcaggccaactaccaacatctggctttgtcgatcctctctgttgggtcttttttgtgtattttgttacatttcttaattcttattgctttcttccttttactttttggaggtttattttgttgctgctttctagcttaattttgatacttagcttatgattttctggctttcctcttttcaattgatgtctgttttgtaggtgctgctttagctgtgtgtggcaagtttggttgcatgtttctttttgttcaattctcagtatttgcagcttcccattatactttattcattggcccatgtttctaatgggcctgtggtagtcgcctcttcaatatttaggtactaaatttgcatttcttgttaagatttaatgga

SEQ ID NO: 823197 - DNA, 622 bp, Homo sapiens
tgttcagcctctcttgactttccttttccatcctgatgaaaaaaatagggttgacattttttacactattccagtaaaaaggagccatagtttatgtctcagaaaacacgtaagcttttgggcctgaggctctggctcactatccccctcaagcatatacttataaatccaggcacaacactaatttggctgatttccccctggattagctgctttctttttttcttttcttttctttcttttcttttttttttttttttttttgagatggagtcttgctctgtcgcccaggctggaatgcagtggaacgatcttggctcactgcaacctccgcctcccaggttcaagcgattctcctgcctcagcctcctgagtaggtgggactacaggtgtgcgtcaccacacctggctaatttttgtatttttagtagagatggggttttaccttattggtcaggatggtcttgaactcctgacctcatgatctgcctrccttggcctcccaaagtgctgggattacaggtgtgaaccaccgtacccagcctgacttgtttcttgatggacattttctctgtgggttcaaagaccataaaaatattcagtaggagaaatgcttccaagc

SEQ ID NO: 823198 - DNA, 364 bp, Homo sapiens
ttaaactgctctaagtattatttgtagatatctatttatgaaagaggttatcttgcttataggaaaaataatggattaagcttaaccattcacaaatggacagttatttgtaggtacttaaacgtgaagmtctatcagagcatggtaatttgtcattttttagtgctttattttgactgtctataagagcacagttgagtacaaaatgacgatgtttctgtagtgccactgctagtttgattgataatgagaagatacagctaccatttttaatttttaaaatgcaagattattctggagtaaattaacctaatcacacagagcaagtaaattaatgtcagttccttacttaattgcaaaaata

SEQ ID NO: 823199 - DNA, 569 bp, Homo sapiens
atctccatccacttctagccacggagatacatttattttcctatatagcacttgttgctgcctgacattataacaaacgtgttttggcttacttgtttactgtctttctctcyacctataatgcaagccttctgagggcaaagactcccttctgttgactgatgtatgaccagaacctagacaaatgccagcctctgagtgggtgctcagcagatccattctggaaaatggccagggcagtgaatgagcagaatgagcatgggaggggaagttgtaagaattaagaaaagttaaacccagaggactgtaaacaaggcacagaaataagctttgggggacagaggcatctggtctaagattaagattggagaagtcacctctgtaagtcaagatgagactgaaatctgtctgcttttattctcagcttctagcttcttcactcaacagcaatttattcatttttttttccaacactgtgtgaagacaggactgtctccgccttatttccattgaattgtccacgtgatagatatcagataccaaagtgggtttgaggcagacctccatgt

SEQ ID NO: 823200 - DNA, 443 bp, Homo sapiens
tcaaaaacaaaagtgaaaataaagattatcccagacacagagaaaccacaagtatttatcatcaataggtctacactaaaaatatgttaggaaaagtctttcyggaagaataaaatgatatgagattgaaatctgtatgtctaaaaggaagtaaagtacatttgaaatgttgtataagtgaataaatataatttttctataattttaaatttatttaaaacataacaccaatatgttgtggtgcttataccatatgtaaaaacaaatgtataaaaataataacacaatgtctagaaaagtaggtgtaaaaatttttattttaaaggttttttaagatttaagcattacaacagtatctgaaggtatgctgtgataagtaaaggccgatactagaaaatctaaagcaatttctctctcatatttctctctctcccccacttctc

SEQ ID NO: 823201 - DNA, 648 bp, Homo sapiens
ttacactacctcactgtatttctgtgtgtttttgagaatgttgtaatttaaaagaagttcactccacagccacctaattcctctgacttgagttatattcaagtgtctcaaaatgtgacacagacattatcttgctacttgccatgcccttaccattgacattgaagagtggtacaaatgcagtcactcatccatctccttgctctaattcatcctaggtcaactgaaaaagtgtttgatgacaacttgcagcatagagacagagaagacacacgggcatatgctttggactacaaaatccctaaagtgtccttccaaatgttaaatgaggattctataaaagaagcaacaatgttgattatttaattatagtattgaaagaagtgctatagtgagtcaacttggctcacaatacaagacacttgaagactagagcatgctcttgggttcttaataaactgtgatctgtttgtacctccaggtgaacatggttgttttgaccttattgaagtttacacctttacctgttagtgtcctttatcttctaacatctattgttgcctttgaaaaatctgttgggaattttctaagtctgatcattcrtaaggtaacttttctttttaggttatgggttgtttttcttatccc

SEQ ID NO: 823202 - DNA, 602 bp, Homo sapiens
  misc_feature 598, 599, 600, 601, 602: n = A,T,C or G
atggaggcaaaaagcaaaattaatgkggaggaaggacaataattgtttttttagtactacaataccaaagattggggaagaagtcaaagaaattatatcttttttatttttgaatattaagataaaaatcatacagccgaattcactctttgttttttgtttgtttgtttgttttagacgaagtttcactcttcttgcccaggatggagtgcagtggcaggatctcggctcaatgtgacctctgcctcctagattcaagcaattccctgactcagcctcccaagtagctgggattacaggcatccgccatcatgcccagctaatttttcatatttttagtagataggatttcatcatgttggccaggctggtctcgaactcctgacctcaggtgatccaccgacctcggcctcccaaagtgttggaattacaggtgtgagccaccgcacccagccagaattcactttttttgacatagaattctgtgactcttgacaaacatatacattatgtaaacaccaccaaaataaagatatttaggctgggtgtggtgctcatgcctgtaatcccagcactttgggatgccgaggtgggtggnnnnn

SEQ ID NO: 823203 - DNA, 621 bp, Homo sapiens
actacacttagtaattaaaaaatgaaaacaaaaaagatgtaatattttgatgtgattctctttaaatattttcatgtatgctattatgcttagtaaatcaaaatgaaaatgaaaagaaaaaatgtaatattttgatgtgattctttttaaattggttgttttagctttcatttaaatgaaatgttttcgatactgaaaaacaaagattttctctaagcaatataattaaattcataagataaataatttcaataattatctcttaaaatatcaacatctcatatttcagagctctcgcattttagagattgaatattgtaaatgtaactatgcaaatcgacttaagtattaaaaacagtatcaaaaatagtaagatcttcaaggtatgataggttacgttctctggataacaaaattattgttttaaatgactgactagaaaaagggttaatatttgcattacataaacagaagatgccattaaatcattttcatattattatttgaatgaagtcagagtatatataaattgaaactccctgaaagaaggctgtgttgggacactgagaatgtggcccaaccaaaacttatgtgaaraaagtgattgaatgctcctgtaga

SEQ ID NO: 823204 - DNA, 606 bp, Homo sapiens
catttcttcccacactttgttttctcattttctcatttttcaccaatttgaactatatcttcctttgtcccacttccatttttttgtatattcttcttatttacactaagttgcttgtttcttttgtgtccagatgcctatagttcatcttctccaagaaagattcgaagcaagttttcctttctatttcgtgttacgtcttccttctcttgtccttttgttctgtcatgcttagactaggcagtgagctggagggaaggaactgactagtttgcataactagaagtattctggatattctataaaaaaataagccaatgaaaagttgtaggttttgactaaaggtgtgaattggagaagaagaatgtggacgatataccaaataaggaaattgtaaattcaaggaaaagaagagacagatgtcgaaaatggtagataagttttattaactagagtgaaggtcatagtagcagtataatgaggagttagtgaaagtctaaaataattgcaattcatgatctggagtgttaatttgacacaagkagcagttgtggatgagtaataggaacacttgcccatatgaaataggttctgcttttctgtact

SEQ ID NO: 823205 - DNA, 510 bp, Homo sapiens
gaataaagaatgttgacattctgaaaagagttccttcatgaaatgcaattacaatgactgttcattataatgcactaatacactgcagttacttcatataaaaagggtaaagtwtccttagagtttttataaattatgtattttctttttgaaaataaaaaaccttatcttttttttttttttttgcattttaagaatagattgccttaatcaagagattagaaggtaggattgaggaattctttgtacctgaacatgaaaaaggaaacatgttcaaagttcactgcagcaatgactgtaataacaaatgagtggaaataatccaaaagtctctcagtaaaggaatttataaaatactatccagacgttaaaataagtagattacggctggaaatggtggctcacgcctggcatcccagcactttggaaggccaaggcaggcagatcacttgaggtcaggagtttgagaccagcttagtcaacatggtgaaaccctgtctctactaaaaa

SEQ ID NO: 823206 - DNA, 510 bp, Homo sapiens
gaataaagaatgttgacattctgaaaagagttccttcatgaaatgcaattacaatgactgttcattataatgcactaatacactgcagttacttcatataaaaagggtaaagtttccttagagtttttataaattatgtattttctttttgaaaataaaaaaccttatcttttttttttttttttgcattttaagaatagattgccttaatcaagagattagaaggtaggattgaggaattctttgtacctgaacatgaaaaaggaaacatgttcaaagttcactgcagcaatgactgtaataacaaatgagtggaaataatccaaaagtctctcagtaaaggaatttataaaatactatccagacgttaaaataagtagattacggctggaaatggtggctcacgcctgkcatcccagcactttggaaggccaaggcaggcagatcacttgaggtcaggagtttgagaccagcttagtcaacatggtgaaaccctgtctctactaaaaa

SEQ ID NO: 823207 - DNA, 596 bp, Homo sapiens
actgtcacaaaaccccgactgaaaacagccccttttcatactgtcagctgcccttctttcactagaagacagagtccctgggagccctgtgggaaggagacaccacttcgctgtgggaagtctcaccatcgctgtcgtgccaggagccgttggagtgtccccttctctaaagccatgtcaagcacagtaagaataaatagaggggaagtggaaccgtgagaacatgctcttaaaccctattttacagtattcctttgttaaatgaaatgaaagcaattacaagagaaaaagtaggccgggcacggtggctcacacgtgtaatcccagcactttgggaggctgaggcgggtggatcacttgaggtcaggagttcgagaccagcctagctaacatggtgaaaccctgtctctactaaaaatacaaaaaattagccaggtgtggtggcacgtgcctgtaatcccaggtactcaggaggatgaggcaggagaatcacttgaacttgggaggcagaggttgcggtgagctgagatcgcacaacygcatgccagcctggctgggcgatagagcgagactctatcaaaaaaaaaaaaaaaaaa

SEQ ID NO: 823208 - DNA, 516 bp, Homo sapiens
cctgaaggaagcactgaatatggaaagacaaaactgggaccagccactgcaaaacacacgaaaatgtgaacaccaatgacactatgaagaaacggcatcaactactatgcaaagtaaccagctagcatcattatgacaggatcaaattcacacataacaatattaaccttaaatgtaaatgggctaaattccccagttaaaagacacagactggcaaattgaataaagagtcaagacacatcagtgtgctgtattcaagtgacctatcttccgtgcaaagacacacataggttcaaaataaagggatggaggaaaatttgccaagcaaatggaaagcagaagaaagcaggggttgcaatcctagtctctgataaaacagacyttaaactaacaaagatcaaaaaagacaaagaaggatattacataatggcaggtaaagggatcagtgcaacaagaagagcaaactaccctaaatatatatgcacctaatacaagagcacccagattcacaaaaca

SEQ ID NO: 823209 - DNA, 654 bp, Homo sapiens
tgtagaaacagtagacagcccttcagcattacgcttgggggccattttaaacagcagtrtcactaatataaagcacaaaattgtgaaacgtcacattaaatagaacagaaaaggatactcgtatactgtagtatactgtataatagtggaagcaagaaggcagagtattgctttatttgacctcagctgggaatgtgcaagtctggcaacaaattttcattgctctgagcatgtctacaaatgaccacaaaagtgccccaagtattgattttaggattacaaataaattttagcaagtaggcaaatttgaagatatgaaatctgtaaataatgaagattgatttttaaatgagttaatgctttttagtcaaaccattttggagaaagtgcctccattccttcttctttccatttgttgctgctgttatttttacttcactcaagaacttttaataattctaagcaagatgtttagtagcatcactttaaactggtggaaaaaggggtttttagtagtttctgtgtgaaaccactgaaatcatcctgtaggtgactggcaatttaaccaataatgagatatagtgcagatcttgggtaacaatagaatataacagtagaaacacaagctccagaatcagaaatattagatttata

SEQ ID NO: 823210 - DNA, 624 bp, Homo sapiens
agctgaatatagaacctgccaaggagagatgcaaccttgtttacattcttgttggcagctaatgaagaagctgctgtgtactcgagctattatctaaaccaaaaataacacatgaaaatgattaatttcatctaaaaataagcaggcgctaggctatgtcagccatgataatcaggctctgagctgattgtactgcagcattggagtggaacttgggaacaaagggagaaacaaatttgagctcatagtaatcatctcctactgccttttcttccctctgtttcttctcttttctcttcctactttgttgttatttttccttctctttttccttctcttttttctccacgttttccttcttctctgtagtttcttcctcctctcttcttcccccttcttttaaaaacactcccctcccttatttcattattacactattatcctcagactgcagtggatccatccccattgcttacggcacagtttcctacagcagtacctgtctctacttgtagcacataatatattgttacggggtgagtaaatgatcattaattgttaaggatcaaaattattttaatgttttaattaaaaamttactgcatataatctattattgcatga

SEQ ID NO: 823211 - DNA, 528 bp, Homo sapiens
tccactgctggctaagacagagggagccatgtggcaacaaatagagtgtattttagtggccaagaatggcagcttcagatggcagccagcaaggaaatgggagcctctgtcctacagcaacaaggaastgagttctgccaacaaactaaatgagctggggagaggatccctcgttccagatgagatgagcttgagtttggtaaacattatgatttcgagcttgtgagtccctaaacacagagcctagctaggccatgctcagactgctgactcatgtaaactgtaaactaacaaataggtgtaattttaaactgctaactttgtgtgagtctgtcttagagcaataaaacacaagtacagaataattgcctacatggagtttctgggtagttaggagcatgagagaatctctctggggctttctggcacctggaaggccttccctatggactggcagaatacttcctgttcgagcaagtctctccaaagcaatggggatcatgaaaaactgaactcattgacaatccc

SEQ ID NO: 823212 - DNA, 599 bp, Homo sapiens
ggtacattaaagtgctcaaataaatttcttctaagtggaggagaagagggatgtatrggtggtggaagggttccatgattctaagtggcttccctgggagggacatgtttagtcagatttaggagatagtttatggaaagatagggagcaaaatataactcaggataccatgtctcactccaaaatcagccataagcctcccactgccatatctacttaacactccacagtcagcctcagaccctctccccaccatttcacacttcatcataaacacaaatcctcctccatacaaccaattcacattccacatcaagcaaaaattgtccctccttacaatcactacatattctgcagtaaatccaatcgtctgacccaacaggcattttacagtccacagcaaactacaatcttacccttctcagacctcctcacctcccgtgggaagccctaacctcctcccccacagtaattcacctttccacaggaggcccaacgcttcacaccccatagtaaaattctcacgcctacagccacttcacacttgctagcaatcctccatgatccctgcccacaccacctcatgttccaagaagaac

SEQ ID NO: 823213 - DNA, 633 bp, Homo sapiens
aagttcattatgccttgtgctcttctaattaaacaacttcaaacttaaaaaataaacaaayaaaataaatgtcattaggagctatgctttctaaacaatttgaccaaggtaaagtctagaattataaacaatccagtccaagcagcatgcccatagtggtttagaaaattaaacgatagtcttaagaataagaagaagattaaataacctctaacatcccatttagctttaatattataaagcattgtttaaattaaaatttcggaaaaaggctgggcttggtggcttatgcctgtaatcccagcattttgggaggccaaggcagatgaatcactttatttcatgagtttgagaccagcctgggcaacatggtaaaacgccatctctatttaaaaaaaaaatagctaggcatggtggcaggcacctgtagtctcagctactaagaaggctgaagtgggaggactggttgagctcaggaagcggagactgtggtgagctgagatcacaccactgcactccaacctgggtgacagaatgaggccctgtctccaaaaaaaaaattttaattgaattttattatttaattatttaaattagaaataataattaatttaaatacttgtattagttatt

SEQ ID NO: 823214 - DNA, 548 bp, Homo sapiens
aatattatatgctaagacaacaataaatgctcagcagtacaytcatcaatgttgttactttggttagattctcagtgtctcttccaatggaagtatttctccctgtggttcttcatgttcactcaagtcataaggattcatatcagtcaaggatttataggcagcctgtgcaagttcattctttacgactataagcatgttccttctcagtttataggcaaagagatgatctattaagtgttgctattgggaatgataaatgaatatttacaatttacaataaataaacccaaaataccaacaagtttccccaaagatagagaagtttctaaaagtttcgacttttcagcgactactgcacattgtgaagaagtagagacattctaggtcgagttcactttaactagctaggtttcatgggccactaaaacccctaaatattctaggttttggtggaacgtaagagaaagagaatcagacaagcaaattataaaacctggttttgacacttatttacagagaagcctcaactccttggatatcctcat

SEQ ID NO: 823215 - DNA, 584 bp, Homo sapiens
tttatatattttattttgttatttttgaatacatatgacatactaaagagtgcatatctaacttggtacactttttaaggaatatgtgcaaaaggaacaaacatttccctccacatagtttaggaatgtgccctcccttatacagccccttctcctcaaaccaaagaagccataattctaaaatttatgttaatgatacttttacttttctttgtagtatttaaccacatatgtaggtatcctgaagcattgtatttcctattttcttgtgattcttttttttttttggagtgtgccatttcatctaaatttcaaatctgtcgtcatgaaccttttcatattattctctattatcttattatcaggatataaatgcctgcttcatatgtgcctataccttgactctatttgtattattgtttatatgtgccttccgttttcttgattaatgttgccaatttttaaaactttattaagtttttcaattcttggcctttttttttctgtaaaatataccatcgtttcaatgtctgtttttgwctttttttttttttttttttttttttgcggacatttattttact

SEQ ID NO: 823216 - DNA, 632 bp, Homo sapiens
aaactgataaacagaacttgtttctagccaagctgctctactacaaaatcaataagaaatataattttatccctagaagacatttttctgtccagaatcrtggcaccattccagcttttgttcccaagcagcattttgtatgcaccctggaaatgggacaggactttctgaggatcccaagaagtttgggattgtggaaggagctttggcattggagtaggagactggggttcaaatccttactcctctccttgttctctgtgactccaagcccttgacttcttaacgtgtaaaacgggaatagttataccctaccttctagggttgtaatgaggatgaaataaaataactggtgccaggtgactggtaagtaggaggtgctcagtcaattccctcagtgtcctggggggagtaagggcaattccatgacctcaacagtaataaggagcgatagagggaagttgtgtcctactccttccagcggatcactgaaagcccaagctcccagcagattcagaggaggcctaggggtgtcagcttctaggaggagacttggtttgggctgggggcagagctctatgagaggagtacagggactgagttaccagctgcttggttccagaagaaagaac

SEQ ID NO: 823217 - DNA, 565 bp, Homo sapiens
tttctgtgccccaacctcttatatctctgtgccccaatcccttatttctatgccccgacctcgtatctctgtgcccygacccctttcccacttttctggagggtaagaacccccaaaccccttccctccatgtctctactctctcttttctctgggcttgcctccttcactatgggcaaccttccaccctccattcctccttctccctttgcctgtgttcttaagaacttaaaacctcttcaactctcaaatgacctaaaatctaagcatcttattttcttctgcaatgccacttgaccccaatacaaactcgacagtagttccaaatagccagaaaatggcactttcaatttttccatcctgcaagatctaaataattcttgtcataaaatgggcaaatggtctgaggtgcctgacgtccaggcattcttttacacattggtccctctctagtctctgttcccaatgcaacagatcccaaatcttccttctttccctcccacctgtcccctcagtcccaaccccaagcatcgctgagtctttctaatcttccttttctacagac

SEQ ID NO: 823218 - DNA, 642 bp, Homo sapiens
agagtccactcgctgagcttggaggggtgcttcctgttcttagtcacagatattatctagatatttctaatgccccttccttccccccgtcccacctgcaaactggaattgaagaaagaagtgtctcaaaaacattaaatcctctcttgcctggcgagatatctttattcctgagtaactcctccaaataacacccctgagtctctgaaaatgtaaaaattgcctgtctagttgaggcaaatgaaggctaaattgagtcataatttccctctagattctcattcacctctagctgtaggaagcatcaccaatacagaattgatgaaaagtgtataaacatattatccagattctcaggctgtcacagggagcatttttgttgttgttcttgattttaatgtaagcaaagctgagcagtgggagtgttcaggttttagaagagatttttctttctgaaagataatatttctcattctgaatgattttcttctttttcttttaaattccaaggcaaattctgaaatctgtttcgacttgacttatttttggatcytcacctgtatcttaattacgtagcaagaagtaagcacaattgatgagcaatccatgtccctaatctttgatttgttatgaattgtcttt

SEQ ID NO: 823219 - DNA, 661 bp, Homo sapiens
aaatgttcagggtgatagcttcgtgttttrtctaattcttagggtcgttttcttattcttcacagaaaactttttgtttacaaaagagctttgtattcaaatggtgctttgagagttgtaaaaaggagtaagaggccgggcgcagtggctcacgcctgtaatcccagcactttgggaggccaaggcgggcagatcatgaggtcaggagatcgagaccatcctggctaacacagtgaaaccccatctctactaaaaatacaaaaaaattagccgggcatggtggcgggcgcctgtagtcccagttacttgggaggctgaggcaggagaatggtgtgaacctgggaggcggagcttgcagtgagccgagatcgcgccactgcactccagcctgggtagagcgagactctgtctcaaaaaaaaaaaaaaaaaaaaaaggagtaagaaatcatcatattgtatttgttcccataatttattactgatacctcttatgatccttgtcttgatgacgcagggcttcatgggccaataccacagaagaaggccacataagaaaaaatgagtaataagagctaacgtgtatatagtgcttcctatttgccagaccctattctacatgcagtttgcatgttgtttaacaggtataaagatatagacaagc

SEQ ID NO: 823220 - DNA, 571 bp, Homo sapiens
gttggaatcagctctcatttttagtggctgcttccttgtgcatcagaggaaccaaagtaaatttttataggaaaagaagtgtttaaaaatctcttttaaaaaggtacacggaaatcaacagtgtattttataacaaaaataatcaatgggcttcttgtgtttttttgtgtatcttgcctgagccaccacattttacttctgacaagactctttggcagtcaaaaagggggtgccagtattcacatattaacaaactgtgaaatgtccttttcatccctagttttcttgcaatgtcactgcctctcttttttacctttgtaaagttacaacttctgaaacttcgttgcatagaatgtgaagttaggtgaataaatgtgtttgtaaaaatcagtaaaaagaaaagatgatttatcctctctacttcttagctatacttcgtggtagcccaggtctcaataaggttctaagtacactagggcttgcaaacctgttcttagcgaatgaaccagtggggatgagaatgttaayttaatttgagttactgtggatcaacatcactctgttaaacaag

SEQ ID NO: 823221 - DNA, 472 bp, Homo sapiens
ggttcggtttatttgcatttatttatcctacaagcattttttttggacatctattatatgcctagtctagtagggaaaccaatccaagggagcagaaagctgtggtactaattttgcagtgtgagaggatgagggattattatgcaaggtcctccccactttgggccaaatggctcgccacatcagccaggaccctcacacaggaccactggaccctcacaggcacctactttctgctgaagcaattgctcataaagcctttcatctgaaaccagtaagtggctcgtgtcctagagcggggcatggggtaggctctggagctagagcaactgagctcaaatactgatttcccttagataatctgtagaaaaggctcagcccagtgcctggcacaaagttaaggagtcaagaagatgattgttatcacgcatggcacaagtctaytttgaattgagagtgggatgaagaatat

SEQ ID NO: 823222 - DNA, 631 bp, Homo sapiens
cttttactttgttgatgatttcctctgaagcacaaaagttttaaattttgatgaagtttaatgtatctgtttttcttttgctgttagcgcttttggtgtcatatataaaaaatcattgcctaaaccaagttcaaaaaaaaatttactcctatgttttcttttaagagttttgtagtttttgctctgacatttaggtctctggtccatttcaacctaattattgtatatagtgagatatccatgtcttggtgtatggcaggtgtacaattcccttcttttgcatgtggatatccagttgtcctatcatttgttgaaaagactgtgctttcccccattgatttgtcttagcattcttgtcaaaaatcaattgacagtaaatgtaagagtttatttctggacttgcaattctattcctttgatctatatatgtgtccttaccaggatcacattgtcatcattactgtagttttgtagtaaattttgaaatcaggaagtgtgagtcctctaactttattatttttwaagatggtttttgcttctttttttattttttactttttttgagacagagtttcactcttgttgcccgggctggagtgcaatggcacgatctcctgacgtcaggtgatcc

SEQ ID NO: 823223 - DNA, 624 bp, Homo sapiens
tggttaagtcaccaactcagtatctagttaggttcatttgtttcattgtgcttttgtttctgaacttaaaaaaaggcatttgtrtggtctcaaagtcaaatttgcaaagtaagttactttcagagagctctagcttttatctctgtctcttcaatcttattctctccctctctccataataacttaaagaaaaaactttatttagtttgaggttatcctctttctcttcctccttctcttctttcttttttttttaatttttaaaacagcaaattgttaaatttattcacatgttccccttttattcaatacttggtagcataatctacacagtcttttgaaccttccttttttcattttaacagtatatcttggagatcacttggtagtggtatatagggctcttcctcatttctttttatagttacatagtactccattttgtagacttacaatagtttattcaaccatccccttttggtgtacagttacattatttccagtcttttgttatccaataatgttgcaataaatagccaaactgtgcttcaaaagacactatcagaaaagtgaaaaagcagctgacagtgtgggaggaaatatttataaagcatattatctgat

SEQ ID NO: 823224 - DNA, 587 bp, Homo sapiens
ctcaacctcctgggctgaactgagcctcctgactcagcctcccaagtagctgggactayaggcatatgctaccattcccagttaattttgttgtagacggggtcttgctgtgttgcccaggttgctctcaaactcctgcactcaagtgatcctcccactgcggcctcccaaattgctgggattacaggcatgagccaccatgcccaatatcaaactaatatttctttttttttttcctttttgtggagaacagcttctcactatattttccaggcaggtctcttaactcctgggctcaagctatcctcctgcctctgcctccctaagagctgggattactggtgtgagccaccacacccggctcaaaactaatatttctaagatatattcccagaggtgtggggctaagtggattccatgaaccccaggatacaaatgcaggcttctcactggagcctatacctcagagccacgctggctggtcaatcaccaccacgctccattgccaggcggaaatatttatttgaaaaattgaaaacacagatgcaatgtattatacaaagaaaggtcttaataccataataaaa

SEQ ID NO: 823225 - DNA, 518 bp, Homo sapiens
acagtaaaaatgttaacaatgggtacctactggatggagactcggatcgctgggacagaggaattttacttttttacttaaaaaagccaaaaccaggaaaggtaatatttgcacgttaccgattctaacaataagaatgtacagtagactgggcacggtggctcacagctgtaatcccagcactttgggaggccagggcgggtggaatcacgaggtgaagagttcaagaccagcatggccaacatgatgaaaccctgtctctactaaaaatacaaaaaattagctgggcgtggtggccagagcctgtaatcccaactacttgggaggctgaggcaagagaatcgcttgaacccaggaggcggagattgcagtgagctgagatcgcaccrctgcactctagccccagcgacagtgtgagactctgtctcaaaaaaaaaaaaaaaaaaaaaaaaaaaaagaatgtacagtaaaaatttcctttttatctcaataacaattaccagtttctaatatatcct

SEQ ID NO: 823226 - DNA, 651 bp, Homo sapiens
gaccggctggagccatggcagaggaacataaattatgaagatttcatggacatttaccagttcccaaataatactttcataatttcttacgcctgtcttactttaatctcttaatcctgttatcttcrtaagctgaggatgtacgtcatctcaggaccactgtgataattgtgttaactgtacaaattgattataaaacatgtgtgtttgaacaatacgaaatcagtgcaccttgaaaaagaacagaaaatcagcgattttcagggaacaagggaagacaaccataaggtctgactgcctgcagggtcgggcaaaatacagccatatttttcttcttgcagagagcctataaacggacgtgcaagtagggaagatatcgctaaattcttttcctagcaaggaatattaataattaataccctggggaaggaatgcattccttgggggaggtctataaacagctgctctgggagtgtctgtcttatgcagttgagataagggctgaaatgtgccctggtctcctgcagtaccctcagacttactacggtggggaaaaaacccgccccagtaaatttgaggtcagaccagttctctgctctcgaaccctgttttctgttgtttaagatgtttatcaagacaatacttgcactg

SEQ ID NO: 823227 - DNA, 598 bp, Homo sapiens
cgcccagccttcatcgggagattaatgcaawagaatcagaaaatgctttgttggagggggtggagtctccaggtgggagaggaataatgtagcaggtggatttttttaataaatcttcaccacttgtggactacctagcctagattaccaatctggagaagccctttcaagaggaaaataggcaaataggccttccctgcctttggatctgccactaacggtggagaagtgctgagctttgggttttgatctgctctatggggagtgactctaggttgtcattcaaatcagcttaaagctaaatgttttggctcttgtaactaaagatccaggcagtgctggcttcaggtgtagcctgaaccagcaggttacatgatattaacagggccctgtttttccctctgttcccctgctttgccatccgcaaagttggcttcatccacatggtagccccgtggcgtaggttctcccctcacatttgtaaacatggttgcagtagttccagacttcacagcagcatcccacactgttcaaggaaagacattgttcaggctactcctgaagaataaggaagcatctgtttcccagaagacatcta

SEQ ID NO: 823228 - DNA, 627 bp, Homo sapiens
tgctcatgtctgcctagtaacctactataacaacattgtgttattctcagtacttcctgtcaggatgtcatgatgtcaagttgtcccattgctgattatgttaaccttggccactgggttaagatggtatctgccaaattttcaattgtaaagttaaaacttaaattttgtccttaagtatcttctttcccaattattttggcatccattgattagctttgccttaattgattattactagtatggctttcaaatgattttataattctgtcaatctttttacatccattagggtgcattgcattgtaaggaaaagctttttagtcttttccacgtttttattcatctacagcactatgaatgcatagacttacattctaataaaaaaggtataaagatctacgttcttttttttgttcacataatttctgatttggccagtgaaaactccttcaaaatgtgtccttttgactaatccccaacattctttaacacttctttacactttgagaatacaagatgttacaagtttcacaatgtaatttcccaggcagtgaccatgggtagacgcgcrcacacacacacacacacacacacacacacacacacacagtcacactgtcaaca

SEQ ID NO: 823229 - DNA, 631 bp, Homo sapiens
tgaacacatgttctcaatagaaatccagactccaktccttgtacttgaacatttaattgtttgaaagtaacacattttattatgaagaaaaataatctatattcaaaatttagcaagtataccctggcaaaaaaatatataaagttgttttcaaattttcccattcaagaatggtgatatttaaatatattttctccttgactttttcccgtatctattaattatattaactaatatattaataccatattattacatattatatcatgttataataacatatcttataatccccatgcctttaaaaatgtcttattgttctgtcactcaaacagttattttggactctcatttgctgttttgacttctaatgttgcaaaatcttcttgagccaataacatttataattaagggagcagagttcttaaaattgaaaatgaaacctgtttggttatgaaatatcagagagttacaactttttccttaaatagatgtgagttgactttcattaaagggggaataaaagaaagaacaaacattttaagcaaacgttctaaacaaaggttgcaaaatcttactatctaaggcatggctcctcaattggatcttactgagatttactgataggtca

SEQ ID NO: 823230 - DNA, 601 bp, Homo sapiens
tgccatcttttgccagccactcgctatctcatcgtctgttgctcgctactcattgcctcacagatcactggtcttaccgtcttgtctccttccttattgccagctgctgatcgctgtctcaccatctcaccaatcaccaatagctgtcttgccaccttgccatcttgtctcatcccttcattgtcaccatgatgatgcagggcaggcaatggggcttagcctggaagggttcttggcttcactgaggaaagaattcaagggctagccagtggtgagagaaagcaactcttattgtactggtactgcttcttgtggagcaaagctaacccatagggagtgtggcctgcattgtcagtgtatgggttgttggccgctatatttatacccacttttaatcatacgttaattaagaggcaggttattcacaactttctggaaaagggacagggcgtttccagaaccatataaggtaacttccaggccattgccatggcattagcaaactgtcatggtaccagtgggaatgtctttatcctaatgagcagcgagggcawctacaggtcactgccatctgctggtgtgggctgacttctgttttttt

SEQ ID NO: 823231 - DNA, 578 bp, Homo sapiens
tcactcacaactgttttgcagatgacttagggaattgctgttcagatgcattcataagggaactgagtcatgaggggacacaggcacggtgtgtggcatctggcttgcaagtgaggactgcggctctgcagtgtgtttttaggagctattcccagaagtccagctttgaattaatccattcagctatcccagtaattgtgggagctagctctcccccttaatcgatccctcactgtttaaactataatagctggaggaaatgttattgtttgcaactttaaaaaattgacctatactcactctttcccttattatcaaattctgctcccagccaacactttcataactatcaaaggattaaataaattcacactaagattttaaaatttcaactcacatgagtaactaatctgaaaatcttgaggcaaggtcctctcttatcttctacaaggttataagagctaatgtactacagatatcctatstgttgtaccgataagcttcatttaatccacttagaaattcaaaagaacgtataccttcttggaatttaatatctcctcagaattggatgttca

SEQ ID NO: 823232 - DNA, 586 bp, Homo sapiens
agaatcaatccttaagctaggcaatgcatggagacatcaattatgctaaaatatttaaactatttcataagagtagataatgatgcatagtaaattgtgtcctgctgataatattagaaaatacttaggcaagatggacatacatgtatattttaaaacaattctttttcttttttctttctttcttactcttttctttttttaagtacttgcactttttaaagattcctagagaaccagatgggtgatgaaatatctcaaaataccaggtttcacacgtgatagtaatattgggagaaaaaagtgacactagaaattatttagttattctgaaatctgtcacttcttgaaaacagcaccagaattaagaaataaaattaatcgtgtaacattgtgttctcacattttcaattcagctagtgaattatgaggccaaaattccttaagacaattaccccagggccttagtcggctcccaagtctctgcctttcacctgagaaagaatttccaaactgcctgatgakggagaaaaccatatccatggtcccagcggtctggaggatcccaagaatctggatgggaagc

SEQ ID NO: 823233 - DNA, 391 bp, Homo sapiens
tcatgttctattttaatattttggggaactgtcatactgttttctacagtggctgtaccattttacatttctatcagcattgcctcagggtttcaatttctccatattctcgccaatgagggcctacactcttaatcattgtaccatattgctgatccaaggtagatgagtgagaagagtcataaaaaacatggttgtatattcccaagaactgtttttgttaaatgttacagtcttgacacacatcctttcaccactctaggagaaaaaaatactgctaaaaaatagactattctttgtgttgtaraaaactgatgaatttttatttcctttcagtttttctagatgacattcaatcccctccctgctttggttaacatcattacttcag

SEQ ID NO: 823234 - DNA, 593 bp, Homo sapiens
aatcctattggttctgtttctctggagaaccagccatgtttaggaatacaaggttaatgtggagtcattgaaggttttgggtaggagagtcatgtggtctgmtttgtctttcagatagatgacttcgaagggcaaatttgaaagggacaagagtgaaaacaaggaaatcacctaggagactacgtgtgactattatttttatgtcaattcggctgggacacaggatgcccagatatttggtcaaatattattctgggtgtttctgtgaaggtgtttttggatgagactgacattgaaattggtgaatttgagtaaagcaaattgtccaccataatgtgggtgagcctcatccaagcagtggaaggcctgagtagaaaaagaaaccaacccacccctgaggaaggaagaggtctccagctgactgccttcagactcagattcatctgcagcattggttcttcctgcctgacatccttccagtgggcagctgtgctctcccagggtctcctgcaccactgacctgacctgcagattttggacttaccagtcactaaaagaccataagtcaattctttataattaatcaactcatt

SEQ ID NO: 823235 - DNA, 615 bp, Homo sapiens
cacccccacacacctgggcttgttgttactgctgtttgttcgtttattgacttatctggactattwtgtaaagtctgtattctttgttgtgtgtggtctatgatatttctatttggttaccttcttggtcagttaatgattggttagagaacatcttaaatgctttgaaccaatatgtgttgggtacatttcagtgctttggtaggcagtttaaaaccctgccttagacttctctttttgctgtctacagccttaaggtctgatagcaatgagagcttagtgtctactcaaatcttacctgatataggccatgagcacagccctgcatacatgaatgacttctaattcccaggaatatgtgaaagctttgcaaagtttcctatggatatttcacttttcagtgctttaaaaaaaaatcagcctcttatcctcaactggcaatgctgcatcaggcagctataatgttaatcagttgtcattatttattttttctataaatgcccttctagtatggctgtttgcactaagctaactctgagtctggtcaaataaagacagtgagctgtcataaatagtgaacattctttgggaatgaggcatgtgatggatgtgatg

SEQ ID NO: 823236 - DNA, 657 bp, Homo sapiens
tgattgctgatgcagaacagaatgaawtagtaaagagaattcaaaatgagacccaacaacaaacaatttacgggctatgaaaccacaaggaatatgcatataggatgttccaaaaatgagcaactctattatgctgaaaatcgtcacttcattataaatgtttccattctaagctccatccctcactctctgttaataattcaagcatttaaatttttattagattgtaaattggcacacaggtcatgagcctgacttcacaactgtcatattcaaaattggaatggaatgaatctctttctgcttccagtcaagtcacccatttgcactatccaaatatgcctaatgggaaggagagacacacttgatgggaggaaaaaaaatctcatggagttaacatttgtagtgcaatcaaattaaatttccatcggattttagtttaaaatggtgcttggctagttgctgctgatacatcatctcccaaatttccactaaaatatcaatgaagacacagaaaaaagataaaaaatatacatcatctacagaaatgaaaatttcagaagagtctattgctcagaataatagagaatgttgactaaatgtaaaaccgaagaagcacaatagaaaaatatatatatattactctaatgatgctta

SEQ ID NO: 823237 - DNA, 657 bp, Homo sapiens
tgattgctgatgcagaacagaatgaaatagtaaagagaattcaaaatgagacccaacaacaaacaatttacgggctatgaaaccacaaggaatatgcatataggatgttccaaaaatgagcaactctattatgctgaaaatcgtcacttcattataaatgtttccattctaagctccatccctcactctctgttaataattcaagcatttaaatttttattagattgtaaattggcacacaggtcatgagcctgacttcacaactgtcatattcaaaattggaatggaatgaatctctttctgcttccagtcaagtcacccatttgcactatccaaatatgcctaatgggaaggagagacacacttgatgggaggaaaaaaaatctcatggagttaacatttgtagtgcaatcaaattaaatttccatcggattttagtttaaaatggtgcttggctagttgctgctgatacatcatctcccaaatttccactaaaatatcaatgaagacacagaaaaaagataaaaaatatacrtcatctacagaaatgaaaatttcagaagagtctattgctcagaataatagagaatgttgactaaatgtaaaaccgaagaagcacaatagaaaaatatatatatattactctaatgatgctta

SEQ ID NO: 823238 - DNA, 615 bp, Homo sapiens
acacaagtgactggataaaaagctttaatttcattgttaatggagtgtttctctaagttgcctatacatatcaccttgagtgacccagtaggatgctccatttcagggtaaagggaagggtgtagcgtttaattcctggcagcgctgtgtgtgtgccacctcccactctaataagcctgtcatgtgtctcatggaggaaatgtcaaagatgtctttccatttccaggttcagagagcccatggtggttcgggggaagcatcagtgttgtctacaagaatatggagcccactccaaatgaaataatcagataacattgaaaaagaggaaatccgcacaacgtccagctatggagtagctacatggtgaaatgccgggaagatgtccaggacaggatgtggtgacactgtgggaaggctttattgcagaagggaattctaagaagtgtgggagaaccatgaaatttagcccagaagagtaagaaacattgtgccaggattggaaaggaacagctctgacaaggaaacaagaataggagaaaaatgccagtgcagatagagggargtgctagttgctctaggcaaagaccatagaaagatttgtcaaaaggagtctta

SEQ ID NO: 823239 - DNA, 558 bp, Homo sapiens
cgtacttgatgatccttcaactctttctgagcaccttccatgcacggcctcggggaaaagcccttgatggaagggaggtgggcgctagagacacaggtgaggaagccaagcctgttcagtagcgatggagctacagggaaaatacaagcgggagccctgggcatggtggtttaaatagggaggtcctgcaggaaggtcctgacatgctgcttttgggcaaagaccttcaggcttggagtgcatgaagcctggggtctgcacgtcggggactgctgcctctgagacagaccccaagcagaatcagattcggtgtcccagatccccaacccgccactgacggtgactcccaggccaggagtgaaacccacgctctcattgccttgatttctcaggggcttcatgaatattttggtgtctggggcacctgtggacagtggaggaggggtgaggttgsccctgtgtgaggaggagtccaggagaaacctgcggttacgcagccaccttggcctgcctgacagtcaggttccgcctgaggccacagtgagattgtggtacggg

SEQ ID NO: 823240 - DNA, 567 bp, Homo sapiens
tttattgttttaatatataaattgattcctttaaaaaacaagccacaaatctcatggcgggcccttttacgtgcatgagctctaattacttgattttttggaagcgcctgaaaaaattatatttctaattcctctaggcctgtcatgaaagagccttttataactgccgggctgtccctcctgggaatcagacgctgcggtgcagaggaggatgacgacaggaaccgctcttctcagaaaagggccttgcagccctgagcgtttccagctcaaacagaatggatgcgtccgctaatgatgtctgtcgctatttgcatcgtggatgcatttccagggttcgcaggccctggagaaggaggaaaagcttcccaccctgtcatgctcaggatcatgtcgtcatcgtccacagctgagtcacatcgcccggagcagatgtgactggcccccaccccctctgtgtgtacagagagatgctctcagagggtcgggaagccagagcctctgagcccagcttggagcatggcaagccacgytggctggaaacccctggacacagagacttgctga

SEQ ID NO: 823241 - DNA, 609 bp, Homo sapiens
tttatgaataaaagacagacattatgatgaactgatgctacaacatgtttttaatttaatttatttattttgatagctttatgggcatgaatggtttttggttatatggataaattttgtagtggtgaagtctgggcttttagtgtacccgtcccctggatagtgtacatcgtacccatcccctgggtagtgtacatcgtacccctcccctggatagtgtacatcgtacccatcccctggatagtgtacattgtacccatccattcctgaggtacttcacttaggataaaggccttcagttccatccaagttgctgcaaaatacattatttcattccttatggctgagtagtattccatggcatgtatacaccatattttctttatccacttattgattgatgggcactttggttgatttcatcttgcaattgtacaacacatttttttaagcttgaatgtagctgtggattgttttccttatctaaaattcccacaaagatgtgggagcaagatattrtacagcaacatgtgtagagcaagatatttattaaaataaattatatagcttaatatataaatcctttctcacttctcatgaaatatatag

SEQ ID NO: 823242 - DNA, 589 bp, Homo sapiens
tcccaactttacaaaaagtcttgtctgcaaactggtagtgcwgctaagtttataaactatcccataagattactgcccttggacatgagctcactgatttaagatgtgaggcaggtacctggattggaagtaatatttttttggaatgcttccttggcaatgaaaaggccaccctttaattaaacaatggtcaggtagctggctagttcccttagggtatcacgtttgaccaccatttctggcaaattggacattcagtagtagcagcagttaactaagctcatgtataatgatcattcttgttaccataacaactttgtttataaacctgaagtcccgggccaactgtggaaggagtatgactcatattcacattcagcttatacatctggattaagcctcctcttatgtggagtagagtgtattctggttagaatccacatgggatacaaatatttttatgatttggacttttttcaagtattccatccacatactcctttccaagcttacttgtctctaattcttcttcttcttcttcttttttttccaattctcaatctccctctttcctaatttatactaacaa

SEQ ID NO: 823243 - DNA, 615 bp, Homo sapiens
tattacattgtacacatgggattttctcaatgcctactaattaaaatttcttttaaatacaagacayaaaaaatctttatttcagaaggaaatataaactctcaaattataaaggattaattttaaacattaaaaaattccctactgtagactgaatggttgctgtcttcgataagtgcaaagaataataatacaatgtaatatattaaattgatcaatacaaaattgctgtgtttgcagataaaagacattcatatactagcaatacatacgattcaatttataaaaagcacctagcagagctcctagctaatatgtggtacaataaatatttgttgaatttaattgggtagaactgcactgttgaatatggtagccattagccacaggtagctattgtgtacttgaaatttgacgagtgtgactgacaaaacaaattttaaattttgttaaattaaaaatttagtttttaacttaaagctgataatctatagttacagaaaaatgtataagtatgtaacaatttggatatgtgaatctatttttcagctacaaattttgaggaagtctatatacagatcaaatatttccattgaaaatatagtgtcagagttg

SEQ ID NO: 823244 - DNA, 646 bp, Homo sapiens
agctgattaagagtattacaaagagatggctaaggtcacggttttaatctacttaatggcctgtttactttgcttagctctgttccacgygggccacaagtacacctctctcaaacttacatttctaaattaaggtggaccgagtaataaagcataagcgaaaccatcactgatgactggaagacacaacaggaactgctcaccatggaaagtgagcatctccaccaacacagaacttaaaagacatttcatttagtcttttttttttttttttttttttgagacggagtctcactctgttgcccaggttggagtgcagtagcacgatcttggctcactgcaacctctgcctcccgggttcaagtgattctcctgcgtcagcctcttgagtaactgggattacagaggcacaccaccatgcccggctaaattttgtatttttagtagagatagggtttcacaccatgttggccaggctggcctcaaactcctgacatcaagtgatccacctgccttggcctcctaaagtgctgggattacaggcgtgagccattgcacctggctcatttagttttttcattcattctttccatatggccagtgctgacatcacagaaagaaaccagatacgccctccacccagaag

SEQ ID NO: 823245 - DNA, 579 bp, Homo sapiens
gcattactgtagaacaccgcaggctttacaaacactgcacacttaggctatgctaaatttataaaatatttttcttcaatagtaaattagccttagcttactgtaacttttactttataaacttaaaaatttttaaactttttaactcttgtactcatacttagcttaaaacacaaacacatatagctgtacatattttctttcatatccttattcttataagcttttacgatttcaaacatttcttatttttaaaacttttttgttaaaaatgaacacacaccacatacattagctgaggcctccagagagtcaggatgatcaatgtcactgtcttctacctccacctcctgtcccactggaaggtcttcaggggaattaacaggcatggagcagtcacctcctatgacaacaatgccttctcatggaatacttcctgaaggacctgtctggggctgttttacagttaccttttttttgttgtttttgttttttgaataagtagaaggagwatactctaaagtaatgattaaaagggtggtatagtgaatgtataagccagtaacatatttgttatcg

SEQ ID NO: 823246 - DNA, 581 bp, Homo sapiens
gaaaaaagaacagggtaacagcaattgttcagggaataagagagataaccttaaactctgaccacyggtgagtcgggcggaacagagccatatttctcttctttcaaaagcaaatgggagaaatatcgctgaattctttttctcagcatggaacatcccctgagaaagagaatgcacacctgggggtgggtctctgaactggcccccctcccccgggggcgtggtcgtctcttatggtcgaggctgcagagatgaaataaactccagtctcccatagcgctcccaggcttattaggaggaggaaattcccgcctaataaattttggtcagaccggttgctctcaaaccctgtctcctgataagatgttatcaatgacaatggtgcccaaaacttcattagcaattttaattttgccttggtcctgtggtcctgtgatctcgccctgcctccacttgccttgtgatattctattaccctgttaagtacttgatgtctgtcacccacacctattcgcacactccctccccttttgaaaatccctaataaaaacttgctggtttttgtggcttgtggggcatca

SEQ ID NO: 823247 - DNA, 442 bp, Homo sapiens
tatataaacatatataaatatatcatcaaggaagatttaggatatatgaatatgtggcaaggttggaaagaacataattctttcccagaaggggaagggggagctrtacttaatcggatccagctacaacatcactggaagtcatttcttaccaaaaagtatctccacggcaaattctggtggataaattttccaagctttttgtttatgtggattatccaattcatttcttggtagataaagcctaagaatagaaaaaaaattattacattttatattggggctcaccgaaaagccacgcagttgggtacccacgttagagctggaagaaacaaaaaaaagaaactcaccatgaatagaaccccagctccttttttgtgtctcggttggctccttccacctttttggtgagacttaaaaatactttaatcttcagcaacac

SEQ ID NO: 823248 - DNA, 469 bp, Homo sapiens
tctttcccttcccaggaagccatatttcagactatcacctggggagaaaccttggacaatacctggctttcctaggcagaggttcctgcagccttcctcagtgttttgtgtccctgggtacttgagattagggagtggtgatgacttttaacaagtatgctgccttcaagcatttgtttaacaaagcacatcctgcatagccctaaatccattaaaccttgagtcaacacagcacatgtttctgccagcacagcatctcaaggcagaagaatttttcttagtacagaacaaaatggagtctcttatgtctacttctttctatgtagaaacagtaacagtctgatctctctttcttttgcccacaagcctgaccaacacggagaaaccccatctccactaaaaatacaaaaytagccaggcgtggtagtgtatgcctgtaatcccagctacttgggaggctgaggcagga

SEQ ID NO: 823249 - DNA, 469 bp, Homo sapiens
tctttcccttcccaggaagccatatttcagactatcacctggggagaaaccttggacaatacctggctttcctaggcagaggttcctgcagccttcctcagtgttttgtgtccctgggtacttgagattagggagtggtgatgacttttaacaagtatgctgccttcaagcatttgtttaacaaagcacatcctgcatagccctaaatccattaaaccttgagtcaacacagcacatgtttctgccagcacagcatctcaaggcagaagaatttttcttagtacagaacaaaatggagtctcttatgtctacttctttctatgtagaaacagtaacagtctgatctctctttcttttgcccacaagcctgaccaacacggagaaaccccatctccactaaaaatacaaaattagcyaggcgtggtagtgtatgcctgtaatcccagctacttgggaggctgaggcagga

SEQ ID NO: 823250 - DNA, 669 bp, Homo sapiens
aactatcataatatgctgtattatatctttcttatagcacttgaacacagtgctatatcatcattaaataaaygaattaagactttttcgtggtagaactaacgtgtctgtaaacttatgaagtggcttttattgataaatgtttataacgatttgtttccctcattatttaggtgcaagaatatttgtcagcagtattaaaaatggaatgtggtgtcgaggaactatcacagaattaattccaatagagggtagaaataccagaaaaccttgtagtccaaccagattatttgtccatgaagttgcactaatacaaatattcatggtagattttggaaattctgaagtcctgattgtcactgggtatgatattttataatatgtatccttggcctgcttagaaacattttggagggaggtggagttaaagaataaaggaaattagaggtagagaggagtaatttgtcattcttaacttccaagacatacgttttattattttgctctactgttgtcttgataagtaaaactttatcatttaccagtattactagatggagagcttagaaaaggaactccaaacttaagtactcttcttatgtcactttaaagcagggaataatacacaaactaattcttttaaatgttacagttagcaacagatgattg

SEQ ID NO: 823251 - DNA, 491 bp, Homo sapiens
tttttttaattaaaagtaatgtatatcacagattttacaacactcaaggaattctttaatataattaagagaaactacaaaactccaattaagacacttgaggccgggtgtggtggctcacacctgtaatcccagcactttgggaggccaaggcgggagaatcacttgaggccaggaattcgagcccagcctggccaacgtggcgaaaccccgtctctacaaaaaaaaaaaaaaaaaaaaaaaaaaaaattagccaggcgtggtggcacatgcctgtaatcccagctacctgggaggctgagagcaagcagaggttgcagtaagccaagatggtgccactggactccaacctaagtgacagaggaagaccctgtctcaaaaataaaataaaataaaakaaagacacttgacattcttcaaaaggttaatgtcatgaggaaaaaagtgtggggttttctagagattaaaaaggctaaagagttgtaagaatc

SEQ ID NO: 823252 - DNA, 551 bp, Homo sapiens
tggtgtttatgttctagtgggtagagagagaggacaaatatataaccaatgcaaatatcacacaaccctgtttaattatcatgaagaaaacagcaagataaggagatagagtttgctgggggtgggtgggggaactttagattaagtgggcaggaaggtcttctcagaggagatgacgtttgaggagacaactgactgaagtgacaaaaaaactggatccgtatgagaggcactccctgcagaggaaccagcgcaaaagcactgaggcagagcactttgtggtcagtgacaggagggcccagggcaaggataagcagttagtgtcttgattgaaaggacaactcaccaccacacacctgtactccatgcactactttttctttttatttaattttatttatttattttgagatagagtctcactctgttgcccaggctggagtgcagtggygtgatcttggctcattgcaacctccgcctcctgggttcaagcaattctgcttcagcctccccagtagccaccacgctcagctaatttttgtattttagta

SEQ ID NO: 823253 - DNA, 660 bp, Homo sapiens
ctgactgaagtgacaaaaaaactggatccgtatgagaggcactccctgcagaggaaccagcgcaaaagcactgaggcagagcactttgtggtcagtgacaggagggcccagggcaaggataagcagttagtgtcttgattgaaaggacaactcaccaccacacacctgtactccatgcactactttttctttttatttaattttatttatttattttgagatagagtctcactctgttgcccaggctggagtgcagtggtgtgatcttggctcattgcaacctccgcctcctgggttcaagcaattctgcttcagcctccccagtagccaccacgctcagctaatttttgtattttagtagagacagcgtttcaccatattggccaggctggtctcctgacctcaagcaatccacccacctccgcctcccaaagtgctaggattacaggcaagagccactgcgcccggcccatgcactacttttgctttcttccaagtgcttatcacctaacaatctttaaaatttacttccatgtcatgtttatatttactatctcccctggccagaatgcaagcccctgtggcatgrggggtcttatttgctgcaccgatccatcccaaatatcttaaaactggccttgcacatggcatagagctcat

SEQ ID NO: 823254 - DNA, 458 bp, Homo sapiens
gggatcccatgtcacaccagccacatgtcacaccagccataacctaagctactagtcaacaggaaagatttcagacccccctgttatcatcaggaatagagagacccaccttgracttgccttgagggggttttagggctgaagggatttggtatagtatttaacaactgggaaagagagacggccggttccctctaaggagaatccggaacagcaaccttggaagacaccgtacacagttttaatggaagatagattcaaaatcaaatttaagagaatttggttctggcacctttaaatcagataacccgggggagtggaattcacctagagggctcttccctaggtcaggtctgcacagccttgtagcagtaaggttgaggaaacttttccaaaggaaaaaaaatcctactgaccccaaagcaagcttaatggggataaaatgagtgattttgttt

SEQ ID NO: 823255 - DNA, 578 bp, Homo sapiens
ctcgaggatccctgggagccgttatcgtatkcctcagaatctgccgtgctgtccctccgcccccaaaaccaacaggacacccattctgtgattctcttcttctccatcgcccagttggaggctgctggggaccaggagaaaaaaaatgcctttcccgagttctctaattcaaatgcttatcagctttgcacaccattcggcctttccaaaagggaccagaaaacaaagatatgctaatgacaaaggataattgagacctcgcctgccttgcatattttgttcatagaagctgtagcaataataatgtaatcctacctccccatttgacatgtaaggaaactaaggcccattggagtgacaggccaggcttgggtggcttgtagcttcagtccataatgacagctgtgaaagaattcaaataaggtctatggacgcttcttaggagggtttcccatctaatttccatctgctcagctactaatgcctggaaaaatggatgaaatagttgttacctgtcttgaatgaagaattatctataagtgccccagagataacacctgctatacacagaatttgct

SEQ ID NO: 823256 - DNA, 509 bp, Homo sapiens
tagccagagtggagagaccttgcagaaaagccaactgttcagtataattttgtttcttgaatgataactcttaataagtagcctacatgtgcagctctcctaattgcaagaatkccattacttcttctttgttcttcgatagtgttgataaaatggtgacaattagtaaaagacactttcacacttgtgatttctgttgccatctgcacacagtcagtcccaaatcatttatcccttctgcccagattcagctatctattggacatgtccactcacaaacatcataaacatctcaaatgaatggaactcattaaataatgcaagaatgaattaaaataacatacaatgctataatgttataatttaccaattgttttccatgtttatctctctagctatattgaaaatttttgaggtctgctgtctgggtttgagtcattgccccttcccatatccccttgaacaaatcactaaacctctttaaatgtttacttttttcacttatgtac

SEQ ID NO: 823257 - DNA, 524 bp, Homo sapiens
atttctgatttatttgaggaccaaaatttaaataagcagtgtatattaagtgctttgtaagttgtaaaggataataaaagtgtgggatattattatattccagcattccccaacagcacgttccccacaccagcaacagtactgggcatgtaaagggggctcagtaaatgtctggatattgataaactagactgtatgatgaaattggaggaccaaacatcacgagtaagaggacctgactttgttctcttctgtaccactgacttcctgtgtgatgtggggccagttcctcgcctcactggacttttttttttttaatccagataacatctaagaatcctttctgtccccatggcaggcagttcttaacaaaaggcttagttaactctgctttacagatttcaaaagcagagtccagtggcccttcctatcagacaccttacatytaccaccttatcgatgttctattttccttctgcattccacttccgtagctctcccaggtgaagatctggcatgtgata

SEQ ID NO: 823258 - DNA, 524 bp, Homo sapiens
atttctgatttatttgaggaccaaaatttaaataagcagtgtatattaagtgctttgtaagttgtaaaggataataaaagtgtgggatattattatattccagcattccccaacagcacgttccccacaccagcaacagtactgggcatgtaaagggggctcagtaaatgtctggatattgataaactagactgtatgatgaaattggaggaccaaacatcacgagtaagaggacctgactttgttctcttctgtaccactgacttcctgtgtgatgtggggccagttcctcgcctcactggacttttttttttttaatccagataacatctaagaatcctttctgtccccatggcaggcagttcttaacaaaaggcttagttaactctgctttacagatttcaaaagcagagtccagtggcccttcctatcagacaccttacatttaccaccttatcgatgttctrttttccttctgcattccacttccgtagctctcccaggtgaagatctggcatgtgata

SEQ ID NO: 823259 - DNA, 623 bp, Homo sapiens
aatatatttgaaagagaacgcatatcaagaatataaaaataacccatacaaaataagaaaaagccaaatagaaaagtgggcaaaagaattgaataggaacttcacaaaagaagatattcttatggccaattaacgtgtaataaagtgctcaatctcattagtcttcaaatagtgcaaattaaatctccagtgagatatcattcattatacaacatcaaatggctaaaatgaaaaaccgttaccaccaaattttggtgaagatgttaagcaactggaactcacttactgtagtaaaagatttgggactattgtggtgattttgtagcatatcaaccttgctgaacttaaaccacatttcccagaatttctttgtgtaggtggttctgggctaaagttgactcagtagacatctcttcaggatttggaagtcagaggtgaagccattttacacttgaaagaactgtgtgcatcaggtgttgttacagctckcaaatacttttaatgatctgctgactcattgtgatggggcagtagctgggcccacagctcctccaactccttgtgaatcttcttcatcttctctaaatcctaggtcaggtgcatggacatctccatggaaaagt

SEQ ID NO: 823260 - DNA, 627 bp, Homo sapiens
tgtggccacatcaggaagtggkctggaagtgcctgaatgctcctacttgggcaatctcaggctgctgtggggtaatatccatgtcattatgtaggaaacatagggaaacaaaggaaagtctctgattccactttttcttgacaaaataacactccgggttcccaaccacaaggaggcactgcactgtcagaaagggctaggaccctccagcaaggagctagtgctgggttcatcaaagtctataccagcagactgacccacaagatgagtggatgtgggtcagcgtcaggatgggttcatgaaggtcaggctctgggagaaaagagggcggcccccagacagtgaggccatgaatgtgggaaagcagtcagagctgaacagtcaaggaacagcccaagtcagaagagaagggcacttcctgaccttgaccgttcgagaacatcctaattcagaggttttcaccaaggcccaaagtcccattcttccctatgtatctcattcccttggccccagtggtataatgtagacacacgagctaacgttcagaagggggtcaaaacaccagtgttaacactccatcgttccaagttcttagtaagtgtccacctgcgctagacaaagatcact

SEQ ID NO: 823261 - DNA, 623 bp, Homo sapiens
tatctgccacagacgatgctgacttctttaaaaatatcacaagtgggtgaccgctattatacaaagctctgtgaaatggaatgactaatctataaacataagcatgagattgaataaaatatatataaagaaatatatgtgatattaatttagcatagacagtaccatatcccatagaacttcttgcacaatgcagtgacacaccactgtgttattaatgctttggaaaaatttatttattctattccattagtgtattttaacaaacattgctctgggacagtatgcctgccaatttatgtttatgagactgtcaacataatttacatgcagacaaaaatatgatacaatattgccaatgcagaatcgccttgtcaaatgatattgtcacaaaaaaatgaaacagtaccccagctgaggaaccaagcatattcatcactgttcgctgcacagaatttgaggtgacacactgaaatacatttaatgcctttttttcatgcatcaaatgaataaaaagtgaatgaatgaggtacttctgactgccatatactgtgcaaaagcaaatagatttcttrtttccctcagaaaaaaaaataaaaataatacatgggttcccgaaatag

SEQ ID NO: 823262 - DNA, 615 bp, Homo sapiens
ctttgagcacagggtctctttagactgtgaaattctaagtagatcacgcgttctcttcttcacgattccctcttaattcagtaagaactaagtgacagctgtrattttttattccgggcactatgctaggcaccataggggtaaagactagaaaggcaggtatctacttttacagagtttattctctacagcaccttgctcagcccctttttcgtagtatgtttgaacctggccctggaagcctgggattgttcaaacatatctggttaaggaaatcgtatttatgttcaagccatgaagacaaagaagatggaaacaaatagatgagggcccccttcttcactctactataccaaacctgaaccatggccaaagggaacagagtgggagagaggcagccggtggggattgcccagccagcctcctaaattgttcccagtgcagaatagctgtgctcttggcctcattgcttcctgtcacagctcctaatataccatacacagattcatggtgtgacccactatggacactacagcaattactttttataccactagttggaaaaaaaaatccaaaatacatcaaggaatattctccataaaaagaataaccgtt

SEQ ID NO: 823263 - DNA, 615 bp, Homo sapiens
ctttgagcacagggtctctttagactgtgaaattctaagtagatcacgcgttctcttcttcacgattccctcttaattcagtaagaactaagtgacagctgtgattttttattccrggcactatgctaggcaccataggggtaaagactagaaaggcaggtatctacttttacagagtttattctctacagcaccttgctcagcccctttttcgtagtatgtttgaacctggccctggaagcctgggattgttcaaacatatctggttaaggaaatcgtatttatgttcaagccatgaagacaaagaagatggaaacaaatagatgagggcccccttcttcactctactataccaaacctgaaccatggccaaagggaacagagtgggagagaggcagccggtggggattgcccagccagcctcctaaattgttcccagtgcagaatagctgtgctcttggcctcattgcttcctgtcacagctcctaatataccatacacagattcatggtgtgacccactatggacactacagcaattactttttataccactagttggaaaaaaaaatccaaaatacatcaaggaatattctccataaaaagaataaccgtt

SEQ ID NO: 823264 - DNA, 647 bp, Homo sapiens
aatcccagtaggcccccaaaacatagtgtctcttttgtagtgataggaaatatayagagagagcaaaatgccgtttactgtaaaaaagattgtctcagcatgtggactaaggaccaccaaaacccttaaacgtcacctatggtgtcggtccccgaatcctctctgaattatccaatttcctccgggaatttacctctggtcaatggtataatattttactatactgaagaaacttgccatttcctgattattgtaccaactaatatattattattggtattattttgagacacggtctctttctgtccctgaggctggaatgcagtggcaggatcacagctcattgcagcctcaaccttctgggcacaagtgattctcccacttcggcattgctggcagctgggactgcaggggcacaacaccatgcctggctaattttggtattttttgtagggctgggatgtcaccgtgttacccaggctggtctcaaactcctgggctcaagtgatctgcctgtgtcggcctcctaaagtgctgggattacagtcatatgccacagggcccggtctgtaatattatcaatacattaaactggcaggatgttttaaaaaatgtaaattaaactgagaacagaagtgacatagccc

SEQ ID NO: 823265 - DNA, 539 bp, Homo sapiens
gcaggtgtctaccacaaacagggatggcctgaactgaggcagtgggagtggcagtggcattgggagtgggagtggggatggagagaagacaggcagagaagagagactgaaggcatarttcagcagaatccgccaggtgactagacaagggaggaagagccgagaagggctccgctggcgttttttccttgagcaactgagtagacaagtgaaccattaactaaggtgggacaggaggagatgcatggggccagagggagagagtcacaggaggagctaagactcagatgcctacagatctatgtgccgttcccaagaaaactctggaagtggttggagtctggctcaggaggaacgtctctgtggctctctaatgtgcacagtgtgtgcagtgtgtgtgcagtgtgaagctgcaaagaaatgtggctctcacatttactgctgtagcaaagaatatagaaatatcttaaacgtaataaatgttccaataaaatgagaatactttcaagtgtcctcttataataaaattttaaagcaac

SEQ ID NO: 823266 - DNA, 408 bp, Homo sapiens
cttcgcacctgcgtgttcccgctcgcttgacagcacccggagcctccccaaggcctccaaatccgaggagcggccctcctcaccagacacctccacccctggctcccggaggctctcgccgccaccatcgccactcccgccgccaccaccaccgtcagcccacaggaaactcagcaacccgcggggaggagaaggctctgagagccagccctgcgaagtcctgactccctcacccccgggcctgggccaccacgagctgataaagctgaactggctgctggccaaggcgttgtgggtgctggcgcgccgytgttataccctgcaagagaacaagcagctgcggcgtgcaggctgcccctaccaggcagacgagaaggtgaagcggctcaaggtaaagcgcgcggagct

SEQ ID NO: 823267 - DNA, 318 bp, Homo sapiens
ctggatcccgactcttatgatatcaggtgaaaccctggagataaaataccacacaggactggccacctcagggttaggagtgtatggctgacttctcatttatttttattttaatttttttatgagacaaggtcttgctctgtacccaggctggagtgcagtggtgtgtgatcctggtgcactgcagcctccaactcctgggctcaagtgaccctccgacctcagcctcctgagtagctgggaygacaggcgcatgccaccacgcctggctgattttttgtagagataaggtctcactatgttgtctaacctagtctt

SEQ ID NO: 823268 - DNA, 588 bp, Homo sapiens
tgttaaacaacatgctaaatgtgacatgtcaaccctcactctaaactttgcctgttcagagcatcagatgaagacttcattgggttttatagtggctttctgattttcggtagtccattgaagaaggtagttaagtttgaaagttgttgtgtactgttaatgactgtctgcccatgttctgcctgaaataccacgactgtttctggaaagtatctttaataaagctggatacagtttggcttggaaaaaaaaaaaagagtggttgatttgcacagtgggattgcggggacttttttttttcttcttcatacttgtttgtattttccaaatcttccctaaggtcatttattacttttagaatttaaaaattattttataaaaatatgtaaagctctggttttttaatgactatgtaatgactatgtctactcaaaagtatcttcaaaatgacctatttaaaaatctatcccctcaaaayatcctgataaatcctttcatctttttttggactaaaaatacagtgtaataactgaagaacaggttaaaaaatgttaactaaactgtaatttagaattgatatgattaatt

SEQ ID NO: 823269 - DNA, 626 bp, Homo sapiens
ctgctacagatggttatttctatggtattatttatattacgctaagttacattatgaattaaatcaacttttgaaaggaggaacagaaacctaaagaatatttatcaagttgtgttcaggggaagraattaagaattaaaatacagatggtaatagtttactgtgtatgatgtgtacagggcaccatggcaagtagtttacatatattctcatttaatcaacacaaagaaacaggtattatcattacttgacacataagaaaaccaaggctcagaaagtcagagctggaagtcaaatgtcattctatctgatccaagtctgtgctgttagctatcacacttcattgttttgtatgtatgtttcaagttttaaatatcattgtaaaatataatcttaatatttcatgaacagttgactgcctctgtgagagagtgtgcgtgtgcatgtgtgtgtatgagtgtgtaatgtagctgcaaatagacatttattaaacttgttttgctttttggaatctacttatttaaaatactccatatatttgagaagcaattgaaaatgcatccatgtatgttatttgagcgttactagaaatttatttatacaaatccatattaatgtgctaataa

SEQ ID NO: 823270 - DNA, 626 bp, Homo sapiens
ctgctacagatggttatttctatggtattatttatattacgctaagttacattatgaattaaatcaacttttgaaaggaggaacagaaacctaaagaatatttatcaagttgtgttcaggggaaggaattaagaattaaaatacagatggtaatagtttactgtgtatgatgtgtacagggcaccatggcaagtagtttacatatattctcatttaatcaacacaaagaaacaggtattatcattacttgacacataagaaaaccaaggctcagaaagtcagagctggaagtcaaatgtcattctatctgatccaagtctgtgctgttagctatcacacttcattgttttgtatgtatgtttcaagttttaaatatcattgtaaaatataatcttaatatttcatgaacagttgactgcctctgtgagagagtgtgcgtgtgcatgtgtgtgtatgagtgtgtaatgtagctgcaaatagacatttattaaacttgttttgctytttggaatctacttatttaaaatactccatatatttgagaagcaattgaaaatgcatccatgtatgttatttgagcgttactagaaatttatttatacaaatccatattaatgtgctaataa

SEQ ID NO: 823271 - DNA, 606 bp, Homo sapiens
gaggtccactccagaccctgtttgtcttggtattaacagcagaggctgcataacagcaaatattgctgcctgatccttcctctggaagcttcatcccagagggtcacctgcctgtttgaggtgtctgtcagcccctactgggaggtgtttcccagtcaggctacacaggggtgagggacccgcttgaggaggtggtctgttcgttctcggagtttgaacgctgtgctgagagaaccactgctttcttcagagctgtcagacagggacgtttaagtctgcagaagctgtctgctgccttttgttctgctatgccctgccccaagaggtggaatctacagaggctgagctgcggtgggctctgcccagtctgtgctttgtttacactgtgagctattcaagcctcagcaatggcggaccccccttcccccgtcaagctgcagcatcgcagtttgatctcagactgctgcactagcagtgagttacggctccgtgggcgtgggacccactgagccaggcacrggagggtatctcctggtctgcaggttgctaagactgtgggaaaagcacagcatttggtcagaagtgtactgtttctgcagatacagt

SEQ ID NO: 823272 - DNA, 589 bp, Homo sapiens
tctacttcaaaaaatggttgacagtgttgtgcaatcaattttacagctttaagattttagcttcactaactcaaaactataaagaatttttttaaagtrtgcttataaaatctgttgttttgaagtttgattagtgagaacaaaatgtatttggggaatctgatttccaacacttttctgttttttttttttcatgctctttgcacccattatgatgtctggatcaaagacgatttagcacagaagttgttacacatgattttagagagtttcatttctacttcaagaaatttaagtaagcaaaattgccaatctttttgaaattcatcctcacaaatgtgaacaattttcagataacactttttctaaaaagatacacagcctaaatgtaaataactaaaaaacatcaaatacggtcatcaaagattattttcgttaataatatgaatgatagaataccaaaaaattctacaagggaggctgcctatcacaaaaatgatctctggatttccatggaatctaatctttgctgttctgactcatgttattattgatatttttacaatcactttccagttccaagaggaga

SEQ ID NO: 823273 - DNA, 455 bp, Homo sapiens
ggaggctgaggcaggagaatcrcttgaacctgggaggtggaagttgcagtgagccaagatcacaccactgtacgccagcctgggcaacagagcgagactctatctcaaaacaaaacaaacacctacaaagacaaggaacataaaagagtaaaagatgggtaaatatagaagtgaatagaggctggggactatggagaagtggccggtgtgtgccccatttcaagggagtgactgctacccatctccagctaattgctgccttatggaaatgcgatctctgtgttacagctcttccaactttgtaaaaaagagatgccaaacgttttatttgacattccaaattttatatgttggcaactggttcattttcttttaaacactttccaggccaaatataacacatcccagggatggatttgggtcataggccaccagctggggtctccagttcaagt

SEQ ID NO: 823274 - DNA, 455 bp, Homo sapiens
ggaggctgaggcaggagaatcacttgaacctgggaggtggaagttgcagtgagccaakatcacaccactgtacgccagcctgggcaacagagcgagactctatctcaaaacaaaacaaacacctacaaagacaaggaacataaaagagtaaaagatgggtaaatatagaagtgaatagaggctggggactatggagaagtggccggtgtgtgccccatttcaagggagtgactgctacccatctccagctaattgctgccttatggaaatgcgatctctgtgttacagctcttccaactttgtaaaaaagagatgccaaacgttttatttgacattccaaattttatatgttggcaactggttcattttcttttaaacactttccaggccaaatataacacatcccagggatggatttgggtcataggccaccagctggggtctccagttcaagt

SEQ ID NO: 823275 - DNA, 628 bp, Homo sapiens
ggccgtcctcccctccactctccaggatcctttgaggttgccttccctgatgctgcrgagaaaatgaagaaggtcattacacagcttaaagaaggtaaaatacactccatctctccttccccagacacacacacacacaattagaaaaccccacttttggccggggatggtggctcacgcctgtaatcccagcactttggaaggctgaggcgggcagatcacttgagatcaggagttcaaaagcagtctgaccaacatggtgatacccatatctactaaagatactaaaattagctgggcgtggtaacgcatgcttgtaatctcatctactcaggaggctgaggcaggaaaattgcttgaaccctggaggcggggttgcagtgacccgagatcggcactccagcctgggtgacagagcaagactccatctcaaaacgaaacccactcctgagaccccccatccactccccgtacaatcccctggccccatctctgagcctcagaccttgagggacgactatttccccgcgtggaccatttttgatctggccccgccccttcgatgaaaggtttcgtctccaactgagcccctttccgggactactactaacctggccacgcctcttct

SEQ ID NO: 823276 - DNA, 602 bp, Homo sapiens
tagtcttctagcccaaagaaataaccgtttttctgaaatgttaagcatccttccaagggtatcagagtgatatggagaaatatggtaagacagttacagaatcagagataacgacactgattctaaaagcattattaccaaggcattgttgcattaagactgttttttcttttcttttagagacagtatcctgctacgttgcccaggcatgtctcagacccctgggtttagtgatcctcctgcctcagcctccccaaatgctgggattacaggcatgagccgggctgtttttaattctaagtaatttataatttacaattacacctaacaatggcttcaacaaggggtgtccaatcttttgccttccctgggccacactggaagaagaagaattgtcttgggccacacataaaatacactaacactaacgatacctgatgagctaaaaaaaaaaaaaaaaaaaaaaatcccccaaaaatctgataatgttttaagaaagtttatgaatttgtgttgggctgcattcaaagccatcttaggccatgggctrgacaagcttagcttagaaccaagacgaaatttatggtttactttacaagaat

SEQ ID NO: 823277 - DNA, 686 bp, Homo sapiens
gaaaactggaatggctatgttaatagcagacaaagtacacttaagagcaaagaaaatcacaggaacaaaaagtgatgttacataatgtaaaacagttgattcagccaactgcggtggctcacgcctataatcccagcactttggaggctgaggcgggtggatcacctgaagtcaggagttcaggaccagcctgacttacatggtgaaaccttgtctctactaaatacaaaaaaaactagccaggcgtgatggtgcgtgcctgtaatccaagctatttgggaggctgaggcaggagaatcacttgtacctgggaggcggaggttgcagtgagccaagatcgcgccattgcactccagcctgggcaaaaagagcgaaactctgtctcaaaaaaaaattttttttaagttgattctttaagaagacatgagaattcttaatatgtatgcacctaacgacagagtttaaaaatacatgcagcaaaaactgatgaaactgagaggagaaactgacaaatccaacattaggatcagagacttcaacattcctctctcagtaatagactgagctrgtagacaaaaaagttaccagctataaaactgaacaccattggacaactatgtctaattgccatttaatattcgtcccataacagggcaatacacattctttctaagcacacatggagc

SEQ ID NO: 823278 - DNA, 510 bp, Homo sapiens
aaataaagaacaactaaatgagaacaaggaaaggctatgtattcagttcttgctatgacaagagagtcagccaccattatttgtgttctggcagagactcacaggcaggcagtggagtgggagagcttcatagtggggaaaagagaaaacttcaggtgtgtcctgattggaggctattggcctggggaagctgtaggtgagccagctagaagcaggtaatcctacatgattgggttaagaaaccatatccactttctctgatttggtcctaagtagaaagtggggacagaaattagggaagctgtcagttattaatcaagtcccaggccaatttagggccaatcgttacagggattattgtttagcttcctggacaggttaccagagacaagtctggtttatagagagtagcctggctkcctgagctggtgactgtggatgatgggctggcttttcacagctggttgctgcaaattaggagtcagagttctagttttatatatgatctgg

SEQ ID NO: 823279 - DNA, 213 bp, Homo sapiens
ccaagggtttactctctaacttcatttctcacggtggatccckctcaagcagagtccgggagccaatccacgtccaattgtgccccctgctggacaaggtccacttgttcagaggaaacttgcggagagatggagagctccagttgagatgctccagctccctctgccaacacagtttaataacaagtaataaagtagaaaaacaatatagca

SEQ ID NO: 823280 - DNA, 213 bp, Homo sapiens
ccaagggtttactctctaacttcatttctcacggtggatccctctcaagcagagtccgggagccaatccaygtccaattgtgccccctgctggacaaggtccacttgttcagaggaaacttgcggagagatggagagctccagttgagatgctccagctccctctgccaacacagtttaataacaagtaataaagtagaaaaacaatatagca

SEQ ID NO: 823281 - DNA, 631 bp, Homo sapiens
ttctttctttccaatttggatgccctttgtttctttctcttgtctgattgctctagctaagacttccagtactatgttgaataacagtggtgaaagtgggcatccttgtcatgtcccagattttagaggaaaggctgtttccatttttccccattcagtgtgatactagctgcaagtctgaaatatatggcttttattatgttgaggtatgttccttctatacccagttttttcaagggtttttatcatgaagggatgttgaattttatcataaaaggatgttgatttttatcaatcatctcaccaattgaaataattgtatcgtttttgtcctttattgtgttgatatagtgtgtcacattgattgatttgcatacatggaagcatctttgcatccctgggataaatttctcttcgtcatgatgaataatctttctaatgtatcattgacattggtttgctagatattgttgaggatttttgcatcaatatacatcagaaatattggcctgtagttttttgtttttaatatgtctttgtctgattttkctgtgagagtaatactggcctcatagaatgagtttagagatattccttcctcctatattttttggaatagtttgagtacagt

SEQ ID NO: 823282 - DNA, 523 bp, Homo sapiens
cctgctatgaccaagctgggacctaaagtgcaagacaatgtcacctttacctgccyctctgcttttttgcagagagaaggagtcttttactgtagccaccataactgcaagtgtactggatctcacctggagtcagcatgtcttagagtctcacccaaggctcatggcgtaatacctggatatttctgttggttatttagaacccaagggctctttagttagcaggtgatgaatcttcccaggactgagttcttcccttcaaggcagcaggtttccttttggcccggggtgtgtctaaaaatgtcttcataagctggggtctggaacaggagcctcatgactctgcacggtgcctaacctattgtggctgagctggtatccaagatgtaagacaaagtcccctttactcttcactctcctgttcttaagcagaaggaaggagtctctttcattgctgcaagctgcactgcctggggttggaagagggttgaagcaagcattccttttagctgccctggttgtt

SEQ ID NO: 823283 - DNA, 580 bp, Homo sapiens
gagaggagacagttaaggacattrcagaaggcacacatctttgtgtctagtacgtctttatatcatgacactcacacatctgctgtaccctgtgctttactgggtgggagaaaaagagatgccattgtagctcttatagccccaggcatggaaactgtacgtgaccctgggtatatccgtgtgatcctgtcactccgtgaacatcatcagtcatatgtgttttcatctcagctccaagtccatgtgataaattggatattgcttttgcttatctaattctcattgccccagccagactgtcaagtcgttgtggtactgtttgtgcatcgtactgaattatgacatccacatgatagatgtagaatgcccctttgaaatgtatcgcacacactctgtctgtcttgcacgctgtagagctggggtgggacagatgaggggtggatgctgctgcaggacagggctcagtatctgccctcccaaggtcaggcctgacattgctaggagacagaggcacggggccccaccttcctgtccaacctcccttcctgctcctcccccctcaccctctctcatcatcaca

SEQ ID NO: 823284 - DNA, 613 bp, Homo sapiens
ccccagctacttgggaggctgaggcaggagggtcacttaagcccatgaggtcaaggcttcagtaagcagtgattgtgatactgttctctagcctgtgtgacagagggagaccctgtctcgaaaagaaataaatataaaagtgacaaaatcatcttaaactagccgtagccgagaaaagccatggcgggggcgggggtgaggggctgtcttcaacaggcctgcttccaggtgctcaaacaggtgtctctttccctctcttgggactgccctgctgggtgctcgctgcattcacggacaggccctcccttactgtgtggtgcagaggtgatcactggcagctgcagtgtgttgtccactttgttcttccccccagagaaagtgtgtggccatcacatcaagcaccagcatgtgtggcgaccattaaatatataccccattaccctgccctacaccagctccagagcccaggaggttgggtgctccagctggccatcctgggtcacaggccccaggtggagcagttggraggacagtccccaatagggagaaggtgcactggacaggcaaaaacaacagatgcccattgcagggagattagaccagggacataatc

SEQ ID NO: 823285 - DNA, 544 bp, Homo sapiens
tgagtccttgtgacatgacctcagtagtctttgatgactgccttgctctctgctgcattaagatattccagatccatctggcacattccctacaccagacctggaattcatcatttctctaaraaactgcttggtttcttttagagggaaatggtattttaagaccacaaattgggcattaggaatgctctttgctactgggcttgtttcttgccttgagattggacagggggaggagattataaatatgtttatagttgtattttatttacatttaaagagaaaataccctgtgagttcataaatatataaattaaagactgttgaattttttctctattatatttctgtagctcctttctttatagcaagagccctggttttcaaggatacaggaggtagtagaattagattcttgtcttacccatgttatacacacaacaatatcagaatagcaatactaatgctaccgctgatatgattatggaaaacactaaacagtattttttgcatatgctctcccatttcccccattgtttctata

SEQ ID NO: 823286 - DNA, 551 bp, Homo sapiens
cattctctaaggctcatcacacactgtaccacacttctggtcccgaaattggaaccttttctcatcactagaatgtatccttggccctatatgggtacccatattgagtatgcattaacacacttttggttgaaaataacagagaacctaatttaaactgactaaaaaataaaaggaattcattggctgatgggcataaaacctcagaagtagttcagttcaggtaaagctagatccagcagcagctcaatgacatcaccaaggatctgatttctttctctctgttagctctgtattcttcagggttgccctcatcttaaggctatttccttagtattcccaagatagtttcaagtgcattctaaggctatatgtttccaattttctatcccggcggaaagaatagctctttatactagaattcctagcataatttgaacagattcactcttactagaccagcttaggtcccacctttggttggttcaaragaaccatggtggggttaattccaaataaaccacatgttgtaaaacggggaagagatagtt

SEQ ID NO: 823287 - DNA, 670 bp, Homo sapiens
ctcactgaaggctcagaggttaggatttttcaagcatagtttggttggcaggagactagggaatagatgctgctgattggtcagagatgccgtcacaggtctttggaaaacagtcctccttcagtgagtctgcctctgggtaggggccactggacatattgagacctgcatcaagagaccaggtgaagtcagctgatcatcagaaatgtgaaagtctgaaaagactgctgaaaaggccagtcttaggttctacaatagtgatgttatctacaggagtaattggggaagttacaaatcttgtgacctcttaaacaatggctggttatcattgaactatgcttatatttcagcagaatttaggatactctcatagtcctaaccttgtggattttcattattcttgtaaaggcaatttagttttggaaagggctattatcatccttgctttaaggttaaactataaactaaatttctcccaaagttagcttgggccctataccccaaggaaatgaatggaagacattttggaggttagaagcaaaatggaatcaactctgtcagatttctcttactatcayaattttgcaaaggtggttctaaaagggcaatagattaccatataaatacaatttttcaattttttggtaacctcaacttaaatcaatgaata

SEQ ID NO: 823288 - DNA, 602 bp, Homo sapiens
tcctgttgtccaacccagggaaaacgtcacgtctggaaagaaggatrtcacggtgtctaaaaatggttttgcatctattactttgctatttccatttggaccaggaagaatatcggcattaatccatacaggacgcttcagatgcctcttcacattttccaagagcatcatggatggttctacaactgccagactaaaaacataatttgttgtcaatgagatagattctttaggtaaagtaaaaagaagttcttttagactagtggtctcaatgttctcaaattcataatcaaaatacaataatgtctgggttaaataaaatcaaagatcgcatagcaccagagggaaaagctaacatatgccatatctctaaatgttgaactgtgcttattattcatgaatataccttaaagagtctataaatatatgaatagtggtactacttgtggacaaaatagaggtttcaaaactccatattaggatcacttggtgtgaaaacagttttttaaaagacacaaatattcactcgttccagaatgtataaataagataaatgaaatacacttaataacctgtaaattcacatttatgaaatacccaag

SEQ ID NO: 823289 - DNA, 517 bp, Homo sapiens
cccactctgtgctgagagatcccctcataatttccccaaaacgtaaccatgtgtgaatagattttgagttagyagggttgcagccacgagtgagtcttcccttgttattgtgtagccagaatgccgcaaaacttccatgcctaagcgaactgttgagagtacgtttcgatttctgactgtgttagcctggaagtgcttgtcccaaccttgtttctgagcatgaacgcccgcaagccaacatgttagttgaagcatcagggcgattagcagcatgatatcaaaacgctctgagctgctcgttcggctatggcgtaggcctagtccgtaggcaggacttttcaagtctcggaaggtttcttcaatctgcattcgcttcgaatagatattaacaagttgtttgggtgttcgaatttcaacaggtaagttagttgctagaatccatggctcctttgccgacgctgagtagattttaggtgacgggtggtgacaatgagtccgtgtcgagcgctgatttttt

SEQ ID NO: 823290 - DNA, 598 bp, Homo sapiens
ccatctgcctgtgtaattttaccccctgattctctcccattggatccctgtggtgccaggmagaaatggcctgctagaggacccagtgagctccctgggcctttctgctgcttcctctacctttgaattttgctcggctctccaaattgactcagctccaggtaaagttggaaacttctcccacaaatagaccttcagcttctccagtggtgatgtgtgttcgggagaggagggtttccctttcccacatcagcagttggggtactcacaattttggcgggatctcctgtgtcctgccggagcagtccacttccttcagaatttttgtgggtcctcttgggattgctggttagttcttgcagtcaatctggagctaaaattcacaatgctagcccccgcatgctgctctgtctggagctgcaatctaatcttgcctcccatccaccatgatcgccatttccccaaggcactatattctgaaaaatatatattgttttaatttcttattaagtagaaaataaaccgaaagggatagtgatgttcataattttcaatgttcctcaatatgcatttccttaaatagttcttccctgagata

SEQ ID NO: 823291 - DNA, 552 bp, Homo sapiens
gagatggggttcaccatgttaaccaggctggtcttgaactcctgacctcaggcaatctgccagccttggcctcccaaagtgctgggattacaggcgtgagccaccacgcctggccctacayttctattcttaaaaatggaaaatacaatataaaaaatagtatttacaatagtataaaacatgtaaaagccttgtgatcaatttattgtttgttcaatgaagaaacaaatactataaaaattgctgaaataaagaaaaccctatttaaggacaataaataataaaggcaataaagccttaattagtgcataccatgttcattatttgatgactatattgctaagatatctacactctcattatgatatataatttcaaaacaatcccaataaaaataatatatattttttgttataattgacaagctgattctataatttttatggaaacataatgaacctacaatagtgaaaatctactagaaaactaaagtgttttagggcacctcattaattacttgatatgagctagcttgatagtgtggcctatgtg

SEQ ID NO: 823292 - DNA, 551 bp, Homo sapiens
caccgtgcacacgcttgccccgatgtgagatttcccctgggttcgcgctcgggtccgcttcttaaatacactgcctcagcggtgtggatggcacagagctgtggcagccctactgaaaccttaaacaggcttcctggggtcataaacatggataccgagacttagatcacctcccacaacttaaacgtaccccttcactccactgccttcgccccttcctgcagcattcgcatctagttgttcaaaagtgctttccgggtcctcagacatgcaccccaaggttttaaacctcagtgcaagtactagatgggcttccctgtgcaatagggatgtcaggcgcgcagttttgcacacgattgccaagatgtgagatttactttaggttgcaccttaaccgtcgtttttaaatatgatcgtcccatcttgatgtgctgctcctgctgtggaaggtatccctgggttttaggcaagcatatgtgttctttactatggctccaratcccagcatatttgaagtcctgagtcaacctgctctcctagacaagcagaca

SEQ ID NO: 823293 - DNA, 577 bp, Homo sapiens
gaaaccctgtctctacaaaaaagacaaaaattagttgggtgtggtgacagacacctgtaatcccagctacttgggaggctgaggcatgagaatcacttgaacctgggtggcagaggtttcagtgagctgagattgggccactgcaccccagcctgggtgacagagtgagagcaagactctgtcttgaggaaaaaaaaaatcccagagcaaagcaactctgaaaggagttttgggcttaaaaaaaatgagtattatatttacttaaaaaaacttgatgactccggtttgagggcaggaatcacctaggagttggattaactgcccttcccataagaaaagaatttctgtttatgccaagatgagaggggggtggatagggtaggttggtgggggggacacaatgaggtaatggagggtctgcttattatcacaaacagaaatggtgattaacagaccttccttgtgtgtctcccaagccttccataacttataccagtaactagcatgggctgctggtagtgcattggcctcttgtgttagccacaagagaggctgacwtttgtgcaggatgagtgca

SEQ ID NO: 823294 - DNA, 521 bp, Homo sapiens
taaaaccttatttctgggcatggctgtgaggtatttccagaagagattagcatttgaatcagtagactgagtaaagaacgtcgtcttcaccaatgtgattgagcatcattcaatctgttgagggtccaaatagaacaaaaaggtggaggaagggtgaatttgctctttttgtgagctgggacatccatcttctcctgccctcggatactggacctctggattcagattgaattataccatcaggtttcctggttctccagttggcagacagcatattctgggacttctcaacctccgtgattgcatgagccaattcctgtaatcaatctcctcttccatatatcctattgcttgtgtttttactggagaactgtgattaaaaccagtgacaaattatgtataatgaaggttctaatagttagaaagaatgaataagactacttgatagcagaagaggatgactatagtcrataataacttaattgtaatgactttaaaagtgtaattgaattatttgtcac

SEQ ID NO: 823295 - DNA, 572 bp, Homo sapiens
taacacaacatggagacaaggaagggatcccaaagactgccggttgacttcctgggagtacaaagaaaataaatcatgaactatggtcctaagtgagyagcagagaggacatgcagtctgcctgcatgacatggatgggtctatgtgtggatattctgggagaggacatggctcagagcaactcacatgtcaactagaagagtggactctggtcttggaaaattccactcatgaggttttcttttttggtctgtataaaatgaaggccatataattttttaaaaattgttttttttttcagcatttacattagggcacaaaaaggtaatacgattttattatatgttttaaataaaatgtctgattgaacaagggttgtagtgggcaggtgcattaatttattagaattttagagtgtcttgtatttactgtgtgtctgtgtgctaagcacctcgttttactcagttttatataatcatttcaacagtcctttgagccacatccatatccccacggtgcagataaggaactgagcaggagtcactgagttacagggatgatgactgtcagag

SEQ ID NO: 823296 - DNA, 412 bp, Homo sapiens
acacacacacgccccttacaaccctgggctctcctatgctctgcctrtgaccacgtcttcacatttatctcctgtgttatcacattctcatcacatacctgcatcactcgtacacctcctcatacactacctaacccactcatcacacttataaggctccgttcacagactaacacacatccaagtgtatcgccaacccaccgcaaacacaaattccctattcagtcaccacataccacagtcatagtgaacaaacccactgcaaacacatattccctattccatcaccacataccacaatcatagtgaacactcactctcttgaagtcttctcatgctacccattgtttcttctttatatttcccccacacccttccactaattcactctcttctcctacacacctacaag

SEQ ID NO: 823297 - DNA, 545 bp, Homo sapiens
tgaatctctttttatttttcctggttaaactacaaaaaacagataatgctgaatgtgttttaaatcccatttgcgctgagaatatgatcaaaagtgtacaaatcaaataaccttaatggtaaggtgtctacagtttgaacaacggtctcaaaccttggtcttgctaaaccccaccaatacgaagcccatttctaacattttgacaaacattctaagaaacattttttgcatatatatgcataaaaatatatgtttaaaggcttatgtattttgaatcagagtgcatacttcatttatcatttccttttcaatgttcatcattctatcacaatggaaatttcataatttactttcaactctttccttactgaaaggcacttggattatttccaatctggggctattgtaaacagaaagtaataaatgttcctgggcatacatgatcattattccctaataggaagcttctagaattgtccccastaatctttatctccttctggtactcatgaacttgtgtcatcccctccccttgagtaacttgc

SEQ ID NO: 823298 - DNA, 626 bp, Homo sapiens
cagaatagagggtgggaggagggagaggggaagaaaaaaataactatggggtacyggacttaatacttgaatgatgaaataatctggacaacacatccctgtgccacaagttcacctacgtagcaaaccttctcatgtaccccttaacctaaaataaaagtttttttaaaaaaactaacaacgaggccaggcacggtggctcacacctgtaatcccagcactttggaaggccaacatgggcagatcgcctgaggtcgggagttcaagaccagcctggccagcatagtgaaactctgtctgtactgaaaatacaaaaaaattagccaggcctggtggtggttgcctgtagctacttgggaggctgaggcaggagaatcgcccaaactcaggaggcagaggttgcagtgagccgacgtcgtgccactgcactctagtctaggcaacaagagtgaaactctgtttcataaaaaaaattaacaatgactgggaacttgcatcggttttctgtctaattccttcacatgggatgatctgagatggttttatcttcctctcctttatattggggtgggcatgaaggaggtgctcagaaatgtctacttaactgagagaaatctgtttgttca

SEQ ID NO: 823299 - DNA, 673 bp, Homo sapiens
ctttttgttttgtagaaatggggacttgctatgttgcctaggctattcttgaattcctggcctcaagggattttgccttggcctcccaaattgctgggattataggcatgagccacrgccccggcccacatacagctatttaaaactaaatttaaattacttaatattaaataaaattaaaaattcagttcctctgttgcactagccaaatgccaattactccatgtgtgagtagctaccatgttggatggcacaggtataaaatatttttattgtctcagaaagttctatcacacagtgctgacatagggttcctgcatctctgtaaagggactatattctaatcttagtaactggtccattccctccactccacatttacttttaactcatataaaatcgtgcacacactcacacacacaactacccaaaccactaatcactttgattttataaaaagaacatctattgattttaactaaaaagacacttgttgcaagaggaattttatatatcatagtaaaaatgtcctatttgagggaaactttcagacaattggattttaactgggccatttattttgtgccattaccacaaggatgccacacatttagcatctgttccctggtgcacaactttaaaagggagctggttggatcctctgaccatgagg

SEQ ID NO: 823300 - DNA, 578 bp, Homo sapiens
tggttcgagaccagagcctgggcaaatcataaagagaccccatctgtacaaaaaataaaaaataattcgctgggcatggtggcatgcacctgtagtcctacttatgcagcaggctgaggtgggaggaccccttaacccctgaagttcaaggctgccgtgagctatgaatgcaccactgctctccagcctgggcaacagagtgaggtgctgtttctaaaaataaatacataaataattatataaaatatgtacatatataaatacacacatgaagatatattcagcatcaccagtcaatagagaaatgtgaatcaaaaccacagtgaaatactactcacacccattgggatggctaagaaaaaaaggagaaaataataaatgttgtcaaggatgtggagaaactggaacccctgtgcactgttggtgggaatgtaaaatgatgcagtcagtctggaaaagactctggaggttccttaaaaaattaaatatagaattaccatataatcsagcaatttcacttctgggtatatacccaaaataaataaaagcagagactcaaagagatattcacacaccca

SEQ ID NO: 823301 - DNA, 633 bp, Homo sapiens
agtgttctgtatcttatacagtttaaagtgaaaagcagaatgattatatgggtacttgatgtacagtttctaccaaatgtgtattgctatkgtaccattgtaaatttaaaaaattgtatgtcagaccatcgttaagttgggaactgtttatatttattttgtcttctttgcaatggttgcagaatactaggtattaaactctggtaaatcatcacaatctatactatagtatagtttgaagtagaataaatatttgtagaatggtgtttttaaccaagcagattctttgagaatatgatttgatgtctgagccttggatcctgttttcagcgtaggatacctggggagtatagtatttccctgtaatcctttttatttctgtaagattggtagtaatgtctccttttctttctaattttagtaatttgattttaaagatttaacttttggttttttgattttctctattattttttgatcctctgttttttaaatttataccctaatttttatttcctttcttctccttgctttgggtatagtttgctgttctttttctagttacttttggtggaaggttagattattgatttgagaacttttttttcaatataggcatttataggtataaat

SEQ ID NO: 823302 - DNA, 601 bp, Homo sapiens
taagtccagctcacagttaaggggtattaatctctacctcttggaggggcatatatttacataaattatttagaattctactgtaaggaagatttgtcccctctcctccatttatccaaaatttatcattcatcaatgtttatcattcatttataacaatatggactcatgtatatttatcttatactttgagttacaatcaaatacagttgactcttgaacaatgtggggtttgggatgccaacccccctatgcagtcacaaatcagcatatgacttttgactccctaaaaacttaactaatagtctactcttgactggaagcattactgataacataaatagccaattaacacatattttgtatgttatatgtattatatacccaacaggggtatccaagggagcagatagagtcatgggttcttagtttctatttctggttaagccaggagaaagccccttcctcatcccccttttccacttatcattagagacagaaactaaaaaamcatggtttcaggctgctaaaagcctaaaacaacaaaacacaacaacaacaacaacaacaaagtaaggtgggttggacaagcttaatatac

SEQ ID NO: 823303 - DNA, 582 bp, Homo sapiens
aactaagaattttttatgttgctgttctaggctaatcaacggcacttttcagtttatctagtcataaaatggtccattttggctaggtctaaatagattcgtagatagtgctgaattataacttttcatgcatgatttcatttttaaaatgttttgttctgggatttgatccaaatgtaataactgaaatacgattcagcgtccagagaagggtattatatttgaaatgttgcccttgaaggatcatcagaaagttggcaggattttttttttcgttctatgaaacataggcaaaggattttatgaacaactatgatatttaggtttttgtccaggcgtgttacaccagtataatacagtggaatggagtctatcaaaatgtcaacataactttgctgggctgattacatctataataggagtaggtcagaatctattcctcagtacaatctaaagcattcttttggatgtcacactaaatgaaagcatgmttctctaaagactattcagggcatacaacaattgatcatggcatccagtgctgaaaacatgttatgtatagtgcatgagatgtaatattgc

SEQ ID NO: 823304 - DNA, 657 bp, Homo sapiens
ccaactgcaaatagttctctgtgctgacagactatatatatatatatatatatatatatgtatatatacatacgcacactatatatatatatatatatatatatatatatatatatatatatatayacacacacattttgtcctggtttgccttttaaatggctttctttaccaggttggagctttagcagggaagtgtgcagtgtgggtcttataaacatgggctctaaagttactatgactctgagcttccttttgctcacctgtggatggagatatatgtatctgttactgtattaatccattttcatgctacagataaagacatacccgagactgggaagaaaaagaggtttaatggacttacattcccacatggctgaggaggcctcacaatcataggaaaaggcaaggaggaacaagtcaagtcctacatggatggtggcaggcaaagagagagcttgtgcagagaaactcctgtttttaaaaccatcagatctcatgaaactcattcactatcacgtgaacaacacaagaaagacctgcccccatagttcaatcagctcccaccaggttcctcccacgtcacataggaattgtgggagacacaattcaagatgagatttgggttaagacactcaaaccatatcaattacc

SEQ ID NO: 823305 - DNA, 544 bp, Homo sapiens
aataaggaagaatgagaaggtggctgaatggtaggagctaggaatgttggtaatattttctcctgaagcgkacccagacttctctgggaaacttgaatttaagaaagcttataagggagactgtgcagtggaaggggtctggtcaaggagaaacagagcactggtgcctgtatactgccctcccccaataaaatatttgtctcctctaccccacaagccagaccacagccattcacatttaaagcttgtggtttgtccatccttgggagggtgccacgtggaataggattatattaagtgcatagtgatggctttgtggctcaggcagggaaatgtccctggctaattgcacattagatactagtcctgtaaatgttattaggctgtgcaagctagctgctactattaactttatgttgaccttctttgtaccaaacacaagctctcaaaagagttctttgcagagtgccatttaagggctcgtgcagcctttagaagttgatttggggatgcctgggaatgcagtctcctggaattgcattta

SEQ ID NO: 823306 - DNA, 527 bp, Homo sapiens
tgtttacctatcctgccaaatttgagtttcaggaacctaatccaaatgttaattcgaatttccaaatcaccaccgattgcccatccctaatcaaaaaattytaaatgctccaaaacctaaaacatttgagcaccaacatgatgccacaggtggaaaattccacacctgacctcatgtgatgggttggagtcaaaactttgtttcatacacaaaattattaaaaatataggggccaggcatggtggttcacacatgtatgtaatcccagcactttgggaggctgaggcaggagaatcacttgagtccaggagtttgagaccactctgggcaacacagaaagaccctgtctctttaaaaaataataataattattattttatatatatataaagtaagattacctttatactatgtgtataatgtgtgtataaaaaataaattttgtgtttagatttaggtcccatccctaagatatctcattgtttgtatgcaaatattctaaaatctgaaaaaatccaaaatctaaa

SEQ ID NO: 823307 - DNA, 617 bp, Homo sapiens
aatttatttcaataatctgcctccrattccctaaacataccattctctttccagcctctatacctttgttcatgcagcttcctctgactgggtttgttcttcacttggctaacccctcttttacttaagcacaccttgaacattccctccttccccatttccccgcagtgcccctaatggacatacttctgaataacacaggtggtattccttccttgttggaacctcctggaggaagagacagatgattaacaaatccttccatcaacccctttgaccatgacatcaacagtgctccaaattatggggtaccgtattagcctatgtctatcttgatcagaatccttacctcggtgtattgaaattatctatttcgtgcctgcctctttaaagtcagggtttgccttatctattgtctaacaccatgcagtaggtaacatgcagtaggaaacatggcattaaattatttgggttcaaatcccagttatggtgtgtaaatgcctaccaggcgtgaggcacctgctaagcaggttgcacgcatcatttgaattcacaccaccctttgcaatagaacagataggcaacagaggctcatttgggctaaaggatttgatgga

SEQ ID NO: 823308 - DNA, 472 bp, Homo sapiens
aaataattgaagtgggcacccaccaagcccttcatccctgggaaccctggtyactggaaccacattaatttgggcccaggagttctctggtgccttttgtcagctattttggatgcgtcatcattacttacgccttaataaaaccaccctccttttttattgtcatcagatgtgttagcagtttgtatctcatctatctgtccttcagctcctaaggacattctggaggagggacattccctccccatcctgcccccaaccctcacacacactgtggttcatagggtttgggtaaagactaaaagagttgctccatgcgaagtgtttggcacaggggctcacgtggttaagggctcaatgtattgtcagttatggtgttttagtatatgcagttctgttgtttaacctcttgatctttctcagatctctgcttccctctccaccccacttccttagagcaaccctcactgcc

SEQ ID NO: 823309 - DNA, 479 bp, Homo sapiens
agaagaggggcatttcacttttgtagtattctttccaaaatcccagagccccatctaaccatggagaaggcattagagaaactcaaattagagatataaaagttattttatagtgttattttcttatatttgttggtttgctcaagctgctctttatcctattccccatacacacccccgatgccttgttaatttgaaagttctactttgcttttttttttttttttgagatggagtttcactctgtcacccaggctggagtgcagtggcatgatctttgcctcctgggttcaagcgattctcctgcctcagcctcctgagtagctgggattacaggcacaacatcaccacgactggctaatttttgtacttttagtagagacagggtttcactatgttggtcaggctggtctygaactcctgaccttgtgatctgcccatctcagcctcccaaagtgctgggattacagacgtgagcc

SEQ ID NO: 823310 - DNA, 454 bp, Homo sapiens
ggctttacaatctcatctttattgtaaagcactttttcaaacatggtaggacctaatgcagtctgtctctcaattcagtaaagccttcctacataaggaaaaccaggaataaagttgggcttatttaagatgaattagatgtatttaattctttatcaagaaaagcagttttattggtttcaattaataatctcaaatttattaatcaagtgttgacaatctacaatatttggaaaattgttttgataaaaagatacataatttataatttattatgaggcatttctttgcaagcaattgcttattatatgttcaaaccctttttatgggtcaaataatgtcacagtaatgttatttaaatygtgttttgctctgctacctcatagatacattgagtcagttgataaatatttgtcttgcatattaataataaatgtcaagcaatcctatgaaa

SEQ ID NO: 823311 - DNA, 583 bp, Homo sapiens
cagatgatgatggtttctgcttgtgctgccagggaatgttttcactttcttaatatgccttgagtttggtaactggttaagcttattttgtcattttcttttttttttttttttctttcttttttgaratggagtttctctctttttgcccacgttggagtgcaatgggggcatgatcttggcttactgcaacctctgcctcccaggttcaagcgattctcctgcctcagcctcctgagtagctgggaatacaggcatgtgccaccacacgaggttcatttttttgtatttttggtaaaaatggggtttctccatgttgatcaggctggtctcgaactcttgacctcagatgatccgcccaccttggcctcccaaagtgctgggattaccggcatgagccactgcgccaggcctccattttctttctttagcacattatgcagtaaatagttgaatccattatttctttctatgaaacaaaggtaataacaacacagaattcactggcccattataaatatcaaaacagaaaatccaagtaaaagtatttagcatatcgtgtttggctcatagtaaactataa

SEQ ID NO: 823312 - DNA, 542 bp, Homo sapiens
agttcaggggtacatgtgcaaaatgtgcaggtttatgatgtaggtaaacatgtgccayggtggtttactgcacagatcatcccatcacccaggtattaaggccagcatccattaactattcttcctgatgctcttcctccccaaaactctccaaaaggtgcccagtgtgtgttgctcccctccatgtgtacatgtgttctcatcaatcagctcccacttagaagtgagaacatgtggtgtttggttttctgttcctgcattagtttgctgaggttaatggcttccagctccaaccatccatgtccctgcaaaggacatgctctcatccctttttatggctgcatagtattccatggtgtatatgtatcacattttctttatccagtctatcactgatgggcatttaggttgattccatgactttgctagtgtaaatagtgctgcaatgaacatacatgtgcatgtatctttaaaatagaatgatttttattcctttgggtatatacccagtaatgggattgctgggttaaatagtatttctg

SEQ ID NO: 823313 - DNA, 650 bp, Homo sapiens
tatcaatggtcagttttggtaaatgccctrtgtgtttgtaatgaatgtattttgcggtactgggtgcagtattctgtttaagttctatgtcaattttatttattgtgttattctagttttctatttccaattgatttttttggctggttgtattggtcactgaaagagatgtgttaatatttctatcataattgcagatttgcatatttctaccagtagaccttagtattttacctgtcctttagcaagtttatcaaagtttgcttgatgtattttgaggctatgtaaatgtggacttgttttatcttcatggacatgaaattttatcactagggagtcatcctgtttgtatgcagtattgctttttgtcttaaggtcacttttgtctgtcattgatattgccatgccagacctctctgattaatatttgaatgtgtatcattttctatatcctcatttgggttttaatcttgctgtaattctacatttttctttagacatctctcttattagagatcagaaattagttgaatatttttattttagtctgacacaattaaacttttatttggagctgtcagtcattcatatttcatgtaattcttgttagactgaagttgaacctgccatctgattatgtgcctgctttt

SEQ ID NO: 823314 - DNA, 650 bp, Homo sapiens
tatcaatggtcagttttggtaaatgccctatgtgtttgtaatgaatgtattttgcggtactgggtgcagtattctgtttaagttctatgtcaattttatttattgtgttattctagttttctatttccaattgatttttttggctggttgtattggtcactgaaagagatgtgttaatatttctatcataattgcagatttgcatatttctaccagtagaccttagtattttacctgtcctttagcaagtttatcaaagtttgcttgatgtattttgaggctatgtaaatgtggacttgttttatcttcatggacatgaaattttatcactagggagtcatcctgtttgtatgcagtattgctttttgtcttaaggtcacttttgtctgtcattgatattgccatgccagacctctctgattaatatttgaatgtgtatcattttctatatcctcatttgggttttaatcttgctgtaattctacatttttctttagacatctctcttattagagatcagaaattagttgaatatttttattttagtctgacacaattaaacttttatttggagctgtcagtcattcatatttcatgtaattcttgttagactgaagttgaaccwgccatctgattatgtgcctgctttt

SEQ ID NO: 823315 - DNA, 650 bp, Homo sapiens
tatcaatggtcagttttggtaaatgccctatgtgtttgtaatgaatgtattttgcggtactgggtgcagtattctgtttaagttctatgtcaattttatttattgtgttattctagttttctatttccaattgatttttttggctggttgtattggtcactgaaagagatgtgttaatatttctatcataattgcagatttgcatatttctaccagtagaccttagtattttacctgtcctttagcaagtttatcaaagtttgcttgatgtattttgaggctatgtaaatgtggacttgttttatcttcatggacatgaaattttatcactagggagtcatcctgtttgtatgcagtattgctttttgtcttaaggtcacttttgtctgtcattgatattgccatgccagacctctctgattaatatttgaatgtgtatcattttctatatcctcatttgggttttaatcttgctgtaattctacatttttctttagacatctctcttattagagatcagaaattagttgaatatttttattttagtctgacacaattaaacttttatttggagctgtcagtcattcatatttcatgtaattcttgttagactgaagttgaacctkccatctgattatgtgcctgctttt

SEQ ID NO: 823316 - DNA, 616 bp, Homo sapiens
gcaggatctactgggtgaagccagctgggctcctgagtctggtggggacttggagaatctttatgtctagctaagggattgtaaatacaccaatcggcactctgtatctagctcaaggtttgtatacacaccaatcagcaccctgtgtctagctcagggtttgcgaatgcaccagtggacactctgtatctagctaatctagtggggaggtggagaacgtttgtgtctagctcagggattgcaaacgcaccaatcagcacattgtcaaaacagaccaatcagctctctgtaaaacagaccaatcggctctctgtaaaatggaccaatcagcaggatgtgggtggggccagataagagaataaaagcaggtctgcccaagaccacagtggaaatccccttgggtcctctttggcgctgtggaagctttgctcttttggtttttgcaataaatcttgctattgctcactccttcggtccacgctgcatttatgagctgyaacaccgcgaaggtctgcagcttcactcctgaagctagcgaggccaggaacccaccaaaaggaggaaactccgaacatcagaatgaacaactccaaatgtgccgcctttaagaactgta

SEQ ID NO: 823317 - DNA, 599 bp, Homo sapiens
aagttatgtgcaaaagctatgaaaatgtgaagatgggagcactagagacattccagggagggcaacatttgagatggccctttaggaatgagtagcaatttactagctagacaaggagataaaggcaattccaggtaggggaatggctatgcaaagacacaaacatatgcggtggtaggacgtgatttgagaatgggtgtggttgcctaggatattccaggtagtcaagagatgacaatggaagggagggaagccagggtttgaacagcagcaacagttacagaggtgagcatttctggtactttctagacacctgatacggaaactatgttacttatatatgttatctcatttaatccccgttattattatttttataggtaaataatgtaatttaagtttttcattttgcatgtcaaatgtgaaaatctgtaagagtaagtaactttgattgtacaacacgtaaagatccttgaaattagttgtaattaaaaatattttgctcttttaaaaatgggaattaaactttgattttttgttctaattaaaaatgacmattttcttttttaagaataaagatattagacactagtgaactc

SEQ ID NO: 823318 - DNA, 654 bp, Homo sapiens
tttgggatccttcagcacaggaattctcaagacctgagtattttttataataggaatgtccaccatgaacttgatacgtccgtgtgtcccagatgctgtcattagtctatatggttctccaagaaactgaatgaatccattggagaagcggtggataactagccagacaaaatttgagaatacataaacaacgcattgccacggaaacatacagaggatgccttttctgtgattgggtgggattttttccctttttatgtgggatatagtagttacttgtgacaagaataattttggaataatttctattaatatcaactctgaagctaattgtactaatctgagattgtgtttgttcataataaaagtgaagtgaatctgattgcactgggtctgggagtttcttttggctgtgattcaaagtcttgggatttgtctctggctcatatctatgtctgtacctttaagagtataaaagaagtagaagttacaatggttgactcataccccattaacctgccctgctgtcctaaaggtaacttwaggttaaactctgggaagcaggaagccaggagtctgctgccattaaatcaaacacattaacaccagctggcaacttggccctggggaagtgccagggttctcgggtgtgtc

SEQ ID NO: 823319 - DNA, 639 bp, Homo sapiens
tcctgggcataagtgatccttctgcctcagcctccgagtagctgagactacaggyatgcatcatcacgcctggctaattttttttagttttatttttgaagaggccggtctcactatgttggtcagggtggtctcaaactcctgggctcaagcgatcctcccaaagtgctcggattacaggcatgagccaccacacccagcctagcttttactatattttatctgataatccttttatggaaaaaagaagggcagactcttttacagtttgaagaagctccatattccatcaggagccatcttgagcaatacttgggtttctaagagctccccagagccagttctccagctcaccttgctttctaatctaaggttgccctcaccttggacaagaagcacgagtccctcagagtaattcagagtatccaaactcaaaagtctatgtacatggaggccttgctagaccttaatggtgacattttcatcaatatccggttttctgccatgagtccctatccctctttttcttaacatattcaagccagaatattttttcagccattctgtaactgcacagtttcttccaagtctctactttgtctcccattaactaggatccaatatatttatgtatttatt

SEQ ID NO: 823320 - DNA, 613 bp, Homo sapiens
ggtcagtggagcatcagaacacatacatttattgataagttggcagtcttacacaggtgcagtttgtggtgtctcaaaacaattatggtagtagcattaaagatcwgtgatcacagatctccgtaacagatataataataacaaactttgaaataatgcaagaattactaaaacgtgacacagagatatgaagtgaggacatgctgttggaaaaatgattccaacagacttgttcgatgcaggattatcacaaaccttcaatttgtaaaaaatgcaatatctgcagagcacaataaaatgcggtatgcctcatcaactcattttcccaggtattttatgaatttttgtggggttttttagaagtggaatttctgtttccagagattttcttggtcctccaagaaaatctttatttatttatttttaacttttatttatttagagataaggtcctgctccgtcacccaggctggagagtagtggcgtgattatagcttactgtaaccttgaacttctaggtcaaacaatcctaccgcctcagcctcctgagtagctgggactaaaggtgtgcactgccacacctggctattttttcccaatttagaaacgttgt

SEQ ID NO: 823321 - DNA, 613 bp, Homo sapiens
ggtcagtggagcatcagaacacatacatttattgataagttggcagtcttacacaggtgcagtttgtggtgtctcaaaacaattatggtagtagcattaaagatctstgatcacagatctccgtaacagatataataataacaaactttgaaataatgcaagaattactaaaacgtgacacagagatatgaagtgaggacatgctgttggaaaaatgattccaacagacttgttcgatgcaggattatcacaaaccttcaatttgtaaaaaatgcaatatctgcagagcacaataaaatgcggtatgcctcatcaactcattttcccaggtattttatgaatttttgtggggttttttagaagtggaatttctgtttccagagattttcttggtcctccaagaaaatctttatttatttatttttaacttttatttatttagagataaggtcctgctccgtcacccaggctggagagtagtggcgtgattatagcttactgtaaccttgaacttctaggtcaaacaatcctaccgcctcagcctcctgagtagctgggactaaaggtgtgcactgccacacctggctattttttcccaatttagaaacgttgt

SEQ ID NO: 823322 - DNA, 613 bp, Homo sapiens
ggtcagtggagcatcagaacacatacatttattgataagttggcagtcttacacaggtgcagtttgtggtgtctcaaaacaattatggtagtagcattaaagatctgtgatcacagatcwccgtaacagatataataataacaaactttgaaataatgcaagaattactaaaacgtgacacagagatatgaagtgaggacatgctgttggaaaaatgattccaacagacttgttcgatgcaggattatcacaaaccttcaatttgtaaaaaatgcaatatctgcagagcacaataaaatgcggtatgcctcatcaactcattttcccaggtattttatgaatttttgtggggttttttagaagtggaatttctgtttccagagattttcttggtcctccaagaaaatctttatttatttatttttaacttttatttatttagagataaggtcctgctccgtcacccaggctggagagtagtggcgtgattatagcttactgtaaccttgaacttctaggtcaaacaatcctaccgcctcagcctcctgagtagctgggactaaaggtgtgcactgccacacctggctattttttcccaatttagaaacgttgt

SEQ ID NO: 823323 - DNA, 630 bp, Homo sapiens
tcaccaaatatttactgaacacttactgtgtaccagacactgttctgggctctgggaatttaattatgagcaagacacacagggtccctgcccctcataaaccaacttgagaatagagaagggggagacagctgttaagtataagagatgagttcagacacaggcaggcgtatgatggaaatgagaggagagtgccattatatgatagagaataagtaggatagagattcgggggagacttttagacgagtcagtctggaagagggtctgaggatgtgacattggatttgagaggagcctgtcatgcagagagccgatggggaacacacttcaggcagaaagaatgccagtgcagaggcctcaggagtgacccagcatggaaggagatgtgctaggtggtgatgaggatgggaagttgtagacgtcaagacttgcagggcccttgaaggaattgggtttttatctaagaacaggtagagggttttaggcaagtcttggtgatttgtcaacagaatgggtttagccacttaagggcattttattgatcagctcaaggctgatgaataaaataaaaatgccagtttgttgaytgttgatttttcagaaagattaattatcatcaccaggagc

SEQ ID NO: 823324 - DNA, 401 bp, Homo sapiens
tcagcaaaatacacatacaaatcctttaaaaatttcttattaactttagagactgaaacttgttaagaacctgtgaaatttctgacttaaatttcaatgcatgaacataggatgtgtgacagatacgagaatgcctgtattgggttgcagcccacggaggtctgagattggtctccaggttggaaggacaacttggatgatctcaggaactaagggacttgagcagactgaactttgaaattttctcttccctaatctccaggacacactgggacctgcagtgaaacaaaggacatctgtagcaaagcstttcaactctagattgtcctctccatcctagaaatggaggaggaagtgatagctgaagttggttaattaaatgctctgatcttctgtaaaat

SEQ ID NO: 823325 - DNA, 401 bp, Homo sapiens
tcagcaaaatacacatacaaatcctttaaaaatttcttattaactttagagactgaaacttgttaagaacctgtgaaatttctgacttaaatttcaatgcatgaacataggatgtgtgacagatacgagaatgcctgtattgggttgcagcccacggaggtctgagattggtctccaggttggaaggacaacttggatgatctcaggaactaagggacttgagcagactgaactttgaaattttctcttccctaatctccaggacacactgggacctgcagtgaaacaaaggacatctgtagcaaagcctttcaactctagattgtcctctccatcctagaaatggaggaggaagtgatagctgargttggttaattaaatgctctgatcttctgtaaaat

SEQ ID NO: 823326 - DNA, 530 bp, Homo sapiens
aaattgtattaaatttaaaatgtttattgacttgagcattgagaacatcaggtgataaacctaatgatgttttcatggagaaacaagtgaaacactktccataatccttggtagtggcactaaaacatgttcactaataggagaaaaaatagatcagaagtagttgttcagagttgaattaatttacatgttatctactgaattagacttattatggcaacctaaaataacagcagagattagctttccaaagataatgagtttatttaaacgaaggattgcaaacaggaatgcaccaggtataacaagttgtaggtgcatcctgacaggttggggtaaggggaaacttttaaaggcaaaaagaagtccacagaaactactttaaaacaaagtttattggtcacagaagctgactgcaggagttggcgttagcttcttggtagagacagccattgctaggcatgtgttcctgcgagaacattttatctataatgctgcagtcttgaatataatgcagttacagaaatatg

SEQ ID NO: 823327 - DNA, 655 bp, Homo sapiens
cattgagcactactgtagttttcayaccactgttgagaaatattattcttgcctgggtgcttaaagaattgttaaaaagtcctatgagctagagattttaataatttcttcctattgcctaacccttcatggagaacttgctttatcctcagccctatgggacagctctaatcactgtatgaccctcctcttttgggcacagataatgggccatagatggataactgtccagagctggactattaatcatcttatccaggaatctgtaactggggaattagactgagcgtgctacctgcaggaagttgaattcagatagtgtaggctcaagtggtgacgtttcctttgggtgcagccattgtcaaccatgtataaacaagtaaataagcagagaagccagtttgcagagaaatttgaatgaagtagtcatagagtgaaaatgagaggtagctgtgtgtgtgtgtgtgtgtgtgtgtgtgcgtgtgcgtgtgtgtgagagagagaggaacgcccactggaggcattgctatagagcacatggcaaggtgcactatcttgagagtagagaattttcttctctgtaactcccctctttactggctccagcaactctagccagcccagtgcctggtcccgtctgtgcatgtctagggga

SEQ ID NO: 823328 - DNA, 655 bp, Homo sapiens
cattgagcactactgtagttttcataccactgttgagaaatattattcttgcctgggtgcttaaagaattgttaaaaagtcctatgagctagagattttaataatttcttcctattgcctaacccttcatggagaacttgctttatcctcagccctatgggacagctctaatcactgtatgaccctcctcttttgggcacagataatgggccatagatggataactgtccagagctggactattaatcatcttatccaggaatctgtaactggggaattagactgagcgtgctacctgcaggaagttgaattcagatagtgtaggctcaagtggtgacgtttcctttgggtgcagccattgtcaaccatgtataaacaagtaaataagcagagaagccagtttgcagagaaatttgaatgaagtagtcatagagtgaaaatgagaggtagctgtgtgtgtgtgtgtgtgtgtgtgtgtgcgtgtgcgtgtgtgtgagagagagaggaacgcccactggaggcattgctatagagcacatggcaaggtgcactatcttgagagtagagaattttcttctctgtaactcccctctttactggctcyagcaactctagccagcccagtgcctggtcccgtctgtgcatgtctagggga

SEQ ID NO: 823329 - DNA, 624 bp, Homo sapiens
aactgagaatggctatgatgagaatatatacagtgtattatatacatatatatctacaaacacacattgtattagtccattatcacattgctttaaggaaatacctgagactgggtaatttataaagaagagaggtttcatcgcctcaacggttctgcaggctgtgcaggaagcatagtggcatctgcttctgggagacctcaagaagcttccaatcatggtggaaggtgaaggaggagcaggcgcatcacatggtgaaaggaggagcaagagagaaagagggctaggggccacagttttaaacagccagatcttgtgagaagtcactcactattgtgaggacagtaccaagaggataatgctcaatcattcatgagaaatccaccccgtgatccaatcacctcccatcaggccccacctccaacatgggggattacaatttgacacgagatttgggtggggtaaatatccaaagtatatcacacgtacacgtaaacatgaactataaaagacatagagttatttctrtcactttcctatgcctcctcactaaaacttgatgatataattggaaaagcaaaagtaactggctcatgcagaaaaaggaatttattgactcatgta

SEQ ID NO: 823330 - DNA, 656 bp, Homo sapiens
ttaaaattattatttgcctgagtaagcatcaaacttgtgtgagaatcctatcacgtcttgtaaagtaagcaacttcagggtcagatttaacactgttcctctctactaacatgttaaattgggaataatatactcttttaagttcatagattttagttcttacttaaatcagcaaataaaataagtaagcatattacctatgagaatcccctccatagcaaaattgtgaggaatttatgtgctaatgctggtttattttgctatttattgtttctcagattctgatggtagaattaaccatgggcgaattgcttatatttcttcgaagagctgctctaatcctgatgagagttatggctgcctgtcttcaaacattcctgcattagaattgatggctctatacgtggcagctgccatgcatgattatgatcacccagggaggacaaatgcatttctagtggctacaaatgcccctcaggtaggaaatatttttaagaacctttaaagagtaattctgaaattttcagtcatgctgtgtatccctttataaatcattcagttgaatcatatgkccaatccatctgactttaataccctacattttaattaattggataacacatggcattaatgtgatgtgtgctaggaaattaggg

SEQ ID NO: 823331 - DNA, 540 bp, Homo sapiens
tgaatgatttgatatatattatggatggagatcttcagattggttgcytgccacttcaagataaatgaatccagcataaggtccattatttaaaaaaaaaaaaaacaacaaaaaaaaaaaccaagaaaaagaaatttatgaagttgttgctatagctacatcagcaggcataaaaaccttgaactttatgagaaatacttttgccctcatattgaaaatgcagcttttatgtgagtgcaggattgctataggaaaggcatacctaatatgattcgagaaaaagtgaattcattgtatgacaacttaaagcaaaaggaaggtgaaggatctaaagctgtagaagttaatgccagcaagggaaggttcgataataggaggagcagcttctgccaacaaagaagcagcagaagagttcccaggcatcattaagaaaactattgaggagtggctgggcgcagtggctcatgtctgcaatcccagcactttggaagtttgaggcaggcggatcacttgaggtcaggattggaaccagcctggcca

SEQ ID NO: 823332 - DNA, 670 bp, Homo sapiens
atttggcctttcccatcataataactctcaccctacaagtcagggagccagtgtgggggtttggctacctgctacgtatgtctatggcaattatgcattctggcactgggaaatgaccacagggtgggtccctggatttccttccaaggaaggaagtcagacctgtaagtcagacctgagctaaaactccattaattacctgatctccataagcctctacttcaactggaggaccacaatgacattttgggtcccttggtatcaatgtcagctcagagccagtgtccagtagtccccaaaatgtctgatcatttccctttcttcaatgcagttaccctggtaatagactgggggtctccttggggaaggatgggagaaatattaacagcataaatagtcactagcatagtggggtccttttcaaggggacccagcctccccttcattcaagggtttctgggcctataaattttgtggtggagtgactgttgttcccaccgttagatctgacatacagagaagagcaattacaggactcttcagagatgcagttgccgccatcacaaatccatttcgcaaagcgttggtcaagggtgtatcttctggacccycccagctgggatgggtaggtccaaagtgaccaatccactccagcatccaatctccctaa

SEQ ID NO: 823333 - DNA, 615 bp, Homo sapiens
tcttcaataaatggtgcggggaaaattggatatccataagcagaaaaatgaaactggactcttatctctcaccataaataaaaataaactcaagatggattaaagacttaaacataagacctgaaacrataaaactactagaagaaaacatacgagaagcatttcaagacatcgatctagacaaagatttttatagctaagacctcaaaagcaaagataacaaacataaacatagacaaatagtactatattaaactaaaaagcttcttcacagcaaaggaagcattcaacagaatgtagagacaacttgttgaatgggagaaaatatttgcagactattcatttgacaaggtactaatatctggaatacacaaggaactcaactgaacagtaaaaaagcaaataaccccatttaaaagtgggcaaaggacatgaatagacatttctctaaagaagacatacaaatggccaacaggtatatgcacaaatggtcaacatcactaatcatcagggaactgtaaatcaaaaccacaaatactatcttactccagttagaatgactattactgaaaagacaaaaaataatagatgctggagaggatgcagagaagagga

SEQ ID NO: 823334 - DNA, 626 bp, Homo sapiens
gcctcggcctcacaaagtgctagcattacaggtgtgagccaccacacccggccgatctgattcatttcttagaaaacgtttaaaacacttgactcagccattttgttttaagtaaggaacataaaaacatactcaagaaatgaaacaaatattgcaaaaaccttagtgccatattacagccaacaacctagaaaaggggaaataaagacagaagaaaaagaaaagagaagaaacaaggaaataagtagaagaaagagaagaggaggaggaggaaagacccacagccaggggagaaaaacagaaaaccccactaggggcagaccttatgccaggcacagttctaagccttaggagtcgagaacacaacagtgaagggttctgctcatggaagatgaatggcagtgaaaggagcaaagaaaagaaaaacaagacacaaatcagaacatttcagatcacaagtgcctggaagataagaaacaggtgacattttgcgaatgatctggggcgggtgcaggggtttgggggctggatattagaaaaggcctctctgaggaggggacacagaagctgggacctggatggggagaagtyggccacgcacagatccgcagagaaagctccaggaa

SEQ ID NO: 823335 - DNA, 612 bp, Homo sapiens
cccagccattcctgtacctcacttccaatttctgtacatcactttactttttttgtctataaatttgttctgaccatgatgcacccctagagtctctgaatctgckgtgattctgggggatgtctgattcataaatcgtttattgctcaattaaactcctttaactttaattcggctgaagtttttcttttaacaaaagaaattaaaacatgaaaattggtgatataatctaaacacactcatttccaatgtgttttctttattgttaacaagttggtatggctcattatcagagcctatggtactaaagaatagaaaaacttcctggagaaattgacagtctgattaaaaagatatcaggaagaactccttgttaaaaaaaatagggtatctattattcagtcttaaaagtagaatacttacttctttggttgtgtgattactatttattgtacaaaatgcaaattctctgaaagagttggcacttttaggcatagggataaatttttttctttgtctttttcattttttttccttaccactgcctttggactcagtctgtgatctagttctttgatagttggtgacatgtcaaaaaaatgccaagacttt

SEQ ID NO: 823336 - DNA, 546 bp, Homo sapiens
ttgtgaagttgtccaataaggatatgcctcccaggcacaagaayagaaaagcagtcaccaagtctgagagttggcaaagtcactgtggcagaaggactaattaattgcatgagtgaagtgagaataacaaagtttctcaaaactgttggtccaagggtctatagtgagcagactgccaagtgacattaaataagaaggtaatgacagactgacccccaaagaagattttggtcctgacgaaggtaagaaggaaactcattaagagctcacaataaggtccagagacagaagcaggtatgatcagagaaggacatggcagaattcaagatcttggtatgagagtagttctaaggcatgatacaatatgcacaaggaggaaggatggttggatgaatggatggatacgtgaatgaacagatggggggatagataaataaagagctacagataaacataaatcgataagaaaaattacttacataaagattagaaagttccccttatatctaggctttccttctaaattttctgctgtccttttaagtt

SEQ ID NO: 823337 - DNA, 640 bp, Homo sapiens
cactgcagttgttacaagtaatagttttttgatttgtttatgtttttgtttcaggaagacagacattgttgactctcggcagagctggtcttagttgtgtrgcaaaatagataagggactcttgggggaggatgggagtggtagtcagtaacatgtagggcgtttggggcaggggattactgcattacattcagctccacatctcatttaaaacatggtcagaagaaatgaagtcaagtaaaatggtctcgaaagtggctggtattaggcagaagacaggcaaagtacaagtcaaagatagaagtggaaggaaaatggaaagaaaaaaggaatatctgtggtgggccttaccctcatgtgttacccacatgcctctattaatcaatgaaaattttaacacgtcatacacatggttcacgtattttccatcaaaatagttgagagagaggaggggtaagtaaaagtgagctagccaggatagtgggtggcaaaattccacttcacagttttgcctgggtcaaggcttgactagaaagtctatttactttagaactctcactaaaaaattattctttttcttagtataggacatgcatcttggtaaaaatccttattaaacaataacaactaatttaaaaat

SEQ ID NO: 823338 - DNA, 618 bp, Homo sapiens
tgcatcttggtaaaaatccttattaaacaataacaactaatttaaaaatttaaagaccatgcgaagcaacatgtaggatggtggagaagaacgctgcacacttcagccaatagtttgcacaactgtcagaccactgttagagctagctgtaagttcagtctcatcgatgtacttcagatttcccaagggtctaaatctcctctgtcctagagagaaatacttcttaaattgtcatgtgtccttcctttggctcctttctatccccaccaagttaacaggattctgtgaaaaaatttcctcagtaaaacacatttggaaaacactacatactatatccctttcttagagatttctggtgcacatgagcatgttaaaagggcatcaaaatatctgagaggttctgaggaagaaaaactgaacccagcattttccaattcaaaccccactcccagttctccccttttgccaccaggaatacctattagcttttcatgggtcactagtattttytagtagagtgattggaaaatgctattccaataaaataaaagtattatgacattttcttgccacattgaaaggactgaagatttaaaagacttaccaaaaggatctatt

SEQ ID NO: 823339 - DNA, 471 bp, Homo sapiens
agataatgtgattcaagatgagaaaagttagaccttgatctaagttcaaaaactttaactacggaagaggaattgtgggctgtcttctcctcctcccatgcctcttcattctacactttaccaaaggcttaaagaatgagaaaatcctacgtactatggttcaataatagcaggagagcttgtcaatatcaccatggtcatagaaaacctcagccaggagactcataaaattggacaggcggtgattaggaacagaactcttccagatacctgaaaaggcctcttaaggtgaaacatatgccactttgccaggcacgctggcacttgcctgtagtcctagctactcgggaggcttgagactgtagcrtgctgtgctcgtgcctgtgaatagccactgcactccagcctgggcaatatggtgagacctcatttctaaaaaaaaaaaaaaattttaagagatatttaaaaaac

SEQ ID NO: 823340 - DNA, 471 bp, Homo sapiens
agataatgtgattcaagatgagaaaagttagaccttgatctaagttcaaaaactttaactacggaagaggaattgtgggctgtcttctcctcctcccatgcctcttcattctacactttaccaaaggcttaaagaatgagaaaatcctacgtactatggttcaataatagcaggagagcttgtcaatatcaccatggtcatagaaaacctcagccaggagactcataaaattggacaggcggtgattaggaacagaactcttccagatacctgaaaaggcctcttaaggtgaaacatatgccactttgccaggcacgctggcacttgcctgtagtcctagctactcgggaggcttgagactgtagcatgctgtgctcgtgcctgtgaatagccactgcactccagcctgggcaatayggtgagacctcatttctaaaaaaaaaaaaaaattttaagagatatttaaaaaac

SEQ ID NO: 823341 - DNA, 491 bp, Homo sapiens
atgagctacacactttctgaaatccacaagtgtgtgtctcgtaagctcctatgagtgtggtctttcttaagagctcaagctccctccggtcttgaattgccttgacatcacacactcaggtgggccctgcctccaagcccaccttgtgaaaacagggacgggggaccgccactagggagagaacgtgagagttggaagggcccaggcccatgggaagtccaaagtgggctgtccaggtagggaatctgaggccagtgaggaaagaaggacttttcgaggccacagagctgtgtggggcagaggtggcactagagtgagtttccctggtgtgaggcccaggctctgtcctctgcatgatccgggggtgggggacgctggaagcctggttgactagaaggaaagacaagccagaggccagtgctactctccacttctgccctttgctgrgctggccctgaccccttccaggcctcagggcctcctgctgccct

SEQ ID NO: 823342 - DNA, 627 bp, Homo sapiens
ctacatctcccaagcccccaggccctgggagccaccattctatctctacggctataagtttaaccctttcagctcgcccatgtgagatcatgtggtgcctgtctacgtgtgcctggtttgcttcgctcagcacaatgtcttcaaggttcatccatgttgtcacagatgatgggaggaaagtacccatcttgactttgatcttggtccttcctggcatttctttatatttttactatatatgtatataaaaatactacttttaccccaaaactatcctttgaaaggctaggaactgagacaggaatctgggtcgacctgtgggtgagaggagccgtcgagttgggtgaaatggttcccgctgccccccagctctgtccctcacctcatgagtgccccctgcactgttgcagtcatcagcttaatagtctagcaggcactgctttcttgggtgctactgcatgtggtgaaggagcattttgtggatctaaagtagacagggaataagcagaaaatgcaggtggccccagcagccactgaaccggcctggattcgggtgaagaaagcagcgttctcctggtgtaaacagacacagccycaagtgcaaggcacgcagcttagaaagtcagg

SEQ ID NO: 823343 - DNA, 620 bp, Homo sapiens
tttttgacttacaatattttcaatttatgatgggttcatcaggatgtaatgccgtggacagtacacagcaccattcctggcagccagtgagcactcatggatgttagccgggttatctctttttcattcttcacagctctcagagctctgtgtaggtttggaaaagcccagggcccagcccactccccagagacaatcactttgacctgttctggttgtggttacccatgtggccaccaacatacctctcaatcatagactttgacatagatttctttgtttatcaacccacaagaattttgctcacctacaccacaacctgtttccctccactctctccgcagagggttctccctctattccttttttctgttggtagcctttgcatgtcaacaaacattcttcaatctcaatttcttgtcccatccaccacagatgtgacctcctgtctcccaagaagacatggtattcgggggccactacacccatattccctttgtctcttctctagttctttaccttccccaaaaccggagtttttaaaaatagmtaagactaaatgtgggctttgtatggctaatgttttacctctatacacttttttttttttttgagacaga

SEQ ID NO: 823344 - DNA, 396 bp, Homo sapiens
ggtgtctttgcaagaaaaaatgggcaaaggagacctcagaaacatcttggtggagtctcttcctatctaatccagccccagagctgggaagaggccccacaagcaggctgcacaaaggttgggagaatgtggcctgttaagccttggagtaaacccaattcctagattggtcagggtctggagggtttgggcctctttcctataagtggagtgaagggagggtgatgggtgatggctggtgtgtgtcgagtcttccaggacagcctcctccaaaccygcctgctatggctggccctcgcaggtgtgagctgccacttcccactggcctgccctccatcctcggccttcctctctgtgcataagcccctgtttcctctcccaggcagagaaggctta

SEQ ID NO: 823345 - DNA, 587 bp, Homo sapiens
gcatattttgaagacttggtcttggctgttcgtttgaaatcatgaaatgaggctgctctgttggacttgggaacccctcaaattaagattccgcggttaatagcatagcctctcagcatgtcccctgctgtcrgttttgtaagtttcagatgtcctttaaattgctctaccagactgacaaaacatcattcctggagaatatttgccttcgtatgctcagaaaagatagagctagggagatctgaatttcaagtatttttttttaaaccagatgctgcagatttaggggcaatttttattcttattttaaattctctgagctttggacctttcactgcttgaaaacgtgcttcgtgttttaacaccgttttaggagacattttcaaatgtcttgatttggtctctattttaggttctgatattccaatatcaagagttttgtgcccatttttcatgttaagttgtccctctcgtcttttggcatttgctcctggagaacagaaaatttaagtttacgagtcatcatatcagctccgagattgacatttggtcacactaaccttgggaagattcctgtgataacagaa

SEQ ID NO: 823346 - DNA, 415 bp, Homo sapiens
gtgtgtccccgtagtcccagctactcagggggctgagccaggaggatggcttgagcccaggaggtcgaggctgcagtgagctgtgattgccactgcactccagcccaggtgatasagcaaaaatctgtttaaaaaaaaaaaaaaagaaaggaccccctcaacatattgtaagcttcaggaggaaacagagagctttctccccatctctctttttatacctatgcagtatatctcccttgcattaatcttagggccttgcttagatgttctgaagatgttggctaaatcaaattggattaactaattcttatgcctctattccactgtttgcaagagttttcacatgtattatctcatctcttcctcacagaagctctgctagataaaacaggggctacacggtggtccccatgtt

SEQ ID NO: 823347 - DNA, 486 bp, Homo sapiens
ccaacatggtgaaaccccatctctactaaaaatacaaaaaagtagccaggcgggtggcaggcaactgtaatctcagctacttaggaggttgaggtaggaggatcgttggaacccgggaggtggaggctgcagtgagctgagatcgtgccattgcactccaacctgggctacaggccaaaattccatctcaaaaaataaaaaataaaataaaggccacgcacggtggctcacgcctgtaatcccagcactttgggaggcccaggtggcgggatcacctgaggtcgggagttcgagaccagcctggccaacatggtgaaacctgtctctactaaaaatagaaaaagttagctgggcgtggtggtgcatgcctgtaattccagctaatcaggaggctgaggcaggagaattgcttgaatctaggaggcagaggttgcagtgagcagagakcgtgccacagcactccagcctgggtgactctgtctcaaa

SEQ ID NO: 823348 - DNA, 663 bp, Homo sapiens
ttctggatccttgaggaatcactacactgtcttccacaatggttgaactaatttacactcccaccagcratgtaaaagcgttcctatttctccatatcataatgtagcaccaaatgtagataagcgcctaatgtagatgagaggttgatgggtgcagcaaactaccatgtcatgtgtatacctatgtaacaaacctgcatgttctccacatgtatcccagaacttaaaatataataaaaaaagattgaaaattttaaattttaatacaaaattaggacttagttatttgcaaaatacactgtattttcaatgtgaaaaacaaagggttatcgtatgtattatcaataaagttatatagttttccataaaaataacattaataatggaaaattctaaaagaaaaataattaaatttcttttaggacaatttaaaaatgtatctgtcaattttaacatgaaaattctcttacatttatacatcccacattctaataaggactaatttttatgagcagtaaagaaatgtgtgtatgcgtgtctgtatacttataggtatatatctgtttctgtgaaaatctctcttttagagtcagaaaatctgtttggtcccagttcttactaataatatatgatctcactaaagatacttaaattcaataaact

SEQ ID NO: 823349 - DNA, 589 bp, Homo sapiens
agagagaagatataaattgccaacatcaggaatgaaagaggattataatatcaaaggatgataataaagtatgaaagtactgatgtcaataacttattacattttaatacacttgaaaatattatttaaaatggcatttgccaaaatggccaaagataaagttcaaagaatatataatcatataactattaaagtggattctgtaattttaaaccttcccattaaaatatcaggttaataaagaaatataagggttaattgttggacaggtgcagtgactcacgcctataaccccaacactttgggagactgaggcgtggacaacatggtgagacttcatctctttaaaaaattttaaaaaaattatccaggcattgtggtgcatgcctgtagtcccagctacttggaaggatgaggcagaagaattggttgaggccagaagttcgagattgcggtgagctatgattktgtcactgcactccaggctgcatgagagagtgaggccctctctctctctctctctctcaaaaaaaaaaaaaacaaaaaaacttaatggttacagatatttaaataataagtaaagaataag

SEQ ID NO: 823350 - DNA, 524 bp, Homo sapiens
ttaatgtacctgtatgaaaactaaacactttgtggaaaagtacaagggataatttggttataggagaggagaaatrtgtctatgatatttataatttgaataaacatggtcttactttatgttcaggggatattttgcttacataaacttaattgtttgatgttattttcaaatataaggtgataaatagaagttctaagacagatttctgaaaacatactcagcttcacactgtgtgtatcctgaatcacttataccacagtttccagatacatcagtctttgaattaaggtgagaataacattctgaagggccaaactctacttctgaaaataaaaaggtgaggttagtcatattaaacttatattaattaaaaataaataacaaatacacttaaaattctgaaagggtttaagatattcattgtacaaaataagatcatactataacattcaaaataaaaactagatttaagatcacacaaaactacttcaatgaaatgtttaaaaattgaaaggactctg

SEQ ID NO: 823351 - DNA, 613 bp, Homo sapiens
ccgatctgtggaaaattgtcttccatgaaaccagtctctgctgccctaaaggttggggaccgctgccttacagcacgttttctacttatcaggggctaaaagttggttggatcaatatacctgctacattatagcaaaaagaaggagtgctgtgatcctggattggcaaggcaatttaaataaccacagcctagggcatctcttggtaacattctttcctagttttttgtttgtgtttgtttgagaggaacgggactttactggaaggcttggactccatatacacttacgagtgggataatcacatgggaaaacctcatgcaagaaagtgtcagcacattcaactctgcctcgatttcctctttctttctctctcttctcattttcctagcccagagttttcacttcactggggataggatcttcaggaaaggatatcagggagggatggtgagagagaggatgtgagtgcacagaagactatgtgtgtgttctagwgtaaataaagcagagaagagagtttatgaagctcagagcaattgcatattttaatcttgcagaagaaaatactaagccccatcagtctcagacggatctcactacgtgtctgagt

SEQ ID NO: 823352 - DNA, 521 bp, Homo sapiens
tttatctccaaatttctgcttttttgtaagtaaaataggatgataataatacttaattccagttttgcagtgataatgtaagcaacacaccagacaccaagtaactattatatataactattaattaagatttcctagagaaacacgtctatggattcaggagcatggggagatggatcctatggtaatcctttttcaaataagtcttcgattaattatcagactgtcatggtggaggtatcagccagggtccaggtggtagacatgaaatcagataatttgagggggatttatgaacaaaatgaacttatggaagcataagacagttgaacaactgtatcagtcatctattgcataacaacctcacctcccaatcttagtgttttaaaacatttatttgctcacaattctgtgatttagttatttaggctaggatcatctgggcagccctcctgctagcctggcmtgagattgtacatgtaagtgcagtgatctggcagattgaatgggttgaaaggtcc

SEQ ID NO: 823353 - DNA, 517 bp, Homo sapiens
gcatagaacatggtaaacaagtaatgttttcttgacagatttgatcaattataaatgtgaatgtatctattccatragtagttgccatgtttctgaccccaatgtaaaaagaaatacatatttttacaagatgaattccttatcattataattttatttttcttgttatgtaaatgttcaactttcttacattaaatgctcatagttcatgacagctgaaatgaggtgttcatataaatgagcataaggtaatatggtgtaaaaaacaatgactccataaaatattgtcttctaggtacattgcatcatatataacaagggtcaaaactcaaatgtctaaaagggccagataggttcataaatggattatgaaagctgggaaaggagcatggtaaagagaagaatgctccctctcgaagagaagacttactcactagttcaccagcttagtgccatgaaggaaggcagactgagagtggttcaaggacagtgagatttacatgaaatctgacatcta

SEQ ID NO: 823354 - DNA, 539 bp, Homo sapiens
gagatggggtttcaccatgttgcctaggctggtcttgaactcctgacctcaggtgatccatccaccttggcctcccaaagttcactaagtatttctaatgagcagccacacttaactgctagtctataagggatacctttaattgtttttaaagtttaaatttatcacccaaatattaagccttgtacaacatacccccccgacacaagtttacctatgtaacaaaccagcacttacacctctgaacttaaaagtttttaaaagtttgtgcaaaagtatgagattttgctaaaagattgccttgaagtatccatcaagaacaaaacagtcattttaatttcctcatgcaaattttaaaagaagctatactaggaaaattcaaggccatctggaactaagttgcatggcagtcacctaaaatccttggtggaaaagataaggctgcartcaaataaagtgaatttcaaagtcacgattatcattttaaaatcagaatttcgagcagaaatatcaagaacaggtattgttggaagaaatat

SEQ ID NO: 823355 - DNA, 497 bp, Homo sapiens
ttcacttgccaccctttattttatttctttcataaatttgtttacattccttatccattrcgttcttctttcttcatcctttttgttaagtttgtctgtcatggcaaagtacctctataggctgctgtcctttgaaataattttctttagtgataattaaagaagacattttaattgcatgtgttatctgaaatgtactgttagaaataatgacttctcagattcaaagagaatctatcacaaagcaatcctctactttgtgcagtaatataacttctcaataacactcttgctcctttcttttccgttatcaactgacagtcttaaaaaaaaactattttcatataatgtttggctgatatttcttagttatggtaatggttttatagagattagaatttataactaaatatattaaggtcagaaagggaaaagtaaatgtgcattagctaatatttgtgtcttattttaaaataattttcaaatgataagattga

SEQ ID NO: 823356 - DNA, 608 bp, Homo sapiens
gagtgagtgcgggtgtgtgtgagtgtaccctccaatgggatggcatgctgtccagggtcctgttcagggttggttcccatctggttccctgagctgctgtgataggctatgaccacccgagaccatgaactgttatgaataagtgggtaaataatgaccttactgattaattaattattaactgagacagagtcttgctctgttgcccaggctagagtgcagtggcatgatcatagctcactgctgtcttgacctcctgggcttaagcaattcttctgccttggattcctgagtagctgggactataggtgcacaccaccatgcctgggtaatttgttttttatttttatttttgcagagaagtggactattaggttgtccaggctgatttcgaactcctggcctcaagtgatcctcctgccttggcctcccaaagtgctgggattacaggcataggccatcatgcctggcctttaatctttcttaaatatatgtgtagctcacatttatttcaatgtttaatgttagaagtgttttggrtattcattttgatgtttggtgatatgtttgtgatcagaaatatgccataagaacttaccttttttata

SEQ ID NO: 823357 - DNA, 599 bp, Homo sapiens
agagatcattttccctaccagtagccttgatatatatgattgagaagtaaattgtaagataatacaaaagcagtctgaatacaggaaattaacttgactagtaatgaccaagakagctgtgtgaaaatatattttaaaagttcccacaaactcaccaaaagtgggagctggaaatgcaaagacagttttgacaagacaaagttttttccaagctaaacaaaaaagattacagacttttagaaactacatttttaaagaaaaaaaaaaaagcagataaggcaaatgaagcctagaaaaattaagagatttatttagggtaacttagccagttaatggcaggattgagactaaaacacactgtaaaatccaagtatggtcttttatatctatgatataacctgtatatatgtaagaaatatagcacttgtaatttgttaatctccaaatgttcatgaagttgaagtaaatgcattcattgtttcaattattcttaaagagaaaaatgcccaaagacatcttaattgcatgggtatgtatacacgaaatacacatggagatgtcttcaaatataatatgtgcatgtcttcattccttccctc

SEQ ID NO: 823358 - DNA, 552 bp, Homo sapiens
gagaggagagaaagaggacttgctaagcttatrtcttcaatctggtacaccagcagtcaaatgaaaattcaaagtcatagacactatttacatctgaggagtcattcttgcccaggtccaaatttccaggaaggaatttcattcctgactttgctgggggcagcagcatttgttacatctgttaccatctcatttctccctccttcccttcagtgctcagcaccccccatttaagtcgctaagtattccttcttctagcctacagtcttatctcactataaacgtatatctcaagtgatcggtttggcatggtccctaaagcaacctgcagggaacagaggaaaaagaaaactcaaatcactggaaagctagaaattcaatcatttggaggagtttcttttatgtaggacaatcttaattgaactgaacctagaaatccccgacaagattcactatatcctttttctctccctctaagtgtgcctttgaacaatgggtgtgtataccattattctctctactcattttgcaggcttatagacactggaaacc

SEQ ID NO: 823359 - DNA, 645 bp, Homo sapiens
ttatatctttcaaaatagctagaagaaaggacttgacatgtacacaacacactggtaggataaatacttcagtgatgtataccctgaatatcctgacttgatcattacacgttctatgcatagaacaaatatgcatatattatgtttgtaagtatttgtggggtacattctatgcatatttgttttatatatacataatataccaattttttttgttgaagaaaacaatacgagcttaactttttcaatatattatcgccatccacaaggagggcacttaaatatttccttaaaatcctaccattaactaataattacaagagctttgattatgaattgctttctatatgtgcctgggaccatgtttagcacctcacatgaattatctcatttaattctcataacttccctatctggcttatgatttttttatgtcactggagggagcagtctactaatcccaaagaagtccaacaggtactagcctacctggctgaaagggagccaagcaggtctacttcacaaatgytttgaagctaatcatggcttccttttgtatggactccacagtccctgagattattcagcaatcacctggtgagatgtgatgtgtgattttgatacaaatgtggggattgtgctatg

SEQ ID NO: 823360 - DNA, 586 bp, Homo sapiens
tgtttgccgcaactctattcacaaaacggaaaatatggaaccaacattaaggcctatcaaaaggagatttatgaaatcaatcctggtttatcccttgcatatagttctacagttattaaaatggtgatgttcaggggacactaactcaacccgaggggtggttgcatcggctttttgcaagaaacaggccaagctaatggctaagctgtttggggagcacctgctcattgtagaggagacacctgcctttcagtttccatcacatccttgtaagactacagactcaatatcaccagattatcctcttcgcaggagaagctgcaaaatgtcctggcttttaaaacgttgtgcaggtcttggagggtagaaagaaagtatctgtgggctgcattttagctaacattcaggagttttgcaaactttaatgtggaactaaaattattgtcaggtaataatgctcagtacttataatcagtcttaaaacrtaagattaaaacactatatttctatttaggtaaaattatgtacatatgtttgcatgtgtgtttatgtgatgttgacacaaatgaatgcacaaatgatatat

SEQ ID NO: 823361 - DNA, 641 bp, Homo sapiens
ctgtagagagtgtgagaatctacacacgatgttaaattgctgatagaaaggtaaggtagtgcaactcttccataggctcatacgtcaatatgtactcaaattgaaaagtggcccttcaatttctaaaaagtcattctaaggaaatgaataaatgcaggaagacatatgcacaaagatgtttttctcatttttctgtagtaccaaagaaaagagagaggtaaacctaaattttgagtggcaggaaactggctacgtaaataatgaaatgctgctgagctatttaagtttgtgatatagccttattaaatgacatggaatcatgctcattatatactaataagcaaaaaagatacaaaacatttttatagtttggtctaataattaaaagtattatatatttgcttgcattgtgcctgtgtgtacccccacaaacaaaaatatctcaagaatgttatgaagatcatttattggaaatgggataatgggattttaagttatttatactttttatttttttttkgggaaacaaggtcttgctgtgttgtccaggccggggggcagtggtgcaactatagcccatggcagcctggaactcctgggctcaagcaaacatgcagccttaggctctggagtagctggga

SEQ ID NO: 823362 - DNA, 530 bp, Homo sapiens
ataaataagtaaaaataaaagaaggcaaggttgacgcaagagcgcaggggaaaagtgcatgggcactttttgacctaccgaagaccatgtagttgcaaagtatatataacttaaggaggtttgttttaasagcaattttccatagaaaccatcatcttaaaggaaggaggctagagagcacgacacaattccaagagggatggtggtggtcatgggtgattttctttctcattctcccttcctggttcgcagcagtgacgcaatatcacttctctaatttgaaaaataataaacaggcttgccccaaactgtgcctttcaatagtcatatagttagtacaaaccacggtgaccttttaaagatatgacttgttttttaacacctaaagcaagaaatgctccatatgtgagctcctacctggccaagctgccatgtcaactgcaatgccatggtgtctgcccatctctgaaatgtcagcagagaaccgtggcaggggctgaaatgcaatatgttgcaagaggctgaacttt

SEQ ID NO: 823363 - DNA, 620 bp, Homo sapiens
ggaacataattttttataagtctactttaccaggcaatttttcaaggacgtttctaaactacattttaaaagacaaagtcttgttgggcagtgctactgtgatcgaatggaggatgaaatggtttgagtaataccgtcttgtttcttcctagactggcatctgccacaaggggcagcccatctgctccatccttggggaagaactaaatgagtgtcccttggctgagacggctgaatggaagatgccctgacatcagccaccatgtgtgtcctcaaatacatgtctctggtgttatgctacagatgcccacggcatattttgctctttgtctgagttagtggggcaaggttctaccccagggacgtttggcaaaatctggagacgtctttggttgtcatggatgggtgaagggggtgctactaacatctagcaggtagaggccagggatgctattaaacatcctacagtgtacaggacagcctgcacaacagataattatgcaatccaaaaggtcaacagcacaatcgggttgacattaaactcattgtaactcaatagtatgctctctgctgcttaaaacccaccacagcttcccagcwcaatggttaagcctagaggc

SEQ ID NO: 823364 - DNA, 605 bp, Homo sapiens
gaaacaatggacaagtcacacatttcagtgagcaaaactagtcacagagctccacctaactgccagggggctggaaatagagaagagccaagggaatacttgctgagcattgctgttgctgccgaaagtgtcccccatgatcgtgaaatcttaaagtcacataccacccatggggaaaaaggttccagggcagtcagacattttcttctctctcaattggtcgttaaaagctggtataaagtagatctcgctcctttgtgaactaaagcgtgttaagcttctatttggcaaaataaaataatcatactaaacaatatatgctcctaaaagctaattaaagagcaagctcaaatcatcacgaaggcagatcagttttaagcaaagcttcttaagtgtcattatccgccagacgtgcatacaaagtgttttgtgaatttttccttcatcctatctttaacctctcaaacagccgcytacagagagccagagagtggcaggagaatgtgttaccaccagcagcacatgtgagcctctccacatttatgaaggatgattacataactatgatgagaaggaatttttctcactttccaaggaaggccagt

SEQ ID NO: 823365 - DNA, 607 bp, Homo sapiens
agctaccagggtgaatgcgtgtaaggatgccagtggccccacccgccctgcaccagcactgccactagtgcaaayacacgcatggaggctggtagcctcgcacccaccagtgccctgaccctgctgctgctgctgctgctactggtacaagtgcaagcacaaacaccagccacctcactcctgccaatgctctgtctctgctcatgtgagcaagtgcaggaatgtcacagccccgctactaatggtatctgacccaagacaacacatgtgaacagtgacacactgctgcgactgctggcatgtgcaagcgagcacaaatcctgctgccactgccccaacaaagtgagccatcaacatcattcagagtgttgtggccagccaactgggaatacctcagccccttcagtgcaccaggttcctaaattcaaggagtcagagaacaaaaccaggagctcaatacaaaccaccagagttacagcatgcagcctggaagtgctgagctgagtcttatccctctacagtcttccagaaatgaagccagtcaactgaaaacaccttgtaccaccatcaaacacccaagggcatcaaagaacataaaagcaaaaaa

SEQ ID NO: 823366 - DNA, 607 bp, Homo sapiens
agctaccagggtgaatgcgtgtaaggatgccagtggccccacccgccctgcaccagcactgccactagtgcaaatacacgcatggaggctggtagcctcrcacccaccagtgccctgaccctgctgctgctgctgctgctactggtacaagtgcaagcacaaacaccagccacctcactcctgccaatgctctgtctctgctcatgtgagcaagtgcaggaatgtcacagccccgctactaatggtatctgacccaagacaacacatgtgaacagtgacacactgctgcgactgctggcatgtgcaagcgagcacaaatcctgctgccactgccccaacaaagtgagccatcaacatcattcagagtgttgtggccagccaactgggaatacctcagccccttcagtgcaccaggttcctaaattcaaggagtcagagaacaaaaccaggagctcaatacaaaccaccagagttacagcatgcagcctggaagtgctgagctgagtcttatccctctacagtcttccagaaatgaagccagtcaactgaaaacaccttgtaccaccatcaaacacccaagggcatcaaagaacataaaagcaaaaaa

SEQ ID NO: 823367 - DNA, 564 bp, Homo sapiens
tgttaaagtggcagtgctctgcaaggataattacattttatttaaygtcaaaagatttggaaatgattcctgtcactatcatcttgctaatatcactatctccttaggcctggctttcttcctctacaatacggaataataataaattacaccatacacagtgtctgtgaaaaatcaggtgaaggccgggcgcggtggctcacgcctgtaatcccagcacattgggaggccgaggtgggtggatcatgatgtcaggggttcaagaccagcctgaccaacatggtgaaaccccgtctctactaaaaatacaaaaattagctgggcatggtggcacacgcctgtaatcccagctactcaggaggctgaggcaggagaatcgcttgaacccgggaggcgaaggttgcagtgagtcgagatcactccactgtactccagcctgggccacagagtgagactccatttcaaaaaaaaaaaaaaaaaaatcagatgaaaacgtatgtttactaccaatgtttttcatgagattgaaatttcattctacatatgccattaattaacaatttc

SEQ ID NO: 823368 - DNA, 555 bp, Homo sapiens
attcattctcttaggcaataaggggcaaacacatccatgaaaactaggtatgatattcagacgtgaaattttaagaatttttttctaacacctaccttttctttatctttttgaagttgtttstccagttttttggctttactcgtggcatgttttaacttttctctaacttgaacatcttccaaatctagctgtgtaaatttttctttattctcctcaataaattttgtaattttattcagtttcctagcaaagcaagtatattgtaagtcattattttgaatgtgcacatattttaaaaccacatttcctacctggaacacttcctctataaatatgtccaggctcttaataaggcaggatcctaaaactctccttattccaagatgatccctctccccatagttgaagaagcacctgtatttttgattatgacagctattttgcctttctaagttggagggaaaataacacattttccagtgactacaatgtctaggtatataaaaattttaccataggagtaaaattttggttttaccttttacgaatata

SEQ ID NO: 823369 - DNA, 656 bp, Homo sapiens
gtgtttttgtggaggttacataggcatgattgattaaaccattggccattggtgatcaacttgaccttcagcccttctcccctccctggaggttgggggatggggctgaaggtctcaaccctctaatattgtctttggtcattctggtgaccagcctcactctgaagttatcagtcaatataagtataaaaaaaagcaagcactttggagagtacaaggattttaggagttgtatgttaggaaactggggaggaagaccaaatgcatatttcacagtatcacatcctcacatctgccaaacctaattgaacatctgaggattttggtatccacaggggtcatggaaccaatccactgtggacactgagggatgactgtaaatatattaagcataatggaagccaagtttcttgaagggaactgtaaatgtagaaagggcaagagtagcatgtggtcttgaattggaattgaagaatattagtctgttctcacactgctataaagaactgcccaagactgggtaaattataaaggagagaggtttaattgacgcacagttctgcaggactgggagacctcagaaaacttacaatcgtggtggraggggaagcaaacacttccttcttcacatggatctcatgagaacttcagatctc

SEQ ID NO: 823370 - DNA, 483 bp, Homo sapiens
acttgaacattaaatagaaataaaataccagcagaaagagatacacctgrtaatatttagagacctgcaacacagatattgtttttaggggtcccatactcctagtccacatgtcaaaaaatctgtttatttattcatttatttatttatttatttatttttgagacagagtctcattctgttgctcaggttggagcgcactagtgcaatctcggcttactgcaagctttgtctcctgggttcaatcagttcaaatctttcagcctcctgagtagcagtgtttacaggcatgtgccaccaggactggcatttttttttttttttaagtagagacagggtttcaccatgttatccaggctggtctcaaactcatggtctcaagtgatctgcccaccttggcctcccaaagtgctgggattacaggcttgaaccaccacgcccagcagaaacatcctttttaaggtaaatggcatgttgccctat

SEQ ID NO: 823371 - DNA, 514 bp, Homo sapiens
ttcagcctcctgagtagcagtgtttacaggcatgtgccaccaggactggcatttttttttttttttaagtagagacagggtttcaccatgttatccaggctggtctcaaactcatggtctcaagtgatctgcccaccttggcctcccaaagtgctgggattacaggcttgaaccaccacgcccagcagaaacatcctttttaaggtaaatggcatgttgccctatatatacttcttatcactaaaaaggaagcacagtgtttattgagcctcttggggtttcagagtccacaaataccacaatagaggatattgctccaacgtgttaataaagtcctttttaaatccctgttcagttaacctacctagcctctgccaaaactagatgggttgcagaatgaatgcaaagactagtggtttcaagtggaatccagaacatawgatatctctacagcagatataggctgtggccaaacctgctctgcccattgcgtcagatgatccagcagaattca

SEQ ID NO: 823372 - DNA, 514 bp, Homo sapiens
ttcagcctcctgagtagcagtgtttacaggcatgtgccaccaggactggcatttttttttttttttaagtagagacagggtttcaccatgttatccaggctggtctcaaactcatggtctcaagtgatctgcccaccttggcctcccaaagtgctgggattacaggcttgaaccaccacgcccagcagaaacatcctttttaaggtaaatggcatgttgccctatatatacttcttatcactaaaaaggaagcacagtgtttattgagcctcttggggtttcagagtccacaaataccacaatagaggatattgctccaacgtgttaataaagtcctttttaaatccctgttcagttaacctacctagcctctgccaaaactagatgggttgcagaatgaatgcaaagactagtggtttcaagtggaatccagaacataaratatctctacagcagatataggctgtggccaaacctgctctgcccattgcgtcagatgatccagcagaattca

SEQ ID NO: 823373 - DNA, 504 bp, Homo sapiens
cattgtagaagtggccacctgggcatcstctccacatcccctcctaatggatgtgaggtctaagctaaaccctggaggtgacagttccatgagggcatacttttgtctgcaaatcaactgtcaagtctcaaggagagatccctcgtggagcacacagttagatgaacttgcccgaagggactgtctggtgaggggaaagtaaacagttctatgtgcatgtctaaaaagttaagtagaaagcaggaaacatagggaaaggggagaggaaaagagaaaaaataaattaaaaaaaaactatctcttagaaaaatgggggtattggttagtgtgactttcccaaacagccaccaaggggttggataatgtaaggaagaaaagcaaagatggtagttctgcctcaaacaatctttggccaaaggaagatagaagacagaagacagctaggatacattctcccttttctctcctccatggactaatatttgttgtggcttccccttgtaa

SEQ ID NO: 823374 - DNA, 607 bp, Homo sapiens
atgagccgagatcgccccactgtactccagcctggacgacagagcaagactctgtgtcaaaaaaaaaaamaaaaaacaaaaacggattacaatacatcaattgcaataaccagaatatgtcccgggctgctcttactacttttttgttttgcttctattgtgaagaatggggtcctgttccttgtagtcccatctccctggggttgctgcctactaagtgttagacatgtattactcttaattagacatgtgttaatttaccactaaggttgcttatgagttggatcaactgcttatcaaagaaaagtttactgacacaaaaatataaatagtattttgtgttttaaagaatacaaggttaagtcatttatataaaagaatatctttaaaataaactcagtatctaagtctaaaatatattcagcttgatttgcacattaccttttatcaaggcaagaaaattataattataatctttgacaaaatactaaattagtgatcaaaataatatatgtacattttattttgtaaaatgcaaattactaaaaaaagatgttgtattatcattaaaacaatcatcaacatcattgttattgatacatgatac

SEQ ID NO: 823375 - DNA, 621 bp, Homo sapiens
ttagtctttcagttttcaaagggagtaaattatatgtgtgaactgaaactatatatcttctcccagttctcagaattgatcatttattttacatcgctcttcagtctctataccagtattttagaagttgtcataagtaattcctctaagtgctacctcgctggagtggtactggagcagcaaagtagcaaaagaatactagctgggagcacaaaattaatttttacaaatttctcagtggcacgttatttctaccagtcatataatcagtagactatatagaaacagaggtactctagggtaccgtacttgtgctctgaatagctgctagacatgcagtgcacggtgcgatgtgtggtatctcaacaatgcttttcagaacaagactgtaaccttaaggtcatgatcagaaatcacacatttgaataatccatgaatgaagacggtgtgtgcgattaaaaaatacagtgctttctagttaaaatgggagataagtgaaggtaatgaaatgtgcaycatttaaataacaaaagtattgtggctattagagattcactgtgctgttactctaatggtattaagagtttggaagtacaggccgggcgctgtggctcacgcctg

SEQ ID NO: 823376 - DNA, 436 bp, Homo sapiens
ctctctccataaatgacagcagaagagttcccagcagcaagactggaggatgggcttatggtaaggggagatgagtgggaagtcacagacattaatggtgaataatttacacttttcatctttacatgattaaaaaaatcagttaaactactgaacacacggaacatggatttacttatttgatcagtgtgttagtttttttattgctgctgaaacaacttactacatatttactgtcttaaaacaatacaaatttactggaaagacgtcctgtgttcatgggctggaagatttaatattgttaaaatgtcagtactacttaaagcaatctaaaaattcaaaatcccacaacgtttttgcagaaatagaaaartctcaactaaaatttatatggacattcaaggtacacaaaataatcaaagtaggcaaaataatc

SEQ ID NO: 823377 - DNA, 587 bp, Homo sapiens
gtgctttcaaaaataatacatggtaatggtacaaaatatgaaaaataaatttcaaggaaaagattacaatcccccatcaagaagatataataatcactgttagactgctagcataattccctcaggtcctgtaaccatgagggtattatgtaagttaaaaatgaatatcttttattcaacaaatatttcttgagtgcaaattctaggccatgctctgttctacatgttgggatacaataagcaaaacattctgcacatggccagcttacattgcattgagggagacagaaaagccacatgaaaactaaacttcataatgagttagagataaggactaaatagcaaagagttaaaggaaaattttggaggaagggtgccattttagagagcgttgtaattgaatcctcaatgagaatatacacttataaagtgcatattaacaatttataactaattagatttaaagtaagtcaaataattgatttcaagtcctttattatgtttcccygctaaaaaatgaattgacttctacttccgtcatccagatagtatagggtcacattgcctgaatacattccatgacctga

SEQ ID NO: 823378 - DNA, 583 bp, Homo sapiens
gacgaaaaaagagagacacataatttcctccaccccacaaagaacaagagacactaatgtcctgatccttaagtaaagaaaatgtttcaaggaggaaatacaaaaatgtatcaaataacaccaawaatttggaaaagataagagctgatagttgcttattgatttcatcatattggtaatgtgtacgagagtagttctaagaaatagtaaggatgcactgcttactattgatgtggacttgagagaattggcagaaaggaagtgaagacaatcactctatattctttttttccttttttttttttttgagatggagtctcacactgttgcccaggctggagtgcagtggcgcgatctcggctcactgcaacctctacatcccaggttaaagcaattctcctgcctcagcctcccgagtagctgagattacaggcacccaccaccatgcctggctaattttttgtacttttagtagagacgggatttcactctgttggccgggctggtctcgaacgcctgacctcgtgatccaccagtctcagcctcccaaagtgctgggattacaggcatgagccacatattc

SEQ ID NO: 823379 - DNA, 552 bp, Homo sapiens
atagctacctacattatcctttataaccttcattggcgtttatgttcatatttagaactacaatccaccacctgaggttctctttttttttttttttttttaagttccaaagtacatgcaggatgtgcaggtttgttacacaggtaaatgtgtgccatggtggtttgctgcacctatgaacccgtcacctaggtattaagccgagcatgcattagctcttttccctagtgttctccccacaccgccctctgctgagaggccccagtgtgtgttgttcccctgcctgtgtccatatgttctcattgttcaactcccacttataaatgagaatatgcggtgtttggttttctgttcctgccttagcttgctgaggataagggctcctagcttcatccatgtccctccaaatgagtgatcttgtttccttatatgtcttcatwgtattccatggtgtatatctaccacattttctttatcctatctatcattgatggtcacttcttttgattccatgtctttcctattgggactagtgctgcaatgaatgtacat

SEQ ID NO: 823380 - DNA, 632 bp, Homo sapiens
actagtgctgcaatgaatgtacatgtgtatgtatctttataatagaatgatttatattcctttgggtatatacccagtaatgggactgctgggtcaaatggtatttctcgttctaaatctttgaggaattaccacattgtcttccacaatggttgaactaatttacattcccaccaacagtgtaaaagtgttcctatttctccacaacttcaccagcaacttttgtttcttgaccttataataattactattctgaatggtatgagacagtatctcattgtggttttgatttgtatttctctaatgatcagtgatgttgagtatttttcatatgtttgttggtcccatgtatgtctttttttgagaagtgtctgttcatgtcctttgcctgctttttaatggaattttttcttttaactttgcttaagttccttatagattctgaatattagatctttgtcagatggatagattgcaaaacttttctcccattctgtaggttgtctgttctctctgatgatagtttattttgctgtgtggaagctatttaatttaattaatcccatttgtcaatttttgcttttgttgcaaytacttttggtgattatatcataaaatctttgccctatgtc

SEQ ID NO: 823381 - DNA, 584 bp, Homo sapiens
tgctctcctcaatctgctgagaccagtacttgtctagctcctcttggttcttctgagctagctcgtcgtattgggcctgtatgtctgccatgatcttggcgaggtcctgagatttgggagcatctaccttcacggtcaacccagagctggtgagctgggcttgtaggccttttacttcctcttcgtggttctccttcattaagagcagctcctccctgagagcctcgatgtctgtctctagctacagccaagtgacactggtgtcatcaatgaccttgcagagcccacggatgtcgttctctacagactggcacatggccagctctgtctcacacttgactctaaagccatcagcagcaaggtaggcattgtcaatctgcagaacaatgcaggcattgtccacagtatttgcaaagatctgagccctcagatcctcgatggtcttgaagtaatggccccagtctctgacctggggtcccttcttctccaggtgctcccgggtgttgctctccagtctctggttcttggtctcyaggctcctcactctgtccaggtaggaggccaggtggttgttcaggctttgg

SEQ ID NO: 823382 - DNA, 632 bp, Homo sapiens
gtgagaatacaagaggcgttagacatgtactctgctctaggaagagtttctagtatagaatatagattttttaataagcacacacataatttatagtacaatgtagaaaataacaagggtcataaamaagattcaagtaagatcagaagagggacaaattaaataggaaaggccagaaggaaagcagggaatatttcctacaggaagtggcagttttcagccttaaagagtatgaaagatttgggcatgggagtgaaggaaataatcactgttactgccaactcactttctttaaggtaactgttccaaattaattttctgcccctgcacatgagaaataaaacacattcccttagtaataatgactcattaaaactgattctcaaagggagaaaggtgataagtgggatgccatctcagaatgtgatgactgtcacttaggaaaaagctctccagatgctatgacctccctactacatcctccatatgagaaattgctatcaaggggatacaccttactaactgaccaatttctagcgggtttctacagatttctgcagtcttcattcatacaatgctagtctagatatttttttaaatgatcttttttcctcttaattcaactgagggat

SEQ ID NO: 823383 - DNA, 482 bp, Homo sapiens
atcacttagagtttctgttaaagtaataattattttaattaatatttttccaataaagagaagtatatttagaatgtacatagtagccatgttttaatcaagcaattttatggtgagttcaaaatattttatttgtttttaatatgaaataaattgaatatgtgcaatgtttttgtcataatcttaacagtgcaaatgatgtaccaccatatccatggccaaggtcacaactgcctcaaattacttattgcaagaagtaggacaaacataagtgaacacttcacttctgctctcatttcgttggctacagcaggtcattggttgtgcctaactaactgcaagcatggtaggctatggggaggggagtgaggaartgcaattcaaccatgtgtccagaggaaaaccagaatattggtgaacatccctcagaagaatagtggaaaaaacaacattttgtagttttaaaaaaactaatcagaaat

SEQ ID NO: 823384 - DNA, 571 bp, Homo sapiens
tatgtaaatttcccttttgacttcttcattgacccatttgttgttcaagagtatattgtctgatttccatgtatttgtgaattttccaaaattcctyctgttattgatttccagttttctaccattgtggtcagaaaaaatactttacacaatttcagccttttaaaatttgttaatagttgttttgtgctctaacatataatctgtcctggagaatgtttcatgtatgttggagaagactgtgtattctgttgctgttgaataaaatgttctgtatatgtccattatcacttgatgaaaagtgttcaagtccagtgttttcttattagttttctgtcttgatgatctatccattattaaaagtggagtattaaagttccctgctacgattatattgcaatctatttctccttcagatcctttaatatttatttcatatatttagctgcccccaatgttgagtgcacatatatttactgctttatcattatatagtgttcttgtctttttttttttttttttttttgagaccgagtctcactctgttgtccaggcgctggagtgcagtggc

SEQ ID NO: 823385 - DNA, 531 bp, Homo sapiens
gatgagaacaaataacaattgctttttcctaaatcaagttgcatatgcattcaatttgtcaggtctgaatttagacatatcgtttcacatactgtcttctattactctaattaccatgctgcacatatttttccaaactggcatttcaatatgctttacttttttaaaagctgatattcctaaaattaccattttccttctcactctttcctttcaccttaacacttttcagtaatgttttctcaaaaaggaactttcaagctcaaataactataaaggtaggaaagatgtttttaattaatcataaagtggtacttaaaagtttgcatctctaaatgtgaacatatatagagagagaaaaaatgaatttagcagctaaaaaaagttaagaagtaaattgttyttatcaaaacatcttttaaattattttacactgtagtttattacaatttaatttaaaaatgtatggtacttctgcaatattagtatgccttttcttgcctctaagttattttttaattatctctggat

SEQ ID NO: 823386 - DNA, 509 bp, Homo sapiens
taggctgcagtgaactatgatggcaccactgcattccagcttgggtaacagagtgagatcctgtgtcaaaaaaagaaaactaatatttaaatattatatgtttcaatatttcgaacaytttggattgaaaaatacagttctttcattgtctccaaattttttcatatgaatactaatagaagcataatttgattgcatctattttccatattattctaagacaaaagtatatttgctttactatcaaatttagagatgtctactgacacagcttttttcctttaaagttagcaacaactgttatctaatcaaagttactactgtaccataaatgtgttttatattttaaagatttataaattagtagaagataaatgtgatccctaagaacactacctttttgtttgcttgttcttcaggcttcatggtaggaaaattatcccctggctgcctactgatctgtcaatatcattgattcatttgaggattaaggaaagctgaagatgttt

SEQ ID NO: 823387 - DNA, 573 bp, Homo sapiens
tgctatcagttttctgatttatttttataggagcttatttaaaacatgaaagataacctgtaagtagctagcttggataacattgtgaaagcccaaccctgggtggggaatgttccttgtttaggccctaatttttctcttgggaatagcttccttgtccattgttctatgtggtccctgactccactctgggaggggttcttcctttactgttttcctccgtggctttctctaatacaggtattagggaaacacaaccttcttacagggtgcacagctttctcagcctgcattctgctcatgataggtacgtgtctaagatccagtcagaaaactttcacatacagcttcatgatttctttgactaattctctcaaatcttaataggcttttaatccatttccttccaaaaagttttctgtgccagagatcttttagagagcggagttttcatgtaacttgtgctttttttctatttcgtcttcctattgcgctatctattcyggaaatgctatgcctttattcttatatttgctttcaggtatcttaattcatttaagttttttaatacta

SEQ ID NO: 823388 - DNA, 595 bp, Homo sapiens
ctccgtttgtacctggtggattatatattatattaattcataataccagctctgccaggctccctacagttacaattattaaagctgtaactgaaacgttatctctcatattgatcttcaaccagaagttcttgtcccgaagcttttgtttcacattaagacactaatgatcaccttcaccaaatgagcagcttaatagtcacaaaaagctaaatgaaaagactttgatcaccacctttgagagcactgtgttccaacatctctcccatccataattggcaaacactaactgagcttttaattttttttaaaaaaagaaacatacaaaatactctaaagaaacttattttttcagaaaaattttctccttttttgttgtgtttgccaagtatgcttagccctacctattctatttgttttccaggtcatataaagcatctgtgtgcctataggttatttctttatatgtgatttttaacaatttattcattttcttttcataagaactgagatgagttatraattcagttgaagtgatagaaattatgcagcacttttgagtgcctatttgatttacttgttaaaagaattggta

SEQ ID NO: 823389 - DNA, 507 bp, Homo sapiens
ccagcctgggagataaagtgagacattgtctcaaaaaaaaaaaaaaaatgcataccttaatttaaagaaatattattgctaaaaaatgctaacaatcatctgagccttcaaagagtcatatccyttttgctggtggaaggtcttgccttgatgttgatggctgctgactgatcagggtggtgatttctgaagggcaaagtggctgtggcaatgttttgaaataagtccacagtgaagtttaccacattggttgcctctttcttttgtgaaagatttctctgtagcatgtgttgctgtttgacagcattttacctacagtagaatttctttcaaaattggaggcaatcctttcaaactctgctgctgttttataaactgagtttatggaatattccaaattttgtcattccagcgacattcacggcctcttcactggggtacattccatctcaagtacattctttgctcatctgtaagaagcaccttctcattaaaattttatcatga

SEQ ID NO: 823390 - DNA, 507 bp, Homo sapiens
ccagcctgggagataaagtgagacattgtctcaaaaaaaaaaaaaaaatgcataccttaatttaaagaaatattattgctaaaaaatgctaacaatcatctgagccttcaaagagtcatatcccttttgctggtggaaggtcttgccttgatgttgatggctgctgactgatcagggtggtgatttctgaagggcaaagtggctgtggcaatgttttgaaataagtccacagtgaagtttaccacattggttgcctctttcttttgtgaaagatttctctgtagcatgtgttgctgtttgacagcattttacctacagtagaatttctttcaaaattggaggcaatcctttcaaactctgctgctgttttataaactgagtttatggaatattccaaattttgtcrttccagcgacattcacggcctcttcactggggtacattccatctcaagtacattctttgctcatctgtaagaagcaccttctcattaaaattttatcatga

SEQ ID NO: 823391 - DNA, 621 bp, Homo sapiens
tttctgcatttccaactgaggtaccagattcatctcactggggagtgtcggaaagtgggtgcaggacrgtgggtgcagtgcatcgagcgtgagccgaagcagggcgaagcatcgcctcactcgggaagtgcaaggtgtcagggaattccctttcctagtcaaagaaaggagtgacagatggcatctggaaaattgggtcactcccaccctaatactgcacttttccaatggtcttagcaaatggcacaccagaagattatatcctgagcatggctcggagggtcctatgcccacggagtcttgctgattgctagcacagcagtctgagatcaaactgcaaggtggcagcgaggctgggggaggggtgcccaccattgctgaggcttgagtaggtaaacaacgtagccgggaagctcgaactgggtggagcccaccgcagctcaaggaggcctgcctgcctctgtagactccacctctgggggcagggcatagccaaacaaaaggcagcagaaacctctgcagacttaaatgtccctgtctgacagctttgaagagagtagtgattctcccagcatgcagctggagatctgagaatggagagattgcctcctcaagtgggtc

SEQ ID NO: 823392 - DNA, 621 bp, Homo sapiens
tttctgcatttccaactgaggtaccagattcatctcactggggagtgtcggaaagtgggtgcaggacagtgggtgcagtgcatcgagcgtgagccgaagcagggcgaagcatcgcctcactcrggaagtgcaaggtgtcagggaattccctttcctagtcaaagaaaggagtgacagatggcatctggaaaattgggtcactcccaccctaatactgcacttttccaatggtcttagcaaatggcacaccagaagattatatcctgagcatggctcggagggtcctatgcccacggagtcttgctgattgctagcacagcagtctgagatcaaactgcaaggtggcagcgaggctgggggaggggtgcccaccattgctgaggcttgagtaggtaaacaacgtagccgggaagctcgaactgggtggagcccaccgcagctcaaggaggcctgcctgcctctgtagactccacctctgggggcagggcatagccaaacaaaaggcagcagaaacctctgcagacttaaatgtccctgtctgacagctttgaagagagtagtgattctcccagcatgcagctggagatctgagaatggagagattgcctcctcaagtgggtc

SEQ ID NO: 823393 - DNA, 631 bp, Homo sapiens
ctttccactcaaaataatccctacatcaaagtggtatattttggggaggcagactctgctgtcctttaacgttaggcacagatcatttttggaaaagaccaagaagtatatgttctgaattctaataaaaatggaagaaaatacaattattaaaaatcaccgggagccaagatggctgaataggaacagctccagtctacagctcccagcgtgagtgacgcagaagatgagtgatttctgcatttccaactgaggtaccagattcatctcactggggagtgtcggaaagtgggtgcaggacagtgggtgcagtgcatcgagcgtgagccgaagcagggcgaagcatcgcctcactcgggaagtgcaaggtgtcagggaattccctttcctagtcaaagaaaggagtgacagatggcatctggaaaattgggtcactcccaccctaatactgcacttttccaatggtcttagcaaatggcacaccagaagattatatcctgagyatggctcggagggtcctatgcccacggagtcttgctgattgctagcacagcagtctgagatcaaactgcaaggtggcagcgaggctgggggaggggtgcccaccattgctgaggcttgagtaggtaaa

SEQ ID NO: 823394 - DNA, 620 bp, Homo sapiens
tgagtatagcagagatggaatgatcckgagtgcattatgccaataaaccactcaattacctctaagctttgtgttatatgagagaatacactttctttatttttaagctgcttgagttgggttttctttacttgctgctgaaagtatcctgacaggtaagtgtgtagtgtgtatgcatgtgggaatgcaaggaggattaaatacagtagaagtcagagtgaaaggaaggaaatagttaaggtcatccctcatgaaatggaagggatatggcagcatacgttaggtggtatgtaagctgagaacaggtggaaaacagcccacatctacctggattttcctctgtacctcctgccatacgtttatttgccctgcatggattgttaaaaagtaaagggaggcacagtaaaattttaaagagtttatttgagcaaacagtgattcatgaatcaagagtagcagtttcaaaccagaagtggttcaggagatccacagagagaatacaagtgggaggcatttataggacaaactcaaaagtaatgcaaagaaaatatttgattggttgcagtcatacagttgccttatttggtgtatcccattggaaaatgcctagttacataagt

SEQ ID NO: 823395 - DNA, 518 bp, Homo sapiens
ggtgtctcatgcctctctaaagtatgtaaaaccaagctgcatcctgaccaccctggggacatgttctcaggacttcttgagggctgtgttatgggccatggtcattcatatttggctcataataaatctccttaaattttacagagtttgactcttttcattgacagcaataatctttttgtgatgaatttcccaggtgttctttgtgatgcttgtatttggatgtctaggtctctagcaaggccagggaagttgtcctcaattattcccccaagtttttagaattcttttcttcctcaggaacactgattattcttaggtttggtcatttaacataatcccagacttcttggaggctttgttcatattttcttattctttttttttttgtctctgttggaatgggttaattcacagaccttgtcttcaagctctgaatttctttcttctcctgttcarttctattgctgagactttccagagcatgttgcatttctaaaagtgtgtccaaagtttcc

SEQ ID NO: 823396 - DNA, 646 bp, Homo sapiens
acatctactgttttttgatttttttgattgtggtcattcttgcaggaataaggtggtattgcattgtggttttgayttgattttccctgatcattagtgacgttgagcattttttcttatgttggttggccatttgtatatattcttttgagaattgtttattcatatccttagcccgctttttgatgggattgtttttttcttactgatttgtttgagtttgttgtggattcgggatattagtcgtttgtcagatgtatagactgtgaagattttctcccactctgtggattgtctgtttactctgctgactgttctttttgccatgcaaatgctctttagtttaattaggtccagcagtttatctttgtttttattgcatttgctttgccgttcttggtcataaaatccttgcctaagccaatgtctagaagtgttttccaatgtgatcttctagaatttttgtagtttcaggtcttaggtttaagtccttaatccattttgagttaatttttgcataaggtgagagatgaggatccagtttcattctcctacatgtggctagccaattatcccaacaccatttgttgaatagggtgtcctttcctcacttcatgtttttgcttgctttgttgaagatcagttg

SEQ ID NO: 823397 - DNA, 658 bp, Homo sapiens
tcagctcagcgaacacctgcttgccaggtgtgattcattcccacgggttcttaaagacctaccgtggccacagtgtctggcagggaatattcagagactattaacaaagtaggcagaaaatacaattttattgtgtctgaagaatataagtatttacatatatgtgttaatggcacatattaaagagaagagcaaaagaaagctgaggaaaatttaaaagtaaggacaaacccatgagcaaattcacgaataataatcagagttgagaaaacagtctgggccaaagctgaggtgaaggaaaacaatacttaaaacatgttctttattgtttagtaggcaaaaagtagactcgtttcagaagaggtagagaagaaaaaaaaaagtgtgttattgggaagatgtgaaggcaccgaatgaaaatgtaaaatactatttttgttgctaaaactagttgaaagcaattcatatgactactacagaatattaaaacctaacacactgtaaaagcctcgatttttaaaatttgttaagtatgtaakatttgttaggtatgtaaaggtgaatatatatacaaaatagaagccactgagcattgaaagaatatatagtatatgtaagatttgttaggtatgtgagatttgttaggcatataaaggta

SEQ ID NO: 823398 - DNA, 577 bp, Homo sapiens
aaaacttgcttgaattccttccatgaaaatgggcttttctaccacaaggccaggctgcacattttttacacttttacatcctgtgccccttttaagtatcagttcaactttaggtcatttctttactaacacatataagaacaggattttagaagcaaccaggccacttctggaatgctttgttgcttacaaatttctgctaccagataccctaaatcaccactatcaatttcaaagttccagatccctaggacaggggcaaaatgcagccaagtttttgctaagacataacaaaagtaaccttattctagttcccaataagttcctcatttctatctgagacctcatcagcctggacttcattgtacatatcactatcagcattttgattatgaccatccagttagtccctaggaagtgtcaaactttccctcatctgtcctcttctgagccccacacattcttcccaccactgcccaatacccagttccaaagtcactttcacattttcaggtwtatctatagcaatgccccacttctcagtaccaattttctgtattagtctgatctcaagtgg

SEQ ID NO: 823399 - DNA, 640 bp, Homo sapiens
gcctacctgaccattccctcgatcttctttttgtatttggcatctattttgctgcggtattcaggcctcatcaacatagctgcgaagctgaaagcagagttcttcaggcctgccctgtgacactcaatcacagttgacgtcaggatgggtacaatgtctgcaagagaaaaggggagagcagcaacagcacagtgtctgctgtcctcagtgatacaggcgggattccaccctggttctgtaggaaaacagggtcatggtctcttgaactttgctttttctgcaaagaaccagatatgatctgtttaatgaggaaagtacgtagctgtggggtcaggctaactgcccatcaagtgcttttcctttgatgacaccatgttctgccttgtaacactaggacctgcaccccttgaggcaacacttccatgagtttcctttcatgcctcttagatattttttgcatctgacaggactgctgataaaagcattagggggattaatgactttatacactaatctctctgcaggcatcaaattctttcttcaggacagacacccagaattacyggctcaaaaacaggaccttttaaaaaatactcttaccacaaattgccaaactgctttctgcaaaggccataccaat

SEQ ID NO: 823400 - DNA, 611 bp, Homo sapiens
aactggaatgataaaatgtcaatctgcttcagaaaaatcaatacctttattttcctcatccaggttgagtataacatacatgtcttttaagtcaaccaagtcttggattttaatrctgaaaaacaaaaatgcattattaaaaaatatatatgatctttatataaaactgttttaattcacaaaaaattacaaaccatggaataggttactggtctccaaaatgtgatgtacagaatgatctactgggttaagaaaatattagaatttctgtacttcattatattttatctttaaacttttgggtttgttgttgttgtttgtttgcttactgtgtgcagagatggggggcgggtagggttgtgcctggcttaatctctgatctatagcttcaggaataaggaggttaaaattgtcctgaagaaatttgggtacgaaaatattctcctgagtagtattaattattgtaagatgatacaggtttctctttacaatgtgttccctttctcccctgcccagagttctttcatacaaaaggaagtgaattatagtatagaaagaacattaaatttggatcagaaggatcaggttgaaagctctgaaaaatgcgggca

SEQ ID NO: 823401 - DNA, 595 bp, Homo sapiens
atacacttcagatgatgaagagaattttcatattcacagacattttgtagaggacagttaaacccagccagcaatgataattgagtaacatcggttgctcatgtttttacttattcacaagtcactgtttaccaaaattattcaatggccctcccatcctggaccagacaaaaatcactctttgtcctagctaaaggaaagatccactccaggattttaaaaacaatacaccattttactccagagattacgagttacgttttaatggcaaaggaagcactttatgtgactatttgaacagtaccacctgttgaaacttgtaatgttattgcctgagactcttcagaattcaagatttaaactttcctctagtcgtgtgagagctgatgtgagcactgccaaagatacaccaatgagatcctctgtcctcaaaactcagatatttcgagccctgcttcggggaggaacagctctggacactggcagcttcccgacaccagcagctgaggcacgttatgtcaacaagawggaacctgcctgatctcactttgccaggtacactggaacccaaaccacagcaggatgaccatttgat

SEQ ID NO: 823402 - DNA, 534 bp, Homo sapiens
ttaggtgtagaactgggcctgcttcacaagaatcgcttgaacccaggaggcggaggttgcagtgagctgagattgcgccactgcactccagcctggctggcagagagagactctgtctcaaaacaaacaaacaaacaaaaaacttgacccacctagagacctatatgctcctttctcattaagaagtgttggaggctccacaaggttcttttctaatgaaacgttcttagagatataaactaacaagtcattttatctgtctttcatttaaaactgttgtcatttttacctcttaataacttttggtaaattatttaaatgttgaaacaacaaaaagaatattgaaaagtacaggggatgatttagagagtatttataagtaatctccttatatagtttccttgaactctaagtaggaaatgtaaaaaagtgatgacatccaaagtcrgcttcttttagctactgcgtaagagtgaaaggatacactgctgattttcaacattagagtttaccctaactccattttgactttaa

SEQ ID NO: 823403 - DNA, 620 bp, Homo sapiens
aggcttctctttccatcattctggtacacagctctgtgccactcatctcctctctccatggcttttctggagcaaatgtgtatatatygtacagatgccaccagggctctgttcctacatcctcagaccttaccattatgtgcatgtagacccagctcctgatcccagctctcatctctttgcctaagatagataggtaggtaggtagatagatagacagacagacagacagacagacagacagttattcccatggaagagcagctccatctgttttttgtagtcctcggtgtaatcaacctactagcctgaaaggcaggattcttacacacttctctccatacctattttaacctaggttcccctagaagcagatcctgattttgaaggattcagtgcgaatagtttatttggaaggtgaacctagaactcatagaagagacagggaagggtggggagtgaagaaagtatgcaatatcaagttgcccctttaggtgactggagtggaatcttgctaggctttctggtagtcggtgtagaacacacgttagaattattttaccaatggttgagcacttggttgaggcacttactggttgagggctgctccttggtggtgg

SEQ ID NO: 823404 - DNA, 602 bp, Homo sapiens
tagccagtaaacaaaatggctaaataactaaaatggaagttagatagaataattaggtaaaaaatacaatggtgctttgtttatttttgaagscttgttgtttttagttaccttttcaaatttataatactcaaatctagttttcacagtttgtttagttgttacagctgcccttctctgtattctcgatatgctcccttctctgtttttcatgactttttatttgtgctcttatttcttcccacctcaattcatttttttaagttctcagggaataaatattaataaatagagagagtgccttgaatataaaatgcatattttctcataagtggcattaatttggcttccctttcattacctgtgttttctttaatatcataaaagagaatgttatccatgcatctactgacagaaaagaaaatgagtttttctctttgaaagttcaccttaaagctttttgtcatgcacaactgctttaaaatagcgtgggtgtttttttgttgttttttttttggtttttttttttgtttgtttttctgaatgaatggcctgcagctgctcttcagggtttcctttttttttttttttttagtatttta

SEQ ID NO: 823405 - DNA, 621 bp, Homo sapiens
acaagtgggtcattgagtggtggtaaaaggagccagtcttacttctatcttttggtttcaagacacaagtagtctaactaaagggacgtaggactatatactggccattgattcagtgcatgyactgcattctggaagtcaacaccttgaccccacagagtactcattttaagcttatactttaactgagattgtagcaggcaatttcatctgtctcttaggctgactgcatgtgggtgattgggtacctgaattccatgtacatgtaattattggtaaacttcctttgccgtaaattatgtcttttccagtgaagcaatgctatgtgcaatatcacattgatagttaaggtatatctttgcaaagtcatgctacatggtctctcccacccaggaaagaactctggaagaagggattactttcgataaggagaaatcacagctctccaggttgtaaaagttctgatgtaacttacctgccagtaaatggccagatggtattctcaagtaatgctgtcatagagagggctcaatgtaagtttttgctgctaataggttgtacattcagtagtgacaaatagataaatcttgtagagaaggagtctgtgttactaagtgtact

SEQ ID NO: 823406 - DNA, 642 bp, Homo sapiens
gaatgtgaagaattgctgggtagccatcagaaggtaggagaaaggcattaaatggattctttctgagagcctccagaaagaatcaacatttctgacaccttgatttcagacttctggcctccgtatctgygggagaatatatttattttgttgtaagtcactcagtttgttatagttgtcctaggatactgatacacaacgttattttttaaataggtaaaatatatgaaaacatatttcacaaaagaagatttttctatggcaaacaggcatatgaaaggatgcacaacatagtttttcattaaggaaatacaaactaagacaattatttactagtacacacatattagtagggctaaaatatcaattactggtgaggatgcaactagatctttcacacattgatggtagggatgcaaaatggtacagccactttggaaacagtttggcaacttcttataaagttaaacctagtcttacatggtccagctgaccaaacacgtgaaaacttaacgtcaacacaaataattgcacaaaaatgcttatatcagcattattcataattaccagaacccaagatgtccttaatacgtgaatgaataaattgtggtgcatgcatacaacggaataccattcagcaat

SEQ ID NO: 823407 - DNA, 567 bp, Homo sapiens; identical to SEQ ID NO: 820446

SEQ ID NO: 823408 - DNA, 632 bp, Homo sapiens
ccttcagtttgtcaacctaagaaaagttatcatctgaayttaaatatgcatcacataaaagcttatatattttaaattaaaacgtgtacacaatatttgtattatgtttagtggtccttcattttaactaactttacctgttaactgactcattactcttcctaatcacattggataaaaaggctcctttcgtccatctaataaagagtacactaaaggatagaagttcactattatacttaaaacaaatagctcactgctaaactgtaaaaatcagaaaagagaaaaataaacttgatattatttggtttataatgcattgatttatttcctaacttctcacatagataaaatcgatacatttgaactcactaatgtattaaaaaaataccatttgtgtgaatttattctgtctaaagacaaccataagagaattatttgaattttatagactgtgctttccttttggaaatgttttattgccaaagaaatcagagataacaatttatatctcaatatagaagaaatcataaaatagatccatggttaatagaactatatacatctagtattttaaaaaggagtttaaagatcagcacgtccttcttttactagtaggatccagcaaaacg

SEQ ID NO: 823409 - DNA, 559 bp, Homo sapiens
ttagtctaggctcttctcacatatatcagtcctcagagcctcacaagaccttccgaaggctttggctgtcttcagagatttgctagcatgtrgacaggcaaacctaaacatgcaccaaatagatgccccaccatctggggcattctccagggctgttggttcccaccaccatacaatggcaatctgtggaagaacaaagttatgtcattacaaaacaaattaagaatgtcatttagtgctatttgtgaaatacagaatatatgtttatttgtattaattatacatggcaagtcattaatcccagcaagctcttgaactagtttcctaactcacaaatgggtatatttttaagcagatttaatgaatttgtatggtgctgaagaaacttttattgatttcctagagctgccataacaaagtaccataaattaagtggcttagaacaatacagatttattgccttacaggtctaggggctggaattctggaatcaaagtgtcgtcagagccatgcttcctctggaacctgtagggaaacccctccttgcctcttcctagct

SEQ ID NO: 823410 - DNA, 560 bp, Homo sapiens
cacagaaaaccgacacctggaattactttagctcatttccgcctggttttcatcctcagctggcaaagccaccctgctctgtgtctccgggacacaccctgtttgggaatgttggtaatcctgkgaccccatgcgtctccagctccccactgccaccccacctgaagatggggacagggggcagagagttttgtccctttccttgcatggtagatgaagcaatagaggattggagagatgatatggtttgcctagggtcacacagcaagccagaggcttctgtcccagaaccacatctcccagagctcgttgctgctgcatcttccctgggctcctgctggctctgtttctctggggcgggggcagtggtggggggcacctgacaggtctgcatgcggagcccacctatgaagaccagctcgatggctcctgtccttaggagcccactctcaggtgggggacagacacagaaacagatgcaggtaacgtggtgtgatagatgcaagaagagaggcgaccccatgcagggtccccgaacccaggctgggggaagaatatgg

SEQ ID NO: 823411 - DNA, 563 bp, Homo sapiens
cagtccctggggataactccaaggggttcgggctaattatctttataktgcagccatccatcactcttgtgctcttccttagcttcttccagagggaaacagccgggaaggatggtatatataagaaagtcttcctaacagttatctgggtagtcctctggcccaactttctacaccagggtcaccttcataggccggtatttaatgactggctcttaagatgatttctttttttatttttatttttttgtagagacagggtatcgctatgttgcccaggctggcctcgaactcctgaactccagcaatcctcccacctcagcctccccaaatcctggaattacagtgttaagatggtcttaactagcaaaggacaaaggacaaagaagcaggaaggggagcggggaggcggcacatcagagccctttacccttctctacctggcagttacagttattcttcaagacaaattcaaatgggaagccttccttggtccccaaagcagagagagttcagtcccactggatatggtacattgatggtcacgatggaattatgtaaat

SEQ ID NO: 823412 - DNA, 643 bp, Homo sapiens
cacactagatgtgcacagaatccatttttgttacagatcaggtttcaagcacaaacgcacaggtgcccttcctggcagctgcttccaatggcaatgcccagcagctgcctgtctctcctgacatgcttaagggtgcaggccgaggaaggccagtgggctgtctgcaagttgagggaggcactcaaggcagaagtcaagtgctcctgggttgcaaacctggaataaactggaatggttgctaggacaaggagcctcatgcaggcaggggtggcatgtttccagtgtaaccatcatggaatatatgtaatcatagcagtgtaatgataatgctatgcaatttttgtctccccttgactccaaatccacgctgggggccaattctttgcctagccctttgtgaatttcagggcatttccccatgacttttcttatcacccttaggtaataaaaagtactctggttcccttaagtcatacaagacagacccagttctgcataaatgtgttccgttcagtgtaatgagtaaaactttcattaataggcatgcytctccatccccagcctgacacactggcctcctggaggtgggtgggagtggagctgcttctctccttcctccaggatccccttgcctttgtccgcc

SEQ ID NO: 823413 - DNA, 618 bp, Homo sapiens
gttatagtgaacaactcacaattctcttaaaaaattcaagattacccactcttctgcctctttgcacaagkttttcttttggcccagaaaacatttcctcacttgtactgtacccttactttcctataactctttacgggtgcctatactattttccaccataattgcttgttcctatgattatctcttgtgttagagaaatgttcccataagaggcagactaccatttcatcatgggttagcatcatgaacagacaaacacacctgaattttcagttaggatttgaatccagagtggagggaataaagtttccgggcaagaggaccttggacacaaatgcctgcaggtggaaataagcatgacttgtttcagagactagggacgaaggataagagaactcttccgcataaaaataagtatatcagccaggcatggtggcttacacctgtaatctcagcactttgggaagctgaggcaggttgatcccttgagctcaggaggtcaagactagcctggacaacatgatgaaaccctgtttctacagaaaatacaaaaattagccaggcatggtggcatgcatctgtagacccagctactgtggcggctgaagtgggagg

SEQ ID NO: 823414 - DNA, 518 bp, Homo sapiens
cagagatatctaaactggagtgtggaacaattactagcaccgttttacccataagggaatttcacacctaatggcaaagcaagggtatgttttctcaagattyccactgtgtaatgtagcagcatttcagtgatgcctgcaatgcatggcaagataaaataatgggaagtgcagtaaacttatccaatatctgcgtacaacttatgcgtgggaattaactccctatgcactctcagtctatgcagctaatttcctaggcagctaattccacttctagctctgaagcatattatgtgatacagacatggccaaacagagtatcattttatacggtgctcattactaactcacaagcaggccaatcatagtaacgagactcacactgttagaggcatcaaggtagcagactcctttcctgctggactcaaaccagaaagattgtgaatatgaggcttttgcagctctctcatcaccacaaggagtcgtagaatgaagcctgagcatatctcacatagatg

SEQ ID NO: 823415 - DNA, 616 bp, Homo sapiens
cctcagcagcagagcaccgcccacagcgggagtctaagcctctgatcaccccgagaccctactgaaagccctcagcagcacagcacctcccacagcaggagtctaagcctctgatctcaccaccaggatctcccagcctgatctctgcctgcctcctgtccacgcacagcacgatgagagatcccagcccctcacctgccttgcctccctcctcatctgcctgtgtctcttctctcccctgcctccctcctcatctgcctgtgtctcttctctcccctgcctccctcctcatctgcctgtgtctcttctctcccctgcctccctcctcatctgcctgtgtctcttcttctctgttctgtttctggctacatggaaatatatttttatatatggaggaagctttcaaggacctacctacttaaaaaaatcaacctatttttgagaataaagggtacagggctgtgaaaatccatggctctgccaaagcctcgcaggtggagcaggyggcccatctgcataaatgcagaatccacggcaccactgcctcacgtattcaccgcaggggccatcagacactgggattttagtcattgatttcccgcgtgttcgaagacat

SEQ ID NO: 823416 - DNA, 616 bp, Homo sapiens
cctcagcagcagagcaccgcccacagcgggagtctaagcctctgatcaccccgagaccctactgaaagccctcagcagcacagcacctcccacagcaggagtctaagcctctgatctcaccaccaggatctcccagcctgatctctgcctgcctcctgtccacgcacagcacgatgagagatcccagcccctcacctgccttgcctccctcctcatctgcctgtgtctcttctctcccctgcctccctcctcatctgcctgtgtctcttctctcccctgcctccctcctcatctgcctgtgtctcttctctcccctgcctccctcctcatctgcctgtgtctcttcttctctgttctgtttctggctacatggaaatatatttttatatatggaggaagctttcaaggacctacctacttaaaaaaatcaacctatttttgagaataaagggtacagggctgtgaaaatccatggctctgccaaagcctcgcaggtggagcaggtrgcccatctgcataaatgcagaatccacggcaccactgcctcacgtattcaccgcaggggccatcagacactgggattttagtcattgatttcccgcgtgttcgaagacat

SEQ ID NO: 823417 - DNA, 591 bp, Homo sapiens
tatccaactttgaatgatactacagggctacagtaacaaacagcatgacagtggtacaaaaacagacacacagaccaatggaaccgaatagacagcccaaaaataaggttacacacctgcaaccatctgatcttagacaaagctgacaaaaataattaatggggaaaagactccctagtcaacaaagggtgctgggataaccggctagtcatacgtagaagattgaagctggaccccttccttatgccatgtacaaaaagcaactctagatggattaaagacttaaatgtaaaacccaaaattataaaaaccctgggagacaacctaggcaatatcatcctgaatgagcaaagatttcatgattcatgcaatttctgcaacaaaaggggaaattgacaaatgggatccaattaaacttaagaacctctgtagagcaaaagaaactatcatcagagcgaacagacaaactaytagaatgggagaaaatatttgcaaactacgcatctgacaaaggtctcatatccagtatctataaggaacttaaacaaatttacaagagaaaaacaaccctattaaaaagtgggcaaagga

SEQ ID NO: 823418 - DNA, 585 bp, Homo sapiens
gattttaggaagtaaccagatcttacggggggtttgaagtcattttaacttttatgacgttcgagtttgtgttgaccttttagtgcccaaatttatgctcttgagcattttgagctgagcttattcattccacacagtatacatttataaatattttaagtatgaatttagtaacaaccttttccctcataattatgctaactgatgtagtgaaatgttgagagaatcagatattaatggttggctgagctggggcaattaggtggcatttatgagtcttttgttatggcacacggttccaaagtagatcatttgaaagcattaatttcatgtgcaagcgccagtacacgattcagcaattacaacgagttatataagttagatatcaaaactatgaatgcaccttaatgaaaaaagagtcttattttgcaccacaatgaattttttcttaatatagaaagtgactcatgtgtctmagtggctaataaagaactgtgttcgtgttcctagcaaaatgcaaaatcataactttttaaaaaattggtgcattttattttatataaattgtgcctcaaaataagatag

SEQ ID NO: 823419 - DNA, 629 bp, Homo sapiens
tcacacacatgtacatacgtgtacacacatgcacaggcagtcacacacatacatatgtgttcacggatatgcaggcagtcacagccacgtgtgcctatagtttcagagcagaaactttgtatrcctacagttttaaccagcttttaaatattcattataaattgtaaataccgacagtccccgatttaaccatggtttgacacacaattttttgactttaggatggttcaaacatgatacaggtttcctgaatgccatgcgagtgcccctctgcttctgtttttcactttcaggatagtactcaatgttgcatgagatatatatccaacactttagtataaaacaggccttgtgcgaggtggcttttgcccactgtaagctgatgcgtgtgttctgtgcacattcacgctgggcaaagctgagccgtgatgttatgtggattaggtgtattaaatgcatttttgacttacggcattttcagctcatgatgggtttattaggaagtaaccccattataagccaaggagcgcctgtccctgaatgcaggaacttggtgttcttagactacaggaatagctaattgcatcccatgtacatgggataattcttccaacccagtctcctcatct

SEQ ID NO: 823420 - DNA, 590 bp, Homo sapiens
agagccggctgagacgtcatgtgattctagagccttttcaggaagagcctgcacttctggacccttccttttctcaaayagccaagaccctgaggaacaggctgcccgtcgcctcaggggctatccccgacccctcctggttggacacacctcctcgacatcagctataaaactatcactttactgaggcagagcattgacttcttaacctacagttacaaaaaataaaaacaaaactggttttctcttaggagaggaaaaaacgcgatggacctttccaggacaagggacgtgagatgcagaaattcccacctggcccctccttgacggacaggaaacacaggaaacccaaccacattccggttccccatgatgcagagaccagccctaatgactgcaattacggctccgtttaacagacaactgactggatgttacaatggagctgtcagccccactgaattaatcctgctggaggaccattttcatctgttgctcctgttccaggcaaacagccctggtcagctctgggaccaagtccaggctctggagagggccggtgttcaaggccatctgtaatttagttcagc

SEQ ID NO: 823421 - DNA, 633 bp, Homo sapiens
ttgaaaaaaaaaattagccaggcatggtggcacatacgtgggaggttgaagasggaggatctcctgagcccaggagttcaaggctagagtgagccaagattgagccactgcactccagcctgggcaacagagtgagaccctgccccttacaaaaaaacaattaggacagagcctgagtccctgaagtacggacatgccttcctggatatcagagcccctgtatgaagttgactgagctgtctgtagttaccactcaatgtctagagtaattgagacctcagttcacgtgagacctgaagaccccaatgtgacatggttaagcgcagctattagtcccctgcagatgtgtgcaaacatgcgaacacacactcccctgtctagacacaccctttacaactgagaaaacagaacctcctttcacaaattagaagtaattcaaacttggagccaaccaatgcacagatgcaccagaaagctcctcccaagcactgcatgagcctagacgtctccaggtgatgtgcctaatgaacccatcgaggtacctggacgtctccaggtgatgcacccaaatgaacccatccaggtacctggacgtctccaggtaatgcacccaaatgaacccatggaggtacc

SEQ ID NO: 823422 - DNA, 551 bp, Homo sapiens
ctgtgtctgtgcgaagaactaggtgcagtgcacagaatgaaaggcgccgtccttgttaaaaaggacctcagagcctaactgaaaacagacaatagggaagaagcagacacatgatcaattaattgaaagaggccacaggataaatgaggaggaggccgtgtgagaaggttactccactcctgggatctgacttccgggttagggtattaccttggccactgccctctgtttcagcatctcctacgtaaagtggtggtaatactcatagctgatatttaaaaccaccaaacagccctgcttgctacctgcagtcccaatctacgagatgcccttctgtcatcagcaatggcacctcttccccctggaaagcaccctgggctgctcacggaaaaacgatcacctgagtggcggggccgcaggtagtgagcttttgtcctggagctgtggtgtcctactcccagttccacctgggttggttgggagaggmcttgctgaggaggggcatttaaaatgagacttgaagaataaaagacacctgctgggtggcagtt

SEQ ID NO: 823423 - DNA, 506 bp, Homo sapiens
aaacctttaccaaggaaaaaataaaggaatgttacccactgagatcratcagttcatctaatcacagatcgtcaaacagtagtgttcccacctaggagtgtcaggaagttgtgtttgtatttgaagcagaaaactgggctccaagtgagcacgttcagctttggaaactatgttatttaacataggctagcttgttttcagattttaaaagtttaaaaagaaaatactttgcattctaaaaaaaaagagagagactgagggagatgtatgctcaagcaatgggtgtatcctcttgttcttcaccaaacaaggggaaagttttacattcatttacattcattttacaagtttgtaagacatatacagcttagggagaaaaatatgaaggcctcggttctggggagaaagcatgcgggcatttgtagtactgagactaaaagtaaggggagaaagagttgctgaggtaaagctaagttagaatatgaattattgctactataaatgac

SEQ ID NO: 823424 - DNA, 626 bp, Homo sapiens
gggcattaatctactcatgaaggatccatccacatgacccaaacacctcccattaggccccacctccaacattggggatcaaatttcaacatgatgtttggaaggaacaaatatccaaattatatcagatggggaggcttaaacaataaatatttatttctcacagtttctggagtctggaagtccaagatcagggaggggaccagcatagtcaggttctggtaaggaccctctttcagggtgcagacaactgacttctcatattctcagatggtgaaagtacggtgaaagagctatctgatgtatcttttataaaggcacttaccccattgatgagggcttcattctcatgacctaattccctcccaaatcaccttctaaaaccatcatattggggattagaatttcagcatgtgaattttggggggccataaacattcagtccatttcaggatgttaattcgccccccaactaataaatagattcgatgcagttgcatattaaaatcccagcaaatatcattgtaaaacttgacaagmtgattctaatatctgaatgtaattgcaaagtgtcaagagtagccaagatgatcttgaagaagagaacaagtttgtcagaaatgtgt

SEQ ID NO: 823425 - DNA, 594 bp, Homo sapiens
aatccatgctaagagtttccagagtgttcatccctcaacacttatcatccatgtcatggrgaggtagagagtaatttccctgaatagccagtggtctatgggactaacctttcatttgggaaagacagatctggaaagcgaacccagttaacagtcaaaaacacattcgtttcataagaggaaagtggaagaaagcccctgaagagaacaatgaaggaaagcaggtacacgtttgccaaggacattaacaaaccattgctaatgtgtgcctgaaatctgatttccttcttgatgtattaagataatgcattggcagctcacactatacatggagagaaatattcatattaatttaagacgttctcatagtttcaaaggtagagagcccctcagtgtctgcacaggtagaatttaggaaaatgttcagcctatgtgagagctatagtgtggtagaggttgtttaatccatgccaaattctttggacgtgattttctgcctgaaactatagtcttctttgcattttgctggcccaatgtcatcaagtttcacacaaagcttggaaaaatagcccacaagtgtagttggatcagcct

SEQ ID NO: 823426 - DNA, 619 bp, Homo sapiens
aaaactgatacaggtattctggtgaygctactgtgctgcttagttaccctgaacattattttttcactggattcatggtacctcctagtttttactgttgggtacttgtgtgagtaagtgtaagaaaatgattgcttctcggttgcatataaattcagtcagtaaagatggtgatgccaaacaatgacagattgtccatacaggtggctgaaataatggcacctgtgctttctgatggttcagtgtaaataaactttgtttcatgcacaaaattattaaaatatatacaattaccttcaggctatgtgtttaaggtatatataaaacaaatgaatttcacatttagacttgggtctcatccccaagatatctcattatatatgtgcaaatattccaaaatccaaaaacatttgaaatctgaaaaacttgtagtcccaagtattttggataagaaaaactcaacttatagtaggatggtagatttaaactcatatttgtaattatgttaaaagtaagtaaattatataccccaattaaaagacaaattctgtgagaatggatttcttgggaagaccaaaaatctttacagctactgatgggatatacaaagattcagaaa

SEQ ID NO: 823427 - DNA, 619 bp, Homo sapiens
aaaactgatacaggtattctggtgatgctactgtgctgcttagttaccctgaacattattttttcactggattcatggtacctcctagtttttactgttgggtacttgtgtgagtaagtgtaagaaaatgattgcttctcggttgcatataaattcagtcagtaaagatggtgatgccaaacaatgacagattgtccatacaggtggctgaaataatggcacctgtgctttctgatggttcagtgtaaataaactttgtttcatgcacaaaattattaaaatatatacaattaccttcaggctatgtgtttaaggtatatataaaacaaatgaatttcacatttagacttgggtctcatccccaagatatctcattatatatgtgcaaatattccaaaatccaaaaacatttgaaatctgaaaaacttgtagtcccaagtattttggataagaaaaactcaacttatagtaggatggtagatttaaactcatatttgtaattatgttaaaagtaartaaattatataccccaattaaaagacaaattctgtgagaatggatttcttgggaagaccaaaaatctttacagctactgatgggatatacaaagattcagaaa

SEQ ID NO: 823428 - DNA, 626 bp, Homo sapiens
gaaatatgataataacttatcaattaaaagaaactatccacaacctgttaatgaaactaaaaactattttgaattatatattttccrggtttatgatcatcttaaaatgaaatcatattttgagatagtagctttaaaccattttgaaatatgttgattttttccaggtaatttaaaaatattattaaatagttaattataaaatttatactggtattgtacccattagtggcatatttttcattgtattttcttccattcatttaatgattggctaatactacttgtttttaaagaagtaattgaaatgtagaagagatatatgtaatttgcatacaccttctcatggtatataatctatgacaatgtgacattgttactttaacatttcacacttgctccattctctaactttcagaacactctttagctcttttcactaatagatcattaaccaaatcaatataggtgaaatcaaagattcacaatctataaggatactaatagtgaaatccttgtttttttctctttgccttcccccttttcagtttcttaccaggcaatatcaagaaggaagccaaagattttgaaacttgaaatactaaccttccttatcacttcttcga

SEQ ID NO: 823429 - DNA, 510 bp, Homo sapiens
aaagcaaaggtggtgttgggggaaaagaatctgaaaatgtaacactgttaaagagttctgatttaatttgctagtgtaatacagaagagawtcacaaataaaaagtctttatttgcttgaagagcctctgaggtttttcaataccattgaaatgctttcctcaactcaagtacttttcatatatcagagaagtggcaaatttaacaaagcctacattaacgttccgtatttctattctaaataaaatgcttcagtaagtaaacatgagtattcagtaatgctgcaactggagacaatgaaaaaagctcctgtttcataatatattgataagtaaattattttaaaagaagcaaacagtattgttgaacagtgaaaggctaaaccagtcataaaatagaaactacttgagtacctttgtttattttctatgacaatacaaaaaaaatgttggcatacatgtgttttgtaaactgtaggtattttgtgtagataatagtcaaacccatataa

SEQ ID NO: 823430 - DNA, 515 bp, Homo sapiens
tgctcaaattctaaaatctaccaggtttaactaacatatgagagcttagacagtagccaattaaatcatctagtatgagattaagaagataaagtggaaaaagcagcactactgtaggagaacttcctgagcgggaagtggcagcaaagtgatcacaagaactgctatgaccaccagccttcccacactatccaaccaaactccacgtgcctcccgaggccatggtctgaggggtttgtgcaagaggactgcggaagacagagggataccagcagcctactctgcatgccaaggaaaagccaaggatagacttttgcacgtttaatcgtatttcttcatttgtccaccagtaaatgtgaaggaaaaagttgtcccagatccyccataggaaattcttacttataattggattaaaccttaagtttgagaacgactcacagtattgcagaggaagagggaaaaggtaataaaaattcaaaatgcaatgaagcctaatatatactctttcttgcaaa

SEQ ID NO: 823431 - DNA, 587 bp, Homo sapiens
cctctacctggtaagtatcaaaatcccagactctgagaaggcaagtgtatgtctggacctgcrtctgcatagaaaatattgtgcaaaaagcctgtgcacattgagaaccactcttatcatttagggaaattttttattaacatagaaaaccacttaccagccaggttcccagacgtcagccaagggccaaccttgcaaggagcctttccaaggaaagcagtctctggtctgctgtgttaacttttctgtgcagatgcctgccttatccattggaaataaaatagtggttctccatttctctttatctccccaaatcttgtccttaccactcttactattgcctgttatgtgtgcatgtgtttatacatatattggcacacatacgtacactgtgaaactatttgccttgtaacaccttctctgcagtgtaagtcccatgaaggtgagggttgagtttgctcactgctgtattcccaacacctagcacttaatagataggctggggagagcttatcatggcatgagagccaatggtgtgcctttcttgccaaatccaagttcggtggcatcaccagcattgactgaaa

SEQ ID NO: 823432 - DNA, 463 bp, Homo sapiens
ccaatttttgtttttattttttaaaaaagttaacctacggataccatttactgcttctgttgttttcatttctagaaatacttttctaatctaatcctgctcttttttcttaatttatgtgtgtttaaacatttaggttcaggggtacatgtgaaggtttgttacataggcaaactcctgtcacacaggtttgttgcacggattaattaatccatggaatactaggcagccacaaaaaaaagaaagagttcatgtcctttgcagggacatggatgaagttggaaaccatcattctcagcaaactaacacaggaacagaaaaccaaacatcgtgcrttctcactcataagggggagttcaacaatgagaacacatggacacagggaggggaacatcacacaccagggcctgttggagggtggggagtaaggggaggggtagcattaggagaaatacctgatgta

SEQ ID NO: 823433 - DNA, 490 bp, Homo sapiens
gttcacaagttttttgttaagtcatatcagttctgaaattaaaagcctgtccgcctctcactcttctatttcaagcagctctatcaatccccactagggtaacaacgggatgtacaatcccaggtacagaccacatgtcactggacattggtataatttgaatacaccaacatctgtcctctttgttaacagtgccccagtcttcacaagaggaaaatgcctcatctcatgggatgtattcttaatgaagggtaattcgaggaaccattttacttcatggaagctgcatctggtccctctcctacccctggcacagccagctagtagacaggtgattcagcaggggctgcatggaggtctctgcagcttatgtgcggataacgagaggaactattgaaggaattcactgtgagggcgggagagagttgctgagaggctgctgtgyccacacgcagccaccaacctccatcagaatctgcatggccaagct

SEQ ID NO: 823434 - DNA, 379 bp, Homo sapiens
ttcaaatgtgctctccacaagattctgacacccagcctggttgggggaatcactgagggggtgtcatctctgttcttcctccccaggaactttcggatcactgttcaaggactgaggcccatcygctccataagggattgtaaccgagtggcccagacttgaaacacattttacagtttttcctttcccttccttcttcatctcagaatgtagcctggaaatacactttaagacttcacttccctcctttccaccaggcactcggatgtgctattctccctcctccaagtatgcacttacttagaaattctaggggcttgttttgaaacaaaccagtcccgagacccagctgctgcttaaatggagttatggacaatta

SEQ ID NO: 823435 - DNA, 573 bp, Homo sapiens
acagctttcagaatgcacctggaaaagccgcagacactaaatatcagctcatgaaagaagctgcaggggctgtaccctgcaaagcctcagggatggagctgcctayggtattgggaacccactccttgcaccagtatgccatggatatgagacctcaaatcaaagaacattattttggagccttaagatttaatgactgccctgctgggtttcagacttgtatggggcctgaagcccctttcttttggctaatttctcccttttggagtgggagtatttatcaatgcatgtattcccattttatattgggagcaactaacttgcttttgattttacaggctcataagtggaagggagtagccttgactcagttgagactttggactatggacttttcagttaatgctggaatgagttaagactttgggggactgttgggaaggtatgattttatttttcaatgttagaaggacatgagatttgggaggatccaggggtacaatgatatggtttagatttgtgtttctacccatatcacatgttcaattcttatcctgaatgtcagaaatgagg

SEQ ID NO: 823436 - DNA, 573 bp, Homo sapiens
acagctttcagaatgcacctggaaaagccgcagacactaaatatcagctcatgaaagaagctgcaggggctgtaccctgcaaagcctcagggatggagctgcctacggtattgggaacccactccttgcaccagtatgccatggatatgagacctcaaatcaaagaayattattttggagccttaagatttaatgactgccctgctgggtttcagacttgtatggggcctgaagcccctttcttttggctaatttctcccttttggagtgggagtatttatcaatgcatgtattcccattttatattgggagcaactaacttgcttttgattttacaggctcataagtggaagggagtagccttgactcagttgagactttggactatggacttttcagttaatgctggaatgagttaagactttgggggactgttgggaaggtatgattttatttttcaatgttagaaggacatgagatttgggaggatccaggggtacaatgatatggtttagatttgtgtttctacccatatcacatgttcaattcttatcctgaatgtcagaaatgagg

SEQ ID NO: 823437 - DNA, 632 bp, Homo sapiens
atcacaatgttattagtctcctacttgctttatattttcataacactaaccatcgtaatagttgacttaatttataaatgtttagtattgtctgtctcctatcataagtatttaaacttcagtagaacagagattgtttttattgctttatttactgctacatttctaaattctgcagtcatgcacaacgtataatagaggctcaatatgtattttcaatattgatcaaattgcaatgcattaatttgggtcacctggtaaatgtatacttaaaaatgttaaaaataaaattacatattagtataataagtttttgtttgacatacatttttctccttattaggttgttaattctatggggtaagagcttttctgcattatttagtacttaattgtcggtaatctggacagccccctgctcaacattggagttcaataaatattgtttcaatatatgaacacttaactatctttctatttgtatttatctttccatctatctatattaggtaagaatagcttgttgctgatgggactcctatttgaagactttccactttgcactggataacttgtatgtaaattactacrcatttctctgtattgtctatgtggtatctctatgctagggg

SEQ ID NO: 823438 - DNA, 607 bp, Homo sapiens
tttcacttttattaacttcttattcaaaatattctttttccttctttggttatactccattagcacaggtgttcaaatggggcaggtccttggttgatgactytattttggaataatttatgccataaaatcttcagctgtactggctaagacagagcatttgatacaggaatgcaaagctgcttcaacattggaaaattaattaacataagtcacccatctaacaaactgaaaaagaaaaactatattaacatctcaacagatgcagaaaatgtattttacaaaattcattttccattcatgataaatagtggcaaaatatattaataaaatggaacttctttaacctgatagaacatctacaaaaagaaaaaagaaaaaatcttacctatagtttaatcaatggtaaaagactaaatgttttctccataagatcaggaacaaagtaaaggttttctctctcagcattcctttaaaatatcatactggaatttctagccagtgaaataaggtaagaaaataaataaaaggcatgcaggataaaaataaaaaatcaaaattgtgaatattcttatatgacataattacttagatacaaaatacaaaa

SEQ ID NO: 823439 - DNA, 469 bp, Homo sapiens
  misc_feature 113, 322: n = A,T,C or G
taaaaagcaagattaacacagactttttagaagtgagaatataaaaggagaaattatcactaacctcttagaactctctgttaatgtttttaagtatgtatgatcctcctganatagtctaaggtcacttaaatttaattataaaatctactgcaatgtttctgtatagacattattgaaacatatttatactagattgtgaaaatgtacgtagatcagtagctgtagaatccaaacagtaaaaacacaattgatacgtattaattttgaatcttgttatctcaggaatttcagattgttattagcttttctaaaaagagcnatagccaattagtaattgtaagctgagttatttggagaaaaaagaaaatccaaatattayggaaatttagctagtgaaagaaaaatagtgaaataaaattaaattactgtataataacaaaactatttgaaatttaagttgaattta

SEQ ID NO: 823440 - DNA, 621 bp, Homo sapiens
atcatctgcctcactacacacttaagatgactgacagtgtcagtgtccaattatagcattacttttttcatttgggacagtaagagaaatgttcttgtatcctctgacatttcaaaatgtaaagattgagactagttcatgcttttcctctctttattgtgacatgaatttttccaggtgattttcatgcctcagattttgccatatcatgatctcccaataattgctcattaaattcaagtattttcacatgataaatattttatcatgtaacaaatggtcacagactccctcaggatttccaaagcaggtaagtccaaagaactttcaactcacaatatatcaaagattgttttcctatatcatgtctagtaagtctaataattctcttaccaggtagactaacctacatattgaggaaaacctttttcttcaatcaaaggaattacctgcagatatttagagaagcaaacagtttcttgaaatgacatctcttgtgtcagagtccggtttagaaggaggcctattgaatttgttgctcctttttctacaacaaattattcttatcagttctaarattattactttgtatgctaaacttaagatgctcttatgcctgtc

SEQ ID NO: 823441 - DNA, 564 bp, Homo sapiens
tatgtatttgtttaataaatggttgagtgaatatttcagaccctggcacatccaatcaataaaataattagccaatcagtctattaatcatctactctttattcaaaaaaaggctttgagcctctaccrtatactaacccgtctacttggcacatgttctgttcttcaaaaatgctgttgtccctctccttcctctcttagaattccatctgtactccaggactcggatcaatcctgcctcctccaagcactgcttgtctctcttttgagctatttcttctttgacctcatatatcttttattttccaccacattcattttactcttaagctaccctagctttcattattcatgttttccagagtcttatcttcctactgacataatcattgttttggcagtgacctatatattttttaacgtttttacaaaaatttccaattcacaaacaagtacttattatccagcttcaacaaccatcaacgctttttaatacacgtttcattgatcatcctataccaagtcagataacagatatacagtcttcatctttgagggtcaatt

SEQ ID NO: 823442 - DNA, 585 bp, Homo sapiens
agcaaagggtgaagctgtytggaatcacagctaaaccacttttgcctttgttatccttcttccctgctcccaactggtgggagctagagtttataagagagaaggggaagaggtgactcagataaaagattcccacacccactatgatctgtgcgctatccttggtacatcctcagtatcttagagatactggagaaaataatatggacccagatggagaaaggaaggaaatgagtagtgaattgaatttgagattaaaggatttgtttttatttttattttagttggtcaagattggggcctaaatgccaaaataagactgttaataacaaaagaaagaaaaattatagactggctaaagtgtcattaagcactgtgttacccattggcaaggagggactcaacattgtatagttttgataaaatatatacctaattcatgtgtaaattatacaagcttagattccccaatacatggttagctacactagtggatatttttagctattagaataatctaagttaatcacaaaagctatgtacattgaaaatcccattagctgaaactttaatttcagaaattgg

SEQ ID NO: 823443 - DNA, 622 bp, Homo sapiens
tgtctaaacctagtaataaaaatatatcacttttatttcaatttctatatatttaactatgaggtcaagtatcttaccctctgtttttattcattacatagacttcttctgtgacaagcacatyaatgtcctttgttactctttcttagtgtgtgcctataaaaatcttattaatttgtaagtactcattatatgtaagcaatatttaaaatttttttctatgtgttgaaaatatttttttcccggtttgttgttgactttggtttattgtgtcttttccatgtgaaaatggaaagactttcatggattaacatttactaatatttatctttataagtcttagttttggtatgagagatacagtatgcgtgtataaataggaattcaattttgtctctaatttttaatgaagtagcataacataatatgctaggtgtatttttttaaatttagatctctctcaaaatacttgttatacaccatatcagttaaagtacttagaaactgctcatcatatttcactttagttctttccttgaatgtatacctaggtgaattctggcagagataaatttggggcagagcctaggatctaaagaatgtgaaaaaagttccctatgtc

SEQ ID NO: 823444 - DNA, 659 bp, Homo sapiens
acaaatgtgtagtaaagtgactatcagagcaacttagcagtgtcaatactaagacttattttatctgttctacaatatcgaactctaatattttccattagaattttaataataaacatttcatcattaayagatttaataaaatatcataattttcttttatcccacaaatgcattctcttaatatgatgtttggctttagcctcagccttatctgaatatggatatttaactcgtggtcattcaacagtcagccaaatatgtattctgtaagcctctaaacaaattcacatgcgtacatgttctttttatacaaatgacttattactatactactcttcagaaaatagtttaatgataacatagatctatctcactctttctaacagttacattttattatgttgacatcctctaaagtatgtaatcactctcccagcaatggaaatccaagtagtttctagggttttctttttcacaaatgatgcttaatgaatgtggctttccatttacctttgtgtacttttcccagtgtatgagtgtcatacttttctcaaagtggaattgcttttttttcctgtgtgcattttaaactttgatagagattgccaatagcaaataacaatagattatgagaaagctattcctcatatccttga

SEQ ID NO: 823445 - DNA, 659 bp, Homo sapiens
acaaatgtgtagtaaagtgactatcagagcaacttagcagtgtcaatactaagacttattttatctgttctacaatatcgaactctaatattttccattagaattttaataataaacatttcatcattaacrgatttaataaaatatcataattttcttttatcccacaaatgcattctcttaatatgatgtttggctttagcctcagccttatctgaatatggatatttaactcgtggtcattcaacagtcagccaaatatgtattctgtaagcctctaaacaaattcacatgcgtacatgttctttttatacaaatgacttattactatactactcttcagaaaatagtttaatgataacatagatctatctcactctttctaacagttacattttattatgttgacatcctctaaagtatgtaatcactctcccagcaatggaaatccaagtagtttctagggttttctttttcacaaatgatgcttaatgaatgtggctttccatttacctttgtgtacttttcccagtgtatgagtgtcatacttttctcaaagtggaattgcttttttttcctgtgtgcattttaaactttgatagagattgccaatagcaaataacaatagattatgagaaagctattcctcatatccttga

SEQ ID NO: 823446 - DNA, 596 bp, Homo sapiens
caacagctccctttacccaaccacaccccttcctcggcccttggtgactaccgttcttctgtgagctcaccttttcacattttctttatccattcttctgatgatggacccctagatctcttccacatcttagctattgtgaataacatcgtaatgaacatgggagtgcagatatttcttctgcatatcaacttaaattcctttcgagatatatccagcagtgggattgctggatcatatggctgttctatttttagttttttgaggaacctccacactgtgctttataatggttctattaatttacattcccacagacagtgcacaaggattcccttttcttcacaccctcaccagcattcttcacaccctcaccaaaatgtctatttgctaatagccattctaacaggtgtgaggtgatattccattgtggttttaatttgcatttctttgatgattaaaaacttytcctctaatatcagtaaccagacaaagatgcccacactcattacctttattcaacatagtactggaaggtctagccagagcaattatataagaaaaggcattcaaatagaaaagaaagaagtgagatt

SEQ ID NO: 823447 - DNA, 596 bp, Homo sapiens
caacagctccctttacccaaccacaccccttcctcggcccttggtgactaccgttcttctgtgagctcaccttttcacattttctttatccattcttctgatgatggacccctagatctcttccacatcttagctattgtgaataacatcgtaatgaacatgggagtgcagatatttcttctgcatatcaacttaaattcctttcgagatatatccagcagtgggattgctggatcatatggctgttctatttttagttttttgaggaacctccacactgtgctttataatggttctattaatttacattcccacagacagtgcacaaggattcccttttcttcacaccctcaccagcattcttcacaccctcaccaaaatgtctatttgctaatagccattctaacaggtgtgaggtgatattccattgtggttttaatttgcatttctttgatgattaaaaacttttcytctaatatcagtaaccagacaaagatgcccacactcattacctttattcaacatagtactggaaggtctagccagagcaattatataagaaaaggcattcaaatagaaaagaaagaagtgagatt

SEQ ID NO: 823448 - DNA, 596 bp, Homo sapiens
caacagctccctttacccaaccacaccccttcctcggcccttggtgactaccgttcttctgtgagctcaccttttcacattttctttatccattcttctgatgatggacccctagatctcttccacatcttagctattgtgaataacatcgtaatgaacatgggagtgcagatatttcttctgcatatcaacttaaattcctttcgagatatatccagcagtgggattgctggatcatatggctgttctatttttagttttttgaggaacctccacactgtgctttataatggttctattaatttacattcccacagacagtgcacaaggattcccttttcttcacaccctcaccagcattcttcacaccctcaccaaaatgtctatttgctaatagccattctaacaggtgtgaggtgatattccattgtggttttaatttgcatttctttgatgattaaaaacttttcctctaatatcagyaaccagacaaagatgcccacactcattacctttattcaacatagtactggaaggtctagccagagcaattatataagaaaaggcattcaaatagaaaagaaagaagtgagatt

SEQ ID NO: 823449 - DNA, 646 bp, Homo sapiens
aaaaaccccttataaaaccattagatctcatgagaactcactcactattatgagaacagcagcatgggggtaactgcccccatgattcaattacctcccaccagrtccctcccatgacatgtggggttcatgggaactacaattcaagatgagatttgggtggggacacagccaaatcatatcaggctttattagcaaattagatacaattaaggagagagattagcaaactagaagatgcatcagaaaaaatacagagtgaagcacacagagacaaaaaaatgggggaatagtatgagtccaaatggacatgatttaaatatatccatcacagaagagggaagagagaggataagcagaagcagttatgttggaaaatattatgatttcatatttttcaaactaatataaaaaacattaagcccaaaactaaagagcattgaaatataaatcaataaaagcttcatcactaaataaatacaagtaaaactatgacagagggagatcacacttgaacttcaagaaaccaaaaacaaagaagaaaatcttaaaagcaaccagagtaaaagatagattttcttcaaagcaggaaaaattgattgataattttcttatcaacaggaagagtttgagaaagaagagtagc

SEQ ID NO: 823450 - DNA, 608 bp, Homo sapiens
aatattggtggggtaaggtattttagggggagtgactagacccaaagttctctggttttggcatccgacatcatttttactacatcatatgcaagttcaataaattcctcagctgggcgcgctggctcacatctgtaatctcagcactttgggaggccgaggcaggtggatcacaaggtcaggagttcgagaccagcctggccaatatggtgaaaccccatctctactaaaaatataaaattatctgggtgtgatgggcacctataatcccagctacttgggaggctgaggcaggagaatcacttgaacccaggaggctgagattgcagtgagccaagatcgcaccactgcactccagcctggttgacaaagcgagactctatctcaaataaataaataaataaataaataaataaataaatccctcaaatctgtagactaaggattatcaagatgacataaatagaagttcctattcccaacctcttcccatttctggatcaggggtaaygagtttctgctttgcaccaaaggctccacatccatcctttggctctctctgaaaaggaaactttctgtagattctaggctatgtggctcgtgtctta

SEQ ID NO: 823451 - DNA, 606 bp, Homo sapiens
aagcctttaactgggtcatgagaagtcatgatccatttaacaaatagtcttggccactgcttgagatgagagaaagaaggcaatgaaaatgtttattaaaataaaagaaaatgtaagaatttatccacagaaatgagttgtccctatctctaaagcccttttatgaaaactgcaggttgccactgatcagtaggtcataaaattaatttagtcatttgtgacaagcaaattcagaggacatagaatagaaaatatcagcatttctcaggcaaaaggaataactgtttatgaaattgtgtttcagtcctgtgcctgcaaatatgtgtgagtgtttgcatgtgcccctgtgagtctgagtgtaaactgtgatataaaacactgaaaatcattcatctaaaaggtcttgggtgatgtcaggcatcctaaaaagtgttggaatggcattttaccctatctttcacctccctgctgaccacctccttcccctctgtctttcaacttctttagcatttcactatctccccataaagctggtactcrtccaaataacagagcaaaacacattaaggctgaatctacatgaggctttagatttccatcaatcca

SEQ ID NO: 823452 - DNA, 433 bp, Homo sapiens
ctagcctacagagtttagaggtcaggacactagcttaggagtataytcattgttcaagaggcatgtttatatcaaagacagagccacaggaaagacagccagcaaagaacactgacaatgactggtcatgcaaaaacagtaagaaaaacctggaggaacagaaggtgatgaaagagaaaattctaccaagaaattagagctttcaagcaggcaactctcaagaagaggcggttggatttagcaataaagcatcccccacagaatgttcagagagcaatttcagaccagcgataagggcaagggcttggttaacttggttaaagagtgaataggagcatttctgcttccaacattataactgataaaacacaacaaacatcctttttaaatgcctatctcactagcaaagaaggggaaaatcctagtagccaaa

SEQ ID NO: 823453 - DNA, 538 bp, Homo sapiens
gatgagaaagagagtcctcgacattctctcctacccctcagagagcctacctggctttacattgccctgtcctctgtggtaccacgggaagggaagtcgattaaactctcatcccaaggtcaggaacaggagacctggcccttggcacatgcttgactggggctctgccggggcctgagacagacagtcaggaaaactcctggatgctggccatgctgatgacacttgcccctcctacagagcacatagccgacagttccccaggctcacctgcagactgggccctgggcctgacagcattgctcccagaaacagacactgcatctaccaacagcctgtcctggaccaacgttycacagccatgttgatttacctgcatgtcccactataccagagggcattttcatgaggatgtgaaaattcagacccaagcccaaggacacactcagtgagaacatgaatgggatatcctgtgcccaggcctccaccttctctgcacagttcattggctcctgcaccaccctgagatgggcagggc

SEQ ID NO: 823454 - DNA, 625 bp, Homo sapiens
ttgcacacagaaggtcagacctcccaacacagcttgtaactgagcctggcaatgtcctttctttccaacctttctcatctcctcctcagcaaagctgagccattctctatgccagttattcccagctgcagcctcaccctcagaaaactggactgatcttaaggataatgactgatagtggcccccagcacacctagctcctcagtggaggagaaacccaatgaaagggcttcctgttggcatttcaggcacaggaatgaagaagctaaaggagtcattctggggactgcccttcatgggagcttctctgttcccatctccatctctgcccctttcagcatagtacccaattcagataacctctgaacccactgagtttaccaaaaaacaccctctatgaatgaaagtggcaactctaatagtacatctaaaggctcaatatcatagtcctggaaactctatagattttgccattcttgtttgatatggaagttgattatatcaatgaactagctttaaattcacccttttctagagacacggagctggagtgaggtmcttgtctgcacagcatagcctggataactttaataattgatgtttaaataatctcccaactatttgc

SEQ ID NO: 823455 - DNA, 567 bp, Homo sapiens
aaaaatgagagatcctaagatacctaaccagtgtaagctagacttgcctgtgcttgtacaaccaccttgggattcttcttaattggacatatttttggaatcccagtcttgggcagggcagaggacgatgtggttttgtttctttgtcatgctaaattctccagaacattctggaactagggtcaatgctagattggttgtggtgtgagagagaaagaggaatcaaagatggtttcttatttataattttaattattttgaccagaagtaagtgatataccatgtaccgagatgggattaacagagctgcaagctcatttgggaactactaatggtaaccaagacattgaaaaaggagtgtagacagggaaagctgagaatttgcggggactaagttctgcagtgcaatttgggagaacataaaggccccagggtccagaattctcttwcctagttacttgctagttagtatctggaattcttccatgggattcattctttggttttcttgtctgtgatattcataaaatattttcaggggagagaggaggaagggaaagaggagtt

SEQ ID NO: 823456 - DNA, 613 bp, Homo sapiens
atgcagaaggaactggaacccaaagcccacgtccttagctactgtcacatggcagaaacgaaggtcctggggttcatttggtatggtatatcaagggagagaaactgcattattaaactgagtgaggccaggtagagactttaggaagcaggtgcgttttggtggagagctgaatgagctgagttactcaaagtgcagtctgaggactacagcatcctctaggagccaataaaaacaaaatggagacagctgggccccacccaagacctacgtcattccaggggatttgactcagaaatctgcactaacaagctccttgggattttcagactaagtttgagaaacactggaatgaaaaatcagaccagacttagcagcgggagaaaggagggtcttgtacattaaaggggtgaaaaatttaagcgactagtaagaaaaggacctttaatagtgtctcacatgtagctagcattttataagtgctacagactgaatttttrtgtctcccctaaattcatacattaaatcctaattcctgaagtgaggtgttaggaggtggggcctttgggagatgatcaggtactgaggatggatccctcatgagtgggatttg

SEQ ID NO: 823457 - DNA, 568 bp, Homo sapiens
tacagacttgaggtgtttgagcactatctaaaacattggctgactgaagagctatgcagatatggggcagcctttaggtaaggccaaaaattataaagaagcataaaaacattrgtagattcgtatctggcacaccccaggggagacagccttcagaatttaaatccaggcaatgatcaacaacaaccaccttaagaaaaatgaaacaaaatctacagtttctgcaatatattatacaaaatgtccaattttagtttaaaaattactagactgaaaaaaaaagcccaaaaatgtgtgactcatactcaggaagaaaaagtagtcaaaatgcactgattctggatgagcatagagtttggatataatagacaaaggtttcaaagtatctgttataaatatgttcaaagaattaaagaaaaatatcacaatgactcaataaagaatctcaatagtgaaatagaaactataaacaaattaaaagctagttttaaagttgaaaacaataacgaaaatgaaaaaaacacttagatggactcaactgcaaattgcagataacagaataataaat

SEQ ID NO: 823458 - DNA, 621 bp, Homo sapiens
gaattctactaaacatttaaggaagaaataagaccaatcttacataaactctctcagaaaatagagaaggagggaatgtttccgggcacattttaagatgcctgtattatctcatactaaagccagataaagatatgacaagaaaagacaactacatattcagttcctcatggatatagatgcaaaattagttttaaaatttagtaaactgaatccagcagcatgttaaaaggattatatacagctgttaagtggattttatcccagaaatgcaagattggtttaacatttgaaaatcacttaatgtaatgcatcacattaattaaaaaaaagaaaagaaaatgtgtgatcaaaatagatgcagaaaaatcctctaacaaaatttagcacttactcatgataaaaactcccaccaaactagcagtagaagagactctttttaacctaataaagaacatcttcaaaaggccacaactaacaacaaacttaatagtaaaagacagacttaatctctaagttgggaaaaggcaagaatgtccaccactayttctattgaacattgtactgaaaatttaagccatggcaattaagcaagaaaaagaaataaaaggtatccagatc

SEQ ID NO: 823459 - DNA, 639 bp, Homo sapiens
tctcatttctcctgtattttgtaattttcaaatgggagcttaaaaaattttaataatggttttaagctagccttttcattttgtgttcaaaaagggcagagagggaaagaaggtgagagagggatctaggaggaccatctccaaaccacagcacccacgggcatgatcctcagccaccacagctgtgccccaacccagagggctgtcagtgctctgggctcattctccatgcctcagtttccccacctatgaaatggagagaacatctcccctcttcacgcctcactgcaggatagttgggtgctgcttctcctgcccaaaatgagggctgcatttcagcatctacactggtgggtgggggtggggtgggaacgcaggcaaggtgaagcctaaggagggcagagagcgcttccgttgggatagtggggtcctctcattgaattaagaacctaggatagaaattctgttttttaaataattaggatgcactggggtaagggagcagggaatcagaattaaattccacagaacagcaaaagaaaccaaaagaaaaaaagaaaaagatcctgatttggcaatgtatgagttttgctgagaagccctgtttasgaggatccattattcacagctaatggccat

SEQ ID NO: 823460 - DNA, 628 bp, Homo sapiens
cagcttccccatccctgatacagatttcatgaacacataaatacataagactccagggctgacttactcaattgacattatattatttgtttatcatccttttgaatatcaaatcaacacagagaatcagaagtagtctacagttgatttgcacaataaaatatgacttttcaaaatttattccttctggtacgtacctctcaaactctaaataggtagcaatatagtatcttgaaatagtaattgtttgcttacttattggcactttctgtaaattactcagaggcacttaaattgtagaaggccaggtgtggtggcttacgcctgtaatcccagcactttgagaggctgaggcgggtggatcacttgaggttaggagtttgagaccagcctggccaatgtggtgaaaccccgcctctactataaaaaaaaatacaaaaattaaccagacgtgatggcacatgcctgtagttccagctacttgagaggctgaggcaggagaatcacttcagtycagaaagggaggttgcagtgagccaagattgcaccactgtactccagcctgggtgacagaaaaaaaaaatgtctataggagaaatatgattattagaacaaaatacagaaagaa

SEQ ID NO: 823461 - DNA, 541 bp, Homo sapiens
atcctgagactttgctgaagttgcgtaatagcttaaggagattttgggctgagatgatggggttttctatatacaatatacaatcatgtcatctgcaaagagrgataatttgacttcctcttttcctacttgaataccctttatttctttctcctgcctgattgccctggccagaacttccaacactatgttgaacaggagtggtgagagagggcatccctgtcttgtgccattcaggggaatgcttccagtttttgcccattcagtatgatattggctgtgggtttgtcataaatagctcttattattttgagatacatcccatcaatacatagtttattcagtttttagcatggagggctgttgaattttgtcaaaggccttttctgcattgatgggcatctgggtttgttccaagtctttgctattgtgctattgtgaacagtgctgcaataaaaatatgtgtgcatgtgtctttatagtagaataatttataatcctttgggcatataccgagtaatggaattgctgggttaaatgt

SEQ ID NO: 823462 - DNA, 445 bp, Homo sapiens
atcagaggatgtggtgaagacaagtcagtagctctgcttggctgtggagtccagccagtggtcttactggtctgtggagcactgctagcagttycactccacctcagacaagacagtggccctgctcaactagagaacctggcagcagggtctatttgtccagaattgctaccaactggcctatctagaatcccaggctagtctaaatagtaaagatccatctctacaaagaacatctgcaaaggctggtagaggtggccattttcttaaatgttcagacaccaatgagaggacacaaggattacaaaacatcagggggacataacacccttaaaaaaagaacctagtaaagctccaataatagaacctgaaaaaaatgaaaatcggtgaaattactgacaaataatccaaaataatcctaagaaggtcagataattatcataaa

SEQ ID NO: 823463 - DNA, 601 bp, Homo sapiens
taaagagatcaaaaaagcaacccagttttcaatagctacaaataaaataaaataattaggagttaaccrgagaagtgaaagatctctacaacgaaaattataaaacactgataaaatacattgaagggtacacaaaaaattgaaaggtatcccatattcatggattgaaaggatcaatattgttaaaatatccagactagcccaagtgatctacagatttcatgcaatcactgtcaaaatatcaatgaaattattcgcagaaatagaaaagaaacatcctagaacttacatagaaccagaaaacacccagaatagccaaagccatcctgagccaaaagaataaaactgtaggaatcatgttatctgaccacattatactataaatgtatagtaatcaaaacagcatgggactggcataaagagacacatagaccagtggaacagaggaaagatcccagaaataaatccatacatctacagtaaactcattttcaacaaatttctcaagaacatgcattgaagaaggaacagtctcttcaataaatggtgctgggaaaattggatatccatttgaagaagaataaagtagacctttatctct

SEQ ID NO: 823464 - DNA, 588 bp, Homo sapiens
ctttcagttctcctctgatcttagtgatttcttgtctgctacgttttagatttgttcactyttatttctctaggtcttttatttgtgatgttagggtgtcgatttgagatctttcaagctttctgatgtaggtgtttagtgctataaatttccctcttaacacagagattttggtacattgtctctttgttctcattggttttagatgacatgaacagacacttctcaaaagaagacatttatgtggccaacaaacatgaaaaaagttcaacatcgctgattgttagagacacgtaaatcataactacagtgagataccacctcacaccagtcagaatggctattactaaaaagtcaagaaacaacagatgctggtggagctgtggagaaataggaacacttttacaccattgatgggaatgtaaactagttcaaacattgtagaagacagtatggcgattcctcaacgaatcagaaccagaaataccatttgaccctgcaatcctattcctgggtatgtagcccaaagaatataaatcattatattataaagatgcatgcacacataggtttattgcagcattattc

SEQ ID NO: 823465 - DNA, 588 bp, Homo sapiens
ctttcagttctcctctgatcttagtgatttcttgtctgctacgttttagatttgttcactcttatttctctaggtcttttatttgtgatgttagggtgtcgatttgagatctttcaagctttctgatgtaggygtttagtgctataaatttccctcttaacacagagattttggtacattgtctctttgttctcattggttttagatgacatgaacagacacttctcaaaagaagacatttatgtggccaacaaacatgaaaaaagttcaacatcgctgattgttagagacacgtaaatcataactacagtgagataccacctcacaccagtcagaatggctattactaaaaagtcaagaaacaacagatgctggtggagctgtggagaaataggaacacttttacaccattgatgggaatgtaaactagttcaaacattgtagaagacagtatggcgattcctcaacgaatcagaaccagaaataccatttgaccctgcaatcctattcctgggtatgtagcccaaagaatataaatcattatattataaagatgcatgcacacataggtttattgcagcattattc

SEQ ID NO: 823466 - DNA, 624 bp, Homo sapiens
agcgcaacagatatagatagatacttacagatgtacttctatatctatagccatatatatatctctrcaagattctaaagaaacctggaggctgggggttgaacagaagaaaggaataatacatatacattattctgtaagaaatatcagaaaacggatggggcatggtggcccatgtctgtaatcccagcactttgggttgccgaggtgggcggatcacttgaggtcaggagtttgagatcagcctggccaatatagtgaaactccgtctctactagaaatacaaaaattatctgggcacggttgtgcatgcctgtattcccaactactgggaagctgaggcaggagaatcgcttgagcccaggaggcagaggttgcagtgagctgagattgcaccactgcactccagcctgggtgacaaagaaagattttatctcaaaaaaaaaaaaaaagttttacatatacatatatatatgcatatatatgaaaactattgaaaagaattgaatgtgtggtattaagaaaagaagaaaattggtatctcatctagtatcatagttggtttcatgctgctttcttatggatccattgctttgggagaaaataactttttcccctaagtga

SEQ ID NO: 823467 - DNA, 547 bp, Homo sapiens
cagctaaccccaggcgtgcggggtacctgtcctgggtaggacacccactgctaccctcagcagcaaggackgagacaggcttccatctggttcccggggcatccagctctcgctcctgccttctggcttccgccctgcccctctgcgtccatcaccaaggctgtgctggccgaaagggtccactttggcgggtcttggcagttagctgagggcaccagtgtcgctcccacacaacatgcaaaccctcctgccgagctgcgaccttcgcctgtcacggaacctggtgctgagtgtggtgagagtgaatcctgcagcacgtggcgcactgtcggcctctttcatgtttagcttttgattgtgcttattgtccatttgtatttcttcttctaagtgtctgttcaagacttttccgtcttggctggaggtgggaggtgcctgctcctgtgttttctggcatctttctctgctgtctttgtgtgtctgcactcagggagtttccctggggtgtgtgcctagagaggtgctggttgtacatttcaacgtaggg

SEQ ID NO: 823468 - DNA, 547 bp, Homo sapiens
cagctaaccccaggcgtgcggggtacctgtcctgggtaggacacccactgctaccctcagcagcaaggacggagacaggcttccatctggttcccggrgcatccagctctcgctcctgccttctggcttccgccctgcccctctgcgtccatcaccaaggctgtgctggccgaaagggtccactttggcgggtcttggcagttagctgagggcaccagtgtcgctcccacacaacatgcaaaccctcctgccgagctgcgaccttcgcctgtcacggaacctggtgctgagtgtggtgagagtgaatcctgcagcacgtggcgcactgtcggcctctttcatgtttagcttttgattgtgcttattgtccatttgtatttcttcttctaagtgtctgttcaagacttttccgtcttggctggaggtgggaggtgcctgctcctgtgttttctggcatctttctctgctgtctttgtgtgtctgcactcagggagtttccctggggtgtgtgcctagagaggtgctggttgtacatttcaacgtaggg

SEQ ID NO: 823469 - DNA, 561 bp, Homo sapiens
aaacccgaaaaactgaattccaggagggaggtcagacactcccattatacatcctccctrtggagtgcagccacgactggccagcactaactccaaaatgaataagaacagaccctccgtgggaaccaaactccaaacctgactctggagcagaaccacatgacatagcaggtcctgaaggacatcaaagtatttcactccaaaatatgtttctttgacatattttgaaatggccctgcagagccttttgtgggggaaatttccatctgtagctagtctccactcatactgccaggtctttcccagatccaggagagttgaatcgagcctgacacctttgaggtaggaaaggagattttcaccatccttctctcggaaggctactacctggaaacttcatctacacaagaacctcggcttccacaaccccccttatcttaacccaagcatctctttctgctgacttcctctttagacaaagctttattctttctaccagctgccaatcaggaaatctttggatccccctctgacctggacgccccccttcaagatgtccca

SEQ ID NO: 823470 - DNA, 553 bp, Homo sapiens
ctacactaacacaaagactaactcaaaatggaccacagaccttagtgtcataactgaaactataaaactgtctgaagaaaacacaggtataagtcttcatgaccttggatcagaccatggtctcttagatatgaaccaaaagcactagtaatggaagaaaaaagtagataaattggctacattaaaattaaaacttttttgttgcaaatgataccactaataaagaagacaacatacagaatgggagaaaatatttgcaaatcatatatctaatctaacgagggactaatatccaaaataaataaataacttttacaactcaataataaaaaacccaactgcagattagtgaaggatttgaatagacatggttttaaagaagtcatgcaaatggccaatgagcgcacgcaaagatgttcaacttcattatccaccaagaaaatgcaaatygaaaccacaatgagacatcagctcaaacctgtgaggatggctagatgagaaagatagatgatgtaaagattggagaggatgtgaagatatcggaaccactgag

SEQ ID NO: 823471 - DNA, 603 bp, Homo sapiens
tttcagacaaacctttggattttttttcctatcacacttaaaacaattctttaactttctaaatttggacaagattaaattgtacatagattccctttcatgaatcccctccatgagttacacagaccacaatatgcccaaactctgtgacttatccttagccagtcaagtagggggacggaagaatttaacataaggaaagaaggcttaagccacctgaaacatgtgtgaattttccctggacaggctgccactgccaattgcatcactcataggcatcagggactacaactggaaaagacagaaaagagtccttcccctttctgggcaaggcagctatccccattcactcctgggccttcagttaacaccagagagtggccccagttgccttcagttaccaaggagctactaggaaatggccactgaaagactgaaaaagaaaagaactcaggttcctcacctgaaccaggtggtggcagtcaggtgcttccacatggaccttttagtttcaccagagagtgccctggccagaaacctgcagttgcctccatgcttaggcactgtccatcaaggatccsagcttggaaaggaaaagggaga

SEQ ID NO: 823472 - DNA, 619 bp, Homo sapiens
gattaaactgcccaatcaaaagacatagagtggtttaatagatgaaaaaagcaagacccaacaatctgttgcctacaagaaacacacttcatctataaagatacacatagactgaaactaaagaaattgaaaaagatactccatgaaaatggaaaccaagaaagagcaggagtacttatacttatatcagacaaaatagatttcaagacaaaaaatgtaagaagagaagaagaaggtaattatataataatagagggatcaattcagcaggaaaatataatgattgtaaatatatatgcacctaacactggagcacccagatatatacagcaaatatgattagagctaaagagagagataaaccccaatacagtaatagctggatacttcaacactgaactttcagcattggacagatctcccatacagaaaatcaacaaagaaacatcggacttactccgtattatagaacaaatggatctatagctatttacagaatatttcatccaacaactgcagaatatacatttttytcctcagcacatggatcattcccaaggatagaccatattttaggtcacaaaacaagtcttaaaacatcaaacaaattggaataata

SEQ ID NO: 823473 - DNA, 421 bp, Homo sapiens
caaacaagggagttttgacggggactcaaaaaatttcacagcacaaaagggcattctctgctgaaagaggctctggtggtttaaaagcaatggtcaatgggaagcatttgttctgtaggaaggtgaagcccatctggcctctcttcagatggggtgagctgcttgcttgaatgaagagttacagttttcagctgttacgtcgtcttgcacttggctggccacatactgctcctatcttttgatgagtgtacgcaaatcctccagaacacatccttttgtctttgacgctggccttccttcatgaccataarcctgtcactctgtcaaccctgttcaattccatatgattctcctttactcttacgtgggccaccaaccatttctttcttttcctttctatacactttctaaagttttctgt

SEQ ID NO: 823474 - DNA, 590 bp, Homo sapiens
caaagccaatttaaaaagcctctataaaataatcattcttggatttgatggcaagatggccaaataggaacagccctggtctgyagctcccagtgagaccgatgcagaaggtgggtgatttctgcatttccaactgagtacccagttcatctcattgggactgggtggacagtgggtgcagcccatggattgcgagccaaagcaggctggggcatcgcctcacccaggaagtgcaaggggttgaggaattctctcctgaactcaagggaagccatgagggactgtgctgtgaggaatggtgcactctggcccagacactgcactttttctaagaccttcgcaacccgcagaccaggagattccctccagtgcctatgccatcagggcccagggtttcaagcacaaaactgggcagctggttgggcagacaccaagctagctgcgggagatttttttttttccatatcccaatggcaactggaattccagcaagacaaaaccattcactcccctggaaaggggctgaagccagggagccaagtggtctgcctcagtgggtctcacctccacagagcccagcaagccaagat

SEQ ID NO: 823475 - DNA, 628 bp, Homo sapiens
agaattttctttgttcctgtggcagagaacactgtctatcaaaatccttttcttttgcytcttggggctgtcgctagactatgtttcccaacccctcgtggagttaggggtggctgtgggcctgagttttgactcatggaatgtgggtggaagtgatatatttactacttccaggcctggccccagtaaacctcctgtagaagagtctctcactctttgtgtgtctgccaccttggtgcaggggatctagccctttctctgagcctctgtaggatgatggggccaccagtgaaaagagcttgggtacctaaatgagtttgtcaaagtcttcctgctgcaaatctccactggaccctgcttgagcaagaaaggaagttttgtgtcaagtcactgagacattgaggtttgtccctctaagaagctagcactgtgtgccctcaccagtacaggctctcttatctccaccagagtttctgaacataagatccaaaagggtgagagccttgtttacattgtatcaccagtgcccaggagagtgtctgttgcaggtatccaataaataattttttcaacaaatgcatcatataaatactaacataaaaacaactcgagagagtgctgaaataat

SEQ ID NO: 823476 - DNA, 636 bp, Homo sapiens
aaataaggtgatcctcaatccatttcttttttagcgctgagcagcatccaattggttgctccctccatcacccccactaagcttaagaatctcaccttcctcaaaatccagagataagtaatgaaagtcatcaaacagagtcaaggggtcaccacggagggtattgaatcctccgagaggaatgttacctctgacacctagctagccgggcgggggtgtccggtgcagggtaagagtgaggcgttgatagccggaggttgtctatcgatattaagggcttcccccttacaattgaggcccttatttcagttgacaaatgacacctcactgaaaaggacgatggaattcatttcgctatcgaggctatggctgaagtagagtctgatcagtcctcagtggggaaatggaagaagagattgagtgaggataaaacaaaggaatgtacttttactatgaagatcagaacgagaccacaggctgatatatgtgcaaatttagacacttggagtttatctcctrtgtccaaaaatctgccccagacattccatttctcattgctgtctttcttttaaacttgttgtcaaggaaataagatgcaagctgagcaggtgggaactagaagcaaaaagtttaata

SEQ ID NO: 823477 - DNA, 498 bp, Homo sapiens
caaacctggacgaacacaagtggattttatctctgatctttacctggtgggactcttggaagtacaacctacagaagtgtagaggtgcccccatagacttgtcccccaggagtttttaacrctcgagcttgtcaacagtaagcctttagtcatttatcaaaattactgtttaactgttcctaccagttcctgtctccagtgacatctgctttgggtaaactgatctgtattccatatattttcttgtctctccagttttttaggatggtggcttgtcctatgacttcaattctttgagggatcgaagaaaagtcattgattttcagtttgttcagctcttctctggtgaagataggcgagatgacctccaatgtcagagaagaaactgaaagtctcaactttgccttttgaccttttgtttgaaattttcattgtatcttttatttttgctttaaattttaagtgttttttcatatttttctttatcatttttaatag

SEQ ID NO: 823478 - DNA, 498 bp, Homo sapiens
caaacctggacgaacacaagtggattttatctctgatctttacctggtgggactcttggaagtacaacctacagaagtgtagaggtgcccccatagacttgtcccccaggagtttttaacgctcgagcttgtcaacagtaagcctttagtcatttatcaaaattactgtttaactgttcctaccagttcctgtctccagtgacatctgctttgggtaaactgatctgtattccatatattttcttgtctctccagttttttaggatggtggcttgtcctatgacttcaattctttgagggatcgaagaaaagtcattgattttcagtttgttcagctcttctctggtgaagataggcgagatgacctccaatgtcagagaagaaactgaaagtctcaactttgccttttgaccttttrtttgaaattttcattgtatcttttatttttgctttaaattttaagtgttttttcatatttttctttatcatttttaatag

SEQ ID NO: 823479 - DNA, 511 bp, Homo sapiens
ttttgacagccagtatacaggtattttgasgatatttaaatggtaataagatgattgaaaaattaatctaattttagaggacctcaaggtaaatttttatttgtggaaaaaaatcttcattaaaataaaaagtggaagtttaataaatatttcttaggacttcttttgttctaccacatcggaattggatactataagtatccaaaaagtatccaaaaagattaaaatacagatcaatcttttttgaatcccatacagtagtagcattgctttaaacattatggaaactgcagaaattggtcctagacttacagaaataacttagttataaatttggaatctccagaaagggatgggcattgggcattttccaactcatttctcttggcatttatcatactagggtccatagacaatttaattttaatagcttagatgccttgaatcatttttgagccctattttatttttctcaagtcaatgtgagtgtgtgaataaatcactaatttta

SEQ ID NO: 823480 - DNA, 614 bp, Homo sapiens
acttcctgccaggatcctgggaggaagctgctggggcgaccccgacatccacaggggtcagctgtcacccaagggcaatggtgacgagaacgtgtggacagagagtgcctggggtccttccctcayaggcatcattgagtgctgcagagggtccctccttcagagacggagagagaaggtaatgaccaccacaggaaggctatcaacaccaggaagggagcacccacgtgcatcgggctggtggtgtgccaggcacggttggaaatattttacatacaataatttacttttaatagcaggactttgagctggtcttatttttattttcattttacagactctcgccttctatgtgctcatgcactgtgataatgcatgctttttgtcattcctcttggcccatggctcctcaacatgcattctatgcataactttattgcctgctttctctgagtattttcgagttcagcctctcaaaatagatacacgttggcatatctcctctttgtttgccagcccagatcatggacataggccagcccatggtctggcagcccttggttcgaacctcttccaatcaacaaaggactggagcgttagtcttggaatatagt

SEQ ID NO: 823481 - DNA, 621 bp, Homo sapiens
ctgagactagtgcctgacccacataagcattataggagggccataatcaccctcatagcaaagatgactctcatgatggccctcatgatggtgataatcggattatgtagaaacctttaagaggaagaaaaattagaggtgcattaatgactgttctagcccagctaacacaaagtgataaagttgtttgtttgtttgttttatttttgagaccgagtctcactctgttgcccaggctggagtgcagtggtgcaatctctgctcactgcaaccttcgcctcctgggttcaagcaattctcctgcctcagcctcccgagtagctgggattacactaccgagtagctgggcgcccactaccacacccagctaatttttgcgttgttagtagagatgggctttcaccatgttggccaggctggtctcgaactcctgacctcatgtgacccccccacctctgcctcccaaagggctgggattacaggtatgagccaccgtgcccagccccatgagcctttttctactcaggggattaaatatytaaagtagaattgtttttgtcttgcttatctcttccatgccacctctgtttctttagggtaagcatccattcttcggagact

SEQ ID NO: 823482 - DNA, 599 bp, Homo sapiens
ttctagtctcatatctccttccagsccacttgggttccccaactgggatccactcttcccggcttttcaatttcctgtctctgtaaatacagttccttgtaattctacaatgcaagccttaatcattacacctggcacagctagaatccaatccccatcacggcgtatgagaaccactcttcctttccagggattcccaattcacatcagcctcataaacccgatactcatccggacccaaaaagtaacaattgtcttgcattgggacatctagtcactcaatttgcattctcaaatatcaattgctaactcatatctgggttttatgctccacaatttccccagggcaaacctccaggaacttatgaactgctctttcttactgaaagatacagtggctggaactgcacaaagcaagaagatacttctgtaaccaagcatgatcccagtgagcatttagatacacaggagatggaaagatgtgaaccctatttttcaatcatcagatggtgacatagcagtgcacagaaggtaggttgtggaagattcatcagctcagggtttcagatgcatgctgagaacaatgtggtcttgctgtc

SEQ ID NO: 823483 - DNA, 616 bp, Homo sapiens
gggtttcagatgcatgctgagaacaatgtggtcttgctgtctacacagaattggatgagatyagaatccatttggaaggggcattctcttcactgtggaaggaaagggtacacacttctaatagctcttgaattattttctgtttttccccatagaacatgagttcgagaccagcctggccaacatggcgaaatcctgtctctactaaaaatgcaaaaattagccgggcatgggggcgcatacctgtagtcccagctactcaggaggctgaggcaggaggattgcttgaacctaggaggcggcagttgcagtgagccaagattgcgacattgcactccagcctgggtgactctgtctccaaaaaaaaaaaaaaaaaaaaaacgagaaggggttgccttaactattttacaaaaatgtaaatataaagaggaaaaatgtggtttcgagcaccttcaatgagcactttgaccctggtgtcaaaatatcactagcaggagaaatggggaaatacagaaggtgaaaaactccaagggcagccctaatgcaagcttttatggagaaaatattagtgttattttttatcatgggaatgttataggaaaacatcctactgtat

SEQ ID NO: 823484 - DNA, 533 bp, Homo sapiens
atgccctgatctgctttgcgcctttgagttatcctctttccctgtcagcctcttcctcttcccagtagatcctgctggactcagcttgtcataacacactctaggcaagtgccagccaatcctaagtgcatcatactaacttacagaagccagagcaatgagaagtgagatgaccccctgtaggctacctgatttctaatctaatgccagttggtttatttataaaataagtggcatttgttgaaaatatctgttcttcttacttgaaacattgcttctttaatctcattcgccattctcctcactatgtggaaagtattttctttcttttaacttgtattttaagttcaggggtacgtgtgcaggttcgttagataggtaagcttgtggcatgggggttcaytgtatagattattttatcatccaagtattaagcctactacttcttatttattttttctgattctcttccttcacccttcagcaccctctacccttcaactggcccatgtgtgttgttcccctccatgtgt

SEQ ID NO: 823485 - DNA, 559 bp, Homo sapiens
ctgacctaagtaattttccatctcccygaggaatgtcttttaacatttcttgcaagacaggaaaattgattccgaactcctttagttttgcttctctctttatttttccttcagttctttaggataatttcactgaatgcaagattaaacactattggattattttgtttaccactttaaacattttatccccctctctttttgtttgcattatctctgatatgaagacctatgtaattctattcttgttccactatagtaaggtgtttttttccctctcatttctttagtgtttttctcttcgtctttgattttttctagagtgattttgatatgtctatttatagtttttaaaaatttatcttgttttgagttctctgaggttctgggatctgtgatttcatgtctttcattaattttccataatttctagcctttattacctcacacactgctttttttccttctctcttttttctgcttggtgttctcattaggcttaaccctttgtagagtgtaattaatgcctctgagtttgtctgttttggggcccaagcac

SEQ ID NO: 823486 - DNA, 252 bp, Homo sapiens
tttattttctgaattctggtgcttggacatcyggggtcttgctgaccctggaggtactgcccttgccagaatgagctggttcttagaacccagggctgtgctttccaaatcaaaccaaccacctggagtccatgctccaaccaccttctctgtggccctcacactccgggccaccatgcacctgcccaaatcacgccaggccagggaccagacaggaagggacagcccctcgcccctgagcctgctaaaatg

SEQ ID NO: 823487 - DNA, 566 bp, Homo sapiens
tctccttttaagtaactattttcacacacacacacacacacacacacacacacacacaaaatcagaactgcaaatgctaaaaattgggaggttaacaacaataaacaagaatattatgctgtatgyggcataaaagctgtccttagaggataataataattaatattactgtcatcaataagaatatgaagaaataatgaatgtaagaatttaggaagcgataagacaaaaacataaagaaaatagaggaatgagattagattaaatcaaattatttagaaattagaaaaatttaattgataaattcaataacttttcctttaaagagataaataataaattagtgttttattttaacaaatattatcaaggtaaaaatagagaaaatgaaatttaactgtgaccttagaaattaggaataaatttaaaatcgaatttagagaaaatagagctacaatatagatcttgttaatgatttggaattttatgtgaaatagagttcttcaaatattactaaatttatctaaagaacagatagagctcttgaataggtttcaatttcatag

SEQ ID NO: 823488 - DNA, 582 bp, Homo sapiens
agaatctaccttagctagttttagaggaaagagatatctgaataaaggaagcttatagaattactgggagagatgaagaaataaactctaaatttttgaagaaataattcttagaattttatcatagaactgaacttctttcctttttgttttttccttcttgagatggagtctcgctctgtcgcccatgcaatggcatgatctccgctcactgcaacctttgcctccctggttcaagcaattatcctgcctcagccacctgagtagctgggactacaggcatctgccaccacgccgggctaatttttctatttttagtaaaaatggggtttcaccatgctggtcaacctggtctcaagaactgatctactgaggggttgctgcctctcctgagaagttgatacggataattgctaccactgctttgggctccaggtgatactgtctctcccaaagtggaaactgtcattgctgccatcgactgcaraaaataaccagaaaatgggcaatttgttccttgcctgtttttttctcaaggtaagtgaaccccactatatctcatggacaaagcctaaatcaccc

SEQ ID NO: 823489 - DNA, 639 bp, Homo sapiens
cagaggcaaacacaggaatggaggctcatgggaacatggttctcactccatgatggcactggttcaactcatagaaactcaatccttatagcaatctcctggagtagataccattcktcttgccactttacaaaagagcaaactaagctgcagagagggtaaacacatatttgtattcactcacaaataaagagtagagccaggatttttgaactcagttagtctgattccaagaaatcctaatcttacctgccatgttctgtactacctcttaacaagaaggctttgtttgtaatacaaaaactactcctatgttcaattgcttttttataatatttcaaattaaagatgcagtttctgataagggaaaatataaaatatattagcacaaagcaacagttgtcatcagccaagttaattgattaaaaagcagataatttctatttcagtgactgccacaggagaggtggtcaataaattagaatttcccctcattgcagtgtttgattgactgatcaaactaattagatctgctggcaataaaggtatttggagacttattttaaaatcttctgatatttgagaccttttcctctgcttgtggaatccactgttcagacattttggtgggagacagtg

SEQ ID NO: 823490 - DNA, 595 bp, Homo sapiens
atgtcttcttatctctactaaatgaagtgagatgagaacccaaagatcttcccaacctggtttcatttactgggwcccaacaaatagcaccttttctatgcatcccgctccacaggtactaaatatatgttccatttttgccctttttatctttccttgtttaccaagaggctgcttctatagaacacatcaccctgccttgttttctagatggcaacagccaatgagaggtagcaaccccaatttggaaggcatgaagtgagaaagattagggtatttattctgcgtaccaccacctcacccagaactacagttttggcagtgccatgtttctcttgttcttctacccacagtctcaagtgccctggacagctcttttccaatggctacagtgtttgtgagttctagtaatgttgttctccttttagctcttcaggcccttgggcttccactgttgctagtacctggctactttgctattcaagtttgtttcccaaatccaacccatgcttctgtaagtagtcactccactaagctcttattagtaaattctttgaatgtagcctgtttcttagtaggaattggaccatagatt

SEQ ID NO: 823491 - DNA, 595 bp, Homo sapiens
atgtcttcttatctctactaaatgaagtgagatgagaacccaaagatcttcccaacctggtttcatttactgggacccaacaaatagcascttttctatgcatcccgctccacaggtactaaatatatgttccatttttgccctttttatctttccttgtttaccaagaggctgcttctatagaacacatcaccctgccttgttttctagatggcaacagccaatgagaggtagcaaccccaatttggaaggcatgaagtgagaaagattagggtatttattctgcgtaccaccacctcacccagaactacagttttggcagtgccatgtttctcttgttcttctacccacagtctcaagtgccctggacagctcttttccaatggctacagtgtttgtgagttctagtaatgttgttctccttttagctcttcaggcccttgggcttccactgttgctagtacctggctactttgctattcaagtttgtttcccaaatccaacccatgcttctgtaagtagtcactccactaagctcttattagtaaattctttgaatgtagcctgtttcttagtaggaattggaccatagatt

SEQ ID NO: 823492 - DNA, 595 bp, Homo sapiens
atgtcttcttatctctactaaatgaagtgagatgagaacccaaagatcttcccaacctggtttcatttactgggacccaacaaatagcaccttttctatgcatcycgctccacaggtactaaatatatgttccatttttgccctttttatctttccttgtttaccaagaggctgcttctatagaacacatcaccctgccttgttttctagatggcaacagccaatgagaggtagcaaccccaatttggaaggcatgaagtgagaaagattagggtatttattctgcgtaccaccacctcacccagaactacagttttggcagtgccatgtttctcttgttcttctacccacagtctcaagtgccctggacagctcttttccaatggctacagtgtttgtgagttctagtaatgttgttctccttttagctcttcaggcccttgggcttccactgttgctagtacctggctactttgctattcaagtttgtttcccaaatccaacccatgcttctgtaagtagtcactccactaagctcttattagtaaattctttgaatgtagcctgtttcttagtaggaattggaccatagatt

SEQ ID NO: 823493 - DNA, 458 bp, Homo sapiens
gtaccttcctgccccaaccttagatcccttaattctcttctcaaatatttaccaagcatctactatatgccaggctagacacgaatgcaaataccaatttctgcttagatatttcagtgtactagttagacaattacaacaaaaataacatggtaataattgaacacttactatgtgccatgctctatttgaagtactttatatgtattaactcatttaattctcacaaccctatgaggtggatactgttttctccttattttacagatagaaatgtaggcatagagaatttaagtaattggtccaaattgtgatacagagaagcacagggactataagagyacagaagagggactcctaatcaaaccccgggggtcagtatagagaaggctcctagagaaattagaaaaagcctgagtagaatcttgaaacctgagtatgaattagtcaggtgcaga

SEQ ID NO: 823494 - DNA, 458 bp, Homo sapiens
gtaccttcctgccccaaccttagatcccttaattctcttctcaaatatttaccaagcatctactatatgccaggctagacacgaatgcaaataccaatttctgcttagatatttcagtgtactagttagacaattacaacaaaaataacatggtaataattgaacacttactatgtgccatgctctatttgaagtactttatatgtattaactcatttaattctcacaaccctatgaggtggatactgttttctccttattttacagatagaaatgtaggcatagagaatttaagtaattggtccaaattgtgatacagagaagcacagggactataagagcacagaagagggactcctaatcaaaccccgggggtcagtatrgagaaggctcctagagaaattagaaaaagcctgagtagaatcttgaaacctgagtatgaattagtcaggtgcaga

SEQ ID NO: 823495 - DNA, 624 bp, Homo sapiens
cacatagcactgtgtgtagcctttgctctcaagctctgttatcttcactggcctgctcaacttgagggcaaacacgcttcctcctctttatcccgatgccagagctgtgcccagcacatagtgggcaccaaggaaatatttgtttagatgactgggtgaatgatggaatgaatatttctcaaacttgtgtgttccagcttattaataggctcttaatgggctataaaattaattttagcagaggtaaaattttacaggaggtaccaaccatcatttttatctgaatgaaatagaatagaattgagtttaaatgatcagagtggttacatatagtaaaggtaaatattgtttcttaaatcattgggggctgtgtgtgtgtgtggtgatgtattatgcttagactatgtttgtttgttttttaagtttgaaagccactgctgtagcagatccaaagataagtacaatagcttacaactaacagttcttctgttttgcacgttgtagaatctctcgtgyccagcacatagcagatctcaataaatatttgtgaaatacgttagttcataagactggatgaagtcatttgttggtggaatatgaaagaagaactgggccttgatggat

SEQ ID NO: 823496 - DNA, 678 bp, Homo sapiens
aaaatattaatattcttgggaacattttaattttcattaagaaaacaccaacttactggtttccattgaatagttctgcccagagtttcagctggcctataaaggagtgtggagtagggctgatcacttctgtacatagaagcccacatcctccaccatctgcccagcagattctgaaaacaaaaaacaaaactgctctgcttagggaggcaggcgtagaggtggactccccagccctgctcttgagggtgcgatgagatctatagtgccagctgtgctttggagctggcaatggcaagagcagtgggcttgccagtgtgaagcagaggtgcatatatgagtaattaggaggtaagtctcataaaataggtgagtgagaagaagagaaacttgaaaacggagatgatgagaaacagaaaacaaaaccatcagtgaattatgtggcggggggtctcgaatatctttagtaatattgtctctgcagtaatgtgcctaagagctgttagagaactgctccctttgggtaacattcctatagctgataagttttcagagacatgcagctctcctccagagrtcctctatctcgggacttccagagttctaggcgtctgtgtcctccctcttgacttcattagggatggccaggatcctctccaatgttctatagttttcaga

SEQ ID NO: 823497 - DNA, 648 bp, Homo sapiens
tgcactttggtgccattaagtaaaataaaggttccttgaatacaaacagtacaatactgcgaaggtaaccaaaagggcyactaagtgactaatgaacaagtagtgtatacaccatggacatgctggacaaagggatggtttacatcccaggtggggactgtgccagattttatcatgctactcagtccagtgggcaatttaaaacttaagaattatttttgaaattttctatgtaatattttcagaccttgcctgtctgcaggtaacaaactgcagaaagaaaaaccacagagaagggagactatagaagtattctaaatcacattcttattaaaactatacagtcagtccctgagcactaggcagcagcactcctgctcgcccttttccaacggcccaccactgaagggcagcccgatgcctggcagccaccctctagcaccatgtcacagagcagagtccccacgatgcagaagaagagtctgcagggctcctggcagaattacactttagcaataataggaatgggggcagtgttccagcctgtttctgtttctaccagtgacatggaaaaagtactactagatgcccagcatgagtctggacagaatatctccaagagttctcactgtgacaggatacctcgct

SEQ ID NO: 823498 - DNA, 578 bp, Homo sapiens
aataatgatatacaaaactgcccaggccagtctcaagctcattgtaaaggacattccattttcttccatcaaagcagtttagcattatcaaacattgaattcaagtattttcttagttcctgtggttttttgttttgttttgttttgctttttttgaattgcctttgaacctaggagtcaggtataatgatttgacatcaagtaatcttatgtctaaatttgttagctcatcagctatcgtcagtgttagtgtattttacatgtgggccaagacagttgttcttccagtgtggccagggaagccaaaagattggacacccccgtactaaaggttttctctgtttgtttttcttgaaattatgaatactttcctgaagtattactagtaacattttattgccaatatgtggcttattgtagctttataatgcccaagatgcaaagcatgtctaagatagaaattgctttcaggtcaactggtatttcctgtttatagtgcatctctcttaatattatgaaatacttctaagttcmggattgttcttgtttcttattttttttttccttttcaaatgagt

SEQ ID NO: 823499 - DNA, 610 bp, Homo sapiens
aagtgcaaaaggaaatacctgcctggcctttgagtgatcatgatggtgactattcaccattgcaatgtggattgtaatgttggaagacactccaggctctgggaaccttgcttttagtaataaaagccccatttagaagtaaccaggtagctagaacagcagggctagaatcaaaccgatcagaagccacgcaggaggcttgtgtgggggcttctcaggacatcaagtttcatcctgattggtggccttgttgtttcagaagtcctcacttgcccacagaacaggtttctcctcaacctactcgcctgattggtgggaaaacccccactggtagaagtggcggctgtcagggtaggagggcagaggctggtgcaagatttggaggcttttatccttcttatgtgatgtgtgatatgcttggttcatctaagtgtagtgggtctactctggcctcagacaggcggaaagcatatggagataagcagggtggaagtctstggaatcaaagcccaggggtctgggaaatcagctggagctctcagatgtaagcagcagaaacgaacaagggctgttttcagcaggcagtatccatcacaattaccttaggtat

SEQ ID NO: 823500 - DNA, 602 bp, Homo sapiens
attggacaaagcatagtaagttgtgaaaatgaggaaagacaaagggacttgggckagggagctaattgggtagacatgtgttcgggaagatggtataacaaggtttgtttgtaaagaatttctccagcctcagttttccgtccttgatgataggaaggttgcgtctggcagcagaatctttgtctggggggagctgctgtgcaaaccaccccctaccgaatttctcctctcccgctttcttattgcaggtagtactccgttcacgcccagctgtcctgtagaatggcagcctaaatgtgaacaaaagctatacccccttcctttgatgcctttagtccaactaaaagaggctacaagtttccaaatgaactttgcattacaaacatgaagatgtgaaagtgaacagagggaagatgagggcaggccaaccccaagggccaaggctgctgcttatcttctcctgaagccccttcctctcctgacctctatggagaagcccccctaaagttcctttctctacccccagggctaggttacagccacctcctaggtagacagtgggagactacagaaccacaggcccctccaaatacccttggcct

SEQ ID NO: 823501 - DNA, 602 bp, Homo sapiens
attggacaaagcatagtaagttgtgaaaatgaggaaagacaaagggacttgggcgagggagctaattgggtagacatgtgttcrggaagatggtataacaaggtttgtttgtaaagaatttctccagcctcagttttccgtccttgatgataggaaggttgcgtctggcagcagaatctttgtctggggggagctgctgtgcaaaccaccccctaccgaatttctcctctcccgctttcttattgcaggtagtactccgttcacgcccagctgtcctgtagaatggcagcctaaatgtgaacaaaagctatacccccttcctttgatgcctttagtccaactaaaagaggctacaagtttccaaatgaactttgcattacaaacatgaagatgtgaaagtgaacagagggaagatgagggcaggccaaccccaagggccaaggctgctgcttatcttctcctgaagccccttcctctcctgacctctatggagaagcccccctaaagttcctttctctacccccagggctaggttacagccacctcctaggtagacagtgggagactacagaaccacaggcccctccaaatacccttggcct

SEQ ID NO: 823502 - DNA, 613 bp, Homo sapiens
tatagagagggaaaatttcaacacagtggtgcatacagggagacagctgttcgaacacaaagacagagatttataagccaaagaaagagggctggaacagaggaamcaaccaccgtgacgccttgacctcacctcagacttccagcctccagggctgtgagacaacacatttctgttgtttaggttgttgtacactttgttacagcagccctagcaaactagtacatatgggtacaccacattttgtttctctgtctgtcacttagacttttggctcatttccatttttttggctattacgagtaatgctgctctgagcatccacacacaggtgtttgttttcatttctcctgggtatgtacataggagtggaatggccaggtcaaatggtaactctgttgaactgtttgtggactgccaaactcttttccagtgtggcactgccctttcacattccctgcaggaacatatgagggttctcatttctccacattcttgttgacacttgttacgatccttcttttttactgtagccatcttagtgggcgacggtggtgtctcactgtggttttgatttgtatttccctgaaatgatattgagcatcttttcatg

SEQ ID NO: 823503 - DNA, 613 bp, Homo sapiens
tatagagagggaaaatttcaacacagtggtgcatacagggagacagctgttcgaacacaaagacagagatttataagccaaagaaagagggctggaacagaggaaccaaccaccstgacgccttgacctcacctcagacttccagcctccagggctgtgagacaacacatttctgttgtttaggttgttgtacactttgttacagcagccctagcaaactagtacatatgggtacaccacattttgtttctctgtctgtcacttagacttttggctcatttccatttttttggctattacgagtaatgctgctctgagcatccacacacaggtgtttgttttcatttctcctgggtatgtacataggagtggaatggccaggtcaaatggtaactctgttgaactgtttgtggactgccaaactcttttccagtgtggcactgccctttcacattccctgcaggaacatatgagggttctcatttctccacattcttgttgacacttgttacgatccttcttttttactgtagccatcttagtgggcgacggtggtgtctcactgtggttttgatttgtatttccctgaaatgatattgagcatcttttcatg

SEQ ID NO: 823504 - DNA, 218 bp, Homo sapiens
cacatgcccctttgccctgagycaattttactatgtattctttcactgtaacaaatcaaagcccagagtagcactgtttgctgagtccttccaagtgaatcgccaaacacagaggtggtcttgggaaactctgacataatggcattatatgaaattagttttctttaaggtgatgtgacctgtgactacgatcagaaggctgtttataaaacaccttt

SEQ ID NO: 823505 - DNA, 218 bp, Homo sapiens
cacatgcccctttgccctgagtcaattttactatgtattctttcactgtaacaaatcaaagcccagagtagcactgtttgctgagtccttccaagtgaatcgccaaacacagaggtggtcttgggaaactctgacatartggcattatatgaaattagttttctttaaggtgatgtgacctgtgactacgatcagaaggctgtttataaaacaccttt

SEQ ID NO: 823506 - DNA, 250 bp, Homo sapiens
ggaggacttcaaaaccaatattcttctgaagaatctagtgtccattgccagaaaagccagtctctggcaattcctgagycctaatgagcaaatgtatggaacccatggggagacaaagaagatatttggagaggtggaaaaacagcctgattcatttgctgtgctggaactctcaggagcatggggctcacacacactgtgaggggcagctaaggaacactgggtaagtgatggctctgagagcactttg

SEQ ID NO: 823507 - DNA, 250 bp, Homo sapiens
ggaggacttcaaaaccaatattcttctgaagaatctagtgtccattgccagaaaagccagtctctggcaattcctgagtcctaatgarcaaatgtatggaacccatggggagacaaagaagatatttggagaggtggaaaaacagcctgattcatttgctgtgctggaactctcaggagcatggggctcacacacactgtgaggggcagctaaggaacactgggtaagtgatggctctgagagcactttg

SEQ ID NO: 823508 - DNA, 250 bp, Homo sapiens
ggaggacttcaaaaccaatattcttctgaagaatctagtgtccattgccagaaaagccagtctctggcaattcctgagtcctaatgagcaaatgtatggaacccatggggagacaaagaagatatttggagaggtggaaaaasagcctgattcatttgctgtgctggaactctcaggagcatggggctcacacacactgtgaggggcagctaaggaacactgggtaagtgatggctctgagagcactttg

SEQ ID NO: 823509 - DNA, 250 bp, Homo sapiens
ggaggacttcaaaaccaatattcttctgaagaatctagtgtccattgccagaaaagccagtctctggcaattcctgagtcctaatgagcaaatgtatggaacccatggggagacaaagaagatatttggagaggtggaaaaacagcctgattcatttgctgtgctggaactctcaggagcatggggytcacacacactgtgaggggcagctaaggaacactgggtaagtgatggctctgagagcactttg

SEQ ID NO: 823510 - DNA, 584 bp, Homo sapiens
tggtctgtctgcctcagctctccctccaatgagcaggagccctcttctccgcttcattccttagtggaggctgagcagtccctccagatggggcttccatgcccttgggttttccaccacttggctcccatctttttttcatagcaggtagtgggtttggtcactgcctctccagtgagcctggaggggccacgaggacagggcagacccctcctgctcataagtggaccccagcctgcacagaaactggctcccagcagagctggtcgtgatctgttgataaagacacagcaccctctgtccctggaggtgtggccagggcacatctaccccgctttgcttctgtccttctcaccacaacacgcttcttatcactgtgcccccagaatgacaggatagtggtgattgggaaggggctgaaacacacctgactcggtggatgtagcactccactgtcacacctcatctgtgtatgtgtgtgtgtgtgtatgtgtgagcatgtgtccatgtgtgtgcatgtgtgtatcygtgtgtgcatgtgaggacagcatttttggctctttaagtttgacctggaatgtcca

SEQ ID NO: 823511 - DNA, 476 bp, Homo sapiens
ccggggcaagcatgggccctcgggcccttgaccctgggatgcagctgtttcgtgtctaccactggagagcctgagcaggtcctgtcctggctgtggtgtyctcctgtgtaccaggtcaggctcagggagagaatttcagagatggctttcagctgcagactgttcctagaatgtatgacctgtgctgtaacaagcaaagctggtaaaaaaaaaaaaaaaaaaaaaaaggaagatgacctggtatagtggagctctgggtatcactggcagcaaaataccctcagtctctcagaaatggcaccaaataaagaggaggtgcttgccagggccacagtgagggcttgcggacagcctggccacacattcacttcccagaggtgagaccaattggaatttagaagatgcttatgaaagggttaattatgcagggttttttttttttttaaactaatattgatggaaggctgttccaactg

SEQ ID NO: 823512 - DNA, 489 bp, Homo sapiens
atggcggttcccgtcagctcaggacctcaacagttactcttcacagragaacagaacccaggggtcatgatggcaaactggctactcggggatggcccagtgctgggcttgggaacactacaggagtgtcaaagacaaggtgaggggagccattgatctagggtgaacttgagtatcagtccttggggtaactcatggagggagggcagtgtgtgatttggtcaggggtagtagaagaagatgtggctgtgagagtcaaatcaggattttgtgcctgtgatgggactgtcagttgttttgtcatggcgtctcgtggcctattacaaggcaggcactgcccagcaaggaggccaggcgcatagaatttacaaagcagtcctgagagaaggacttctgctcaagcagcagggctggggccagatgtacttttcaggccagcaggtgctctggttactggaacgtaactcatggggacttggggtttgagtg

SEQ ID NO: 823513 - DNA, 602 bp, Homo sapiens
aagtcgacgtgagggaaattggttgaagtcactcaaacctgaggctgaagggcagtcactttataaaccttaagagtaaccgaggggaaagaaaaagacctcaaagattscaaaactttagattttttttttgtgattttgtagaacatgaggggaatctggggccagaaggcatttgtacctttaaaccaggcaatcaaataacttagttttattattagaagcaagaatagtattaaaacgccttcaattggattgcacgtgtgtaggcataattcaggaagaaactaaagatcgtgtcatgtcaagtgttactaaagttcaggaaggaaaagacaaagctccaggacacgtattttctgttgaaataaaagaaagcaagccagaaatagacagatcaggacagggaggcgtgcaggcggtggcctgattttgaatatttgatggtttccttcagggaatgtttgatgcttttatcgactaatttggaattgaaaaaaacaaaacaaaacactattgcttcaatattaaagtgatcagggaattgcataattttatggtgacaattttaaagagccacaggtagttttggaagcagactg

SEQ ID NO: 823514 - DNA, 620 bp, Homo sapiens
aacaccatcaaaatcaaggcataaaataattccattacctcagaaagttctcttgtgtctcctttccaacaaccacagaaactactcttttaaattatatcacaacagattagkttagcctccactcaaactttatataaatgggttcatatctgtttttagtgtctagctttctttattcaacaaaatatttttgagtctttccatggtgtaaatgctgcatgtatcagtaatgcatttttatttattaatttatatatattattggtatttaactgtatgactaaaatgttagtttatctatctctggttggtaaataattacactgattccagttttattctgttttgaaaaaagtatacaaacattttatacacttttttgtgaatatatacattttagtttctttggataaatactgagcagtcatattgctgggtcttagtttattagaaattgaaaactctttttcaaattgattgtatgatgtgcaatgctattagtaatgtaagagatgttcttccacatccttgccaaaatttagtgctctttttttatgttagtcattttagatgttctagtatctcactgtgattttaaattatattttcctaactag

SEQ ID NO: 823515 - DNA, 620 bp, Homo sapiens
aacaccatcaaaatcaaggcataaaataattccattacctcagaaagttctcttgtgtctcctttccaacaaccacagaaactactcttttaaattatatcacaacagattagtttagcctccactcaaactttatataaatgggttcatatctgtttttagtgtctagctttctttattcaacaaaatatttttgagtctttccatggtgtaaatgctgcatgtatcagtaatgcatttttatttattaatttatatatattattggtatttaactgtatgactaaaatgttagtttatctatctctggttggtaaataattacactgattccagttttattctgttttgaaaaaagtatacaaacattttatacacttttttgtgaatatatacattttagtttctttggataaatactgagcagtcatattgctgggtcttagtttattagaaattgaaaactctttttcaaattgattgtatgatgtgcaatgctattagtaatgtaagagatgttcttccacatccttgccaamatttagtgctctttttttatgttagtcattttagatgttctagtatctcactgtgattttaaattatattttcctaactag

SEQ ID NO: 823516 - DNA, 628 bp, Homo sapiens
ctgtgttgaataaagatggtgaaartgagcagcatccttgtcttatttcagatcttagagaaaaggctttccatttttttctgttcaatgtactaggtgtgggttggtcatatatggttatattgactttagatatagtctgctccgatctctttattttacagataaaggcaacaaatcttcgagagagtaactcactccctgaagccctagaactaaaatataataaaaccaagtctagaacccagatgaatcttgtaatattgtgttattcctgtcatacttttcaacatagaacatttgtaattatcctttttgagaaatattaggcatcttcccttctttgagaactagataaacccttcattttggcacgactaagtagaatatttttgttttttggcttctaatattgtttggaactaggttgattagatgtctttcattttcaaaaggctgtaagcttattgagttccatttgatgttatttatctttgattttgccagagtccaatatcatatcttacacatagtaagtgggcaagatgtttgaggtatattatgcatttgttcacttagtgattggttgaatttcctcttagcaggagaaaaacaaacactgaatcat

SEQ ID NO: 823517 - DNA, 609 bp, Homo sapiens
aggcacacctttgggtgctytgtcattgcttactggatactcactgtgcactggtgtgtgtgcctgccattggggtacctgccatgtctggcccatcttatgcccctcctgccccacccaagggctgagcaggtagctcagaccactgtacactccatggatcaccccactgactgaggcaatagagagcttctcccagtaaacaaaagtcaaatgtgtatatctagttacattggctgcaactggctcttacctataagtgcaatctactggcttatagattgaattgcacagcctaatataaaacctgctcaaagatgttcatagggctatagaagcaatgccaaaataccctacccagtattttctacagtcacaccacctggagaggggatggtgaaagggaaagtaaaagaaaaaataataatattataaaaaaagaaaaattaaaaatcctatccaaacaaaaattattacaaaaatcagaagtaccagtgtctccagatgagaggaaaccggcacaagaattctggcaccataaaaagtatgattgtagtgatatctccaaaggatcacactagctctccagcaatggtccctaaccaaaag

SEQ ID NO: 823518 - DNA, 352 bp, Homo sapiens
taacatggtttagctatcaatttatcccagtcatctttaataatgttgcataaagttttaattttttcatgaagtttttttwgcatctctgttaaataaatttctgaattacagttttgtgattactttttactttacttttactttattagctaattttaaatgtagattattctttttatttattctatagtttttttattttacctttattttttatttacttattttatgtagtagattcaaatattgattaactagagaattacagcttttttcatacgttcttctagctcacaaatgttatttattcatttattttaaaataattattgagaactgaatattaagc

SEQ ID NO: 823519 - DNA, 556 bp, Homo sapiens
cataaaatatggatgaatcacacaaacattatgttgaatgaaagaaaccagacacaaatgagtatgtaggccctatataattccacttacrtaattttggtttgctatataaatatattcaagagcaaacaaaactaacttttatcagttagtgaccctgaggaatcataagtagggttgccagggtgctaacaatatttcattcatgattcaagtgatggtcacactgtttggtttgtaaaaaatatatcaaatggccaggcatggtggcttatgactgtaatcccagcactttgggaagcctgagttgggcagatagcttgagctcaagagtttaagacctatgagtgagaacatgcagtgtttggttttttgtccttgtgatagattgctgagaatgatggtttccagcttcatccatgtccctacaaaggacatgaactaatcattttttatggctgcatagtattccatggtgtatatgtgccacattttcttatgtaccctaaaacttaaagtataatttaaaaaaaaagaaaattactttgcaaatcac

SEQ ID NO: 823520 - DNA, 539 bp, Homo sapiens
ttcatacattgatgcaactccctgtaatccaaatatataatactgttacatctaaatatgaatttaacaagaaaaacataggataaaaaacaacaaaaaaaatcccattaacactagattaaatttatagaagtgcctgacaaagacttgaaaataaacaattttagaatgcttagaaagataaatgacataaagagctccagtctgcagctcccagagagaccaatgcagaaggtgagtgatttcggcatttccaactgaggtacccggttcatctcaccgggactcattagatagcgggtgtagcccacggaggccgagcagaagcagggtggggaatcacctcacccgagaagcagaaggggctggggaactccctcccctagccaagggaagctgtgagggactgtgccatgagggacggtgctatccggcccagatactatgcttttcccatggttttggcaatccacagataaggagattccctcgggtgcctacaccaccagggcccygggtttcaagcacaaaactgggct

SEQ ID NO: 823521 - DNA, 383 bp, Homo sapiens
tgaatttggttcctgccctcaaggaactcatagtctakcaacgaagattaacaaataatcaattgtgattgtgtgtgtgtgtgtgcgcgcgttagagagagaggaaaagagaggctgtgtctgaaaatggtgtgcaccaagagttgagggaatgaattaaagggtgtggaaccttcagccacggaggtaggacaaacttcctagaaggagtaaagaggggacattcatgtgagtcttgaggaataactgaattttcaccaagtggatgagggtaatgagcatttctggcaaagaagggtgtgtgcagaggtactgaccaaagaacaacatgggagaggagaacaactcatctgtgctgagcagagggtcctgggtgacgcagg

SEQ ID NO: 823522 - DNA, 618 bp, Homo sapiens
aagcactgttgagtgatcatatgcaaaatactgtggggacggggttctgggagcacctcacaaaggaggggactgtggggcatagccaaccccaggggctcggctcctggccactgtagctggccttttcctgaaagcagatcttaaatgctcctatcagacacacacacacacacaaacacatacactcacacacattcacacacacacacactatgtgaggtgatgactatcttaattagtttgattgtgctgattatctcacaatgtatacagagattagatcatcaagtcatatgccttaaatctatacataaataaaataactggccttttcctggctgcagagatgggcaacctgagtccacagtggggcagtggaaaaggggtttctgcccctccagtcttttctccagcggggcaggtgggcacagttcccccaggtccaccccaggggacccaggggcttgtttttcactgtttcttcttcccataggaaaaattcaaacagacccaatcccctcgggccctgggatatgagccagattgcctyggcggagggtcttctatgaccccagcccctttcagctgctctctgacccctccatcccccagcat

SEQ ID NO: 823523 - DNA, 562 bp, Homo sapiens
caataaatagtagtttttaccaccgccctcccttcccgtatctcaagacactttcttatggaggtcaycacctccttgggttacctgccaacatcgctgacccttgtctctgatttccaggcgtctctctgggaaccatctctcacacatcccaggacaagcattctctggtctctacagcctgaaaatcctgtaagtataggtacacctcattttacatagagctgcagcactgagaatggtgagcaaatcaaagttttagaacccaagtcttggtttaccactgacttgcttattatgtccttatcttcactttcagtttcaattgttatttccatttctttgcttcaccttgtctgtaacaaactttatgatttgtaaataaacatttaattgtacctgctacattcagccacactaaaaggaagtgaaacatttaaaaaaattaaagtgtataatgaccatcgacataggtctttgtgggactgagttcagttacagacccacaggtctctccccatgacctctagcccaagagacggataagactgtttctggagag

SEQ ID NO: 823524 - DNA, 505 bp, Homo sapiens
ccaggcccaggctaatagtaggtggcttgtgccatgggttttcccaggctggaaggccccagggccatttctgctattgacacacccccaggaagtgcccgaaaccaagctaatgaggcctgggactacttagagctgcattggggcttggggagccggggcgggagggtgggggacagctacatcttttataaggaccatgggaggtgaggaggtaagagcatgaggcagctcaggctggcttcagcccctgcccttgggacagaaggacacccacagaaaccaaaagaggcgcttacagttcctgcagtctgcccagggtccggatggccacagggaactcctgcagcttgttataattcaggtctctggaacagaaagcagagcagtcattagrgcaaaggcttaatggggcatgtcagggtccctgagaaatggaaacttggctctgggcttggccagggagatgggttttccaatctgttggatccagcggccaatgtct

SEQ ID NO: 823525 - DNA, 505 bp, Homo sapiens
ccaggcccaggctaatagtaggtggcttgtgccatgggttttcccaggctggaaggccccagggccatttctgctattgacacacccccaggaagtgcccgaaaccaagctaatgaggcctgggactacttagagctgcattggggcttggggagccggggcgggagggtgggggacagctacatcttttataaggaccatgggaggtgaggaggtaagagcatgaggcagctcaggctggcttcagcccctgcccttgggacagaaggacacccacagaaaccaaaagaggcgcttacagttcctgcagtctgcccagggtccggatggccacagggaactcctgcagcttgttataattcaggtctctggaacagaaagcagagcagtcattagggcaaaggcttaatggggcatgtcagggtccctgagaaatggaaacttggctctgggcttrgccagggagatgggttttccaatctgttggatccagcggccaatgtct

SEQ ID NO: 823526 - DNA, 665 bp, Homo sapiens
ggggaacgtccttaagattttgaggttgatgttgcaaaaggcacaagatagtcctgagtggcttgccyggggccacagagaccatgggatggtttcatgtgactttgctatcattgagtccttatacagttcattggacccatgtccaggcaatccattgagtagttccagccctccttggcagtttctggtcaggaattttgcaggagtggcctaacagacagtagcaaaagacatatggtaaaaggcatgtgaactacaagtctatttttgtcgagaaatgggaaagaataaaaactgtgcaaaggtcaaagagaatgctgcaaactccatgccaatgaggtggccggagttttcccatttggacgtctacacagattttatgacctgggaaattgccaaagtcctgcttcatatagtaccatgtagatgtaatctgtggctctaattgtccagggaacatgtctttgcaactctctccgctcctgatggattcaactcagtgcaatgaacatttgttgcctccttgcaatacacaaagaattctgctgggtaaagtggaaggtagagagatgggtttaaaaaaaaaaacccactcctatctagacaaatgcacaagataatgaaagagcatctttgacatgactgtggagagcacacgaagc

SEQ ID NO: 823527 - DNA, 617 bp, Homo sapiens
ttcaatgtattatttaattggggctagttacaacagtatagtgattaaaacacaaggtgggctttgtgagtctcagacataggctggaattatatcaccactcacttaatagctgtgagacttctggctagatatatacgttttctactcactttggtcagctctgaaatgggcaaagtgatactaaatggaaggctggggcaggggtaaaggactatgtgataacgaactattaaattcttaatatacatcctggcccccactaagaactttatgtaataatttcacatattctcttccctccaaaaaaaaaataacaacaaaagatgagtgatacgatatagaatcccagtatgtaacataatacaaaggaaaaaaagcatctgttttggattcaggtgaatctgtcctctctaggggtatgactttgggcacggagatgtggagcaaagtattcactcaaatcagaatatggaatggggcagagctgcagaagctactgccattcccaggaataataagctaagggggtatccgacaccttkaagtgctagtgtgggtgagcaaagactcctgagcttggcacttgaaagatctttgagtgaaaacataattag

SEQ ID NO: 823528 - DNA, 540 bp, Homo sapiens
tcacttcattttctactgggctctactgcttatcttactcagatctcaatctccaaattttgtctagatatgtcattgattatgcctattgcctatgactgtgtgtgtgtgtgtaatttatggtttaaagagtatatacatgttggtaatatttcacaaatataaaatggattgtttaggacacagtcaactccctgtcctgaggtaatatagcttaaatattactttattggttcttatggctgcacaaaagacatttaacaaatctatttttttcctaaaacaatgtaaatgtatttattattttccttcaccaaaacaactacatatgtgaatccaacatcaccatatctcatcatgattaaatatacaccagggcctttctagaaactacagttctgattacattatcagagcaccctcctctgtatataatgacagctagcaggtgttgatgcaaacagcttgcastggaaagctttttagtaggatagagttaggcatctaactctcacctcacatcctatctctaccatttgc

SEQ ID NO: 823529 - DNA, 535 bp, Homo sapiens
tgcttataaaacaaagtattttgatatgattattctgtctctcccatccaggggaaactttatcatgtcaatctctgttggtctatttcctcatttttgcmgtggggctagaattataacttgtgaatatagacatcatattcacttaaccaaataatgaaacaatgcatggaaacgtggtttagaaactgagaggtgctatgtggcagtattactactactactatgattaatagattaacatagtggttgcatgtgtatatacatttctctaaactcacctaaaatctctatattttgttgtatgtaaattatgcctcaatttaaatataagcttctttgtggaagatagcagagcagggtaataattactctgtttatcatgtagcaaagaggtaaatatcaaagcagcccctattcctattcaagtaattacagaatacgtgaatcccttttgctagttttccctgatatatgagacttattggattaacttgctttctggagtaatagtgagtactctgctttcactcct

SEQ ID NO: 823530 - DNA, 611 bp, Homo sapiens
caatttgttcctcataacaaaagagccaagctttgtggagtgctcactttgtgccaggcataacaccagatgctttaatgaatgtggccttccactctaacaatgaccatctattgttatctccactttacaggatgagagaagttatactggaagagaagaggcaaagctaggattcaaagccaaacttctctggcacagagcctaaactcctggacaccctgcgttctattgcttgaaggacaggctgtcctatgcctagttgtctttcaaaaagcaccaaggtagttgcctcagtgctcagaagatggaagacgctcaataggtagcttttgattgatggagaagattttgtgattgggtaaaatttttaattttggaaagaatcctgtacatttatctaaaagaaaatttggtctcaggcacttcaaagtatgctgaagttttcattactaagttttaaagttggtaatgggaattgagttgatgtctactctatttaatttgaatggcttttgaatatacaagattaaaatattttgtgatgatggttattagggcagtttaggataaggattaacacagcgaraaagggctttttggaaaagtga

SEQ ID NO: 823531 - DNA, 607 bp, Homo sapiens
aagcttagacatacatcagatttatcaccacagcaatmcatcttctacataaccatcagaataatctttctaaaacagtcttgaccactaaatcattcactgattactcaaaatgcttcagtcatcccctataggaaaaggaataaataataaaacgcaacatccttagtcttatatacaaggcccttcccaacatggctttcatgttgagaaggggcttactatctcccatcatttccctaaatcggcttagaagacaggattgtttattcagtgatttagttatttattccttcaaacaagtatgtattgagggcctattatggaccatatatagtcttctagtagctggaaatttaaaaaataatcaaagtatttttttctctccacaatggggtcaaggcttattggaaagacaaagataaaatacgaatggcaactcaagtacattttgtatgataattatgatgattctttaacccagatacccttttgcaactattcatttattcattgtgcatttattgagtgtgtactgttgagcctcatgagagcacctagagaaatcagtggaaatgcattgagcttaagttttccaatttaaccg

SEQ ID NO: 823532 - DNA, 618 bp, Homo sapiens
gcgatagtttttgcaggtgggtgggaggctccaaagccagtgggcctgcagttgtatcatgatctctgccgcttattaacctatacacggtatgaatttgccctctgccaaagactaaactatactcagyttccaaatctgttaaatggagtcaataaccatatgtatctcttttaggggacttgtgaagattaaactagtgtttaggcagcactggcactagtaagtaccctacagatattagctactgatattttaattattattattttgtcttcattgaggaaagctgaacaaaagcttctcatggtgagggaaaaattcaggcagaatgattgtataagtgcacacataggcatgggcttgactagtaaggtttttgagtaggggcttcagttttctgatacctgaatgcagccttgaaatgctgcacaagctttcacaaatgcaaccttcttcccagggaagtcacttctttccggataagcaagtcaggccccatccagtggcagcactccaagtgaagcctctttttttggtgtgatagtagtctgaaataagcatttcaattagattcattaagacagttattacttggtaattgaatagcaacagatt

SEQ ID NO: 823533 - DNA, 618 bp, Homo sapiens
gcgatagtttttgcaggtgggtgggaggctccaaagccagtgggcctgcagttgtatcatgatctctgccgcttattaacctatacacggtatgaatttgccctctgccaaagactaaactatactcagcttccaaatctgttaaatggagtcaataaccatatgtatctcttttaggggacttgtgaagattaaactagtgtttaggcagcactggcactagtaagtaccctacagatattagctactgatattttaattattattattttgtcttcattgaggaaagctgaacaaaagcttctcatggtgagggaaaaattcaggcagaatgattgtataagtgcacacataggcatgggcttgactagtaaggtttttgagtaggggcttcagttttctgatacctgaatgcagccttgaaatgctgcacaagctttcacaaatgcaaccttcttcccagggaagtcacttctttccggataarcaagtcaggccccatccagtggcagcactccaagtgaagcctctttttttggtgtgatagtagtctgaaataagcatttcaattagattcattaagacagttattacttggtaattgaatagcaacagatt

SEQ ID NO: 823534 - DNA, 581 bp, Homo sapiens
ggcaggtaaatcaaaatatcatttatgtgcttctttacctcaaaattatcgtagttatcagaccctcagcttaatcttcttgttttaatacatgaacaaaraaacatattacattctaacacacattttaaaaaaacattttgataaatgtattatagtgttacctttgtaattccacatattttgttttatgagtttcaagtacttgttctaggagcccatagccttcactagactgccaacaaatatggtcaataaaagattgaaatccccatgaaagacattttaaatatgttactttaaccatcacaatgatgctataagttttcttgttctcctttcactggtggaaaaaaaaattgagtgttaaagaagttaaatgacgaccccaagcttattctgccattacatggcagggccagtaattgaactccaattggcttgatgctctattgctcttccaggcccttcacccttctgattgctccactggtaaagggaaggaggatttgctcaatggtcttgatcaggccccaagtctctgaaaaggtcttttggttgctacaaagtcaagagcccca

SEQ ID NO: 823535 - DNA, 620 bp, Homo sapiens
acatgggtggggcaaactaagaccctttcgctccccagggtgggccctagggctaaggaacggaagccacaggacttgatttcttccttttgtcctcctttctctccttcttccctttaaatggagaaaatggagacctggtaacttaagaaaattgggggataaaggggcctagggcggataagcagcagacactcagtaagactatgcttcaaaatcccctccttccctccctccatccatccttctgttcctcccattctttttttttttttgagacagagtctggctctgttgcccaggctggagtgcagtggtgcgatctccgctcactgcaatctctgcctcctgggttcacaccactctcctgcctcagcatcccaagtagctgggactacagacacccaccaccatgcctggctaattttttgtatttttagtagagacaggggtcaccgtgttagccaggatgctctcgatctcctgacctcgtgatccgcctgcctcggcytcccaaagtgctgggattacaggcatgagccgccacgcccggccttcccattctttaattgggagtgagtgttctctctttggatccctgttatatcacacagctatca

SEQ ID NO: 823536 - DNA, 644 bp, Homo sapiens
ctggcctcttttttttgtatattacctgatctcaggtattctgctatagcaacagaaagacgaagacagaatccttagctgtctgcaagtgtgcatgccattttcatcmtctgaagagtcagcgagtgtcttaggtggagtcttgcaaaagcaggccctgagccaaagatttggatgcaaatgacttgttaagaaagggctcttcgagaccgtgccattgcactccagcccgggcaagaagagtgaaactctgtttcaaaaaaaaaaaaaagtggggggctcctaggaaaagaacagtaaaggagtgggggatgaaggacagggaatgggaagaagccaagcgagagcatgatttcagaagtcctacactcagcctgatcacacgggaagctttagaacaaagaacacacctcagagtttttcctgcctcaacacaaaggagctgggctttggtgctcttcatcagcctgtctttggctatccagggttgtggaacgaggtgaaacataaaactccgaggtacttccggctccctccagtgtctgagggtaatctgcaggactgagggtaattgcagatgctagctgttagcagcaaactatgcaaaagctgaggactggcttataaagccagatctgggtgag

SEQ ID NO: 823537 - DNA, 644 bp, Homo sapiens
ctggcctcttttttttgtatattacctgatctcaggtattctgctatagcaacagaaagacgaagacagaatccttagctgtctgcaagtgtgcatgccattttcatcctctgaagagtcagcgagtgtcttaggtggagtcttgcaaaagcaggccctgagccaaagatttggatgcaaatgacttgttaagaaagggctcttcgagaccgtgccattgcactccagcccgggcaagaagagtgaaactctgtttcaaaaaaaaaaaaaagtggggggctcctaggaaaagaacagtaaaggagtgggggatgaaggacagggaatgggaagaagccaagcgagagcatgatttcagaagtcctacactcagcctgatcacacgggaagctttagaacaaagaacacacctcagagtttttcctgcctcaacacaaaggagctgggctttggtgctcttcatcagcctgtctttggctatccagggttgtggaacgaggtgaaacataaaactccgagrtacttccggctccctccagtgtctgagggtaatctgcaggactgagggtaattgcagatgctagctgttagcagcaaactatgcaaaagctgaggactggcttataaagccagatctgggtgag

SEQ ID NO: 823538 - DNA, 638 bp, Homo sapiens
acacacaaaggcttatatcaactcctgtgtacacgctaaacaaatatccatgtagaagaaattacttaaacagcatgaattctatgtgggtaaagagttcataatttgtcaatctcttagaaaatctaggaaatatatattcataaaatcaagagaatacatttataaaatcaagagaacagtgagaaaaacaggcaatctgtagcttaatacaaaaatacttttaacaaaataaattagctaaaagacaaaatttagaatgaataatttattaattgattttcattgaagaactatgtcaccatcagggcagataattgattttaaactatactaaattatattttagtttttatttttttagaagtcaagccaggtgtggtggctcacacctgtaatcccagcactttgggaggctgaggtgggcggatcacaaggtcaggagttccagaccagcctggccaatatggtgaaaccccgtctctacttaaaagacaaaaattagccgggcatggtggttcacacctgcagtcccagcttctcaggaggccgaggcgggagaagtgcttgaaccagggaggctgaagttgcagtgagccaagatcrcaccactgcactccactctgggcgacagagtg

SEQ ID NO: 823539 - DNA, 516 bp, Homo sapiens
gtttatcttggccatattggctctgagagtgtagggttcacatggaatttctttttgctttagatcttttgctttctgacaaatttctgyctgttcttctattgtcctacctgtgaaaaaggtgttttctgccaacttgtagccagtagagcaaatatatacaaataatggagcattctatcaaactgccaggctagacaatgtccatcttggatgcagtcctactcaagatgcaaaccatacacatgtgcctcaccaagtgagccagctgggtgtctccctccagcaggccagaagcagggccaagtgtgtaccaaccagcagttgcttttagtaatgtggggtggaatttgaactgaatttctacagtccttcaatatatgcactggaataattaaaaagatgtaaataacagctatcagaatggtgccagactcttcactccactgtcctgcaactgtcctcccctgttcatcaccagaatagtttcctgtgggtctctgttttcccaagcag

SEQ ID NO: 823540 - DNA, 571 bp, Homo sapiens
gatttgtttggcctgggtgcaaacatcttctatataaggtattttatatatcttaattgatgtggcagtaaaaaatattttaggaattttcttgtctgccaataagattctgtgatgtattatttacaaacatatgttcttgctgtgagagttactattaaaaagaaatatgtgaatttttcgtgaactccaattataggagaaattgctttatatgcctgtctggaatatagtttaccttctctctgtaccaaaattataataggcttaacaatgcctatgaagaatcggggctaagatgttatcagtacttagatttcttaagtgaatgacctttgagctatatggcatttcaatgttttatcaacatagacaaacacagaaagaatccaaaaaaaaacctactgtaagagaagctgaaatactcaataaacctttgcatatttccttcgaaatgaaaacaaaacaaaaatrgcatacttcttctactttaaatagtctattgctatcttcagatattttagttttacttatgctgcctctcagtatactaagagcagtggaaagtagc

SEQ ID NO: 823541 - DNA, 434 bp, Homo sapiens
tttttttgtaccagtaagtatttctatgaccctatctccttggtatttgacacagcaacctcaaagagcttgcaaattcaataaatatttaatttacatgsaagtgagtaaggcccttgacatatgttgcattaaaaactatatagtctaaaggtcccttccaattttgggcacctttaagaatgctctttaagttccataatacctacccaccacctttgttgttgttgtttaaaaatatagctacctataacttcataaaataacaatgtatttagagagaggaatatctcaaaatcaagctctggtaaacgttgaatttaacagtccataacagtgatgcaagatactacctcacagtccattttttaaaacaccaacctttgtcttagaaacaatttggcttcaagcactggctttcataaatcaagcag

SEQ ID NO: 823542 - DNA, 601 bp, Homo sapiens
cttccattgctactattcttcaggtttttcttattgaaaagtgatttgcgtttcctttttgttatataaaactttgtattttgctggttagccttaaaatgattccctaatcgaatatctcttctttcaaatttcagtgtttttaagaatatataaaatgagtctagtaatagatctaatggaagatactgagcatttaaaagttaaactgtttacataatagtaatcatttgcttatgtaaataggaaaagaacgtggttaactgcctgcacacagcaggaaatgcaaacatgaagactcagttctgtcttagaactgatggagtgaattgaatgtgtacaatgcagaggtgttcattgcaaagcagtaacgtcagttatttcaatacaagagacataaaaatcataaacaacaaacattaagcatgctatgaaactgaaaatctttaaagaaacatcattgagcaatggtgttgtcttgtctattatagttatgtggactgarctaaatattcacatgacactgaaataataagaacgggaacaaaagcatttagagggttataatctaatatatggcgtcacaaatcaaatcctttac

SEQ ID NO: 823543 - DNA, 601 bp, Homo sapiens
cttccattgctactattcttcaggtttttcttattgaaaagtgatttgcgtttcctttttgttatataaaactttgtattttgctggttagccttaaaatgattccctaatcgaatatctcttctttcaaatttcagtgtttttaagaatatataaaatgagtctagtaatagatctaatggaagatactgagcatttaaaagttaaactgtttacataatagtaatcatttgcttatgtaaataggaaaagaacgtggttaactgcctgcacacagcaggaaatgcaaacatgaagactcagttctgtcttagaactgatggagtgaattgaatgtgtacaatgcagaggtgttcattgcaaagcagtaacgtcagttatttcaatacaagagacataaaaatcataaacaacaaacattaagcatgctatgaaactgaaaatctttaaagaaacatcattgagcaatggtgttgtcttgtctattatagttatgtggactgaactaaatattcacatgacactgaaataataagaacgggaacaaaagcatttagagggttataatctaatatayggcgtcacaaatcaaatcctttac

SEQ ID NO: 823544 - DNA, 628 bp, Homo sapiens
aaaaagcatattttcatctgtttcagagaatagcattttactgtccatgagattaaaaaaatctcacatttgatacagcatttttcaaacccaagttacattmatatttctcaaaatattatttctttaccaaaatgaaaattagtttaatatatttgctttaccctattgtagaacttccttgaaacctatgttatttattgctaacattttcaaggataatggttcttgacagaccttttagaatagtttatttaccctcaaatgttgtcttgaaatttactttactcatggtattgtgaataaagttatccctaagggtatcttttctgctttgataaacaaaatactccgtttgtgagattaaattcatgcatatcaattgcttttcttttatctatctgcctcattcccgccagagaattaagtaaggcaatctagaaaaagaggcaaataggctataagatcacggagggtaaaaaaaggtggtaaatagacggtattttatagactctctaatttgggaattgtactctattcttgatattcatccaattggctaagatttgccttttatgagtctaatccctgacatctcgaccgtggggaagcacataattgtaggatc

SEQ ID NO: 823545 - DNA, 616 bp, Homo sapiens
cataagagaaagaatatttttacatattttgaagccgtatttggtttttgggtattttctctatcaggaaaaaatgtagtcactgaattatgtcatgagtaaaagaaagtttggtgccaagcaccatcttattataatttccaatatttttcattctgccttgccattcatggccaagaagaaattcctttgccatgaaaagcaaataaatatagatgaaaactgaaggataagaacgaggcatctaatacaagtattaaaaagttaataatttggattttatacatatggagtatgaaataactgtactatgagttgttaggattacagccattaataaaagttgaaaaaattgaagcagtagtaattttatctctaaaagcattccagtaggaaccctaaattctgaggggctcagtgtcccagtgtcttttctctgtctgtactctctttctccggctaatctcatttatctcatgtcccatgtcttaaatgcartccaccaatgagaccctcattaataacaacctcttgcctgaacttcagaaatgtacatcacctacctatgtggcactttgacttaattgtaacaagcatttcaacttgaccttgtaac

SEQ ID NO: 823546 - DNA, 623 bp, Homo sapiens
ctcacagtcatccataatggctggaatcaacttcttccaaattcctgttaatgttgatgatattttgacctccttccatgaatcatgaatgttctttttttttttttttttttttgagacggagtctcactctgtcgcccaggctgaagtgcagtggtgcaatctccgctcactgcaagctccgcctcctgggcttacgccattctcctgcctcagcctcccgagtagctgagtctacaggcgcccaccaccatgcccggctaattttttgtatctttagtacagacaaggtttcaccatgttagccaggatggtctcgatctcctgacctcgtgatccacccaccttgacctcccaaagtgctaggattacaggcgtgagccactgcgcctggccatgaatgttcttaatggcatgtagaatagtgaatcctttccagaaggttttcaatatactttgcccagatccatcagagcaatcactatctatggcagctattagccttatgaaatctatttctgaaataataagacttgaaagttgaaaygacttcttgatccatggacagaatggatgttgtgttagcaggcatgaaaacaatgttaatctccttatacatctcc

SEQ ID NO: 823547 - DNA, 529 bp, Homo sapiens
tccttcccaatagtccactgcaaaatacggtggagaatgagcatccttccaagaccaaagaggttcttggagaagaacaaaggcaattaggcagaaaagggaagttggtctttgggtttaagatttcctctctgaggttatctgggattagagagtctacttgacttttgcttggactcagtagctttaggttgcatttcgatatggtttggctatgttcccacccaaaccttattttggattgtagttcccataatccccatgtatcctgggagggaccaggtggagataattgaatcactggggtggtttccctcatcctgttcttgtgatgattaagtctcaccaggtctgatagttttataaggggcttcccctttcactggtcactcatacttcttcctgccaccatgtggagaaagatgtgtttgcttccccttccaccatgatcataagttttytgaggccttcccagccatgcagaactgtgagtcaattaaacctcgttcctttataaattacccagttt

SEQ ID NO: 823548 - DNA, 624 bp, Homo sapiens
tgtttcagtactcgaagatattgcttttccctcgatttttgcacagtttcattatttsatgtgtaagatgttggagatttgaccaagtgaccccaggctactgtgttagtggccgaaacattgtcataacattcacgtgcaaaaaaaaatcagatccattaagttttaaattgtttagtttctaatattacaagctgttcctatatatcaagttagttgattcatttcaaaataagcagtccctctttgtaatttttacgtcattcatatttcttattttcaaggactaactacattaaaatatataagatagaaaaagtaatactttaatattatgaaattaattcaattttcaaatatatttcaagcaccaacaatgcacagtgctagacaatgaaagaaaatgtaataaacaaagaatacattatacatatcctaaggagtttacaatctattggaatttacagaaagataaaaagatgtttcacacagggcagggatcaacttgtgctgggtgcctaggagtccaaaggaagagcgaagatttggtgtatgcatggcatgcacacacgtgcacatgcatgtttatatgaatattttaactcctacacatagtgtttttac

SEQ ID NO: 823549 - DNA, 626 bp, Homo sapiens
cctcttatatgggatattttctctcgttttcctaagaaaattttatgcatcatttttagacacatcttccaggacctgcctctaaaccaaattargcacatcttcctctgtgcaccttgcatttagtcacatctccctctgttgcaccttgctcaggggtttgcactataactttctaattacgtgtgcttttcccctactagcatgatgcatttttaattaagggcacaactctctgtggccctgtggcctcaaattgtgcacacaatacaatgataatccaatggtgatgagatgagaacaagaaggcaacactaacggagtcccatcaacaggcagaagaggatcatttgtaatatttctcttcattctattattgttttcttagagcctttacaatatggaatcatctatattatccagcacaagcaagtctgccgatttcagatgagttatattactggcaaagatgaaagaggagtaatgacaagttacatcagattttctattagaaacaaaatcacaaaaagcatttggctcttgataaagtgtgtgttcccagcttttttaagatcaaaaaagataataaagtataaacttgatacaacgtattcatggcagaaagc

SEQ ID NO: 823550 - DNA, 583 bp, Homo sapiens
gccctgtgtgttaaatgccagtagaaccccagagttcttaataataacctaaaatgcctacataattttgctttcaaaacagtggcttaagacagtatttacagttactcccagtggttgtgaatcacttgttttaagaaagaaccatggactttgggaggctgaggtgggccgatcacctgaggtcaggagtttgagagcagcctggccaatatggtgaaacctgtctctactaaaaatgcaaaaattagctgggcatggtggtgcacacttgtagtcacaggtactcgggaggctgaggcatgaaaatcgcttgaacccgggaggcagaggttgcagtgagccaagatcgagccactgcattccaacctgggcgacagagtgagactccatctcaaaaaaaaaaaaaaaaaaaaaaaaaaaggaagaagaaagggagagagagagaraaaaaaaaaagaaagaacaaaccatgggagcgagtgactgaggtagggtcttaaaaaacaagatctttggcagagaggacaccaaggaactgagataccagaatgttagaaagataatctatgtggatattgaa

SEQ ID NO: 823551 - DNA, 564 bp, Homo sapiens
ggaactcagatcatcttaaggctcaactggggatggatcctcttctaagatcactcaaattgttcctggcaggattcagctcctcacggttgttggactggaggcctcagttcctcatgagttgtttcccaraggcctcctctgatgccttgccccatggatctcaccatgaggcagctcacagcatggcagctggcttcatcagagtaagcagtaaagtgtcagtaagagagagtgctggcaaacagaagtcagtcttttgtaacctaatctcagaagtgacatcccatcacttttgcttcattctgtttattacaagcaagtcactaggtccagcccacactaaaggggcggtgattacacaagaatgtgatgtagagataccggaggcaggaatcattggagactatatcagaaggctacctatccctaaaccaactactgatacaagaggattagaactggctcacaccattcaggttctccacacccctggagctggattcaggtcgctaaatcacaaggttaccacacagctatggcatccgcctgtagtcccaacta

SEQ ID NO: 823552 - DNA, 649 bp, Homo sapiens
aaggttatggggataccaacttttaagtggcaggcagaggaagagggaatcagccaaagagacagagatagagaagtgtattatatatatgtatgcatgtttatatatatacacatatatatatttaaatttctgtacatcatgtttttttgttatataccactaagagttatatattatgatgttttgatgtcttaaaaaagggcccagccaagagcatgcctgtgatacacaaaccaaccaatcaagagccataccccctctatatggtccatacaccccacaagacaatattcctgtctcagtcaccccagggccaggtaccaggcaactagggaccatccctatagttcagagccctctgaaattattcaaactagccaatcctaaaatgtttaccctgacctgccttttctttcctaatgaaactccaataaaggctccggcctaacgctttccccttgctcctgtgttctgcctctgaccaccctggtgtctttcccatgtggctctgcgtggcgtgttgtgcttcctrtctccaggacctgtgagtgtaatgaactttgtttttcggagcctctcctgtatctccttttgtggccacccctgactgaccatcacataaaataatacagaacaataagaaaac

SEQ ID NO: 823553 - DNA, 659 bp, Homo sapiens
acaatctatgtagttttctatatggatcctatacttagtgaaaacttaaaaatgtcagaaaaagaatatttcacataaacctaaaactttaactcctccagsagtagatcagcaagtttccagattacaggtccaaagatcgttaattttagaacttttcagaacttgaaatattccatctttattccagatccagcaaaatttgagaacaaagacattcataaaatttcatgctgtcatactctcaatcataagtagaaacaatactggatctcaatctcaactccaattctaaatagttatctaaccttgagtcacaacaccccacttatatgtataaggctttagcttcttcacctatatgattcagcaccgtattaactctaacatgcttttttttgtgatggagtctcgctctgtctcccagggtgtctgccccgccaccccaattcaagcgattcttctgcctcagcctcttgagtagctgggattacaagcccgcgccaccacagccggctaatttttatatttttagtagagacggggtcatgctggccaggctggtcttgaactcctgacctcaagtgatctacccgcttcagcattccagagtcttggaattacaggcgtgaaccaccatccatggcctctaatacact

SEQ ID NO: 823554 - DNA, 626 bp, Homo sapiens
tttttcttttttttttttttttttttttttaaaaaagagagaactttggtgttgcaacttagacagcagctyaaccagagtagaatgccactaggtagagtcctgagggccctattccagaccctagttcccagagggcatttctagacatgctgtgggccataagagagcccactgccttgaagggaaggattccttcctggcaggattcattagctacttattaaagagccactgagccttgaataaatatcagtgttgcccaggcattactccccatgggccttgggtgagacccagggtggtcctggcttcaggtgtgatccaaagcattcttagctacggtggccatggagggagactccttctgcttagggaaaggagaaggaagattaaaggagatgttgtcctgcagcatgagtactagcttagccacagtggggtagagcaccaaacagcctcctggagtctccaattccaggccatgactcctggatggcatttctagacctgccctgggtaagatggaaacccacttttctgaagggagggactcacgactggcagcattcactgcaagctgactgaagagcccctgggccttgagtgaacatcagtggtagcca

SEQ ID NO: 823555 - DNA, 539 bp, Homo sapiens
agctaacttatttaggtgtttatctctcatgagtgcttatgaggaatattgttttcagagcaaggtctactttaccctacattccttatcgacatgtctcaaattccttttaaaatatattttcctaaggaaagagagcatgtcttgttcattttagcatcacatataatgcctatgactataatttgcacatagtagaaattcagcaaatgtttaaagaactaaaaataataagcagagtaatatttttaaagttgcatattttcatttcaaaaaggaaaaaaaatgcaataagtattaggtcatttctcagccctagaagataatcagaagttacagaaatgctggtgttaggacaattgttcttttctgcattgtcccacttaccaaaagagttgcctacttctgcagttctttgcaaaccaccactggcttcttaaccattaggaaacacactcacaaatctactgaawctgttgtatcaaaggtcacataatctctcaatcaaaaaatcaattttttttcatttattatctttg

SEQ ID NO: 823556 - DNA, 386 bp, Homo sapiens
atgttgtgattgatccaaaggatttttaaaagaatcttgaattttgattttttattacgtcaaagtacatcatttcagtagcaacgactgctgatgacagatactattattaagcactatataacatcatatggaaatggacagaatgtagttaagagaagaattcaaggttaatcgaatattgaggtcaaaggaattgtgatgtgtgtgtatctttgtgtgtattaatggcttgtttttgttttaactttgtaagagatactagaacaagtgattayatatcttatcagtttattataaaatattagcactgtttttgtgagatatcatttcataataagcatcttgatattattctctggaaaatagtgatctgctttgacaaa

SEQ ID NO: 823557 - DNA, 581 bp, Homo sapiens
ttgtgctgctctaacagaatacctgaaactgggtaatttataaaggaacagatatttatttcttacagttctggagactgggaagtccaagatcaagggcctgcatctggtaagggcctccttgtggtgttatcccatggacgaaggtagaagagcaagagaggaaggaggccgaatttatcctcatgtcaggatcccatcctcaataacgaacccactccctcaggaacagcattcatccactcactagagcagagccctcatctcctaatcacctctcttaaaagtcctgcctctcaacacaattgtgttggggattgagcttccaacacatgaactttggggacacgttcaaaccatggcaatggctgtcctcatgttgaatattaactgagataaagtctatctactagacttgaagaccctgcaggaattaccactaattcatatgtctaaactgcaataaattatagcaggaaataaaatggaatttccaggagctaaacgagaagatcttatgaacacaaagaagaaagcaacasacattggggtctgcttgcatggggagggtgagggaggag

SEQ ID NO: 823558 - DNA, 643 bp, Homo sapiens
tggcccgtggagtccctgaggagagatactcagattgtccaagtgtgttcaggcgcagctattcacacaacgagcctaatgttttcttgttggagtggtgttccaaaagtgaaatatttagagtggaaatgggggaaacattgtgtccacactgggacctggaaatatcattgtgtagactctatcaatatagtgctaaatcttaaattgttatgtctcaaaagtcattctgaagtcagggcttactgtgaataatggcttggaaaataaaaataatgtctctcctgggatcagaagcactgacccgaataacaggacgggagggactgactgagagggacagagaagctttcccagagtgtacagttccaggggtctggagcctgggagtctagaatggactgccagtgaccttcatgtgaccgtgagggtctttttgcttccgaggatccttgggtcgctcagtagggatgtgagtgaggagacgctgctggggcctccacgcccgatgtcggtggttctcaccagaatgcctcggctgcatgacatakagctctcttataaagttggagtttcctgttccaaaacgttcagatttcttgcactttctccttgtgggtggaggtgagggcacgtttctggc

SEQ ID NO: 823559 - DNA, 641 bp, Homo sapiens
cactgactgaaacttagtcacatgcccacctrtaccttctacaaaggctggagaatcaaagatccaaactaaaacatgggattcttacttctcaggaagaagagggccatggagactggggggcacttataattctctgccagaccatgtatgtataattatgacccaactagtgttgaattcagctccatgtcttacaacttatcaaataattcctaggaatgttataaatatattcttgctagacattggagtctccaacatatgtaaaagacacaactactagcaaagtggtgaaatggaggtctactttagtgccatggtaaattgttagtgtaagtgaatacatgttcctttgttatctcataaaattactactgccaaaaggatttcctgattgcactgatattgattaacatgtttatcaaatttattcatttcatactatttgcaaggatttgtgctaggccctgtggagaatagaaagcttccttgaaggagtttataaagagtagaatagaatagtaaagcttattttggccaggtgtggttgctcacatctgtaatctcagcactctgggaggccgaggtggaaagattgcttgaggacaggagtttgagatcagcctaggccacatagt

SEQ ID NO: 823560 - DNA, 312 bp, Homo sapiens
ttctgaatccccactacctcccactccttccacgcagtcccttgcttctatacaaagggctcccagcatctcacatgtttgcaagtgaccacagtgatcctgctggctccccagggcatcatttttctttgccacttccaaagcttgccagcatcactgaaagcatgtcattaaccaggkgtgcctctaggtccttgtgcagagctcttggccccagggtcaactgtctgtcctagggcatgatgggcagcacaggctctctcatgagggttcctgacccttgtggcagactctgagctgggatccttgttg

SEQ ID NO: 823561 - DNA, 312 bp, Homo sapiens
ttctgaatccccactacctcccactccttccacgcagtcccttgcttctatacaaagggctcccagcatctcacatgtttgcaagtgaccacagtgatcctgctggctccccagggcatcatttttctttgccacttccaaagcttgccagcatcactgaaagcatgtcattaaccaggggtgcctctaggtccttgtgcagagctcttggccccagggtcaactgtctgtcctagggcatgaygggcagcacaggctctctcatgagggttcctgacccttgtggcagactctgagctgggatccttgttg

SEQ ID NO: 823562 - DNA, 569 bp, Homo sapiens
taagaattttctatgactattcaatttttcaaaacacagagaaaaatcagatatttatagctctgccactttaaagcatcagatgaatttatctatgtctttctttacccacaggttgagaagaaaatacgggagtgaactgtagcaataaacggtttgtgggtaattttggtactttaatgtggcttctaaaatgtgtactacatgacttaggaaggaatatttaaggagcccagctgcactaacgtgggttgctattgtgttattactaaaatagctgagagagactctctgtgcagtcaccctaagtgagttattttgagtgagttgctatggtggtatgacctgcatgtatgactaaacatacaaaaaagccaaaaggccagaaatgaagtgtcagctatgaagatgctagtgataaaagcctaccccaaagcaatgacagatactttgaaaatactttgagggaataaagcactctwagggaacacagggtttgaagtaggactgtgttgttattattgagttattttccaataattttcgagagtctgccacagctttgaggc

SEQ ID NO: 823563 - DNA, 488 bp, Homo sapiens
tgttctcataagtgggaactaaataatgtgtacacatgaacaaagaatgtggaatctcactggagacctggaagggtrggagagtggaagaagagtgagggataagaatttacttaatgggtataatgtgcagtattttggtaatgattacactaaaagtccatacttcaccactatgcaacatatccatgtaacaaaactgcacttgtacaccttaaatttataccaaaaaaggactgtgtggtcatataaataaatgaagcagaactgagagttcacaaataagtttttacctttatggcaaattgatcatcaattttaatcaaatttactaatttaatcaaaattactaaggtaattcattgggggaaagagagtcttttgaacaaattgtgctgaaacaattgaatatccacatgcaaaaaaaagttaacttagacacctcacactaaacacaaaaattaacctttacacatctcaaaccaaac

SEQ ID NO: 823564 - DNA, 441 bp, Homo sapiens
cacctccaacctctatggcttaggacagcaatttawttaactcatgattctatttgggctgagctcagctgggtggttcttttggacttgactggacttactcatgactgtggtcagctgcaagtcagctaggtagctttgctcatgggatctggctgttagctgaggaaatgagtccaggtgtctttacttatccagcaggctctccttggcttattcctgtagtaaatcagcaaacttacaaggactagagcagatgcttgcaagtagttttgaaacctaagcttggaactggaacattatcagttctgctgcattctttaggtcaaatcaagtaagaaggccaagagggtgaagaaatagattccatctcttgagaggaggagcttcaaagtcacattgcaagggcatggacccaggtagggaaagaacttgtgacac

SEQ ID NO: 823565 - DNA, 615 bp, Homo sapiens
agtctttgcaaccttgggttaggcaaagatttcttacatcaaaagcacaacccagaaaagaacaaactgaaaaattagacttcatcaaaatttaaaacttctctacaaaaaacactgctagaggggatgggaaaaaacaaaaacactgttagagaaaagaacagcaacagactgggaaaaaatactttcaaatcacatacctgataaggaacttgtatcaagaatatatatacacatgtacatatatacacacacacacacatatacatatacacatatatatacatacacacacacacatatagaactcttaaaacaactttaagaaaacaaccctattaaaaacatgtaaacgatttggatattaaccagagaagatatataaatagcaaataagaacattaaaaaatgctcggaggccgggcatggtggctcacacctgtaatcccagcactctgggaggctgaggtgggtgtatcacttgaggtcaggagttcgagatcagcctgaccagcayggtgaaaccctctctactaaaaaaaatataaaatcagcagggtgtggcggtgctcacctgtaatcccagctactcaggaggctaaggcaggagaattg

SEQ ID NO: 823566 - DNA, 437 bp, Homo sapiens
ataattaatcaaacttttttcttaaatagcataacatggaatatgacttttccccctttagattgtgtttttctggttgttaaagtaatacaaaacattgttttttwaaaaagacaatacagaaacatttgaaaaatagtgaaagacttcctgggctcctcttgttgttcattttgtgtagtataaccttcataaaaatattttttttggccgggcgcggcggctcattcctgtatcccaggcactttgggaggccctggcgggcggatcacgaggtcaggagatcgagaccatcctggataacacggtgaaaccctgtctccactaaaaaataaaaaaaaattagccgggcgtggtggtgggcgcctgtagtcccaactactcgggaggctgaggcaggagaatggtgtgaacctgtgaggtggagcttgcagtga

SEQ ID NO: 823567 - DNA, 621 bp, Homo sapiens
tagatcctgtctggggaaagtctaatttattaggtttcaaagttgctagctaatcarcctctatcccttctggtacacatatttgagtgagtacacgggtcacccacccattgggctacagctttctgactcaagcccagctttccccgtaacctctatctcctccagacttttctgctcaaatggtgctgattctgacataggggaaggtactgttactgttgtttgctgcatcctctcaacagataatgggttgaacattgtcgaacacaacttattaccttctcccgtcttgtagtagagtttaaggatattgcatgcaagagctgctattccattcaacttctcaagcagatcttaaacacattcatttttcccatatacatgctgccttccctctaagttcatacaccattctatcttgcctggaactctaaaatagcctcacaaaatgagctctctcctcccacttttgcttctgttccaaccagttgtcatcttggccagtttgattttttttttaaagcaatcctgaccataatccatgcttagaattcctcaatgcacctctagactcttgtaataaaatacaaactcaagaacactgcctacatggccctg

SEQ ID NO: 823568 - DNA, 520 bp, Homo sapiens
cctaggtttcaagcacaaaactgagcagctgtttgggcagaaaaggagctacctgcaggagttttttttcataccccagtgatgcctggaatgccagtgagacagaactgtttactcccctggacaggaggctgaagccagggagccaggtggtcttgcttagcagatcccacccccatggagcccaacaagctgagatccactgggatgaaattctcaattgcagcactgcagtctgaagtcgacctgggatatttgaacttggtggggagagagccgaggcttaagtaggtggttttctcctcacattgtaaacaaagcctccaggaagttcgaactgtgtgtggaacccactgtagtgcagcaaagccgctgtagccaaactgcatctctagattcctcctctctgggcagggcatctctgaaagaaaggcagcagccccagacagagacttatagataaaactcccatctccctgtgacccagcacctgggggwaggggcagcagtgggctcacct

SEQ ID NO: 823569 - DNA, 565 bp, Homo sapiens
tcatgatattgattcttcctatccatgagcatggaatcttcttccatttgttgtatcctcttttatttcgttgagcagtggtttgtggttctccttgaagaggtccttcacatcccttgtaagttggattcctaggtattttattctctttgaagcaattgtgaatgggagttcactcatgatttggctctctgtctgttatcggtgtataagaatgcttgtgatttttgcacattgattttttatcctgagactttgctgaagttgcttaccagcttaaggagattttgggctgagatgaaggggttttatagatatacaatcatgtcatctacaaacagggacaatttgattagagcataagctctgaacacagattttttgtatgttaatttactgctgaattttgcgtattttggcatatagtagagtttgatcaacattgtaaacatgaatgattattagtgactcttgagatgctaaaacccttatgagtaayatgaggcattaagcatttattcagaagtttaaaaagggttgctgacttataaaagctataataaaa

SEQ ID NO: 823570 - DNA, 533 bp, Homo sapiens
agaatgctgtcacgccataagtggaagtactgtggtagaagagagactataaaatattgatggactattgacctgaggtagcaaaggaagataaaagcaaattctctgagtgcacaaagaagctacccgtctccatagtgtggaaaagaacttcaatattaacatcaataatgagttatcgttgtctgaaatacatttttcttgttaccatatcagaattgtattcatttcagtttcagagaaaaaaaacatatttttttaaatttcataattatgttttctgttgcataagaacagttcacgtggagaggtgcttcgaaatatacatcttattatcattaaatcctagccattgtggctatcttcataagacagtccaacagttgagctgtttgggagtttatttgcttggtgtcttgattttaagttattaaaaagttgtacctgcccaaatgttgttcatgcctgaaaataatgttcattgaacttaaattttccyattctaggatcctgcacttggcagctttgtgttg

SEQ ID NO: 823571 - DNA, 590 bp, Homo sapiens
ccttatttttcttttcccatctcaccaatctcttcctgtcccctggttcctccctgtgacccaaatgtcagcttagagtctctagtttttgatattcaaatgaagagactcctgtcccacactacatgcagtgagactgatacattccaccttattcaccggttatgggaggaggaaggatgatgatttctgctatctttagttgcctatgcctctgaatctactcaagataaattcagataagttagcatagtttgtagtttgtcttgtcattgtacacaagatgtcctggctcagcttcggattgccccaggcatggaacacagcttcctttccttattttctcatgccctccaccctcagcgctccccaggtatcactcacgttaggaatgtgtggtggagcagaggaccagagataaggaaggcacagagagaaacagaaagcacttgagagstacaggaggatcccctcaaatcctgaacattaacctgcgcatacgttgggtgaaactcctaaggctggacatgaggtattggtagagcctttgaaaggacatgctgtagtagtaaggctaaattaatgccaga

SEQ ID NO: 823572 - DNA, 484 bp, Homo sapiens
gattcagaataatcgaaccaatctgcaagtaatttaactgtgtgccataacaaagaccaacactctttaaagaaatacaaytaaatcacaaaaccaacaaatacatgagacctgacatccaataaaaaatttcccagcatgcaaaaaagaaacatgaaaatataacccataataaggagagaaataaatcaatagaaaaagactcagaaatgacattaataaaggtaatagcagacaaggaacttgaaatagctattataaatattcaaaaagatatataataaaacataaacatgataaaatacaagatatttttaaaatatctaaatgaaacttttaagatgaaaaatatatcaaaaatgaaaaatacgctagatgagattcagaaccatttagacaccacaggaaaaaaacagtaaacttaaaaacatagcaatagaaaccatccaaaatgaagcacatatagaaaaataaagactgaaac

SEQ ID NO: 823573 - DNA, 615 bp, Homo sapiens; identical to SEQ ID NO: 815590

SEQ ID NO: 823574 - DNA, 607 bp, Homo sapiens
cttccttggctcctcacatattctaaagcaccccccaacaactatactyagcccaagagttaacagcattccttaagagcccttaaaccccttttttttttcactttgaaaatgtaagttgatggaatcctgctcgtttacattctgtgtattttctgacaggacccgcaagtattttcaaaggctccactctgagttagaattagcacattagggacagcagattcactgttaaggaggaggccccacctctggctcatttttctttccttaccttgctcagaacaggattccccacataccaactggccagctgacactgttgcacatttgcacaatcattcattcattcattcaaatatttactgtgctcttattatgtatgtgtcaagtcccgggccgggatctgaaagcccaaaatgaatgttgaatcagtaactccagcctcattcatctatcagttgtgtcaccttggacaagtaagctaattttcctgagcctcagtttcctcaactgtaaaatgtgggataacaatagtctctgcctcacaatattaaataattgtacatacttcccaaattaagtgtaataatatacataaagaaca

SEQ ID NO: 823575 - DNA, 543 bp, Homo sapiens
atatattttcatacttcctagacacttgaagcctgattaaaaaacaagccaaattaccaaaaaaaaaaaaaaaaattagtataaacatctaattttctttagggaaactggcaaggaaactggttacagagagaataagggttgggattgccccttgggaagcccttgttactcagcaggctgcaccagccccactccgactctcccacacacaaaggaggcagagtagcccgaggattgggagcacaggactgttggccccctgactgtgacttcctgtaaggccttaggcagagtaatccccttcctgtgactccattgcttcatttgtaacaaggggagattaataggctcagctttaccagggttgttgtgaggattaaaggagttactacatatcaagaggttagaatagtgcctgscccaccgtgggtgactgataaatgttagtcatgatgatgacaacaacaactatctacttagtaaagactgcaatatcccagagcagagttcagactggtgggatcaacagtattcaataaa

SEQ ID NO: 823576 - DNA, 654 bp, Homo sapiens
caaaatggaagcagtttacgcttaacacaaatgccatctacaagacaggaaaacataatgttttactgtcttttcttcctgatcaccatttcatctagtggcagcttatggtgattggggaattgagaagttttctagactcctgaagtgtgcagttctccaagtataaccttcaaacttcaatgcctagccatatgtattttccttcctttaaataaatattcattgtaccagggactctcctagaccttgaagatatggtagataaggcaaatatggtccttaatctcatggtgaagaggttgcatgtatccttttgtttgctgtttaccaagttacatttaacaccataaaagttatttttaaaaggtttttttcttcttgagaaaagttcccttctgccatgttcatgtttctaaatgatagtaaagaatcacaatgataattatctttaagcctgtgagatggaatattttaatgccattacttatgtttttgaggaatagttaatgggaaatatctcaatatatgatgctaaatgaaagaggcagaactaagctttatatatcatatgataccagttttagtaagtacrgaaatataaggatatataaatagttagaaaaataaataaatatatgggtaagagactga

SEQ ID NO: 823577 - DNA, 598 bp, Homo sapiens
caaaataattgggatgattcaggggatactcaatccctgatatgtcataaacacaatttagataggrgaatgtgccttttcctcatacctggaacattttaattggtattttatttattaagtcatgtagaaaacgtttgatgcagattttagtgaaattgctgtaaaattatagacaattggagagtatacgataacttaataattggggttttctccagtcagaaataattctttatttttgccttaatcagcatgagtaagacctaattgtaccccttttaagccaaaggtcacgaactacaaaagtggacgaaaaatccggtctccttcagcttctacaaatagctcttagagttactttaaggtcagaggctgtcaggccactgtccatctctcaggcacttaatgatagtttaatcaaatcaagaaggagatactgggtgatcccattcttgatggtctctgataagctggtaatgggcagaaatgtttccctaagaggtttatgtttcagctgcacaaagaaacttctatactgtctttcaggaaatacgagcccaggtacaataccaacttatcttttacccaagagctt

SEQ ID NO: 823578 - DNA, 557 bp, Homo sapiens
actgcacattattctcttctacattccacttcctgggaggccccaagagatactaatcaaaataagtaaatactaataaaaatcagagaaacygaatacccattatgagccaggaacatgctaagggatttacatgaccaccaacacaatgttggcaggtgacccagagttaactttctcactgggagtgttatctcctatcaactcttttcttggcctctgataagaggggacctgctcccattcctcatatacctcctgcctattcccttgttccccctgtccatgtgtcctcgggcaagtcctttctcatcaacacccagctcttctcatattctcctgctctcactcttgccttctaccctattcctaggtttctttagtaaaatctctcaagattttctccactcccaccatgtgccccctccttttttccccatttgttaactgtttcaaaaggatccctgaaggtatcagcacactactaagggggaaaaaatgaaaaaagggggaaaaaagcattatctgacatctcaaagctggcctggcactcacac

SEQ ID NO: 823579 - DNA, 653 bp, Homo sapiens
agcggtccagctaaaggccctcctcctcttaaatgaaggtgtctcaacaaccttagaccacacttcctgccttctgcagcctctgttgcattcmtttgtcaattaatcatacacttttgtggtattgactttgtgtttctacattttgtttccccagtgggaatgtaaatttcttacagatctgaactgggtgttacacggctacgtagtccatgcctgatacacacattggttgatgaatgaactaacaaattacaaataactaattagcaacaatgcattttcctgacgaattggtgacatatttgcatgactgtcaccttctttttttaggtcattaatgtggatgatgatgggaatgagttaggttctggcataatggaacttacagacacagaactgattttatacacccgcaaacgtgactcagtaaaatggcactacctctgcctgcgacgctatggctatgactcgaatctcttttcttttgaaagtggtcgaaggtgtcaaactggacaaggtagaacctttgttttttttcccaaatattgtatttgaaattgttttttcagctattctgtatacaaagattaaattaatatttttcttctgaaaaaaatcccaaaataaacagattgttaaggaaagatata

SEQ ID NO: 823580 - DNA, 633 bp, Homo sapiens
aaagtttgcacatatggcacttcactccatttgcccttctttctacaaaagaggtctagctgtaagatggtgttataatttatacttccctcagggggccaggtttctcccctctcgaagagkatattgtggccaggtgttatgcagaagaatataagccgcttctttcttagcgtctgagggtcaaattggtcccaattctccagaatacatcttaggggcatttttgccttggggggaatgtttcccatcgctttggagaagccccatatgggccaccagatgttaccggtgggtctttgttcttagagatctcaaggcggtggcaggccactcccaagattgcggcaagccttttgttctctgacctggggttcttggcctcatggattccaaggaatggaaccttgggccatacggtgagcgtcatagctccattagaagctgtgggtcttggaagagaaccgtggaaccgagctagtagtgttcagctcaattaggaaggacccgggcacttagccttgcaggaacaatggcaaacctttagcccgatcaggagtggcaatgggcaccttactggatcaggagcacagcggacaccctgccggatccggaggggtggaagtcagttac

SEQ ID NO: 823581 - DNA, 554 bp, Homo sapiens
cgccctgcatcttaaggctggctgagcttggtagactcacaggatagcaagggcctsagtggccagagctccatgggaagagtggtggccaggcaagcaggcactctagggtaagactttgcaggccagagggtggaatcagcacttcactccaacgacattagaaattcctggagtgttttaagcagggtatgacataaaccaaggggcagccagcaattcagttaggagaatattatggatagtccagaaccatttctagatgtttggctttactaatgggatggagggtggggccattttctgaaatagagatgggtgggaatagctttgagggaaattcagaagtttccctctggacctgaaatattttagagacctattaggcctccagaggaagatgtcaaggaggcagtgaatgtctgagtagcacacttccttttctattataaatatttgctgaactgtttaacagtgaaaattgctgaagcggaaagtaaaatctttacacgtttgattgtttgggttctggaagatacagcataggaacaata

SEQ ID NO: 823582 - DNA, 601 bp, Homo sapiens
ctcagggagttttcaaagttcaactttcctgtgggaatagtttgcaaaacaactgagaatagaaggatggaaaggcagagtgtgggaaatcaaggttgcratcaaataccatgtttgatttatcacatgcatcctctgtcagtcatctggtggagcactaccttttgttccccttatttttgtcctgttttgtacctccttatagtacacaatagagataagaagaccgaaaatgtaaaagaaggcttccctgctctgcctaaatatgagtcccatctaatttttcctaagactcagttctgggagtaaacgctttgggacatggacattgagaaggtagtcagcactggaaagaaggggaaagtttagtgagtagtaggtatttccagaaaaagaatcctaaagatgcttaatttacaggggattttcattgccaagttatacaagtcactttgggtagaaatagaatgtggctttgataaattacttaaagtcaaatcccattagaaatttgactaagttacttcaaacccagcccaagactagccaattcagacagctcctgtgctataaaatggcaatccaatggaaggattcagtg

SEQ ID NO: 823583 - DNA, 571 bp, Homo sapiens
tctacaaggaacttaaatttacaagaaaaaaaaacatttaaaaagtgggcaaaagacatgaacagatacttttcaaagaagatatatatgtggccagcaagcatatgaaaaacagctcaacatcattgatcattagagaaatgcaaatcagaaccactgtgagataccatctcatgccagtcagaatgatgattattaaaaagtcaaaaaataatagatgctggtgaggttgaggtgaaaatagaatacctatgcacgttggtatgagtgtaaattagttcagctgctgtgggaagtagtgtggtgattcctcaaagagctagaaacagaactaccttttgaaacagtaatccaatttgtgggtatatacccaaaggaatataaatcattctatcataaagacacatgcgcgtgaatgttcattgcagcactattcacaatagcaaagatatggaatcaacctaaatgcccatcaatgggagactggataaagaaaatatggtacatatayaccatggtacaccatgcagccataaaaaagaacaagatcaggtcctttgcaagaacatgg

SEQ ID NO: 823584 - DNA, 635 bp, Homo sapiens
  misc_feature 198: n = A,T,C or G
ggaccttgttgtttaagggaattatttcagcacttgtcagttactctctaggaaatcagggtatttctacgattttgttttctaccgaatgacattcactccttcttttaaaatgtacattcatttgccccatgcctttatgctatcatctctctgcctaacagaacaggtgcattccctccattctgttttctcagngtattagtccattctcacactgctacaaagatactatgagactgggtgattcatgaagaaaagaggtttgattgactcacagttccgcatggctgggaaagtctcaggaaacttacaatcacagtggaaagcaaatgggaagcaaggtatgtcttacatagtggcaggagagagagaggaagtgaggaagttccacactttaaaaccatcagctcttgtgagaactcactcactatcatgagaacagtatgtgaaaactacccctatgatccaatcacctcccactaggtccctccctcaacacgtggggactacaattccagatgggatttgggtagggacacagaaccaaaccttatcactcagtaactgagtagccaacttagataccaatttagggctgctgggaytttgacaggcactgcttagaggagacc

SEQ ID NO: 823585 - DNA, 589 bp, Homo sapiens
ccagccctgccatgggatccctccagtaccagtaataaaggaaaactgagcaggcaatttggttggcgacgtgggaggcggaatatcacacagctgctttacccgcagctgtattggctttgcagtgttgacagtttgaaaaaagaggaagacaaataggaaataaaaccttgtcttgggctgggaaataagcagctgggatgtgacccacccagggaggcttgctttcattagtagaagttattgatttaacttgaatttcagacctataatttttatcttttaatgaattttccattatttggagtttttcttcaccctggggcttctaagtattttttaaacctgtatttatttctatatattttattccacgctttgagaaatctccataaacaaaatcactgtaatatacattttccattgaggattccataccctctaccccaactactctcttctyaccacccccaaatggtaagtaaactcttcatgctgttgaaaagctaagctgatatacacagaaaaaatgaagtggtagattaagtaattatttagtgaacttcagctgggtagacaatttgtctaa

SEQ ID NO: 823586 - DNA, 619 bp, Homo sapiens
cttctgagtggtggagacactgtaagggaaatgagatgtcggttcaatgactattcccttccattccctttcccgtcagtctacacatttttggttcttcaacttctttcyaaccttactggaaagtaagcttcatgaaaacatagactttattttgttcaccaccatggccccagcacctagaagagcaaaggtcacataaaatgaaagggtaaatgaatgaatgaatagaatgagataagagcacgtcaagaaataaaatttattaggctcttcccacctgtttcttgatatttttatgctttcattcatttcctatacttttccatttatttgccaaatccaagctgtttcatttataaatatttttccaagtttgttagtatttaccttctattccttatctttgaattaccttttcttttctgtccactaattctgttgctttcaactgtttcaaccttacagtttcgaaccacaaggaatccgattattttttgtatgtgctcctcaaatccataaatctaattttaaattcaaaaacaaacagctctactttctttgaaatgtataaccctataaaatattcacattagtctaaattatatgattaatgtgg

SEQ ID NO: 823587 - DNA, 619 bp, Homo sapiens
cttctgagtggtggagacactgtaagggaaatgagatgtcggttcaatgactattcccttccattccctttcccgtcagtctacacatttttggttcttcaacttctttctaaccttactrgaaagtaagcttcatgaaaacatagactttattttgttcaccaccatggccccagcacctagaagagcaaaggtcacataaaatgaaagggtaaatgaatgaatgaatagaatgagataagagcacgtcaagaaataaaatttattaggctcttcccacctgtttcttgatatttttatgctttcattcatttcctatacttttccatttatttgccaaatccaagctgtttcatttataaatatttttccaagtttgttagtatttaccttctattccttatctttgaattaccttttcttttctgtccactaattctgttgctttcaactgtttcaaccttacagtttcgaaccacaaggaatccgattattttttgtatgtgctcctcaaatccataaatctaattttaaattcaaaaacaaacagctctactttctttgaaatgtataaccctataaaatattcacattagtctaaattatatgattaatgtgg

SEQ ID NO: 823588 - DNA, 547 bp, Homo sapiens
aagattgaccccaaattctatcttttctaatcaaacagattagaagcaatttctaccaccttttactcttaaagcatgtagtcatttctctcttatctctctgaagagactgtaaccctattatcctccacctgcctgatgccagtagttttttacatctgtttagttagggaatgggtgactggtactttatatacaagcagaaaggagctacacagcagtaaacatagtctcaataaacactgtctccttgctccctatagacagcctcctggtgtcttcccagcggcaatctctgtttgtcatgaagtgggtggcaggggatgcggatacagcaacgggaaaccctgggggtgcgtctgtgactggtccacactttgcctttcccacttcacctcgtctttggrctcttaggtgccttgatgtccagtggcacatcagtgcctcactgccagccagtgtatgaacttgatatttggacactgagtggaattactcaaaggaaaagatttgacatcaggagaatggaccctaatcaatgcagtct

SEQ ID NO: 823589 - DNA, 647 bp, Homo sapiens
tagttgatcagttaaatttttttttctgttgctgacaaggtatgcatggaagaagttgcaaaaactttatttcattatatgctcaagcattagtcacagctttcaagctaaatctaattgctgtagtccttacagacctccctggccctaggcagtgttgagctaagtgatgatcctcatgtttagaaaacacaggaattagaccctagcaatgcactaacaatatgactgagaattatccatccatgccttagtgtacctctgaaataagaataaaaaatgcctaccctgatatatggtccagaaatacagcaaggaggtgggggatgatagatcatgtcctttgtactattgggaagcaatttcatatgtaaattgaaaagaaaagaagaccaaaaataggtatgtggaattagttattccacaaaatagcaaaatagtttttaaataaatccaggcaagccgtggtacataacaaaataaatgtcattcgcccgctttgctgcagacctgtcacaagcagctcctggctcggctgcacagattcctcaccatccgcaaaaaggaagttactgggaacttaaagcagagggatttgtttttaattttgrgctgtcaatgggtgaaaatatgtaaaactgacagat

SEQ ID NO: 823590 - DNA, 466 bp, Homo sapiens
tccctggaacagctcatgatgagcctgtcacttgggaaatgaactaaactcttggagccagttggwtgcaaacttagaaatccactaggtcagcccctcatattcacaggtgcatctgaggcctgcagaaggacagtgccttattcatggaccttggctgtccagttgggaccatcagggtttcacacccttgcctgggctcaatccattgcactgcctcacatggcagaatctctgattttcagcatttacccagaagtctcagggagcctaacaaattcaaaacaaatgttcaaggaattctaccaaagcaaagtcccaaggaacttggaacagagtcatcccaatcctaagaatgctaactggaaaagcaagaggcaccttgtccctcaaatgggtgggatggtctgccctaggtgggcctgggtgggctctcatgatggatctgggctaccccaacagggga

SEQ ID NO: 823591 - DNA, 671 bp, Homo sapiens
tctcaaaaaagtcaccagagatmggatcccagaaagctacagagtagtgtcagctacagtacagacaatttctccaacaaaattgcctcgttacagattctcttcttggcacaacaagtactttcaaaaatagtagcccaatttcacaagcaagttggaacccactgatcctgacttctaaaataccgcattccttctgttgctagtaatgctcaaaatatgcctcttaaaattacttgtcaaagtctccttttaacagggccaattacttttctcctgagacaaaagcctgagaaccagaagcctaggaaaatgaatggatcatgatcttgctggcatgtttagcaatgaacttaaagtggtccccactttccacatcaattcccctccccacttggtgatgagaattcaaatgttctcaaagattctgggccaggaccatctttaaagtttaaagaattttcctttttttttttcccacagtgactacatagttaaattaccaaaattacacttaaggaaaaggtcaaaagttactttcttaatttacatgccgggcttggacataggggattaatttgagcaatccagttatgtttttgtgtgttaacatgtaactggcaaaaaatacataattgttcattcttaatgattaaattgtggaatatgtt

SEQ ID NO: 823592 - DNA, 552 bp, Homo sapiens
actccccttctattggctatcacacttggtgtttcaggtttaggaatttttacaattattgttgccttatgtaaayggggaaatacccaccaccatcttctaaatgcctagccctacatctactttatagtcgctttaattgttataaaggaattctatatatgctaggccacattgtggcaaccccataaatcccaacatttagatacccacagttagttaaaatacttataaactccctccaacacacacactgtcaaaattagacaggattcatgacccttttctctgaggacactgttatttcatttcttgtaagtcaggtgctcttttacttcaaagataatccccaaagcttgtctgacagttcccttgagattgtatggaacctgtggtttctcctttggtttgaattctttaaatagttttaatgtttgtttccctttcttcctttgctcttatggcattaacagccttctcccacctccttgtaattgtccccctaacccaatatatgaaatagcatgataattctctggttaaactgtccca

SEQ ID NO: 823593 - DNA, 495 bp, Homo sapiens
gatatgcacttaaagcaaacataaccttaaacggtaaataaagaacccggaacttggaattaacatatgcgtttctgatgctagctctgccactaagatcacaccactgtatgatcttggatgagtcattaactctctaggtctgtttttttcatctctaacattaagaggttttataatttcaaagttctcttccagctatgaaattttattattatattctgcaaaagtatttgtcagattaattcctagacatataaagacatataaaggtttaacacattatctattgttatttactctgccatttctcctctccatttgtgtggacaactgaaagtcaattacgtatgctaaggcaaagacattggggaagactccctatacttttactccactggcatatctagatgaacaacttagwgccctgctgattaaaggactcaaagactcatccatatccatttctctcacaagtttaaagaagcaaaaccc

SEQ ID NO: 823594 - DNA, 456 bp, Homo sapiens
tgattggctcgtcttcgcgtcaaacagcgaggcacacacgcggccaactcgcccacacccgcagggcagggcgcagtcgctgcgccctgggcgcaggggcaccgctccggggagtgtcgcccgcccctgcyctcaccgctctttcgctttgcgcttagggcgacgacctaaagtcgaccccccaaatccgccctagccccctggctggctcgcacatgctcagaatgctggctcctgccccgctggggtttcagggctctcagtcctcttcccgtgcgcccggaggcggtgggtcagcaggtaggggctgccgccaagcttcagaaccagccctgctccaggaggacagcaaaaaaaaaaaaagggggggggagggggaggggtaaagagcaaaggaggaagtgggagggaaaggatcctccactcccgcgcttggagaggcagggtgaaaaatca

SEQ ID NO: 823595 - DNA, 456 bp, Homo sapiens
tgattggctcgtcttcgcgtcaaacagcgaggcacacacgcggccaactcgcccacacccgcagggcagggcgcagtcgctgcgccctgggcgcaggggcaccgctccggggagtgtcgcccgcccctgctctcrccgctctttcgctttgcgcttagggcgacgacctaaagtcgaccccccaaatccgccctagccccctggctggctcgcacatgctcagaatgctggctcctgccccgctggggtttcagggctctcagtcctcttcccgtgcgcccggaggcggtgggtcagcaggtaggggctgccgccaagcttcagaaccagccctgctccaggaggacagcaaaaaaaaaaaaagggggggggagggggaggggtaaagagcaaaggaggaagtgggagggaaaggatcctccactcccgcgcttggagaggcagggtgaaaaatca

SEQ ID NO: 823596 - DNA, 643 bp, Homo sapiens
gttattctccatcttcaaacacattctctgtcttctccatctcttcagggcctayggaggctccatcactctggttctcttgccctctggcttctgattgggattagccaatggtgagcaccatgaggtcctgaatcttgcccctcttccaccaccccttgcaccctctttgcctgtttgttcttggctagggctctgctctcagccatggctccagccaggcaccccctccctcccacagctctgcagctgtgctcaagatcggctcaattctcctcccctagtccctttaggtttcatgatggtaaaggctgcccagtgctgccaatccttggtgcttcactctccttgttttcctcttgactctgctcccacctctgtgaatagtccctttgttaaacttctactcattacccctttgagtgtgccagctgtttcctgccagtattgtcacatgtacccgtgttctaatgttaaaattccaaccaaatcacttaatttatattatagttgaaagttgtgatatgaggctttcaaattagatgtcttgctttgaaagggggaatttctagaaaatgtattttaaaatgagtgagggtattttatgctaaaatggtgaatcctaacttttttctcagtaggt

SEQ ID NO: 823597 - DNA, 616 bp, Homo sapiens
cggctccctccctcaggtatcacgtggccatcttctccagctcacctggtggccttgtgagccatacacctaaggacaagtcatctcacccagcaccctccatataaaggacagggaagggacaggacaaccccaacaaaaactctcaggaaaacttctgaaccactgctgtccatagcgatgatcaaatcctgcttatcggaaattcgaatcccttctctggcaccggagtcaattccaggttaaatggcaaggtggggtccccctcgtccatggtctttgtgatccctggcacctctccatgggctcttctgaaatggggagtccccttcttcttttaggaacctgcacacctcctgttggtgtagttcaggggcctgaaaacgactttaggggatgaggatccaaagtccccatgttcctgtttagcagacggtgctctagtgttgcaggttgggtctgagccccctctccctgcctctgaccacgcggcctctttctcagctcccgtgagcttctgggcactgctaaggctggtactgccatgcaatgtgggatcagattgaaccatgtgaaagtaccgttyagcaggacaaaaatggtcaaatggcaataa

SEQ ID NO: 823598 - DNA, 558 bp, Homo sapiens
ttctttcttctttttggccaaacaaataaataaataaatgaataraagaagctgcatcccaccgtcgactcacgcccctctgtggaaatcccctccttgcaggtgatcacttgaggctcacctgagctgccatctcctctgggggctctctctgcctttgttccctgaggctcccggctgacaggatggccagtgccatagtcactctctccagatggggtgcccttagggcaggcagacgctccttgcttcatgctccagtgcattgggcggggcctctgtgcaggctcctggtgatttcccccagagttgcccagcctgcagtgcttcccatgggggaggcattccaatgtgggcaggcacagatcccccatgccctcttccctgggacacctgcagcaggccccaggctgtcctcaaggctccaccactgtgtgggtgtgtcagggggacccagaccctagggccatgagcctgcctctccccttgtccctgatgaatatgctcagaagtgcaggacggcggccccgggtagaagctcccttgggctgagtcaag

SEQ ID NO: 823599 - DNA, 576 bp, Homo sapiens
cccacgacaaggcaatgtggggggccaagccagactacattattcacaatgtggttttctagctgcttccaaatttgattttgccagttgaggctgagcgagttaatcccctggacttcatctcttgkgcctcaatttcccaagcttctccaaggtgttgccctttcctctctgaccactaaatctgtgggaatgagctcgaagcctgcacccagtgcttcctggctatgcagcatctgtattgaccaagtcacaaactggtctaaataataaataggatcaaagactgacccctggatggggttggctccaccgcatttctgtggctgtcagtggccttggcaagctgataggcgcatcaaaacctctttggtataaaagtccagatgagggagatcagagagtgtgtgggtgcagagcctctggggaggacgggtttgcaggctacactgtgttcaggtgcccaggtcagtagggatccttccctgcaggtggcctctgagatgcctttcacccaccctgcacttgtgacatcttggcttgtacctggggacctctctctgcaccgtacacaga

SEQ ID NO: 823600 - DNA, 623 bp, Homo sapiens
cctttattttattcaatcattataataatgggaggtgggttttatcatgattyccattttataaatgagcaattggaagcttagaatcaccaaataattttcccaacatagcaaagaatccagctctggctgactccacactcacagcaactacaccacttcgcttctgccgaagcaatcctacttgcactcctccttttggattgctgagaagcatcactatctaattaccataaagccccctcctctccatgcctgctatctttgtcctggtttgagacctctttatccctcccatccctaccttcagtctatcctgcacaggactgacaaagtcatcttccagaatcacaagcatgactacatcagtattctacttaaaatccttcagtaagtattctctctaccagtcgagatgctcgagcaaggaacagagagatactattgtctgaaacaaccacaaagacaacaaaacacatgaaacaatgggtttcttttttatttgtttttgtttttcagcttatattttagattcaggggtaaggaaggattttacctgaagccttagcgggagcatggaccttgagaccttgagtttggacttccagccttcagaactgaga

SEQ ID NO: 823601 - DNA, 291 bp, Homo sapiens
aaagtctatcctgaggctcaggatcccccaagttctcccaaagaccctcgggccccagtctaggaagcatggagatgacaagtggaaaacagtggcatcacacatgggacagatgatgtgawgttggcaggaaaattccctgggatacgacttttgtgggggtctctccacgtcctgccctgttggaggctggaagcctctgtgctctctacctcctgggggggcagcagggcagaaaacagaaggttctcagagagtacccctgttcctagctcttgttcttcaaacgtc

SEQ ID NO: 823602 - DNA, 464 bp, Homo sapiens
aaatggagcattcacataaattgtccccattttacagatgccagaaagtcagaaggggagcccagaagtctggcttaatctatctttcagaggcttccgaacacatcacttcayggattgtgcaaagagtaccttttcaaagcgtacagtgagtgtgcagtctgaagtgaatcagcaatcacaacagtaaatcttatatttgtatgttgccaataaacattatctcatttgatcctcataaaatgcttgtgaggtagtaattccctcctttttacagaggagggaattgaattcaaaatgagagtaatacaattaaaaggtcacttgaataaaggcctgtattattttgttagggaatgcaattaagtgatgaatactaatttccttgaaactgatgtaacctttccccctatgtaatactagtgacacaacttgagtgccttggtggaagatgtccaactttt

SEQ ID NO: 823603 - DNA, 453 bp, Homo sapiens
ggttcaccaagttcattcaaattttaacgtatttcgttatacaatatcaaaaagtcacatttgttaacatcttcacctatatcatcagaaaaatctttaatcgttggaaaccatcaaactaatagtaaaaaatacaagtttcccagaattctgatattcccttgaaagcttgaatcttattggtaccaaataatgtcaattattttatttccttccttccttcctaccgtctttccttcctttcttccttccttccttccttccttccttccctccttccttccttctttccttctcttcttcctttcttttgtttgtttttatttttctttttwttttttttgagacagggtcttgctctgtctcccaggatccaggatggagtgcagtggcatgatcatggctcactgtagcctcgaacttcctgcttcagcctcctgagtagctggaact

SEQ ID NO: 823604 - DNA, 585 bp, Homo sapiens
tgttttatgccttaaaaattataaataatgataagtttaatttgcagcccttatagcttagaggcattgtagttgatattatagtaaccyttttagatgttagtaacttttattgtaaaatttaaggtagctctacctgctaaagtagcacctattcttttgaaaggaactttctcaaaggatttttagggcttcataatttcttgttgctctgtgtaaatccctctgataggcttccctgaaggattttaagcagaaataacatcaggtaccagtagatggcagtgaaaaataagcagacacatttttctgataaaatgccatttctacctcagtacttgataagaatcacacagtctagctggcctttgtgttttcactaaaaatatcctgaattatcagtcagttatgtttgactatgagaaattgcagaaaagttaaaagtatttcgcatccaaaagtttgtaatctagtgtaataaataggacagatactcaaagtgtatgaatggtatgacaataaatttagaaaatcatacaggcacacacactgctatagacatgtaaagatacatacatgtattgg

SEQ ID NO: 823605 - DNA, 607 bp, Homo sapiens
tcttacagaactgaacaatacttaaatgtgtttaaacctgctatataaaatgtcagatgtaaaagcgaatatctaatgaagcaccttttcccttttctaaaattcaatagtaakggccaggcacagtggctcacacctgaaatcccagcgctttgggaggccgaggcgggtggatcccttgaggttaagagttcaagaccagcctggccaacatggtgaaacgccgtctctactaaaaatacaaaaaaaaatggccaggcgtggtggtgcacgcctgtaatcccagctacttgggagtctgagacaggaaaatcgcttgaacccgggaggcagaggttacagtgagctgaggtcacgtcactgtactccagcctgggcaacaagagtgaaactctatctcaaaaaaaaaaaaaaaaattacaatagtaataattatgccttctaacactaaaatcaaataaccttacttatcagttacattgcctactaagctgacttattttctgacttttcctttgctttattctcttatttcttccaagtaaccatattctcttttaccctcctgttcaactgtctatgctccttctctctttgttcactattt

SEQ ID NO: 823606 - DNA, 516 bp, Homo sapiens
ttggaactgatccccaggaaagacaaatggttggctatgcagttatcagtgcacgggtagtagctgaatacatgaaaatagctagatttgcgtcaggaaatgagaggtgaaaaattataaaagagctgagaacagaacactatgaaatgttgcccatttattttattgtttttgagacagagtctcactctgttacccaggctggagtgcaatagcgtaatcttggctcactgcaacctctgcctcccgggttcaagcaattctcctgcctcagcctcctgagtagctgaaatgacaggcccacacaaccacacccggctaatttttgtatttttagtagagacggggtttcaccatgtttttcaggctggtctttaacctctgaccttgtgatctgcccacctaacmctcccagagtgctgggattacaggcacgagccaccacacccagccgaactgtttcccatttaattgacgggtataggaaaagaaaccacaagagccaggagataaaat

SEQ ID NO: 823607 - DNA, 570 bp, Homo sapiens
ttgagaaatccatttagagaatcaaagattgagtcaacaatctgayacaatttttctctaaaattccattttggatgtgtatatatgcatgtgcagttccaattgctgccaagaggaatttaaactatgttaattttactatatgaaaagacctaatacttaaatatgctttattccttgtcgacactgttttatcaggtccattaacaggttttctcaagtagtgggcctctgtaatgttataaaattgtcctgctcagtagtgttcccaaactggttctgcaatcttttcaccttcctcatcttggctcactgttcagatattagctcctttctttctttgtggtcagtacagattatcttttatattctcctttaggtgggctacattttcttctttgttcggatattaggtccttttttcctttgtgttcagtacagattatcttttatattctcctctaagtgggctatatttacttcttgaataaaaatggtcaccactagatcttatttcctccatctgctttgaagtcagacactccaacattcctttccctcacgtgctat

SEQ ID NO: 823608 - DNA, 570 bp, Homo sapiens
ttgagaaatccatttagagaatcaaagattgagtcaacaatctgatacaatttttctctaaaattccattttggatgtgtatatatgcatgtgcagttccaattgctgccaagaggaatttaaactatgttaattttactatatgaaaagacctaatacttaaatatgctttattccttgtcgacactgttttatcaggtccattaacaggttttctcaagtagtgggcctctgtaatgttataaaattgtcctgctcagtagtgttcccaaactggttctgcaatcttttcaccttcctcatcttggctcactgttcagatattagctcctttctttctttgtggtcagtacagattatcttttatattctcctttaggtgggctacattttcttctttgttcggatattaggtccttttttcctttgtgttcagtacagattatcttttatattctcctctaagtgggctatatttacttcttgaataaaaatggtcaccactagatcttatttcctccatctgcwttgaagtcagacactccaacattcctttccctcacgtgctat

SEQ ID NO: 823609 - DNA, 618 bp, Homo sapiens
aaaaggtactgccttgtaactaaaatcaacccattaccccatcctgtaaggcctatgctagaaagacactgccttgcagcaaaacgtcagccttaaacttaactaatcaccaagggattttgtctcattttggcctattgcccaaatttctgttcatccacacatgaacaaaagttcttacattctctgagattcttttacttctcacctcaagtaaattgcttctccctgtctttgtaggctctgtgatgctatagctctctttcttctaaatcttctctcattgtattctagtgttcatatttgcagaactttcataaaaatagtgaaggcactatttaaagattttattgtattttgaggatcctttatatacttctatcaaatatctattacattttatttccccccaattttgagatctcttggataaaatggattgttgataggaggagagattgagagtattaacctaaagagagaaaattactttttctctgtagctagacatcctagaaattaaagggagagaatgaaagaaagagggagcgagggagtgtgtgtgtgtttttgtgtgtgtgtktgtatgtgtgtgtgtgtagaaggatttccatatct

SEQ ID NO: 823610 - DNA, 469 bp, Homo sapiens
agaattgaaagactgttgatattacatagaggaaaaaaaaaggtggggggggggcaacagttgtttgtttkttttttttttaaaaagacaagaaatagagaagaaattataaaagtgattgtttatgatgatgggattattgatgctatttctacttaatatactatcccattttttgggaagtaacatattattttataatctaaaaaatggttaccattgtaaaatttttttaattcagaaaagcatttagattacaaaattaaagaatttagaaactataattaatgagtattcctattgttttctttgaaaggcatattttaaatttttattcctcgcattatttaaaagccaagcatggctagcctgacatgtaaggggcttggaagtcaccactgcatcctaacaacaagtaaaaggctgagaaaactgaaaaatcaacaacacttcttaaattcataagaga

SEQ ID NO: 823611 - DNA, 588 bp, Homo sapiens
agaagttaaaaaaaaaagcatacagtgaatccattttgattaaaacacagacatataaatttacacgtgtatgtctattacaatggccattacaatatgtatgcatgtgcacacatatacatatgcctacatatrcatatgggcactcacaaaatgtttaaatggttatatagagtaaatacatagcagggttatgaacaatgttaagagtatgggtgatttttttagataattgctttatttttgtacttatttattgtcctgatttttaaacaacgaccaagaattacttatataaagaaataagaatttaaaaaatggaaagataacctcctacagtatgcattccagaaaaattgtatgatacaggtttatcaaatgccaaaataagtgaaaattaaccactttcagattacatataaacttttaataaaaaagaggaaaagcaagcacaaaccaagactaaaagcacttataggcttcttataatttcaaataagagtttttatgttatttaaaatttaattatatgcattaaattaacaacaaagtacaccagcagaaggctaggcagaatacatttttctt

SEQ ID NO: 823612 - DNA, 523 bp, Homo sapiens
ctgtatcccataccagctagccatgggctagaatccatcctaagggagatgtaaactctgagtcacttctgactctctctacaggtgaggctggttacaggcccaaggtcagtcctctgaaggtcaaaggtataaacttttaatggcaagagcacagctgggcaatggtgaaaaaaagttggttaaaagaccctagaggatctgaatggggtaccaagggtatccactacacagctgtaatgggaaagggggacaaagaacaatagttcccaaactatgtttctggggacatttaattgtgtgaaatttctacaggaattagcaatgggaatggtggttataagtttgaaattgccaagttgaatgaaattaaaaaccttgtttactgcagaaattctcagatcctttgatatcccaagaggccrataaaatacaaagcattttcaagctcatttaatgagagcacaccttgggaaatacttgagttgggaggtattaagagtttgcattgattgaactaagt

SEQ ID NO: 823613 - DNA, 589 bp, Homo sapiens
ccccaccggctaagcttccatgtctatctcctgaggcactgttggtgggtcaggcttcccaaagagaaggacgcctccagcagggcaacatgtgtaagaacatgagggtgttaagtagaacatcaaaattcaggagagtaagagagctgcttaggaggagaaagaagagatggtagggcaggcgtggtggcccacgcctgtaatcaagcactttgggaggcccaggcgggcggatcaggaggtcaagagattgagacctgaggagcatctctgcctgcaccatctgggaagtgaggagcgcctctgcccggctgctccaccgtctgggaagtgaggagcgcctctgccaggctgctccaccgtctgggaagtaaggagcacctctgcccagctgccccaccatctgggcagtgaggagcgcctctgcccggcccccgccctctctgggaagtgacgagcgcctctgcccrgccgcctcacagtctgggaagtgaggagcgcctctgcccgggccctgccccgtctgggcagtgaggagtgcctgtggagtccgccgccctgtctgggaagtgaggagtgcctgtgcccg

SEQ ID NO: 823614 - DNA, 589 bp, Homo sapiens
ccccaccggctaagcttccatgtctatctcctgaggcactgttggtgggtcaggcttcccaaagagaaggacgcctccagcagggcaacatgtgtaagaacatgagggtgttaagtagaacatcaaaattcaggagagtaagagagctgcttaggaggagaaagaagagatggtagggcaggcgtggtggcccacgcctgtaatcaagcactttgggaggcccaggcgggcggatcaggaggtcaagagattgagacctgaggagcatctctgcctgcaccatctgggaagtgaggagcgcctctgcccggctgctccaccgtctgggaagtgaggagcgcctctgccaggctgctccaccgtctgggaagtaaggagcacctctgcccagctgccccaccatctgggcagtgaggagcgcctctgcccggcccccgccctctctgggaagtgacgagcgcctctgcccagccgcctcacagtctgggaagtgaggagcgcctctgccygggccctgccccgtctgggcagtgaggagtgcctgtggagtccgccgccctgtctgggaagtgaggagtgcctgtgcccg

SEQ ID NO: 823615 - DNA, 568 bp, Homo sapiens
agaaattggccaaaacaaaggggccacaggccccatggcagtcygaaatccagcagggcagtcacatcttaaagctctgaaatgatctcctttgactccatgctttatatccaggtcatgctgaagcaagaggtgagtttccatggtcttgggcagctccacccctgtggctttgtagggtacaagctccccttggctgcctttgtgggctggtgttgagtgtggcttttccaggtgcgtggtgcaaactgtcagtggatctaccattctgggttctggaggacagtggccctctccttatagctccactaggtggtgccccaatagggaatctgtgtggggtcttcaaccccacatttcccttctgcactgccctagcagaggttctccatgagggcccgctcctgcagcaaacttctgcctggacatccaggcatttccatacatctgaaaactaggcagaggttcccaaaccccaattcttgacttctgtgcacccacacgctcaacaccatgtggaagctgccaaggcttggggcttccaccctctgaagccatggtccaagct

SEQ ID NO: 823616 - DNA, 551 bp, Homo sapiens
ttgttaattggtttaaaacataagaattttagtttgtttttatgaattactttaaaagatgagctagatactattttccgcaagtatcataatacttgaggtgaatgaacagagaattaaaatgctgaaactgtcacagaatattttaatattagttaaaatctccttagctaaaaaatgtaactagttctttgtttcaaattttaattagcacatgtgcagcttttattttttctctttttaaaaaaccatttaataagcatgtataattttctgtttttcaattttcatttttcattgacaaataatacttatatatatttgtggagtacaatatgatgttttgatatgtacttacattgtagaatgattaaaccaagctaattaacaagtccatttttatcttagataattgctttacaacccagttttctgatacgaaattttcttgratttcatactgaatagttatgaaaaaaaaacaaagactagtgtagaaatccaaatgaaaatttaaattcctttatagtcttctgagatttcctgacatt

SEQ ID NO: 823617 - DNA, 670 bp, Homo sapiens
ccttgccaataaataattccagctgctagttgatactacaaggcttaatggatcaaartatttgatgccatcatcactaaaatctcttttggcagtctcaagatggggtgctgccaccagtggtggagtacaatacaataactggtatgccaaaagaaaacagatattctatttattaataggccattttacaattaaggaaatctttaatcttcatggatatacaacatgctcattgtcactcatatatggtcactcatacataaggtacccaatgtagttttacacaagagagtgagtgctacaatacataggtataaaaatgacataactcattctttctttttccgcagcacatgcttaaataaacttatagtttctcttactggacttacactaaataaatgttatgaagtagataaatgactttaataaattccttccaagcacaccagtttgaagataaagcaaaatgtaagttatacaaacaccaatgaacaagaaaattaaagaagtaattttctctaatttctattataaacattcagccaatttataaggtaaatatagtaacagtctaatcagaaaataaaaccataaaattccaaacttatcaaaaaatattgcactatggacttaagtccactcataataagttagctgggattaa

SEQ ID NO: 823618 - DNA, 410 bp, Homo sapiens
aaatgaaaagatgacgctgattcagatttaaaaaatgatacaactcagaaaccagaaagaatgggaaaagcctrtatttcattgttctccattcaaagccgcaagtacagagatataatctttacaagataagtagccaatataactaactttaaatgaagtttttcctttccaaacacctgcaataagctttcctcatttgaaacaaagaatatatttctgggcatatccatgtgtgaaagttgaacctcaggagatcccaatctcatttctcctgcctaatgaaaggggaagaaaaattaaagctaatttgggcgtacttaatttcaaagttaaaagctctgaatttatatatgtcagaaaacggtcttgatggcaaatttttaaagaaaaaaaaacatgtcccaaat

SEQ ID NO: 823619 - DNA, 541 bp, Homo sapiens
agggggaggggatataaagagcaaagcagaacaaagaataaaaagaaatattggaaacaaagctcgatccaggagtttttcaaaaatattatcccagtgaaaaagagggaataaaggataatgtaaaacttaaaaagacatttttcaatctagcttcaaatgagggcagtttctatgtgtcaaatcatcagccagttaataaatagtgccttgcctagaattcagagcccagagcccaggacgacctagggtattacaattgaaaaggagatgggaatggaaagagagctcaataggagagggccatgaggctccgagaagtcagtttacagagatgcaagcaagcaggctttcttctctgtctgatggcaattttgaatgttaggtttatcttctgactgcaaaggaagagcaattgaaattcacaagcatttctttacttaytttgaatatgataccattcagagagtaatcacgaaccctcccactcagacataatcactgctctctgagtttagctcctaaaatgttaattaaaaca

SEQ ID NO: 823620 - DNA, 626 bp, Homo sapiens
ttcatttaataaaactctatttgtgaggtaaaaaaatgttctcaagttccctcaratagtaataatcatcatcataatggctcagctattctcttctacttggtattgttaatttctaacaaaataatatggaaagagataatttgttctgaaactgcagaattggctttggctgcctggccaggaatgcggtgctggagaagctgcccctctccttgtgcttggatttttgtatcctactttatcacactcacctcaaaattgacatggccattgggaaggcggttggcacaaccctcattgaggaaataaatatctttgattaagagactgaagaatggtatcacaatctagaggaaacaaaagattctggttggtctgggcaaacaaatatttagcctttcataaaaatacacaagattaatgaacaacattaacttttgattatatgaaaggccacaaagaattaaggtacagtgttttgtttcttacacaacagcaatttcttcccttacataattttgcttatactacaactgctataaccaaagcacagcaaggacaagtagcaatgggaagtgaataggttagtacttttattacaatttttcctatttttctcattg

SEQ ID NO: 823621 - DNA, 311 bp, Homo sapiens
attgcttctccctctgcatgactgaagaaactctttacatatggaaagattcccctgaagcagtatagcacactttcatctctttctctctttctctctctctctttctttcttttttctctctctctttctgtcatgacaaaaaagagaacggattatgacaagtgaaaaatgtgagtacatatggtactgtaactttggcctatccatttggtgatgargatctatattatattacatatacctagaactggtttaaaataaaaccattataccaacctcctcctctatttaatatattagagaaagag

SEQ ID NO: 823622 - DNA, 644 bp, Homo sapiens; identical to SEQ ID NO: 812057

SEQ ID NO: 823623 - DNA, 662 bp, Homo sapiens
ctgagattttgatatacccatcacacgaggaatgtacactgtacccaatatgtagtctttttatccctcaccccctccctccctttccccactgagttcccaaagttcatagtatcattcttatgtctttgcatcctcatagcttagctcccacttatgagtgagaacatatgatgtttggttttccattcctaagttactttagaataatggtctccaattccatctagggcgctctgaatgcctttatttcattcctttttatggctgagtagtattccacggtgtgtgtgtgtgtgtgtgtatatatatacagagagtcagagcccaaaaaggggaagatggcacccacttggagacgtggtctagtgggatagagtaacctgaatgagacaggagggtatccatgggggtgggggtggggggtcaatccaacaaggagaatcagagagtgagcagggtaaggagggtatccatgcagaagggaagccaggtgtagaatgtcagggcccaggggagatgagaaaagtattagcatgggggacaaatatatatatacacacatacaactatatatatatatwttttttttttcactcattgattgatgggcatttgggcttgttccatatttttgcaattgtgcattgtgctgctataaa

SEQ ID NO: 823624 - DNA, 641 bp, Homo sapiens
taatcccagctacttgggaggctgaggtgggaggatcctctgatctggggaggcagaggtgacagtgagctgagatcacaccactgcactccarcctgtgcgacagagggagactccgtctcaatgaataaataaataaatagccgggcgtggtggctcacgcctgtaatctcagcactttgggaggctgaggcaggtggatcacttgaggtcaggagcttgaaaccagcctggccaacgtggtgagaccctgtctctactaaaaatacaaaaaattagccaggtgtgttggtgtgctcccataatgccagctacttgggaggctaaagtgggagaatcacttaaacccgggaggtgaaggatgcagtgagccaagatagcaccactgcactttagcctgggcgacaagagcaagactccatctcaaaaataataaataaataaataaataaataaataaataaataaataaagttaagtaactacctttcagagctactattttctgggtgttcataagggctagaaagttcttccctttacagagacaaaatcagctactttgtaatacacacccattggtctaagttgtgcttgctgagattacacagaagagtccaactcttctacatgataaccct

SEQ ID NO: 823625 - DNA, 628 bp, Homo sapiens
gggtagacttggggagttaattttaggtgtcaatttgaccagattaaggaaaacctagaaacctggtaaagcattgttttgggtgtgtctgyggggtgtttccagaggagattagtgtgtgagttcagtggactaggtggaaaagatctgccctcagtgttagcaggcaccatcctcttgcccaggggcccaaagagaacacatacagagggtggactccgctctctgagagctgggacaggcttttcttctgctgccttggacatcagaactccaggcccaccagcctttgactccaggcccaccaagattgacaccagcggcctcccaagtcctgaggctttctgccttggactgagagttaccccatctgcttccctggttctgaggtctttggacataggctgagccatgctactgacatcccagggtctttagcttgtagacagactgccaagggacttatcagccaccatagttttgtgagccaattcccctagtaaatcacctctcatatgtctatatacatatcctattggttctgtctctctggagaaccctgattaatataaatttggtcttggggaagctgaatattatttcttcttactgtgttccttacaacaca

SEQ ID NO: 823626 - DNA, 640 bp, Homo sapiens
atgattttcaggttcttttttgacagcttctatccttccattcatttcaagatcattttttcttactttatgaactatagtgataatatctgctttaaagtttttgtgtgataactccatcatctggattatctcagggccggcatcagttaattatcttttcctttgaaagtaattgagattttcctggttctttgtgtatggagtaatttggggcattttgaatattatatgatcaaccctatctagttcagaccacaagtcctgacctgctttggatcagttctacacatgccctgctcaaggaagagtccaggacttcacccacggatttaaggaagtcttttctttagcacaccgcgatttcccttacactctctggcgcccagaggcccttttccgggtctttgtgctgcaacgctggagttttaccctcccctaactgttgcatatttcccctgcctggggtccacctcctgggtgaagcaaaaagacaaaaaaagaaagaaaaatcaacagaatttcccccacaccttcayaggggttccctttcccaattcctctgaccagagagaaggattttcctcatggttttagatcctgcactaccaacattacaggagtatagtttcatgattgg

SEQ ID NO: 823627 - DNA, 521 bp, Homo sapiens
aagaaacaacagatgctggcaaggctgtggagaaatatgaatatttttacactgttggtgggaatgcaaatagttcaaccattgtagaaaacagtgtggtgatttctcaaggatctagaaccagaaataccatttgacccagcaatcccattactgggtacatacccaaagaaatataaatcattctcttacaagatacatgcacatgtatgtttattgcagcactattcacaataacaaagacatggaaccaacccaaatgctcatcaatgatagactggataaaaaaagtgatacatacacaccatggaatactgtgcagcaataaagaggaatgagatcatgtcctttgtagggacatggatgaagctggaaaccatcatcctcagcaaactaacacagaaacagaaaaccaaacactgcatgttctcactcataagtgggacmtgaacaatgagaaaatatggacacaaaaaggggaacaacacacatcagggcctgtcagggggagcaaggggagg

SEQ ID NO: 823628 - DNA, 440 bp, Homo sapiens
ctgggattatgagagcccaccaccacgccgggctaattttgttttgttttgagatgaagtctagctctgtcgcccaggctggagtgcagtgacctgatcttggttcactgcaacctctgcctcccaggttcaagcgattctcttgcctcagcctcctgagtagctgggattacaggcacctgccaccacgcctggctaatttttgtatttttagtagagacggggtttcattgtgttggccatgctggtctcaaattcctcacctcgtgatcgccctgccttgttctcccaaagtgctgggattacaagcgtgagccaccgcacctgtcctgatttttgtattttagtagagatggggtttcaccatgtyggtcaggctggtcttgaacttctgacctcaaatgatccaactgtctcagcctcccaaagtgctgggatta

SEQ ID NO: 823629 - DNA, 509 bp, Homo sapiens
ggattggtttatttgtccctaccaaatctcacattgaaatctgatacctgacatcaccctaagggtatgaaaaaaaaaaagaagaaacttgatccccagtgtggtggtgttgggaggcagggcctagtaggagctgtgtgggtcataggagcaaatgtctcatcaacggctttgtgccattctcatggtagtgagctcttgcaagattggattggttcttggggagaacggatcagttctcattagaatgggttgttataaagccaggacccctactcactaccccggggatcagtctctcttcacatgagcccacttgccctttgatcttctccttcatattttgatgcagcacaaaagccctcaccagaagctgagcagatgctggtgccttgcttcttgcacagcctgcagagctgtgagctaataaattaccccrcttcaagtatccctttatagccacgtaaaatgggctgagacagacagtctcttcaataaatggtgttgag

SEQ ID NO: 823630 - DNA, 540 bp, Homo sapiens
cagggatttgtttcttcaggaaattcatcctggatcggaattcctgtcgaactaagtatccacggcagcgagcctgcagcctggtgatcaggccttcattggccagccacagctgttctcggttatatgcggcagtcaccccagagatagaactctgaaaaagcagtggtcacattcaaagacattcacaggcaagaatggatgcaggttttcacgaagtatcatccacagcacacaagctaacacctcctgcttcctaagtctatactagatcattagctacataacaggaataaagccctcaggtctgttttttaggactaggttgttctcacacacgtcctcccacctagaaaacacttcataaacaaaaacttgatcttcttttacttcatatgtcatctcacttatctacctayccaacactgactaggctgggcactgtgctggctgatctggggtcactgtagacaagaacagagtgacaggtacccaacagggctgtgtgccacgtaccgagggacccctagaatgtcacaa

SEQ ID NO: 823631 - DNA, 627 bp, Homo sapiens
ataataaatgctggtgatgttgcagaaaaaaaggaacacttatatactgctggtgggaatgaaattagtccacatactgtggaaagctgtgtagcagtttctcaaagawcttaaaacaggggtactatttgacagcaatcccattattgggtagatacccaaaggattataaatcattctaccataaagactcatgtacacatatgttcactgtagcactattcacaatagcaaaggcatggaatcaacgttaatgcccatccacagaaaactgaataaagaaaatgtggtacatatacaccatggaatactatgcagccataaaaaagaatgagatcatgtcccttgcagcaacatggattatggctggaggctataatcctaagcaacctaatgcaggaatagaaaaccaaatattgcgtgttctcatgtataagtgggagctaaacattaaatacacaaagacacaaagaagagaacaataaacaccagggctacttgaaggtggatgatgggaggagggaaaggactgaaaaactacctatggggtaccatgcttattacctatgtgataaaataatctgtacaccaaacccccatgacacacaatttacttatgtaagaaac

SEQ ID NO: 823632 - DNA, 602 bp, Homo sapiens
tctctgtagactcacctcaattgaagagtcctgataatttacagaagtgtgtagtgcactaagagatccctgctgtacgatgcctgcctgtggagtgttttatgtgttgatccactggagtgtgtgtgtgtgtctgtgtgtacgtgggtgagtatgggtgggcacggattgtgtgtgtgtgtatgtgtttacattgtggtatgtgtctgttggggtgccgccattagggatttggaagagtgaggaccataaacttgtcaacattcctacatgcctgcttcataacaagtgtactgaacatggccaaaataactaaaccaagtaaacaaattagacattaattaaatttaatgctgggcaggaaagaagtagtcaaggccaggtaaaatgaagaaatataaccaagtgaatgaaatttttacattgattcgtagaatgagacatgaatattttttaaaatttgtaatttctaatgactatcagtatataaaactaagaattatatggctgtcaactgactaaaaactgtacataagattagagatagtgaaacaaccayatatgaacttctatttccacttttctgtctcaagaatgacttg

SEQ ID NO: 823633 - DNA, 574 bp, Homo sapiens
tattaatggatagcaaccttttcaatactgtttcctcataagtgtatggataaacggattccaaatatatttggttaaaagcaaggcaaacaaatatattgaattcagataaggactctaggtcagagatcaatcgaaagtgggtcctgatttcaagactacattattttgtgctgagtgaaacaaatgaaagctaactaaagtaagtataaatgaaataagatttgtaatataggtaaagcaaagtgccctaggagagcaggaatatttctttccattgtcagatataagcatgatatttgtggtgggccttgaaagactagaagaataagagatgtaaacaacaagacttaaaggcataaaatggtatattatatttatggacacttggagttctcactattaagtgggaggtattgataagaacacatggacatgtagatgggaacaacacacaaaccagggccttctggagtgcagaagttgggaggagggagaggatcacgaaaaataattaatgagtattatgcttaacamctgggtgatgaaataatctgtacaacacatccccatg

SEQ ID NO: 823634 - DNA, 429 bp, Homo sapiens
acttcaagaaggcttcagatatttgcgttaaaaagaagcccagtgctaacagccaaracagtggggaaaagtcattgaagatatttcatagctccactttgcagtacttattttctgtgtggtcataatgaaaaggggattcattggctcatgggtcttcaggctgtaaagaaagcatggtggcttctgcttctgggaagactcaggaagcctcccaatcataccagaaggaaagcagcaatgaaatgtttcatacggcaggagcaggagcaagactcacagaggaaagaggtgccacagcctgttatacaaccagatctcatgagaactcactatcactaagtcagcatcaagaagatggtgcttaaccattggtgaaggatccaccccccaacacacctccaccccctactgtttccagacagaagc

SEQ ID NO: 823635 - DNA, 569 bp, Homo sapiens
aaacaaagaggcttgaaatggtgaacagctattcttttctgcctactagggatgasaaagtacaggctgttttcaaattaaaaccagaagggccaaagatgtaaataaatgtgactgatagaggacagcataaaagaaaaaataagtttttttttttaaagcaggactgtgagaattttaatagagtctagattggtgaataaaaaagaatagaatatcccaaaaagtgtatattaatgctcaaaccagtaaagaaatatgagttaccactttgtggaaaaataacatgggtagattcatatgcccctactgcgtgtaagattatttttaaagagattaaagcattaaatgtagaaaataaaaccacaaaggctctagaagtaaacataggacatttcctttataacctttaagtggttaaggtataagtaattataactaaaagtctagaagctaaaagattaaaaaatgggtatatgtgaatacagtaacaataacttcatgaaaaaatattgtaaacattcacttctcagtcttttggctaagatcaagtgaaatattgtaaacaa

SEQ ID NO: 823636 - DNA, 614 bp, Homo sapiens
acaaagaggcttgaaatggtgaacagctattcttttctgcctactagggatgagaaagtacaggctgttttcaaattaaaaccagaagggcyaaagatgtaaataaatgtgactgatagaggacagcataaaagaaaaaataagtttttttttttaaagcaggactgtgagaattttaatagagtctagattggtgaataaaaaagaatagaatatcccaaaaagtgtatattaatgctcaaaccagtaaagaaatatgagttaccactttgtggaaaaataacatgggtagattcatatgcccctactgcgtgtaagattatttttaaagagattaaagcattaaatgtagaaaataaaaccacaaaggctctagaagtaaacataggacatttcctttataacctttaagtggttaaggtataagtaattataactaaaagtctagaagctaaaagattaaaaaatgggtatatgtgaatacagtaacaataacttcatgaaaaaatattgtaaacattcacttctcagtcttttggctaagatcaagtgaaatattgtaaacaaattgaaactacaagtaatcaagtaaagaataatatttactcttcata

SEQ ID NO: 823637 - DNA, 614 bp, Homo sapiens
acaaagaggcttgaaatggtgaacagctattcttttctgcctactagggatgagaaagtacaggctgttttcaaattaaaaccagaagggccaaagatgyaaataaatgtgactgatagaggacagcataaaagaaaaaataagtttttttttttaaagcaggactgtgagaattttaatagagtctagattggtgaataaaaaagaatagaatatcccaaaaagtgtatattaatgctcaaaccagtaaagaaatatgagttaccactttgtggaaaaataacatgggtagattcatatgcccctactgcgtgtaagattatttttaaagagattaaagcattaaatgtagaaaataaaaccacaaaggctctagaagtaaacataggacatttcctttataacctttaagtggttaaggtataagtaattataactaaaagtctagaagctaaaagattaaaaaatgggtatatgtgaatacagtaacaataacttcatgaaaaaatattgtaaacattcacttctcagtcttttggctaagatcaagtgaaatattgtaaacaaattgaaactacaagtaatcaagtaaagaataatatttactcttcata

SEQ ID NO: 823638 - DNA, 592 bp, Homo sapiens
gaagttctttaaatttcttgttctatcattctatctaaatatactcaaagtactataatcttaaatattattatttaatactctttcctaaaggaacaaagaaaaacaaaatccaaagatctttttaaaaagtctatattattcaaataagtttgcttcaaaaaattggcaatactgattttttatttgtagtactattttaggaaaaaatgtcaaaatgatattttggactttgcaagtcctgttttgggtagaaatgtcaaaaacttaattttatgtatgttaaaacttgaaatggccattagacattcaaaagaagatgtttaaaaggaatattttataaatgtaggattcatgggatgtggattttatttgagtgtggaataagagaaaggtgaggataaagtctgggtttaacatgactcccagtcctggatgagcaattgtgtggaaaacagtgccattcattgagatgaaactactaaagcaatggttttcaaccttgcctacacataagcatcacctgsggaactttaaaaaaatacgaattcctgaaatccaacctcagagattcttattcagttgaaatggg

SEQ ID NO: 823639 - DNA, 578 bp, Homo sapiens
taagttctacattgatgataataacctgagagacttctcagtctccaaaattgcactatttctaaaatataagtaaatattcccttcatcctaaatctttcaaagtttaagaatgtcattgatagtcttygctttagaggaaaatacagagatcaagaaaaaaggtctggaaaaatgaaaaaaataattttaaaagcttcctcagagagaaagagtttcagacggatatagtttaactatattaactcagccatgaatttcttacttctcttctagtaccggttactcttttgctgaatgaatctaccttatgaacacaagttaaaaaaaatgtacccatgataagtaaaacattattaaatacagctatttttataaaagtttcaagtcaaaaatggatccatttctgttcttcttcttacagggagttgcttatttcccatccttcattaaaagggccaaaaagtatactcatctgtagtagagaatatgcataatgtttattaactcatgcttattataatgttaacacattatctgccactccaagaatgtgggcatatttagaaaatgttcaa

SEQ ID NO: 823640 - DNA, 550 bp, Homo sapiens
atacttgtcatttaaacctaagttgatcacttaagatagaaaataaataagcaaaggtctgggaaatcagagtcaacccctgaagcagcccaacattttgtgactagatgagaaagctagggaaaaatcggctaaggagcttgagaatccgtggccagagaggctggaaagaagtgtcacagaaaccaagagagcactagcatgtgctggacattgaacacacattatcctcatcctcccaccttgctaaacaggcacgggtatttccatctaacagaaataaatcaatacctggaaagactaattacttcatccaagttcacacaagtgatacattttagtgttggtaattaaactgaagttggctcacttaaaaattcctgtgtcttccatcaccctttaccatcttaattgaggataaaaaggaaagaaggaacaaagaaagggagggaggggaaggcaaggggaggaaaagggaagggagggaggataggatgactgaatgaatgaccsctagtgatctgagagaaaagcttcaggatggagtctg

SEQ ID NO: 823641 - DNA, 639 bp, Homo sapiens
ttgtatttgtgttttttctcctttccatatccttgcaaatagtacatcttagaagayaagtgagaaaaaaggcccagaatttcctttaaagagattctaggacagaaggaatccagaaatatggaacctaggaatccttcttccataagtctatttggtgttctacactttccctaatttatttccaagtacctttctcactttgcataactggtttacaaatttggcttagaaaactggcccttatgttttcaggagatttttaaaagtaagacataatttaaaaattaaatatggcaagcagtgctaagttcaagcatgagccatatgctagcaagcaaccaccacctggcaagttcattgcagaacagttttgggatgctgtatatcctgtttgaaaatatttgctttaatatttcctacctgaagaaaagaaggtcacttacaaaggtagaaatagagaataaagaaatggagactggcccaaaaaagagaactaagctatctgattgaagacaatgacttgttatcagaagcagcagttgctgagttaggttatagagaaggtgacattttaaggggtgagatgcatgaaatatcaactaaagattagtgttaggaaacttttttttaaagcaa

SEQ ID NO: 823642 - DNA, 577 bp, Homo sapiens
aaattattttttcttagaatgcrttttgttctttgtcctctggctgccaaatgggcaattctgcaatcatcaactacatccacgttcatgaagccttgaacacattagcgtttctgatatggtttggatctgtgtccctgtggagtctcatgtcaaattgtaatccctaatgttggaggtggggccaggagggacatgactggatcatgtaggcagatttctcatgaatggtttagcacctcccctttggtactctcctcacgttagtgagttcttgtgaaatcttgtcatttaaaagtcagtagcacctcccctttctctctctcttactcctgctcccaccatgctcgcacattgccttccaccatgagtagaagctccctgaggcctccccagaagcatatgctaccatgcttcctgtagagcagaaccatgagccaattcaacctgttttcttatcaattacccagtgtcaagtatttggtatagcaatgcaaggacagcctaatacagtttctatttgtgaaatcctcttggtctggccccacattgaggtagctactgtctcctctgtctt

SEQ ID NO: 823643 - DNA, 577 bp, Homo sapiens
aaattattttttcttagaatgcgttttgttctttgtcctctggctgccaaatgggcaattctgyaatcatcaactacatccacgttcatgaagccttgaacacattagcgtttctgatatggtttggatctgtgtccctgtggagtctcatgtcaaattgtaatccctaatgttggaggtggggccaggagggacatgactggatcatgtaggcagatttctcatgaatggtttagcacctcccctttggtactctcctcacgttagtgagttcttgtgaaatcttgtcatttaaaagtcagtagcacctcccctttctctctctcttactcctgctcccaccatgctcgcacattgccttccaccatgagtagaagctccctgaggcctccccagaagcatatgctaccatgcttcctgtagagcagaaccatgagccaattcaacctgttttcttatcaattacccagtgtcaagtatttggtatagcaatgcaaggacagcctaatacagtttctatttgtgaaatcctcttggtctggccccacattgaggtagctactgtctcctctgtctt

SEQ ID NO: 823644 - DNA, 638 bp, Homo sapiens
gtaaactcctgctgagtattgaattttaaattcaaagtagttttgaaaaaataagttgttttaatgaaattaattcacatgtcattacgtgtgactatacaggcaagcttgatacgattatcccggaggatattctggtccctatgtaatactattggaagtgaaaagagaatatttatttccaggatttataacacagcataaagacacaaactttaagtatgtattgtgcttcaatagagttgcctacagcttgttaaatccaattaataaacacaatagacacattcacttttttatttttaagcaaagttactgaatttgttctatttgctattttgtatttctgattacaagatgctgtcccctgctgtttgctaatgattacaccagctatagtcacgaacatacagtgaaataagataacagttttgtttaatgtctcacatctacaaatcagagaagaacaaaagtagaaatctgcatgtccgtagaacaaatctagcatgctagcactgtgcctcctcttctcccaagtcatgtcatttcaataagcattttgtcctctccatgcttttggtaaytagatgggctaatgggaagggtggtggtgtaatattatttcttctgaaagagct

SEQ ID NO: 823645 - DNA, 623 bp, Homo sapiens
ctgaagaccccagaatttccccagattaagttcaataaaagatgtttgcatcattgaattttagtaaacattagttgaataaactattaaatggttagattgattataaatgtatgagattattttccaaaatatacatttgctcatctaatttagaatgagtaaatcccagttttctccctttttcccatttcccacagcctttataacatcttttttagcatattagggaactaaatttttttaaaaaacctggtaacttaagagaaccctatatagatctccaatgggtctatcctaaagagtttatctcagaaattcaaggctatctggtttcctggcacccataaatcacagcttaaccaaatcacatcatagtgaaagcattctaagtttaattttaccttgagatttatgaagcttctaatgatatttacagtcacgcatatgataaataaatgcataacaagttctatagaatgtttggatattcagagaaattttccaagaacsctttgtgaaagtttattaaacgcctagagatcagaaaatacaaccactcatttgattaactatcataactcttcattttctgttgcctgtaagcattgtcatgcagattt

SEQ ID NO: 823646 - DNA, 455 bp, Homo sapiens
ttataaatatactccttatcttcaagaaagccaatgaaaagcataaacatgttaaaagatgcagaagataaaaaaatgacccaaattaagcttttaaaggtagttaatatgttgtctcagatgaaagatataatggatagaattaaaaccagattagatgctgcagaagcaaatggaacttgaatacatagaaactacctagaatgaaattcacattaaaaagactaaaaaagcaagcaaacggaatacaaattagcaatgagatggcttaaagcgtctcatatatatgtaaggatgtctcagaattgtcagaaaagaatgkttgttaaaaacaatgaccaaagattttcaaaatttaacaaggtttgtaagccttctgactgaagaagctcaataaacccagagaaatatgatgataataacaaaaagcccaccataattatattgcataaaaa

SEQ ID NO: 823647 - DNA, 554 bp, Homo sapiens
ttccccctgataccaagtatccaatctgatgctccaaatgagaggatactatagtctaatataatcaactcatgtcttttargcaaagtttttatttctgcccactgagaggctaccaatagatcaaatctccttggcttctgatgaatgcatggtcctgtctgctgtggccacggggctgggcatcccccattgcaagttatgagaggcacacagggtgacttccctgaagggaattcttggacagacccctagaagaggggactgtggtcaaagcagtcggtgtgaatatggacataaacacagagggttatgggaacacagaggaaggctactaactcagacaggcagctcaggaacagcttcacagaggaagctatcccaacactaaacttgagggaggagaggaagttgctccagagtgggccgcagggtgatggggttggaggtggaataacggtaaccccagcagagtaaactttagtgtgaatgtcgtgtgtgtgtgtgtgtgtgtgtttgtgtgtgtatggtgtggtgctattatagttgtttga

SEQ ID NO: 823648 - DNA, 621 bp, Homo sapiens
gccaccttacactgaggcaagtcttctgaactaccagatgtttaaaaaaaaatagatcagattctggttctgaattttttcagcagcaatcacaagagttgaatttttattcatttgtctgctcattcattcattcattcatttattcatctattcatcactcaacaggcattcattgtgctaaattccttgtgctaaattctgcttggtgaatatttgcaatcttcgtattattgttcaagtgattgcccgttttttgaaaaataacaaacagaaagaagattatgaaggccaggcacggtggctcacgcctgtaatcccagcactttgggagggtgaggcagttggatcacctgaggtcaggagttcaagaccagcctggccaacatggtgaaaccccgtctctactaaaaataaaaaaaaattagctgggcatagtggcagatgcctgtaaacccagctatgaggcaggagaattgttttaaccccggaggcagaagttgcagtgagccgggaycgtgccactgtactccagcctgggtgacagagaccctgtctaaaaaaaaaaaaaaaaaaaaagattatgactttgcatagaattcagttgggggatggagagga

SEQ ID NO: 823649 - DNA, 621 bp, Homo sapiens
taggtttttctattactcttttatgtaattttgctttacttttatgtatttctaagctctgctgtaaggtacataaaggtttacaactgttatgtctttataatcagtgatacaatttggcgatatgaaatattcatcttaatcctgtttgatgcttgtcgcttcaaattttatctgtcagaaaatactatgttagacttgccttccttatttaatacatctttattttccaatttttggtgttatgttcttgggtgtgccttttgcaaatagcttataattaaaatttgtgtgtgtctttgtatgtgcatgtgcacatgtgtttgtatttatatagcatcattgcattttccccttattctaacattctcagcctcttaaatagagacccagctctgctataaatttatacttacaaatatataattttggttatacagtatttgggatgaagttgaggtgtacaagtgtttttagaatgccatcatgatctaaagtattatggactttttcttcacaagctraagctaaagtggtttaaataagaaaattaaactacaagaaaaaataacatttaagagttcagctaacctttaaaattgatgctcacaccaataatta

SEQ ID NO: 823650 - DNA, 632 bp, Homo sapiens
gagggccttcttcttggtttgcgagtagatgccttcttgctgtatcttcacctggtggggacagagaagaagcaaactctcttgtgtctcttcttataagagtactaatcccatcacaagagctccaacctcatggttaattactttccaagggtgaaacccttcacctccagataccaccacttggggattaggatttcaatatctgaatttgggggaatttaacaaatgtgctgtcaatagaaaagtgttttttctgaaatgacccccaggatcatgagtgaggcatagagaaagtgtgcctcacctgcaagatggcctcctagttccctgcctcctagtattcacactcttgtgtaatcccctcctgcattgaacctggggtgatctatgtcaccagtagcatacagtacaagtgacagtatgtcccttctgaaactaggtcattaaagatagtgtggcttcctgcttgcactctcctttgccctctgttacatcgctcactctggggaaagctggctgccacctcgtgagcagcagtccatgtaatgagaaactgagtgctcctgcycacatccctgtaagtaactttagaagtgggtcctccagccccagccaagccttatgatgaa

SEQ ID NO: 823651 - DNA, 520 bp, Homo sapiens
tgtatttttttcgaatgagttgaaaagggacatctagaggcagcttggcttgtaacttgagacgatgttttccagagaaacaaatactctctttcatgttacccatggtcccagcccsagcacactcctcttcccagtcctaggaatgaaagaaggaatcatccagacactactctgctaaatctggcagaggctcctgagtgcaatgacactgaccaggaaaaacaaagatgaggatcctgctggactgtaactaggactctggagtgcaaaatgaatgttgactttctcaatgtggacagtgacatacgttttactacagtttctccagaaatgcttcttaaccatttattgtgagaattacagtcaagagagtaaattattacattctttagatggtccttgcaggtaaatgacccaatctgtggaaagtcaggttctatcagtcctcaaggggactgggctttgttttatggtgactgagacatcaaactactttggtggggtctggatatattca

SEQ ID NO: 823652 - DNA, 550 bp, Homo sapiens
caaatgatttgaaaacttacgttcatgcaaaaagttgcacatgatgtttatgtgcagctttgttcatgattaccgaaacttggaagcaaccaacacatcctccagtaagtgaatggataaaaaattatgggacatcaatacaatagagtttctttgtttttttattttctacaacagggcctcactctgtcacccagggtggagtgtagtggtgcgatcataactccctgcatacttgaactcctggactcaagcaatcctcctgcctcagcctgctgaatggctgggactgcaggcatgcaccaccacaactggcctcccatacaatagaatattattcaacaataaaaagaaatttttaataaagtcacaaagaagacatggaaaaagttaaatgcatattgctcagcaaaataggccaatctgaaaaagctacatacttacatactgcttgatttcaactacatgaaattstggaaaaggcaaaactatagaaatagtaaaaaaaaaaaaagaaaagaaaagttgccaggggtttcagaggagagag

SEQ ID NO: 823653 - DNA, 507 bp, Homo sapiens
cagaggcgtcacaaagggacaagaaacccctcatgtgtaagttcttgacccacaggcccaaggaagaagctaatccctgycccaagccccagtgaaactctgctgaactcatccactctgaccaccattgccatccctgatctcccagctggtgaagaggatgccatgctctctcacaagagaatcactagtgccccccaaagaaaaccaaccctagaggactcagattccctcagggtccaccttgtcactaacccaagcatctgccacctaaatccccttcccttcaacaccaaggttgaatgggtattcaagtaaaatggcccccagtaaatagcttgagctgccatcacatgtactgtgagctcaccagcaccttccccaggctgtgataggggcaagaggaaggagaagaagactggggcgacattctcctgggagaatgtcagtgtgctgagctctcttcccttctctggcttgactcagaccatcagagttgggttttgc

SEQ ID NO: 823654 - DNA, 579 bp, Homo sapiens
tgccaagcatcagggtcttgggaatgctcccttgggcctctctgtgctgtcagggctgrgaaccagtggtccaggggacatctcctttcccacgcccccatccttgctagttcatgaactagcaacttctgctccctttgaagcatcgagaagaattcctcctgcctccgccatcttgccctgtgctctgcctaaggggagctcacttgcccgctgagatggcaaatgtctgaattccactagtcatgtttccccagaactactcagctgggaaagtcaggagccagtttgggcctcaggccccagccacgttctcctacagctgatgttttcaatcccatctgcctctgacacctctttctccatgaatttggttctcaagagtccagagacgcacagataccacgcagcagaccccaatgggtagaggctatggggacaggagaagaggttttgcccctcagctttgatacatctaagacacaaatgcagggataggtcaaggagacacttccctcaccagagagactgggcgtgcaaagccacaggaaggaaccattcggtgggggctctggggaa

SEQ ID NO: 823655 - DNA, 622 bp, Homo sapiens
gcaccacgctgagggttctgactgtcagccagggtaatcaggagccatygacacatttggttggggaggggtgtgtgtataaagggttgacttggccacagctgcatttctggaagatcattctgcctgccttatgcagaatggattacagggcaggaagcatgaaaggaggcagacttatgagacggctaattacagcagtccagacaaaatagcctagtagtggactgtaatggttatggtggaaatagaagtaaacatatgaaagagctattcaagaataaaggtgaaccggccttgagacaggtttgcacatggggccacgacaagagcggtgtgaaaagggactcctgcatgtctgctgtgttcctgagagtagtggtaggattgtgggctgaggccaagggcactgaaggaagacctggagtcttctcccaatggggaagtggataagctttcaatcaaggagactgtgtcatctgtttcactgactctttccttaaggggcatttctgttcatctcctggttctctgctgtatcccagacaggagaaatattacagcaaacccactagcttcagaatctacttaatgcacacagtaatgtatgaatttctgccca

SEQ ID NO: 823656 - DNA, 577 bp, Homo sapiens
ctgcaaattaacctaacttttatgctctgtttttctttaaaattgaawgcctttaacagcacacaagtcacctcttaaatagtcttccaccagatacccgaaatcatctctcacaagttcaaagttacacaaatctctagggcagggaaaaatgccagcaggctttttgctaaagcataacaagagtcaccttttctccagttcccaacaagttcctcatcttcctctgggactacctcagcctggaccttattgttcatatcactatgagcatttttgtcaaagccattcaacaagtctctaggaagttccaaactttcccacatttttctgtcttcttcggagccatccaaactgttccaacctctgcctgttatccagttccaaagttgcttcacattttcaggtatcctttcagcaatgtcccactctactgattcaaatttgctgtattaatatgttttcataaagctgataagaacatacatgagactgggcatttacaaaagaaagagatttaatggataactcacagttccatgtggctgtggaagcctcacaatcatggcagaaggaa

SEQ ID NO: 823657 - DNA, 249 bp, Homo sapiens
ggggtatataggaactgagtgtattatctttgtaataattttatagatataaaactgttggccaggagtggtgcctcacgcctgtaatcctagcactttgggaggccaaggtgggcggatcaccagagttcaagagttcaagaccarcctggcaacatggtgaaacaccgtctctactaaaaatacaaaaattagccaggcgtggtggcgggcgcctttaatccccactactcaggaggttgaggcagg

SEQ ID NO: 823658 - DNA, 249 bp, Homo sapiens
ggggtatataggaactgagtgtattatctttgtaataattttatagatataaaactgttggccaggagtggtgcctcacgcctgtaatcctagcactttgggaggccaaggtgggcggatcaccagagttcaagagttcaagaccagcctggcaacatggtgaaacaccgtctctactaaaaatacaaaaattagccaggcgtggtggygggcgcctttaatccccactactcaggaggttgaggcagg

SEQ ID NO: 823659 - DNA, 629 bp, Homo sapiens
aaaactaagcttcataaataaagaaaagatacagtctttttcaggcaaacaaatgctgagagaatttgcactaccaagccagcactacaagcaccgctaaaaggagtgctaaatcttgaagcaaagcctcaaaatacaccaaaataggccgagcatggtggctcaagcctgtaatcccagcagtttgggagaccaaggtgggcagatcacgagttcaggagatcaagaccatcctggctaacacagtgaaaccctgtctctactaaaaccacaaaaaattagccaggtgtggtggcacacacctgtagtcccagatactctggaggctgagtcatgagaattgcttgaacctgggaggcagaagttgcagtgagccgagagtgcaccactgcattccagcctgggtgacacagcgagtccccataacaaaataaaaaaagaaaaaagaaatacaccgaaatagaaccttcttagagcataaatctcacaggacctataaaacaataaaataattttaaaaaaacataaggtattcaggcaacaactygcacgatgaagagaatgacacctcacatctcaatactaatgccaaatgtaaatggcctaaatactccacttaaaagctacag

SEQ ID NO: 823660 - DNA, 654 bp, Homo sapiens
ataaatgaagtcatagaacagaatgtgctttaaatattatgaatagtgcctscgtgtgtgtgtgtgtgtgtgtgtgtgtgtgtgtgtgtctatagatgcatattaggccactgaaaagttttattattctttccaggagagagactgccaacttttgaacctaactagaacaatatattgcttcttcatattttgattaaggcaaagagagtctagttaaaaataattcaacttgtcgtggaaatgctataaattgctgtgaagtgagttgctggctatggcttgtcagagtaaatatattgtacaaatcttaggggagaatcagtgctcgtgcattaaaatcaaatcatcttgcagcacactgagaaaaaggttagatttttaaaataatttcaaagtcatgaaaagagcaaatatgctccacaaagagcctagcaaccctcaatgaccaatgccccttttatatagtttggtatctgaattagaatcccagaatctacaaattcctctgggtgagggtgctgcattttgaggattttataacactgccatcaccaagctctcttttgatattcactttaaggagataatttacgggcaaccagagagcataaaccaaagtagatatctaactagatagctagatacatctcc

SEQ ID NO: 823661 - DNA, 458 bp, Homo sapiens
agtcatacagaccaaaaggaggaatgtcgcccagccctctaaactgacccagaacccagctcatgtctcaactgctacctctcctacttagaaagaagtaactccrccaaagcagggttctggacaaatatatttttattgatcatatacaaatagatgaagatggacttggatgttaagaaaaataatactatacaaaatcaagagtagacagtcaccactagacttaaattaagggtgtgtacattagataatttaatccaatgtatcaggtaaaaacttgaacgaaccttttagcctcttccttaaaattcaggaaagcatgtcctccacaaaacagaatcaaaatataaataaaagactggcttaagatgaaaggaaaccttacaaatgaaaagaagccagatgagaggcccttaactgagaatgaaaagaaattgagtggacaaaataattat

SEQ ID NO: 823662 - DNA, 606 bp, Homo sapiens
atcatcatctgatggaattcaatggaatcatcgaatggacacaaatggaatcatcatcaaatggaatccattggaacgatcgaatggaawcgcatggaattatcaaatggaatcgaatgcaatcatcattgaatggaatcgaatggaatcatcatcaaatggaatcaagaggaaggaatcatcaaatggaatcaaatggaatcattgttgaatggaatggaatggaatggaatcattgaatggaattgaatgggatcaccaattaacggaatcaaatggaatcatcttctaatggaatcggaaggaatcatcaaatacactcgaatggaatcatcatcgaatggaatcgtgtggaatcgtcgaatgaactggaaatgaatcctaatcaaatgcaattaaaatgaatcatcatcgaaagaaatcacatggaatcatcatcgaatggaatcatacggaaacatcacagaatggaattgaatggaatcatcagttggactacaatggaatcatcaaatgtcctcgaagggacgcgtcaaatggactcgaacagaatcatcatcgaatggaatcgaatgggatcatcgaaaggactcgaatcaaatcttc

SEQ ID NO: 823663 - DNA, 541 bp, Homo sapiens
tcggggcagccaagtggaaccagaacaggacataaagtgagcttgtacatccaacagccatgagtaatatcaaaaaggttgtagcctggccaacacagcgaaaccccatctctacaaaaaatacaaaaagtagctgggcgtggtagcatgcacctttaatcccagctacttgggaggctgaggcaggagaatcacttgaacccagggtgcagaggttgcagtgagctgagattgtgccactgcactccagccagggtgacagaatgacaacctgtctcaaaaaaaaaaaaaaaaaaaaacaggttgtaacctgtccaagataccccccatacatctaaaacaattaaacacattcaacaaagtaaacatgtttctgtcctctgtctcatgtctctcaggcagcagggcttcccawgtattttatgctggcaggcactgtcccacacccacctgaagccacagtgtcttaaggcttcttctgttgtaaaacatgcctttggatccactaccaacaacttcttgacaaggtccagagctaaag

SEQ ID NO: 823664 - DNA, 647 bp, Homo sapiens
agatggctagaatgcaccccacctatgaagagcagtggacatggctgggagtagagccagaacaagccctcaaaagaacacaggccaaactggagactcggggcagccaagtggaaccagaacaggacataaagtgagcttgtacatccaacagccatgagtaatatcaaaaaggttgtagcctggccaacacagcgaaaccccatctctacaaaaaatacaaaaagtagctgggcgtggtagcatgcacctttaatcccagctacttgggaggctgaggcaggagaatcacttgaacccagggtgcagaggttgcagtgagctgagattgtgccactgcactccagccagggtgacagaatgacaacctgtctcaaaaaaaaaaaaaaaaaaaaacaggttgtaacctgtccaagataccccccatacatctaaaacaattaaacacattcaacaaagtaaacatgtttctgtcctctgtctcatgtctctcaggcagcagggcttcccatgtattttatgctrgcaggcactgtcccacacccacctgaagccacagtgtcttaaggcttcttctgttgtaaaacatgcctttggatccactaccaacaacttcttgacaaggtccagagctaaagcaacaattg

SEQ ID NO: 823665 - DNA, 486 bp, Homo sapiens
tgtgattcttttgtttattcctgagtattttattctttttgatgctattgtgaatggaatggttttctcaatttcaagattgttcattgctagtatatagaaatcgaattggccaggcacagtggctcatgcctgtaatctcagcactttgggaggctgaggcaggaagattgcttgagcccaggatttctgggccagcctgggcaacatagtgagagtccatctctacaaaaaaatacaaaaatcagccagtgtggtggtgtgcacctgtagtcccagctccttgggaggctgaggctgcaggatggcttcagcctgggaggttgaggctgtagtaagccataatggtgacattrcactccagcctggctgacagagtgataccctgtctagagaaaaaaaaaaaaaagaattgatttttgtatattgattataccctgtgaccttgctaaatttattagtactaatatttgttttatggatgcc

SEQ ID NO: 823666 - DNA, 576 bp, Homo sapiens
tgcttctctattttttggaatagtttgaggaggattggtatcagttctttaagtgttttgtagagttaagaaataatgccatcaagtcccgtgcttttctttactgagagactttttattacaactttgatccmattacttgttattgttctgttcaggttttgaatttctttctggtttaatcttggtaggtttctgtctaggaaattgttcactttttctagatttccagatttcttggtatatagctgctcatagtagccactaatgatcctttgaatttctgtgatattggatgcaatgtgtcctttttcatttctgatgttatttatttgatcttctttctctttccttagtctggctaatggtttgtcatttttttaacttttaagaaaacgactttttgttgcattgatattttgtggtttcttttttcatttcaaattcattttttctgctccaatttttataatttcttttcttctattaattttcagtttggtttgctattgcttttctatttctttaaggtgcgtcattaggttgtttgcttcaagttttctcttttgatgtagg

SEQ ID NO: 823667 - DNA, 591 bp, Homo sapiens; identical to SEQ ID NO: 815716

SEQ ID NO: 823668 - DNA, 594 bp, Homo sapiens
gagagtactgtattacacacttgtattgaamttaaatacttcagatttccctatgtctggattgaatacaactaacttactttatattgttgagctattaatattaccctgaaaatagggtatattatattacatacataaatatatacagtcatgcactgcataatgatgtttaggtcgatgacaaactgcataggacagtggtcccagaagattataatggagctgagaattgcttatttctagtgactctgtagccgtaatgtagcatacaatgaattactcaagtgtttgtagtgctggtgtaaacaaatgtactgcactgtcagttgtatataacacatataaatcatgtacagtacataatacttgacaataataatacacaaatatgccactggtttatgtatttagtatactatactttttattgttttagagcacacttttacttatttaagaaaacgagttaactgtaaaatagccttaggcagctcgttcaggagggattccagaaggaggcaatgtcatcctaggagatgacagctctatgcgtgtaattgcccctgaagaccttcaagtgggacaagatgt

SEQ ID NO: 823669 - DNA, 563 bp, Homo sapiens
aagatatacaggtttggggacaggagacttcaagtgtaattgcaatgcttcacttctttcaaaaagcagaagcaagtgcggcaaaatactgagattagtaaatctggacagccagcgtagagttgttcattttcttattctctatacttcactgcatatttgaatatttaaaacaaaaattcaacattaggggtaggttataggaggaattttatacgttctcatatttatttctttagaggtctcatttgcccctgaatatcatcatcaagtaaccacgttatgtactccctcaacagcaatcatttgctcagaaccttaaaaaacaatgaagacatttaacaaatcataattatcatcatccctgtaactgcatttattaagtaagttcctactgtgtgccaagcacatggtggcagcctggcaacagcctctttacactgaagtagctcaaggtgacactgccagtaacagcaaagctgcaatttgtctatctccaamatgtaacaccttacctaatggctccatttctaaaagtatattgctgctgcccctggctacat

SEQ ID NO: 823670 - DNA, 526 bp, Homo sapiens
cacaaaagaaattcttagatacatatgaagagatttagataaccacatgataatagcaggagattttgacaccccattggtagtattagacagatcatagaggcagaaawctaataaagatgttcaggatctgaactcaacatttcaccaaatgggtttagcagactactacagaactctccacccccaaacagcagagtaaacattcttctcatgtgcacatggtacatactctaaaatcaaccatgcaaccgggcataacacaatcctcagcagttaaaaaaaatcataccaaacacactgtcagaccacagtgcaataaaaactgaaataaataccaagaatatctttcaaaactacatagttaaatggaaattaaacaatctgttcctgaatgactgttgggtaaacaatgaaattcagtcagaaatcaagaaattctttgaaactaatgagagcaaagatataacatacgagaatctctgggacatagctagagcagcattaagaggaaaatgtatagtgc

SEQ ID NO: 823671 - DNA, 652 bp, Homo sapiens
gacccaggcagtcagctaggacaaatctgcactgaactatagctgcctaatcctcggcaagggaacacagtgttactgaccttatgcaaagtatctaagccttgatgaacgaaatttggacatttaccttcctgctcagattccagaaagaaagagaactgactatttgcagcaaaatttcaggcaatatttttccatacccaagtttcctgtagctcagtttacagtgacccccacaggcctggcgttcacatcatctccacttagactccttgtaagatcaaacatgggactactataaggcacggtctcttcctacctttgcatctcttcagggcacaccaatggaagttattgtcctttctggtgtgtggactctaattcacagtcctcaaagaggatgaatacctgtctgatgtgtaatttgtgatgaaactttgtcttagacccatgggccactagtttcctgtgatttatctcactctccttgccagataggtatctgcaatgtttttaagttttgtaatatatccctgatataataatctaacttcacttctcacatgctaacacagtatcartgtaagagcacattgtcaatgctagctcccctccattgccgtgtctcctgaatagtatgcatgtctcgctt

SEQ ID NO: 823672 - DNA, 553 bp, Homo sapiens
agaggtagccccctggagtagggaaactttccccttttttatggcacagactctctggtctcacctacagccctctgcttccctgagggccgccatggaagtagtcaccttatgtatgcagcaccccacatagagtgaggacagtggccagggaaccaaaggcactcaggggcacagagcccaacacaaagtccctcatgtgggaggtaaagtgttcatcatttggcccttgggtagtcagatggaacagcctgccacacacccatctcccaaattacatgcactaaatctagatacgactgccatttactcacagtttctggtatttctttggcatctttccatatcgttcaaatggccaccatcagccattcaattagggtgtggtcgccttgccctgtgctaaccacctgctcacctgcaatcactgayggagggagggatgagtcataatggaagccaacttctccatttcagaggcagagcagacgatgctgttggctccctcatcccaaagatgaggcatcgaggcaggtaggggttcccccaagca

SEQ ID NO: 823673 - DNA, 613 bp, Homo sapiens
gattaatattttcaaaggatgtggatcccatgttgacagcttttgccttcaagtactctaatratgtcttatgactgtcttctggcttacataatgtcttatgagaagtctgcaagtatccttatctttgtgataatgagtccttttccccctctgctgttaaaacattctctttcttactcatttttagcaacctaattaagttatgctttggtgtagtttgatttttcttcatccagcttgtggctagttaggctgtttggatctgtgggtttatacttttatcaaatttggaaattccaatgatttatacaaatatgttttaaattcatgctctcttcttggactcagattacatgttagactacttcatactgtcccactgatgctttattaatgtttccagacttttttcctactctttgcttcagattatagagattctatttccaccttccagttcactaacattttcttctggaaaacttaatgtgttgttactcataggcagtgatttattcatttcatatactgtagcttttatctctagaagttctatttgattttttatatttttatactctttgtgtccaagtatttcttgaaattctta

SEQ ID NO: 823674 - DNA, 503 bp, Homo sapiens
caatgagaccatcatagtgctcccatcaaatgtcatcaacttctcccaagcagagaaacccgaacccaccaaccaggggcaggatagcctgaagaaacatctmcacgcagaaatcaaagttattggggtaaatctaattcagaacgtgttggagaggggttgggggaagtgccaagagatgatatatgtcttgggactggacatctgtcgtgagtgtggagaccctaaaattttgctagagggactttagggtagaagccacttggagaaaactgtcccagaacttttccacaagaggttgtcttaaaaatatattttcccttattctgaatatgaggaattgattttctattgttgtctttgtatttttacaatacagtgcttttctatattttcttttacaaaagtaatggtggtaaataatgacatattgtgtgtatgtgtatatattccacaactgcatgcttaataatccaaactgactttttgcaaataatttttcc

SEQ ID NO: 823675 - DNA, 534 bp, Homo sapiens
ggtgcccagatttcatattgttcaaacacacatgtttttacaaacaatttgtacagataatgcaatcatcacagggtcctgaggcaacatacatcctcagtttaagaagatgaygggattaagagattaaagtaaagacaggcataggaaattataagagtattgattgaggaagtggtaaatgtccatgaaatcttcacaatttatgttcagagattgcagtaaagacaggcgtaagaaattataaaagtattaatttggggaacaaataaatgtccatgaaatcttcacaatttatgttcttccaccacggcttcagccagtccctcctttcggggtccctgccttcccacaacaatatccagtcttattgcattattgatctgccatggtccctgcagtctaactcctggatcattaattattgatgagtgaatatcttgctttaagagctagattcaaattccttaagacaagagatcaagatctttatatgcacaaattctctactcatgaaatgtaattgaacatgaa

SEQ ID NO: 823676 - DNA, 596 bp, Homo sapiens
ggaaagaacaaagctttgtgtcaataattgtaaggattgctcccatttatttttctgacccctatgtgtgtcagatctcatgctaggcatttttacgtatattgtcttgtttaattctcacaaaaatcaygaaggataaatgttatcattttattttaaaattgagggaattattactcagtaacgttatttaacgtctggatgaagatgtatctttcaaaccccactctcaattattctattgcatcaaggatttagaattgattaagaaataaatattaactcacaaatatctagcaaattattaatttctttgaagagtatcctagaaattatgctacatatgttcctaaaataatcacagaattatagattgtagagatttagagctagatccataaggaaccagatgcttcttcatatgcaatttcttgcctgactttcacatgctcaaggtcacagaaaagcaaagctgggattcaaatccaatttggtgctcttcagaccatagcatactggctcagaatttgacattttgttcatctctatgtttataaaaaggcaagataaaagacccagagaaatctatgaaaggg

SEQ ID NO: 823677 - DNA, 608 bp, Homo sapiens
ctgagcaaactattcctcttaggggatcatggcatattktttccagggagacctttctgtgctgcagatgctggtttcttccatcaatttcttctatagaaaactgctaactaaacctgctaagctggaagcctggtaaccttgagaatgaatgttcaactatgacccggggaacatggatttatgacagataaaaatcaactggaacaagttactaaaatgttctatgactcagtttcctgttttgtaaaatggagatgggatctgctctgcagggttgctgggaaatgtgtgctgaccacaattgaccacaattcgcaacgtctcaacatgtttctcagatgtgacatacctgattagcacctttggatcattcaaaaatacaccaattttattatacatattgtctcttaaaaaacgagctgctaaattgtttaatgggtagaacaattctatgcctagaatggccattgaatcaggtgtggaaccacaggtgtcttgtaagtggctctccagagcgaaaggttccaaagctaacagtaaagtgggtaaggtgtgccctgaagtgtaggaagaaaaattgaactctttataggttttatctcatc

SEQ ID NO: 823678 - DNA, 592 bp, Homo sapiens
atttaagctcttcatcttcagcttctcatttgctcctctagtcccatctttcactgctcactattacacagttagtgcagaagcaagatagaaattgcttattttcctgtttacacctcctctatttcatctgcaggccatcgcgcatgttgtttacttaaactgggacatcctcttgcttatcctgctggaaaatgcctatttattattcaagtctgttcatgtgctaccacttgtgtaaagctgttctgactctttcagccgagcagtgctggcccattgtggagatctgtggcaaaaatgattatgactgtctaccaaatttccattagcaaggtgttttctctgggaagcagcttcttaaggaggaactgcaattttcagattccctgtaatctaggtggaatcctttaattagcctttgccatagactgtgagccgaaatcatatgcattactttttgcttaagatgtttaggaagttgttgtaaccttttcccacatcttccatctgaatacagagactgaaagagtataggagatgcctgaggaagaakaagagtgaataatacatagaggaaaaccacctttct

SEQ ID NO: 823679 - DNA, 358 bp, Homo sapiens
ttttattaggttactcatgcagtgaactgttatctggaattgcaaactcaggcaaattacttccagaggtcatatgatgagacattccattctaaaagtactgttccattctaacagtactggcagtactgttatgatagtggacaggagggggtagaaatatttttatgtaggtaataaaatgcaggaactcttcagagatgcttcggcatatttatggaactttttcarctaccaagataaagttttctcaggctattgtaattatattgtaaagccccacaactttgtgcaacaatcatatatgtcgccgctatcctgtataaaacatggtgtttggctatgcgaaaaaaactga

SEQ ID NO: 823680 - DNA, 570 bp, Homo sapiens
accatgctctcttcatcaccatagttttatactaagtctagaaagcaattaacttgtgtattttaatctygtgttatgttatgtgtccctcaaaagttcatgtattggaaacttaattgccattttaacagtattaagaggtgtgggctttatgaagtaactaggccatgggggtccactccttataaatggaataatgcctctattgcaggagttgattagttatcctaggagtgcattcctgataaaaacatagtttggctccatcttctttttctgtctctcatgagctcacttctgcctttcatcttctgccatagaatgacctttgacagatgccagaaccgtggtgttgaacttcctagtctccaaaatcatgagccaaataaacttctattatttgagaattactcagtttttggtattcagttacatcagcagtaaatggacgaagacagaaaattggtatcaagtgtgaggttgttgctgtaacagataacctgaaaatatggaagtggctttggaattaggtaagaggtagagtttggaaggattggaaggagtgggcta

SEQ ID NO: 823681 - DNA, 570 bp, Homo sapiens
accatgctctcttcatcaccatagttttatactaagtctagaaagcaattaacttgtgtattttaatctcgtgttatgttatgtgtccctcaaaagttcatgtattggaaacttaattgccattttaacagtattaagaggtgtgggctttatgaagtaactaggccatgggggtccactccttataaatggaataatgcctctattgcaggagttgattagttatcctaggagtgcattcctgataaaaacatagtttggctccatcttctttttctgtctctcatgagctcacttctgcctttcatcttctgccatagaatgacctttgacagatgccagaaccgtggtgttgaacttcctagtctccaaaatcatgagccaaataaacttctattatttgagaattactcagtttttggtattcagttacatcagcagtaaatggacgaagacagaaaattggtatcaagtgtgaggttgttgctgtaacagataacctgaaaatatggaagtggctttggaattaggtaagaggtagagkttggaaggattggaaggagtgggcta

SEQ ID NO: 823682 - DNA, 623 bp, Homo sapiens
atcaatgacaccttattaaaaatgtatttttcactccaaaaaatcatattatagttatttgcttctttccatgcatcacgtaccatttggtagttaaagggattcatgaaatcagaaatggtacttttgatttgcttctggtaacagagacttgaatcatcaagcagccaacaccaatcatttagaaggtaaactggaacagagaaaactactcttttatgagacagagtatcatagtgatacacactttaaactgaaagctcaggagttagataaatatggcttaaaatccttccttagttatgtcctagcttatgatgcaggcaagttctttaacttgtcagagcccccatttttctgtatgtaataataatatttatctcaaggattgctttaggggttaacaaaatagaatgcaaggcgatcagcactgtgcctaacaaacaccaaacaagcatcaaataaacattaggtatcattcctaatggcactgtagaatcttaaaattgcatgagaccttattcattcactctcccgctctcagyagtaattattttggttatgtgatggaagatgattcaacttctatgtttaaactttcagagatagggaattcactattt

SEQ ID NO: 823683 - DNA, 617 bp, Homo sapiens
aattcctataaactccacatgtcaagggagagaccaggtggaggtaactgaatcatgaaggcagtttccttcatgctgttctcatgatagtgagtgagttctcatgagatctgatggttttgtaagggtcgctttcccctttgctaggcacttctctttcctgccaccttgtgaaaaaggtgccttgcttccctttcaccttcccccatgattgtaagtttcctgaggcctccccagccatgtggaactatgagtcaattaaacctctttcctttataaattacccagtctcaggcagttcttcatagctgtatgagaactaatacaacaaattggtactgggagtggggcactgctataatgatacccaaaaatgtggaagcaactttggaactgggtaacaggcagaggttggaacagtttggagggctcaggagaagacagggagatgtgggaaagttttgaacttcccagagacttattgaatggctttgacgaaaatgctgatagtgatatggaygatgaagtccaggctgaggtggtctcagatggagatgaggaacttgttggtgactggaataaaggtgatgcttgcaaatgctttagcaaagagacta

SEQ ID NO: 823684 - DNA, 503 bp, Homo sapiens
aaaaatcaaagtgggaaaagtaaaattcattccaatggctcatatatgctttttytgggtagtctatttcactggatggattgtttcctgtagtatttaaatagtgaagaaatgcagtgcctgggttacattcttatcaagggtgtaaccctatgagattgtagtgcctggcatcaggaagcctttccctgttaagtaaggaaggtattagttgatgccccatgaggagagagtgatttagcctggagtcttgctttgcaggagccacacagctactgataggaactgcctgggaaattattaagcattgctatgggagcatggacaggctgctggaattctatattctgatctcctaccctcaaggcattcttccttggaagttaacatgtatttctttatatgatttttttaagtgctatagcaaagacgtattgtgtaaaccttttaagattaaaactaaagttagaaaaactatatgaacaaaaagttatgggacgaac

SEQ ID NO: 823685 - DNA, 615 bp, Homo sapiens
ctgataataaattgaaagagctgatgttttatgctaatgaacacggaccttacaatggggtcaaaaggagcaaagtatttgtagacatattccttcaatttcacttactaraattttactgtttttttttttttgttgttatcatagttgagccatagatacaatacatgttcaaagtgtaaggtgatctttgtagcaatcaatccctctgagggacatttagctttctgattggtatgcagacaatgagtagactggtatgttaaccaaggtaaatcaatggtgaatagccaggagttagaatctattacgagatatgcaaaaggacagataactagaggtcctatttttccccagccataataacaattatagtaaagcaaaagctggtgatttttagcaactttcaagaaatacttgtggtccaacatcaacaaattttagtttggcattcttcatgtgtttattccatacatacatactgggtatatattatgaagaaggtgctatgacagtttccaaatatgtcagttttcgatccaggcaatatgatctagatattatttttcctgcttctttcagtaaagtacaagtccaactcctggaaacaatgca

SEQ ID NO: 823686 - DNA, 622 bp, Homo sapiens
catacattacgtgtctcattagcatcttaaatctcccccaagggstgtgttttttactatcataatgagcaaagggtcactgtgaggacaggtaaaatcaaaatgcacatgctctctatggggaaaattccctattgaaaatagctttgcttgaatgagctcagttacgatgtaaatgctgagatttgtgttgttgattgtatgatcaccaaggttgctgcatcccaagaacatggttacttccttggatacctctcctgcctcaaaagcagatgtaaaaatgtcaatacaggagaaatgtggccatctaactgaggggcacattaattgtattacacaactgtccttggccaagttttctaataaggtataaatggataaactacatgaatagcaaactaaagtagatatattatttttatagcctgtatggtaactagcacacttgagagcctaaattattgaatactaatcctaaaactcttcaagggatggccatagatcctttgtccttctattttaagtctttgattacaaatagcactattacccatggccatgttctaagaggtttctcagcattgtattcagttgtttggtcaaagttccacactgcaggaga

SEQ ID NO: 823687 - DNA, 637 bp, Homo sapiens
gaaacattttataaaagggaatttatgcaagacatgttaaacaatttaaaagtgattaggcctcctgaatgcgttataaaatgccactataacccttagctgtacaacttgcctggtttrcagctaggtaagacccaggacacatggagttaaatgctggaatgagtcagaccttatctgcacttctgtctaggtcctaggctctatacctagtacataattaaaatcccaaacttaccaacaaaagtaaagcttgctaaaagttaacagtgtaacatgcatgtaagattattgagaaaacagtttgcatatacttttggcaaaaagattataaagaggcataagagtgtgactttttacctagattaaaagtttaaagaattgttctaagttgaataaaataaaaatgaaagtttaagaacattttggaaggttaattgtaaaggaaatgctgggtataaacatattggctaaagttgaaggggcatcatccagtttttctgtaaattgattattaaagtaagagcacaacaggtttctcttaaagcactaacctgctctttaacaaaaattataaagggttaaaaagggtccataaacatcttaccttacagtccaatattaaaattgggtaaat

SEQ ID NO: 823688 - DNA, 637 bp, Homo sapiens
gaaacattttataaaagggaatttatgcaagacatgttaaacaatttaaaagtgattaggcctcctgaatgcgttataaaatgccactataacccttagctgtacaacttgcctggtttacagctaggtaagacccaggacacatggagttaaatgctggaatgagtcagaccttatctgcacttctgtctaggtcctaggctctatacctagtacataattaaaatcccaaacttaccaacaaaagtaaagcttgctaaaagttaacagtgtaacatgcatgtaagattattgagaaaacagtttgcatatacttttggcaaaaagattataaagaggcataagagtgtgactttttacctagattaaaagtttaaagaattgttctaagttgaataaaataaaaatgaaagtttaagaacattttggaaggttaattgtaaaggaaatgctgggtataaacatattggctaaagttgaaggggcatcatccagtttttctgtaaattgatyattaaagtaagagcacaacaggtttctcttaaagcactaacctgctctttaacaaaaattataaagggttaaaaagggtccataaacatcttaccttacagtccaatattaaaattgggtaaat

SEQ ID NO: 823689 - DNA, 579 bp, Homo sapiens
taagtctccatttgaacttctattctgttccattgatctatttttctatctttacatcagcatggccccatcttaacattcgcttcataaaaagttttaacattagtttaaagttctccaattttgttcttttttttttaactttgctgtagctattctatatattttgaattttaaaatatattttagaatcagcttgtcagtttctttagtgtgcctgtttagattttgaattgacacgtgttaaatctgtagatcagtttgggtagaatatttatgtcaacaggattgattcatctaatctttgaatatactctccatttacttaaatctttgctgcttatgaacaatgttttgtagtattcaatgtacagattttacaaacattttattaaattttcccttggtatttcatatattttgatgtttttgtgtgtgttattgtttagttaatttgattttccaattgtttgtactagtatatagaaattacactgattttatgttttgagcttrtatcctgcaaccttgataaattcacttatttgttctaatatttgctttgtagatgctttagaa

SEQ ID NO: 823690 - DNA, 517 bp, Homo sapiens
tgttggtcaggctggtctcaaactcccgacctcaggtgatcctccttgacctcccaaagtgctgggattataggcgtgagccactgtgcccggcctaaattgattttttttttwaatagactttaatttttaggggagatttaagttcacagtaaaatggaggagaaagcacataacatttctgtttacttccttccccacacatgcacaacccctcccactgtcaacttccagtgccagagtggcatatttgttataattgatgaagttacattgacacatcatcacccaattccacagttcacattaggcttcactcttggtgttgtaaattctataggtttggacaaatgtattatgacacatatctaccattttagtgtcacacagtgtagtttcactgccctaaaagtcctctgtgctctgcctattcatccctccttcctgactaattcctgctggtcactggccgttttactgtctccattgttttgccttttccagaatgtcatatagt

SEQ ID NO: 823691 - DNA, 565 bp, Homo sapiens
gcactataagctggcaatctggatacctcaggatccggttctgatcttcacactcgttacctggttaattcaggaaaaacgtacttaattttctccctcttttgcttaattttaaagaattaaatatagytactatgtctatctaacttttcagaaaaaaaaatctttgaagaacatgttactttagaggaggaaaacgtatcttttccttctttcattttggattaattgactgggttaattggctggaccatgtaacaaaggatagattaacaggagaaaagtatacacatttatttaagtttcccataacatgggagatttcataaggaaatgaagactcagaggaagagttaaacctgagtattttttatggtaggtttgatgaagagtggagagttgtggagaaatagggctgggtggaaagggtctgatctaatggtaataaactgggggaaactcagcaaggcctattcattcagattcctctctgtgcccctgtgtctttggagatgacttttcctttaggatgttcttttcctcgaggtatagggagggcactttg

SEQ ID NO: 823692 - DNA, 515 bp, Homo sapiens
tggaagcttagaacactgagccagcggtagggtgtaattcaaaaactgccgattagaataaaatcaatctccctcactttagaaagaactggagccctagcctcaaccctttctcaattttacttaaggatgccaatcaacttggattgacagcaaaaaccatcaaaatgttacaccttgtaatgaaataatgacagtcagccaaccagatactagataactacatagctgagaggaaaaccctttcaatatctgttataaatatctgtccttgtactgggcttcttaaatataaagaaaaacaaaacttaaagtgggttcatctggagaccactactcctgttataatgcctttttaatccactcagaattttccaaataaactcaatgatgttaatgatttgcctcaacayaggttcagtaacttctgtttgcaaatgtgacatcgcacatctctcttccagcttgtcgtgtcagtctcatgattttgtaaatagcagaacaaatggaaccta

SEQ ID NO: 823693 - DNA, 611 bp, Homo sapiens
atataaaaagtgagttttatctcaacgccagtagcttaataatgggaaattcaaagcaggcagaaaggaaagagagcaatagaaagtgatatggtttggatatttgtccactccatatctcatgttgaattgtcatccccagtgttggagctggggcctagtgggaggtgtttgggtcatgggggcggacccctcatgaattgcttagtgctgtcctcacagtaatgagtgattctcagtctattagttcacccaagagctggttgtttaagagccttgtacctcctcctgtctctctcaccatgtgacacacctgcttcctcttcttcctcgatgaatgaaagctttctgagacctcaccagaagctttccagaagccagcaccatgcaaaaccattagccaaataaacctcttttctttataaattacccagacttaggcatttctttatagcagtgcaaaatggactaataaagagttttagaagacactacttaactctgtagttgcaggttaacaatttgatctctgatttttcttgctataatttgcytatcagtttaaaatgtacacagaaatgggccataatatgtaacagctgtaatcccag

SEQ ID NO: 823694 - DNA, 626 bp, Homo sapiens
tcctaactgcaaggtgacagcattgcaaatatttctttcatataaacctataaaacaaaaacataggttkttttctgttggaatgtacctaccagtaatcacagctatattattacttcatattgactgactggcctaaacattggaagatagtactggcatttaaaaattattaaagcaatgtaaacaaatatgctgtaaactctgattttgatcggtgtttaatttattgagaaaaaaatgaaggtgagattttgacacatttcagtttattccacattaaaaagaaaagtaaaaccaagcttctgactttcataaaaattaattttcttctaaggaggaaacctatttatttgtgctgttactgatgaatttatatttaactattaaattattgttgtattataattctgagcatgtttctattgaatttaagaaaggccatttgagtttagtaaaacacctgcaaactcagatgagtgtgaaatgctggctgcatctgagcacatttaaaataatgtgtttattactcaattaaaatcccaagtaatatgctacttataaattagaacttataaaataaagcctaggttatgatgcaaaatcaaactgctgtatttagtgag

SEQ ID NO: 823695 - DNA, 626 bp, Homo sapiens
tcctaactgcaaggtgacagcattgcaaatatttctttcatataaacctataaaacaaaaacataggtttttttctgttggaatgtacctaccagtaatcacagctatatkattacttcatattgactgactggcctaaacattggaagatagtactggcatttaaaaattattaaagcaatgtaaacaaatatgctgtaaactctgattttgatcggtgtttaatttattgagaaaaaaatgaaggtgagattttgacacatttcagtttattccacattaaaaagaaaagtaaaaccaagcttctgactttcataaaaattaattttcttctaaggaggaaacctatttatttgtgctgttactgatgaatttatatttaactattaaattattgttgtattataattctgagcatgtttctattgaatttaagaaaggccatttgagtttagtaaaacacctgcaaactcagatgagtgtgaaatgctggctgcatctgagcacatttaaaataatgtgtttattactcaattaaaatcccaagtaatatgctacttataaattagaacttataaaataaagcctaggttatgatgcaaaatcaaactgctgtatttagtgag

SEQ ID NO: 823696 - DNA, 522 bp, Homo sapiens
aaagctctcagatttatacttctgaaaatatataycctttagcctgatttttgaaggatacattcactggaaatagaaatcaggattttttttaacactataaagatatcatttattttgtgctgtcattgtttttgatgataaatcagtataattcatatccccatgtctcctgttcataatatgtcttttaactccgggtctttctgaaatttttctttaactttactatttagaaattgtattatgacatgcctaggtttaactctcattgtatttattcagataagggttgactgcaattctttcacctgtaatttgaaattttaatcaaaagttaaaagtctttggcccattctccctccgtccctacctccattttccttcctccattttccttccttctcttcctctgcctcctcctcctcctcctcctttctttttttgtctcattctgggattcttattgttaaataaagatcattaggtcttccagaaggaaaaaaaatagagctttatttt

SEQ ID NO: 823697 - DNA, 667 bp, Homo sapiens
tagaatattaaacaagtcaggagaaaaacttgattacatcattctgcacccaaggttgataacttatattctattttcagtcaaaaattataaccagttacatcattctagagagcgtaagaaattctgcaataagattacattttgacaagatgcttccataataaaatgtcaaaatagagatgcccaaaatttgaatgtaattccctcttccattatcaaattctcaggtaaaattaaaatttgaatattatatcttctcacaaattaaatttctaagacatttaattccaaagaaattaaatccaaaagcaaaatatcttgaccatgtgagtaaaatctccaaaattatttccccattgttttgttattcttttcaatctctgttagaagtattgccagtgactgaatttagttggtatgcattcaacagttccagtgtcttctattttatagtggactgagtatacatttttaaggttctaaaattatattattttagtaccaagccttgacttcacttttaaggatttttttcccctttgttctttaaatctgtatttctttgacaatccacttctaacagataacagcatcatctacacaaatgtataaagamaatatatctggcttttttctttatttaccccgacaaccattcattatc

SEQ ID NO: 823698 - DNA, 651 bp, Homo sapiens
ttgtacttatgtctctcttcactgggcagtctttccagatacctaaatatggtgagctattatgcacagattttctctcagttcaaagataagctaacatggttcacccttctcttctaggtcctatgttgaatattgcacttgtttctaaattgtccattgaaatgtgtcccagcactcaacttgttccaacctgcttgaaagataactaggtgtaaaacatagatatatgagagatggactgcttagtttgaaggacataatatttaaccagaattgtactttatgtcatctactgagagacgatgcttagcacattcaagatccaaggtctccttagaaaattttatatactaattaatagcggtttccccagatgatgagtttcattgaatcattctgcttttagctaactttaaccattcctaggcaatgtccattagcttaaaaatctgaactgggtaaaacattcaaggaaggactaacttattctctatgaaaacattttagtcattatttgtccccarcctactcatggaggagaaactaaacactgagaataacccaggctcatatatatatatatacaccctacatatatatatatgtgccctacatacatacatatactgtgccctacatatatatatg

SEQ ID NO: 823699 - DNA, 621 bp, Homo sapiens
tatgttgaagcagactttcatcccagggatgaagccagcttgattttggtggataagctttttaatgtgctactggatttggttcgccagtatgttattgaggatttttgctttgatgttcatcagggatattggcctgaaattttatttttttgttgtgtctctgctaggttttggtatcaggatgttgctggcctcatatgagttagggaggagtccctctttttctgttgtttggaattgtttcagaaggaatggcaccagctcctctttgtacctcttgtagaatctggctgtgaatccgtctggtcctgggctttatttttttggttggtaggctattactgccttaattttagaacttgttattggtctattcagggattcaacttcctcctggtttcatcttgggagggtgtatgtgtccaggattttatccatttcttctagattgtctagtttatttgcatagaggtgttgtttatagtattctctcatgttagtttgtatttctgtggratcagtggtgataacccctttatcattttttattgtgtatttgtttattctctcttttcttctttattagtctagctagtggtctattttgttaatcttttc

SEQ ID NO: 823700 - DNA, 618 bp, Homo sapiens
actccgagctacattttgggacatgaataaaaatcagccaggcaaggaaggcatagttaatagcatgaacaaaaaacaaaacagaaaagcaaggagcaggcgtgtgggcatgggtatggaaggccaggctatgctattagaacataaactctgaggctggacagcttggccgaggccagaagcagaatgaactcttgtgattaccctctgaatacatctatgctgctattgattctgcacctcgttcattattgagagacagtaaaagggaacttgctttacagatttttaattcaagatttcctttcctttggagttttaagtttggaagcatatgcacctctgtaccaggggaagaaagagagagtgctggtcaacctgcctatgagtattgcgtgtgtctatagaacagcttgctgaggaggggctttaaagagactgatgctcatggggataagaggaacagacattacttaggccccttcctctctgcaggcctggaagcatttaacacgtggtcagcctcagcaagaaccaagcatattcttactgggattgcaggsacgcagttgataacataagctcagcccttgatctgattgagaaattgaaaaaaaa

SEQ ID NO: 823701 - DNA, 617 bp, Homo sapiens
ggtgagtgtgtctatgtgggtgtatgtatgtgtgtctatttgtgtttatttgtgtctctgtgtatgtgtatgcatattacatatgtgtatgcacgtgtgtgtatacagtatatgtgtgtgtgtctgtgtacttgtgtctgtgtatttgtgtgtctgtgagtacatctttgtgtgtatgtctatgtgcccatgtctgtgtatttgtatgtatgtatgtgtgtatttacatatgtgtatgtttgtatatgtatgcatatgtgtatatgtgtgtgtatgtatatacagtatattaagtgtttgaatgtatgtatcatatttatcaaattccacgttgtattaattgttctcacactgctataaatgactacctgacactgggtcatttatgaagaaaagaggtttaattgactcacagttctgcatgggtggggaggcctcaggaaacttacaaccttggcagaaggcaaaggggaagccagcacatcttaacatggccgatcaggagagagagagagggaagcgggtactgtcacacacttttaaaccatcagatctcwtgagaactcactatcacgagaacagcaagggggaatctgcccccatgatgcaatcacctt

SEQ ID NO: 823702 - DNA, 640 bp, Homo sapiens
tatctgcgttctccctctatacacagcatctaaatgaaatgtacgtttttttatttgttttacgtcagacaaggaaaatatttgtaagcaaatacagggatatgtgggagagttctattgtcccccgtatctcactgctgtctttttctttttgatgtaacagcctatctattcccaaaatgggatgccactaaacatttactttcttctcctttttttctgatttacctgtgactcttctattcagaaactattcacccctattatcaccttatgatcttagttttaaccaaattcataacccacaaactatttcttggctgagcagtgaaaacatgcctttggttgtaatgtattcaggacaaattccaacccataacatgaaatacagacatcttagaaaatgaaataagcacctatacatgcagctatttatatatttgccaattttatttgcattttttttacttttttatgttcctgtttaacctgtaaataaaaattgctaggtagtacaagccacacatatataatagagatttggaattgaaccatgaaatttgtttkctattgggaattgagaatagccatagtgcttgaagttttgattcagttcatgaaaagatttattttttttaga

SEQ ID NO: 823703 - DNA, 597 bp, Homo sapiens
cttttcatcctttactttagcaacttaccggttgctttctgtgtatgtggggccagtttatgtgagatttgaagaagggattttcctttattgggaatgtctaatgagcacttacaagcagaatttcctcccgatttttttcctctgcactctgaatactggaaagtgttttgagggccttctgacagtacaccacagtgatttttttttctgtcgtaatccatttatgactaaaaaacatgatgctttttgtttttgagatagagtctcgctctgtcacccagggcagagtgcagtggcacagtcttggctcactgcaacctctgcctcccaggttcaagcgattctcctgcctcagcctcctgagtagctgagattacaggcatgcgccaccacgcctggctaatttttgtatttttagtagagacaaggtttcaccatgttggttaggctggtctcgaactcctgaccttgtgatccacccgcctcagccttccaaagtgctgggattacaggcatgagccamcgcatctggccacatgatgctttttttttggttgctcacatgacaagctattatttttgtgtcactttaaa

SEQ ID NO: 823704 - DNA, 625 bp, Homo sapiens
tcttcattattttcagcgagatccgtaaactctttgtgactgagtctcacctgttgaactaaccagtaactgttgctctggtccactgaaaaactaagagtcatttgtatcacgttctaatcgccttcatcacaagggctatctttcctgctttgaaacttaaatgttcatcatcaagcagtttcttgtgtgaggtacctaccttgataactacgttaaacatttccctatttttttcagtcctttaaagattctgcatatttactgggtgtaagataattttctcagcatgaaaagaagaatgtgaaatggttgaggtttaaatacccataagagaagaggagataagagactagttactgtcttaagcttatacttgaatttcaagtagatacttgcaaaatctggggactattgaaaagctactattaataataagagaaaatgcccccatatagggacaaaaatactccaagtgaagtagccatctgaatgggactcagttgggggagaaaatgctttttacaacaaattaaattctacttcgatcttcrcacaaatttgtagtccaaattaatattataaaagaattgtgaaaatcccaagttaatacatgaagaagaga

SEQ ID NO: 823705 - DNA, 630 bp, Homo sapiens
ttcagccaaagacaatgcaaaaaagcattttgtatgtgttccacttcaggcatggccaaagatgctcctgccaggccaatttccccacaaataaccactcgaaacctggataaattttttgaatagtagcctggaggcagtgcagattgagcagaggctgaaagattataggagggaatcaatttggaagaaagaatggcatggggtaattttcctgtgttctcaattattttagcctcaatgcagattgcagtcagcattaataagtaaatccttgatagaaaacccatactttttctgttctaaagaactggagaacagagtttgaaataatcatttccaccagaaagtgagggagatattccagaaaggagatggccagagacggggagcccagatcccatgcacaaatttcagccaattaactaaccaaccttaaaccatgcatacacaaggcaggatcaaagcactttggaatgaattttgagctgtgttcaaaacacaatgttcatgagtctaaaataattgyccgctaaaatttagaaaatcaatactctattaaggattataacaggattcagtctctacatcttcagagtattcaagaaacaatacaaatccagtcaatag

SEQ ID NO: 823706 - DNA, 565 bp, Homo sapiens
gtggccagcttcactcagttttcatgccggctggaagtaaatccatgaaatgcaaataacgtagtggatcctcattggccagctatcgtgagacacctgacgtattactgttaaccaactcacgctactgtgcaatggagcgctgagactcattcctcccaactgcaactgtgtccttgctgaccaacctctcctcatcagccatccacccctgccctccccagcctctggtaaccaccattctactctctacttttaaggtcaatgaacaatggtttaagtataagtgacaaggaaaattcacaaaatagcagttagatttttgactctgtgggagataaaatacaagtcacacacctacacacgcatgtgttcacaagagtgctacatgcagatgactgtgtcacctgctgcatggcactatgccactgaatcctaacacctctaggtagacagtgacaaagagtttaaaggtttaaaaggttaagtaatttgcacaaagtcacacagctamtgagtgataaggagtcacgaacatggaaaaattaaaggtccatggtggtgg

SEQ ID NO: 823707 - DNA, 565 bp, Homo sapiens
gtggccagcttcactcagttttcatgccggctggaagtaaatccatgaaatgcaaataacgtagtggatcctcattggccagctatcgtgagacacctgacgtattactgttaaccaactcacgctactgtgcaatggagcgctgagactcattcctcccaactgcaactgtgtccttgctgaccaacctctcctcatcagccatccacccctgccctccccagcctctggtaaccaccattctactctctacttttaaggtcaatgaacaatggtttaagtataagtgacaaggaaaattcacaaaatagcagttagatttttgactctgtgggagataaaatacaagtcacacacctacacacgcatgtgttcacaagagtgctacatgcagatgactgtgtcacctgctgcatggcactatgccactgaatcctaacacctctaggtagacagtgacaaagagtttaaaggtttaaaaggttaagtaatttgcacaaagtcacacagctactgartgataaggagtcacgaacatggaaaaattaaaggtccatggtggtgg

SEQ ID NO: 823708 - DNA, 614 bp, Homo sapiens
ggcggcacttgaggagcccttcagcccaccgttgcactgtgggagccccttcctgggctggccraggccggagtcggctccctcagcttgcggggaggtgtggagggagagacgccggtgggaatcggggctgcgcgtggtgcttgcaggccagcacgaattccgggtgggtgtgggcttggtgggcccggcactcggagcggccggcaagccctgctggccctgggcaatgaggggcttagcactcgggccagcggctgaggagggcgtgctaggtcccccagcagtgctggcccaccggcgctgcgctccatttctcgccaggccttagctgcctccccgcagggcagggctcgggacctgcagcccgccatgcctgagcctcccctgaccctccgtgggctcctctgcagcaggagcctccccaacgagcaccgccccctgctccatggcaccaggtcccatagaccacccaagggctgaggagtgccggcacaccgcccgggactggcaggcgccttcacctgcggccccgtgcgggatccactgggtgaagccagctaggctcctgactggtggggacttggaaaacctttatgtctagctaggggatt

SEQ ID NO: 823709 - DNA, 614 bp, Homo sapiens
ggcggcacttgaggagcccttcagcccaccgttgcactgtgggagccccttcctgggctggccgaggccggagtcggctccctcagcttgcggggaggtgtggagggagagacgccggtgggaatyggggctgcgcgtggtgcttgcaggccagcacgaattccgggtgggtgtgggcttggtgggcccggcactcggagcggccggcaagccctgctggccctgggcaatgaggggcttagcactcgggccagcggctgaggagggcgtgctaggtcccccagcagtgctggcccaccggcgctgcgctccatttctcgccaggccttagctgcctccccgcagggcagggctcgggacctgcagcccgccatgcctgagcctcccctgaccctccgtgggctcctctgcagcaggagcctccccaacgagcaccgccccctgctccatggcaccaggtcccatagaccacccaagggctgaggagtgccggcacaccgcccgggactggcaggcgccttcacctgcggccccgtgcgggatccactgggtgaagccagctaggctcctgactggtggggacttggaaaacctttatgtctagctaggggatt

SEQ ID NO: 823710 - DNA, 645 bp, Homo sapiens
gggatccttctgcctgactcctcctcaagggaagctcaggaatccaagagatatttgatggttatttggattcaytgggaccaaaaacaaaaacgaaaatgaaattcctgcaggcagaaaagatatgacgaaaaatcagaagaatctctatcttgtgtttctcacttacacagactccgtattaagagttctctgttcctaaggcactgtaaccatgtgggttagcctataggtgagttagctcacactgccttacttcttttagctatctccttccacactctcattatgtagaaaaacttgtgtttttcccctcattttacttttattgactgtgacataagctaacctgaaggctccatcacagcaagggaaaaacatgaaagtaaagtaaaagaaagtaaagtaaaagaaagtaaaagaaaggggaatcaaataaatgaaaacaaacgagcacagtatcttgacaaaaataaaaaaatgaatgctggaagtaaatgtattccattgttaatcacagttgtctccatgtggtgcttatatgtgtgatttatttatttctaattacatttctatgacttttccaaatttccaaaataatgaacatatttccactgctgactacgatccacacagaagcaactt

SEQ ID NO: 823711 - DNA, 542 bp, Homo sapiens
tgggcaggttgaagtttggcattgccttataccccatcccttgctgaacactggaaaggaagtcacccctatgattagtraacgtgtgtctacttgtctggtcttcttctcgttcaacaacaacataaactacaaaagcctggattttttctagtgctaggaatttggatcatttaaaacatctgatcaaattcaggtaaaataaaactagtgcagaaatctacctatgaaagaaaaattgaataagaataaaagatcagtgtgttggttgctttcccatcaaacttgtacaaggataacataggctcagatatgtaaacatctaaaaattaagaaacatgtgacatgaaatgtacacaaaatttaaaacatgaaactatagcaaactggctatgtactgttgtgtatttgcttagaaacagaatatttcaagaattgaatttaacaatgcatgaacttatttacaattaaaaacaactttataaggcatatttctcaattttaatacccaatccaacagcccaataaaagtggagaagccc

SEQ ID NO: 823712 - DNA, 619 bp, Homo sapiens
tagtgactcaaagtataaactgaatttatttaataagagtagaagaactgaggataggatactgacattattaacattaatgaaatgggcagagaagaagwtagtaaatacgaatctgaaagttattccaagacatacgatgagtaagagttattatgtaaagagaagagagtgtcattaaatactcaacattgtcaaatgagtcagagaaatcaattgtatgaagagtgacgcatgactttttttacttggcaattagaagatcatggattaattttccatgtacgtattcaataaaatacaaagcacagaagctgatgtataaagcattaagctatataaggcagtaaataacagaactgattagaaaaaatatggcgcacacttaagatgaaaaactgtaaatccattaaaatgagaattgtgacaaatttgttgaaaaatcaatttaaacattgttcaattgctgctatgtatcttgaaagtggtatagtgtattcttgctattttactttatacatttttcatgtttttcaaaacaccatgcttgctagtattaagttctgaacgtcatttcttctttgttacatctcttacttaatgataaagataattttgg

SEQ ID NO: 823713 - DNA, 619 bp, Homo sapiens
tagtgactcaaagtataaactgaatttatttaataagagtagaagaactgaggataggatactgacattattaacattaatgaaatgggcagagaagaagatagtaaatacraatctgaaagttattccaagacatacgatgagtaagagttattatgtaaagagaagagagtgtcattaaatactcaacattgtcaaatgagtcagagaaatcaattgtatgaagagtgacgcatgactttttttacttggcaattagaagatcatggattaattttccatgtacgtattcaataaaatacaaagcacagaagctgatgtataaagcattaagctatataaggcagtaaataacagaactgattagaaaaaatatggcgcacacttaagatgaaaaactgtaaatccattaaaatgagaattgtgacaaatttgttgaaaaatcaatttaaacattgttcaattgctgctatgtatcttgaaagtggtatagtgtattcttgctattttactttatacatttttcatgtttttcaaaacaccatgcttgctagtattaagttctgaacgtcatttcttctttgttacatctcttacttaatgataaagataattttgg

SEQ ID NO: 823714 - DNA, 493 bp, Homo sapiens
atatgttctactactttcagcattcaatgtacttagctgttacagacaaaggaaattatttctaccttagataacagctgtgaatacaactgaagccaagaaacagacaggacacatgttttagaatattaaatttccttatgaaaaccagcctcctacatcattttatcttttcgaaggaacttcctggaggacagctttgagctttatcataccatggtaaatagctttggttaagatttaatctttgtgttctttctcctatgcaattataataaatttataaaaattccttctaatttaattccacttttagtaaatttttataagaacaaggaaatgtggacagtgatttatatgcaaagatcttcattgtagcattatgtataataayaaaatttggaaataacctaaatgtcccaaaataatggaaagactaaataagaatgaatatcaatataatgtagcattactcagtatcaagaaaatagag

SEQ ID NO: 823715 - DNA, 522 bp, Homo sapiens
  misc_feature 517: n = A,T,C or G
ctttctctccccctcgaatcccctartgcctcccattggccttacctggcaggaaggccgtacgcaagggagcatgggaaatgtctgctatgggaggaacaggatgaggctgagagcaagttggcaaatgaccggcgtgtgttccctggaacaaatggctagcccatttgtatcttttactctccgcaaaatatttatgttcgttgaaagaacatgaatggatttcatttcgattctcaagatgaaaaaaatcattaaaggcaaagtattagttatgttgtattaggacacttacaaacccatttccagcttaatgtaaaaatgtttatctcttccccgaggacaggccaatgaagtaggtcaggattcttattttagaggcaagaaaatagggccaggagagaatgcgtccctggctggaactctgactcccgaacccaggcctgagtgtgtgttatttgggcaggcttagtccagtgaactgaaaatcagtgagcatcggatcatgctataagcntatgg

SEQ ID NO: 823716 - DNA, 580 bp, Homo sapiens
acagtacgatatgtgtggaatcttaagcataatggtatgggaaaagaaggatctatttmataggtcattattaattatgcaggaaatgttaaatttcttgtaatgaattatttcaatcttccaagtagctggattgcctgagctcagtgtaaaacttcctaggaggtgaaggcaataaactcctccctgttttgcaccatagactggcctacaataactattctgaacagaatgcactgcccagaagaaaaggcagtgaagaagggaattagggaattcagatgactctgtttttcagaattatctagatgattgaggcaaatagagattttcttttattgaaatgctgccatcattttctgctctaagtgtagatgttgcacgagtgacatctgtggtatatccttcttccagatagaagtataaatttataatttagtggggagaggaattttcttttaatcaccaaactaccagctgtatagaaaatttttttgaaatcaccaaactagcagttgtgtatcttagctcctaaagccacattcacaagaatcataagcatctcatttagaaaatctaa

SEQ ID NO: 823717 - DNA, 630 bp, Homo sapiens
aatttcacatcaataaaatcatatagtcttttgtgtccgaactctttcagttagaataattgttgtgagatttatctgtgttgttgggtatattggtagttcattcctttttattgctgagaagtaattccattgtgtgactatgcagatatgccaaaatttaggttgattctaatttggggctactataaataaagctgctatgaacatgaattcactagtctgtgtgaatatatattttcctttattttgggtaaatgcctaggtgtgagattgctggattaaatggcacctgtatgtttaactttatatgaaacagccaaattgttttccaaagtggttgcaccattttgcatttactagcaatacacaagcattccagtggcttcacatccttggcaatacttggtattgttagactttttaattttagatattctagtgcatatgtagtaggattttattgtggttctaattagtatttcccaatggctatcaatatcaaacatattttcatgttatttgccattcatatattttctttggtgaaatatcagttcaaaatttttgcccttcttttttttwaaaaaaaatgaaattgggctgtggtcttcatattattgatccgta

SEQ ID NO: 823718 - DNA, 563 bp, Homo sapiens
aaagtttataggctgttactacacccttatttttcctccatttacctcagtgatctagaacaacctaacacactttccagacctgaaccactcagccagttcccttctcacctcactcccaaccaagaacatttctggagaagaggtagactgtgtatcttaagcagaattcctcagtttcatttcccaaatgagctctgtcgggaatccagaatccatctctctaatagtgaccttcccccgtgaaaattaaagactaattcatctaaagacagccaaatgcaaaattgcatttgtaaactaacacaagctaaatcatcattcttaaactttgtggcaaataggaagcttttaacctcagaacacttaagaatttgggttttaagaagccataacccaaaggtaatacatgaatcttttgcaagggaacttcctgccawactgttttgctgtggttttcatcccacccacctaaacctcatgaaagtaaaaataatgatcaatcatgcaaagtgggacttgtctgaaggaactgaaatgcgatagaagatgagtgccagcaa

SEQ ID NO: 823719 - DNA, 694 bp, Homo sapiens
aaacaaaaactttgggaaacactgctctatacccaaaggactacctttactttcttacaccaggacaaggaaagagctcttttrctaaaaaataaagcaaagcaataataagaaaagcaaatttaaaaatagaaacagaaatccatttgcagtgagatcttaaagcttattctcccacagtaaccagacatgaatttggggttgcccttctcacattcccccaaactccctcttgatcaatatttgctttactcttcctcaatgtttctctgtttatttttcctttccagacaacagaacttgttacaaatgttgtgtagaaaggagctacagtgtgatccgcaccagaccttctctagtcaagactgaacctatggctgggtagacaaagtggctgcctagaaagtgtatgacttgaaggcagaatgaaaaggtcccaacctgtattagtctatttttatactggtataaagaactgcccaagactgggtaatttattaaaaaaaaaaaagatgtttaattgattcacagttcagcatggctagggaggcctcaggaaacttacaatcatagcagaaggtgaagggaaagtaaggcaccttcttcacaagccggcaggaaggagaagtgctgagcaaagggggaacagccccttataagaccatcagatcttgtgagaactcactcactatca

SEQ ID NO: 823720 - DNA, 637 bp, Homo sapiens
agccatgagggaagggtctacaccatgaaaatcagcaaatgctgcaaaccggtcctggaaagccagttgtgagacatttaccagcacatccctgactacatcagttgctgaatttttaattgaatgatatattcactgcttcatgaacattgcacatttattcaatggaccaactctctccagcaatagcatggcctgaatataataactgtaccataaatattaataatatgaacggcggtattcttttttctctccaagtcacttcaaatgtcctgtgaactgccccattgaataatatataaaactgtaagttaacctcagcattatcttgaagaattggtctttggaagtgtaagtgcctactcaatatttgaatgctgtagacacctagaattagaatgtttgggatcataaatgttcatcccaatgctactgccttgccttcccattaacctgaactacagactgttgcttgaagaaaatcctttaaaggaataaaaayccatgtgctgcttctcacacctcagtacagggaaagaagccacttccgcaaagctcaagcctgatttatgcagaaggcttctagtcttacctgcttccttaaaattgctatttaacataatttttggtttat

SEQ ID NO: 823721 - DNA, 551 bp, Homo sapiens
ctaattcccaaaatgtttgtcaaaagccttattgagagaagtcatatttagcaaaaaataattggagatcatacagtattccatgttctcagatgctctaaaatctaaccatggattatggcagcttggtaaagaastgatgatttatgtagaattgtaatgactatccccaaatagcttcactgaattatggacctgtgtaatgggtcagtatgagagacagtccagtgaaagtctttgttgggtctactatgacaatattgttgctgtttcaaatgatgtccactttatgcacagaagaaaattcttacttcatcctggaactgagaagtcaattttgtaaattattagacttctgttttcaagatagcacttagaaacctgagaaacaaaagcacagtccattaaatacaagtcaattttaaataaaattatttaataaccttaagattattactacaagttccattttatgtctccatcattattttattttctgttacttaaaaaaattagtctattggtgtataatatatatacaacaaaattca

SEQ ID NO: 823722 - DNA, 551 bp, Homo sapiens
ctaattcccaaaatgtttgtcaaaagccttattgagagaagtcatatttagcaaaaaataattggagatcatacagtattccatgttctcagatgctctaaaatctaaccatggattatggcagcttggtaaagaactgatgatttatgtagaattgtaatgactatccccaaatagcttcactgaattatggacctgtgtaatgggtcagtatgagagacagtccagtgaaagtctttgttgggtctactatgacaatattgttgctgtttcaaatgatgtccactttatgcacagaagaaaattcttacttcatcctggaactgagaagtcaattttgtaaattattagacttctgttttcaagatagcacttagaaacctgagaaacaaaagcacagtccattaaatacaagtcaattttaaataaaattatttaataaccttaagattattactacaagttccattttatgtctccaycattattttattttctgttacttaaaaaaattagtctattggtgtataatatatatacaacaaaattca

SEQ ID NO: 823723 - DNA, 579 bp, Homo sapiens
agggtgagccgaagcagggcggggcatcacctcacctgggaagcacwaggggtcagaagatttccctttcttagccaagggaagctgtgacagactgtacccggaaaatcaggatattgccacccaaatactgtgcttttccaacagtcttagcaaatggcacaccagaagattatatcctgtgcctggctcagtgggacccatgcccacagaaccttgctcattgctagcgcagcagtctgagattgaactgccaggcggcagcctggctggggaaggggcgtccaccattgctgaggcttaagtaggtaaacaaagcagccaggaagctcgaacttggcagagcccaccacagcaccacaaggcttgctgcctctatagactccacctctggtggcagggcatagctgaacaaaaggcagcagaaacttctgcagacttaaatgtccttgtctgcactgctctgaagagagcagtggttctcccagcacggtgtttgagctctgagaacggacagactgcctcctcaagtgggtccctgacccccgtgtagcctaacagggagacacctcccagagg

SEQ ID NO: 823724 - DNA, 579 bp, Homo sapiens
agggtgagccgaagcagggcggggcatcacctcacctgggaagcacawggggtcagaagatttccctttcttagccaagggaagctgtgacagactgtacccggaaaatcaggatattgccacccaaatactgtgcttttccaacagtcttagcaaatggcacaccagaagattatatcctgtgcctggctcagtgggacccatgcccacagaaccttgctcattgctagcgcagcagtctgagattgaactgccaggcggcagcctggctggggaaggggcgtccaccattgctgaggcttaagtaggtaaacaaagcagccaggaagctcgaacttggcagagcccaccacagcaccacaaggcttgctgcctctatagactccacctctggtggcagggcatagctgaacaaaaggcagcagaaacttctgcagacttaaatgtccttgtctgcactgctctgaagagagcagtggttctcccagcacggtgtttgagctctgagaacggacagactgcctcctcaagtgggtccctgacccccgtgtagcctaacagggagacacctcccagagg

SEQ ID NO: 823725 - DNA, 579 bp, Homo sapiens
agggtgagccgaagcagggcggggcatcacctcacctgggaagcacaaggggtcagaagatttccctttcttagccaagggaagcygtgacagactgtacccggaaaatcaggatattgccacccaaatactgtgcttttccaacagtcttagcaaatggcacaccagaagattatatcctgtgcctggctcagtgggacccatgcccacagaaccttgctcattgctagcgcagcagtctgagattgaactgccaggcggcagcctggctggggaaggggcgtccaccattgctgaggcttaagtaggtaaacaaagcagccaggaagctcgaacttggcagagcccaccacagcaccacaaggcttgctgcctctatagactccacctctggtggcagggcatagctgaacaaaaggcagcagaaacttctgcagacttaaatgtccttgtctgcactgctctgaagagagcagtggttctcccagcacggtgtttgagctctgagaacggacagactgcctcctcaagtgggtccctgacccccgtgtagcctaacagggagacacctcccagagg

SEQ ID NO: 823726 - DNA, 542 bp, Homo sapiens
gcagcttttctaatgcaagagccaatgatttctgtgtgtctcttgagaagtttatttaaaaatggcagcatttgaaattacctctagagatgtgactaatgtgagtctaaaggttttgtcttaagatgttgaattcctataaaatattttaaatacaaagattaaaatgatgcaaattttaaagcttcccttctctttagtaaatgtttgctcactattcctcaccccaggtatgagttcactccagaacttgaatccagttgctagtgaatatggatggaaagagagttctagtctagggtagtgagctgcccagcccaggagaaacttaatatgcaaggggagctcacggatacctcccacctccactgccgcttacattcatgatacctcatttctatgacacaatttctaagtaggtttcaccctaaagttttattttktatgccattacttaaatgtttatcattttatcccactgataatggaacacaaatagaaactttttataatgaagatacaatcccaactcagagtaatta

SEQ ID NO: 823727 - DNA, 543 bp, Homo sapiens
ttacccacattttagtggttgaaactttgagagagtagagtgccttaggatttgatctgttgacaaaagcagtgggagttttttgtgtaattgcttgtcaaaatgaaaacaactacttggccatttgtgtgtgtctgcgtgtgtgtttttttttttttaaaaaaagccaaaagaaaaccaaataatacgtgctatcttttgatgtacttacaattaacttaatcaacctataaagcttttgttatccgcatatttgaattttgtaaccttacattctgtgtacacaggacaatacaactgctatgtaagcttgtagaagtacatgggaacgcagagtattactcactatgagtctgttacaataggaattaaaatcatgctcttgggttaacagaccttaatcgtgggtcagttttgtatgttggctacttaagtgaacccataaactataaaaaggagatactttttaaatatctaaataaatatataggaggtttrtatttctgagactcgtatttgagaaaagggaaaagtataggaatt

SEQ ID NO: 823728 - DNA, 429 bp, Homo sapiens
aatatctgctctttacatttagattctgaaatagaataatttgtaattttttaaaatatattttaaaatcattaaggacagaacctaaatcatcaggacagaacattttataaaaatggtgctgtgaataagtaaagaagatttggaggggacaatgttttaaaattttgtgagtgactttaaaaataagagcgacaaaccaggtatcctttaaaaccaattagacttttaacctagcagcttatatctgttcatgcctagattgtttggctgtgtggaagtagtttcttagttgacagatacaaaakacacagcaatactgccctctacaggttccctgtaaggcaggcacttgtcttgcaagtttttaaaagaaccctaacctagaggaaagacttcaagtgcttttggctttgatgtctttaacac

SEQ ID NO: 823729 - DNA, 593 bp, Homo sapiens
ctctggcaaatagaacacagactttcaatcactgtcactttttccataatcctctcattggaaaagagagtttttaaagagtagatctttttatttggttttggtctttgaactacawaatcagaccacatagaatggtgtcagctgctctagtaaaatgcaactacaacacaaaacatgaaaaaaaagtaccagtgcctgtaaaaaaattattttctcaataatctttttcctctcctatattcatggaatggagctgttattttataaaattatgcactaaaatatcactaggccctgaaacaaattcagtttctctctcaacttccagccagtttcaacattgttgcccgccctccaactccagggaaagaaaatggcccacatccaggtaactgaggcagtgagttcttgtgctcatcacagttgccatcatctaccagctttttggcattctggcctgtctccaagccatacacatgcccaagtgaacaaatctgaatctaaaaataaaaataaaaatgcagaagtcatactcagagagctggaagtttaacacatataatgatatcgctgtaaaactatttgctttt

SEQ ID NO: 823730 - DNA, 580 bp, Homo sapiens
ttggagactaaagacagtgaacaacaaaacagcatgtaaaaaaacagatgaaaaatctgctgaggtgaaagcataaataggaggaaatayaaaattccccttttatgccaagtgcttcccacttgagaataaatcactaaggtcatttactagctctaacttgagaaccacaaactatactgggttcacctgcctttcactcctcctcagagtcaaacaaaaactctcacaattttaatatttagcaaatacagtcatgcactgcataacaatgttttggtcaacaacaaactgcatatatgatactgttcccataagattataataccgtatttttactatgtcttttcaatgtttagatatgtttggatacacagtatttaccattgtgttacaactgcctacagtattcagtacagtgctatacaggtttgtagactagaagcaatagattataccacataacccacgtgtgtagtaggctatactatctaagtttgtataaatatactctgcaacattcacacaatgtaaagtggcctaattgcatttattataatgcatccccattgttaagcaa

SEQ ID NO: 823731 - DNA, 649 bp, Homo sapiens
tcttccacaatggttaaactaatttacactccaaccaacagtgtaaaagtgttcctatttctccacatactctccagcatctgttgttacctgacttgttaatgatcaccattctacctggtgtgagatggtatctcattgtggttttgatttgcatttctctgatgaccagtgatgatgagcattttttcatgtgtctgttggccacataaatgtcttcttttgagaagtatctgttcatatcctttgcccgctttttgatggggttgtttgtttttatcttgtaaatttgtttaagttctttgtatattctggatattagccctttgtcagatgggtagattgcaaaaattttctcccattgtataggttgcctgttcactctgatgatagtttcttttgccgtgcagaattagatcccatttgtatattttggcttttgttgccattgcttttggtgttttagtcatgaagtctttgcccatgtctatgtcctgagtggtattgcctaggttttcttctagggtttttatggttttaggtcatacgtttaagtctttaatccatcttgatttaatttttrtataaggtgtaatgaagggatccagtttcacctctctacatatggctagccagttttcccagcacc

SEQ ID NO: 823732 - DNA, 626 bp, Homo sapiens
tctttgcacaccaacacacatgcctacttgcactcatgtgcttgtgtttcatctgccccactggactgcagactcgaaacttccttattgggctaggcatggtggctctcccctgtaattccagcactttgggaggccgaggcgggcagatcacctgagatcaggagtttgagatcagcctggccaacatggcgaaaccccgtctctactaaaaatacaaaaattagctgggcgtggtggcccatgcctgtagtcccagctacttgggaggctgaggcaggagaattgcttgaacccaagaggcagaggttgcagtgagccaagatcgcgccgttgccctccagcctgggcgacagagcaagactccatctccagaaacaaaaacaaaaacaaaaacaaaacaaaacttccttatcgctccaggccctagcataccgctgttattgttggttggaatgtaatggaaacacccagctgggacatgaggccagagytgggccaccaaccctgagtcatcgcactattctgagggagttagtctcctttctggcctcagtttccttctctgcaaaattaggaaggtagaccctgtgttctgcaagatccctccaggggacataattcat

SEQ ID NO: 823733 - DNA, 405 bp, Homo sapiens
agcctttgtctctcccagagagtttgagcaacttgctctgagctcctaccaggttggggacactgctccttccttcacatggcagctgctttcagagtaasccttggttacaagagggctgctccctggagctacatgtatggaaggaccgggcatctccccagagtggtgtgcactggctgtggtctctgtcctttactgcccatggtggccagcctgggaccagaagtcaaggtcatcatccccccaacatccttcccgcactactcctctacccagaggtaggggagagattgtgggatcaggtagcctctggcatgaaggtctgctgggccactacctgctgtgtgccctaagcttgttacttcaggtccctgagcatcagtttcctcatctataaaatgg

SEQ ID NO: 823734 - DNA, 405 bp, Homo sapiens
agcctttgtctctcccagagagtttgagcaacttgctctgagctcctaccaggttggggacactgctccttccttcacatggcagctgctttcagagtaagccttggttacaagagggctgctccctggagctacatgtatggaaggaccgggcatctccccagagtggtgtgcactggctgtggtctctgtcctttactgcccatggtggccagcctgggaccagaagtcaaggtcatcatccccccaacatccttcccgcactactcctctacccagaggtaggggagagattgtgggrtcaggtagcctctggcatgaaggtctgctgggccactacctgctgtgtgccctaagcttgttacttcaggtccctgagcatcagtttcctcatctataaaatgg

SEQ ID NO: 823735 - DNA, 470 bp, Homo sapiens
  misc_feature 467, 468, 469, 470: n = A,T,C or G
caatgctggcaacccaagccactcctgaaacgctcaactcagagttaggaaaaaaaaaaaaaaaaaaaaaaaccaaacaaaaaacacrttttctcctttttctttacctcccatctgccccggttccatcctcaatgccagaaatgggcctggtatattgtcccactccctgcatgggaaaagagggatggggaggacagcaagagagagttgcatttgaaaagagaagttttgtagggccaatgttcaatccaaagggatgaccgaccaatatgaagctgctgggctccacagtccattttcagattgaatgatgcggaaggagtggtgtctttccctgtgctcaagtctgcaccaccctgagacctgggcaacaggagccagggccacctctggccacaccgcaccttggcggtaaggggtccataggatccatgggtaaaaggggagccagggccacctctggnnnn

SEQ ID NO: 823736 - DNA, 346 bp, Homo sapiens
ttcttaagggctttaaggcataaaraagtaacttggtgggtgcctgtaatcccagctacttgggaggctgaggcaggagaatcgcttgaacctgggaagcagaggttgcagtgagccgaggcaagatcacgccattgcactccagcctgggtgacaagagcgaaactctgtctcaaaatactaataaaaataataataataatcataaatctctacggggtgactctccagcactttttaggagaaccctgtctccaacccacaggagctggacttgcttccacactagacaattagagggacataataattccccaccggcacctttcctgaagcccaagggatc

SEQ ID NO: 823737 - DNA, 346 bp, Homo sapiens
ttcttaagggctttaaggcataaagaagtaacttggtgggtgcctgtaatcccagctacttgggaggctgaggcaggagaatcgcttgaacctgggaagcakaggttgcagtgagccgaggcaagatcacgccattgcactccagcctgggtgacaagagcgaaactctgtctcaaaatactaataaaaataataataataatcataaatctctacggggtgactctccagcactttttaggagaaccctgtctccaacccacaggagctggacttgcttccacactagacaattagagggacataataattccccaccggcacctttcctgaagcccaagggatc

SEQ ID NO: 823738 - DNA, 610 bp, Homo sapiens
tttgttcactgatggtctggcatacagagaatgcatgagtaggcactcagtgaatgtttgttaaatgttgaatggagggtttgtgagcatgtgttggttggcaaaggaaggyacgttgccaaagatggtggaaataatgccataaaaccaggaaatcttggagtaaaatgcaccagttgttggaaggtaaaaacagggttctttgagaaaaccgagatgagtgagatccactagagtgagcccaacagcttaatgctaaataaagacattatatatcacaataacaaaaactcctctcaacgtgtaacttctttcacatacagttatttcaccctccaatgattctacaagatagatttaatattcccatttcacagttaaggaatcagaggcccagagagatgaacacatttgcccaatgctatgtaactaggaaattactgggttgaccaggtttggccaactccaagtactagctccctcccctcccctctctttactatgcaatccagaggaggagggagagaatgaagaacagtggttgggcaggcagatctggggttatcacttttcagaaatatccagtctggaaggattccctcagaactga

SEQ ID NO: 823739 - DNA, 521 bp, Homo sapiens
acgtactcccctctgaataagaaagctgaatctcattggtcagcaatgagggagattcattttggtattttttcttttttcttttataggcaatctttcttctcttccttctagattaacaggattctttcagtcagctttcaaaactcattcagtgtagatctggtttgttttcttccttgaaaaaaattattaatataataccacagtctctgcaccgaacatcatgatgcatgcctataatcgcagctactcaggaggctgaggtgggagaatcacttgacaccaagagtttgagcattttttagagatgggaccccatttcttaaaataaataaataaataaataaataaataaaaaggtgtctgtgtgtgtgaaaccacaatctccacgttctgaatgtaattatgccaaatatattttcttcttayattctttgcatttcttttaaacatgttttaaaatttaattttcttttaaaataggttttgttttcccattttcttcacaatttccttaa

SEQ ID NO: 823740 - DNA, 521 bp, Homo sapiens
acgtactcccctctgaataagaaagctgaatctcattggtcagcaatgagggagattcattttggtattttttcttttttcttttataggcaatctttcttctcttccttctagattaacaggattctttcagtcagctttcaaaactcattcagtgtagatctggtttgttttcttccttgaaaaaaattattaatataataccacagtctctgcaccgaacatcatgatgcatgcctataatcgcagctactcaggaggctgaggtgggagaatcacttgacaccaagagtttgagcattttttagagatgggaccccatttcttaaaataaataaataaataaataaataaataaaaaggtgtctgtgtgtgtgaaaccacaatctccacgttctgaatgtaattatgccaaatatattttcttcttacattcttygcatttcttttaaacatgttttaaaatttaattttcttttaaaataggttttgttttcccattttcttcacaatttccttaa

SEQ ID NO: 823741 - DNA, 655 bp, Homo sapiens
atttttcatagaacgccgattttttaaaattttcttttttttgaaaaagcagatgatgyggagaaagcacaaaaacaaggacaattggaaactcctggaaaactgcccagtcacccaaagaaaaagtcttggaaaatccctatgtcacctgaccaattcctcctgactgttagcgccctgcagcacgcccgtaattccggggaatttgcctatccctgtaggccccaaacagaaattactgatgtctggggaccttcaatttcatacccaaggaaggtcttgaatttcaaaggaaaatcaatccaacgtgcagttgatcggttgagattgagcaatcctcctatagatgtgaaacgaaccagtattccccttgaaatccagaaactgcagcccaacttgaagatctctttgcacagtcctagagcccagtccaccataccccagcccatgattatccgctccaggttctctggcagcttaaagggtggagaccaagtgaccagttcaattgaaagggctgtgtgcagtacgggtcccctgaccagtatgcaggtcattaaaccaaaccgcatgctagctccacaagtgggcacagccaccctgtctcttaagaaagaacggcctcgcatctatacagcccttgatccttttagag

SEQ ID NO: 823742 - DNA, 433 bp, Homo sapiens
ggaaggtgcggccgctgctgggccagatagaggacaatgtgtcacacccatccggctctgatgtcacacttgacactgcaccagaggacctgagcctctgctggctccagcccagcccctttgccttcccctrctgccacctggcctggccagccagcagggactcgggaaagcacacaggtttcagagtaggagggcaaggaatgaactgggctctgccacggagcagcttcatatgcctgaataattcacttgctagtctcagcctgctcctcttccatgaagtagagaccacggtcctacctagctcataggtggctgtcggggtcaaatgagtagacttttacaccatgtgaggagctaacaagtattattagtatcattagggagtgtggaaaaagtgtgatatctcatctctcgccttcccatcatg

SEQ ID NO: 823743 - DNA, 465 bp, Homo sapiens
cgctgctgggccagatagaggacaatgtgtcacacccatccggctctgatgtcacacttgacactgcaccagaggacctgagcctctgctggctccagcccagcccctttgccttcccctactgccacctggcctggccagccagcagggactcgggaaagcacacaggtttcagagtaggagggcaaggaatgaactgggctctgccacggagcagcttcatatgcctgaataattcacttgctagtctcagcctgctcctcttccatgaagtagagaccacggtcctacctagctcataggtggctgtcggggtcaaatgagtagacttttacaccatgtgaggagctaacaaktattattagtatcattagggagtgtggaaaaagtgtgatatctcatctctcgccttcccatcatgtggtattacactggttggaagttgaattttaaaaagcttggccg

SEQ ID NO: 823744 - DNA, 565 bp, Homo sapiens
ctcttattattgtggtttataggctcaaaaggaaatttgtggaatgactttatgcacatatgaaaaaacaaaaatcttgacaccatttctattctgtcagggtactagaaagaatcaaaaatcaaaatgactcaattttcctttttctcaacatttttatgaagctttagtataagaagtccagttaattcactggtattgtcttaatccacaaggtttaaggataatcagtttttacaatttcagtggtttcacaaaggaacattaattatttatcacaaggtcagaataaacataggacattattgattctatgtttacaaagattatacatttttaaattctaccatattttgtaactatgaagcagacttttaaagaatatgtcatgacttaacaagtaaacgtgttatgtattttgaaataattatgttgactttaactttcgacgtatactggtattctaaacatttcaaatgtgtcttccctacattgtatatttacttgtgctaacctttcaggatattgaaytcttcagttgagaataattttttaacaaacctcg

SEQ ID NO: 823745 - DNA, 614 bp, Homo sapiens
acataagccattcctgttttgtaaaaccacagaatccatgagaatccctggttctcgtcagttctcttgtcccattctcaccgttctatgtatttccttcacacatttgatgaasatttgtaaagaggagttgttgggcagaggaggacttgcttgtgttttggttgtgccttaaatttcaagacttaagtttaaaatcatcataagttatgctggccaaaacatgactgacaaacaatatttatatatctgtcagtttcttcctttccattctctatgggatattctttctccttcggccagtccaccaagttgacagcagtattggtctctcctctgctgagaaagtcttgccacattctggaatttagttcatttagcattgatactatatcttacacagcagttacaatgagggtaatactttgttgaactaaagtcagtcaatagtaattcttcagaatttatgataggaagactatttctttagggctttaatgggatttctaatacgatatttccctggtatgcaatgttgtttttgacttacaatcttggccaatgttaaaggacagatttaaaggtctcatttgggctttatacactgtgatagt

SEQ ID NO: 823746 - DNA, 626 bp, Homo sapiens
acttcaatggtactttacagctaatatcaccaccacccaacacccatctgcataatgcatttaaccttacaaagaatacttttatctattatattayttcattttcaaaatggtcttataaaacaggtagagcagggattttaactgaatttccattatgaggaaaataaggtaacaacccattcctggcaaaatctggactagaattcaaatcatttggctccaaactaacacatgcttctccaaaaagcagcccagtatttccagcgacttaatttaatgaacagattcaagacatgggttaaaaatgttgaggatgtcaggctgactgtcactgagtatacttcttgggtaaggggcatccttactcctgttaagatgatcttactaacagctaaagcagactgggagaattttgacaggagaactactattcttttcagacacagatagttcccttttggtgaaacttgttgcaatgttccacaaagtgttaccgcatctggaaagtccataataattttgatttatctgcactgacagtcagcagtatgttatattcactgttgcataatattattatctgttgatcttcccagtagataatatattcctcaaaggaagaa

SEQ ID NO: 823747 - DNA, 620 bp, Homo sapiens
ggtcaaggctgcagtgagccatgatcatgccactgcactccagcctgagtgagagtgagacccagtctcaaacaaaataataataaaaaaattatgcactgctaaagactgycattcctataaaacagaataaaatgtgtgtgtacgtgtgtgtgtataagtttgttgcggagtgtgtctttacattagttgcagtgggcaaggatcttaagaattaaaaaaggttctcatatttcagaagctatttgtggcaaggctggtgggcattttgtcattcaaagggacaggctattgaggtctaagcccctcctatataaagagttccacttcccctcccagccttctatgggacttatgcacccaggaaggataaatagatttttaattcacaagagaatgcactgctcctatcgtacatggtgagtgacccaggcatgaaggtatgaaagttatcctgtcattggcctttgtttgctagtctggattttgctagtctgcgcgcgcgcacacacacacacacacacacacacacacacacacacacacgtcattagttcaaatcaagagaaaaagggcaaaggtgtcaggagtgattttgttgccactagctcatttgattt

SEQ ID NO: 823748 - DNA, 632 bp, Homo sapiens
actgccaccatctctcctggttctcaggactttgaactcagactggaatttacatctctggctctcacaggtctccagtttactgtctgcagatcctaggaacttctcaacctccataattgtgtgagttaataycttgtaataaataaataaaaatgggatatgtgtgggatgtgtgtgtgtgtgtgtgtgtgtgtgtgtgtgtgtgttcattggttttctttctctgaaaaaccccaatacaagagtagaggtggagctaagattgatacaaatgatactattgatatgaatgagatgaagacatgtgtaatcaaactaaagtgaggaagatgatgctgagaagactttcagagaaaaatcaagagctaaaagcacattagtggtggcaagaattttattaaaaatgagaaataaatgaaaccctcaaaacagtagagccatccaaatgaaaatgattttctatcagtagcagatcaactttgtgatgtttcaatgtattctccagatccacagttctttcaatgtacacatgtaattaatttaactgttttgtacaacttattcttgccaatgtttattttagactgtaaacctaaaatagaatagggtttatagtatttaacctgttg

SEQ ID NO: 823749 - DNA, 588 bp, Homo sapiens
tttctcatgtacatctttctatactcaacagtgaaaattctgctaaccagataatcagagcaagaccaaatgagaccagccgctytctggaaatgactttttgatgaggtataaaagtagaaaagcagaagtaattttcaaacacaagacacctggggaggtactaggtgatatcacctttactatatgtctttcacttttaaattaatatttttactttcttctttcttctagtctgcaacaatcttattttctctgctctagtttaatttctattccagtgctctactaattatttattttcctctgtaataattctgacattcatctaattctaaagatatatacctccacttaaaataattcaataccaagtactgcttatttttactttattttatttcagttttcttttacatatagtacaatttattctttttaaggtacaattgtatgtgttttgaccattacatagaaacttgcaaacaccaccacaatcaatatatagaatagtttcattatgtctaaagattacctcatgcttccctttatatcaaacctcttcccccacctctagcccctggcaac

SEQ ID NO: 823750 - DNA, 629 bp, Homo sapiens
ttgttctatgaaagaatgaagatgattgacagagcactatcwaaattaatacagaaaaaaaagagagaagattgaagtaaacacaatgagaaatgacaaagtggacattgccattgaccctgcagaaatacaaacaaccctcagagactattatgaacatccctatgcacataaactaaaaaacccagaagaaatggacaaatttctggaaatagacaacctctaaagatcgaacaaggaagaaattgaaaccttgaatataccaaatgacaagtagtaattaaattagttattaaaaaacctcccaaccacaaaaggccaggaccagatggattcacagcccggttttaccaagtgtacaaagaactgctggtagcaatccttccggaactattttagaaaattaaggaggaggaactcctccctaactcattctatgaggccagcatcattctgataccaaaacctggcaaagatacacacacaaaaaaaaaaaaaaaagaaaaaagaggactttaggccaatatccccgatgaacttaaatgcaaaaatccttaacaaagtgctagcaaacttaatctagcagcacatcaaaaagctatccacaatgatcaagtagggtttattct

SEQ ID NO: 823751 - DNA, 636 bp, Homo sapiens
gaaaatttattaaatatgtacttatgtttcttttctgttccggttgctctctgtgactctcctttctttttttcttaacatatgttagtcccattcaatttctctctcagtcctccactaacacttcctytcaattccaacttaatcttctatctgctttcccattaacctttaatatacacacttgctacctcctctttatttcctatctggcccattcatctctcatttatttcctaatataatagatgtgagcgaggaaactcaattctctataaaacaaatacaaaaattaaggtctcagagattagaaaacagtataactcagttgcactacttgaaaacaaacatacttacctatcatttttttctcagatcttttttcaccttttcctaaaccaatattttaagaaaaaaaaagtcatgtactaatttttaattcttctttgctccatcaactgcaatttctctaaactgcccttgaaatcacctgtttgaaagatttaagtatatctggaatttatcattgtacctctagcacctactagagtgattgccacaaagtaggccctcgatgagtgatgaacagaactgaaataagtaagtttaatacttgataggaaagtaaatggttaa

SEQ ID NO: 823752 - DNA, 636 bp, Homo sapiens
gaaaatttattaaatatgtacttatgtttcttttctgttccggttgctctctgtgactctcctttctttttttcttaacatatgttagtcccattcaatttctctctcagtcctccactaacacttcctctcaattccaacttaatcttctatctgctttcccattaacctttaatatacacacttgctacctcctctttatttcctatctggcccattcatctctcatttatttcctaatataatagatgtgagcgaggaaactcaattctctataaaacaaatacaaaaattaaggtctcagagattagaaaacagtataactcagttgcactacttgaaaacaaacatacttacctatcatttttttctcagatcttttttcaccttttcctaaaccaatattttaagaaaaaaaaagtcatgtactaatttttaattcttctttgctccatcaactgcaatttctctaaactgcccttgaaatcacctgtttgaaagatttaagtatatctggaatttatcattgtacctctagcayctactagagtgattgccacaaagtaggccctcgatgagtgatgaacagaactgaaataagtaagtttaatacttgataggaaagtaaatggttaa

SEQ ID NO: 823753 - DNA, 636 bp, Homo sapiens
gaaaatttattaaatatgtacttatgtttcttttctgttccggttgctctctgtgactctcctttctttttttcttaacatatgttagtcccattcaatttctctctcagtcctccactaacacttcctctcaattccaacttaatcttctatctgctttcccattaacctttaatatacacacttgctacctcctctttatttcctatctggcccattcatctctcatttatttcctaatataatagatgtgagcgaggaaactcaattctctataaaacaaatacaaaaattaaggtctcagagattagaaaacagtataactcagttgcactacttgaaaacaaacatacttacctatcatttttttctcagatcttttttcaccttttcctaaaccaatattttaagaaaaaaaaagtcatgtactaatttttaattcttctttgctccatcaactgcaatttctctaaactgcccttgaaatcacctgtttgaaagatttaagtatatctggaatttatcattgtacctctagcacctactagagtgattgccacaaagtaggccytcgatgagtgatgaacagaactgaaataagtaagtttaatacttgataggaaagtaaatggttaa

SEQ ID NO: 823754 - DNA, 599 bp, Homo sapiens
tcctgctatccaacccctcactcttctctctgattatcttttcccctaacacctaggctatctatagttacaggctcaaagactccagcagctgaggctrcaatgagttgcttggttttgatccctaagtaaatggtgactcaaatctaacattcacctaaaataaaaatctaaatttaaaactctctttaatcattttgtttttctattattcctatctccttgtaacagattttgatgcacattgtctgaattaaatcctcacatactctccatacaacttggactcatgtgaagttagaagttcaagtaatgctccagatcatgcagaacagtgattttcaaaatggacttttttaggggctcctttcaggggttttgagtttctcatccccttctcaacactttagtcagagaagatctgatttactttatacgtttgacttcagtgtgcattttttatttgcagaaagaaaactgttatcataaattgtgaaatcaaccaagctaattcaaccctaccatctaaaaatgaataaaatcagaactgggaacatcaataattgacacttcaaaaacaagctggtagcagaaccaaa

SEQ ID NO: 823755 - DNA, 610 bp, Homo sapiens
ttcatagtatcagaatggcctgggagaaatcgaaaataactgggaatgattataaagacctggtctgacccaactcttcaggcgaatttcgaaaggcaacttctatgtttactcagtagagctttcttcaagccttatgaaattagaggacgacttttagcagttcttatcaactacttttggtaacaccagtgacctcatcccattgatgaactctagacagcctctattaacctgtgaaaaatgattctctatgacacgtatgtatttagggataaacccagcgtcatctcagtgaccttttccttttccattatcagcttttcttattattaagctaatatttcacgtttcttttgatcttctgcttttcttttccttccaactttgtgtggtctttccttaggcagttttcttttttcttctttttttttgttttttgagatggagtctcgcactgtcgtctgggctggagtacagtggtgtgatgttggctcactgcaacctccacctcccaggttcaagcctcagcctcccaagtagctgtgattacatgcacccrccaccacacccgactaatattttgtatttttagtagagagagatttca

SEQ ID NO: 823756 - DNA, 610 bp, Homo sapiens
ttcatagtatcagaatggcctgggagaaatcgaaaataactgggaatgattataaagacctggtctgacccaactcttcaggcgaatttcgaaaggcaacttctatgtttactcagtagagctttcttcaagccttatgaaattagaggacgacttttagcagttcttatcaactacttttggtaacaccagtgacctcatcccattgatgaactctagacagcctctattaacctgtgaaaaatgattctctatgacacgtatgtatttagggataaacccagcgtcatctcagtgaccttttccttttccattatcagcttttcttattattaagctaatatttcacgtttcttttgatcttctgcttttcttttccttccaactttgtgtggtctttccttaggcagttttcttttttcttctttttttttgttttttgagatggagtctcgcactgtcgtctgggctggagtacagtggtgtgatgttggctcactgcaacctccacctcccaggttcaagcctcagcctcccaagtagctgtgattacatgcacccgccaccacrcccgactaatattttgtatttttagtagagagagatttca

SEQ ID NO: 823757 - DNA, 546 bp, Homo sapiens
ccaccccgtctctgggcctgcaggcctgcccggccagggacctcaagtaatccagaggagaaacatyaggatgagtctgcctcctccttgagcccccaaatcccaccaattctgcaaatgcccacgttggaaaagatgccagtaattctggttcaacatgttccaaggaggggaaaacgacagcctgctgttgacattcctgatttggaattgtgaacacattcttagagggtaaaaattaaccaccatcagttggggaaggcattatggggagggcattatggctgcacttcaaggactgatcacaagaaccgcctcactccaactgcccagggcctgcatcgacgttttaacagagccaaaccagagcgagcccagttctggaccgttccctcagaaaagcagccgaggaaaccctgagtaattgcactcatagatcataggctctggcatgtggttcccagactgaaccatttatccaaattaaaaccattctccagaaacaaaatcagacccttttaattgaaaataaaaccaagcaacccc

SEQ ID NO: 823758 - DNA, 592 bp, Homo sapiens
gttaggcacactcttgtataaccagctgttttcactcaacaatatgtcatggacatttttccatgccaattattcccaatctacatcaccatttaagcggccggcaaatactccattatacggatgtattctaaattaatcaaatccccattgataaacatttagtgttgcggtcaagggcacagactctggagcctcagagcgtggcatcattcctggctgtgcaactccccagctgggtgatggtcagcagaaacctagcatctctgagaagtttcctcatgtattaaatggaggtgcggttgtccctcggtatgcgtggggaattggttccaggagccccataccaaaatccacagatgctcaagttccttatataaaatggtgtgatatttgtatataacctgcacacatcctcctgtacactttaaatctctctggattacttataataccccatacaatgccaacacttcatttcattcttgtggattcaatgtagtagtamttggcgcatggcaaattcgggttttgctttttggaacttggcggaatttttttttctggaatattttccatgcatggttggttg

SEQ ID NO: 823759 - DNA, 592 bp, Homo sapiens
gttaggcacactcttgtataaccagctgttttcactcaacaatatgtcatggacatttttccatgccaattattcccaatctacatcaccatttaagcggccggcaaatactccattatacggatgtattctaaattaatcaaatccccattgataaacatttagtgttgcggtcaagggcacagactctggagcctcagagcgtggcatcattcctggctgtgcaactccccagctgggtgatggtcagcagaaacctagcatctctgagaagtttcctcatgtattaaatggaggtgcggttgtccctcggtatgcgtggggaattggttccaggagccccataccaaaatccacagatgctcaagttccttatataaaatggtgtgatatttgtatataacctgcacacatcctcctgtacactttaaatctctctggattacttataataccccatacaatgccaacacttcatttcattcttgtggattcaatgtagtagtaattggcgcatggcaaattcgggttttgctttttggaacttggcggaatttttttttcyggaatattttccatgcatggttggttg

SEQ ID NO: 823760 - DNA, 633 bp, Homo sapiens
ggagaatgttcctgtgggccttggcagcaagtcagcattcttcgttggcatggagtcctaggaaaaagaggtacggggcaccttgaacacaccgggcaagcaaagaagaatgcacgcgtctcctctctccaggaagggctcctttcagagacacgctttgtagctcagctgtttgggggccgtggcaggcacctgggccctggtcacacagtggctgtggagcctgtccctgtcccttgggagcagcctgtgcctccagctcttcagccttccgctgctcccacttgctggctgtggctgtggctgggtggcatttgtttttgtcccagggctgctgctgccagccagcaggtctctgatgtcaccagccgcaggtctaggggtcaccctaaaaacatgcgcctcactgacccccttacagctcctctcctgagaaggtttctgggtgcatttatccatatggggagcctccccggcaggccacaggggagcaaggagagattccttcctggttacccacccaaccatgcttcatgctccagacyaagtaggttttctgggtcctagtaaagtcttccaattcccccaagctgtgaaagcccagaggcggctgtcatcttctgtgctgtggct

SEQ ID NO: 823761 - DNA, 582 bp, Homo sapiens
cctctctggaacattcttaaactaacaatgatacagatagaaggtgattagtgatgcaagttttgggatggaggaggaggagaagggaaatggmtgtgactgcaaagtgatagaacaaaggggacccctgtgatgacagggcagtcctattccttgactcggtgattccaccaactgacatatgggctaaaattgcatagaactaaatacaaacacacacacacacacacatacacacaagtacatgtagaactggcaaaatctcaattgtgccaatgttaattttccggttttcattctgtgctataattacataagctttcaccattggcaaaagctgtgtgaaggatataggcatctctctaaattatctttccaacttcctgtgaatctattactctttcaaaataaatagttaaatgcaatgtaatgtgcccacaagcccagggtttacagtagacgcgacttactcttagctcaaaaatcctctggcctgactcatcttggctcattcccaaattcaaccttgataattaataaggattgtttttacattgataatatttgccattttccaaatct

SEQ ID NO: 823762 - DNA, 552 bp, Homo sapiens
ggcccttcatctttgtattgtactgcaggatttcctatggtgattgtgtttgttatgctgaatgacagaatgatctttctggcagttctgggttgtctaatcatatttcaggacaggatgcagcaaggctgaccaggagctcattgattggtgtctggcaggcttgttgggtggcaggtcagatactgactggaagaatctatgccagaattttaaggttttgagggggatctctaatatctgcataattgcctagttctccctaggttcattttcattcttgagagaaacatcctcaggtgtcagtagataaatgcctgctgctagctctcctcttccaggtgagtaattgaaaactaatcctcttgttttcaggcccaagggtcattcatgccttttgttgcctgcgttgtctcagggccccctttgggtaccctggtcccctcggggctgattctctctgcaggtgccctctcagctttggtttggctcagctttcccagtsaccgtgtcttgtttcactttttgtcttccagaaactttgttgaaata

SEQ ID NO: 823763 - DNA, 516 bp, Homo sapiens
tcaatggtagtcataggagaccagaagtcatgagaacatataagatttcccagggcaaatttggagagtaaaagaaaagagtgccaaggagggatcctgagaaatgacaaatatttagagtcagctataggaagaaaaatatccaaaggagactgaagagttggttgaatgagagaagaatggtttgaaagcacatggaacattcagatatctcagtgattaaaatggcaaaagagaaatgggtttcaagaagaggaaagttaattgaaaacaatagaggaatatttttagagtgaggaagttctaagtatactaataataaaatagaaaattttaagaagacacattttaaaaatgttaaatggtagatttatacctgaatatataagtaactacacaaaatgtcagtggatgaagtcttctaattaaatgaartggaaaaagctgttagactacgtgaaaatcagaagaacccaatctcatgctacttggagaaacatatcctaaatgttagaa

SEQ ID NO: 823764 - DNA, 615 bp, Homo sapiens
aaggacttcagcgtcactttggataatagtctgcaaactgcatttaccaaggaagagaaaaaaggcatcttgttcccccatgttgaaasgtagacaactaacagcgtatttttaattacccgaatgctttagcagggaaagtagtcagtttatagttaccttcaatatgtagactacaaattattagtgcatgaaaatggcatccaagttctgttgctgggtctagtaattttggatattttccatgctattactgcctgctccatatacctttactggttctttttgaaattaacttaatggcactctgcagaaatggactgcctactgagagtgagcgcttgcctgcaaagatgggccgagttcccactgagaagcactgatttggcacaaacagagaaatgctttagcattaatttacttgagtatcaaattattcaaaataaataattaaagtcttttcaggagctggagtcaatatttgctttcaatattttgggtccattaacgcgtatcctgtattgaagggtcagccccaccaaggtctcccgctacagcaatacatcccaaagcttcccacaggtttttcccttcaggcatcaaatgtcgtttccc

SEQ ID NO: 823765 - DNA, 615 bp, Homo sapiens
aaggacttcagcgtcactttggataatagtctgcaaactgcatttaccaaggaagagaaaaaaggcatcttgttcccccatgttgaaacgtagacaactaacagcgtatttttaattacccgaatgctttagcagggaaagtagtcagtttatagttaccttcaatatgtagactacaaattattagtgcatgaaaatggcatccaagttctgttgctgggtctagtaattttggatattttccatgctattactgcctgctccatatacctttactggttctttttgaaattaacttaatggcactctgcagaaatggactgcctactgagagtgagcgcttgcctgcaaagatgggccgagttcccactgagaagcactgatttggcacaaacagagaaatgctttagcattaatttacttgagtatcaaattattcaaaataaataattaaagtcttttcaggagctggagtcaatatttgctttcaatattttgggtccattaacgcrtatcctgtattgaagggtcagccccaccaaggtctcccgctacagcaatacatcccaaagcttcccacaggtttttcccttcaggcatcaaatgtcgtttccc

SEQ ID NO: 823766 - DNA, 683 bp, Homo sapiens
aaagagaattttatttaattaactgtaaaattaacgtcatcattaaaataataaaacccaamttctcttctctaggaggtcatggccttcctagccacttttatgtttcaaataagaaaaatgttgagttaacaatttatttatatggtccgttcagtataagaactaggaagacaatttattcatgccttagacttctaatagctccattcccatatataaaggagtacatatcccaattaatacaactttttgccacattaattattctagcagaacactctaatttttgtgtttaaagaattcacaagcctctttaaaatatcaggaacgatattaatatttagtgaggaacagtatatatatatagagagagagagaaagggttacattaatcatttctcatatatatatatatatgagaaatgaaatgaaatatatatatatttcaaagcttacagagtttaaggaatcttcctgaggtcacaaaggtcacagctgagttttaaaaccaagtctgcacggtaccaaaatccttcttctttctaacacactaaattgccttaagaaaggcagctccccttactgaatcccacaccattcccatcccacgaatatattctttcttttttcataccacaaatttttatttaccacctatcagccaaacgtgataagtgttg

SEQ ID NO: 823767 - DNA, 638 bp, Homo sapiens
atgggattgctagatctaatggtatttctgtcttaaggtctttgaggaatcaccacactatcttcaacaatggtagaactaatttacactcccaccaacagtgtataagcattccttttctttttttccacaacctcgccagcatctgttattttttgactttttaataatagtcattctgactggtgtgagatggtatctcattgtggtttgggtttgggtttgcacttctctaataatcagtgatgttgagattttttcatacgcttgtcagccacatgtatgtcttcttttgagaagtatctgttcatgtcctttacccatttttaatgggatttttttcttgtaaatttaagttccttatagatgctagatattagacctttgtcagatggacagtttgcaaaaaattttctcccactctataggttttctgtgtactctgttgatagtttcttttgctgtgctgtgctatgcagaagctctttagtttaattggatcccatttgtcaacttttggttgcaatcrcttttggcatcttgtcatgaaatctttgtccatgcctatgtcctgaatgacattgcctaggctgtcttccagggtttttatggttttgagtttttacatttaaatcttg

SEQ ID NO: 823768 - DNA, 606 bp, Homo sapiens
aacgactattaaagcaacacatgaattcagattgaatttttttttcttcaaggtttactccacaaatagtagattccccaggagaattactgtttcatgtgcaggccctgggcaagcagtaatcaattgtttyttaagaactttgttccttgaaaaagggaaggttaataccccatttctcactctgatgataattggcagaatgccatggctgagttgtgccaatattaagggaaagtgagagctaagaagcatgaatttattttgagggtgcttagctcctttaagggcaggccttggtgaaaatagtctttactccattttctttatttccccttttctgcaaaaaaaaaaaaaaaaaaaaaaaaaaagaatatttcgctatgattctttggtttagtaacctgtatagtttatctccctttttaaaagactgccatattgctttttttggtttgccttatataatggtaaaaagagtcatgcatttgttcaattatactgcaatatcatggaaccctttcatccttcccataacttggttatctatagccaaagttgaaacaccctgtaaattgcctttacaaaatgaatggcatatcaaag

SEQ ID NO: 823769 - DNA, 448 bp, Homo sapiens
gttttttgaagatagagacacatttgccatgaagcttaagttcaggacccctcgctagcatgggcatctcccctggaatgtatccatatggccatatgtttctacaaaggctgcaaaggtgagattaaggtaagatcgtttgactacaattcctttccactctgattttcttccttacacttcccttcatgttaatacgatgttagcatgatggatataagtggctgaaagcatttttggggtctgaataagaggaagtagagctctgaatatatttagtttgggtttagtgggatatatttatgtggtttctaggctgtccatgtgtagttaagttatcattagccatcccagtagaggatggcttccaggaatactcctgcccactgtctgagtcacctgtggtggtgaygtaaaggtgcagaaccaaaggtcatctcatatatga

SEQ ID NO: 823770 - DNA, 586 bp, Homo sapiens
cctatggcctcacatatatctttcttcctcatctctgtctgccaatttgtttctctcctccttcgttayccaattcaaaattcagatccttcctcagccagccccatatctttggcatcactctcttaatcactcaatacttccatttgcactgttttttttccacttattgatatgttactttgcaagtgttctcaacttgtgttggatgtacacgttctctctctgctagattataaaactccttggaagcagggaatttctcttgcataataacattttagttcttatataagaacatttagaatatgttggtactacttacagtgcagtaccagcaggtatccactaactagttgtaattaacaaagtagttgttatggctggacaatgtcataattctatatccaaatctgatataaaacaatgcatatccaaaacacatttcaaacaagagtgcaagggaatcccattttcttcaataaaaagttttaagtgattccattattggccttttccctctttaagtgagctttatttcctttattatgttttccttgttagcttgtccacctgctgaaaggaa

SEQ ID NO: 823771 - DNA, 546 bp, Homo sapiens
gtattcgagtggaatggaaaggaatggaatcaaccagagtggaatggaagggaatggaatggaatggaaactaatagattagattggaatcaacccgagtggaatggaatggaaaggactgaaatggaatggaatggaatggaatggaatcaactcgattgtaatggaatggaatggaacggaatggaatggaattaacccgaatacaatggaatggaatggaatggaatggaatggaacggaatggagtggaatggaatggattcaacccgagtgcaggggaatggaatggaatggaatgcaatggaatggaatcatccggaatggaatggaatggaatggaatgcaaagcaatggaatcaactcgattgcaatggaaaggaatggaatggaaaggaatagaatggaatcaacctgattgggatggaatggaaaggactggaatggagtggaatggaatggaatggaatgsaatggaatgcaatggaatggtatggaatggaatggaatggtacggaatagaatggaatggaacgaattgtaatg

SEQ ID NO: 823772 - DNA, 404 bp, Homo sapiens
gggttgattccattcctttgcattccattacattccattccagtgcattccattccattccattccatttcattacattccattccattacaatcggattgattctattcaactcccttactctccattacattccattccattcgggttgttccattccattccattccattccactccattccattgcgctccgtttgattccattccattccattccattccattccattccggatgattccagtgcagtgcattccgttccattacattcccctgcactcgcgttgattccattscattccattccattccattcaattccattccattacaattcgttccattccattctattccgtaccattccattccattccataccattccattccattccattc

SEQ ID NO: 823773 - DNA, 491 bp, Homo sapiens
agaaaacgaaaagagaggaagatcagtgcacctgctagaagacaggtgttaggtaagcaaggaccaagtttcagatgccaggtgagttatttagagcccaatgaacaaaactggtctatagcccctgaagcacacatcctcagattttgataaagcacattaaacacaggttctacatatgcaagttatatgtataatccaggaatttgtaaagaaggagttcaaggatagaagtctgatgaaatgggataaggatgggatctgatcctgctcataggaccatgaaagtggtgtaggggaggtgggagctggtagagatgaggagaaacagcaaaaggagatgcagaacccgagtcttagtggaaaccaaacactgaaatccgaactcaggcttgcagacactgaaaactcaggcaaacagaagtagagcagcaacagatcctagwcagatctgactggaggccaggtaaaagaatgcagacaataaaagg

SEQ ID NO: 823774 - DNA, 602 bp, Homo sapiens
caaaataactgcttgtaggaagaacatttatcatatagacctaaataayagtctaaatctaagaagctacaactaagaatgccaataacttagatatttttatctacgttttagcagagtcctgtctaacttattttttatacagcttgacattggttaatgcacataaataaatgacacctagactgataatctcttcatgagttaccctaatttctaaactgaagccacagaatgcagtgcaatgcctatcagtttaattatacagcaagctaaaggaaatcatgaaaggcatagtgttgtatatgtctaagaaaaaccaaataatgttgggagaattcccagggcaagtacccagaatggatcttcaattactcgatcaaaccaccattccattccattccctttttaactctccaattacttcaactttctaattggttaatgtggctggctaccagaaaattaacataatttgcatatttagccacacactttaaatatatttctaagtggtttgagacagaagaaatagtttgtaagtgttccttgaatactgaaaagtacagaaaaacaagtaaatgctaagaattcggtcccat

SEQ ID NO: 823775 - DNA, 611 bp, Homo sapiens
gactgctgaatattcattgtctggtttcactaaaacagcatgcaggtacacagtgttcctttcctaaggtagctgggttgcacctataccttttggaaatggaaaatctgaagaatgctacaacccggaaagcattttttttttttttcagaatgaaactaacaagggtagtaaatatctatgagtacagtaacaaaactatgtatttccatgggcacaatacattttgtaaattctaatttgtattctttgtcttggggttagggaggaatgattaagataaagaaatagatcagtaatctctctacttcactaagatgagggaagggaaaagtgtaatgtacaggtcaaaataatgctgaaatgcagaatgcttttcaaaagtatgccattagaccttcaaatgtgctgtaggtgctaatagtacttgtctatcaagaaaatattgagtcattgtcttttgaaggttttaaactgttttatgtcccacacacatccctaccaggcgtagtaagagtagtccattaatgttttcattgattagaggttgaagtaatagaatattgtgsaagtgttttactgcattaacttttattttaattcctcttcta

SEQ ID NO: 823776 - DNA, 629 bp, Homo sapiens
ttcagcactgtagggtttcagagtttctccaaacaagatgattctcaatattgcttttaaagatgaggatggggccagtgtggtrgctcatgcctgcaatcccagcactgtgggaaactgaggcagaggatcacttggggccaggagttcaagaccaacctgggcaacacagggagaccccttctctacaaaaaaatacaaaattagcctggcgtgatggtgctgtgtctgtggttttagctattcaggaggctagggcaggatgattgcttgagcccaggagttcaaggttgcagtgagctatgattgcaccactgcactccagcctgggcaacagagtgagactctatctatctctaagaaaataaataaataaaaatgaaagaaggaaaggctggaactgggggtggggcagccccagcagagggagtcagctctcgtgcatgagatgattattggaaactccaaattctgaactctgaatatggggtgtgtcctttatgaatatatgatttctatcttcccccaaaaccaaccaggaaaagtcttcatatttcaaaggaagaagaaaggaaatccatgtctgtgttttaagacactttactgcctaacatccttttgtattaaag

SEQ ID NO: 823777 - DNA, 609 bp, Homo sapiens
aatgttcatagcagtactattaataatagccatgaaaaggaaataacctcaatgtctatcaacagcaaaatggayaaattgtgggaggcaaacaatgaaaccctatatagcaattagaatgatctaagttttgctcaggcaatcaatctcagaatcataatgtaaacaacacaacaaaaattactatatgatttcattaatataaaaaccgaagcccagacaaaattaatacttcatgttagaaatcagaataatggttatcatgaggcagtggctgggtgggggaaggcatgactctgaagggacatttagggtgcttctgaatgcaagtagtattctgttttgtgatctggatgctgactactcagttgcgttcattctgtgaaagtccatcactctgtacaattataaattgtgcacttctctatatgttacacatcattaaaaagattatttttagaacatgtgaatagaaaaagatgaaactttagtctggaaagatgacaactccagggaatttatgagctcaaaatatataaaatcaggaaagttcactatctcttgtcatacattgtaccagtaggaaaataaaataataaaaagaaagac

SEQ ID NO: 823778 - DNA, 631 bp, Homo sapiens
agggaaattttgctgagttcttaaaattttatggagtgccaaggatatagcttacatgtatgttctcagagaagccmatatggtaaaattatgaaaaaaaaaaacagatcttatcctgttctatgatagtacaaaagatgggctttggtatcttaaaatggtgcctaatcattgcagccttttctcctttctcttggacaatcattgaatgaagagtaatctgcgatgctatttgcatcatccaagatgtttcaattgttaatagaagaatgagggtggattttcacaggcaagatgatttctgattggagaagcaatgagaatgtatccatgaaggtcagatgtttatttttaagcttcatgaaaagttctgtacttgtctgaagcaaataggaaagagaaagtcgtttgcggtcttatgaaatttctgaacttctcatgggaaagtagctgacgtcagtgtttgataagtttcccgtggctacaggcatgagagacactgagaaaaatgtatctttctcttcacagagtcatagtgtacctgaagtttgagctgggtataactaccactcatcacgaaagacctagtgtagataataaaaagtccaaagtttgtgaaaaggtagtggca

SEQ ID NO: 823779 - DNA, 537 bp, Homo sapiens
atggaacctttctttgaagtagaccctacattccaaaatatcactggcaaactctggggcctgcttctgattaaataattgacataaacctccgccgaataaacactgaacccttcaaaaacagagaagtaaatgaaaaataaaaatgcatctatgctttaagtagaagatcttctgcaataatttgttaccagaaagcaatttacttttccttttgtaaaccagcattaaaacctaagaagaaagcacactgggtgaaactctagttgaaacttcgaaatagtcttaaatctattctacatattatcagatttaatgttgaccttaagagagtgcttccatatttatggtttgctatcttatccctcaaaactaaatttattactcatagaatatgaagcttaaaaagtaaaatattgtattttcctgagaatattttggtctttaaattgacaacagtataaatacattgtaagaaaaaaaatagcaacccaactgtgtgtatgtayaccttgcctctttcttcaaggaatgcta

SEQ ID NO: 823780 - DNA, 590 bp, Homo sapiens
caaaatcttgcatatcagtatgcaacagtaatagttaatgtcctaaaaaattgctcagactttttcctggagcaagaagtaaacaggaaaggcaactggcattasaagatgcctcgctgtctgcatgaaagcaggatcggcaagagatgatgaagtgctttcgttgcggtgtcacaaagggatggggctgcccacaagagcttcttccagtgtcagttcagtgaactttgggaaacttccctccctgactccatgacagcgcctccttgaagtgcagtaatgaaagcatttcccctgatttcctctcttttctggcttgtggcagcaaagaagaaagaccgtatcatctgctggctgatgaaaacttgaatagctgtatactgtcaccagatcatttggaggaaaaatgataaatgccctaaagaaagccttgggatgctatatgtaaatctgaggtaagaagagccaataaggtctgtgacaacattaagccagttactagcaatgaagcaattatatgcacaacggaaacaatctacagtgacagctataacaaaggcacaggaaagtgggcaggagactgcttgaaa

SEQ ID NO: 823781 - DNA, 487 bp, Homo sapiens
tagacaatataaacatcagccccagaaagkagacacggaatgacaacttatttttattgctgtcatcattagaacattaacattaaagccaaatcttgttttatggtgcattctgcacactatgctaatgaattatgcaaagccagaaagcaggagcgtgtgtaaaacgtaaaactgaatgacgttctccctggcatatgcagacttgccaagcatctgccctcacaaacacataggcgaccatttgaagtctggaaacagatcaactcaaagcaaagctgatccggtactgatctgtaaggcgactgcatagactccttcccacctcacatctgtaccccctcaaaaaagaaacaaaccataaacagttgcatatcctctttttttcttttgccttctagtgaagcatacgtcagctctttacaacactcctaaaatctaaaataaaagggaagtctcaggggtctaaagtagaacgctggacctc

SEQ ID NO: 823782 - DNA, 543 bp, Homo sapiens
ttgcatgaatcctctttccactttgaatctaagctttgaatattagttaaatatgtgtaacacactattctagctcctgtggtgactgctagttgtgtacgatagagttcrtatctttgaggatctcaacagtttacaaggaaatgaaaggtgctctggggatcacttaaaatttttttttttgaatgggagactccaccctttgaaagggaagtcatgtggtgactcctcttaaccgactcagacagatatccactgaatctttttgctgaagaattaagagtataaaaacatgtctgagtcccaaaccgtgattatagtcagattaattttcctaaaacagctttaatcatgttactctctttaaaaaaatcagtagtttcccagtgctcatgaaagtaagtggtttggtctttgatgaggtatttgctcctcagtacagccctaaaaagcccttacagcctcacctctgactgttttcctagtcatatcccaagttccagcctactgttcttttaatgggatccccttttatattgatac

SEQ ID NO: 823783 - DNA, 593 bp, Homo sapiens
agctaaatgatgagagcaccgggacacaaagagggsaacaatagacaatggggcctaccagtgggtgaagggtagcaggagggagaggatcagaaaaaataactattgggtaccaggcttagtacctgggtgatgaaataatctatacaccaaacccccatgatacaagtttacctatataacaaacctacacatgtaccccgaacctaacagttaaaaaagaatcggctgggtgagtgcagcaaggtggcagaatagaagcctatactgtctgtcctcccccaacaggaacaccaaattttaacaactatatgcacacagaaaagcaccgtcacgagaaccaaaaatcaggtgagcaatcacagtacctggttttaatgtgtacggctaaaagaggaactgaaaagtgtcggagatatagtcttgaatcaccacccctcccctatctatcagcagcagctgcctggtatggcgagctaacttgcacacttggaggagggagagagcagcgactgggggacttcacactgaattcagtgctgctctgtcacagtggagagcaaagctgtgctgggctcagccaacacccatgc

SEQ ID NO: 823784 - DNA, 619 bp, Homo sapiens
gggaaaggtaagctaaatcagtaagaaataaagatctgagcactgtgggtggtttagagatagaacacctatagattggtatgtgggggcagggccaatgatgtccccttgaaatcctgcattggatagctgttgattgatctttgtaactcagtctccacttctaatgagcacatcaatagggtatacattgactttctaatgcattggttttattaaaaagggagctatttccagtttaataagtggagagcttctgtaacaattgctacatttcaattctaagcaatacttataaaggtcttttagaagtgctttctcaaaaccattatgtttttagttaattttttatgtgctataaattttaaaaatgtgtatattgaagatacactttagtgaaaagggctcttgaatagaaattaagagctcagtgctttagttttctttctgcttattaatgcattctttcagtttgggcaaatcacttactctgtgtgaacctaagttcatcatatttaaagagggcatgctaaacatakgcatattctttcttttccatccaaatcattttgaaaggatggaaactatatctgtgtcttttcatatccatataatatgg

SEQ ID NO: 823785 - DNA, 568 bp, Homo sapiens
tgatagtgatcacaaggtttgggaaatacgatgctttagaaaagattaaaagaacacagattgtttatcttaaacaaaggatctaatgctattctaagagtctacaaatcaataatgtttttatatctcttgagagagaaatgagaggtggtagtagaatggggtggttaccaactgtttccagagatttctttctggtttattgctgaatgcccaagaatgtacctcttttctgtgctttctgtttatatgagccagtttttttggggacagtcatactttattggttccacaggcttcaaggaattctatcctaacttcaatctgtacatataattgaggagctattattttgcatatagaatcatttataacatatggttgttctgcttttccagccacattatgagcttaacttttttactaatttttactgaaacatatacaatatgtwatcggtatttttctacaaatatttattgagcactcactatgggtcaggacatcagtgatatgtcagaaatctaataatgaataaaatacagacccttcccctgaaaggatagta

SEQ ID NO: 823786 - DNA, 594 bp, Homo sapiens
gcagccttgacctcctgggcttaggtgatcttcccacctcagcctttggggcagctaggactaccrgcgcccaccaacacatcagctaatttttgttgaggtgaggtttcaccatgttgcccagactgtttcaagtgatctatctgcctcggcctcctaaagtgctaggattacaggtgtgagccactgagcccagccgtatcttcatacttttgttcctacttttatctctaccttgagttcttgtcctcctactatttaattggataacttctgctcaaactttgagactccattcaggtgtcagcacctccaagaaagatttcttgaacttcaagctgattataaacttctccagggaatgtgtgatatttatctttttaatccccatcttctatcacattgccttttacttaaaaggcacctcaattgatgtttcttgaactctcttcacaaaataattccaagacaaataatcaaaagccttaatcaaatgaaagatttaatcattttaatcaatgaggttttctccacaagactagatacatcatttttaattcacaaacgaattgatcatcatttttaaataaaatg

SEQ ID NO: 823787 - DNA, 582 bp, Homo sapiens
ccaaacagcagccagttattctttaaaaataattgacaacctctctccatgttcaatggctttcaaccttatcataaagcagaatccaatatccttattatattgcaycataacacaccttattttaacctctgacttcatctctttcatctttcccttgctccctctgattcataaacatcctttccctgacaaccctcaaacataccgaggttgctgatacctttgtatttgctctttcctctgccttaaacaatgttaaccaaaatatctgcatggttccctacttttgtctctaatttggtctgtgctcaaatattaatttatcacatggatgttctctgacaaacatctataaaattatactttattatttttatctcctttagactgttttatttttcttgatggatctctttacctctttatatatgcctatttatttatttttggtattttgacactagaatataagatcctttcctaccgcattatgtttttctatgacaggggctttgtatctttgtttattactgtatctccagggtgtaaaacaacatcttgcatatagtataaactgaa

SEQ ID NO: 823788 - DNA, 505 bp, Homo sapiens
attcgcttattagttcttacttgttttattgatactacctttatgattatgttactwgtgaataaaaagttacacttcttttttaatgtgaacgatttgcatttcttttgttgtcacactatttaaacctccaaaacaatatttactggaagtgtgatggagggcatctttgaattattcctgatcttacgggggaaaaacattatgtattttactttccattgatgtccactgtaggtttttcaaagatgtatctcatctttgtccaatgttgatgacatttttttttcagttttagatgttggattttataaaatgctgattgttttaagaaaacacctattaagttgacatatatattttttttagtctgttaatatggcaaatgacattaattactatctaatgtgaatgcacccataacacacagagacataagaaacgttttcctaacatggacatgaacagtgtccctcactcccattctgcgtgacctcaatcaaga

SEQ ID NO: 823789 - DNA, 616 bp, Homo sapiens
  misc_feature 63: n = A,T,C or G
ttactcattttttctattttttgcacccgttaaccatcttcacctccctcacacctgcacctncattaccctttttagcctctggtaaccatctttctactctctatgtctatgagttcaattgtgttgattttagatccccgaataagtgagaacaggtgatgtttttctttctgtatctggcttatttcaattaacataatgatctccagttccaactaagttgttgcaaatggcaagatttcatctttttttatgactgaagagtacttcattgtgcatgtaccacattttctttgtaaattcatctgttgatggacacttagattgcctccaaatcttacatattgtaaacagtgcagcaacaaatacaggagtgcggctatctctttaatacaccatttttctttcttttggatatatacccagctgtgggattgctgaattatatggtagctctatttttagtattttgaggaactttcaaactattctctatagtggttgtcctaatttacattcccaccaacagtgtatgagggttcccttttcttcacaccctcaccagcatttgttattgcctgtctttygaatataagccattttaactggggtg

SEQ ID NO: 823790 - DNA, 431 bp, Homo sapiens
gaattcctgatctcaagtgatcagcccacctcggcctcccaaagtgctgggattacagstgtgagccaccgtgcccagccaggatggtatctcttttggagccaaacaagggcagcctggggttaggggaagcgatatcagtggcattcctttagccaccccagctagtgtctcaatatgtcacatgcccccccagtccactgtctctcagcctagttcagcactaggactcacctatgagttgcagtctttatggcctagattgcctttcaagtttatatgaagacacagagtacttgggccctcagtggtgaggtttgcgggaactcaagttccagcctctaggatgggtaattctcctgtggctagggctggtttaaatgctccctccttggtcaggagtcagctgagtttgattccattttcctttc

SEQ ID NO: 823791 - DNA, 486 bp, Homo sapiens
catagtgagtggcttttaaccactactctgaacctgcctccaagtccaagggtatgggctgggcatccctgaggcaggtgtgcaggcatgagcagcatctatagcaagcaatacacattgggaagaatggatgaaggaacagggcacattttggccaagactttcaagctgcttctgggacccgcctgccaggcccagcatcctgaaggctggtggtatgaagagggactgactatgttctgctggtcgtggcagaatcagaactgctccaccatggaacaggttcccaggtaaggtggtaagctccctgtctttggaggtaatcaagcactgctgctggaccatcacttactggtgatgtgtggggaagaataaatagtactgtggactraatgtttgtgtccccccaaattcatatattgaaaccctcatccccaatgtgatggtatttggaggtgtgaggtaattaggtcatgaggatggagc

SEQ ID NO: 823792 - DNA, 482 bp, Homo sapiens
tggtcagacaacaataggggcatgaagctgtgccagtgctggagctttaccttccttttatagggtgctaggtcagagccccctcccaccaccccccaccaccccgaactcggggaggagttctgacctgagtgctcctgctgactcctgaatatcaaaggagggcagagctcccttttgatctcttctcttgactccaaactgaaggacacgtagaaggcaacatgttagagcctgatgtttatccagcaccttccatgtgtcagaaactgtgtgagagcttttgcagatcacctcagcgcagccaagaacggagggctgactttttccccatttcacaaatgagaagactgaggccccaccaggttgagtaaatggctcagttcacattattaggaaatgggyagcctgggtgggagccccggtcagtctgactccagtgctctcaagcttctccctgggtcctgccaccttctgcagtg

SEQ ID NO: 823793 - DNA, 643 bp, Homo sapiens
gagcccagtaaagctatttcatgaacctggtctgtgccttaatgatccctggcaccctttgggggtggggtcagtggatgggcaatakgaatgttagccccaccttttccactattcattctctaggaaccagactagggagtctgtgaagatgggcccccatcagagtttgcaccacctcccctgggttccagcagcacgtggtgccccctctgtgagtctgtttatgcgtcatccccactggactgccctccatgacagcagaggattcttttagtttaactgcaacatcagttacacatcagacacaagaaggtcctacatcatacacacagcaggaaggaaggagggaaagggcatagtaacaacaatcacagatctgagccctaatatgcaccaagcacctcgctgagcacattacaagctagcactcatgtcatcactcctgtaaccctatcagggaactgaggcccagagaggctaagtcatttgccccaggtcacacagccaggaagtggccaggctgggtttggaacccaggcctgcagatctacaaagtgcatgctctttgccttggttagacctgcctggctgtacaggacggaggatgcccccagcttgcaggcccacctggcagagacct

SEQ ID NO: 823794 - DNA, 469 bp, Homo sapiens
cttacccagaggtttgtggtggggaatggaatgtagggaaagagatgctgtgagccctgctggagcctatggctggggtgtgtcagggactctgagatgtccacctcagcccygaaatcatcttcaaggagaggggtttacatggggaccaggaggaccttgcaggactggccttatcctcttgggcccacttcctaagggggtgcccccaggaccaagggtgggagaaacaggccatctgtattaatccgttctcacactgctataaagaaatacctgaaactgggtaactaaaagactcacagttaggcatggctagggaggcctcaggcaacttacaatcatggcggaaggcacctcttcactgggtggcaggagagagaggcgagtgtgagcacaggaaaaactaccatttataaaaccattagatcccgtgagaattcactcactatcatgagaacaacatggc

SEQ ID NO: 823795 - DNA, 560 bp, Homo sapiens
atgtcttttgtggcattttttttttccagaattgggcacttttgtctgcattaaaaaaccagtttaggcagatatccttycttctcaatgattttcttaatggcgtctgagaacatgtccgttgcctcttggttggcagaagttgcttctcctcttatcttgacatttctaaagccagacctctttctaaaattatcaaaccactctttactggcactaaattctccagctttagatccttcaccttcctttaagtttccatgtaatgactttgccttttctcaaatcatataagaatctataggtatgtctttcttatagcaatcctgcagtcacataaaagctgcattttcaatatgagatgaaaaggaattttgcaaacagtgaagggctttgcacctgctggcacagctgtagctacagcttcacgaatttccttttttttttttttttttttaacatggtctttacactgaactcatttatcttgaaatggcgggcaaccacaactgcagccctcaatgtatggtatatatcaagcaatttaactttttcttgta

SEQ ID NO: 823796 - DNA, 489 bp, Homo sapiens
ggggtggagccagcattggccatcaccaaagagatctaactatggcatgtgcctgccaccaaggaggttttcatatctaacttggaaaacacagagaacttttactgaacgtgttcatcaaaattctgccaaagctttcaggatgtcagggttcctcagacatttaaaggcacatccttctacttctcaagagacatgaaagcactaaattaacagcacccaaactgctggttctactaaaatctttaatcatagagatacgcagcataatgtgttgtagtcaaatattaagtgtgcacatgagacaaaacagggaccaccccccacacttagggatctgccaccccacccccacccccaaacatggaaataaagggaagccttgagttcytgtaagggaaattccaggcacctagctagccctgagaagtaaatgagcaacttgataagaagataacagtagcttaaaagacagccaaggaagttaga

SEQ ID NO: 823797 - DNA, 565 bp, Homo sapiens
catacaagagttgactcttaagtacacataaggtgtttttttttttttcctttttagcaagcctcatttgggtagsggggaggaagataaatagccaacagtgaaattgcttcaacataaaaacctttttttttttttaaaggaaactgctttttatactctgaaaagctaaagataactccaatttatcagtgctggtgtcacattggtggaaatttttcagcaatgagcatttaagggtgtttcatggactacaggcataaatatgtgacaaactactatggtactacaaaatcaggttaattgtagctttagagtgacgtttactgtgagttttaccaagataatacccattctgttacccttttattagtcctttatttgttgaaagtgttcattccttgctctaacttcaaaatataatggagtccttctgtaaatgcagtttggtatgactcattttagacctcacttaagagattagtttctaaagtatcagaaaatgaccattggtagtttttgatcctacggcctgacctccggtagcttgctataatactaacat

SEQ ID NO: 823798 - DNA, 569 bp, Homo sapiens
cgtgcgtgcgtacgtgcgcgccctcccgcccgcccgcctcagtggccgggcgggggtcggcccgcgctctgagtgccgccgccacagttmgcagttgtgactctgtaggcggaagcatagggacaagcctgagcgtcacaggctccccacaaacaaccgcgtgacccggggactttccccagggtgtgcaaaagcacaggcaccccctcagttctggggtgaaggtgggggtggggaaggatgcgcccgcgtgttcgctggggaagggatgagggcgcggggccagggaggccgagccgcgggagcctgggtggagaggcggactgggcgaggtggggcatggcgggggaagtgactcagggccagaggcagcaggcccacggaaggtggggtcgggggggcgcggggactgggcgaccctgaaccgacggggcagggcgaggttgccggagcactcgaggcggaccgcgagtgacggcccagctgctgggcccaacgggcaggggtctgacatctggacggagtgggaaagcagcctcgcatcctgccctggggagtcgggaggagcc

SEQ ID NO: 823799 - DNA, 556 bp, Homo sapiens
taagagtggaattgctgggttatgtagtagttctatgcttaactttttgagaaagctccaaactctttttttgagacaaggtctggctctatctatcacccaggctggagtgcagtggcacaacctcgctcactgcaacctctgtctcccagtctcaaaccatccttccatctcagcctcccaattacctgggactaccacccagcccggctgatttttttttttttttttttttttccatatttttggaaaaaactcggttttgccgggctgctcaggctggtctctaactcaagtgatccgcctgcctcagcctccaaaattgtgggattacaggcatgagccacttgaaccagccagcaccaaactcttttgtagcagctgccccattttacattcccaccagtaatgcactggggttccgcttccataatatcctcaccaacactttttattttcctttttttgatagccatcctagtgaatgtgaagtgggattgatttggtataratttgcatttctctgattactagtgatgttgaacatcttttcact

SEQ ID NO: 823800 - DNA, 567 bp, Homo sapiens
ctaaggtcaggagttcaagaccaacctgaccaatatggtgaaaccccatttctactaaaaaatacaaaaattagccggrcgtggtggtgccagctactcgggaggctaaggcaggagaattgcttgaatctgggaggtggaggttgcagtgagccgagatcgcaccattgaactccagtctgggtgacaacagtggaacttcgtctcaaaaaaaaaaaaaaaaattgggttatcatttccttagtcccctcccacccagcttcaggcattagaattgtttcctgagtgactattgtatattttgtctgtgaggcagtgaaagcataaggcatggctctttcttcacagaacttgaaatctggatgaggagctaatactaacccaaatgcaaaaactgaagtaaaaataaggtttagttgttgctgaccatgagtgcaatagaagcccggggaacctagagctctgcgtgcgctagatactcagtggaaagtgggtgggcaggcagggtcaggactgcattctcatctgaacttgatatggcttgcaacgtgcatgcatttgactaga

SEQ ID NO: 823801 - DNA, 567 bp, Homo sapiens
ctaaggtcaggagttcaagaccaacctgaccaatatggtgaaaccccatttctactaaaaaatacaaaaattagccggacgtggtggtgccagctactcgggaggctaaggcaggagaattgcttgaatctgggaggtggaggttgcagtgagccgagatcgcaccattgaactccagtctgggtgacaacagtggaacttcgtctcaaaaaaaaaaaaaaaaattgggttatcatttccttagtcccctcccacccagcttcaggcattagaattgtttcctgagtgactattgtatattttgtctgtgaggcagtgaaagcataaggcatggctctttcttcacagaacttgaaatctggatgaggagctaatactaacccaaatgcaaaaactgaagtaaaaataaggtttagttgttgctgaccatgagtgcaatagaagcccggggaacctagagctctgcgtgcrctagatactcagtggaaagtgggtgggcaggcagggtcaggactgcattctcatctgaacttgatatggcttgcaacgtgcatgcatttgactaga

SEQ ID NO: 823802 - DNA, 543 bp, Homo sapiens
ggccagaatgaagaggaataaactatatcaagaagtaatttctaagtaagaatcaacatgacttggtgacagaagaarctaaaagaatcctggtagattgagaaggagcaagttagagtgagataacaaattaatttagggcatgcaaatatgacaagacttaatctaaggtaacttggacacttagaattgttgcttggaagaaagaaaaataacagttaatgtcaagaagcatagggattaacgatgtatttatttttcattttatgttttttgaggtcacagatacagcctgaccagccagctccatatctaagtataattttggtctgggaaagttacttaactctttgaatctcagcttcttcatctgtaaaatggaaatgataccgacttcaaaatacaagctcaataaatggtagctattattctgacaacaattaccatgattagaccagctggtcaaatgaaataggaacagaacctgtgagatacagaaataggaacagaacctgtgagagaatatttcaaatttgaatccgt

SEQ ID NO: 823803 - DNA, 632 bp, Homo sapiens
gtaaaagttacagttgtctccattcaatactcaagcagttatatttcaagcttaacataattcgagactttaaaatccccagatatgaaaaaaatcctcaataaaagtgattattattaataacattaataatactacttaattcctttcgtatgctcatttttctctatttttgtaaatgaatttgaaaaatacattttcattttctcaggcaccattctatcaaaatgaaacattgctttgcagatttaatgaaaagcaacagttccaataaatgaataggacaagtccaacaaatgagaatggacaaactagtttaagcaaaaatgagaattgtcccaatctcaattttatcctggtgaatcttaattagagttgtggtaagctgcattagtgttaataaggattaatgtcatagtgataagcagaacatacaaatcaataaatgctgctgtatcaatatatgaacagagacgcaaatagccatttgggttcttaacagtgaactwggtagggagttaaatacttgttatgtggatttaatatatttgagaagtaggtgagtcttgcttgtacactacagtctaacattgcctaaagaacagtgctgtgaaacttcacagacaaatgga

SEQ ID NO: 823804 - DNA, 364 bp, Homo sapiens
atactgggatggtcaaggcaatggtctgagaattgtcttgtttcctgccaccatcctgtgaaccaagagcagtaaacttctgaagtctccatgccaacccctgcagccttccaaatgggcacccaactgggtctaggactcagattgcgaccctggtcttgcctagggacaccatgggctgtgcaggtggagctgagactcttcgaagatcacattgctatcttaatccttttggcctgaagcctctgaaggactctgtcaccctgggcaatcttttgaggtcaaggtgagatgggggtatcttgggttctgctctgattctgctagcacgtctttggmtcctatctcccccactgcaaaataa

SEQ ID NO: 823805 - DNA, 651 bp, Homo sapiens
ttttatattttcatcacttctaaaagaaactctatactccttagccatcaaaccccaatctctctatcccctcaacgttaagcaataactaatctactttctatctctctctatttgcccattctggayattttatatatatgggataatgtaatatgtggatttttggtaattctgacttctttcgcctagcatactgctttcaagggtcatccatgttgcagcatgtatcaggagacctgggccattcctttctagggctggataacaattctttgcatagctttaccgcattttgtttatccattcattagttaataagcatttggctttttttcaccttttggctattgtgaataatgttgctgtgaacattcatgtgtagttttggtgtggacctatgtttctatttctcttggacatatacctaacagtagaattgctggattatatggtgattctatgtttaactttttgaggaacttccagactgttttctaaagtaattgtgccatcttatattcccaccagcatgatatgaaggttcccatttctccacctcctccctaacaattgttaatatctgtctttttaatgatagccatcctcatgaatgtgaagtgacagctcatggtggttttgatttgtatc

SEQ ID NO: 823806 - DNA, 550 bp, Homo sapiens
ctcaaagatctatagccagaaataccatctgacccagcaatccctttactgggtatatacccaaaggaatataaattattctactataaagatacatgcacgtgtatgtttactgcagcactattcacaaaagcaaagacagggaatcaacacaaatgcccatcaatgatagaatggataaagaaaatgtgttacatatgcaccatagaatactatgcagccataaaaggaatgagatcatatcctttgcagggagatggatggagcttgaagctgttatcctcagcaaacacaggagcagaaaaccaaacactgcatgttctcacataaaaatgggaactgagcaattagaacatatggacacaggaaagggaacaacaaacacaggcgtcctttcaggggcagggggagagaggaatatcaggatgtggggcttaatacctagctggtgggttgataggtgcagcaaaccatcatgscacatgattaaccatgtaacaaatctgcacatcctgcacatgtatcctggaacctagaataaaataaaatt

SEQ ID NO: 823807 - DNA, 553 bp, Homo sapiens
ctgaaatcacacgcacctcacattctcaattcggtaacaaaaagtgtccagtcccagataagaatcaaactttgatttgatttaaaatgaaattttttccttcccctaattgagactggcagyggcagaacttggataaaggaaagcctgatcttgtcttcctctttcctttttgctgtgctgttttcattttttccttcaggttgctaatgagagaagtctggagggtagaagcagcagagaggcaagaggcagggaacaggaaagttattacctgacttgttctctcctaagacacttggtgctttctgaacctggcaattattttaagctgactctttctaggaaagatattcttggtttcctcagatactctcactgcaaatgtttccctgcaacatccgtccactcctcaaagtctttgctgttgatgtcccagcagctcacatcctctatggggttctaggcaaaatggtctgtcttaccacccacttagggatggagcatctaatgttttcttgttcacctgcagggaacagtaggggtttcattt

SEQ ID NO: 823808 - DNA, 505 bp, Homo sapiens
taggtgaagtgcatttcttgtgggcaacagatcattgagtcttgttttattatacattcaattattctgtcttttgattggagagtttagtccatttacattcagtgttattgttgataagtaaggacttattcctgccatttagtcatttgatttctggttgttttctgatctcctgtttgtttctttccttcctgtcttcctttttgtgaagctgattttctccagtggtatgtctaatttcttgctttttattttttgtgtatcagttgcaggcttcttgatatgaggttatcatgaggcttacaaataacatcttataatacattactttagactgatggcaatttaacactgattgcaaaaacaaactaacaaacaagctataagaaaactaatagaaactctaastttgttcccctgctttttaactttttgttgtttctgtgtgtatcttattataccgtctgtatcttgacagttaatattattttttcataggttc

SEQ ID NO: 823809 - DNA, 505 bp, Homo sapiens
taggtgaagtgcatttcttgtgggcaacagatcattgagtcttgttttattatacattcaattattctgtcttttgattggagagtttagtccatttacattcagtgttattgttgataagtaaggacttattcctgccatttagtcatttgatttctggttgttttctgatctcctgtttgtttctttccttcctgtcttcctttttgtgaagctgattttctccagtggtatgtctaatttcttgctttttattttttgtgtatcagttgcaggcttcttgatatgaggttatcatgaggcttacaaataacatcttataatacattactttagactgatggcaatttaacactgattgcaaaaacaaactaacaaacaagctataagaaaactaatagaaactctaactttgttcccctgctttttaactttttgttgtttctgtgtgtatcttattawaccgtctgtatcttgacagttaatattattttttcataggttc

SEQ ID NO: 823810 - DNA, 621 bp, Homo sapiens
tacctaggtctattttaatttgcttcaagtctgacaggaaaaaaagtacatacactctgactgggccaaattctccagaatacatcttaggggcatttttgccttgggaggaatgtttcccatcgctttggaggtccctttgtggtcgtcaaaatgttaccaggaggtccttgttcttagagctcccaagagggtggcgggctgcttccaagatgtcagcaagcctcttgttctctgacctgaggttcttggcctcacggattccaagaaatggaatcttgggctatgcagtgagtgttatagctctattcagcttgattaggatgaacctcgggcacttagcccaagcaggaacaatggcgagcctttagcctgattgggagcagcaatgggcactgcctcgctggatcagaagtgcagcagacaccctgccagatccggaggggtggaagtcagtggcagaactgtgatggtggcaaacagcagtggtagacgamgagcgaaagctcagctcgagccataacaaacacggaccagaagagtgtgcagttgcaagatttaatagagtgaaaacagagctcccataaaatggaggggacccaaagggggttgcccttacct

SEQ ID NO: 823811 - DNA, 543 bp, Homo sapiens
gaactgatatgattctgttttcagaaacccaggcttttactctgggtctgccttttcacctttaacactggcttctaaccctcaaggtcgctgattgtctaaattgcttttggagctgtaagaaacgggaaggagaaagtagctatttgtcctgtcttaaaagggctttcctggaactcccacctaacatgattatagctcattggccaggaccaggtcacatggtcacattgactacaagggatactgggaaatactacctttcagctgagtttctagccaccccaaacaaaattgggattgtctttctaaggcagtagggaaggaacattgcatgggcaatgaacagaatatgtgtcatgcagataagaataagtaaggagataactaaatgatttggtcaatgtctgcgtgaagaaacaaacaaacaaaaaasagctatttgggagccctgtttaagaagggggatatttacagactattgtgattctggggctgagaaagacactattcttgtgtttatacccctagagcctttgattg

SEQ ID NO: 823812 - DNA, 543 bp, Homo sapiens
gaactgatatgattctgttttcagaaacccaggcttttactctgggtctgccttttcacctttaacactggcttctaaccctcaaggtcgctgattgtctaaattgcttttggagctgtaagaaacgggaaggagaaagtagctatttgtcctgtcttaaaagggctttcctggaactcccacctaacatgattatagctcattggccaggaccaggtcacatggtcacattgactacaagggatactgggaaatactacctttcagctgagtttctagccaccccaaacaaaattgggattgtctttctaaggcagtagggaaggaacattgcatgggcaatgaacagaatatgtgtcatgcagataagaataagtaaggagataactaaatgatttggtcaatgtctgcgtgaagaaacaaacaaacaaaaaacarctatttgggagccctgtttaagaagggggatatttacagactattgtgattctggggctgagaaagacactattcttgtgtttatacccctagagcctttgattg

SEQ ID NO: 823813 - DNA, 633 bp, Homo sapiens
atgcaaaatctttggttgtcattcatatttaatatccaggcaaatggaacaggcagaatctcaatgtggggaatgaaaatagaaactactgctaagaactaaaattttgagtttctcatcctccatggcagtcagattttcttgattctcagtcaggccattccgcaatgagtcaaggtcctgcatggcctctagaggaattaactaggaaatagcttttacgtgagtagcaaaaggcttcctgttggaaaggggctttgagtattcctgactcctaactggtctcttattaggagttaatgcccatcagataacctttcttgcttaagtgctactctgatattctccctgcccttaatgagtcaattgtctagtatgtagcatatatttcaaattgctttcccagtgatggttattgagttgtaatgaactcatgtggtcccatttcaacccagtagcacacattacagaaccaatgattgaccaattgttctgcaaagtaytgtcatcagaccatctgcatcagacactaggtatacatattagaaatgcagaatcctgagccctgctacagataaaccaaactggattctcagagatgagtctgggaattcacatcatttacaagctttt

SEQ ID NO: 823814 - DNA, 600 bp, Homo sapiens
attttaagttcatagttgggcgagtttaaaatgtatatatttgtgtaaccaccaccaaaatcaatttagatataaacatttatatcaccctaaagcatcctttcatgtttcttttcaatcacactcctaccttcggctcttggcaaccactaagaaataatcactacaaattggattaaatttttatagaatcccctttcaatggaatcatagaatgcatactttttcctgtgtagctttttcactcagcataatgtttctgagattcatctatgtcatatgacaatagtttgtccctacttagtgttagctagtatttcactttatggatataccagaatttgtttacccgtttacctacttttgggtaattgggttatttcaaatttactcttttaaataaagatactgtgtatgtgcatgtatacttctttgtacacacatggtttcatttttcttgggtgaaaacgtagaagtgaaattgctaaatcatctggtgctggtgtttaattttttttaagaagctgtgaattgttttctaaagtagttgtaccattttatacttccagcaattkgtgaggcttccagttgttctatagt

SEQ ID NO: 823815 - DNA, 625 bp, Homo sapiens
aaaaggtctcaacctggcctggggaacttgaaaatgacactcgaataaaatcacattcatttatgctctactaattcagaattatttttatgatctggaaagagtttggactcacgtttccatttttagaccctatgacaacaggctgagaaggaggctcaacctacttatgggaacaaattttagatgctctgactcatatgtaaacaactgaagtgctaataatttatctgttagttagagcaaatacttctatttgggttgctaccataagcccttgtaagaactagaaccaaaatgacaatgttcatatgtcctatatttaattttgtcactttgttcctgaatactttcccccgagtgaatcccagtgaataaaatgttactattatattaaacccccattagaacaggaactctttggtagtaggaaccatttaatgttccagtgaggaaataataccactctgctctttgttgttgttgttgttgttgttgagacasagtctcactctgtcactcaggctggagtgcagtggcatgaccttggctcactgcaacctccgccccctgattctctgactcagcctcctgagcaggtgggactacacaggtactctccacc

SEQ ID NO: 823816 - DNA, 593 bp, Homo sapiens
ttgcattacaggtagatactgcaaacttgcttcaaaaaaactaaaaagttcaaataactaatggttcatatttgttccagttagtaaatatcacgacaaggtatcatcgtcatcccatgttctcagtatagattcagcttcatttcttacaccacacacccagaggcataaatggaagtacacagacaaaaggaaaggcctgagtttaaatgtagttatcatgttcagtgttcgacattttattctgagaatttaagtgtttctactgcagtaccacaaagtcaatctgcatattactttaactagatcacttgtaaaaataaatgaataaatgaccagtgatggttcagtgacaagagtgccagatgagtcatgaatgttttcacaagtaaatttgatagtaaactgctaagtttactgtacacgctgtgtacaaattagctcagactcaagatttttgctctaacaagtgagcgctcagttgcatctttaaactttgtgttgcgtgagaggggctgaggggcaggtgggagraagtcagcctgcaggtgggaggtttctgtctcaggagtgctgatacccgtgcatgctgc

SEQ ID NO: 823817 - DNA, 443 bp, Homo sapiens
tccttactatatgacagcactgttctaagtcttttaagagcacyacctattttaatctttgcagtaaccctaacagtaacagataggcgctgttattatccctgctctacagatgatcccactaaggcttggagagatcaacagaagtttccatccaagtggccctctgagtgtacatttctatctctctctttctctgattcagactaaatatcacagtcataagaatcttgggaaaataagacacagtatcatcacatgaacagatatgggatgggcttgggttgaaagaaaaacaaaaccaggggactgctgctgtacaagtattctccagatgccagaaattcaaaagaaacaaatcaagagatggagtcaagagatccaagggggctagagtgactaaccctggggcaagatcaggtgatttatcaggaagcttcatt

SEQ ID NO: 823818 - DNA, 497 bp, Homo sapiens
ataggggatggaaaataaatagtccacacttgttttgtggacactgaaatttcaattttatgtacttttcaygtgtcacaaaatgttattcttcctttgaattttttcagccatgtaaatacatagaaacaattcttaattcatggactgtaccaaaacaggtagcagatcagattggccacagccagagtttgccagcaccccctctgccctcttgctgttcaaagtggggtccatgcccagtagcctcagcctcatctgagagcttgttggaaatgcagattccagggacccacccagacctacagactcaaagactacattttaacaaggtctctggatggctcaagtgcattttaaactttaaaatctacgctcacaccactgcactctagcctgggtgacagagtaagaccctgtctcaaaaaaaaaaaaaaaatcctgcctgggtgtcacccccagaaattctaatttaataggtatggggtgcagcctaa

SEQ ID NO: 823819 - DNA, 600 bp, Homo sapiens
caccaacaatgaccaagctgagacttaaattaagaactcaaccccttacagctgtaaaaatasaaaaacaaaaacaaaaacaaacaaacaaacacccaacaacccaggaatatgcttaaccaaggagaactacaaaacactgttgaaagaaataatacatgacacaaatgaatggaaacacaccccatgctcatggattggaagaatcagtatcatggaaattaccatactgcccaaagtaatctacaaattcaatgccattcctatcaaaataccaacattagttttcacagaattagaaaaaacaattctaaaattcatacggaacttaaaaagagcctgaatacctaaagcaatcctaagcaaaaagaacaaatctggaggcattatatgaccaaacttcaaattatactgtaaggctagagttaccaaaacagcacggtacttgtacaaaagtagacacatagaccagtggaacagaatagagaacccagaaataaagccaaatacctacaatcaactgactttgacaaaggatacaaaaacataaattggggaaagaataccctatttaataaacagtgctgggaaaactggcta

SEQ ID NO: 823820 - DNA, 639 bp, Homo sapiens
tgccatctccttggtgttaagtgagttctcgttctgagttcatgtgatagctggttgtctaaaagaatgtggcaccttcccccaccwagctcccactctcactgtcaccatgacacaccttctcaccctttgccctccgtcatgattggaagcttccagaggcagtcaccagaagcagatgccagcgccatgtatcctgtacagcctgcagaaccatgagccaattgaatctattttctttataaatgacccagcctcaagtagtccttcatagcaacaaaaatggagcaaaaatttctccctttcttattaacaatgtccaggttttgttttttgtttttttgagtctccacactccactctgtcaacgaggctggagtgcggtggtgcaatcttggctcactgcaacctccgtctcccaggttcaagggattctcgtgtctcagcctctcgagtagctgggattacaggcacacatcaccacacccagctaatttttgtattattaggagagaaggggtttcaccatgttgcccagactggtcttgaacttctgacctcaagtgatctgcccccttcggcctcccaaagtgctaggtttataggcatgagtcaccacaattggcctgctatgtcttt

SEQ ID NO: 823821 - DNA, 628 bp, Homo sapiens
aaaattctgagagtggttgtaaaatgtgctcaccacaaaaatgacaactttgtgaggtgatgcatrtgctagttgactgggttcaacaattccacaattcatgtaaacttcagaatattatgttgtacacaataaatatccacatacaattgtatctatcaattcaaaaaaatttaattaaaaagaaaaaactaaagacaacacatgcagatcagaatgggtggtgccagtattaatgcccattaagttcaagtgatttatgaacatggtagggtggaataatgagaattcagggaggatccacggaacagatgagccttattctctgctggcaaagtgatacatgtcatatatgtagaggggaagagaaaagtcattctaagtaaagagtcacatgaatggaacaccaagaaaagaatttccaccactgaatttagcatacagggtggtaagtatttgctaatgtattggactcctccactagcctgtgaaatttttgaaggcaggagctgtatattctcagctccaggaatattcatttacactgtacattatcagttctcaataaatatttgttgaataattggatattaacctggtttctaatgtggttgcaaatttgagatca

SEQ ID NO: 823822 - DNA, 665 bp, Homo sapiens
agttttttgtgtcctttgatatttctgcatcatgacttttagttattttgaatctggctcctggaaatttttcagaaattttctatagtttccaaatgatcattgacagtaaaatttgaaaagttattttctatgtttaatatttttttctagctaaattagatttttctaattctaaattacataatactaatttatatggttctaaattctaatatgatacagtgaccctttctcctaaatttcctataaacttccatgccatcaatcactttttctctctttggaacaattaatcccaaagtagttattactctatttattccttttgccttctgatagatgaaccataaatgcaagtcaaaaattaaccagctgttctggtaatgatggaccaatcagaagatgtctaccatttctttgtttcttataacaatattttgaagtaaaaaatgttaatcatctctatttcatagatgagacaaaataaatccagagaagggtaagtcagaaattgggcacatgtaattcttataagtgaatacattctacaactagraaaaattactatgtgtattagatatcaaaaattgtcatttattttcactgaaattaatagtaaaaaatgcaatttatatcatagaccaattcaaacacttgaatgc

SEQ ID NO: 823823 - DNA, 436 bp, Homo sapiens
ttcatctaactcctgagataggtgcagatcttacagccttagtattccctgttgcaatagtcccttccctgctccttgcaataatcctgtctgaatcaaagtctcttcttactaaattctgattttttttttaatttggcataactaagctttttgaaggggacatctactctcactgtctctttctgcacccctgtgctgtatgtacctatgggacagattaagatgactaacaagtccaacaaagcagaaaactaaaggaggaaaatgtttcttatgttgtttctcaaagaaaagtgccaaagtattcaacatgacaaaaattatcgtaaggtttaaagttatttttatyttaaattacatttagagagacacaataacctttctattacttagagagtctagattagatgtctttttttttttttttttcgat

SEQ ID NO: 823824 - DNA, 628 bp, Homo sapiens
actgtgtaggagctccttgtcattgagaatatgaacgtgtctgccacacaagttgctaattaaacagccactgaattacatctctgtacggcgtgtacacaagtcagagcccacttttataagttgtgtttctcgtctgccccccacagtcatcctgatatgaaaccttcagtggctccctctttcccacagaatcaagtcaaaactgaagggcagccttggggtgtgtggtccttctccatgtgggtccagctcagggatgcgttgaaagcagcttccttatcaggttaattttggcgttattcccactccactttctttcccatgcccttgtcacggctccgcatcccacccgttctttgagacgcagagcgggcctctgcctcctcattcgttactgacgtgctgagccttcctttcccactcttccccagtggcgtccattgctcaccctacgcacagcaccgaatgccaggagaatgatcaagaccttgtgctttcacgacccttccagtytgcagttttccgagtgtctgtacggcgctgctttccctcctctagccgtccactgcagtgcacctgcaggagtgctggctgatttctggacagtttgggtcctggggaccag

SEQ ID NO: 823825 - DNA, 467 bp, Homo sapiens
ggggggagtttctgtggagacaggaggatcctgagatgatggagacttttccccattcccaggaccaccaaggcacaggtaaaagatggcacccgaccaagggagagatagaacagcaagtttccctcaggaagggttattacagctttcagtatcagcttttacaaagacaaataacaggactaaaccggattgtggagacctttgaatgtctttctgccactccctttctttgagtagggaatgtaagcaggtgctctgagtttaaaagggaggtccttagtggctacttttattcataattgtttctcctccgggaaacttgcgtgagaacagtttccttcacttccccaggaggagaattcacgaaggccaggaaagaatgatatagatacaaagttcctaatggmacttctgtcaacacttgtttccggaaccatcatgagctagggttgtcgtccacaacc

SEQ ID NO: 823826 - DNA, 592 bp, Homo sapiens
ctgcacatctaccccagaacttaaagtataataaaaaaagaaaaaaaagttttaaaagatgattaaatacaatgaactgccttttatcagacagaagaattaggtaaagccattaacttaataggagacttacattcccaatctcttagttacctttatatctaaaaaaggattttctcattttaagcatagaacagtcaaaatttgaatcttaaaatttatatctattagaatctagtatgatttattttaaaattttattgacatagaaaatatcagtttgaccattctataatttcaagtatcttatccaaagataagtgatctttaatagaggaatttttgtttgaatgattttcaataattaaagagataaaagctttccatgtgaaatgccaatgaattcgggtaattctgaccatttatattactgcctgtagtctactacattaccctgttctctcttattgaatcataatgagaaaaaaatgtaagatatgtgatggataaaaakatagagaaatgtaattgttagaattaaataattcttcattctcctttctcaattcactgttacaaaaatgtttgaaca

SEQ ID NO: 823827 - DNA, 219 bp, Homo sapiens
ttttcatctttttgtgtctagtgtttaaccagggggaagaaggtacctyctggtacattattctaaaaggatcagtgaatgtagtcatttacggcaaggtatatatatctttttctttttgaaactttattacgctccacttactagtgtggctctaagtattagcaatgtagtgccacaattaaatttgcaacaacattgctcctagatgtagaaaag

SEQ ID NO: 823828 - DNA, 505 bp, Homo sapiens
aaagaaataattttcacataaagcgatctttcttcctttcttcattgtgagctgagagaggattgtagcartacaggttgagcaattttcttttttatgaatctcgtgctcaatttatgaaagccattttgcaacccatttacatgcagtaaacctttgccttaaagttctgtcatttaccttgatcatgattatttatagtccttttagacaaggctctttactggtttagctctcaagcacagcactgtcacaagccagttttctacgtctttcaaggcagggtaggaagctaagacagggccagtcttgtagctcgctgtgaggaatgggggctttgggtaatgggaagaacactagttggcatcaggagtcttgcattcgcaacctctgcactctcactctgtaatcctggccatttatgcttctttagtttcagtttgttcacttatagaaatggagcgacactttcatcacaaggctataaagtggagttgaagtgaag

SEQ ID NO: 823829 - DNA, 509 bp, Homo sapiens
gactgtcatcctttcaaaaggagggggctagaaaaatgagcaatcttctcttcccaaaacgtcaattctagttattccccatgcaagggtttcctaaatctgaagttatctgtattagtttttttttttttttttttgagacagaatcttgctctgtcgcccaggttggagtgtagtggcacgatcttggctcactgcaacctctgcctccctggttcaagagattcttgtgtgtcagcctctgaagtagctgggattacaggcacgcaccaccatgcccagctaatttttgtatttttagtagagatggggtttcaccacgttgaccaggctggtctcgaatgtctgacctcaagtgatccacccaccttgacctcccaaagtgctgggattataggtgtgagccactgtgcccggcctacctgcattagttcttagttggtgctgctcatcactgaggaggggtggctttggccagmtctgctctgtaccgatacattaaaaaggcc

SEQ ID NO: 823830 - DNA, 636 bp, Homo sapiens
gaattggtactaacttttctttgtatatctgttaaaattyggctgtgaatgcttgtagtcctgggctttcttttagttggtagcctttttattactaattcaattttgaaacctgttattggtatcaggatttcagtttcttcctggttcaatcctagtaagctgtgtgtttccaggaatttatccatttcttctagtttttctagtttgtgtgcatagaagtgttcataaaagtctctgaaggttttttgtatttctgtggggttggttctaatgtcacttttgtaatttctgattgcatttattttgattttatcaattttttctttgttaatctagctagtggtctgttactcttgtttattcattcaaaaaacaaactttggtttcatggatcttttgtgttaatgtttgcatctcaatttatttcagattagctctgatttcggttatttattttttgctgctagacttggggttggtttgctcttgtttttatatttcctctaggtgtaatgttaggttgttagagatctttctaacttttagatataggcatttttttagatataggcatttagtgcaataaactttcctcttgacactgctttatctatttcccaaagaatctgatat

SEQ ID NO: 823831 - DNA, 636 bp, Homo sapiens
gaattggtactaacttttctttgtatatctgttaaaatttggctgtgaatgcttgtagtcctgggctttcttttagttggtagcctttttattactaattcaattttgaaacctgttattkgtatcaggatttcagtttcttcctggttcaatcctagtaagctgtgtgtttccaggaatttatccatttcttctagtttttctagtttgtgtgcatagaagtgttcataaaagtctctgaaggttttttgtatttctgtggggttggttctaatgtcacttttgtaatttctgattgcatttattttgattttatcaattttttctttgttaatctagctagtggtctgttactcttgtttattcattcaaaaaacaaactttggtttcatggatcttttgtgttaatgtttgcatctcaatttatttcagattagctctgatttcggttatttattttttgctgctagacttggggttggtttgctcttgtttttatatttcctctaggtgtaatgttaggttgttagagatctttctaacttttagatataggcatttttttagatataggcatttagtgcaataaactttcctcttgacactgctttatctatttcccaaagaatctgatat

SEQ ID NO: 823832 - DNA, 494 bp, Homo sapiens
ctataggtacatgccactgggcccagctatctctagcatttcttttagaaagcaaaaatatacaaacaacaggtctctgcatgcagctaaactgggagtctctggatattgtcctctggtctcctctgccgtccactccccatccggccatgttttcatgtaagcccaccctccagggctgtgtctcagtggtgagaccctgctcaggtcaagaacccgagaatcagtgcagggagagggagagcagatgccagcaatccaaactcagaatccgcctgcaaggtccacacaatgatgttctgcatatggagtgtcgcctgcacacatctgtcactctgctctttaccagacaagcctggggcccagaatagatatgaaaacaaagccaaagagagtccacagactctttacagtttcattgtatgacmccggagtatttcagagagcagagctaaagacctctcctggacattccacatggcttaatgctttgc

SEQ ID NO: 823833 - DNA, 489 bp, Homo sapiens
accctgaaatacgccaataatccttgtttccccctaacactccatttttattctcccaaatccagatatttatacagtaattttaaagtctcaggttctgtaaaattcctttayacttaaaaaaattagagtctgtatatttactgtgatcaatgcatctttattccatccatgaatagctgacctagaaaagttttaaaaatcttcacttttggctcataggaccacattgcggaacttgagaacttacgctacatattcgacacatcattaattttcttttgaagtagaggtggtgctactgggttgccttcaagagaaaaatttgcataaagactacgggtgtttatgaaaaggttgagttctactttctgctctctgtcaaagtaattgtgtgagcttgggcaagctgtgtggttggactctcaaggccttaattttctcacatgtaaaatgagaaactggtgtttcatttgaggtccaatttga

SEQ ID NO: 823834 - DNA, 370 bp, Homo sapiens
tctgttggctcattgtaaggcacattttggattttctcttgcatggatgggcctattgtaatctccatggtcttagtgagtgaagggaaaggctggacagttggaggagacatgaagatggaagcaggatgggagctgtgatgcaaagagtgacacttggtaagtgtctgttgaatggatgagttccaggctgtgtccctcagagtgtgaagcttcttccttcatgcctaggttcattgattayctggaatttacaaaacactgtcttggtacccaggccacaactcccactccttgctttcccatcttcatatttcttgctgttttctgaacaccatgttaattgttctgctactcacttttccttgaa

SEQ ID NO: 823835 - DNA, 627 bp, Homo sapiens
ttggaggaagcttggagaattcaggatccagtccagtgtgtagacaaatcagaaaaccacaaaaacaatgagcaaggctaaaattcaataagaggtgtgctatagttttcttctgaaacataatttctctctctccatttacccccattcctaccaaaaataagcaaagactgatttgcttgcaaaataagtttagtctcattaacttggcctgattatttatataaacgcagcaaaaataatgattgaccacctaggctctttttgagtttgctttcctggaacttttaggggaatctcagactaaacagttaaaagccttttaaaactagaaagtgaagccaaggacttgctctcaggctgtttctgaaatacttagggatttgagtgaatatcccttttataggtctccaaaatatcctggggttcctaggcctgccaggaagtgacactctttattcacccggaagaaaactatgtaagtgaaccaagtatgcaacacamcatggcgataatttttttccaagaggctttattgactccataaagtcaaccttagtttcttaaagtcgtcatatctgaagatacaacattccagttaaggccttcataatatatccagtgttt

SEQ ID NO: 823836 - DNA, 613 bp, Homo sapiens
tattttttgttgcattttcttaccacactctgaaatgcaaatgtcttgtcascaagtctagagtagttgttacttcttgctcactaggtccagtcagtctaatgttatcaatgaaatggaccagttgtgatatcttgtagaagagaaaggtgatcatgcctcttgcaaactagattataacagggctgtagagttgatatattctgagagaggacggtaaaggtatattgctggccttgcctgctgaaagcaaactgcttctgatggtcctcattaactaaagctatggagaaaaaaatatttaccagattaatagctacatagtaggtaccaggaaatgtgtgttaatttgcctgagcaataaaaccacatcttcaatagcagctgcaattgaagtcactgcctgcttaagcttaaaataattcactgtcattctctaagacccatctgtgctctatacaggctgaatggatgagttgaatgtggaggtggtagaaatcataacctctgcatctttcaaattctggtggtggcactgatttctttgagccctccaaggaatgtagcattgattttggattgctattttcctacacagaggcagttctagtgg

SEQ ID NO: 823837 - DNA, 573 bp, Homo sapiens
ctggggaagtaacatagaatgagtttgaggacctactgggcccactgtgagatggrtctgagctaaaatttcattgattaacctacctccataagcccctattctgactagagagccatagtggtgttttggatctcctggaatcagtgtcagttcagagcaggatcgagtggtccctgaactggttgttctttcttccccagtacacagttaccctggtaaaaggttttaggctctttgggaaaggcttggataaagatcaagagtatatatttttggtagtgtactgtttctttccatgggagaacccagccttccctgcattcaacgggctcacggtctgtaaactggctcaattctgggaatttattgagcagcagtaactctctgattttatgattcaagtaagactttcgttcacttgacctagaacttttctgcttatacagaacaagtaaggatttagtaggcttcttctctatttcacttctaggaccaccacaatcaagcagccaacaccataggtttgtatgagtcagactattctgattgctgctctgactctactgtcca

SEQ ID NO: 823838 - DNA, 573 bp, Homo sapiens
ctggggaagtaacatagaatgagtttgaggacctactgggcccactgtgagatggayctgagctaaaatttcattgattaacctacctccataagcccctattctgactagagagccatagtggtgttttggatctcctggaatcagtgtcagttcagagcaggatcgagtggtccctgaactggttgttctttcttccccagtacacagttaccctggtaaaaggttttaggctctttgggaaaggcttggataaagatcaagagtatatatttttggtagtgtactgtttctttccatgggagaacccagccttccctgcattcaacgggctcacggtctgtaaactggctcaattctgggaatttattgagcagcagtaactctctgattttatgattcaagtaagactttcgttcacttgacctagaacttttctgcttatacagaacaagtaaggatttagtaggcttcttctctatttcacttctaggaccaccacaatcaagcagccaacaccataggtttgtatgagtcagactattctgattgctgctctgactctactgtcca

SEQ ID NO: 823839 - DNA, 595 bp, Homo sapiens
gagagtaaataagattgatagactgatagctggactaataaaaaagagagaagatccaaataaacacaatcagaaatgacaaatgggacattaccaccaactgcaacagaaatacaaaaacctctcagagactactataaacacttttatgcaaacaatctagaaaacctagatgaaataaaaaaaaattctgaaaatatacaagctcccaagattgaaccaggaagaaactgaattcctgaatggacaaaaatgagttctggaattgattctgtaatcaaaagcctaccaacaacaaaaggcccaggaccagacagaatcactactaaattttaccagatgtatgaagagaagctggtattattcctactaaaactagtccaaaaaattgagaaggagggattctttcctaactcattctatgaggccagcatcatcctgataccaagacctggcagagacacaacaaaaaaagaaaacttgggccagtatttttgataaatatagacrcaaaaatcctcaacaaaatactattttatcacatatgcaagttatagcatccacacccagagtcagatactgaacagtttcatta

SEQ ID NO: 823840 - DNA, 326 bp, Homo sapiens
acaacaaaaaaacttcaggccaatatctctgatgaatatcgatgtaaaaatcctcaataaaatactggcaaaccaaatccagcagcacatcaaaacacgtatcaaccacratcaagttggcttcatccctgggatgcaaggctggttcaacatacacaaatcaataaacataatttatcacataaacagaactaaagacaaaaaccacacaattatttcaatacacagagaaaaggcctttgataaaattcaacatctcttcatgttaaaaactctcagtaaactagatattgaaggaatgtatctcaaaataataagagccattt

SEQ ID NO: 823841 - DNA, 510 bp, Homo sapiens
gtggttataaaaggccagttcaagggatcctcatgaaagatagaactgtttggtgtcttgactgtcaagtggaaacatgaacctamaatggtgataaaattgtatagaactaaatacacacacacacacacaaatgcatacaagtaaaacaggagaaactgaataagatgggtcgatcttgtcaatgccaatatcttggttgtgatactgtactacagttcttcaaactgtttccactggaaaaaaattgggtgaagagtacatgggatcattctgtattatttcttataactgtatataaacctagaattacctcaaaattaaaagtttaattttaaaaaggtaattatacaggcacgagaacgtataaagaggtacaaatgttcccaccattaaagagtttatcatggaggcagggttaggaagccagtggttttagagatggcaaagttttgttgatcacattcaggagacggtgtaattgtaccagatgaagtctgtactcatata

SEQ ID NO: 823842 - DNA, 434 bp, Homo sapiens
ttataaatatgaagatatgatatacacttataaatatgaaatgtccccttatcattgtattggggtctatgtttatatcctcttgcggacttgaaccttttaacgttatataatgagctgcaaatatatgttgtaaatatgtgtgcacccacactggagcacccagatatacaaggcaaatattaaagctaaagagagacatagaccccaatacaatgataccaggacacttcaacaccctactttcagcattggacacatcaaccagacagaaaattgacaaagaaacattggacttaacctgcgctacagaccaaatgaacctaatagatatttacagaacattttatgcaatagctgcagaatatgcaytcttctcttcagcccatggatcattctcaagcatagaccttatgataggccacaaaagaagt

SEQ ID NO: 823843 - DNA, 568 bp, Homo sapiens
catcttaaagaactatgaaagccagagtaaaccaaacccaaaatcagtagaagaaaagaaataataaagatcagagcagaaataaatgaaatttaaacaaagaaaacaatacaaaaatcaatgaaatgaaaagttgggtttttgaaaagataaacaaaatagacaaagctttagccatactaagaaagaaagagagaatacccaaataaataatactgaagatgaaaaaggatacattataactgatactgtagaacttcaaaagattatcagaggctattaggaacaactataagccagtacattggaaaatctagaagaaatggataaattcctagacataaaaaacctaccaagattgaacaatgaagaaatccaaaacctgcacagaccaataaaaagtaatgagatcaaaactgaaacaagaaaaatctccagtaaagaaaagcccaggacctgatggcttcactgctgagttgtaccaaatatttaaagaacaactaatrtcaatcctactgaaactactccaaaaaataggagagaagggaaaacttcctaactcattcta

SEQ ID NO: 823844 - DNA, 485 bp, Homo sapiens
gggtcttgcttggtttcccaggctggtgtcaaactcctggcttcaaccaatcctcctgcctcagcttcccagaaagtgttggaattacaagtgtgagccaccatgcctggccaaatgcctgatgtttcaagtaccatacatgccagtgatctcaaatacagatccctagcccagggctcaccctctgtgttacagagtcatgtatccagatgctaattagcaccaccatttaggcatctcaaaggtacttacaattagacatgttcaaaattcatgcttttctccccaagaaaaatgaggagaagaagaagtgtgttagtctgttttgcattgcttataaaggaatacccragactgggtaatttacaaagaaaggaggtttatttgggtcacagttctgcaggctctacaagcgtggcaccagaatctgctcagcttctggtgaggtctcaggaaggttttactcagagtagaaggtggagggg

SEQ ID NO: 823845 - DNA, 544 bp, Homo sapiens
ctgaaaccaaatattgctgctgttctgcctttgctatagcaggacaaatcagaaagtgctcaagaacaatacgcaaattacaggcattcaaagacacttgatgtggattcaggctgagccttctggagaacatccccaaactatgttttctgtgtttcacagaaaccacggtttctcttccccttcccctaactccagtttcaccaaaggcagcatggtatgacgatagaagaagtatgggttttagggggtcactggctgaggttcaagtctcagcaactttgttgctaactatggtatcctgaacaagctatttggtttcagagtctcaatttcatctggtgtaaatagggccaggctagttattcccaagcatttcaaagtcattatgaacattaacagtagttaccattgggaaagcctctagtawagctgctaggatatgaaaggtgttaaggaagcatcctttgacttctctgcactatagatttttattattattatttatgtagttggtctataaagaaagagaaaagtctcctag

SEQ ID NO: 823846 - DNA, 398 bp, Homo sapiens
agattaatttcagaatttcttgtaacataaataaaaaatagagcatataatattgtagtggggaagaatatttctttgtaggagaagaaatgaagtagtcaggttttgagagatggtagggttcttgccctgatcctgagggactttgaattttaatcctcaggtcagtttgctgggctgtgttgtgtttgtgacgtagtgtttggagcaaggatgtctcgctgccctgagaacccctagctttctcctgagtattccagggacaaactgatacaggaggggaacttctctctaacgattcagttttgctcctgctaaaactcaaattgggcctgtttttaaatcagaagwtctgttctattggccagaagccttagtagcaatataatgtgagccac

SEQ ID NO: 823847 - DNA, 550 bp, Homo sapiens
atccccttaggtcctagcttctagggggagggggaaatcattacttcttcatctccagcagctggagaaactggaaagkgattagggcaggaccagaagagcagaagaacattcctcggactccaggcacaggacactttaagagtccttatgaaaggtctagttcctatatctgggctgccctgagggagggtagctatggggagatctggggaagaaatgaagcccggggagctcctcaaatccagagatgaccaaactctcctgcttgagcagagagttcccctgcaataaggtagacttgcatttctttgagccaaagaaactgagtggaataagaggcttgctcagtgctattttcatggaaagctgaactctgagaccagattggagggtgggtttccatcaaacgagaggaccctgcacccaccacagattggccgctcccaggctggtcgcagtcattaactggaatcctattggctggtttaggggtgttgctaaggaagcctttaagtgtggggtgagaggtcggcagagtctggtaatg

SEQ ID NO: 823848 - DNA, 604 bp, Homo sapiens
acaaggtcaataaggacattagcactagttaataattactgtcaagttaaggtcagtgtcaccgatgattttaaatgtaggaataaatattgtatcaatcatatggaaggcctttaaatttacttcccttttactcccttttattctgacagccatccaatccccagtcaacatgagaatcacagatacacctgtacattacagctggaaatgtgtctcatcaataacaaacaataacagctaatatttattgagccctaagtttcacatgaattatcacatttaattcttataataatcttgtgaggtagatgaaaacaatcacaatactatcaccaataataaaaaaattacactattaaagccagacactacagatgacctttgaacaacatggatttgaactgtgagaatccaggtacatgtgaattttaaaaaataaatgtactggaaaatattttggagatttgtgataatttaaaaaaacttgtagatgaactttgtaacctagaaatattgaaaaaaataaaaaggtatgtcacaaatgyataaaatatgtttagatactagtctattttatcatttattaccataaaatatacac

SEQ ID NO: 823849 - DNA, 499 bp, Homo sapiens
aattagcgacaagatttgaaatcacaatttaggagtcatgcagcctctggctccaagagtccgaacctccccaaattgctcctgggggtaacatcactaatgtaaaacctaagatcastgcttgagatgttttgctgaccctgcactggatgaatcagctgacaccactcagattgataatctggcccaatcagttctgccatcacacccaggaacagaagacattatgaaaacctaacttcggccccctatgattcaatctccaacctgaccaatcagcactccccacttcccaagcccctatctaccaaattatgtttaaaaactctgatccccaaatggggaaactgatttgagcaataataaaactccggtctcgcgcacagccagctctgagtgaattactctttatccattgcaattcccgtgtcttcataaatcagttctgtctaggcagcaggcaaggaaaacccattgggcagttatagatcaatctcaa

SEQ ID NO: 823850 - DNA, 499 bp, Homo sapiens
aattagcgacaagatttgaaatcacaatttaggagtcatgcagcctctggctccaagagtccgaacctccccaaattgctcctgggggtaacatcactaatgtaaaacctaagatcactgcttgagatgttttgctgaccctgcactggatgaatcagctgacaccactcagattgataatctggcccaatcagttctgccatcacacccaggaacagaagacattatgaaaacctaacttcggccccctatgattcaatctccaacctgaccaatcagcactccccacttcccaagcccctatctaccaaattatgtttaaaaactctgatccccaaatggggaaactgatttgagcaataataaaactccggtctcgcgcacagccagctctgagtgaattactctttatccattgcaattcccstgtcttcataaatcagttctgtctaggcagcaggcaaggaaaacccattgggcagttatagatcaatctcaa

SEQ ID NO: 823851 - DNA, 626 bp, Homo sapiens
tcaaaggcccccaactccaaatgtcatttcatttgggattaaggtttcaacacatgaattttaaagagacgcagaaattcggtccatagcagtaacaaacacaaatagaaatacaatttttaaagaagcaaatatcttctgaatatgaacaattgcagtaacaacaatacaaatataattttccatcattttgctccaggaaggttctaagcacctttcatggattatctcatttaattatcccaagaacagcaatggggatgcatctcttaataaacccaattcatatgcaggtgggggctgaggtacttagaggttaagtaactggcccaaggtcataaggctagtaaattatgggaagcggagtagtgctaatctaattccacacttattggacaagctatatcgtcctgcaccaacatgttatgtctgtatcatgaacatactgctctcatttattgaatcctaactgtaagctgggcactggtaagtacttattaagtattatttgatttaacactaagaacaaatctgtgagaacagcactactttcatccccattttacagatgataaaartgaatatcagagcagttaaatgatttgcacagttccaaagcaggaaac

SEQ ID NO: 823852 - DNA, 573 bp, Homo sapiens
atagtttgattcctactaggtcgatattgtgtctcagaattaaattgtccattaatttttattgtattctgtagcatcttccwcctaatagtgatgcaaatgaattatgggtagatgaagtaattctaattttcctatatacttataattctcttgggcttccatgagcagaatatgtaagaaaatacatttgagatactgttatcagaaaactggggataggagagtacacatgaaaaaatgacatgtacatagtattcaaggatgccttcattcattcattaaacagacatttattgggtgccaaatctgagacagaccccttgctggtttgcatttaaatatatcgtgggtatttaatgaggaaaaaggtatgaaattgccaaaacaacttagagtaagtaacatcaagctgccctcatggcctttctatacttccgcatcttggtggaggaagtattagtgataggggctgtgaagggctgtggtatgggcgtgcctgctccaagcccccagattatctggcagaaaagaacgaagagcaagaattaaaacccctccccaagggatcca

SEQ ID NO: 823853 - DNA, 615 bp, Homo sapiens
gagacatagaaggcaatctttgttgtttcttcctgctctataatccaataaatttgttaattcttagcctctkctagtaattaggaaaacaaatgaaactatgtcattcatatgatgaaaagtacaaaagaagacgattaggatgggaccttgacatcctggaattagagaataaaggtgtttatgaaagctatgttgggaatggtagcaggagaagactctttattcaaagagagagaggaagcagcacattggtttggtatctattagtttttgcacttagtgtaaatcacacttaggattcattctgtttaaacaccctatgtattgcagagtcataccacatcacacggcctgagacctttctcctatattattttgggacttatagaagtcttaaaggcaaggcagcagagaataaatggctcaggacttgaaggcagttttatgatatgctacctgaacagggcagcagttgagtttacttttttttttttttttttggagacggattttctctcttgttgcccaggctggagtacaatggcacaatcttggctcaccacaaacctctgccctctgggttcaagcaattctcctgcctcagcctcctga

SEQ ID NO: 823854 - DNA, 576 bp, Homo sapiens
ttacaacaaaaaacttctactctgtgaaagatactgttaaaagaatgaaaagacaagtctatagacattttaaaaatatttgcaaagcacttatgtgattaaaaataaaacatattcgaattatacaaagaactcttaaaaatcaataataaaaaaacaaacaacccaattaaaaataggcaaaacattcgaatagatgcctcatcaaaaaatatagagatggcaaataatcatatgaaaagatgtgcagtttcatatgtcattagggaataataaaataaacaataatgaactactcttaaatacctattaagatagctaaaatccaaaagactgacaataccaaatgctagtcagaatggggagtaacatgaactttcattttttgctgatagcaatgcataatgttgtaggcactttgaaagacaatttgccggtatgttacaaagrtaaaaattgtctcattatatggtccagcaattgcacacctacgtatttatccaattaaaatttatgtcaacagaaaaatctgcatataaaatcttatagcagctttaagtgtaattgccctaaaac

SEQ ID NO: 823855 - DNA, 626 bp, Homo sapiens
aaaattatattactggaaacaatacgcaataaaatattaaggacctcagtctcattatggtcttttataatttgagaaataaagtgtctattatagtgtaatgccattggcatccctaatacagtcawgagaaggcacttttcagagtcacaagtaaataaatcaatgcttataaatagacaaactgtttacaatgagatctgtgtacttcacataaaaagaaacaataaaggaagataaaaactgatagacactatttagatcattttatcttcttacaagttttaaagaagtaggtggaagcaatctatctttctctcagagatacccataattcataattttgtatcaccaaaaactggaagaaaggtaatacagtttctattcagcatttcaattatttcatcataaaaggaagtcacattttttgtgtcaaaagcgatgggattcatttccaatttctcacctactttccagatttctccatgttcctgtatctgttgatagaggaaaagacagtctccaaatctcctgggaataattttgagccatcataatattctttttagaggggatgcataaagtagacattaaaaatcaagaacccagatcatatcagtgagaag

SEQ ID NO: 823856 - DNA, 325 bp, Homo sapiens
cattttattgttggagttttgtgaagctttcaattcttatattcctttttgtacagttttggccaattttgaagaagtagttattctttgcagggagttgaccatgagagccaaagtacagtaaattcatgaacatttttttgcataaaggtgaactcttcttgctttgagcagtgaaaagtctgcataaaggtawgaaaattccaaatgttaattttctcttattggctgttggttagatagttggttttagagaatactttttattgattttaattataaaagtaaaaacataacaaaaaatagaaaaaaactgacaaaaaaa

SEQ ID NO: 823857 - DNA, 590 bp, Homo sapiens
tgcctttgagaggtagagtactgtagaaatctacacttattaagagcacagtattttactcttttccctttyctatgacatctcttcaccagtccccttctttctatgtgtgtgtgtgtgtgtgtgtgtgtgtctgtgtgtgtgtgtgcgtgtgtttattttattgtgtctatttcagtcagctaggcttcaaatgtaatcgtctatcacatgttcaatttatttgaggcgtgaagttttcccaggacactaaagcaagaggcaccttaggaacggaagcagagtaactaatgcagagttctcctcagacatcagaaataattatgacatcgtagttttatgtcaaactatataataagaaaaaaattaaaatctttttctggactgtcctgggtagtgttaacaacatgacagctattccctctgtacacacttagctgagcagaactagttgaagcattaattgttgttatcacagcagcatggttaacatgctcataaatattatcttggcaacagattaaaaataaaaaggccagaaattatgttgtaaaagtattaacaattttaataagcctaaaggtggtcaa

SEQ ID NO: 823858 - DNA, 552 bp, Homo sapiens
attaatctctcactattcccttgtaatgcmtaaatgccccacacccctttgggcaaaaatatatgtccatgatgggtgcctgattaatattcacccaacctctaaatttatctttccctctaatattgtttttcctgggaaaactacataaatctttaaccaataacttcaacctggacagtcctacttcaggagtttaaaaatagcccacatgtattcaaacaaaccctagcaagaaatctaaccaagtaattgcttgaggggggataacagtgtgtagataacctccttatctgttccctgttcaaaggacttgattggcaacatgtagtacaaaccataacttcctaacagaaggaaaatgacttttgtctaattcaaactttatgaaagtaaagaggtagttttaataaggaaggttataaagaaaagagatttttgtataagaaaagatctttcatggtaaattcttgtcctaaagtaaaataactggttgtttaaaaaagaaagatgtttaggacaggttataaagtccatgcatgtcgtagatgg

SEQ ID NO: 823859 - DNA, 537 bp, Homo sapiens
gtgcatgtgtgtgtttcctatcatttaattgttgagtatttcctttactttctgtcattacacaatgctcyaagtttatcttctatagtttttaaaatgtcctaaaatccattatttcccaggtaaatctgctcctgtttattggataaaggtactaaaaaccagaccaagtttattggatctggtttctgggtgttcttattgttattgatgtatccttttttcaaggtcttctcagctagcagagcaataggggtatgcgtgtatgctagcccatgtgtgtacaaatatttatcaatctaaggttactcatttatcatctctatctatatgaagtaattattagttcatacttttgtttctaagtaatcaattacaacaatgataaatctagttatttttatttgcttgttctccagaagtaagaaacaaggctatcaacatctgacattcatttacttgtttattctagcacgcatttatactagtttcagaattgttagtccataccttatcaatcaaaatacacctgacatg

SEQ ID NO: 823860 - DNA, 624 bp, Homo sapiens
cctgttgggtaatatgagcaaatggcagctgctacctccaaaagaaaatattctcacccctttatattagttaagggaccaattattaatctctcactattcccttgtaatgcctaaatgccccacacccctttgggcaaaaatatatgtccatgatgggtgcctgattaatattcacccaacctctaaatttatctttccctctaatattgtttttcctgggaaaactacataaatctttaaccaataacttcaacctggacagtcctacttcaggagtttaaaaatagcccacatgtattcaaacaaaccctagcaagaaatctaaccaagtaattgcttgaggggggataacagtgtgtagataacctccttatctgttccctgttcaaaggacttgattggcaacatgtagtacaaaccataacttcctaacagaaggaaaatgacttttgtctaattcaaactttatgaaagtaaagaggtagttttaataaggaaggttataaagaaaagagatttttgtataagaaaagatcttkcatggtaaattcttgtcctaaagtaaaataactggttgtttaaaaaagaaagatgtttaggacaggttataaagtccatgca

SEQ ID NO: 823861 - DNA, 616 bp, Homo sapiens
tctattttcttctgtatgtcaagccatactattacaatattttataattaacacatattttacattttattgaggtgtgatttatatrttataaaattgacctcttgtaagtgtattgttcaatgatttttggcaaatgtttgaagttgtatgggcatcaccaaaatccagctttagaacattcccacaactcctgaaagttcctttatccaattacagttgatcctcactcccaccctagtcctaggtaaccacttatattaattttataattagaaaagtattttaaaaaacataccagttttatcaagattcctttgttcagcataagtagaaatttgggaccatatttcattctggagctttttcaggaactttgtactgtaagtttctaagtctgcataggacttcagcgtggaaattgtctgttctggaggataagacactatttcttctaactgggtattgttagccccttggatgctcaaggcaaacacgtttacatcctccagtcgaaggttcagcgcagcatcatgcacctcatcatctgatggtctgtgggtgaccagaactgcaatctgaggcactccttgtgctcttctgctgccatatgact

SEQ ID NO: 823862 - DNA, 634 bp, Homo sapiens
acaaaccaggtacatttccaccttgcagcttttttctttttcttttttttttttttttttttttttgagatggactctcactcttgttgcccaggctggagtgcaatgatacattctyggctcactgcaacatctgcctcccaggttcaagcaattctcctgtctcagcctcctgggtagctgggattacaggtgcccaccactatggccagctaacttttgtacttttagtagagacagggtttcaccatgttggccaggctggtctcgaactcctgacctcgtgatctgcccacctcgacctcctaaagtgctgggtttacaggcgtgacgaccatgcctggccacagcctttctttgtgttagctgttgcctctgcttggaatgaccttgtccctgatatctacatagcctttcaaggacaagcttttcctttgcctccttcaaatctttgctcaagtgtcagcccctcattggcaagccctggccatcttcttaatacttgcccaaacctccccgctggcactccaggtacccttaccttgctaaactttcatttttatttcatagtgctttcaccttataacacactggataatttacttatttactgtggtactatctctaagatccc

SEQ ID NO: 823863 - DNA, 564 bp, Homo sapiens
tctcttaggaggtgttattgggaggatcaaatgaggtatctaaggaaaagcaaatagtggctgacacacagtaagggcccaataaacaactagtatggctatattaaacacttcatttgacaggcctatgattaaacattaagagtaacgtatattgtaataacatagctatcaaagaaaggataaagcaaagttagctcactaagcaataaagagaaaatcacaaaatgcaagagaaacaaaagtctgctatcccaaaataatggtcaagaggaatttcacatgaattggggcataaagaacatgtaatcatgcataaacttttcagatatattcacatggaagtattaaaactgaataactagcagaatgactacagatttacaaaaatgtatctctgaatgaatgaatacctagctatacagctccttgaagacttgttttggaatatgatcttaataccctctggggatggttracagggctgtggaaatatggaaaggggccagtgagaacatatcctctgagaatagtgattcatggtgattttcttttttttttttt

SEQ ID NO: 823864 - DNA, 629 bp, Homo sapiens
tctgtctagttttaatgtgaagatatttccttttccaccagaggcctcaaagtgctccaaatatacagttgcagattctaccaaaagagtgtttgaaaactgctctatcgaaagaaaggttcaactctgtgagttgaatgcatacatcacaaagaagtttcggagaatgcttctgtctagttttttatgtgaagatatttccttttaaaccttaggcctcaaagtgcaccaaatatccacttgcagattgtccaaaaagagtgtttcaaagctgctctatcaaaagaaaggttcaactctgtgagttgaatgtacacatccaaagaagtttacgagaattcttgtgtctagtttttatgtgaagatattttcttttccaccataggcctccaagtgctccaaatatccacttgcagatactacaaaaagattgtttcaaaactgctctaccaaaagaaaggttcaactgtgtgagttgaaggcacacatcacaaatatatttctgagaattcttctgtctagtgtttctgtgaaaatatttccttttccaccataggcctcaaagcgatacaaatatmcacttgcagattatacaaaaagagtgtttcaaaactgctcctttaaaagaa

SEQ ID NO: 823865 - DNA, 525 bp, Homo sapiens
acaaacaagcaactgaaaattcttccgtcttgcattatatgaagcaatcccgtttccaacgawatcctccaagaggtccaaatatccacttgcagacattacaaacagagtgtttccaaactgctctatgaaaagaaaggttaaacaatgtgagttgaacgcacacatcacaaagtagtttctgagaataattctgtctagtttttatttgaagatatttccctttctactgttggaataaaatcgcttgaagtctccacttgcaaattccgcaaaaagagtgtttcaaatctgctctgtctaaagggacgttccactctgtcagttgaatgcacacaacacaaagaatttactgagaatccttccgtgtagcattatatgaaaaaatcccgtttccagggaaggtctcaaagaggtacaaatatccacttgcagactttacaaacagtgtgtttccaaactgctctatgaaaagaaaggttaaactctgtgagttgaatgcacacatcacaaagtggtttctgt

SEQ ID NO: 823866 - DNA, 525 bp, Homo sapiens
acaaacaagcaactgaaaattcttccgtcttgcattatatgaagcaatcccgtttccaacgatatcctccaagaggtmcaaatatccacttgcagacattacaaacagagtgtttccaaactgctctatgaaaagaaaggttaaacaatgtgagttgaacgcacacatcacaaagtagtttctgagaataattctgtctagtttttatttgaagatatttccctttctactgttggaataaaatcgcttgaagtctccacttgcaaattccgcaaaaagagtgtttcaaatctgctctgtctaaagggacgttccactctgtcagttgaatgcacacaacacaaagaatttactgagaatccttccgtgtagcattatatgaaaaaatcccgtttccagggaaggtctcaaagaggtacaaatatccacttgcagactttacaaacagtgtgtttccaaactgctctatgaaaagaaaggttaaactctgtgagttgaatgcacacatcacaaagtggtttctgt

SEQ ID NO: 823867 - DNA, 525 bp, Homo sapiens
acaaacaagcaactgaaaattcttccgtcttgcattatatgaagcaatcccgtttccaacgatatcctccaagaggtccaaatatccacttgcrgacattacaaacagagtgtttccaaactgctctatgaaaagaaaggttaaacaatgtgagttgaacgcacacatcacaaagtagtttctgagaataattctgtctagtttttatttgaagatatttccctttctactgttggaataaaatcgcttgaagtctccacttgcaaattccgcaaaaagagtgtttcaaatctgctctgtctaaagggacgttccactctgtcagttgaatgcacacaacacaaagaatttactgagaatccttccgtgtagcattatatgaaaaaatcccgtttccagggaaggtctcaaagaggtacaaatatccacttgcagactttacaaacagtgtgtttccaaactgctctatgaaaagaaaggttaaactctgtgagttgaatgcacacatcacaaagtggtttctgt

SEQ ID NO: 823868 - DNA, 455 bp, Homo sapiens
cacacaacacaaagaagttaatgagaattcttctgtctagcatkaaatgaagaaatcccgtttccaacgaatgcctcaaaactgtccatatatccacttgcagattttacagtgtgtttctaaactgctctatgaaaagaaaggtaaactatgtgagttgaacgcacacatcacaaagaattttctgagaatgattctgtctggtttttatttgaagatatttccctttctactgttggcatcaaatggctagaaatctccacttggaaattccgcaaaaagagtgtttcaaatctgctctgtctaaagggacgttccactctgtgagttgaatgcacacaacacaaagaatttactgagaattcttccgtctagcattcaatgaagaaatcccgtttccaacgaaggcctcaaacaggtccatatatccaattgcagactttacaaacagtgtg

SEQ ID NO: 823869 - DNA, 574 bp, Homo sapiens
cccgtttccaacgaatgcctcaaaactgtccatatatccacttgcagaytttacagtgtgtttctaaactgctctatgaaaagaaaggtaaactatgtgagttgaacgcacacatcacaaagaattttctgagaatgattctgtctggtttttatttgaagatatttccctttctactgttggcatcaaatggctagaaatctccacttggaaattccgcaaaaagagtgtttcaaatctgctctgtctaaagggacgttccactctgtgagttgaatgcacacaacacaaagaatttactgagaattcttccgtctagcattcaatgaagaaatcccgtttccaacgaaggcctcaaacaggtccatatatccaattgcagactttacaaacagtgtgtttccaaactcctctatgaaaagaaaggttaaactctgtgagttgaacgcacacatcacaaagcactttctgagaatgattctgtctagtttttatttgcagatatttccttttctattgttggcaacaaatcgcttgaaatctccacttgcaaattccacaaaaagagtgtttc

SEQ ID NO: 823870 - DNA, 521 bp, Homo sapiens
ctagcattaaatgaagaaatcccgtttccaacgaatgcctcaaaactgtccatatatccacttgcagattttacagtgtgtttcyaaactgctctatgaaaagaaaggtaaactatgtgagttgaacgcacacatcacaaagaattttctgagaatgattctgtctggtttttatttgaagatatttccctttctactgttggcatcaaatggctagaaatctccacttggaaattccgcaaaaagagtgtttcaaatctgctctgtctaaagggacgttccactctgtgagttgaatgcacacaacacaaagaatttactgagaattcttccgtctagcattcaatgaagaaatcccgtttccaacgaaggcctcaaacaggtccatatatccaattgcagactttacaaacagtgtgtttccaaactcctctatgaaaagaaaggttaaactctgtgagttgaacgcacacatcacaaagcactttctgagaatgattctgtctagtttttatttgcag

SEQ ID NO: 823871 - DNA, 324 bp, Homo sapiens
aagaaaggtaaactatgtgagttgaacgcacacatcacaaagaattttctgagaatgattctgtctggtttttatttgaagatrtttccctttctactgttggcatcaaatggctagaaatctccacttggaaattccgcaaaaagagtgtttcaaatctgctctgtctaaagggacgttccactctgtgagttgaatgcacacaacacaaagaatttactgagaattcttccgtctagcattcaatgaagaaatcccgtttccaacgaaggcctcaaacaggtccatatatccaattgcagactttacaaacagtgtgtttcc

SEQ ID NO: 823872 - DNA, 455 bp, Homo sapiens
cacacaacacaaagaagttaatgagaattcttctgtctagcattaaatgaagaaatcccgtttccaacgaatgcctcaaaactgtccatatatccacttgcagattttacagtgtgtttctaaactgctctatgaaaagaaaggtaaactatgtgagttgaacgcacacatcacaaagaattttctgagaatgattctgtctggtttttatttgaagatatttccctttctactgttggcatcaaatggctagaaatctccacttgsaaattccgcaaaaagagtgtttcaaatctgctctgtctaaagggacgttccactctgtgagttgaatgcacacaacacaaagaatttactgagaattcttccgtctagcattcaatgaagaaatcccgtttccaacgaaggcctcaaacaggtccatatatccaattgcagactttacaaacagtgtg

SEQ ID NO: 823873 - DNA, 455 bp, Homo sapiens
cacacaacacaaagaagttaatgagaattcttctgtctagcattaaatgaagaaatcccgtttccaacgaatgcctcaaaactgtccatatatccacttgcagattttacagtgtgtttctaaactgctctatgaaaagaaaggtaaactatgtgagttgaacgcacacatcacaaagaattttctgagaatgattctgtctggtttttatttgaagatatttccctttctactgttggcatcaaatggctagaaatctccacttggaaattccgcaaaaagagtgtttcaaatctgctctgtctaaagggacgttccactctgtgagttgartgcacacaacacaaagaatttactgagaattcttccgtctagcattcaatgaagaaatcccgtttccaacgaaggcctcaaacaggtccatatatccaattgcagactttacaaacagtgtg

SEQ ID NO: 823874 - DNA, 583 bp, Homo sapiens
cttgcaaattccacaaaaagagtgtttcaaatctgctctgtctaaagggacgttccactctgtcagttgaatacacacaacacaaagaagttaatgagaattcttctgtctagcattaaatgaagaaatcccgtttccaacgaatgcctcaaaactgtccatatatccacttgcagattttacagtgtgtttctaaactgctctatgaaaagaaaggtaaactatgtgagttgaacgcacacatcacaaagaattttctgagaatgattctgtctggtttttatttgaagatatttccctttctactgttggcatcaaatggctagaaatctccacttggaaattccgcaaaaagagtgtttcaaatctgctctgtctaaagggacgttccactctgtgagttgaatgcacacaacacaaagaatttactgagaattcttccgtctagcattcartgaagaaatcccgtttccaacgaaggcctcaaacaggtccatatatccaattgcagactttacaaacagtgtgtttccaaactcctctatgaaaagaaaggttaaactctgtgagttgaacgcacaca

SEQ ID NO: 823875 - DNA, 521 bp, Homo sapiens
ctagcattaaatgaagaaatcccgtttccaacgaatgcctcaaaactgtccatatatccacttgcagattttacagtgtgtttctaaactgctctatgaaaagaaaggtaaactatgtgagttgaacgcacacatcacaaagaattttctgagaatgattctgtctggtttttatttgaagatatttccctttctactgttggcatcaaatggctagaaatctccacttggaaattccgcaaaaagagtgtttcaaatctgctctgtctaaagggacgttccactctgtgagttgaatgcacacaacacaaagaatttactgagaattcttccgtctagcattcaatgaagaaatcccgtttccaacgaaggcctcaaacaggtccatatatccamttgcagactttacaaacagtgtgtttccaaactcctctatgaaaagaaaggttaaactctgtgagttgaacgcacacatcacaaagcactttctgagaatgattctgtctagtttttatttgcag

SEQ ID NO: 823876 - DNA, 331 bp, Homo sapiens
ctgtctggtttttatttgaagatatttccctttctactgttggcatcaaatggctagaaatctccacttggaaattccgcaaaaagagtgtttcaaatctgctctgtctaaagggacgttccactctgtgagttgaatgcacacaacacaaagaatttactgagaattcttccgtctagcattcaatgaagaaatcccgtttccaacgaaggcctcaaacaggtccatatatccaattgcagastttacaaacagtgtgtttccaaactcctctatgaaaagaaaggttaaactctgtgagttgaacgcacacatcacaaagcactttctg

SEQ ID NO: 823877 - DNA, 568 bp, Homo sapiens
aatacacacaacacaaagaagttaatgagaattcttctgtctagcattaaatgaagaaatcccgtttccaacgaatgcctcaaaactgtccatatatccacttgcagattttacagtgtgtttctaaactgctctatgaaaagaaaggtaaactatgtgagttgaacgcacacatcacaaagaattttctgagaatgattctgtctggtttttatttgaagatatttccctttctactgttggcatcaaatggctagaaatctccacttggaaattccgcaaaaagagtgtttcaaatctgctctgtctaaagggacgttccactctgtgagttgaatgcacacaacacaaagaatttactgagaattcttccgtctagcattcaatgaagaaatcccgtttccaacgaaggcctcaaacaggtccatatatccaattgcagactttacaaacagtgtgtttccaaactcctctatgaaaagaaaggttaaactctgtgagtkgaacgcacacatcacaaagcactttctgagaatgattctgtctagtttttatttgcagatatttc

SEQ ID NO: 823878 - DNA, 524 bp, Homo sapiens
ttacagtgtgtttctaaactgctctatgaaaagaaaggtaaactatgtgagttgaacgcacacatcacaaagaattttctgagaatgattctgtctggtttttatttgaagatatttccctttctactgttggcatcaaatggctagaaatctccacttggaaattccgcaaaaagagtgtttcaaatctgctctgtctaaagggacgttccactctgtgagttgaatgcacacaacacaaagaatttactgagaattcttccgtctagcattcaatgaagaaatcccgtttccaacgaaggcctcaaacaggtccatatatccaattgcagactttacaaacagtgtgtttccaaactcctctatgaaaagaaaggttaaactctgtgagttgaacgcacacatcacaaagcactttctgagaatgattctgtctrgtttttatttgcagatatttccttttctattgttggcaacaaatcgcttgaaatctccacttgcaaattccacaaaaagagtgtttc

SEQ ID NO: 823879 - DNA, 505 bp, Homo sapiens
agattttacagtgtgtttctaaactgctctatgaaaagaaaggtaaactatgtgagttgaacgcacacatcacaaagaattttctgagaatgattctgtctggtttttatttgaagatatttccctttctactgttggcatcaaatggctagaaatctccacttggaaattccgcaaaaagagtgtttcaaatctgctctgtctaaagggacgttccactctgtgagttgaatgcacacaacacaaagaatttactgagaattcttccgtctagcattcaatgaagaaatcccgtttccaacgaaggcctcaaacaggtccatatatccaattgcagactttacaaacagtgtgtttccaaactcctctatgaaaagaaaggttaaactctgtgagttgaacgcacacatcacaaagcactttctgagaatgattctgtctagtttttatttgcagatatttccttttctaytgttggcaacaaatcgcttgaaatctccacttg

SEQ ID NO: 823880 - DNA, 608 bp, Homo sapiens
tttccaacgaatgcctcaaaactgtccatatatccacttgcagattttacagtgtgtttctaaactgctctatgaaaagaaaggtaaactatgtgagttgaacgcacacatcacaaagaattttctgagaatgattctgtctggtttttatttgaagatatttccctttctactgttggcatcaaatggctagaaatctccacttggaaattccgcaaaaagagtgtttcaaatctgctctgtctaaagggacgttccactctgtgagttgaatgcacacaacacaaagaatttactgagaattcttccgtctagcattcaatgaagaaatcccgtttccaacgaaggcctcaaacaggtccatatatccaattgcagactttacaaacagtgtgtttccaaactcctctatgaaaagaaaggttaaactctgtgagttgaacgcacacatcacaaagcactttctgagaatgattctgtctagtttttatttgcagatatttccttttctattgttggcaacaaatcgcttraaatctccacttgcaaattccacaaaaagagtgtttcaaatctgctctgtgtaaagggacgttccagtttgtgag

SEQ ID NO: 823881 - DNA, 524 bp, Homo sapiens
ttacagtgtgtttctaaactgctctatgaaaagaaaggtaaactatgtgagttgaacgcacacatcacaaagaattttctgagaatgattctgtctggtttttatttgaagatatttccctttctactgttggcatcaaatggctagaaatctccacttggaaattccgcaaaaagagtgtttcaaatctgctctgtctaaagggacgttccactctgtgagttgaatgcacacaacacaaagaatttactgagaattcttccgtctagcattcaatgaagaaatcccgtttccaacgaaggcctcaaacaggtccatatatccaattgcagactttacaaacagtgtgtttccaaactcctctatgaaaagaaaggttaaactctgtgagttgaacgcacacatcacaaagcactttctgagaatgattctgtctagtttttatttgcagatatttccttttctattgttggcaacaaatcgcttgaaatctccacytgcaaattccacaaaaagagtgtttc

SEQ ID NO: 823882 - DNA, 592 bp, Homo sapiens
tgagttgaacgcacacatcacaaagaattttctgaggatgattctgtctagtttttatttgaagatatttccctttctactgttggcatcaaatggctagcaatctccacttgcaaattccgcaaaawgagtgtttcaaatctgctctgtctaaatggacgttccactctgggagttgaatgcacacaacacaaagaatttgctgagaattcttccgtctagcattcaatgaagaaatcccgtttccaacgaaggcctcaaacaggtccatatttccacttgcagactttacaaacagtgtgtttccaaactcctctatgaaaagaaaggttaaactctgtgagttgaacgcacacatcacaaagcactttctgagaatgattctgtctggttattatacgaagatatttccttttctgcaattgtcctcaaatcgcttgaaatctccacctgaaaatgccacagcaagagtgtttcaaatctgctctctctaaagcaaggttcaactctgtgagttgaatacacacaacacaaaaaagttcctgagaactcttcttagtctagcatgaaaggaagaaaccccgtttgcaac

SEQ ID NO: 823883 - DNA, 578 bp, Homo sapiens
cgcaaaatgagtgtttcaaatctgctctgtctaaatggacgttccactctgggagttgaatgcacacaacacaaagaatttrctgagaattcttccgtctagcattcaatgaagaaatcccgtttccaacgaaggcctcaaacaggtccatatttccacttgcagactttacaaacagtgtgtttccaaactcctctatgaaaagaaaggttaaactctgtgagttgaacgcacacatcacaaagcactttctgagaatgattctgtctggttattatacgaagatatttccttttctgcaattgtcctcaaatcgcttgaaatctccacctgaaaatgccacagcaagagtgtttcaaatctgctctctctaaagcaaggttcaactctgtgagttgaatacacacaacacaaaaaagttcctgagaactcttcttagtctagcatgaaaggaagaaaccccgtttgcaacgaagccctcaaagaggtccaaatatccacttgcagacataacaagcagagtgtttctaaactgctctaagaaaagaaaggttaaactctgtgagttgaaggcacac

SEQ ID NO: 823884 - DNA, 588 bp, Homo sapiens
gtctagcattcaatgaagaaatcccrtttccaacgaaggcctcaaacaggtccatatttccacttgcagactttacaaacagtgtgtttccaaactcctctatgaaaagaaaggttaaactctgtgagttgaacgcacacatcacaaagcactttctgagaatgattctgtctggttattatacgaagatatttccttttctgcaattgtcctcaaatcgcttgaaatctccacctgaaaatgccacagcaagagtgtttcaaatctgctctctctaaagcaaggttcaactctgtgagttgaatacacacaacacaaaaaagttcctgagaactcttcttagtctagcatgaaaggaagaaaccccgtttgcaacgaagccctcaaagaggtccaaatatccacttgcagacataacaagcagagtgtttctaaactgctctaagaaaagaaaggttaaactctgtgagttgaaggcacacatcacaaagtagtttctgagaatgattctgtctagtttttatttgaagatatttccttttctactgttggcatcaaatcgcttgaaatctccacttgcaaattcca

SEQ ID NO: 823885 - DNA, 619 bp, Homo sapiens
aaagaatttgctgagaattcttccgtctagcattcaatgaagaaatcccgtttccaacgaaggcctcaaacaggtccatatwtccacttgcagactttacaaacagtgtgtttccaaactcctctatgaaaagaaaggttaaactctgtgagttgaacgcacacatcacaaagcactttctgagaatgattctgtctggttattatacgaagatatttccttttctgcaattgtcctcaaatcgcttgaaatctccacctgaaaatgccacagcaagagtgtttcaaatctgctctctctaaagcaaggttcaactctgtgagttgaatacacacaacacaaaaaagttcctgagaactcttcttagtctagcatgaaaggaagaaaccccgtttgcaacgaagccctcaaagaggtccaaatatccacttgcagacataacaagcagagtgtttctaaactgctctaagaaaagaaaggttaaactctgtgagttgaaggcacacatcacaaagtagtttctgagaatgattctgtctagtttttatttgaagatatttccttttctactgttggcatcaaatcgcttgaaatctccacttgcaaattccacaaaaag

SEQ ID NO: 823886 - DNA, 463 bp, Homo sapiens
caaacaggtccatatttccacttgcagwctttacaaacagtgtgtttccaaactcctctatgaaaagaaaggttaaactctgtgagttgaacgcacacatcacaaagcactttctgagaatgattctgtctggttattatacgaagatatttccttttctgcaattgtcctcaaatcgcttgaaatctccacctgaaaatgccacagcaagagtgtttcaaatctgctctctctaaagcaaggttcaactctgtgagttgaatacacacaacacaaaaaagttcctgagaactcttcttagtctagcatgaaaggaagaaaccccgtttgcaacgaagccctcaaagaggtccaaatatccacttgcagacataacaagcagagtgtttctaaactgctctaagaaaagaaaggttaaactctgtgagttgaaggcacacatcacaaagtagtttctgagaat

SEQ ID NO: 823887 - DNA, 607 bp, Homo sapiens
ccaacgaaggcctcaaacaggtccatatttccacttgcagactttacaaacagtgtgtttccaaactcctctatgaaargaaaggttaaactctgtgagttgaacgcacacatcacaaagcactttctgagaatgattctgtctggttattatacgaagatatttccttttctgcaattgtcctcaaatcgcttgaaatctccacctgaaaatgccacagcaagagtgtttcaaatctgctctctctaaagcaaggttcaactctgtgagttgaatacacacaacacaaaaaagttcctgagaactcttcttagtctagcatgaaaggaagaaaccccgtttgcaacgaagccctcaaagaggtccaaatatccacttgcagacataacaagcagagtgtttctaaactgctctaagaaaagaaaggttaaactctgtgagttgaaggcacacatcacaaagtagtttctgagaatgattctgtctagtttttatttgaagatatttccttttctactgttggcatcaaatcgcttgaaatctccacttgcaaattccacaaaaagagtgtttcaaatctgctctgtgtaaagggacgttccactct

SEQ ID NO: 823888 - DNA, 634 bp, Homo sapiens
ttacaaacagtgtgtttccaaactcctctatgaaaagaaaggttaaactmtgtgagttgaacgcacacatcacaaagcactttctgagaatgattctgtctggttattatacgaagatatttccttttctgcaattgtcctcaaatcgcttgaaatctccacctgaaaatgccacagcaagagtgtttcaaatctgctctctctaaagcaaggttcaactctgtgagttgaatacacacaacacaaaaaagttcctgagaactcttcttagtctagcatgaaaggaagaaaccccgtttgcaacgaagccctcaaagaggtccaaatatccacttgcagacataacaagcagagtgtttctaaactgctctaagaaaagaaaggttaaactctgtgagttgaaggcacacatcacaaagtagtttctgagaatgattctgtctagtttttatttgaagatatttccttttctactgttggcatcaaatcgcttgaaatctccacttgcaaattccacaaaaagagtgtttcaaatctgctctgtgtaaagggacgttccactctgtgagttgaatacacacagcacaaagaagttactgagaattcttctgtctagcatgaaatgaagaaatcc

SEQ ID NO: 823889 - DNA, 540 bp, Homo sapiens
acttgcagactttacaaacagtgtgtttccaaactcctctatgaaaagaaaggttaaactctgtgrgttgaacgcacacatcacaaagcactttctgagaatgattctgtctggttattatacgaagatatttccttttctgcaattgtcctcaaatcgcttgaaatctccacctgaaaatgccacagcaagagtgtttcaaatctgctctctctaaagcaaggttcaactctgtgagttgaatacacacaacacaaaaaagttcctgagaactcttcttagtctagcatgaaaggaagaaaccccgtttgcaacgaagccctcaaagaggtccaaatatccacttgcagacataacaagcagagtgtttctaaactgctctaagaaaagaaaggttaaactctgtgagttgaaggcacacatcacaaagtagtttctgagaatgattctgtctagtttttatttgaagatatttccttttctactgttggcatcaaatcgcttgaaatctccacttgcaaattccacaaaaagagtgtt

SEQ ID NO: 823890 - DNA, 335 bp, Homo sapiens
acgttccactctgggagttgaatgcacacaacacaaagaatttgctgagaattcttccgtctagcattcaatgaagaaatcccgtttccaacgaaggcctcaaacaggtccatatttccacttgcagactttacaaacagtgtgtttccaaactcctctatgaaaagaaaggttaaactctgtgagtkgaacgcacacatcacaaagcactttctgagaatgattctgtctggttattatacgaagatatttccttttctgcaattgtcctcaaatcgcttgaaatctccacctgaaaatgccacagcaagagtgtttcaaatctgctctctcta

SEQ ID NO: 823891 - DNA, 494 bp, Homo sapiens
tttacaaacagtgtgtttccaaactcctctatgaaaagaaaggttaaactctgtgagttgaacgcacacatcacaaagcactttctgagaatgattctgtctkgttattatacgaagatatttccttttctgcaattgtcctcaaatcgcttgaaatctccacctgaaaatgccacagcaagagtgtttcaaatctgctctctctaaagcaaggttcaactctgtgagttgaatacacacaacacaaaaaagttcctgagaactcttcttagtctagcatgaaaggaagaaaccccgtttgcaacgaagccctcaaagaggtccaaatatccacttgcagacataacaagcagagtgtttctaaactgctctaagaaaagaaaggttaaactctgtgagttgaaggcacacatcacaaagtagtttctgagaatgattctgtctagtttttatttgaagatatttccttttctactgttggcatcaaatcgctt

SEQ ID NO: 823892 - DNA, 578 bp, Homo sapiens
ggtccatatttccacttgcagactttacaaacagtgtgtttccaaactcctctatgaaaagaaaggttaaactctgtgagttgaacgcacacatcacaaagcactttctgagaatgattctgtctggktattatacgaagatatttccttttctgcaattgtcctcaaatcgcttgaaatctccacctgaaaatgccacagcaagagtgtttcaaatctgctctctctaaagcaaggttcaactctgtgagttgaatacacacaacacaaaaaagttcctgagaactcttcttagtctagcatgaaaggaagaaaccccgtttgcaacgaagccctcaaagaggtccaaatatccacttgcagacataacaagcagagtgtttctaaactgctctaagaaaagaaaggttaaactctgtgagttgaaggcacacatcacaaagtagtttctgagaatgattctgtctagtttttatttgaagatatttccttttctactgttggcatcaaatcgcttgaaatctccacttgcaaattccacaaaaagagtgtttcaaatctgctctgtgtaaagggac

SEQ ID NO: 823893 - DNA, 550 bp, Homo sapiens
ggtccatatttccacttgcagactttacaaacagtgtgtttccaaactcctctatgaaaagaaaggttaaactctgtgagttgaacgcacacatcacaaagcactttctgagaatgattctgtctggttatkatacgaagatatttccttttctgcaattgtcctcaaatcgcttgaaatctccacctgaaaatgccacagcaagagtgtttcaaatctgctctctctaaagcaaggttcaactctgtgagttgaatacacacaacacaaaaaagttcctgagaactcttcttagtctagcatgaaaggaagaaaccccgtttgcaacgaagccctcaaagaggtccaaatatccacttgcagacataacaagcagagtgtttctaaactgctctaagaaaagaaaggttaaactctgtgagttgaaggcacacatcacaaagtagtttctgagaatgattctgtctagtttttatttgaagatatttccttttctactgttggcatcaaatcgcttgaaatctccacttgcaaattccacaaaaagagt

SEQ ID NO: 823894 - DNA, 592 bp, Homo sapiens
aaagaaaggttaaactctgtgagttgaacgcacacatcacaaagcactttctgagaatgattctgtctggttattatacgaagatayttccttttctgcaattgtcctcaaatcgcttgaaatctccacctgaaaatgccacagcaagagtgtttcaaatctgctctctctaaagcaaggttcaactctgtgagttgaatacacacaacacaaaaaagttcctgagaactcttcttagtctagcatgaaaggaagaaaccccgtttgcaacgaagccctcaaagaggtccaaatatccacttgcagacataacaagcagagtgtttctaaactgctctaagaaaagaaaggttaaactctgtgagttgaaggcacacatcacaaagtagtttctgagaatgattctgtctagtttttatttgaagatatttccttttctactgttggcatcaaatcgcttgaaatctccacttgcaaattccacaaaaagagtgtttcaaatctgctctgtgtaaagggacgttccactctgtgagttgaatacacacagcacaaagaagttactgagaattcttctgtctagcatgaaatg

SEQ ID NO: 823895 - DNA, 335 bp, Homo sapiens
acgttccactctgggagttgaatgcacacaacacaaagaatttgctgagaattcttccgtctagcattcaatgaagaaatcccgtttccaacgaaggcctcaaacaggtccatatttccacttgcagactttacaaacagtgtgtttccaaactcctctatgaaaagaaaggttaaactctgtgagttgaacgcacacatcacaaagcactttctgagaatgattctgtctggttattatacgaagatatttcyttttctgcaattgtcctcaaatcgcttgaaatctccacctgaaaatgccacagcaagagtgtttcaaatctgctctctcta

SEQ ID NO: 823896 - DNA, 592 bp, Homo sapiens
aaagaaaggttaaactctgtgagttgaacgcacacatcacaaagcactttctgagaatgattctgtctggttattatacgaagatatttccttttctgcarttgtcctcaaatcgcttgaaatctccacctgaaaatgccacagcaagagtgtttcaaatctgctctctctaaagcaaggttcaactctgtgagttgaatacacacaacacaaaaaagttcctgagaactcttcttagtctagcatgaaaggaagaaaccccgtttgcaacgaagccctcaaagaggtccaaatatccacttgcagacataacaagcagagtgtttctaaactgctctaagaaaagaaaggttaaactctgtgagttgaaggcacacatcacaaagtagtttctgagaatgattctgtctagtttttatttgaagatatttccttttctactgttggcatcaaatcgcttgaaatctccacttgcaaattccacaaaaagagtgtttcaaatctgctctgtgtaaagggacgttccactctgtgagttgaatacacacagcacaaagaagttactgagaattcttctgtctagcatgaaatg

SEQ ID NO: 823897 - DNA, 596 bp, Homo sapiens
gttaaactctgtgagttgaacgcacacatcacaaagcactttctgagaatgattctgtctggttattatacgaagatatttccttttctgcaattgtcctcaartcgcttgaaatctccacctgaaaatgccacagcaagagtgtttcaaatctgctctctctaaagcaaggttcaactctgtgagttgaatacacacaacacaaaaaagttcctgagaactcttcttagtctagcatgaaaggaagaaaccccgtttgcaacgaagccctcaaagaggtccaaatatccacttgcagacataacaagcagagtgtttctaaactgctctaagaaaagaaaggttaaactctgtgagttgaaggcacacatcacaaagtagtttctgagaatgattctgtctagtttttatttgaagatatttccttttctactgttggcatcaaatcgcttgaaatctccacttgcaaattccacaaaaagagtgtttcaaatctgctctgtgtaaagggacgttccactctgtgagttgaatacacacagcacaaagaagttactgagaattcttctgtctagcatgaaatgaagaaatcccgt

SEQ ID NO: 823898 - DNA, 606 bp, Homo sapiens
gagtgtttcaaatctgctctctctaaagcaaggttcaactcwgtgagttgaatacacacaacacaaaaaagttcctgagaactcttcttagtctagcatgaaaggaagaaaccccgtttgcaacgaagccctcaaagaggtccaaatatccacttgcagacataacaagcagagtgtttctaaactgctctaagaaaagaaaggttaaactctgtgagttgaaggcacacatcacaaagtagtttctgagaatgattctgtctagtttttatttgaagatatttccttttctactgttggcatcaaatcgcttgaaatctccacttgcaaattccacaaaaagagtgtttcaaatctgctctgtgtaaagggacgttccactctgtgagttgaatacacacagcacaaagaagttactgagaattcttctgtctagcatgaaatgaagaaatcccgtttccaacgaaggcctcaatgcggtccatatatccacttgcagactttacaaacagagtgtttccaaactgctctatgaaaagaaaggttaaactatgtgagttgaacgcacacatcacaaagaattttctgagaatgattctgtctggt

SEQ ID NO: 823899 - DNA, 509 bp, Homo sapiens
ttattatacgaagatatttccttttctgcaattgtcctcaaatcgcttgaaatctccacctgaaaatgccacagcaagagtgtttcaaatctgctctctctaaagcaaggttcaactctgtgagttgaatamacacaacacaaaaaagttcctgagaactcttcttagtctagcatgaaaggaagaaaccccgtttgcaacgaagccctcaaagaggtccaaatatccacttgcagacataacaagcagagtgtttctaaactgctctaagaaaagaaaggttaaactctgtgagttgaaggcacacatcacaaagtagtttctgagaatgattctgtctagtttttatttgaagatatttccttttctactgttggcatcaaatcgcttgaaatctccacttgcaaattccacaaaaagagtgtttcaaatctgctctgtgtaaagggacgttccactctgtgagttgaatacacacagcacaaagaagttactgagaattcttctgt

SEQ ID NO: 823900 - DNA, 592 bp, Homo sapiens
aactctgtgagttgaatacacacaacacaaaaaagttcctgagaactcttcttagtctagcatgaaaggaagaaaccccrtttgcaacgaagccctcaaagaggtccaaatatccacttgcagacataacaagcagagtgtttctaaactgctctaagaaaagaaaggttaaactctgtgagttgaaggcacacatcacaaagtagtttctgagaatgattctgtctagtttttatttgaagatatttccttttctactgttggcatcaaatcgcttgaaatctccacttgcaaattccacaaaaagagtgtttcaaatctgctctgtgtaaagggacgttccactctgtgagttgaatacacacagcacaaagaagttactgagaattcttctgtctagcatgaaatgaagaaatcccgtttccaacgaaggcctcaatgcggtccatatatccacttgcagactttacaaacagagtgtttccaaactgctctatgaaaagaaaggttaaactatgtgagttgaacgcacacatcacaaagaattttctgagaatgattctgtctggtttttatttgaagatatttccct

SEQ ID NO: 823901 - DNA, 606 bp, Homo sapiens
gagtgtttcaaatctgctctctctaaagcaaggttcaactctgtgagttgaatacacacaacacaaaaaagttcctgagaactcttcttagtctagcatgaaaggaagaaaccccgtttgcaasgaagccctcaaagaggtccaaatatccacttgcagacataacaagcagagtgtttctaaactgctctaagaaaagaaaggttaaactctgtgagttgaaggcacacatcacaaagtagtttctgagaatgattctgtctagtttttatttgaagatatttccttttctactgttggcatcaaatcgcttgaaatctccacttgcaaattccacaaaaagagtgtttcaaatctgctctgtgtaaagggacgttccactctgtgagttgaatacacacagcacaaagaagttactgagaattcttctgtctagcatgaaatgaagaaatcccgtttccaacgaaggcctcaatgcggtccatatatccacttgcagactttacaaacagagtgtttccaaactgctctatgaaaagaaaggttaaactatgtgagttgaacgcacacatcacaaagaattttctgagaatgattctgtctggt

SEQ ID NO: 823902 - DNA, 588 bp, Homo sapiens
catgaaaggaagaaaccccgtttgcaacgaagccctcaaagaggtccaaatatccacttgcagwcataacaagcagagtgtttctaaactgctctaagaaaagaaaggttaaactctgtgagttgaaggcacacatcacaaagtagtttctgagaatgattctgtctagtttttatttgaagatatttccttttctactgttggcatcaaatcgcttgaaatctccacttgcaaattccacaaaaagagtgtttcaaatctgctctgtgtaaagggacgttccactctgtgagttgaatacacacagcacaaagaagttactgagaattcttctgtctagcatgaaatgaagaaatcccgtttccaacgaaggcctcaatgcggtccatatatccacttgcagactttacaaacagagtgtttccaaactgctctatgaaaagaaaggttaaactatgtgagttgaacgcacacatcacaaagaattttctgagaatgattctgtctggtttttatttgaagatatttccctttctactgttggcatcaaatggctagaaatctccacttgcaaattccgcaaaaaca

SEQ ID NO: 823903 - DNA, 463 bp, Homo sapiens
caaacaggtccatatttccacttgcagactttacaaacagtgtgtttccaaactcctctatgaaaagaaaggttaaactctgtgagttgaacgcacacatcacaaagcactttctgagaatgattctgtctggttattatacgaagatatttccttttctgcaattgtcctcaaatcgcttgaaatctccacctgaaaatgccacagcaagagtgtttcaaatctgctctctctaaagcaaggttcaactctgtgagttgaatacacacaacacaaaaaagttcctgagaactcttcttagtctagcatgaaaggaagaaaccccgtttgcaacgaagccctcaaagaggtccaaatatccacttgcagacataacaagcagagtgtttctaaactgctctaagaaaagaaaggtkaaactctgtgagttgaaggcacacatcacaaagtagtttctgagaat

SEQ ID NO: 823904 - DNA, 450 bp, Homo sapiens
caaagcactttctgagaatgattctgtctggttattatacgaagatatttccttttctgcaattgtcctcaaatcgcttgaaatctccacctgaaaatgccacagcaagagtgtttcaaatctgctctctctaaagcaaggttcaactctgtgagttgaatacacacaacacaaaaaagttcctgagaactcttcttagtctagcatgaaaggaagaaaccccgtttgcaacgaagccctcaaagaggtccaaatatccacttgcagacataacaagcagagtgtttctaaactgctctaagaaaagaaaggttaaactctgtgagttgaaggcacacatcacraagtagtttctgagaatgattctgtctagtttttatttgaagatatttccttttctactgttggcatcaaatcgcttgaaatctccacttgcaaattccacaaaaa

SEQ ID NO: 823905 - DNA, 508 bp, Homo sapiens
ttgcagacataacaagcagagtgtttctaaactgctctaagaaaagaaaggttaaactctgtgagttgaaggcacacatcacaaagwagtttctgagaatgattctgtctagtttttatttgaagatatttccttttctactgttggcatcaaatcgcttgaaatctccacttgcaaattccacaaaaagagtgtttcaaatctgctctgtgtaaagggacgttccactctgtgagttgaatacacacagcacaaagaagttactgagaattcttctgtctagcatgaaatgaagaaatcccgtttccaacgaaggcctcaatgcggtccatatatccacttgcagactttacaaacagagtgtttccaaactgctctatgaaaagaaaggttaaactatgtgagttgaacgcacacatcacaaagaattttctgagaatgattctgtctggtttttatttgaagatatttccctttctactgttggcatcaaatggctagaaatctc

SEQ ID NO: 823906 - DNA, 520 bp, Homo sapiens
taaactgctctaagaaaagaaaggttaaactctgtgagttgaaggcacacatcacaaagtagwttctgagaatgattctgtctagtttttatttgaagatatttccttttctactgttggcatcaaatcgcttgaaatctccacttgcaaattccacaaaaagagtgtttcaaatctgctctgtgtaaagggacgttccactctgtgagttgaatacacacagcacaaagaagttactgagaattcttctgtctagcatgaaatgaagaaatcccgtttccaacgaaggcctcaatgcggtccatatatccacttgcagactttacaaacagagtgtttccaaactgctctatgaaaagaaaggttaaactatgtgagttgaacgcacacatcacaaagaattttctgagaatgattctgtctggtttttatttgaagatatttccctttctactgttggcatcaaatggctagaaatctccacttgcaaattccgcaaaaacagtgtttcaaatctgct

SEQ ID NO: 823907 - DNA, 531 bp, Homo sapiens
caagcagagtgtttctaaactgctctaagaaaagaaaggttaaactctgtgagttgaaggcacacatcacaaagtagtttctgagaaygattctgtctagtttttatttgaagatatttccttttctactgttggcatcaaatcgcttgaaatctccacttgcaaattccacaaaaagagtgtttcaaatctgctctgtgtaaagggacgttccactctgtgagttgaatacacacagcacaaagaagttactgagaattcttctgtctagcatgaaatgaagaaatcccgtttccaacgaaggcctcaatgcggtccatatatccacttgcagactttacaaacagagtgtttccaaactgctctatgaaaagaaaggttaaactatgtgagttgaacgcacacatcacaaagaattttctgagaatgattctgtctggtttttatttgaagatatttccctttctactgttggcatcaaatggctagaaatctccacttgcaaattccgcaaaaacagtgtttcaaatc

SEQ ID NO: 823908 - DNA, 588 bp, Homo sapiens
gtctagcattcaatgaagaaatcccgtttccaacgaaggcctcaaacaggtccatatttccacttgcagactttacaaacagtgtgtttccaaactcctctatgaaaagaaaggttaaactctgtgagttgaacgcacacatcacaaagcactttctgagaatgattctgtctggttattatacgaagatatttccttttctgcaattgtcctcaaatcgcttgaaatctccacctgaaaatgccacagcaagagtgtttcaaatctgctctctctaaagcaaggttcaactctgtgagttgaatacacacaacacaaaaaagttcctgagaactcttcttagtctagcatgaaaggaagaaaccccgtttgcaacgaagccctcaaagaggtccaaatatccacttgcagacataacaagcagagtgtttctaaactgctctaagaaaagaaaggttaaactctgtgagttgaaggcacacatcacaaagtagtttctgagaatgmttctgtctagtttttatttgaagatatttccttttctactgttggcatcaaatcgcttgaaatctccacttgcaaattcca

SEQ ID NO: 823909 - DNA, 550 bp, Homo sapiens
ggtccatatttccacttgcagactttacaaacagtgtgtttccaaactcctctatgaaaagaaaggttaaactctgtgagttgaacgcacacatcacaaagcactttctgagaatgattctgtctggttattatacgaagatatttccttttctgcaattgtcctcaaatcgcttgaaatctccacctgaaaatgccacagcaagagtgtttcaaatctgctctctctaaagcaaggttcaactctgtgagttgaatacacacaacacaaaaaagttcctgagaactcttcttagtctagcatgaaaggaagaaaccccgtttgcaacgaagccctcaaagaggtccaaatatccacttgcagacataacaagcagagtgtttctaaactgctctaagaaaagaaaggttaaactctgtgagttgaaggcacacatcacaaagtagtttctgagaatgattctgtctagtttttatttgaagatatttccttttctactgttggcatcaaatcgcttgaawtctccacttgcaaattccacaaaaagagt

SEQ ID NO: 823910 - DNA, 562 bp, Homo sapiens
cacacatcacaaagcactttctgagaatgattctgtctggttattatacgaagatatttccttttctgcaattgtcctcaaatcgcttgaaatctccacctgaaaatgccacagcaagagtgtttcaaatctgctctctctaaagcaaggttcaactctgtgagttgaatacacacaacacaaaaaagttcctgagaactcttcttagtctagcatgaaaggaagaaaccccgtttgcaacgaagccctcaaagaggtccaaatatccacttgcagacataacaagcagagtgtttctaaactgctctaagaaaagaaaggttaaactctgtgagttgaaggcacacatcacaaagtagtttctgagaatgattctgtctagtttttatttgaagatatttccttttctactgttggcatcaaatcgcttgaaatctscacttgcaaattccacaaaaagagtgtttcaaatctgctctgtgtaaagggacgttccactctgtgagttgaatacacacagcacaaagaagttactgagaattcttctgtctagcatgaaatg

SEQ ID NO: 823911 - DNA, 550 bp, Homo sapiens
gtgtttccaaactcctctatgaaaagaaaggttaaactctgtgagttgaacgcacacatcacaaagcactttctgagaatgattctgtctggttattatacgaagatatttccttttctgcaattgtcctcaaatcgcttgaaatctccacctgaaaatgccacagcaagagtgtttcaaatctgctctctctaaagcaaggttcaactctgtgagttgaatacacacaacacaaaaaagttcctgagaactcttcttagtctagcatgaaaggaagaaaccccgtttgcaacgaagccctcaaagaggtccaaatatccacttgcagacataacaagcagagtgtttctaaactgctctaagaaaagaaaggttaaactctgtgagttgaaggcacacatcacaaagtagtttctgagaatgattctgtctagtttttatttgaagatatttccttttctactgttggcatcaaatcgcttgaaatctccacttgcaaattccasaaaaagagtgtttcaaatctgctctgtgtaaagggacgttccac

SEQ ID NO: 823912 - DNA, 612 bp, Homo sapiens
agaaaggttaaactctgtgagttgaacgcacacatcacaaagcactttctgagaatgattctgtctggttattatacgaagatatttccttttctgcaattgtcctcaaatcgcttgaaatctccacctgaaaatgccacagcaagagtgtttcaaatctgctctctctaaagcaaggttcaactctgtgagttgaatacacacaacacaaaaaagttcctgagaactcttcttagtctagcatgaaaggaagaaaccccgtttgcaacgaagccctcaaagaggtccaaatatccacttgcagacataacaagcagagtgtttctaaactgctctaagaaaagaaaggttaaactctgtgagttgaaggcacacatcacaaagtagtttctgagaatgattctgtctagtttttatttgaagatatttccttttctactgttggcatcaaatcgcttgaaatctccacttgcaaattccacaaaaagaktgtttcaaatctgctctgtgtaaagggacgttccactctgtgagttgaatacacacagcacaaagaagttactgagaattcttctgtctagcatgaaatgaagaaatcccgtttccaacgaa

SEQ ID NO: 823913 - DNA, 574 bp, Homo sapiens
aaagcaaggttcaactctgtgagttgaatacacacaacacaaaaaagttcctgagaactcttcttagtctagcatgaaaggaagaaaccccgtttgcaacgaagccctcaaagaggtccaaatatccacttgcagacataacaagcagagtgtttctaaactgctctaagaaaagaaaggttaaactctgtgagttgaaggcacacatcacaaagtagtttctgagaatgattctgtctagtttttatttgaagatatttccttttctactgttggcatcaaatcgcttgaaatctccacttgcaaattccacaaaaagagtgtttcaaatctgctctgtgyaaagggacgttccactctgtgagttgaatacacacagcacaaagaagttactgagaattcttctgtctagcatgaaatgaagaaatcccgtttccaacgaaggcctcaatgcggtccatatatccacttgcagactttacaaacagagtgtttccaaactgctctatgaaaagaaaggttaaactatgtgagttgaacgcacacatcacaaagaattttctgagaatgattc

SEQ ID NO: 823914 - DNA, 562 bp, Homo sapiens
cacacatcacaaagcactttctgagaatgattctgtctggttattatacgaagatatttccttttctgcaattgtcctcaaatcgcttgaaatctccacctgaaaatgccacagcaagagtgtttcaaatctgctctctctaaagcaaggttcaactctgtgagttgaatacacacaacacaaaaaagttcctgagaactcttcttagtctagcatgaaaggaagaaaccccgtttgcaacgaagccctcaaagaggtccaaatatccacttgcagacataacaagcagagtgtttctaaactgctctaagaaaagaaaggttaaactctgtgagttgaaggcacacatcacaaagtagtttctgagaatgattctgtctagtttttatttgaagatatttccttttctactgttggcatcaaatcgcttgaaatctccacttgcaaattccacaaaaagagtgtttcaaatctgctctgtgtaaagggacgttccactctgtgagttsaatacacacagcacaaagaagttactgagaattcttctgtctagcatgaaatg

SEQ ID NO: 823915 - DNA, 588 bp, Homo sapiens
actctgtgagttgaatacacacaacacaaaaaagttcctgagaactcttcttagtctagcatgaaaggaagaaaccccgtttgcaacgaagccctcaaagaggtccaaatatccacttgcagacataacaagcagagtgtttctaaactgctctaagaaaagaaaggttaaactctgtgagttgaaggcacacatcacaaagtagtttctgagaatgattctgtctagtttttatttgaagatatttccttttctactgttggcatcaaatcgcttgaaatctccacttgcaaattccacaaaaagagtgtttcaaatctgctctgtgtaaagggacgttccactctgtgagttgaatacacacagcacaaagaagttactgagaattcttctgtctagcatgaaatgaagaaatcccgtttccaacgaaggcctcaatgcggtccatatatccacttgcagactttacaaacagagtgtttccaaactkctctatgaaaagaaaggttaaactatgtgagttgaacgcacacatcacaaagaattttctgagaatgattctgtctggtttttatttgaagatatttc

SEQ ID NO: 823916 - DNA, 555 bp, Homo sapiens
aactctgtgagttgaatacacacaacacaaaaaagttcctgagaactcttcttagtctagcatgaaaggaagaaaccccgtttgcaacgaagccctcaaagaggtccaaatatccacttgcagacataacaagcagagtgtttctaaactgctctaagaaaagaaaggttaaactctgtgagttgaaggcacacatcacaaagtagtttctgagaatgattctgtctagtttttatttgaagatatttccttttctactgttggcatcaaatcgcttgaaatctccacttgcaaattccacaaaaagagtgtttcaaatctgctctgtgtaaagggacgttccactctgtgagttgaatacacacagcacaaagaagttactgagaattcttctgtctagcatgaaatgaagaaatcccgtttccaacgaaggcctcaatgcggtccatatatccacttgcagactttacaaacagagtgtttccaaactgctctatgaaaagaaaggttaaactatgtgagtygaacgcacacatcacaaagaattttctgaga

SEQ ID NO: 823917 - DNA, 629 bp, Homo sapiens
aagttcctgagaactcttcttagtctagcatgaaaggaagaaaccccgtttgcaacgaagccctcaaagaggtccaaatatccacttgcagacataacaagcagagtgtttctaaactgctctaagaaaagaaaggttaaactctgtgagttgaaggcacacatcacaaagtagtttctgagaatgattctgtctagtttttatttgaagatatttccttttctactgttggcatcaaatcgcttgaaatctccacttgcaaattccacaaaaagagtgtttcaaatctgctctgtgtaaagggacgttccactctgtgagttgaatacacacagcacaaagaagttactgagaattcttctgtctagcatgaaatgaagaaatcccgtttccaacgaaggcctcaatgcggtccatatatccacttgcagactttacaaacagagtgtttccaaactgctctatgaaaagaaaggttaaactatgtgagttgaaygcacacatcacaaagaattttctgagaatgattctgtctggtttttatttgaagatatttccctttctactgttggcatcaaatggctagaaatctccacttgcaaattccgcaaaaacagtgtttcaaatct

SEQ ID NO: 823918 - DNA, 629 bp, Homo sapiens
aagttcctgagaactcttcttagtctagcatgaaaggaagaaaccccgtttgcaacgaagccctcaaagaggtccaaatatccacttgcagacataacaagcagagtgtttctaaactgctctaagaaaagaaaggttaaactctgtgagttgaaggcacacatcacaaagtagtttctgagaatgattctgtctagtttttatttgaagatatttccttttctactgttggcatcaaatcgcttgaaatctccacttgcaaattccacaaaaagagtgtttcaaatctgctctgtgtaaagggacgttccactctgtgagttgaatacacacagcacaaagaagttactgagaattcttctgtctagcatgaaatgaagaaatcccgtttccaacgaaggcctcaatgcggtccatatatccacttgcagactttacaaacagagtgtttccaaactgctctatgaaaagaaaggttaaactatgtgagttgaacgcacacatcacaaagaatttkctgagaatgattctgtctggtttttatttgaagatatttccctttctactgttggcatcaaatggctagaaatctccacttgcaaattccgcaaaaacagtgtttcaaatct

SEQ ID NO: 823919 - DNA, 501 bp, Homo sapiens
taaactgctctaagaaaagaaaggttaaactctgtgagttgaaggcacacatcacaaagtagtttctgagaatgattctgtctagtttttatttgaagatatttccttttctactgttggcatcaaatcgcttgaaatctccacttgcaaattccacaaaaagagtgtttcaaatctgctctgtgtaaagggacgttccactctgtgagttgaatacacacagcacaaagaagttactgagaattcttctgtctagcatgaaatgaagaaatcccgtttccaacgaaggcctcaatgcggtccatatatccacttgcagactttacaaacagagtgtttccaaactgctctatgaaaagaaaggttaaactatgtgagttgaacgcacacatcacaaagaattttctgagaatgaytctgtctggtttttatttgaagatatttccctttctactgttggcatcaaatggctagaaatctccacttgcaaattccgcaaaa

SEQ ID NO: 823920 - DNA, 484 bp, Homo sapiens
agttgaaggcacacatcacaaagtagtttctgagaatgattctgtctagtttttatttgaagatatttccttttctactgttggcatcaaatcgcttgaaatctccacttgcaaattccacaaaaagagtgtttcaaatctgctctgtgtaaagggacgttccactctgtgagttgaatacacacagcacaaagaagttactgagaattcttctgtctagcatgaaatgaagaaatcccgtttccaacgaaggcctcaatgcggtccatatatccacttgcagactttacaaacagagtgtttccaaactgctctatgaaaagaaaggttaaactatgtgagttgaacgcacacatcacaaagaattttctgagaatgattctgtctggtttttmtttgaagatatttccctttctactgttggcatcaaatggctagaaatctccacttgcaaattccgcaaaaacagtgtttcaaatctgct

SEQ ID NO: 823921 - DNA, 602 bp, Homo sapiens
aaaccccgtttgcaacgaagccctcaaagaggtccaaatatccacttgcagacataacaagcagagtgtttctaaactgctctaagaaaagaaaggttaaactctgtgagttgaaggcacacatcacaaagtagtttctgagaatgattctgtctagtttttatttgaagatatttccttttctactgttggcatcaaatcgcttgaaatctccacttgcaaattccacaaaaagagtgtttcaaatctgctctgtgtaaagggacgttccactctgtgagttgaatacacacagcacaaagaagttactgagaattcttctgtctagcatgaaatgaagaaatcccgtttccaacgaaggcctcaatgcggtccatatatccacttgcagactttacaaacagagtgtttccaaactgctctatgaaaagaaaggttaaactatgtgagttgaacgcacacatcacaaagaattttctgagaatgattctgtctggtttttatttgaagatatttccctttctactgttggcatcaaatggctagaaatctccacttgcaaattccgcaaaaasagtgtttcaaatctgctctgtctaaag

SEQ ID NO: 823922 - DNA, 639 bp, Homo sapiens
ctagtttttatcccgggatatttgcttttttgccattggcctcaatgagctcccaaatgtccattcacagaatcaacagaaacagtttttccaagctgctgaatccaaaggaaagtttaactctttgggatgaatgaacacatcacaagacagtttctcagaaagcttcttgctagtttttatctcaatatatttcctttttcaccatgggcctcaaagcgctaccaaatatctctgcagattctaagaaatcagtgtttccaaactgctgaatgagaagcgaggtttaactctgtgagatgaatgcaaatatcagaaagcagtttctcagaaagcttcttgctagtttttttaaattgatttttatttatttatttatttttattatccttaagttttagggtacatgtgcacaatgtgcaggtttgtcacatatgtataaatgtgtcatgttggtgtgctgcacccatgaactcgtcatttagcattaggtatatctcctaatgctatccttccccactccacccaccccacaacwggccctggtgtgtgatgttccccttcctgtgtccatgtgttctcactgctcaattcccacctgtgagggagaacatgcagtgtttgcttttttgtccttgc

SEQ ID NO: 823923 - DNA, 659 bp, Homo sapiens
tttgaaaaggctgtttctgtagaatctgaaaagggatatgggtgagcccaatgtggcctttagtggaaaagattatatcttcagatacaaactagaagaaatctttcagagaaactgctttatgacgtgtgcattcatctcacagagttaaagctttcttttgattgcgcagtttggaaagactgtttttgtagaatctgcaaagggatatttgggagccctttgacccttttggtcaaaaaggaaatatcttcatataaaaactagaaagaagctttctgagaaactcctttgtggtgttaacattcatctcacagagttaaacctttcttttgattgagaagtttggaaacactcaattttgaagaatatgtaatgggattttcaggagtgccttcaggcctatggtaaaaaggaaatatcttgacataaaaactacaaagaaagattcagagacactgctttgagatgtattcattcatctcacagagttacacatttcttttaattgagcagtttggaaacactgtttctgaagaatctgtgaagtaatattaagaaacgctttragtccccctgtaaaaaaggacatatcttcagatacaaacttgaaagaaggtttctgagaaactgctttctgaagtgtgcatttgtcaaag

SEQ ID NO: 823924 - DNA, 618 bp, Homo sapiens
ttgtccattgtgtgaatggacgtttgggagttcattgaggtgataggcaaaaaagtgaatatcccaggataactttgaggaagagatctgagaaaaagcttgctgttgtgtgcattcatctcacagtgttaaacctttcttttgattcagtagtttggaaacaaagttttctttgaatctgagaagagatatttggtagtgcatttaggcctatggtgaaaaaggaagtatcttcagataaaaactggaaataacctttctgagagactgctttgcaatgtgtgcattcatctcacacagttaaacctttctttggattcagcagtttggaaacacagttttcttagtttctgcaagcagatatttgaaagcccaatgaggcctattgtgaaaaacgacatatcttaagacaaaaactggaaagaatatttctgagagactgctttgtgacgtgtgcattcatctgacagagttaaacctttctttgtattcagcactttggtaacactgtttttgtccaytgtgtgaatggacatttgggagctcattgaggccgatggcaaagaagtgagtatcccaggataaatactggaaggaagatatctgagaaaatacttg

SEQ ID NO: 823925 - DNA, 193 bp, Homo sapiens
tatttcggagtgctttcaggcatatggttaaaaaaagaatatcttcacctaaaaactcaaagaaagctttctgagaaacttcatcatgtgtgaattcctctcacagagttgaaccattcttttgattgagcaatttsgaacaactgttttcctagaatctgcaatgggatatttgtgagtgctttggggtcta

SEQ ID NO: 823926 - DNA, 598 bp, Homo sapiens
atttcctgagctaacacatgaaaaagggaataatttgtgctcttataaactagagagttaagtcttcatagtataaggcatattaggtaaagtcatcagaaattcatcaccttagtgagagaaattaaggctacactaaatgctgctctgatcttgccattacaaatattagaaggaagacttgaaatgatcacacttacctgaaaataacaaaactgcatgccagaactaaatcccaaaaaaagttatttaaaggaatgcaacaaaatccagaaaccaattacaaaaaatcataagatcttgcatccaataaaaatccccagacatgcacagaaggtggaatatttgacacatagctagtagaaaaataaatagttacaaagatatccagaattacggaggtcaaagcaacaacaacaaccagcaatcaaggacataaaggaacacttatacaataagatctatattataagaagttagagaartatgtgagcataatgaaagtcacacgaaagttataaaatgacacaaatcacactgtaaaataaaaactattatcaaaatgataaatatactggatagcattaatggttgaata

SEQ ID NO: 823927 - DNA, 548 bp, Homo sapiens
ctctctcccatttcttctcttcctcctctttttcctttccctctttctcttaagtttgtgttttgggtttgcattttatccttccattctcaaacagtaactgttaattcaggaacacacattgtctcagacttctcattatactcacatttatttataagtacattaaatgctattcatattgattgatagatttaaacttgtgcaaatactttatttggtgacctgatgaaatgcatctggaattatctattcctgtaatagcagtacactggctatttgaccacgattaaaaatgccagaagcaaattgaaggatttttttacaagggtttcagattcatataaatttgcacttaagaataatgtgttcaaaaaatatatataacattccatgaaaacaattcaataggatattaaatctgtacaatctttttaattttatttttatggaaagaaaagaaaaattgttwattttctacagtgtccaaggcctagtattaagtgatttttctctacattatctccactaatcttcaaaatgactct

SEQ ID NO: 823928 - DNA, 571 bp, Homo sapiens
tgatcttttttaatggtctgatgatttgtctttgctctctttccccaagggaaaaagtttctgttcacttgctccttaatgatagcactttgcatttgtttaatgttactcagtttctcttggtagtgtaccccacagtaacagagacctcaatgaatttaagaatccagtttccactgagcttgctatagttcatatttctttctgctttttctatattggcatgctgacatttggagaagcgtcagtttgcttctcccaacgccctttattcacacagataactccatttccagtgtaacccctcttattcctagtcttggtattttgcccttattctttaatcaaactactgatatctggaattttattgtctttccacattattagttatttattgctgtgtaacagattaccccaaattttataacaaattaaaaaaaacattatctcatagttkttgtaggttgggaaccaagacactgggttgacgtctctcacgaggttgcagttaagctattgggctgctattatctgaagggctccaggatccattcccagttctctcatg

SEQ ID NO: 823929 - DNA, 626 bp, Homo sapiens
cttcaaaataatctcctttgattccatgttccacatccaggacacactggtgtgagaggtaggctcccaaggctgtgagcagctctacctctgtggctgctttcatgggctggtgttgagtgcctgtgccttttccaggtgcacggtgcaagctgccagtggatctaccattttggggtttggaggatggtggccctcttctcacagctccattaggcagtgccccagtggggactctgtgtgggggctccaaccccacatttcccttctgcactgctctagaagaggttctccacgagggctccacccttggagcaggcttctgtctggacatccaggcttttccacacatcttctaatatctaggtggaggctcctaagcctcaactcttgcactctgcaaacccatagggttaacactttgtcaaaactgccaaggtttatggcttgcaccttctaaagggcctacagcagcccaagttgtacctgagcccctttgarctatggctggagctggagcagctgggattcagggagcagtgtcttgaggctgtacagggctgcagggccttgggctcagcccctgaaaccatccttccctcttaggcctccaggagggtctgccg

SEQ ID NO: 823930 - DNA, 596 bp, Homo sapiens
ggccagcctctccagccttgctctggctggggcagactggggctccagactcctgctgcagggggtagaaaaacaaaacaaaacaaaagctaactgggattttcatagggatttgtcaagtctgtacatcagtttggggagtatcttgtatcctataaccctgctgaacatgtttgttagtattaatagttttttaccgaattccttgagattttctctatataagatcatgtcatctgtcactagagatagctttgcttctttctttctaatctggatgccttccatttctatttcttgcctaattctcttgactagaacctccattcaacgctgaacagaagtggcaagcgtggaaatcctggtcttcttctcagttttaaggaggaagcattcagtctttcaccacttcatattaatattagctagaggtcgttcacagacaaccgttatcagattgaggatgttctcttctattcctagtttgttgtgtgtgtatttcattataaaaaygtattggattttgttaaatgcttttcctaggtctatggagacaattatatgttttttgtcccttagtccattaatttgttacg

SEQ ID NO: 823931 - DNA, 652 bp, Homo sapiens
ttataatagctgtttcaaagtccttgctaattccaacatctgagtctcctcataggcagtttctattgcctgcttatttttctcatgtttgggtcacacttaatgtttctttggatgtctcataatttttcattgataactggacattttagataatatattgcagccactctgggtattggcctacctccttttcctggcttgttgtcgttgtttttgtttgtttggtcattggtttatatgtttattagtttggcaagacgaattctgtaaagtatatttcccctcgttgtgcagccagtgatgtttctgctcagatttatttgttctttttatctttaacttggcttcctagggtcttagtctccataaatcacttattggtcaagggtgaacttaagcatcgtgtatagagcccatgatgcattttctaatcaattagaacatgatttctaattaatttacttcttgcaatgacccactgcggtgtgtccagatgaaaatttctattttatacatttggaaactgaggatcatttttctcttaaacaatactcttgtgctcatacagcaaataaattgcagaacaagggctgraactggcctttgacctcatgtataggcctcttttcacaatactgtgttatctttt

SEQ ID NO: 823932 - DNA, 597 bp, Homo sapiens
tgaggatgcaagttgcattgaccagggctcttccttgacacttacatttttggcaaagggatgattctatcttgcaagctattttctgtaaacaaccttcatgcctcactcaaatgataaataaggaaaccccaaatcagataagcaatacatgcatacaacacatgtttctccttctgttttctctgacctctgtaactatgtaagcctctttgggttatttatgaatgatttaaaggcatagtaaaattatgcacatattaatgagtgctcataagaatgctaatgaagaaaactaagcctaatattttctatagatttctccagaatgttttgatccaagttaaaccttctgtagactattgaagttgaaacaccttttagtaatgcttgtaacaatagcagctggcagggagaagtagagctgcatattattttgcaggaaagtgaaataagagcctgtatttatgaaaagaartcccagtgaaaattgtcatttaaggagatttatatatttagatttagatatacagttgctataaaaagtttaaaaagccccagagggatgatacattcagaagaggtgagggtagaatc

SEQ ID NO: 823933 - DNA, 560 bp, Homo sapiens
aggtcatcagcagtaccaaggggtccatgctgtaaagaaggcaaagatgccccacctgcgggggcctccccagtgagagaaaatggggcctcaatgagtgacacactcacagatgcagatagatttgattttagcttgggctgactgagagaaaatcgataagcagcccaatgaagtactcttaactttgtggagacagttgtctttggaacaccaattccagaaaatgcccaagtaggggaaggacattgctgtgtgacccagtcccacccagggacttcagctcaaagactacgtgctgcagccaggctggggtgtaaagccttttctgtttgatgagggaactggccaaggtgcttggccactggacgactggaggccacatgtgaaatgagcgatccactggtcccccaccaacgtacggcaagtgctggcgctggtagacatcaatgcagrtatattctgggggtggatgttttacacagcttggcagctgtgctgtctgtcatgaacttgatggaccacttgacgattgaattgggacagtaccactacgtgtc

SEQ ID NO: 823934 - DNA, 610 bp, Homo sapiens
aagctgcaccagacacttctctggggccctgggttctgtccrctgaagcacagctcctcaatatttctgtcttggggagtgatgtgttcaggccgccattctggccgacgtcatcgcccctcatccagcatttcctccagtgaccttgaagttttcatagccacagtggctgggacatctgtcttacagaaagactgttcttgtctttgcagctatcaaaagtagtatcttccagtccataaagcaagggctgccaatccgtaacatagacggtggcttagttgtctctccacccgcaatggagctcaaaggtgtgcagcagtccccgcggccccactcctcaaattcctccgggccacgtggggacagacggtgctgaaaagtgaagggtggatttgtagaggaaacacagccctcaggttcaccaaacatcattcaatctctccttctttcccccagaccaagctgtctctgcaaagaaaatccaccccccaggctgatggatgccctgtctggtccccagaaatcccttcgggcttccgtttctccacattcccagtgccctcctcctcttgcctctctccttggggtgcatttcgctaataaccca

SEQ ID NO: 823935 - DNA, 529 bp, Homo sapiens
ccaccacgcccggctaattttttgtatttttagtagagatgggttttcaccgtgttggccgggatcatttcgatctcctgacctcgtgatccgcacgcctcagcctcccaaagtgctgggattacaggcgtgagccaccgcgcccggccaacaaatggtacttctagataccgttttatatggttctggccctccccggtgaagttttatttaaagaaaaaagaattatcttggagagatacattcatggggtttaaaaaaaaatagaaaaaaaaagcacacagcgaaaaacgtctttatatcccagaggcaacttttcttgctagtttcttacatgcatagagttatgtgattatataacccttctcttatttacacttgctgttttcacatagtgccaatcattccatattagcatatatagattttatttctttaacatccacagagtaccccaaagtatgtactatggacataccaacatttayttgacaactcttctattagtagatgtttgcatccccctttt

SEQ ID NO: 823936 - DNA, 668 bp, Homo sapiens
gaaagactggtgccactgcctggatcctgagcccaccccatctggtccctgtgggaacctggccttgatcaaattatttacatccagaagacagcaatattccaattttgacagtttttatatgaagtactacagatcctaccttgagtaaggtactcaagggttttaaaagggaagtgtagacgaaacgaaaccttaaatttcaatgtctaagtctgtaagatccgtatcattcaatccctgaatcctgactactgttgcaaccccagcatcttccatgttatggcatttatggaacagctattaaatacaaagcactagtgtacagaaacataattttacaagaaattaattctggaaatgaatagtggtggtagttgcacagcaatgtgaataacacacttaatgccactaaattgtacacttaaaatggttaaaatggtaaattttgtgattaatattttattacaattcttaaaaattttaagaaatcaacagccctgctctctaggactttatatcaaagaagctggctcatattatagaycaatgagtgtctctagaatgcgtggagagatgagtcttgtctaataagaatgtcgggcacaatacaaggcagcccatgggaagtgtcacagatttaagtggcctgagagactggcaatcaa

SEQ ID NO: 823937 - DNA, 622 bp, Homo sapiens
tgctccatctgatatatccttggttttatctccaggttaggatcctttaggtaaagggtcagataatcagctaatgaggctgatttttgtctcaccctctattatcattacctaatgacagtgaatrtaataatgcaaaaatgatcatgagcatgtatgtatacattttctcaattaaaaatattcaattaagaattttaaaattgagctataatgactttttcaaaagacagaaaacaatgaaataagaatgatattcttgaattaaagataactttaattaaagatgccctgttgtttctgatctaaaaagatatatatggatggccgaataggaacagctccggtctacagctcccagagtgagcaacgcagaagacgggtgatttctgcatttccatctgaggtactgggttcatctcactagggagtgccagacagtgggcgcaggtcagtgggtgcacgcaccatgtgcgagccaaagcagggtgaggcattgcctcactcgggaagcgcaaggggtcagggagttccctttcctagtcaaagaaagtggtgacagagggcacctggaaaattgggtcactcccacccgaatactgcgcttttccgatgggcttaa

SEQ ID NO: 823938 - DNA, 598 bp, Homo sapiens
cattattttaagctgataacaacttaacactgtttacataaacaaacaaacaaaaaactaataaacactctatgccttaacttcatccccctgtttttttgactttctgttgtttccatttatattttattgtattgtttatgtcttgaaaacttgttatggttattttttatttattttattggttaattatttcatttttctatttaagataggagtagtctacacaccacagttacagtgttataatattctgtgttttcctgtgtatttgctattaccagtgagttttgtactttcagatgatttgttgcttattaatgtcctcttctttctgatcaaaatactccctttagcatttcctgcagaaagttctggtgttgataaaatccctaagcttttgtttgtctgggaaagcctttatttcctattcatgtttgaaggatattttcactgaatataccattctagagtaaaagttttttccttcaccactttaaatatgtcatgccattctctcttggcctgtgaagtatgaaatgaaaattctgctgtcagayatattggaactccattgtatgctatttcgtttttcttg

SEQ ID NO: 823939 - DNA, 534 bp, Homo sapiens
ccaccagtttctatcaggctttctaactggccacactggagaactgtaggggctatgggtgccacgcactatctgcacctcttccagctttttgtctcagttatctctgtatgtccatcyggcaagcagtattgatgggtggaagtaaccagtcagggttgtggcagatcctgaggctggtgatgtgtatgtccgtgcagcaccagctacaccacatgcactcggagtctgaattccctggctgtagtttgtaatgccaagccatgtaaaatgtccacccccagaatgtattcaggtatgggagaaacacacacagtatataaacggggagtcaaacaacggatgccaaggtacagagatacaggtttcactttcactgactcgctttcataaccctcaatgtaagcaggtttgcccagaaacttattcaggttcccataaagaaggctgcaatctgcaccggtatccaccagtgccagcacctgcacccaccgtacattggtgggggaccagtggatcgctaattccacacgt

SEQ ID NO: 823940 - DNA, 534 bp, Homo sapiens
ccaccagtttctatcaggctttctaactggccacactggagaactgtaggggctatgggtgccacgcactatctgcacctcttccagctttttgtctcagttatctctgtatgtccatctggcaagcagtattgatgggtggaagtaaccagtcagggttgtggcagatcctgaggctggtgatgtgtatgtccgtgcagcaccagctacaccacatgcactcggagtctgaattccctggctgtagtttgtaatgccaagccatgtaaaatgtccacccccagaatgtattcaggtatgggagaaacacacacagtatataaacggggagtcaaacaacggatgccaaggtacagagatacaggtttcactttcactgactcgctttcataaccctcaatgtaagcaggtttgcccagaaacttattcaggttcccataaagaaggctgcaatctgcaccrgtatccaccagtgccagcacctgcacccaccgtacattggtgggggaccagtggatcgctaattccacacgt

SEQ ID NO: 823941 - DNA, 503 bp, Homo sapiens
agctaatggcacgtgcttatctcacgaggaaggaaatttttcctatttcataatctgaraaaacaagactcaaaaagggtgactaggttgaggtcacccagccaggaaatgacagagctgggatccacaggccaccgtctgaggtcagcctccttcccagctgctgggcgcatactcctgtgcacgtggatgccttgtggtcagggacgtatggtgcagccgacagacaggaccctgggtagagaagccaggcactcggggagcctgcagccaaatttgggccaagtaggtgacgggggttgggagggcaggaggctctttcctaccagctagtggtagagcagatgacctgggaggggctgggggcccaacccctgtgataaccgtaactctcagtgagtgagcacttggactgtgctgggctttatggcccatcttcatcaattcatttgaatcctttcatgtccccatgaggtgggtaccattctgattttacagatccc

SEQ ID NO: 823942 - DNA, 542 bp, Homo sapiens
atctttgtttttgtacttacgtatctcttccaaaattcttgtttaatatcagtaatttacacatttaaatggaaaattcctttttaatgttgggaatttacgaaaccttgagctacttttgatattgctcttcaaatggaagatggcacatggaaaatggcaaaaatccaagttttctcaactgaggcttaaccagtttttaaaaaactttttataataaaataattatgatggaatcaacttacgtgtttgctgttctaggcatatttaattaggtataatcctgttggtctctttgaatttgttaagtatgcaattatttctcatcagattttcttgagtgactgtgtttctctcataaggaggagaataatctaattcctgttgatcagctgggccagaaacttttgaaaaagataggaatatcttggaacaagaagtacagaaaacagcatggaccaytgcggaaggtaatacatggcatcgttttgggaagtcctagtcccaagaaatttcattatgatcgcaacaacatgaattcc

SEQ ID NO: 823943 - DNA, 563 bp, Homo sapiens
ctctcacccccacccaacaccgaaaacttgaaaagaaggcatcacttgttaaattagtcaaagccaaagacggctaatctcctccattcctgagtgaagaattctggcctacacaaagggcacaacaaccatctaaacaattctgcttaatatatatgaagagcacttttctcagaaagcaagttgatgagcatgtcagcctaggaatttttactcaaaagagcaagactaatttgcagaattagcaatgttgagggaaatgtagccctgactctagcacacactcatcttctagttgcttgaaaggaatgtctcccattgcaaatttataaaggtgcattaccagtttacttaatagattaccatggctttgctctttaagtttctagatctgagagtctgagcactgtggcaaggtcaccaaaataatatcaccataaaagtcattcctatctagtcattctctacaataccataaggtattttcttaaaaagaaacttcttatttacaagygattagtttgctgtgaattaagttttctagcctcttgtcagtggcttcc

SEQ ID NO: 823944 - DNA, 599 bp, Homo sapiens
gtgggtgaggtaaaataaatactcatattctggaacaacttgcctgaagaaatatttaactattttaagaggtttaaaatgtccacaccatttgatcctggaattcccctccaggaaactatttctggttgtacaacttgtattaagaatgtgtttttataaaaacactaaaattaaatacatgttagacatggttgaaagataactttctcatataacaagcagaccacaagaaggatactcatatcataataggtagagcaaatcttaatagttcatgatatttacaaaaggacttgtaaaatattttcctacagcgaaaaaagaacaagatggtttgattgtagacaattttgggtgtatctttatttaataaataattattgactatgacatgggcacaattactattctaggtattaaggatatagcaatgaataaaccaagtacttatattctagtagtgggagacagatactaacaaataaatcagtaagtacagatatgtcaggtgatactaggatgaagaaagtagaataagggggcagagcracgggagcaatgatgaatccgttggatggcagactgtccgaacacac

SEQ ID NO: 823945 - DNA, 507 bp, Homo sapiens
ggatccactcaaacacctcctgctaagccccactttcaacattagagatcaaatttcaacacttgatttgggagggacagataattcagctatatcatttgatatgctcaatctttttcattgcagctattttaacgggatgtggattaaacctcagttttagtttgattaccctaatcattagttatcttgaacgtctttacatgtgcctgtttgccatctgtgtaccttcttgggttattctctgttcaaatctttgctcattaaaaaacattttttaaaattgaattttaaagattatttatattctggatatttatcctttaccagtctgtagatgttttttttaaagtaaactctttttgtttgtttgtttttatttttttatttwtattttttattattgtactttaagttttagagtacatgtgcacaatgtgcaggttagttacatatgtatacatgtgccatgttggtgtgctgcacccattaactcgtcatttaacc

SEQ ID NO: 823946 - DNA, 420 bp, Homo sapiens
cttcttcaaaaagagcctggcagcttgagtcctatctggggcaaaaaagacataaaccaaaaataagcagacacaaaatcagaattctatttttttataagtccatttctaacctcattttcattaaaataaagtagccacgttattaccttctttatcaaaacaatatgaagggccaggcacggtggcttacgtttataatcccagcactttgggaggccgaggcgggtgatcacctgaggtcaggagttcatgaccagcttggccaacatggtgaaaccctgtctctactaaaaatacaaaaaaaattagccgggcrtggtggcatgcgcctggaatcccagctacttgggaggctgaggcacaagaatcacttgaacccaggaggcggaggttgcagtgagctggaatcatggcact

SEQ ID NO: 823947 - DNA, 388 bp, Homo sapiens
ctatgcctggctaacttatttttctatttttagtggaggtggggtttcaccatgttgcccaggctggtctcaaactcccgacttcaagtgatccacctgccttggcctgccaaagcgctgggattacagccgtgagccactgcgcggactaatgttcatttctattgtgtatcttaaggcaaacttgtctgttctctagatcaggttaaacatcttatcctatcatagtaattctgtttcagtcttcttttcccctaatgacaggaaactcttatgagctgtattcaatacacacttatttcttcagtatttgccaaaaagcatacatatctgcrtttttgtatggcaatatcattatggtattagatgactgatattcaaaaacagt

SEQ ID NO: 823948 - DNA, 627 bp, Homo sapiens
aaataaaaaataaataaaaataaataaaagttttatgacgccatatggtatttcttgttaactgaaaaactttgcagccacaaaaaggaacaaaaccacgtcctctgcagcggcgtggatgcggctggaggccaytatcctaagcgaattaacacaggaacagaaaatcaaatactgcgtgttctgacttacaagtgggagctaaacattagctagttatggacataaagatggaaaaaacagacactggggactgcaagactggagggaggcaggcaagggttgagaaactatctactggtactgtgctcactacttgggtatcgaggtcattcgcaccccaaacctcagcatcacgcaatatactcatgtaacaaacctgcacatgtaccccctgaacctaaataaaatttgaggccaggcgcagtggctcatgcctgcaatctcagcacattgggaggctgaggcaggaggatcacttgaggccaggagttcgagatcagcatggggaacaatgtgagactcctgtctctataaaaaaaataataaaaattgaaattgcttaaaaaagaaaaacttgtgaggcctgccttctagctattctacagaagaagccttttcaaacag

SEQ ID NO: 823949 - DNA, 588 bp, Homo sapiens
agactaatcaacaaaaaagactaaaacagaattacacaaactcagggctagaagacatcttaggtaatataattcactcratttattaattaaataactgggatcaggccaggcacagtggctcatgcctgtaatcccagcactttgggaggccaaggtaggaggacagcttgaagccaggagtttgagatgagcctgggcaacacaggagagcctgtctctaggaggaaaaaaaaaaaaaattgaattagccaggcatgatggcacacacctgtactcccatctgctcaggaggatgaggcagaaggatcacttgagcccaggagttcaagggctgctgtgaactttgattggccaccgcactcgagcctgggtgacagagtgagacatcctcccgataaacttttaattaacttttcccccccagatatagacctgcagaattatggttgttttaagtcactaagtggtggtggtgttgctgttgagagacatggtcatcactccgttgcccaggctgaagtgccggagtgacatcatagctcactatacactcaaactcctgggctcaatttaacacttaaaaag

SEQ ID NO: 823950 - DNA, 588 bp, Homo sapiens
agactaatcaacaaaaaagactaaaacagaattacacaaactcagggctagaagacatcttaggtaatataattcactcgatttattaattaaataactgggatcaggccaggcacagtggctcatgcctgtaatcccagcactttgggaggccaaggtaggaggacagcttgaagccaggagtttgagatgagcctgggcaacacaggagagcctgtctctaggaggaaaaaaaaaaaaaattgaattagccaggcatgatggcacacacctgtactcccatctgctcaggaggatgaggcagaaggatcacttgagcccaggagttcaagggctgctgtgaactttgattggccaccgcactcgagcctgggtgacagagtgagacatcctcccgataaacttttaattaacttttcccccccagatatagacctgcagaattatggttgttttaagtcactaagtggtggtggtgttgctgttgagagacatggtcatcactccgttgcccaggctgaagtgccgsagtgacatcatagctcactatacactcaaactcctgggctcaatttaacacttaaaaag

SEQ ID NO: 823951 - DNA, 619 bp, Homo sapiens
tcctctttgtacctctggtagaatatggctgtgaatctgttgggtcctgggcttttttttgttggyaggctattaattactgccttaatttcatacctggctattggtctattcagggttcgatttcttcctggttgggtcttgggagggtgtatgtggttcaggaatttatctctttcttctagattttctagtttaattgcagagaggtgtttatagtattctctgatggcagtttgtatttctgtgggatcagtggtgatatcccctttatcattttttattgtgtctacttgattcctctctcttttcttcttgattattctggctagcggtccatctattttgttaatcttttcaaaaaaccagctcctggattcattggtttattgaagggtttttcatgtctctatctccttcagttctgccctgatcttagttatttcttgtcttctgctagcttttgaatttgtttgctcttgcttttctagttcttttgattgtgatattagggtgttgattttagagctttcctgctttctcctgtgggcatttagtgctataaatttccctctcaacactgctttagctgtgtcccacagattctgatatgttctgt

SEQ ID NO: 823952 - DNA, 519 bp, Homo sapiens
gtctgtctttgaataggagatgccaaaacttgtttacattcacccagtatttctcagatcagtccagaaatttagataccatcttaatttttcttttttttttaatcacatgctgtatctaatctttaactcatttgactctaccttcaaaatgtatctgcctttgaattacttctctccccctattgccaatcatctaagccaccattagttttcacctggattattgcaataactccctaatggtctctccacttctgcattgttcccctgcagcctgttctcctctgctgctagagtggtctgtttaaaaacataaatcagatcagtgctcaaaacccttcagtgtctttccacacttgctgaaaagccaaatttattgtggcctataaagttycacactgtctgacctctggttacatctctgatcccagtcgcttaccatatttctctttgtttactcaactttagtcttgccagtctttttgctgtcctacatgcccagtgtattctcatcta

SEQ ID NO: 823953 - DNA, 572 bp, Homo sapiens
gtagctacactgggaagtttttggggttttagatcctttgaascattaaaatcttttttcttaaaacattttaattgtaacttatttcaaacacatagatactgtgaaaatagtaatggatacctatgtacccatcacacagataaaacacaggttaaaatttcgtcacattggaatgagctttattttaaaaaaatatgttattacgatgtttgccccattctcctgtcttcattcctctccctttgccacaataaacattaaaccttcattacatattcatatatgaataataatatatattgttttatgattttaaaaatttaaataaatattatctggtgtatatgttgcttggttttttgcttactgttatattttccagatataaccgtatgagtatattagatctaattcattcattgttcccagttagatgtttctttttaaaaaataatttaatattttgaaatagtttcagacttatagaaaaacttacaataataataatcctatccttcactcagatcctgcaggtgttaacattttatcacatttgttgtatcattttt

SEQ ID NO: 823954 - DNA, 572 bp, Homo sapiens
gtagctacactgggaagtttttggggttttagatcctttgaaccattaaaatcttttttcttaaaacattttaattgtaacwtatttcaaacacatagatactgtgaaaatagtaatggatacctatgtacccatcacacagataaaacacaggttaaaatttcgtcacattggaatgagctttattttaaaaaaatatgttattacgatgtttgccccattctcctgtcttcattcctctccctttgccacaataaacattaaaccttcattacatattcatatatgaataataatatatattgttttatgattttaaaaatttaaataaatattatctggtgtatatgttgcttggttttttgcttactgttatattttccagatataaccgtatgagtatattagatctaattcattcattgttcccagttagatgtttctttttaaaaaataatttaatattttgaaatagtttcagacttatagaaaaacttacaataataataatcctatccttcactcagatcctgcaggtgttaacattttatcacatttgttgtatcattttt

SEQ ID NO: 823955 - DNA, 582 bp, Homo sapiens
gggtctgttgcatagcagcctctggacacccacagtgtctattcaagagagaagaagagtgaaaaacacaaataatgtattagtatagagatagttttgactttgcagaccccttgaggcagtcttggggawccccagggctctgcagtctacattttggtccgcttttgaatgcctacagaatgtttttgaccttcccacctgaggctgggctgggaacatccctccagcaaccacaggctccccgagcctcctcatctgaccgaacctgtgtccacagagcatctgagctctcctctctatcattgtgaaatggaccgacataaaatctctcttgtttgcagagttcgtaacgacagagaacatttccataccttctcacaatcatctttgtggggagacagccaggagactgcaccctcttgcctagaacacccatgttgtggccagatccccatgtcgggaacctgctccagggataatctgctgcccccaagtcctgggggtctggttccatggggtttgctcatcttctaggactttggtcacaggggaacaatccaactcctgcctcctcctcac

SEQ ID NO: 823956 - DNA, 575 bp, Homo sapiens
gactgggtctcccagtccctggggataactccaaggggttcgggctaattatctttataktgcagccatccatcactcttgtgctcttccttagcttcttccagagggaaacagccgggaaggatggtatatataagaaagtcttcctaacagttatctgggtagtcctctggcccaactttctacaccagggtcaccttcataggccggtatttaatgactggctcttaagatgatttctttttttatttttatttttttgtagagacagggtatcgctatgttgcccaggctggcctcgaactcctgaactccagcaatcctcccacctcagcctccccaaatcctggaattacagtgttaagatggtcttaactagcaaaggacaaaggacaaagaagcaggaaggggagcggggaggcggcacatcagagccctttacccttctctacctggcagttacagttattcttcaagacaaattcaaatgggaagccttccttggtccccaaagcagagagagttcagtcccactggatatggtacattgatggtcacgatggaattatgtaaat

SEQ ID NO: 823957 - DNA, 578 bp, Homo sapiens
aaagctgctgagattgtgtgtggtgctaggagtaaaatgcaaacctccagcccacacagatgttctgtgaggcctagtccctcaaggccaggcggctcggataagtggtgagatgtcactgcccctgtcagcttcaggcctctcgccagccatccctcctcacacccgctaggcactacagcgtctcccgtcagtgcttaaacacatcagggtgaggactatccttacagtggaccactcacaccacttaaaatcagataggccctgctagtgagaaaagtgcaaggtgagctctctgcttcggccaagatggaataacagggaccagatgtaacctccctcccaaaaccatcaaataaccagcaaaaccatggaaacaatggcttttcaggacaatgaacatcaggcaatgaaggaacgaaaaccaaagaggtgagccttagcctgccccagcttcctttccagagagtgtttccaggccacggcacagggaggggtaaccaggcagagcttggtggattcctgagttaargagatggagatggagttggagaggagggagaccagggtaagaaggg

SEQ ID NO: 823958 - DNA, 603 bp, Homo sapiens
acagtagcagttccaaaccttttggtccacagatccctgtacacttaaaaattactgaggaccccaaagagcttttttttttttttttgagactgagtctcgctgtgtcgcccagactggagtgcagtgcartggtgcgatctcagttcactgcaacctccgcctcccgggttcaggtgattctcctgcctcagcctcctgagtagctgggattacaggtgcgtgccatcatgcccggctaatttttgtatttttgtagagacggggttttgccatgttggccaggctggtctcaaactcctgacctcaagtgatcggcccatctaggcctcccaaagtgctgggattacaggcataagccacggcgcccggccccaaagagcttttttaatgtgggttatatctattgatatttaccttgtttgaaacttaaaaaaatgagaactatttaaaatattttgtcttcaaattcatttgaaaataacaatgatacaactattatatttatgaaaagagcttctccaaaattaaaaaaaaaagtaagaagagtaggattacacttctgcaaatatccttaatttctgtcttaatggaagacagcta

SEQ ID NO: 823959 - DNA, 568 bp, Homo sapiens
tcgtgggctggcaggagccctgcacaccctccacacagagcaggctcccctcgaggtcatcgcggaatgaccctgatttcctcatctaatttgagaggaggtttatttgggcargaataataaaaagcacagcaaatgagcagaggaaaacagaacccaccagacatgcaaactcacagaaataaacaatttgccgatgatcagggaagaggctacaggaaggagtttgtgcagacagctcctatgagaaaatggtccctgggaggtcccagagggctttccggctgcacgctgaccctggaggcagctgtcagctgtggcaccatggttgttctcgtgcttggagctgtcttcaaagccagtgagcgagccactcaagaaacttggttggtcaggtggcttcacagatgtactctgctttttacccaaacagtctgcacagtgcattgtccatcagcatgtgtacccagggagcactgtgaattcagggccctgtgtctccagtactcagcatggttacagaatgggtgaaggtgcagtgaagtgacaccctcttcccatcactaag

SEQ ID NO: 823960 - DNA, 610 bp, Homo sapiens
gtatttaaaaaacaattcaacattaattttcaacaatttaaactcaaaattctactttatctttacaaacagaagacatttttactggaataagagtttaaatattttgtattatttggaattactacctacaattactctatttttaaatttcttttagagcagttggaacatctaagccttgtcccgttccccttccactaaggaatctttgcttcttagctaagaaatgcaacagcaaatttaagagcagcaatttttcctcaggagcaatgtttttttctgagtgcaggcaggatgtgatatcctcctacagtcctcaaatgtacctttttgtttcagtgtatagagagccgatattatgttttccaaaataatataaagccagtgaatatataaagaaactaaaatggctgtgcaacattatgggcaatataagaagtacttttatttttatttctacttaaataaatgttgttctgtttagtggaggtctaatttattattcaytgatggtaattagcttgcttattttccagcttcatgtctcctggcttcatgttgttgataaatccgaattgaattttcctttgttttcttttctagcact

SEQ ID NO: 823961 - DNA, 638 bp, Homo sapiens
gcaagtcgagcaggaatttgatgactaactgagtggattttattttattttttaagaattagaaggagaaaaaagaaaagaaaaagargagaaggagaaaatgaatggaaattgcacattactatgagtcaatcatggtactggggattaaggatatcgtctaatttaactgtctcaaatcttgagaagggtgtttatacaccttttacagaaaagtggttgaagctgaaatatgttcagcgtatgctaattggtaataaacaactttttgaactccactgatgcttgaattttcactctgctggaagttgtcaggtccaaattttaaagcagacctgtcagcttcaaaccatgagcttctgccgttgtactgttctgcagaaaagtaatatgacttcagttcctctggcattagtgtgtagcaagatcagagtgtgagagatcagaagaaggagcactctggtgatgatgataatatgtaccatttatggtgcacacagatgtcccagttgctacctctagcatctctcattttttcaataatgtgcaagctcagtaacatacatttttaagaagtgagaattagagatgtcaagaatgtaaaactatcaagggcgaaggttgaaattcaaaatagg

SEQ ID NO: 823962 - DNA, 638 bp, Homo sapiens
gcaagtcgagcaggaatttgatgactaactgagtggattttattttattttttaagaattagaaggagaaaaaagaaaagaaaaagaggagaaggagaaaatgaatggaaattgcacattactatgagtcaaycatggtactggggattaaggatatcgtctaatttaactgtctcaaatcttgagaagggtgtttatacaccttttacagaaaagtggttgaagctgaaatatgttcagcgtatgctaattggtaataaacaactttttgaactccactgatgcttgaattttcactctgctggaagttgtcaggtccaaattttaaagcagacctgtcagcttcaaaccatgagcttctgccgttgtactgttctgcagaaaagtaatatgacttcagttcctctggcattagtgtgtagcaagatcagagtgtgagagatcagaagaaggagcactctggtgatgatgataatatgtaccatttatggtgcacacagatgtcccagttgctacctctagcatctctcattttttcaataatgtgcaagctcagtaacatacatttttaagaagtgagaattagagatgtcaagaatgtaaaactatcaagggcgaaggttgaaattcaaaatagg

SEQ ID NO: 823963 - DNA, 380 bp, Homo sapiens
aaagtgcttttgaaagtatttcctgtagctctattttttggaagtaggagtattgttattaattattctttgaatatttggtagaatttagcatgaagccatctgstctagggattttctttgttggaaagtctttgattatttctttagtctctttatttattatttatcatatcaggctccctatttcttcctgatttttttggtaagtgatattttcctagggatttattcattttctctaggttatttaacttgttggcatagacttgttcataacaatcccttataatcctttttatttttgaggcatctgttgcaatgtttccatttctatcttattatctgagtattttttctctttgtcttagtctggctaa

SEQ ID NO: 823964 - DNA, 380 bp, Homo sapiens
aaagtgcttttgaaagtatttcctgtagctctattttttggaagtaggagtattgttattaattattctttgaatatttggtagaatttagcatgaagccatctgctctagggattttctttgttggraagtctttgattatttctttagtctctttatttattatttatcatatcaggctccctatttcttcctgatttttttggtaagtgatattttcctagggatttattcattttctctaggttatttaacttgttggcatagacttgttcataacaatcccttataatcctttttatttttgaggcatctgttgcaatgtttccatttctatcttattatctgagtattttttctctttgtcttagtctggctaa

SEQ ID NO: 823965 - DNA, 641 bp, Homo sapiens
cagttatgcctgtggaactatgagtcaattaaacctcttttcttcataaatcacccagtctaaggtagttcttcatagcagtgtgaaaatggtctaatacatacactwttctgtgaaacttttcttttagtttacagggtgtgaagatttcaccaagattgatatggaattttataggatactacatcttaatcaacttagatgctggtgttatatatttttttatttttttaacttgctggcattagtttactaatatgttacaattttttaacttgctggcattagtttactaatattatgtttagaatttttatattcctatacatacaaaaggttggcctatggttttatttccagcaccatattttttggcttggtatcaatattttaaaagtctgttttttatttcctgactgatataacagaaactttgaactgcatatttacagtataatacagatatgggccccagtacccttctttcatggaacatgtctcaggcttcctgattcagggagcgtgcacattaccgacactggtctagaggagctgctctcctgtgggggtgacctataggtaaacatatatacctatacacatatatacacattcatatatatatatatacacacacacac

SEQ ID NO: 823966 - DNA, 609 bp, Homo sapiens
ttggatccttccctctgttggctcttagctgagtgatatggggcaagctttttagtctctcaaaatctcagttctctctgtggtcatgggcagataataagttcacttttaagattgcagtgagggtcaaatgaggaatcacactcagactgtcttttgcttctgaacatggtggaattaatttaacggtctttttgtggggaaaacccatctcctggttactccacgtcatgaactgcccgaggcttgccacatctcctcacctctccggtacaaaaaataactgcagcacaaaaggccggggttcctctctgtagaaggtaggcccctgactttcatcaggatctttgaggtgggtgcaaatatcatggcactgtcagatccgatgttgcatcctggcccttccgtgatccttggaagatactgtggtggaggcttatatgttgtcatgtgaacctcgagggctacacctggctgttatgccattgactttttatttattttttatttatttatttatttatttwtttattttattttttattatattttaagttttagggtacatgcgcacaacgtgtaggttagttacgtatgtatacatgtgcc

SEQ ID NO: 823967 - DNA, 545 bp, Homo sapiens
taacagattatatgaaaataatatcttttattattattgtctggatattatttgaaatattacrttttgtatacatttatttatttcaaaatccaagaattaattcaactgtctttctcactcaaaccacttttcgatacacatcccccagaggtaactctcatggtgacttttgtagcagtcatttttttaggtaccgtgctttattgttttatcattgaagtcactgcagcttactcttgtccatttcatccttccctcttctttacaacctccctgttgaacatcctggtcatttacttcagtttcccctcagctcaggactgctgcctgtacactgtggctgtccatcaacctgctcctctgtcttccttatttctaaaaaaattggcatctgggccatctctagtaccattcctttggtgagactgttgttggagttatgttctttcattaggaagaagtttatatctgattgtctctcttttactgatgccagcaccattgctgcttaacgtctgcatcattaatccactgggcttaca

SEQ ID NO: 823968 - DNA, 545 bp, Homo sapiens
taacagattatatgaaaataatatcttttattattattgtctggatattatttgaaatattacattttgtatacatttatttatttcaaaatccaagaattaattcaactgtctttctcactcaaaccacttttcgatacacatcccccagaggtaactctcatggtgacttttgtagcagtcatttttttaggtaccgtgctttattgttttatcattgaagtcactgcagcttactcttgtccatttcatccttccctcttctttacaacctccctgttgaacatcctggtcatttacttcagtttcccctcagctcaggactgctgcctgtacactgtggctgtccatcaacctgctcctctgtcttccttatttctaaaaaaattggcatctgggccatctctagtaccattcctttggtgagactgttgttggagttatgttctttcattaggaagaagtttatatctgattgtctctcttttactgatgccagcaccattgctgcttaacgtctscatcattaatccactgggcttaca

SEQ ID NO: 823969 - DNA, 519 bp, Homo sapiens
ttttccatataaactgatatttcagtcaattctttgttctcttctccaaccacattctgctccaaactaactcaacactcacttggatgggcaaactcttgatcttgttaccaactgctgcaatagcttcctaatcacaattttgggaaggctgatctctaacatctacccctcccagatttctaccatactccctctctagccccactccaaaaatccttttccttacaaggacctcaagtccagttctccccctatctcttcactgtctaacaacagttgtctcatgccctctgatcctctgttattcatcttaaaatctgggatttttcactttaatcaagattttcatccatcttccaggtgtctctgtacatgcttcctcaaaagataaacagcaaccacaacaggaactgaaaaacaactytgcaccagtgtggctaaatgtgcctgggcaaaaacaaacaaaacaagctgactgttctcattttgaagtcataacttctaatatcgagtggc

SEQ ID NO: 823970 - DNA, 312 bp, Homo sapiens
tcaggaaagtaacttcatctctgctacatatgctcttggattttccttctgtgtatctcacctgcctcttgcccccacattaaagtataatttttctctcagtccctccaaagtagaaggatctcatttaagaactgagagtccgtgaatgagccaatttattaaaaaataaaatatacactctgaaaaggaagatctgaagagaaaatgaatcagaagatcaatagaactctttaaaaaatgcaatratggacagcaaggaacaatatacccatcttgctttaaattacctgctaaaagagataggtaaaa

SEQ ID NO: 823971 - DNA, 643 bp, Homo sapiens
cttcttcaaagaagaattcctaatactccagactgttagctgttcccctagcatcttcacttctttacactgcctattacagttgtagttatgtaattagttgctgtttaaacactgtgtccctagtcagaatataaactttgtgaactcagacgctatggctgtcttgttcactgctttgtccacagcatttatcccaatgcccagcacacaatggggttcattaaatatttgatgaatggatagcaacattcatgttgtagagatacatatggcctcttctttgacacgtgggttctggaacagaaagaacctggcctgtcccgtatcgtattgttattcttttaactttggtttggtttgattatttttatcctctgtgtttttacattttgttttgtaaaggcaagaaagaaccctcaagtggattgcctctggcagttggagccacaccggtgttctcagaatacaccctgtcctttccaatttccttcatatgcggtaaccaccaacagtcttggagtaacaagtcttaaattctgattctcagtckgctaaagtaagatcccttgtggccccaaccacacgccactttctctctgaaagcctatctgttcttgtcagaacttctctcttcttgcta

SEQ ID NO: 823972 - DNA, 637 bp, Homo sapiens
gccaagagcagcattggtagtaagttggacactggacgccaaagacagaatcagcctcttcatcagtgatatccattcatttattgattaattaacagattaatttattagacaaatgctgactgraactctgttatactggagatgtgctatgcgatatgatacgaccttcagtacaaaatatataagcccaggaaggagtgagctgataatattaagcttttactatgccatttatagatctcatttcctctattacattattctctaggcaacttgatattttctctcctgcatcttctcaatactcactaaagactgaatttattggcttaaagtaagaaacatgaagctatcaaaactaacgagctcacacctgcttagccaaggaggatttttcacccatacctctcggtttaggtgcagggtttggggaaggggaaaagacttaaaactgggaagttgtgatgtcctcacatagatggctagtccctgcagcttgtctttatgccgtaagtgtgacattagccattcccaatgaaagtggctgcttcagaaggtgcaggttgcagtggtctccatttatgtggggagctttacaaaacccatgaccaggctacatccaaaccaattaaat

SEQ ID NO: 823973 - DNA, 656 bp, Homo sapiens
gaattgttttgctgtctttttggcttttccaacacttccagaaaggcccacagatctctgagaagtcactttttgtgtttattattataacctggaactaaattgtagagccctgagaacaggtstcacagaatgggcctcaggtaatcaattctgttgcatcctggagataaatacactctgtgctgtctggtaaggaaggaaagaacagataattatggagttcctgctctggaatggggacagttgcttatcttctaagtgcctcagtttcctcacctgtaaaagagggacaataataccagctcggagagacaataaaggcagaaaggtgcctggcacatgtaggtctttggtaagtgtgtgttcttaccagcacatagacccttcttgtcctagttcattttgtgttgctataacagaatacctgagaatgggtaactcataaagaacagagatttatttcttacagttgtggagtctgccaaatccaaggtcgacagacccacagaaaggcaagaaaacgtgcacacacatgagaggaagggggtcaaactcatcctttttatcaggcatccactcctgtgataactaacccactcctgggataacagcattaatccatttatgaggcagagccctcatgacctaatcac

SEQ ID NO: 823974 - DNA, 646 bp, Homo sapiens
agcttccattaggactgtcgctccctcggtcccagcactgcctgttcctctttacctttgcaggtagtggggaaaatayacaaggagacctagattctgagtgtttcttggacacgggtgctggcagctttgtgcaggagtatctctcaacatccctggagtcaacattctgaatgtcctgtgtgatgctgatatcaccaactctgtagaccctgagcctgctcactatcactgagccttcacgtcaaaacaggaaaatgatgagaggtgactggtgctccggtaagaaactccgataagtttctgcatcagatcctgtacatgagaaaaactgtcatgaagaggcagcacagcatagaagctagaagatcaaatctggaattacgcaaatcagggtgtgaatattggctctgctccttccagctctgtgacctggggcaagttacctaacctctctgagtctctgttgcagctgtaaagcagaaatagtaataactatttcacagctttattagcaaaagtgcatgatatagtgatgttaagtgcttaacacagagcctggtccacaggaaacactaaacaaatgtttgttgttattatatcgttgttaaaagcaaaaaaaaaaataaaataaaataaaaacctg

SEQ ID NO: 823975 - DNA, 477 bp, Homo sapiens
tttacacaataccttttaactagagggcctatatttatttttgaaagcaagtgtgtgtttgtatatatttctgtctatcatctcctcctaatgacgtggtgttacctccagggcagaacayggcatctatttagtgaaagccgtacaagaatattaatgtaagaccaatgggaagaagaaactccttctggtcttgtgaaacttatggggagggggaattaaatcgagcagaatatgatcatttattatactggttacagtcaaataagcaacagaattaataagtatcattttgcttcttaatgctactcccctctaaaggtcacatttcccaaatcttttggttttggattagatgaggttcctggggatcttcattatcctctaaggacaagctttacggtctctgaagggggcacctgagttctgtttgggaggtcacacgttgacagttgttctaacaggttgatgtgacac

SEQ ID NO: 823976 - DNA, 627 bp, Homo sapiens
atattttaattaatcccacccctgtcaccttcatctctccacccactctccagcagccactgcactcagtgcacaccatctccaggagggacaccacgagggctaagcctggagcctgacagcaaacaccctacccttcctcctagccgccaaggatttctctctcttatctcaatccccacactttccccgaaggcaaaggtcactgcaggaagctccccaaagttaattagccctcattctcggaagccaacagcctcctactctaaataaggaagagccgtccagtccctttgaacccgcgttctccttaggtaaatgggttctgcacaagctcattatcagaatcacctgggagctttaccaaactacaggtgcctcgctgcctacgaccaatttgctgaatcagtcatttcaagatggtgcccggaaagctgtattttgtgcccctttggagagtccaatgttcagccagatttagaagctgatatgcttcattggaaacaacttctccataggctytttatttggccaagtaacaaccacaattatcttatcaaggcaggaagtgtcgtttagtacacaggctttggagttgagcaaacctggattcaaatcctgggccca

SEQ ID NO: 823977 - DNA, 605 bp, Homo sapiens
cattgttgctcttttctttttctcatgtcctatcttcttttaattaatttttttatttaaatttgtctttagttttatcttactatttattcctgttttaacttttatttatactttcagtgcttaatgtaaaatgtgcaataataatctgcaaattctttcctactgttctttgttattgtcatagaatttatttttgtttgttgtaaaatccacaacacattgatattaccttggcattaaacagacagctgttttttaacaaaataaaaaaatagagtataagtattttattgccttacatgtttaatattttcagttctctttatttcttaatttatatccaaatttatttattgtattagtgttcttcctctcaaagaacttctatatcaattcttataatgaagatgtaatggtggtaagtcttaccagctgtgctttgactgaaatatatttactttatctccatatgtgacagatgtttttgctgggcttagaattttaggttrtcaaaagtttttcagagtttaaaaatgctattttctcttctcacttgcctagattctaacaaaaaggttactatcactctgatctttgtttct

SEQ ID NO: 823978 - DNA, 415 bp, Homo sapiens
acccagaaaaaattgacttttcaagaactgaatcagaacctatcctgtgaaatgttaggacaagtagatcctaaaatcttccagagggaatccattcaaaggccttgaatggcattagacttctccatatcaayactggatggtgaaagaaaaagagcaataccttaaacttgctaaaagaaaatgatttttaactagaattcaatttccatctcaattaaaaaacccactgtaaagaaaaaattcaaatcttctcaggcatataataactctaaaattctacctcctgtgcacctaattttggcaagtatctcaggaagatacactttgctagaacaaggacatagtttaagaaagtggaagaaatcagatctgggaatcaggggatcacatgatacagaggcacagccagagg

SEQ ID NO: 823979 - DNA, 606 bp, Homo sapiens
actgaagctcttttgctctccttgttttrcagatgagcaaactcacagagggatgcaacttgcctaggatcgtatagccagcagctcatgagtgtggaatggggattcaaataaggtctaggagactccaaaatccatgtgcttaaccatgaagttttactaccccttctctgcttcttcattaagtatttttagtgcctaattgcccatgctctctgccaggtgcagtaaaggaggattacacaggtgcaatatgagccatgattcttgttgaaatcagcacgtcaaaaataaggctaatgagcacgtgaaaagatgctcaacatcactaatcattagggaaatgcaaaactgcattaaaatatcacctcatatacattaggatggctactatgaaaaaaaccagaaaataacaaatattggcaaggatgtggaataactggaacactcatgcactgttggtgggaatgtaaaatggtgcagctgctgtggaaaacagtatgatggctctttaaaaaattttaaaaaaatagatttctcatataattctgcaattccattcctggatatataccccaaagaatggagaaaacaggatcctggaga

SEQ ID NO: 823980 - DNA, 606 bp, Homo sapiens
actgaagctcttttgctctccttgttttacagatgagcaaactcacagagggatgcaacttgcctaggatcgtatagccagcagctcatgagtgtggaatggggattcaaataaggtctaggagactccaaaatccatgtgcttaaccatgaagttttactaccccttctctgcttcttcattaagtatttttagtgcctaattgcccatgctctctgccaggtgcagtaaaggaggattacacaggtgcaatatgagccatgattcttgttgaaatcagcacgtcaaaaataaggctaatgagcacgtgaaaagatgctcaacatcactaatcattagggaaatgcaaaactgcattaaaatatcacctcatatacattaggatggctactatgaaaaaaaccagaaaataacaaatattggcaaggatgtggaataactggaacactcatgcactgttggtgggaatgtaaaatggtgcagctgctgtggaaaacagtatgatggctcttwaaaaaattttaaaaaaatagatttctcatataattctgcaattccattcctggatatataccccaaagaatggagaaaacaggatcctggaga

SEQ ID NO: 823981 - DNA, 536 bp, Homo sapiens
cctgggcccttccccaccatatccatatccaatcagtccaayagtgccatcacttcactaccaagcagcttcccatttccagttcctaattcaaccatcattttgaagagcacaacctaagaggttagccttaaatatgtccctttgacatatttctcacttgtagtcagaggaatatttccaaaaggcaaaccatatttttctccttacctctattttgtccactagttctctctccttctcttttgttctcttcctcccttgcctacagctcgctccctgcttcaagcacccaccgttctcaagataaagtctgaattccttaaaatggtaaagactcgtgtagcctagcccccagcctcatcttctgccttcctgctgaacttcaagttcaaacacaacaaaccttctctagtcttcagagtgaccttctttgttagatgggtcctttcccccaacatccctctttgactggttaacttctgtttatcttttacatcttagcgtagcccaccagcaggtagatttgagtataa

SEQ ID NO: 823982 - DNA, 618 bp, Homo sapiens
cacagatcaaaaacattttaaaaatatacgttcctcgtcccgatgactctcacagatcaaaaacgttttaaaaatatacgttcctcgtcccgatgactctcacagatcaaaaatgtttaaaaaatatacgttcctcgtcccaatgactctcacagatcaaaaacattttaaaaatatatgttactcaggccagacgcggtggctaacgctgtgatcccagcactttgggaggccgaggcaggtggatcacgaggtcaggagacagagatcatcctggccaacatggtgaaaccctgtctctactagaaaatacaaaaaattagtcgggcgtggtggtggacgcctgtagtcccagctactcggaaggctgaggcaggagaatggcatgaacccaggaagcggagcttgcagtgagccaagatcgcgccactgcactccagcctgggcgacagagcgagactccgtctcaaaaaaaaaaaaattatatatatatatatatatatatatatatatatatatatatatatatatatatatatatgaaataatataycttactcgtccagatgactctcacagatcaaaaacgttttaaaaatatatgttactcgtcccgat

SEQ ID NO: 823983 - DNA, 618 bp, Homo sapiens
cacagatcaaaaacattttaaaaatatacgttcctcgtcccgatgactctcacagatcaaaaacgttttaaaaatatacgttcctcgtcccgatgactctcacagatcaaaaatgtttaaaaaatatacgttcctcgtcccaatgactctcacagatcaaaaacattttaaaaatatatgttactcaggccagacgcggtggctaacgctgtgatcccagcactttgggaggccgaggcaggtggatcacgaggtcaggagacagagatcatcctggccaacatggtgaaaccctgtctctactagaaaatacaaaaaattagtcgggcgtggtggtggacgcctgtagtcccagctactcggaaggctgaggcaggagaatggcatgaacccaggaagcggagcttgcagtgagccaagatcgcgccactgcactccagcctgggcgacagagcgagactccgtctcaaaaaaaaaaaaattatatatatatatatatatatatatatatatatatatatatatatatatatatatatatgaaataatatacsttactcgtccagatgactctcacagatcaaaaacgttttaaaaatatatgttactcgtcccgat

SEQ ID NO: 823984 - DNA, 498 bp, Homo sapiens
acttaaagcaaacataaccttaaacggtaaataaagaacccggaacttggaattaacatatgcgtttctgatgctagctctgccactaagatcacaccactgtatgatcttggatgagtcattaactctctaggtctgtttttttcatctctaacattaagaggttttataatttcaaagttctcttccagctatgaaattttattattatattctgcaaaagtatttgtcagattaattcctagacatataaagacatataaaggtttaacacattatctattgttatttactctgccatttctcctctccatttgtgtggacaactgaaagtcaattacgtatgctaaggcaaagacattggggaagactccctatacttttactccactggcatatctagatgaacaacttagwgccctgctgattaaaggactcaaagactcatccatatccatttctctcacaagtttaaagaagcaaaacccagtcgctgct

SEQ ID NO: 823985 - DNA, 552 bp, Homo sapiens
tgggacagtttaaccagagaattatcatgctatttcatatattgggttagggggacaattacaaggaggtgggagaaggctgttaatgccataagagcaaaggaagaaagggaaacaaacattaaaactatttaaagaattcaaaccaaaggagaaaccacaggttccatacaatctcaagggaactgtcagacaagctttggggattatctttgaagtaaaagagcacctgacttacaagaaatgaaataacagtgtcctcagagaaaagggtcatgaatcctgtctaattttgacagtgtgtgtgttggagggagtttataagtattttaactaactgtgggtatctaaatgttgggatttatggggttgccacaatgtggcctagcatatatagaattcctttataacaattaaagcgactataaagtagatgtagggctaggcatttagaagatggtggtgggtatttccccrtttacataaggcaacaataattgtaaaaattcctaaacctgaaacaccaagtgtgatagccaatagaaggggagt

SEQ ID NO: 823986 - DNA, 668 bp, Homo sapiens
catattccacaatttaatcattaagaatgaacaattatgtattttttgccagttacatgttaacacacaaaaacataactggattgctcaaattaatcccctatgtccaagcccggcatgtaaattaagaaagtaacttttgaccttttccttaagtgtaattttggtaatttaactatgtagtcactgtgggaaaaaaaaaaaggaaaattctttaaactttaaagatggtcctggcccagaatctttgagaacatttgaattctcatcaccaagtggggaggggaattgatgtggaaagtggggaccactttaagttcattgctaaacatgccagcaagatcatgatccattcattttcctaggcttctggttctcaggcttttgtctcaggagaaaagtaattggccctgttaaaaggagactttgacaagtaattttaagaggcatattttgagcattactagcaacagaaggaatgcggtattttagaagtcaggatcagtgggttccaacttgcttgtgaaattgggctactatttttgaaagtacttgttgtgccaagaagagaatctgtaacgaggcaattttgttggagaaattgtctgtactgtagctgacactactctgtagctttctgggatcckatctctggtgacttttttgag

SEQ ID NO: 823987 - DNA, 674 bp, Homo sapiens
gctttgtttaaagaggcaaaaaataggatcccaatttcttctagcttgcagggtttgtgctgagaaatctgytgttattctgataggttttcctttgtatgttacttgatgcttttgcctcatagctctattatttatttagttagttagttagttagttggactctcgttctgtcacccagggtggagtgcaatggtgtgaactcggctcccttgcctccaaggttcaagtaattctcctgcctcagcctccccggtagctggaactacaggcacatgccaccacacccagctaatttttgtacttttagtagagacagggtttcaccatgttagccagactggtcttgaactcctgacctcaagtgatccgcctacctaggcctcccaaagggttgggattacaggtgtgaaccaccactcccagccttgcctcacagctcttaagattctttcctttgtcttgactttagagaacctgatgactgtgtgcctaggtgaagatctgtttgcgatgagttttccaggtgttctttgaacttcttgtatttagatgtctagctctctggcaaggctggggaagttttccttgattattccctcaaatatgttttccaaactttgagatttctcttcttcctcaggaacaccaatcatccttaggtttggatgct

SEQ ID NO: 823988 - DNA, 597 bp, Homo sapiens
actcagtgctgccctttcacagcagagaataaagctgtgytgggcccagccagcacccacagatggcgggagcatatggaccagccctagccagagaggaattgcccataccagtggtcagaacttgagtttcttggcaagccttgccactgtgggccaaagtgctctagggtcctaggtaaacttgaaaggcagtctagaacacaagaactgaaatttctaggcaactcctagtgccaggctgggcttagagtcagtgaattagggagtcatgtgacctagggagacaccagatggcatggctaagggagggcttgcacattctttcccaaaccccaggcagtgcagcttgcagcaatgaaggtgactccttccttctgcttatggagaggagagcaaagagtaaagagggctttgtcttgcattttggataccagctcagccacagagagggcaccaggcagagtcatgaggcctccattacaagccctaactcccagacaacatttctagacacaccctgggccaagatggaaacccccaaccttgaagggaaagacctgatcctggcatgactcatcatctgctgactaacga

SEQ ID NO: 823989 - DNA, 606 bp, Homo sapiens
acctgttgggaggtgattggattgcagggttggtttcccccatgctgttctcatgatagtgagttatcatgagatctgatgtttttttaagtgtttgacagctccccctgcacggrcattctctttctctctcacctgctgccctgtaagatgtgcctcttccccttccgccatgactgttaagtttactgaggccttcccagccatgtggaactgtaagtcaattaaatctcttttctttataaatgacccagcctcagatatttacttatagcaacgtgaaaatgaactaatatacgcaggtggtaagcatattaccctataagtagtttttcaacccttgtcctcggcctctctcccacctttagtagtccccagtgtctgctgttcccatctttatgtccatgtgtaccaataaatacatttcctgaacaaataaatgacagtcatttaaatgaacaatctaatgaactaaaaaggtaaataactttttctactgaatatttatttatgttattgaacaccaaaaattctacttcaaataaggaatagaaataatgtccatttaataatatttagatatattgtcaaacactctgctgttct

SEQ ID NO: 823990 - DNA, 486 bp, Homo sapiens
tcttcttatgtagtaccttgcaggggttctctgcatttcctaactttgaatgttgtcttctctagcaaggttgctgaarttttcatggatgataccataaaatatgttttcaaagttgtttgcttttctcccagtgtctttcagggatgccagttgccagtgactcatagttttggcctctttatgtaattccttatttcttgagggttttgtttattcctttttactcttttttctttacgttggtctgactgtcttatttcagagatccagtcttcaagctctgagattctttccccatcttggtctattctgctgttaatacttgtgactgcattctgaagtttttgcagtgtgttttttagctccatcagatcagttacattcttttttatactgtctatttcatctgtcagcttctgtatcattttattgtgattcttagcttccttggattgggtttcaacattatccttaatctcaatg

SEQ ID NO: 823991 - DNA, 486 bp, Homo sapiens
tcttcttatgtagtaccttgcaggggttctctgcatttcctaactttgaatgttgtcttctctagcaaggttgctgaaattttcatggatkataccataaaatatgttttcaaagttgtttgcttttctcccagtgtctttcagggatgccagttgccagtgactcatagttttggcctctttatgtaattccttatttcttgagggttttgtttattcctttttactcttttttctttacgttggtctgactgtcttatttcagagatccagtcttcaagctctgagattctttccccatcttggtctattctgctgttaatacttgtgactgcattctgaagtttttgcagtgtgttttttagctccatcagatcagttacattcttttttatactgtctatttcatctgtcagcttctgtatcattttattgtgattcttagcttccttggattgggtttcaacattatccttaatctcaatg

SEQ ID NO: 823992 - DNA, 603 bp, Homo sapiens
atcacatcagcccctgtggcctcaggctccaggcccaccccaggttccagactagtgtagagtgaggtcagcccagagagccccagacttcaggcctgctgcagaaccatgccagcacccctggccttaggcaccaggtaagtaccatgcatataggctccaggcttgcctagtaccaggtcagtccctgtggctccaccctccaggctagacccttaagccccacactccagcagatctaggatccaggcccacttcagcagacccatgtttcaggacagcctctgtggttgcatgacccacaatagccctcacagacttagtctccaggcaagcacccatacaaccagcttccaggctggcccccacagccacaggcaccagaccagtcactttggcttcaggcattaggccagcctctatgatcccaaactctacacctaccccagcaccaagccagcctcaggctctaggctkgcacccatggagccaggctctagtagacacagggtccacacccaccccactacatcctgaagccaggaagactccttgaaccaaggctcctggaccactcctacagactcaagttctaggccagcc

SEQ ID NO: 823993 - DNA, 603 bp, Homo sapiens
atcacatcagcccctgtggcctcaggctccaggcccaccccaggttccagactagtgtagagtgaggtcagcccagagagccccagacttcaggcctgctgcagaaccatgccagcacccctggccttaggcaccaggtaagtaccatgcatataggctccaggcttgcctagtaccaggtcagtccctgtggctccaccctccaggctagacccttaagccccacactccagcagatctaggatccaggcccacttcagcagacccatgtttcaggacagcctctgtggttgcatgacccacaatagccctcacagacttagtctccaggcaagcacccatacaaccagcttccaggctggcccccacagccacaggcaccagaccagtcactttggcttcaggcattaggccagcctctatgatcccaaactctacacctaccccagcaccaagccagcctcaggctctaggctggyacccatggagccaggctctagtagacacagggtccacacccaccccactacatcctgaagccaggaagactccttgaaccaaggctcctggaccactcctacagactcaagttctaggccagcc

SEQ ID NO: 823994 - DNA, 603 bp, Homo sapiens
atcacatcagcccctgtggcctcaggctccaggcccaccccaggttccagactagtgtagagtgaggtcagcccagagagccccagacttcaggcctgctgcagaaccatgccagcacccctggccttaggcaccaggtaagtaccatgcatataggctccaggcttgcctagtaccaggtcagtccctgtggctccaccctccaggctagacccttaagccccacactccagcagatctaggatccaggcccacttcagcagacccatgtttcaggacagcctctgtggttgcatgacccacaatagccctcacagacttagtctccaggcaagcacccatacaaccagcttccaggctggcccccacagccacaggcaccagaccagtcactttggcttcaggcattaggccagcctctatgatcccaaactctacacctaccccagcaccaagccagcctcaggctctaggctggcacccatggagccaggctctagtagacacagggtccacacccaycccactacatcctgaagccaggaagactccttgaaccaaggctcctggaccactcctacagactcaagttctaggccagcc

SEQ ID NO: 823995 - DNA, 595 bp, Homo sapiens
cttaaagaaaatgtttatggaatttaagtccaagccaggatgggggcacatgtggttgaatggaacagggggcttcatggagcaggtcaaacgcaggtgagattcgactgtagagtagagggagtgtgtgggttgctggggagagaggcaggcagccgaaatgacagaaatacttactgaaatatctgtgtccctttcggctggagactgagagggagactacatctgtgaattaagtgtaacagaatgctctgtggctgaaaagaatcctcacgtgtacttaatatatgttcacttagaagaaggtaaaacctgccatttcatagcttacaaatctctctctatatctgtgtttgtgtgtgtgtgtgtgtgtgtgtgtgtgtgtgtttaatctaccaaataattcagaatttaaatctgggccagattaagtctttgtttcattcaaagatattaattaagcgaacttggccgggcactgaagrtaggcaaaggagaagaatgtggctcctgcagccctggagctcaggaatctgtttggaaagacaagcgttgcctgtgctgtaaagaaacacagacttacgtaagaatggtg

SEQ ID NO: 823996 - DNA, 512 bp, Homo sapiens
aatctatttatacctaccccaagctactgcatcaaattataacccatttttccttcagaaataaaacctctctgaaatattttgaaatgttgaaaacaatctgtaggtgcttacaaatagagaagatytgcacatgcttacaaatggatatctatttttgatatctaggccatcctttttctgaaatgcctaatgatggtagagttgtacccaaccagggtcacaagggcctgctctcctcctatcctagtgggtgcaattttaaggaaagccgaagggcattctcatcatagcaacggaaattacaaccagtaatcatcacagagtttgtagagccctcaaagagatgagctacaggtttaattttggattggagcttgttagagccaaggtgaatatatctaaaagggttgggagccctttcatagtggaattctgtgttggttatggaatatgcctcctcctaggcagacatcatgaatttcatcatggtttgggttttacagggtttc

SEQ ID NO: 823997 - DNA, 493 bp, Homo sapiens
atagatgttttaaaagaaccagggctgggtgcagtggcttatgcctgtaatcccaacacattgagaggctgaggcaggaggaccacttgtggtcaggagttcaagaccaaattgggcaacagagtgaaacaatatctctattaaaaaaaattttaattaattgggtgtagtgatgcacacctgtagtcccagctactcaggatgctgaggtgggaggatcgcttgagccctaaagattgaggttgcagtgagccatgattgcaccactgcattcaagcctgggcaacaaagtgagaccctgtctcaaaaaagaaagaacgaaacagaaatcttggagctgaaacaaataatctcatttaaaaatgagcaaaaagatctgaatagacatttcctaaaagaagayatacaaatggccaatgggtataggaaaaaatgttcagcatcactaatcatcagggaaatgcaaatcaaaaccacagtgaggtatcatctt

SEQ ID NO: 823998 - DNA, 621 bp, Homo sapiens
taataaatgctggcaaggttgtggagaaaaaggaatggtctggcgcagtggctcaygcctgtaatcccagcactttgggaggccgaggtggtaggatcatgaggtcaggagatcgagaccatcctggctaacacagtgaaactccgtctctactaaaaatacaaaaaattagccaggcatggtggcgggagcctgtagtcccagctacttgggaggctgaggcaggagaatggcatgaacctgggaggcggagcttgcagtgagccaagatcacgccactgcactccagcctgggtgacagtgtgagactccatctcaaaaaaaaaaaaaaaaaaaaaagaaaaagaaaaaaaaaaaggaacacttatacactgttggtgggagcataaattagtctagccattgtggaagacagtatggtgattcctccaagacctaaagacagaaatactatttgacccagcaatcccattactgggtatgtacccaaaggaatataaaccattctattataaaaacacttccttaacctgcacaatgcacatgtaccctaaaacttaaagtataaaaaaaaaaaaacaaaaaaacacttccacacacgtgtttattgcagcactattt

SEQ ID NO: 823999 - DNA, 528 bp, Homo sapiens
agacttattacaaagctgtaataatcaagacagtgtaatactggcataaaagatgataaatagatcaatgaaatagaatacaaaaatccataaatagccccatatatatggacagctgatttttaacaaaaatgcaaagggaattcagtggagaaattaaagttccttcaaaaatgtactgagaaaattagatcccaatatgcaaaaagaaaaacgaactcctatccatacctcacatcatatataaaacttaattcaaaatggattgtagatctaaatataaatcctaaaattataaaacatttagggcattgaaaaatttaatcttgatctaggcaaagattttttagattcatcatcaaaagtatgacccaaaaaggaacaaaccgataaactggacttcatcaacttaaaaaatgtttgctctttaaaagacactgtgaagagaatayaagacaagctacagagttagagaatcatatgtctgatcaatcatatagtttataaaaaatttatatctcaaataca

SEQ ID NO: 824000 - DNA, 594 bp, Homo sapiens
gaaatagggctttatagacagggagtcacactctctgtctctctctcttttttttttttttttttttttttttgagacagagtcttgctctgtcacccagcctggagygcaatggtgcgatctcagctcactgcaacctcctccacctcccaggttcaagcgaatcctcctacctcagcctcctaagtatctgggattacaggtgcccacccctactcctggctaatttttgtatttttagtagggacaggttttcaccatgtttgtcaggctggtctcgaactcttgacctcaagtgatcggcccgctttggcctcccaaagtgctgggattacaggcatgagccactgtgcccagcctatctcttaatctccattactttctagggcaaatgatacaaacttggtcttctcttcagggctcatgcagttatttccctaatcaacttatcccataaatcacatgacctatttcagagaccaaataattacaaataaaagattccccccaaaccatagattcttgttggcaatgagcatcagttgagctcagattcggtaaaaagtaaaaatgaaaaaagatccatagctatag

SEQ ID NO: 824001 - DNA, 564 bp, Homo sapiens
ggagaggtaatctgggtgtaagtttrttttgcaactatagatgagaggcaacagtgaagaagaaagtacccctgcctctgagccacaggatgttatgagaaaaacctggtactgtatgaaaaaatgtccccccaaactgggaaggagccaagagaccaaagaatgactcggaccagtccagcttgatgagtagatgagtttattgggacttacatacagggtactcctgggtggcggcaagacagctccagagacccacccgcctcctgtctgtaagctgctattaagctacctgttttggctctttacctattgcatacaatgagactttctcttggtataatcccagatatgctgtgggatgtttgggttgtcagggacacctgctcgttggctgggtgctatgaccttggcccactgcccagcctttagggttccaccagcagacacacaccgttaagtaatctcacgaggatcaatcactgtatacttacaaagaacaagaagcccatgaaacttgggcattactactccaaagaggctggctcacctaaagagggtgga

SEQ ID NO: 824002 - DNA, 578 bp, Homo sapiens
ataattttcccagtgcagtgttttattaattgttgtatacgataagctggaccctgtttgatatagtttgagtgtttcttccctccaaatctcatgttgaaatgtaatccccattgttggaggcggggcctggtaggaggtgattggcccatggggcggatccttcatgaatggggtagtgctatccccttggtgattagtgaattcaggcaacagctggttgtttaaagagcctggcccctttctgttgctctctctctcttgcatctgctctcaccatatgagatgtctactcccccttcaccttccgccgtgattatagcttcctgcagccctcaccagaagcagatgccagcgccacacttcttgtactgtctgccgaactgtgagccaattaaacctcttttctttataaattatccagcctcaggtagtcctgaaaaacggcctaatacactattctatattgtcttaaatgggacatattactaaaagagagctaaaagagacacatgktctcttcaactggtaatcagttgactattaaatgttcagtagcattttttttaagtcttcag

SEQ ID NO: 824003 - DNA, 619 bp, Homo sapiens
tctccagggacagcaaattgtgggaaagcaaatatatgggaaattaatgttagataaaggcaggttcctaaagcttgttaaatrtacttctgtggtcccctctgttcacgtctccaagctgttaaggacctaaagttgtcttaggttatcaacctttgtccttcctggtagagaaaggaggaggaacgactttgtaaatgtatatcctgcttttaggcagatagggggaggctatggagctttattttaatcagcttcttcccaattgcctttagcgcaaaataatccttaggccggagtggcatattttcgggtggtatatacttctaccctttacacctttgagaatgcagcttggccaaagcagtagttcacgcctgtaattccagcgctttggaggccgaggcgggccaatcacttgaggtcaggagtttgagactagcctggccaacatggtgaaacctggtctctaccaaaaaatacaaaaatagccaagtgcggtggcgcacacccgtagtcccagctactcgggaggctgaggcaggagaatcgctggaacccaggaaacagaggttgcagtgagccgagatggcttttaatcaatgctttaatagagaaa

SEQ ID NO: 824004 - DNA, 497 bp, Homo sapiens
ttttttctctttttgaatcttattttcctggaaaaatagcttttttcttctcagttgacttaattatttctacattttgccttcttgctgttcttgatgctcacatgagagagcttgagataattgctaacagtttccattctgagaaaaaaaacctctgttttcctcatggaaccctgggaattgaaagcagatagaggtctctcaaaatctaaggctcagtttgattttacattctgttacctgacttttttttacttttgggagtatcaggtattactttgcattatgagagaacattgatgtgtaataactaagtaggaaatgtaattttagggatgtctaatggcagttatgggagagatactcaactctttgcatgtttggattagagaagcatgctcttggtcacctaaaaggtatagaaatatccctacccccactgagaaataagactyccatgggagatgggctgattccctcttttttgggatcca

SEQ ID NO: 824005 - DNA, 596 bp, Homo sapiens
ctgagttcttgtcctgcaacaaggaagaatgaaatacacagggtgagtgtgagcaaggtgaagaggagcattattgagcaatagaacagctcagagaagccctacagtgggcagctcctctctgtagccagggtgtcctgacgagtgttcagcttctaacagaaagggtaactcctctctgcaagcaggtcattccagtaaatgttcagttctcaggagagagggtagctctctgcaactggtcatcccatcctctgctctgctctgctctgtctgagccaggggcttttatgggcctcagaggggagaaagtgcatgtggattggtccatgggtggccatagttgggcctggaaaaggcaatacaagttctaactctggcccatgggtctggcatcagcctggcccccagccttcaggccctccctggcctgaaagtggggcctcactggggaccgacccctttcacccaagagcctgtctgccagatgcctctgtccatggtgcccaggctatttgcaccaaggggmacctgcaggccagtgctgagtcaccttcagttccccctcagcttaccccatgctctttggtgaccaa

SEQ ID NO: 824006 - DNA, 442 bp, Homo sapiens
tttcaaccttgtacattttttcttaaaacacggtattttataatgaaaatagagactgtggggaaagtttgatcttgaagcccctacaacacctctcagattaaaggtatgttggtggaagagttaaaaatagagaatcttaaggccaatacacaaatgattaaagtagtatccgatatttacaaaacgataatcagttcagtaaattgaaaaatatttcaaattttcagacaaatgccaaaaaagacattgaagttattaatactgaaaaggaagaatataaaatcatggttcttgcaatgtttatrtaactataaaaagaggttgtaaagaaacaccacagtttttgggaaagagaaaccttaggttaaaacaaagttaatacaagagtaagaaacaagacaatgatacgaaacctagagaggaaaattttacgggaaaa

SEQ ID NO: 824007 - DNA, 506 bp, Homo sapiens
  misc_feature 184: n = A,T,C or G
ggcgggtggatcacgaggtcaggagatcgagaccatcctggccaacacggtgaaacactgtctctactaaaaatacaaaaattagctgggcgtggtggcgtgtgcctgtaatcccagctactcaggaggctgaggcaggagagtagcttgaaccagggagtcggaggttgcagtgagccgagantcgtgccaccgcactccagcctgatgacacagcaagattctgtcccccccccaaaaaaaagaaaaagaaaaaagaaaagaaaactttgcactcctctgagttcatacttccttccataaaaaaagcaggcttatttgaatttgtcatcttaaaacatggatttttcttccatttattttattataatgggagttctgctaacagagaaatgtcttgtcaaattcacttttcatcttcatttcaatgcacacattacagtctatcatgatttatactgggaacarcatatagatcaccaaattcttcctaaaagctgggggaa

SEQ ID NO: 824008 - DNA, 617 bp, Homo sapiens
gcctcaaaaccacacacacacatattactcactgtttctttagggcatgaatcctggtgtagatgatgtctaggctgaagtctcagctgaaggttcagctrgggaggaatcatcttccaagctcacagattgttgttaggattcaattacatgcccagggtgagattacttcactagtaaattataccaaaactttaaagaatttataacaatccttcactaactcctctcccaagagaagaagaaacaaacaaaggaacgaaaaccaaaaaggaaaaagagagcacttcccaatgcattttatgaagtcagttaacctgatactacaactggaaaaagacattgtaagaaaggaaaattagagaccaacatgccttataaatacgagaatcctcaaggaaaaactatcaaaacacaaaagcaccgtagacaaaggatatacactatgaccaagggtatttattccagcattgcaagtttggataaacatacaaaaacaattagtaaaatatactatctaaatagtataaagagtaaaaacacatgatcacttaagatgaagaataagcatttgactaattaaaaccccatttatgattggagcatttatgaaaaca

SEQ ID NO: 824009 - DNA, 693 bp, Homo sapiens
ccaaggtcatgtggtaagaaggtggaggagtgggctcaaatctgggatcctgtgaccccaaggtaactgtgcttytggtgagaacagcatttcctggacagccacagctgtggcgctccctcagaagggagggggatggtggcacggaacccaggatggggctgccccagggagggtgttttggagagagatcttttgggggtctgctccagagtgacctttatcattctctttccaggtcaaaaggctgagtttcaaattctggataatgtagactcaacgggagagttgatagtgagattacccaaagaaataacaatttcaggcagtttccagggcttccaccatcagaaaatcaagatatcggagaaccggatatcccagcagtatctggctacccttgaaaacaggtgaggttggagttgggcagcagggaaggaggggaagaagcccatcttgggcaccaagggattcaagggtggcagaccggctctttttaaaatttatttatttttatttttcttttccctgcttttcatgagctttgtgggggactggctctctagggcagcctctcgctctctacttccaggattccctcagccctcccctttacgcaagcacgccttcctcttctctgcctccagaagccttctcattcacccaggagcagtctccaggaagccttctgat

SEQ ID NO: 824010 - DNA, 613 bp, Homo sapiens
attatcttttttaatctaaagtgtattcagtagatagcatatagttggatcactttttcacattcagtctatctgtcttttgattgaatttttttatttatattcacacttaatattattattgatattgttagatttacctctgctatttaatattttgttttctatatatctcatgttttgttttccctgtgttgttcctttagtatttttttgcattaagtgaatactttctagttaacatgttaattgacctaatttttacgtgatattttaaaagttatttccttagtgattgccctatgacttacagtatacattttaacttattagaatctacttcatgtttttactaacttaattctaatgacttatagaagtgttaccccatataactctttgcccttccatctgtgtatatatgtgtatatgtagtatttatatattacaaacccagtaatacacagttataatgcttacttcttataattttatgtcttttaaataagctcaaggaaaaaagaaaagcacaagwcttatagagggtttttaaaaattaaccttcttattttttattttcggttctccttatttcttcttttgacttcaaatt

SEQ ID NO: 824011 - DNA, 483 bp, Homo sapiens
ggcgcacaccaccacacccagctaattttttgtgttttagtagagacagggtttcaccatgttggccacgatggcctcaatctcctgacctcatggtccgccggcttctgcgtcccaaagtgctgggattacagacgtgagccgccacacccggcatctattatttttgttttactttttattaatagccattctggctggtataagatggtatctcattgcggttttcatttgcatctctctgataattagtgatgctgaacatttttacatggttgctggctgcttgtatgttttcttttgagaagtgtctgttcatatcctttgcttactttttggttttgttgcatttgcttttgagaacttagtcrtattttttttgcctaggccaatgtctagagagtgtttcttaggttttcttctaggatttttatagtttgaggtcttatatttaagtatgtaatccatcttgagttaattttt

SEQ ID NO: 824012 - DNA, 401 bp, Homo sapiens
aaaaacgtttaattggttgacagttctgcagggctggggaggcctccggaaacttacagtcatggtggaaggggaaggaaacatgtccttcttcacattacagcagcaaggaaaagtgctgggcaaaaggagggaaaagccccttataaaaccatcagatcttgtgagaacttactgacttcatgagaacagcatgagggtaactgcccccgtgattaaattatcctccactggttccctcctaagacatgtggagattatgggagctacaatttaagatgatatttgggtggggacacagtcaaaccatatcacctattgttactggtggcaagtctgaacrgggtccttggtcctcgattcttgtcctgttggaagaaagaatttggccaagaagaggt

SEQ ID NO: 824013 - DNA, 618 bp, Homo sapiens
tagtctctttgctaaagcatttgcaagcatcacctttattccagtcaccaacaagttcctcatctccatctgagaccacctcagcctggacttcatcrtccatatcactatcagcattttcgtcaaagccattcaataagtctctgggaagttcaaaactttcccacatctccctgtcttctcctgagccctccaaactgttccaacctctgcctgttacccagttccaaagttgcttccacatttttgggtatcattatagcagtgccccactcccagtaccaatttgttgtattagttctcatacagctatgaagaactgcctgagactgggtaatttataaaggaaagaggtttaattgactcatagttccacatggctggggaggcctcaggaaacttacaatcatgggggaaggtgaaagggaagcaaggcacctttttcacaaggtggcaggaaagagaagtgcctagcaaaggggaaagcgacccttacaaaaccatcagatctcatgagaactcactcactatcatgagaacagcatgaaggaaactgccttcatgattcagttacctccacctggtctctcccttgacatgtggagtttataggaatta

SEQ ID NO: 824014 - DNA, 605 bp, Homo sapiens
atggtgatgaccaagtttgatattcattgaaaataatgaactttgatccatacctgtatcatacaaaaattaattcaaaatacagcagagacttaaatggaaaacataaaactayaaaacttttaggagaaaatgtaggagaaaaccttttgcccttggtttaggcaaatatatcttagctatggcactaaaatctcaatcccccccaaaaattgaaaatttggacttcatcaaaatttaaaacttgtaccttttgagacacactagtaaggcaataaaaagacagtcccagagtgggagaaaatatttgcgaatcacgtatatgataaaggacttgtttccagaattttaaacaactctcacgcaaaatttaataataaaaatatcaacatctcaggcaaaaatattggcaagctattaactaaagaaatatgcagttatcaaataagcacataacacagtcaatatcattagtcactggggaatcaacataaaatgtgacaccactacatgcatattaaatggcataattacagattaaccaagttttggcaaagacgtggaggtacttggactctccaacactgctgctaataataatgcaa

SEQ ID NO: 824015 - DNA, 358 bp, Homo sapiens
tctgaatatgaataatgccacctggtatgggtggctaaattacccaaattcacccaattgttcactaaaagatgcttttctcttttttttcctggtwtgacagtattgagagtgtagtttgaaaacaaagaagagaacatgttgcctaaagagtgaaagacaggacaagagagtttgaaaatggcacggaagagcttatcacagtcggacactcatctgaggcttcatttcatcgaaaagaaaatagaaaaagataaaataaaatagaaaaagaattccattctccatgatgtaattattcatacctagtattcgatagtacaacagggtgactatcgtcaaaataatttaattgcac

SEQ ID NO: 824016 - DNA, 610 bp, Homo sapiens
ttccaggtaaacaggaatgaaagcaactctagactctcctgacttctgggaccaggatgccccaccaaggaggctgcttttgaggtccggtgatgtcgtgctgcagaggggatgcctgtgacatttttcagcaatgcaacctaacagcccacttgcttgttttttgtcattcagaggctattgaggcaagaatggcatcaggatggccaagccccacctcctcctggacccctcctggtaccctgcgtggccctgaaaaggaccattctctgatggtagatcaaagtccaggcaggcaaaggggaggaagagatactggtgttttttaaaattcccccgcccaacttaggagtcacccagctggaatgcagtctcctgatagcttctgagatacctcctcttcctccactctcatctctgaaacccaaggccaccagcatgaaggaggaaataattagggaatggacttgattcatctttcaataagaatgatttcattattctttctaccttggcccagaaataaacacaaattcacacaatcacatgcaaatgtaccaggcttgataaactcagaastgtgacgacattgaaaatacagctgagaaca

SEQ ID NO: 824017 - DNA, 496 bp, Homo sapiens
acggtgatttcttttgaattattttcagttgattttgtwgttaatttgggggattttaatttgtgaatgaaggacacaatagaaaatttagaactcttaagtctaggttttaagaaactaagaattatttcaacaattaatattcctagtttgatatttgcgatacattgcttcttaatatagaaatttttctgacagtttgtgatcaacctgtttgtttcttatactaagatatttataaatggattttttaaatctaattgttttatttgaaatttttaaatttattttcactaagctgtccactctcatgttcttatcctacattccaaatattaggattgttacaatattatactcttgagtacagctttcttgggatataaggatacttccttcaggccaggcaaggtggctctttcttgggatataaggatacctcaggccaggcaaggtggctcacgcctgtaatcccagcactttgagaggccaaagc

SEQ ID NO: 824018 - DNA, 615 bp, Homo sapiens
ttatcctaaggattaaatggtcttttcagtttgaaatgtgattctggaagcyttgtatttctccttaaagtagtaaacaaataattggccattctataaatctttccagaatctcaaagtcactttgtatcatatgtaaatctaatcattagaatcctggatatgtttttttaatacaaagatattaatatactatgctaaatgtaggaataaaataaaatgacaaaataatcacctttttcataagttttctaagtttcccaaattaaacctaataattattgcagcttcaaatgtctttggggtgattattgtttaaagtcctccctttttttttcatgtgggaaaagaatgctctagctcattctttattccttaattaaatgtagtatcaaatggctgcaaaagacaaccactggctatgttttcatacaaaccccatgcttatgaaatcagttctgtggatttaattcactgaccagctaatctttattcttttcctaaattcatctgtaaaaaagaatcccattccaaagaataacacagctgatctctttgcagcccatttatgtcattaaaaagtattataacctaaatataggccttatatcttat

SEQ ID NO: 824019 - DNA, 637 bp, Homo sapiens
acagctgatctctttgcagcccatttatgtcattaaaaagtattataacctaaatataggccttatatcttattagggtagtttggaagatttamaaataaaattaatgaatttctttattatgtaagaaattctttatattctacttattgcagaataagaactgcatagtagtacaagggataaactctcttgttcctctataaatcaacgtgagacttgttaagcttcatcagttattcacctgagaatagaaaagtatccattgtgtattagaaaaaggaatatgacatacaatacacacatgtgatagatagataaatggatagtcatgatggtttcaaataattttgccaatgcacaatacaagggctttacttttaggaatgccttctgagtcattcatgttgaagagggtaaaattatgtgccttttctgaactaaactctcccagttattaataatataaaaatgttagttgaaaaatcatttgccataacaaaccgacatggattaggtttcattccatattattcagtgtcttacggttatcaactttgtgttgctttacagtcttcattttctttctttcgaccatttcaaatctaattagtgaagagttgagtaaagaaaacac

SEQ ID NO: 824020 - DNA, 637 bp, Homo sapiens
acagctgatctctttgcagcccatttatgtcattaaaaagtattataacctaaatataggccttatatcttattagggtagtttggaagatttaaaaataaaatwaatgaatttctttattatgtaagaaattctttatattctacttattgcagaataagaactgcatagtagtacaagggataaactctcttgttcctctataaatcaacgtgagacttgttaagcttcatcagttattcacctgagaatagaaaagtatccattgtgtattagaaaaaggaatatgacatacaatacacacatgtgatagatagataaatggatagtcatgatggtttcaaataattttgccaatgcacaatacaagggctttacttttaggaatgccttctgagtcattcatgttgaagagggtaaaattatgtgccttttctgaactaaactctcccagttattaataatataaaaatgttagttgaaaaatcatttgccataacaaaccgacatggattaggtttcattccatattattcagtgtcttacggttatcaactttgtgttgctttacagtcttcattttctttctttcgaccatttcaaatctaattagtgaagagttgagtaaagaaaacac

SEQ ID NO: 824021 - DNA, 240 bp, Homo sapiens
aatactgaatatcttagtaaattccactgcatagcaaactaaaagagtcttttaaaatatagaatacataatcatatgtagttgcattattatgtaaatatatgataataacaaatatttgtgtactagactaagggttaaacaggtgcattgcactcattgtgtgtgtgtgtgtaatcatttactctgtcttagtcaactttggctgctrtatcaaaataccatagattgtgtgtctta

SEQ ID NO: 824022 - DNA, 603 bp, Homo sapiens
tattttgatagtggggtctattaatgcttttgccatgctgaccaaatcaaaattctctggtatgtrctccttgtataaaatctgtcttcctcctattattgctctttgagaatgtaccactaattttcccaaaagcaagtcctatccctccaatactatcattcctctgctgggcaaccgacagatttcactatgtcttccaggcattggctacatcataacgtctgctatagcataataacttctttgcagctgctctggtaagtatttctaccaatacatcagaatggatgtggaatagttcatgaataagtgagcaaaatgcctatcttctttattccatgtcatactaagtcaatttgatatgtagtcagcatgcttttgtacccatattttactcttaagtttatgaaaatggctactgaaactctactgcaatcaatttctccttggggaatagacactagtctatggggctcagctaagtaaacttcttctctcttgtccatttcctctaattttctaaaacacacacacacagatctctttcttatatcttctgtcacaaacaagatgtgatagttaatactgagtgtcaacttg

SEQ ID NO: 824023 - DNA, 618 bp, Homo sapiens
tcgactggcttagcctctgagtctacatctttctctcatgctggctgccttctgccctcgaacatcagactccaagttcttcagctttaggactcagactggcttccttgctcagcttgcagacgamcttacctcgtgaccatgtgagttaatactccttaataaactcccctttatgtatacatctatcctattaattctgtccctctggagaaccctgactaatacacaaggcttcatgcaaataaaataaaataaaatcttgagaatccatgtttcagtaatccagccaccaattggtagtttatgacttgaattacttggctctcaataaagattcagtagacacgttatacctggaagagaacattttattatttgtaagaataccctaacagaatttttatttattatgatgatattgaattttattaaaactatattgttcaaagaatcccttacagaacaattaatatcatgaattactcagagatattaatgaaagaaataaaccaatatttcccattgcaaaactggaatgccctctcattagagaacgagcattttgtccaggtgtggtggcgcatatctgtaatcccagcactttgggaggcagag

SEQ ID NO: 824024 - DNA, 618 bp, Homo sapiens
tcgactggcttagcctctgagtctacatctttctctcatgctggctgccttctgccctcgaacatcagactccaagttcttcagctttaggactcagactggcttccttgctcagcttgcagacgaccttacctcgtgaccatgtgagttaatactccttaataaactcccctttatgtatacatctatcctattaattctgtccctctggagaaccctgactaatacacaaggcttcatgcaaataaaataaaataaaatcttgagaatccatgtttcagtaatccagccaccaattggtagtttatgacttgaattacttggctctcaataaagattcagtagacacgttatacctggaagagaacattttattatttgtaagaataccctaacagaatttttatttattatgatgatattgaattttattaaaactatattgttcaaagaatcccttacagaacaattaatatcatgaattactcagagatattaatgaaagaaataaaccaatatttcccattgcaaaactggaatgccctctcattagagaacgagcattttgtccaggtgtggtggcrcatatctgtaatcccagcactttgggaggcagag

SEQ ID NO: 824025 - DNA, 517 bp, Homo sapiens
aataagttgaatgcttaaagctttgtttagcttgactttagttaagtaacaaagccaagctatttatttgaagtactatctgaagtcatgaaatcattatattgctttgatattaaaaaatgtgacttttaaaactttatatccaagtaattcatcaaatgaaaataatatattttcttataatattcaataataaaccaatcgttatggttttattcatctgtattaattcttaaaatcacaaatattggtccatattattttctctctgaaggtggcagtttgaaaaaatggtacaaaaatttttcacagtcttcccttgagaggtagagtctgtatcctttcctcttcgtctggacaatattatgaatgttttaggtaataaaatatggcagaatttatgacaactgccacccaaggcaaggtcagaaaagactatgcatcttctcccggmttcttgtggaatgatcactctcatagaagccttcctcctgaaacccagccatcatgatgtaaa

SEQ ID NO: 824026 - DNA, 586 bp, Homo sapiens
ttgattgtgtatgtgtgtctgtgtgtgtgtgtgtgtaaaattcaattcagcacctaaaatgctgtctgaaatatgtagacagtgcaaacattcttcagagctaatcattycaagggtgctttttgtaatattggaagtagttgtagcgtatcttctgcatgtggacttttaaaataaacctgcaggcttatcagccttaacacagaagctgagcagtttcctgttattcactcaggtaatgaacctacacaataggtagtcctcccctgggcagagctaggtttgcatcttggcctttttcttccttaaattttaaaatatattctatcagctgccatgcagcaatatgagcttctaacatattcataaatgaaatcttcagttcagcctctttcagtggcaaataagcagccataacattttgtaaattctccctctgaaatagcagagaagaaactcgatatacttaccaatgacccttatcaaatagcaactttgtggatcgcgctttgccttcatagtctctctggaggtttctaactctaatgggaaggcaatgtaccattggctattattcttaccagca

SEQ ID NO: 824027 - DNA, 535 bp, Homo sapiens
cagtcaccttacctaagtatcttgtgtctaatatatgaattaatctgtgaaatcacctgctttaaaaatatatttacaaatatatttatgtgaaccttataatatgtaaaatacattcacagttattgtctcatttgatttgcataacaatcttttgaagtatttattattttttacagattaaaatatgaagttcagagagactttatgagtcaaaggttgcactgtaaatcttagaaatgaaaatgatactgcatcttataactcagggttcatggtctttctgttacctctgtactaatggtttctttctttaaaaggggacaattcagatttgaaagatttagggaaaaagatcacattctagacttctgttgtccagtaatatagccactagccataggtggctactgagcatttgaaatctggccgggtataaaatacactatggatttcaaagatttgtataataaaataatgtaaaatatctcattattttwaaaatatgaattatatgttgaaatgatgtacatgt

SEQ ID NO: 824028 - DNA, 729 bp, Homo sapiens
caacccgaagcaactaatgcagagtgtctgtcaagtttgtttctgtggatccactctctgtagctctctggtttcttctaggggttcatggtgcatttgcagayaaatggtttgataagaggaaactgagctggacattctggtttggaaactagaaatggccccttaatatgggctcttagttcgtagtttttatgttcttgctatggtattgttgaaaatgacactaaaagtcagaccattagcttgcatttctcaactcttcatcttgattcttcttttagttcctttgtgacctgactttaaagaatttattcaacatcagtttcctggttggtaaaccaggactgcaacatcagcttctttattcagccattggccagatagaaagaatcatcttcattaaaaaaaaaaacaaagtgagatatgatcagcctaaggaacacatgacagctgcttcccaattcacctctctcagaggttgttgcagacttatcctttggtgttaaagagttagtgatagtccccataaagggttaatgctctggcatcaaaatattctggcatagacttatgatgcaatgtctcagtgggcaccatcagcaagcttgctatggaaacaaactctcagagctcttaaaagatgctctgagatatacctttaatgttgccacagattcaaagtacacatcatggagctataatgagaattgaagccccttttcccag

SEQ ID NO: 824029 - DNA, 469 bp, Homo sapiens
caattaacaaaagaaagaggtttattggacttatggttccacatgactggcaaggcttcacaatcatggcggaaggtgaaaggaaaggagcagcacgtcatgtcttacatggatgttggctggcaaagagagagtctgtgcagggaaactcctgttttaaaaaccatcagatctcatgagactcattcactatcatgagaacagcataggaaagacccacccccataattcaattacctcccactgggttcctcccatgacatgtgggaattgtgggagttacaattcaagatgagatttggatgagatttgggtggagacacagccaaaccataccacttcccttcattccatttctgttttttttttttttcctgagttggggtctctctctgtcttacargctgcagtgtattaatgtgatcttggctcactgcaaactctacctccctggttcaaatgattctcc

SEQ ID NO: 824030 - DNA, 332 bp, Homo sapiens
tgcccattttcgtgatcacagggctagatacaaagtaggcatgcaattattataaatccctgttgaatttatctaactcctctgggactgcagaagtaggcctagatgatctttcaawcggctgtccccagtcattagaagaagtacaccatctgtagaccagatctgccagcaggactcaacctccccagctacattcatttttcatgaagtagagcctcgctgggagagtgttcgttcttgccatggacgctctgtctcgagccaagtggccaggctgcctgaatgcaagcagatgcagtgtgcctggcctggaggagtcatcagaaggg

SEQ ID NO: 824031 - DNA, 596 bp, Homo sapiens
attttctgccatatttttctctagttataccctgaattactttttattatttatttaatatttattatgattattatttgagacagaatcttgctgtgtcacccagggtggagtgcagtggtgccatctcagcttgctgcaatctctgcctcctgggctcaagcaattcttgtgccttagcctcccaagtagctgggactacaggtgcacaccaccagcctgggctaattgtttgcatttttagtagagacacgattttgccatgttgcccaggctgatctcaaactcctgagcccaggtgatccacctgccttggcaccccaaagtgttgggattacaggcgtgagtcatggtgcccagcctgaattactctttttttaatgagggattagaaaagatcagaatgatttgtatgggagatacttttcttaacagaagtatgcttcaaagctatcttttttrcttcaaacaatggagaatatgatagtccaaaatacaatagggtacttggcgggaatctgagtcaggagtaactggtaagttgtggataataaggagaatgaagtgctgatgatgggggaaattgtggctgtctg

SEQ ID NO: 824032 - DNA, 535 bp, Homo sapiens
  misc_feature 160: n = A,T,C or G
caatgtaagatgaccatagttaacaagaatatattatataattgtaaatacctaaaaggagaatattgaaatgttcccaacacaaagaaataacaaatatttgaggtatttaatatgcaaatttctctatatgatcactatgcaatgtacatattgaatnactgccatgtaccccacaaatataaaccaattattatttgttaattaaaaatataattaaataaaatgactcaactataggctgcctacaagaaacacttcacctaaaaagtcactcacagactcaaatagaagggatgaagaaagacactccatgcaggtgaaacgaaaacaatagcaggattagctatacttctatcagataaaacagactacaagtcaaagaacataaaaagaaacaaaaaagttccctatataatgataaagtggttaattccacaggaagatataacaattctaaatatgtatgtacccagtaccrgaacacccaaatatagaaaataaatattgatagaacaaaaaagagaaaatgact

SEQ ID NO: 824033 - DNA, 599 bp, Homo sapiens
tatgataataatagggaacttcaacaaccaactttcatcaatacacaattcacctctacagaaaattaacatgagagttaaactacactccagaccaaataggcttaaaagacatttacagaatattgccttgaacggctgcaaaatatgcgtttttctcaataacacatggagcattgccaaagatggaccatattttaggtccccagacaagagttaacaatttttaaaaaatcaaaattataccaagtaccttttctaaacacagtggaataaaactagaaatcaacaacagaaggaactttgcaaactatatgcattcatggaaattaaacatgcttttgaaatatgaatggggaaatgaagaaattacaaagacaattttgaaaatttcttgaggtaaatgaaaatggaaacacaacagaataaaacttatggtatactaagtgatcctaagagggaagtatatatcagtaaacacctacatcaacagaatagaaagacttcaaataaacaatcyaacaatacaccttaaggaactaaaaacgcaagaacaaactaaacccagaattattagaaggaaacaaataataaagatc

SEQ ID NO: 824034 - DNA, 593 bp, Homo sapiens
ttgagtagatagtacaatagatatcaaaaacattctcatattaacaatcattaataactcttagtacatattttgcatggaaagatatattttcccccatttaaaaaatatatttattkacttttttattatttttacttttatagacatggtcttgctgtcacccaggctaaagtgcagtggtataattacagctcactgtaaccttgaactcctgggctcaagcaatcttccagcctcagcctctctagcagctaagactactagccagagacaccttatttgactagttcatttttattctttgtggagacagggtctctctatgtggcctaggctcgtttcaaactcctggccacaagcaatcttgctgcctgaggctcccaaagtgctgggattacaggcgtgagctgctacacccagcttttctctttttttttttttttttttttttgagacagagcccgccctgttgctcaggctggagtgcaatggtgcaatcttggctccctgcaacctccgcctcccaggttcaaacaattctcctgcctcagtctccagagtagttgggattacaggcgctcaccaccatg

SEQ ID NO: 824035 - DNA, 516 bp, Homo sapiens
gctctaacatcaggtccagcactttgttagccattttttttttccatttcaggcacatgtactagaaaaatacatttgttttctttggaaatattttcctgttcatattttactaagttagactggccttatccttactgatccaaattagtgcaatattacagcatacacactcttgaatacctattcctttgttctcacactattcaaaagctattttcttagtttagttttccaaaacgtgattatttccagctcttccattttaagctcaagtatcttttaaataaaccatgataaagataaatgtcttgcatatcaactcataaagacaaacacctcaatttcagactttattctgtttatagccaaaaaatttggtatagaatattcttattatttataatcccattatgtccccaagacattgagtcrtgtaatgttttgggctgattttttttctcgcttttcctttttcttctattagtgcagtaaaatcagtatctcagcctttga

SEQ ID NO: 824036 - DNA, 516 bp, Homo sapiens
gctctaacatcaggtccagcactttgttagccattttttttttccatttcaggcacatgtactagaaaaatacatttgttttctttggaaatattttcctgttcatattttactaagttagactggccttatccttactgatccaaattagtgcaatattacagcatacacactcttgaatacctattcctttgttctcacactattcaaaagctattttcttagtttagttttccaaaacgtgattatttccagctcttccattttaagctcaagtatcttttaaataaaccatgataaagataaatgtcttgcatatcaactcataaagacaaacacctcaatttcagactttattctgtttatagccaaaaaatttggtatagaatattcttattatttataatcccattatgtccccaagacattgagtcatgtaatgttttrggctgattttttttctcgcttttcctttttcttctattagtgcagtaaaatcagtatctcagcctttga

SEQ ID NO: 824037 - DNA, 497 bp, Homo sapiens
  misc_feature 490, 491, 492, 493, 494, 495, 496, 497: n = A,T,C or G
ttattaactttatgaccttggacaagtcctagaacttctcggagtctcagtttcttcatctttaaaaatgaagagaatatctaccttgcggagttgccaggagtgttaatgtattttttaaaagcctcatgaaatgcttgccaatatttgcttttgcatttttaattagcttttgttttattgtaaaagtaatatgagcttttcttgtaaactttttggatcagtacagaagggtacacagtaaaaagtgaaaattcccttccctccacatgtaccccatccttcccccgaaatcagtctcactctcctgaagaaaatacatcaaattctcaggatatgttattactaaggacattctaaaattcyatgacaggcaaaactccttgagatataaacataacctaacaagtaagctaaaatgccagaacattttatttctttgatggcttttatttttaagtttctctatttgcaggcattttaggaaaannnnnnnn

SEQ ID NO: 824038 - DNA, 609 bp, Homo sapiens
gcactccggcttgggcaacaaagcgagactctgtctcaaaaaaaaaaaaaggaagaaatgtttgtggcttgaatagtaacaatagtgatctaggtcacatttcttgggccctcactttgagcatgacactgtcttaagccagttacctgcatcatctcatgtagtccagacagcaaccctgaggaagataccactaccaatgcccaggaactgaggatcagagaggttcattgatttgcccaaggtcacacagcaaactcactgcagagccaggactcaaaaccagttcaaccaaaccggtgatgtgaaccactgtgaatactcactgcttgcctaaactctgacagttaggctgatatgaacgaccccaggatgggaaatgtatgtatgtatgtatgtatgtatgtatgtatgtatagtatgtatgtatttttgagacagagtctcactctgtcgacaagggtggagtgcagttgtgtgatctcggctcactgcaacctccatctcccaggttcaagcgattctcctggctcrgtctcctgagtggctgggattacaggcgcgtgccaccacggctggctaatttttatatttttagtagagacaggg

SEQ ID NO: 824039 - DNA, 657 bp, Homo sapiens
tgggtgaccagatgcattcccaatgaggagtaatatttcaaaaagactttttttctgagcattaggtcccaaaagtgggcttaaaatattcagtaaaccatgctgtaaacagatgtgttattatctagtctttgttgctccacttttagagaacaagaagatcagatttagcataattcttcagggttctaggaatttcagaatgataaatgagcattggcttcaacttgaagtcactagcctgcattagccaataataagagagcaagcctgctatttgaagctttaaagccagacatttgcttctcctttctagctatgaattcctatattgcatcttattttaatagaaggctgtttcatctacattgaaaatttgttgtatactgtagccacattcatcgatggtcttaggcagatcttctggataacttgctgcagcttctccatcagcatttgttgcttcaccttgcatgtttattttatagagatgacttctttccttaaatctcatgaacaaacctctgcyagcttcaaactttttttctgcagctttatgtctctcagtcttcatagaattgtagagagttagggccatgcttaagggaatgaggtggctgctttgattttctatccagactattacacttctccatg

SEQ ID NO: 824040 - DNA, 543 bp, Homo sapiens
gtaggaagtcgccactatggattaataccgtctacrgcgttgccttttttagaataccatcaagtctccagctatgaacacgtgagctctcacaccagctctgggcaaggacttttcaagtccaatgtacaaaagaatagataagtaaaacaatacaggacttagagaaaatgttcattttacttgaaacaaaggtttgtctaaagcctagtacattttcattcacctaaatctttccaggttggaaaaaaaggaccagggattaatttttcaacccatatctgtacctcctataaaatcagatttattttactttccatttgggaaagatattccttttaatggccatgtctacttaagaagccttcagctgaggtttaaattagattgaaatatgacctggattgtgaatgtatcactctgtctttaataccataatcgtttcatttcctagcatggttcaataaatgagagagaattcatgcaaaaatgtaagtctgtgaaaagggtgacttggaattatgctcatgattggtggagaga

SEQ ID NO: 824041 - DNA, 473 bp, Homo sapiens
ggctatgggcgcagcttcagcagacttaaatgttcctgcctgctggctctgaagagagcagcagatctcccagcacagcacttgagctctgctaagggacagactgtctcctcaagtgggtcactgacacccatgcctcctggctgggagacacctcccaacaggggtcgacagacaattcagacaggagagctcctgtctgcatgtggcatgtgtccctctgggatgaagcttccagaggaaggaacaggcagcaatttttgctgttctgcagcctccactggtgatacccaggcaaacagggtctggagtggccctccagcaaactccagcagacctgtarcagaggggcctgactgttagaagaaaaactaacaaacagaaaagaatagcatcaacatcaacaaaaaggacatccacacaaaaaccctatctgaaggtcaccaacatcaaagaccaaaggtagaaaaatc

SEQ ID NO: 824042 - DNA, 563 bp, Homo sapiens
atagaggatttttggggcagtgaaactgttctgcataatactatactgatggatacatgacattatatatttccaaaacccatatgatgtacmataccaagaatgaactctaatgtaaactatggactttagtgaataaaaagatatcaatattggcttagccattgtaacaaatgtaccactccagtgcaggatgtcgatagtgggggagagtttgtttaggttttgagtgttcagggagcatatattagtctgttctcactctgctaataaagatatacctgagactgggttatttgtaaaggaaaaaatgtttaattgactcacagtttcacatggctggggaggctcacaatcatggcagaagagcaagggacgtcttacttagcatcaacaagacagagtgtgtgcagggaaactctcctttgtaaaaccatcagatctcatgagacatattcactatcatgagaagagcacaggaaagatccacccccatgattcaatcagctcccaaacaggtccctcccatgggatgtgggaattgtgggagctacagttcaaga

SEQ ID NO: 824043 - DNA, 528 bp, Homo sapiens
ccacatttttgctgtaaattattttgcttacaaaaagctgtaatgacactccctagtgagatgaaccsggtacccatgctagatgacgagttagtgggtgcagcgcaccagcatggcacatgtatacatatgtaactaacctgcacattgtgcacatgtaccctaaaacttaaagtataataaataaataaataaataaataaataaataaataaataaataaaagctgtaatggacagtttgttaagtgtctataaattgatacacctgaaattagttgctttttcttttccttttttttttttgttggttcaaatactaagtaagaaaaaacaaatctgctttttttgctttactatcggaggatgtgagatggttggtaaactcagtccaagctaaaataatttccaatacaattgcacttttgatgtctatagtcattctagtggaaaagtgtttgcagtaggctgaatatttataggttacaagacttttaagaactattaattcttacgtttgtttttctga

SEQ ID NO: 824044 - DNA, 454 bp, Homo sapiens
atatacacagattatggagaagtatatttgctcaagtacacaaagataaaggaaaaacagcatacctaactccagagagcttatttggattaacgtaaaatggatgagacatttatcaaaataatgtaaatagaaggtagaatgaaaggcagcttcagagagatgcatgcaaaaattgtgtgagagcagaaagcagcaagagaataaattataaataaacagaaccttaaataacatacttctgatgaaggcttactgaaaactactaggataacaaatcaaacaacttcctaagaaaaaggccattaaggcaagaagatggttctatcatatctggaaaacattatatcttaaagtgccatattcagttgcccaagattttgagaaacaatacttttctttcataactatggttacaaaataygtgggggcttttgttaaagttgaaagagga

SEQ ID NO: 824045 - DNA, 627 bp, Homo sapiens
aaagaaatgaatttatggattgagttagcaatttaatctccatrgcaacatgcaaaaattgagaaagtaattaaatataacatttatagtttgtggaataatttagttatctggtaattattagcatgattataaagtgacataaacaactgtgtggctcaaatgtgtgattatgtacaatatacaccaagctggcacttactgaacatattatgctgattttacaggcaattaataaatacaccgtgcagctgtgctgaaaatgctaaataatttgtcaaaaattgaatgtgtatgcacaagtctgcatttgtgtgtgtgtgtgtgtgagagagagagagagagatctagatgcacttgaactcgtattgagctaaatggtacagaccattaatatatgtaagggcaatttaagtactgcagtagtaacaacattttaagtggaaacaagccatattttcttgatcctgttttttaagcctcattttgatttctaggttgaatataacaattatcatagtaataatagtttactattatcatagtaaaaacgttctatattttcatattttaccaaaaggcagttcacactatttaatgttgtaggcttttgtcaaaatggcaaca

SEQ ID NO: 824046 - DNA, 592 bp, Homo sapiens
aagagacaaagaagttcattatatgatataggtgtcaattcagcaggaggataaaacaattggaaatatatatgcatccaacattggagcatccagatatataaagcaagtattcttacagttaaagatataaaccccaatagaataatagctggagacttcaacaccctactttcagcattgtacacgtcatccacagagaaaatcaacaaagaaacattatacttactcttcactatggaccaaatgtacctaatagatatttacagatcatttcatccaggggctacagaatatacattcttctcctcagcatatggatgattctcaaagatagaccatatgtgaggccacaaaacaagtttgaaaacattaaaaagttgaaatagtatcaagtaacttctctgaccacaatggaataaaactagaagtaaatacaagaggaattttggcaactatctaaacacagggaaattaaacaatatgctcttgaatgactaatgggtcaatgaagatattaaaaaakaaattgaaaatttttttgaaacaagtgataatggaaacacaatagccaaaatctatgggatacaac

SEQ ID NO: 824047 - DNA, 580 bp, Homo sapiens
cacctcctgctggctaaacctgagtggaagctggccggcaagggagtttaataatgcagtcctcagcattgtggagcaagagcagggtgagaatgctggagcatgggtctgcagaggcaaagtgaaaatccagcagagtaggatgaatccatgagcaaaaagcctcctactattaaaaagacaaagataaccaacattgtgaaagccgttattctgcatcaacctttttatttcacaagggtggagattgaggtagaaaacaaggactcaagttgatccatttgtaaacctagaacccttgtcacctgatggcaatccctaatttgtctcgagaacatctttgaactttctctcttggatgtacttcagagtcacacgcttctctaaggacagctatttgcaaccactttcgtgatttttcgaggatgaggtttcttaaatcacctgccgtagcccatctgcctgccactcctacgcctgtgaatttacagttccagttaaagtmacgtccatgaacagggagggaacgaaggctctccctatcccttcaagcccccaaattgatttggcactcgaagtc

SEQ ID NO: 824048 - DNA, 505 bp, Homo sapiens
cttgggagggaaataattaaactgacaaaggaacaggcagctgcagaactggaagaggtcagaagagagagtcccatagaaggtcagaggagtgagacggggccagcgccgccaggcctggccatccagggggagctccctaaatctcacctggactccttcgaggccagcccgccagcagccaaagcttccacaccggaagacggcaaagggatccagaggcggaggcatgaggagcaccgtgaaaacctgaaggggagagggatctgacacaatgacacattgaagcccagagaggtcaagatgagcatcggaatggtgcgctcagtcccttctcctgaaatacttccgagtctgcaagtgagaaaacgcrctgatcctgttgcaaactgtgaatattctgatgatgccagtacagttgatttattaaaatgtaggtcctcaagcttctcagtgtcatctcttttctgccagagagtgctactgtgaacagggccaggcccag

SEQ ID NO: 824049 - DNA, 623 bp, Homo sapiens
aaaatacataagcatgtgtgtgtgtgtgtgtgtgtgtgtgtgtgtgtgtgtgtataaaataaaacttacaaaatatgtatgtgtgtatgyatatattaagcttgtgaagtcctaaaagcctggcagagtgggagagacatgtagctccagtaccagtaaaacaaaccacatggctaattaaatgtgttctattgatctctccactaaccgctgaaaaatacatacagattttcagttaatcagctaatagtttggcattctgcgtgctatatctttctcacctattgttgtgattaactctatgattttaagcttttatttgtagatttgcactttacagacttctaagtccttgaagcaagcaaataaaaaaatgtagctcaatgagaacactgcaagttattgagaacactgcaagttataaaagtggtccaaggagtttcactattttttccttgcaatgtcagaacaggatgaaaagcaaatttgaggctatgtttctttccctggaagaactatatatatagttgacagggaccccctctcttttcacccttgctgacttaccacactgtccaaccaagacttgctctctttcccaatcacttcttcacgaacctctc

SEQ ID NO: 824050 - DNA, 590 bp, Homo sapiens
gaaagaaagaagtgtacttctttcttctgatatgaatcatggtagcgcttggatgaacattagagcctatccagcacaattttttcaccttaagaggaaatggaagtagttgaaatttaaatgttgcatcaaagatgatacagctaatatccagcacacaaagcctcctacattgattcttagatatacttagaagtcacaaatgcaaaagccttttactattgttacaaaacacagcaaggagatatttatattctgtatcgtgtaaagtcatcctggagttggggatccagcctggaattgctgggcatcagggacagtgaagttgtgcaagcatgtacattgtctaacgcatgctcgaagttatatttatcttcaggacatccgatttgactcacgttcattggtcctatatttttatcggttttaattaactatgtcctttagcaatccttacctctatctttcccttttgcatgtgtcagggtaatctcaagtataagtcacccagagaggaagaaaatattttttgtttkatcttatgtttgtggctactaatagcagtattaaaaattaaagtacaacaaaat

SEQ ID NO: 824051 - DNA, 633 bp, Homo sapiens
atagatattattgtgttttatggacaggaaattgaggctcaggtaatwtcaagtgaaatccccaagatcatataattaataaatactgtaaaaacggtagaagtgactcacatttccaatctccatgctatctcatatactctaattgcctcttggggaaacataggctggaagaagaccaggcctcattgtaaactctcgagtgcccagaaattatttacttcaactatttctatcacagtttgtccactttaaatggggtagagattttctgaaacctcctttctcatttgaacaatctgagaatacatgtgtttaggcttaaatcataccagaaactgtcaggcagaacagtccctttgtaagcccaaggattatacaactttagttgtataatttagttgtatgattatacaactaaaattttaaccagatacagtcccaaatgaattatgttaattcactctattatttctctttttaagattacagaaattttatgccaattttatctacattatgctgcaatattctaaatatccctaattaaataccaactattttgatgaaatattttctttaaagtcatcatttattatcatctgatatgaaaaccattcctactagacactg

SEQ ID NO: 824052 - DNA, 635 bp, Homo sapiens
ctccctctccttgccccccaccccccgacaggccccggtatgtgatgttcccctcctgtgtccatgtgttctcgttgttcaactcccacttatgagtgacaacatgcagtttttggtttctgttcctgggttagtttgctgaggatgatggtttccagcttcatccatgtccctgcaaagtacacgaattcattcttttttatggtttcacagcattccatggtgtgtatgtgccacattttctttatctagtctatcattggtgagcatttgggttgtttccaagtctttgccattgtaaatagtgctgcaataaacatatatgtgcatgtgtctttacagtagaatgatttataattcttttggtatatacccaggaatgggattgctgggtcaaatggtatttctggttctagatccttgagtaatcactacactgtcttccacaatggttgaactaatttacactcccaccaagagtgtaaaagcattcctatttctccacaggctcaccagcatgtgttgtttgctgactttttgatgatcgccattctaatttgcgtgagatggtatctcaytgtggttttgatttgcatttctttagcggccagtgatgagattttttttttcatatg

SEQ ID NO: 824053 - DNA, 477 bp, Homo sapiens
cacttggaaaactatgtaggcaaaaaattagctctctctcaccacccccccagaattaactgtttttgataattgacatgctttgttaatactgtaagcttycaacctatcatttaaaattctatcaaaacataacgtttggtggctgtaaaatagtctgctttgaagttaaacaattttccaactacttctctagggtcaggttatttccaatgttttgttataggcattgctgtgaacatttaatatagatacatattctggtcattattaggtgttgtcagaccttttaattttagttatgttctggtttgtgtagtaatagttgattgtggcttaaattacatttccttgataaataatctttggcaatttttcatgtgcttatttgccactcttatatcttcttttatgaatactgttaataattattgtatcctttcctcatatctttttaacagttgctttctgaaaaat

SEQ ID NO: 824054 - DNA, 477 bp, Homo sapiens
cacttggaaaactatgtaggcaaaaaattagctctctctcaccacccccccagaattaactgtttttgataattgacatgctttgttaatactgtaagctttcaacctatcatttaaaattctatcaaaacataacgtttggtggctgtaaaatagtctgctttgaagttaaacaattttccaactacttctctagggtcaggttatttccaatgttttgttataggcattgctgtgaacatttaatatagatacatattctggtcattattaggtgttgtcagaccttttaattttagttatgttctggtttgtgtagtaatagttgattgtggcttaaattacatttccttgataaataatctttggcaatttttcatgygcttatttgccactcttatatcttcttttatgaatactgttaataattattgtatcctttcctcatatctttttaacagttgctttctgaaaaat

SEQ ID NO: 824055 - DNA, 606 bp, Homo sapiens
ttcagcctcagttttctcatctactatctatctgagggtaacaatacttcagagctgctagaggaattcaatgaaataacatgtaaatttccttaaaatatgcccacagcatgggaagcatttaatgaatagtagcaattctaatatctaagtgatagctgccaattcattagatatgggcatgttcagaatggtccattgacttatacttgccccattatgtatatatgaggacaataaaaagttgcccagttgattttttattgccctcttatatgtacatgcattatgtagacagcctgctcaatgggtatttattataataatgaagtacacagtctaatgtttctcttcatttgtataagctttaagaaagccctgttttttcagcttttttggtacataaattcatggcagtttggttataatccccatcgttttgtttgattttccctgcatttcttaaattaagaaatatccatawattgagattagctgtaactaactcatggtgttccttccttttgccatttcctccctttccatcttcttgtaatttaaactttccacatcctagagtgagaaatatgagtccccagtttttcc

SEQ ID NO: 824056 - DNA, 606 bp, Homo sapiens
acctgggtagatgggtgcatgatgacatcgtggattcgctttcagagagaccagatcgagatatcatcttgctaggagtctaggaaaccaactacacaaacagaagcttcgtggctttctggaaacacagccatgggtggtggctacatgtttgcagagtagtgacgggcggttccctaaccaatcacggttttgtgtgtctttcttgttaagagataaatgtcaaggcaaagagggaaagggtcaagaaagacaattcagaagaatctgagcccaggagcctcagggtcctacaaactgcccaagcctgagactggcaagatggattattcttcacaggaccaggactgaagctggaagggcacatagcttacaataaaatgcgtagtttgcagatgacaacgaagagagatgtggcctacttcctatcacttggcctgcacattctcaggccttggtcgaaacaccacttcctcccacggagttgactgatccacaaaggtcgctgggactttccctggtcctttcccgtggcagcctgcactcccccyacacatgcaacacattgatcaccaccggcacccgggttcctggccagactctcaa

SEQ ID NO: 824057 - DNA, 486 bp, Homo sapiens
  misc_feature 455, 456, 457, 458, 459, 460, 461, 462, 463, 464, 465, 466,467, 468, 469, 470, 471, 472, 473, 474, 475, 476, 477, 478,479, 480, 481, 482, 483, 484, 485, 486: n = A,T,C or G
actcaccttaatcttccctcagtttatcacgtccaacatcttgcacatttcaaaaggaacacacattagcagtttccaataatgaaggtgtgaaggtcacacaggatctgttctctcagcaggaggaagaactttgcttggctgtcgtgaagacaaagtgttctatttgctacagatgccccgagagggtctctgcagttcccccttgggagggtctggactgactgtagaggcatgaaggttaggagacccttcactcctctcaggcttgtgcgtggcacttagggctatgatcctaattgtgcaggagacaggggccacaagcaccagccctctgaactttcccgacgctgccaggccattgcctctgcctcagatggggcccaagscagcttgaaagaggagcacaacccctgccccatgtccagctgcctctcaagggggaatatggggtnnnnnnnnnnnnnnnnnnnnnnnnnnnnnnnn

SEQ ID NO: 824058 - DNA, 594 bp, Homo sapiens
tcgacggcacagctaatgcccgaacccagcccctgtcggcagagacagagccccacattattatgtgaataacaatgttttctgttttaagggtgtcaggagtttcgctttttaaaaaaatgtctgttcctgcaatagtaactcttctttctcttgagagtaaaaaatgaaataaaataaatccacgctgcacaggtgctcggctcattctttcaggagctctgccctgtgaccccatctcctgggtctttgtccattttctctttcctgacccagggaaaatgcagatggacagacgtgtgctgtctacgccgccctagcatggaactcccgggagccatgctggctgctggtgggcacctggctcgcgccctgggctgagctggtgtgatgcattttcactgctgtagacgcaggctctgcccgccctgggcctcccctggtctctgcagcccatcctgtgctgtgtcctgcccaccttgtgagccgggcagggcctcctcccyacgcgcacgcactggtggccttggaggtgccgtcctccctcacctcggagcttggggttgggctcccgcgtctcagttgtcggggacc

SEQ ID NO: 824059 - DNA, 542 bp, Homo sapiens
aaagagattgtggttttgaatgatgttaatgttgtgattacaagtaataatagctccatagacagtcttgagatgayggtgtaagggaggtatgcttgagggtgcccccaatcaatccatattgtgttctgtttaaaaagaaatagtgtagtaccttattgatgtctttaattactcacaagttaaagcacatggaatgaaattcctttctttataaataagcatttaagaatttcaccagagaaaacagacatccatatttgcgaccatgttgaaaaattcttggtccctttatggctttatcgcagaggtgagagcattttggtctttgttgagtaactgaatagcattgtatcatttaggatggctttggctgcagatgatgggaaacggtggctccaattggctcaaacattaggaaatggcttaacatcacccctgagcctggtgtggccggtggcagctcctctgccctgctctaagctctgtcctcccatctcgtccagtactttgccattatccttgagtgcctaaggagattg

SEQ ID NO: 824060 - DNA, 449 bp, Homo sapiens
ataagtcggggcaagcctcgtaagatgtgagaagtggaagctgcagggagtgtctggagcccggagacaggccatgggtgcctgatctggaggagtgtgaagggaaacacccaggaagcagggtctgttgagtgcctcaacacaaggctgcaacaggtgggacttgacctgcaagtgcaggagccaagggtgggcaagcatctccacacgttttgattttaaggaaaattattcttgtgaccacgcacagggtgggagaaggagtgagcccactcgctcactattccagcaccgacacggggacgctcactattccagcaccgacgtggggacgctcactattgcagcaccgacaaggggcaccaacacggggatgttcacaattccagcaccgacayggggacgctcactattccagcaccgacacggggatgctcactattccagca

SEQ ID NO: 824061 - DNA, 449 bp, Homo sapiens
ataagtcggggcaagcctcgtaagatgtgagaagtggaagctgcagggagtgtctggagcccggagacaggccatgggtgcctgatctggaggagtgtgaagggaaacacccaggaagcagggtctgttgagtgcctcaacacaaggctgcaacaggtgggacttgacctgcaagtgcaggagccaagggtgggcaagcatctccacacgttttgattttaaggaaaattattcttgtgaccacgcacagggtgggagaaggagtgagcccactcgctcactattccagcaccgacacggggacgctcactattccagcaccgacgtggggacgctcactattgcagcaccgacaaggggcaccaacacggggatgttcacaattccagcaccgacatrgggacgctcactattccagcaccgacacggggatgctcactattccagca

SEQ ID NO: 824062 - DNA, 449 bp, Homo sapiens
ataagtcggggcaagcctcgtaagatgtgagaagtggaagctgcagggagtgtctggagcccggagacaggccatgggtgcctgatctggaggagtgtgaagggaaacacccaggaagcagggtctgttgagtgcctcaacacaaggctgcaacaggtgggacttgacctgcaagtgcaggagccaagggtgggcaagcatctccacacgttttgattttaaggaaaattattcttgtgaccacgcacagggtgggagaaggagtgagcccactcgctcactattccagcaccgacacggggacgctcactattccagcaccgacgtggggacgctcactattgcagcaccgacaaggggcaccaacacggggatgttcacaattccagcaccgacatggggacgctcactattscagcaccgacacggggatgctcactattccagca

SEQ ID NO: 824063 - DNA, 634 bp, Homo sapiens
tggaaactttgtcagcactcgaaaaaacatcaccctgctgccttctggaaaaaygtcaccctgccgccttctggaatgctactatgctatgttgctgttggagatctaatgccggtctgatttttatttctttgtagctgaattattttttctttaggtaatactttagtctctctttaaaccaggtgttctgaatttttacaatgacatgtgaagatatcttttaaaattcatcttacttagcagttcacaactttctcaatatgaacatttgagtctccctgacaatttggggaccttttctggtgctatttacttgaaaattgcctctactccattttctctgttttcttttcctaaaacttctattggctgaatgtggtctgtcctagaaggatccttcatgcctcattaccccttcacttctttcgttttactttttagaaaatttccccttttcttttgattaaaaaaaattcagaagttaccacattccaggtttccaagagcttttatgaggcacaattgctgttttcttaaagtacatgttcatgttttatggctgcattatatccttaaatctctctgagaattctaattattgggaggattttgtttctaaattgcttcttca

SEQ ID NO: 824064 - DNA, 498 bp, Homo sapiens
gggggctgtggtggggtggtgggtcagcttctgtgaatgaagcccgtggctctccagatctccacatcccccagtgtggcctgggcctgttgttgcctcagcactggagagggaggagggctgagagagcctctcttcttccacagtttgagctgccccctcaccagctgtctggtcccctgtttcccttgggctgaagctaggtggagaaaaggacactccaattgagcccctacaggcaggaaagccacacaggtagagtgaccacatactttcctgcctagaacctccatggacatctcctgcccagcttcccagcctcctctgtcacaactccttccatttcccatgagttccagccataatggcccagtggccacayccgaaatcatgcacctctgtgcctctgaaactgtgcctctgtgcctctcgaaatgcacctccaggcctctggtcctttgcacatgctccacctctgcttctgccatctttcctttg

SEQ ID NO: 824065 - DNA, 605 bp, Homo sapiens
gctggctgttgggggaaaggaatgaagctctacttcctggagtgcagactatttatatatattattcatacttctgtggaaaatatttrcccctactccccatttatttaattagtaatttaataatatcaatatggactcattgatatttattttaatttttagattataatctggtactatcattattttgctgctgaaagtaatggccagctttggccattgggagttttcttttcttgagacagggtcttgctctgtcatccaggttggtgtgcggtggtgcgttcacagctcactgcatccttgacctcctgggctcaagcaatccttccgcctcagcctccttaatagctgggactataggtacatgccaccttgcctggctaatttaaaataaattttaaaagacaacaacttttttttttgtagagaagtggtgggtatcgctacattgcccaggttggtcttgaactcctgggctcacgccaacctcctgccttggcttcccaaagtgctgagattataggcatgagccactgcgcctagcctgggagtgcctgaaggttggctcttatgtccttttgacatactaccatcttttt

SEQ ID NO: 824066 - DNA, 605 bp, Homo sapiens
gctggctgttgggggaaaggaatgaagctctacttcctggagtgcagactatttatatatattattcatacttctgtggaaaatatttgcccctactccccatttatttaattagtaatttaatwatatcaatatggactcattgatatttattttaatttttagattataatctggtactatcattattttgctgctgaaagtaatggccagctttggccattgggagttttcttttcttgagacagggtcttgctctgtcatccaggttggtgtgcggtggtgcgttcacagctcactgcatccttgacctcctgggctcaagcaatccttccgcctcagcctccttaatagctgggactataggtacatgccaccttgcctggctaatttaaaataaattttaaaagacaacaacttttttttttgtagagaagtggtgggtatcgctacattgcccaggttggtcttgaactcctgggctcacgccaacctcctgccttggcttcccaaagtgctgagattataggcatgagccactgcgcctagcctgggagtgcctgaaggttggctcttatgtccttttgacatactaccatcttttt

SEQ ID NO: 824067 - DNA, 610 bp, Homo sapiens
tcagtcctcttagggatgtggcagttttttaaatactgagatcttagacacatcttcaatctgtggggctatgctccctcctctagaatctttgagratggtaactgcttccaccaataacatatgataggagtgatactgtttgaattctaaggctaggtcataaaataccttgcagcttcttgctggttctcaagtgaaagtgttctctaaggaaagccagctgccatgtaagaaatctgagatcactatattggaaaagtggcaaagagaaagataaagatataagtacaaaggcaattaaaacacaaacagttggccgggcgcagtggctcacgcctgttccagcactttgggaggccaacgcaggcggcttacgaggtcaggagatcaagaccatcctggctaacacggtgaaaccccgtctctactaaaaataccaaaaaattagccaggcgtggctggcgcctgtggtcccagctacttgggaggctaagccaggagaacagcgtgaacctgcgaggtggagcttgcagtgagccggagcttgcagtgagcccagattgcaccactgcactccagcctgagcgacagagagagactccgtctc

SEQ ID NO: 824068 - DNA, 629 bp, Homo sapiens
aagttattctcctgcctcagcctcccaagtagctgggaatacagacatgcaccagcatgccaggctaatttttgtatttttagtagagatggggtttcaccatgttygccaggctggtctcaaactcctgacctcaagtgatccgcccacctcagcctcctaaagtgctgggattccggacatgagccactgcacccggcctttgagtttcattaatctgagttctaattaatttgattgtgctgtggtctgagagactgttatgatttcagtacttttgcacttgctgaggagtgttttacttccaattatgtggtctattttagagcaagtgccatgtggcgctgagaagaatgtatattctgttgttttgtggtggagagttctgtagatatctatcagatccacttgatctagagctgaattcaagtcctaaatatctttgttaattttctgtcttgatctgtcaggggtgttaaagtctcccactattactgtgttgagagtccctttgtaggtctctaagaccttgttttatgaaactaggtgctcctgtattgagtgcatatataggatagttagctctgcttgttaaattgaaccctttatcattatataatgcccttctt

SEQ ID NO: 824069 - DNA, 600 bp, Homo sapiens
actgaggtctagttttaaattcctgaattactctgagtttctcaaagaggtaataaaatctcccagtttctgttccttcatcagaggtagaactatgtcatagctttattgtgaggcataagtgacatgaaagaacatggaaacaatgtgcaaagtgtgatgcattataaagtcatgacagttattaggacttggagtaaagtgaagagaatgtaaggttataaaagaagagattccaggtgtgaatctcatgtgaaattaaaagaaaaaaaaaaccacctcactcttcactttatcctgttatgtgacacagcacatgcacacacacatgcacacccacacaggctggtggtgagaagacattgtgacattgctttgatggatttacttatttacttattagattattttgagcatcacaacttcataaatgtttcaaataggagagaaaaagtgggggaaagaggaggggaaaagcgaccctcaccaaacaggtcggactgccaccaagtgaataaaattaccttctaatcaaatgcatcattaaaagtacagacattagatcccagtkctgacagctttatgagcaaagcatttgca

SEQ ID NO: 824070 - DNA, 479 bp, Homo sapiens
cttctctatctagccaactcttcctcagcctaggtgactcagttttaccgccactgtctgtggggagggcgagccccttcctgacccttctctatgttcccagaattcccagaacctaygccaagagaccagccagctgagcacatgcattccagtcatctctatttgctcctctcatcaggcctctaggctgagactttctggggagcaagagccatgtttctgcatcaccccttagtggagaatcctcctcataataggagctaatgaaaagttgttgagttgttcataaaataaaagtaatatgtaacaatttaccacaaggctacctataaagaattatgaagaaaatccaatgtttattgcaaaggatgtctattaaatggtgtcccttgggtaaatgtctatttggaatccccacaacagaaaatctacttctaactaaaattaaaaataacaccaagcaagcagaacaaaaa

SEQ ID NO: 824071 - DNA, 508 bp, Homo sapiens
acatggagtaagggctcgatacacattagactttgtgattattactagcatgccctaaatgggcacctgatatatctggaggctgtgattcctcatttgtggagaataaagacacagaaaacatgtttcccaagaccactatttaaggtttaaatgagataacaaaagaaaactgctgtggcctgggcctggcccagagagaaaggagtgagtggaggtgggcagtgttaatcaagggatgctggctggagccctctgtaggcagggacggagttctgggagaacacaagcaccagacgcttcccctccccagtgctgagtacaagtgctccggcctcttgaagagtgatagtgactcaactctggcataaccacctccctgctcccaaagcaggctctacttttatctccccaracgatcctcctgtgaatggtcaggctttggatccaaattggatgtctgctgttgagaatgaaggattactgagctgatgggatgtgcccaggg

SEQ ID NO: 824072 - DNA, 501 bp, Homo sapiens
actcttaaaatcagaaaaatcacatacttgcaatctactatttgaggatacttaaataagtattttaattattttgcttgtgtataaatatatattccaccctaacaggaataaacatttgagtgaaatacaactgtacaaacaaaaataaaatacctattcataaatatttttaaaatattgaaaacttgcaacgttttattttttctgaatgaaaataaaatcttgttttaagatgaagtgttttgcttgaaattatattatgtaagataaaatgctactgataattattaattaatagtatacacatatttaagttaggaggtcactgcaattctcaacaattgcaattacaaacaagcaaataaaacccaaaactctcaaaacaaaaaaatacacataaaaccctttaaaatgctttttaatctagccgagttttcttacatacatgtagttttcttacatactcctcrgtcatttatatagtaagcagacaaaaaa

SEQ ID NO: 824073 - DNA, 646 bp, Homo sapiens
aaaataatgtaattatttcaacagatgcagaaaaaccatctgttaaaattcaaaaccaagcatgataaagaacattagcaaactagatatataagggaacttctttatctgataaagaatatctattaagaaaaaaaaaacctatggcaagcatcatattaaatgtctttgctgctgatatcaggaaagagacaagcaagctgtcaccacttctagtcaacattgcagtagaggtcctagacagtacagtaagacatgaaaaggaaataaaagtatgcttaccagaagagaaggaataaaactagcattacttatacaacataattgtatatgtgggagatgcaaagaaatctgcatataaactgctagaattaacaagcagatttagcaaggtcatggatacaagttcaatgtacaaaaatcaaatttagctctatatactggtaacaaacaattataagggtaaaaaaattttaataccattcacaaccacatgcaaatcttgaagacckaggaataagtcttaaataagctgtgaaagactttatacaaaaatctccaacaaaacactaagacaaatgaaggaaaccctaataaaggggtgtgttgtattcacagattagatgactaaatactgtaaaatgcc

SEQ ID NO: 824074 - DNA, 619 bp, Homo sapiens
aaagaaaatcccattttctaaggagaaattcaagctggctacagaaattttcataaataacaaagaaccaaatgttcatcaccaagacaatggggaaaatgtctccagagcatgttagagacttttttcctcctatcacaggcctagaggcctaggaggaataaatggtatattgggcctgcccagggcccccttgctgtgtgcaacctagggacttgccctgtgtcccaactgctctagtcaaggctaaaaggggccaaggtatagctcaagccatgacttcagagagtgcaagccccaagccttggcagcttccacaggtgttgagtccatgggtgcacagaagtcaagaattaaggtttgggaacctcctcctaggtttcagacgattatagaaatgcctggatgcccaggcagaagtttactgcaggagtggagcccttatggagaacctctgctagggcagtacagagggaaatgtggggttgaagccaccacacagagtccccactggkacactgcctagtggagctatgagaaaatggtcaccatcctgcagaccccagaatggtagatccactggtagcttgcactgtgagcctggaaaagccacactcaa

SEQ ID NO: 824075 - DNA, 428 bp, Homo sapiens
ttccattgtattatacaccacattttctatatccatcaatatcccttgatagacacaggttaattccacatcttggctattatgaatagtgagccaayaaacatggaagtgtagatatgtctttgatatactgattttcttccttttgggtgtataccagcagtggcattgctggatcatatagtagttctattttcagttggctgaagaacctccatactgttttccataatggctgtactacattacattctgaccaacagtgtatgagcattcccatttctcctcatccttgttagtattggttattttttgtgtgttttttgacaatagccattctaactggggtgatatgatatctcattgtggttttgatgtgcatttctctgatgattagtgatgttgagcatttttacatatacctattg

SEQ ID NO: 824076 - DNA, 440 bp, Homo sapiens
ctaagatctggaacaagacaaggatgcccactttcatgacttttattcatcctagtgctggaggtcctaagcatagcaattaagcaagaggaagaaataaagggcatccaaattggataggaagaagtcatattgtccttgtttgcagacagcatgatcttatatttagaaaaacccaaagactgccaaaaaactcttagaactgacaaatttagtaaagttgttagatacaaaatcaacatacaaaaatcagtagcatttctatacactagtatgatcagtctgcaagagaaatcaagaaagtaatcccatttgtaatagttacaaaaataaaatatctaggaataaatttaaccaaaaagtggaagatctctgcaaggaaaaytgtaaaacactgatgacagaaattaaagaggacaacaacaacaacaaaaaatgaa

SEQ ID NO: 824077 - DNA, 609 bp, Homo sapiens
ttacaaagagcttatgttcagaatacataaagaattcctataaaccagtagaaaaatgggcaaaatcttgaataggctcttcacaaaagaggatagtcaaatgaccaatgaacataaaaatgtactcaaactcattagaaatcagggaaaagccgggcgcggtggctcatgcctgtaatcctaacattttgggaggcccaggcgggtggatcactaggtcaggagatcgagactatcctggctaacatggtgaaaccccatctgtactaaaaatacaaaaaattagccaggcatggtggcgggcgcctgtaatcccagttactcaggaggctgaggcaggagaatggcatgaacccgggaggcggagctggcagtgagccgagattgcgccactgcactccagcctgggcgacagagcaagactccatctcaaaataaataaataaataaataaataaataaataaataaataaataaataaatataaataaaataaaataaaataaaataaaataaacactgaagcrgccgggcgcggtggctcacgcctgtaatcccagcactttgggaggccgaggcaggcacatcatgaggttagcagatcgaga

SEQ ID NO: 824078 - DNA, 506 bp, Homo sapiens
acaggggccatgctactcttctctgtatgcatgattccatttatataaagtttgtaaacaggcaaatctatgatattaaaaatcaagaaggtgatttcctttggggaagaaggagagaatagctattgggagggggcagaaggggagttctggggtgccagtcatgaccaatttcatgccttgttggtggttacatggtgtgtacactttgtgataattcattgagctttatacacttatgatttgtgcactttttggtatccattttatacttcaatagaaaaaaatagtttctaaagggaaaacaaaaaccagaaccatcttaaaacccctgctataagaagacaaagatgaaatatgagtacagaaacaacactggttttgagtcggtgttgtatccttgttagattaatgacattaaacttgatcagtgtcastgatcacttgatcatacttgatgtcgctgagcctcagtttcttcatttatgaaataggaatgatatcac

SEQ ID NO: 824079 - DNA, 629 bp, Homo sapiens
cacacgcacgctgaggctcagtaacactatctcttcctcagcgatgaccctgggtttctacttctgtatctctgctcacttctcaacacagaacaaagggatttttrtgggggcagacacaccccacattcctagtttacagaatttatttttggccagagctgcatttagcaatatatgagcaactctactagtaataaggagaggaagaagagaaggcgtatgtgtggatttatcttcctagggctgtgtggctcaggttaatatttaaaatggtcttgcattctctgagcacacactgactgtctgatgggggaggcgatgaggagagggacaggtggcatggggaaagctgacctaggattaaaaattaattgtgctcaattttcaaatcagatcattgtagacagatggctatgaattttaatgtgatttcatgtttaacttttttttgaggagatttaaactctattattcaccagctaggcaatttatgaactcacatttcagctttaattctaccccatcacaagcagaattatagggctggaaaaactccaccaatcatcctctgtttgaaagaaccacacccaaagccaaccaaggcaacagggatccctaacacatct

SEQ ID NO: 824080 - DNA, 599 bp, Homo sapiens
agctctctcctgttgctatttatagcacgttgctcatgtaaaataagtctcctcattcataaaatgaggatggtaataaaccttgtcctactttcctaaaaatagtttcctatctgcaaaatggggctaataatacctgccctattgatttcacaaggctgttttgagggtcagatgtgattgtgtaaaagtaagttgaaactcaaagtatgatacatcagaggtattaccgtagttctgactagcattgcaacccaagcatttgtgagaaaagcgctattgctgtcctttatatctttgaacatgaatgggtatgatacttactagcccagtggacgtaccaaaatatttgtgctgtattttgtctactatttttatggacagctattttaagatgagttgacaaaagcctatgccactggtatgacaacatttataagaccacccataagtggtttggtgttgaaagtgagaaggtgatgttcatttttcctctcttawtctgctcagcttttctgcagtttcctatttctttccacaaagggtgacattgttcagagcagaattgtagacagagtacttgtagatactttcttttc

SEQ ID NO: 824081 - DNA, 641 bp, Homo sapiens
actcattccagggcacattggctcacacctgtaatcccagcactttgggaggcagaggtgggtggatcaactgaggtcaggagtttgagaccagcctggccaacatggtgaaacctgtctctactaaaaatacaaaaattagtcaggtgtggtggcaggtgcctgtaatctcagctacttgggaggctgaggtaggggaatggcttgaatccaggaggtggaggttgcagtgagccgagattgcaccactgcactccagcctgggtgacagagtgggactctgtctcaaaataaaaaaaaaaaaaagaaaaaaaagtctgagttcattccagcattaacccaaaagtccaagtccaaagtctcatctgagacaaggcaagtccatcctgcctatgagcctgtaaaatcaaaatcaaattagttacttcctagatacaatgggggtccaggcattggataaacacacccactccaaatgggagaaattggccaaaacaaaggggatactggccccatgaaagtccaaaatccatagggcaggcattaaaccttaaaggtgcaaaataatctccttygactccatgtctcacatccaggccgtgctgatgcaacaggtgggctcccacagccttgggcagttc

SEQ ID NO: 824082 - DNA, 537 bp, Homo sapiens
gccattgcactacagcctgggcgacagagcgagactccgtctcaaaaaaagaaaaaagaaatgtctacaactaagtggagaaaagagagaaatcaataaaaaacaaacatactgaatagaagaaacagaactgggacatggagctaatgagaggttattacaaagaaaagggaaatcaatggtcttaaatcactgtagaaagctccaggaaaatgaaaactaagcaaacaaccaatgaaaacaggtaggaaatcagtgacaaccatgaaaagaacaactttagtagaaagctagggtagaaaacaaactgcagaatccacatcactagtgagaaatagacactgagtccaaaaagtctggctacaagcaaaaggaaaagaaacaggagcatgaaagaaaagtctgcacaaaataaggatgtgtacgcttacagaaatatgtctatgcccctaaataccatgaggacacaaatccagcttaggcacacagaagtggcactgtgcccaasgcaaagtgtcaaatgtagaaataacatat

SEQ ID NO: 824083 - DNA, 618 bp, Homo sapiens
cttctttgcacatgtaagattaatttcattacttctttcttttatgaaaatatttttattttctataaatacatttggaagaaattatttcttcccaacccagtccaycccattaactgtcagttttttctactaaaaaagatgctaataccaccctcacctgtgactgctaaacagaaaaatattgcctggactaggcattattcccgctagttggaaataaaggctgttgggcatgggagtttgatcttgtaaagaaatcaacactgagacaaaggatctcttagcaaggctggtttactttctgccaaaagggtgcactcaccagcagtccagccacgagagcacaccaaacaaaggagacggggacatttataacctttacatcctgatgcaatcccctatggctgtgtcccgttcccattggctgggatgggacctcacactctaaacttaactggattggttaataatttaaaactttcctaaataggacgaagggaaaaaggacaaagaaaagaggaagttagtgatgagaggtcagaggggttcccaaataaggaatggcatgtatcctgatctgggactcatttagccttatctcaacctactggaaca

SEQ ID NO: 824084 - DNA, 539 bp, Homo sapiens
gcagtatggataaaactggtggtcattatgttaaatgaaataagccaggcacagaaaagtaaactacataagttagctttgtgaaagctaaaaattaaaacatttgaactcatggagatacagagttgaagcatgtttatgggagactgggaaaagtagtggggtgtgtggagaggaagtaggggtggttaatgggttcagtacaatagtaagaaagaatgaacaagacctagaatttcatagcaaaagagtaactatagtcaataattatttaattgtacatttaaaagtaattaaaagagtataattgcattgtttgcaacactaaggataagtacttgaggtaatggataactcctttatcctgatttgattattacacattatatgcctgtattaaaacaggtaccccattcatatatacacctactgygtactcacaaaaattaaaaatacagaaatgtgattgccagtgttggaggtgggacgtggtaggtggtgactagattgtgggggctcgtttctcaggaatagcttag

SEQ ID NO: 824085 - DNA, 539 bp, Homo sapiens
gcagtatggataaaactggtggtcattatgttaaatgaaataagccaggcacagaaaagtaaactacataagttagctttgtgaaagctaaaaattaaaacatttgaactcatggagatacagagttgaagcatgtttatgggagactgggaaaagtagtggggtgtgtggagaggaagtaggggtggttaatgggttcagtacaatagtaagaaagaatgaacaagacctagaatttcatagcaaaagagtaactatagtcaataattatttaattgtacatttaaaagtaattaaaagagtataattgcattgtttgcaacactaaggataagtacttgaggtaatggataactcctttatcctgatttgattattacacattatatgcctgtattaaaacaggtaccccattcatatatacacctactgcgtactcacaaaaattaaaaatacagaaatgtgattgccagtgttggargtgggacgtggtaggtggtgactagattgtgggggctcgtttctcaggaatagcttag

SEQ ID NO: 824086 - DNA, 596 bp, Homo sapiens
ctggtggtcattatgttaaatgaaataagccaggcacagaaaagtaaactacataagttagctttgtgaaagctaaaaattaaaacatttgaactcatggagatacagagttgaagcatgtttatgggagactgggaaaagtagtggggtgtgtggagaggaagtaggggtggttaatgggttcagtacaatagtaagaaagaatgaacaagacctagaatttcatagcaaaagagtaactatagtcaataattatttaattgtacatttaaaagtaattaaaagagtataattgcattgtttgcaacactaaggataagtacttgaggtaatggataactcctttatcctgatttgattattacacattatatgcctgtattaaaacaggtaccccattcatatatacacctactgcgtactcacaaaaattaaaaatacagaaatgtgattgccagtgttggaggtgggacgtggtaggtggtgactagattgtrggggctcgtttctcaggaatagcttagcaccatccccttggtgataagtgagttctcgctgtgagttcaagcaagacctggttgtttaaaagagtgtgg

SEQ ID NO: 824087 - DNA, 630 bp, Homo sapiens
ctatttatcactcctagaatatgcaaatatttacatctttgactgaatcactatttaatttacctaactcagaaagtgcacccacttatccaaagatcctggcttacacacatctgctgagcacttgcttatagataaccctgaggttgtcaaaggcaagaggtcaaagtagatggttctctcttgtgtcagtatttataaaaacacttgacaaattctgttacactaaaatgcaagaggggtaaatgtaatagtagatatagaagatcgtattgcaacctagctttgtctgaccagttcagttgcctttaactttgtttgttatggaaatataaatatttgggacaaatttaaatggaattgagataataatagttaatggttcagttttgctcaaaagctatctctggaagatgaaaaggaagacaataacacctgtctcaaataattattataataatgtatccatatgtttgaatatttattttgattataggtttcttctagtaattttatttgtggtaacttatgaggatactatgatkggtactaaataattttctgtagttttggacaaaattctatttcataaatacttttaagttgcctctgtgatgtatcaattcaata

SEQ ID NO: 824088 - DNA, 583 bp, Homo sapiens
tttactgggtgtgcagaagaatagtgaattaaagaaagcaatgtaatccaatggggaaagtttaaaatcagatttaaaatstcaaattcaggataaacccaaagaaaaagaagatttcaaagtatatctcttaaatacaggaggtgtctgactccaagctaaagtcttatgtctgatttttcaggctttaacataggcaattacaaacgcctgtcctggcgtgcttcatgggggaagctccacactccatttgggcacacagctaggaccttagagtctgtgaaggagttgagtaagtacttagtctctccatccctgccattctccgaagtatatctgtgttgctagccaagatgcctccatttggctagtttgacgccttcctcagttacctcttctgagacctcattgtgggagaggcaggagtgctctgaagtcttctccactctaactcagtgctcagtacatttccactcctaccccctttctcctctccctgccctactgcctgtgcaagaaatgacaggagcctttgttcaaggtccccctgtggtgagatgatttccccgtctgtgttgatgca

SEQ ID NO: 824089 - DNA, 646 bp, Homo sapiens
gtgggtgcagtgcaccgtgcatgagttgaagcagggcgaggcatcgcctcacctgggaagtgcaaggggtcagggaattccctttcctagtcaaagaaagtggtgacagatggcacctggaagatcgggtcactcccaccctaatactgcacttttccaatgggcttaaaaaacggtacaccaggagattatatcccgcacatggctcggagggtcctaaacacacggagtctttctcattgctagcacagccgtccaagatcaaactgcaaggtggcagcaaggctgggggaggggcatccgccattgcggagttagttgtttgattaggtaaacaaagcggcctggaagctagaactgggtggatcccaccacagctcaaggaggcctgcctgcctctttaggctccacctctgggggcagggcacaggcaaacaaaaagacagcagtaacctctgcagacttaaatatccctccctgacagctttgaagagagaagtggttctcccagcacgcagcttgagatctgagaatgggcagactgccgcctcaagtgggtccctgacctcagagtagcctaactgggaggtaccccccagtaggggtggacwgacacctcatacggccaggtactcctctgagacaa

SEQ ID NO: 824090 - DNA, 646 bp, Homo sapiens
ctcaatgaagagaatgacttagttttgttcactcttgtaccccccaatgatgtagtgccattttggcrtatgtattagtttgttttcacattgctataaagatattacctgagacagggttatttataaacaaaagtggtttaattgacttgaagttccacgtagctgtggtggcctcaggaaacttacaatcatgacggaaggtgaaggggaagcaagcacctccttcacaaggtggcaagagagagacagcaggtgaggaactgccaaacacttttaagccaacagatcttgtgagaattcactaactatcatgagaacagcatgggggaaattgcccccagaattcaatcacctcctaccaggtccctccctcgacatgtgaggattgcaatttgagatgagatttgggtgagtacacagaggcaaaccatatcagcatatattaaatgataaataaatacactttggatacatgaatacatagaggctgggtatggtggctcatgcctgtaatcatgcacatctccagatctttgaataaagttaatattttggaatatgctgtaatttggataacttctagaataccactgtgtactcttggtgctgcttacgtaggttgaaacaagaagtagagttctag

SEQ ID NO: 824091 - DNA, 527 bp, Homo sapiens
atatggtagcttgtgccattaattcctaagaattttcaggattcagaagacaattttgtttacttgttgttggcatgaaagtttacagacattagttttaatgttctctctgcttctaggttattaaatactttttttgccaattttccttccaaaaatgtgttatttctcattatttttaatctattatcttgtctttttgaaaatctggattaatatgtttttatggctgtcatttttggaaattagatttaaccactttacctagcaataagaccctttagtattacacgttacctgtggctcaagtacaaccctgattatggggcctctgtattatcacacttaatgcaaacaatgacccacttatggatttgttacacctattcttttgcattcttttattctaagsaggtgtaaggttttgtgttcttccctctctctttacctccaagaaatgtaaactacgatacaactgttgtcaggtgtggtacttcacatggaaggaataaggaattttaattaaa

SEQ ID NO: 824092 - DNA, 542 bp, Homo sapiens
aaagagaaaaagagggagaggaagagaaaaaaaagcaaaattacaagtgattgcatacatagtgagaggagaatatcaaaatgtatgctctttcttaaaactgcccagaaaaatctacctattcccttggctgaccagtcttcacccatttcactgttcatgtgcagaactggcaagagttaatgacagaaaattaaattatgtgtcaattttgttccttcttagcaagtctgataaaatactaaaggctataaagggataaatattgccctaaatcaaatctggataatattgaaaagagactccttcattttacagactaggaaaaccaagtccttcaaaaagcaaagtcataacagaacttaaacttatgcttcaatttgtactttgatacctattatccaattacctttcttttctcaagaaattacttctgtcgtgtttgttcagggactgaatacgtcaaggatggggaagctctccattaggaataaccatgctcagtgccacaaaacaaaatggyacaggtttggatttggttt

SEQ ID NO: 824093 - DNA, 559 bp, Homo sapiens
attctcttaattataatctagataaaggcacaaactgcttaaaaattctcctgacagttccaaagttagatgacaaaagttcaacttgtcaaagaaaaaaatcttcttaaaagaacatttattttcagttccaaggttacatatgtcagttgtcttttccataagccataagaacatttttttctctatagcttatctatggaacagaaaataaataaaagcacagtcataccttttactcagaaacagtaaacttcataaaaacagatgaacttaccacaactaaacagaaagctgagctttgaggaaatggggtggtattaaagagccaaacaacttgctataaataagcttcttgaaatgctaaaaaaaaaaaattttaagtgccggactcccatttagccaatagccacataggcaccaatacacctccagtcagtgtaagctccaccacactgtcctgccattcacctcaacyttaacctcaagattaagctcatttttattgcgcacaaaggtcatctgtattaggtcaaaattcaaagtcccttgtcagaaa

SEQ ID NO: 824094 - DNA, 622 bp, Homo sapiens
ggagatgacagctctatgtgtgttattgcccctgaagaccttctagtgggacaagacgtagagatggaaaacrgtgatattgatgatcttgaacctgtgtaggcctaggctaatttgtgtgttcctgtcttcatttttaacaaaaagtttgaaatgttaaaaaaaaaaaaaaaactaaagagaaaaaagcttataaagtaaagatattaagaaacaaaatatttttgtacaaccatagcaatgcatttgtgttttaagctgttacttaaaaggattcaaaaagtttaccattttttttaagtttacaaagttaaaaagttagagtaagctaaggttaatttattattgaagaaagaaaaatattttttataaatttagtgtagcttaagtgtacagtgtttataaagtttagagtagtgtacagtaatgtcctaggccttcacattcactcaccactcattcaatgactcacccagagcaacttccagtcctataagctccatttttgataagtgcgtaatacaggtataccctttttttgtgttttatactgtatttttactgtatcttttctatgtttagatctgtttggatacacaaactctattatattataattacc

SEQ ID NO: 824095 - DNA, 641 bp, Homo sapiens
tgtgcataagatgtcaacattattcaaggcagtgtggtaatgagctccttaaagttttttttttgagacgragtgtcgctctgtcgcccaggctggagtgcagtggcgcgatcttggcttactgcaaactctgcctcctggattcacgccattctcctgcttcagcctcctgagtagctgggactacaggcgcccaccaccacgccctgctaattttttgtattttacggggtttcatcgtgttaggcaggatggtctcgatctcctgacctcgtgatctgcccaccttggcctcccaaagtgctgggattacaggcgtgagccaccgcacctggcccaccatgcccagcctaaagttttcatatgtatgtatacatttcctgtctagacagttaagtgagttatctctgccagttcatcagcaagaaacaatatagaaaataatttccctttcctactatttgcattgaaaactaaaagtgtaaaaagaaaaaagaaatactagtcactcaagcttttcacacttctatagttttttcataactgaaacccaatccataactttatagttcactatttggtttagacctatttcaatctattagaattcttctatggtgtactaagatagtcaaagatat

SEQ ID NO: 824096 - DNA, 606 bp, Homo sapiens
atcccccaaaccggggggaaaaaccctcatgacctttagtttacgatatcagtctatccgttttcagaaatggggaacgaggtttgcagtgaatggatttctcctttcagagctcgcttaggaagcctggcttgcttctattcttttctcctcctcccccctacttcaagcaaaagcacttgagattcaggaatgtttttaaattcaaatacaaagagaaggaaaggaagccaaacgacctgagacaggggttgtggcttagaacagaccaaggttcattcctcgagcctcctctctctcagtctccaagtgtccccccattcccgggtcccggtgcagatgatgctgtgctgcggtctgaagactgagcaacaggagtccgcccccctcgcagctccctccccgacccgctatctccaggtgggttgtcgagcactggcgaaacctgcggcccaacccttcctaggcaacggraaaaacgtgctcaggagttcattcagcgaaagcgcagagcaaggctgggggcctgtcaccggggaggtggcacttgataggttgggttttgctttttgcatcttcatccctctcttccaagctgtctccagg

SEQ ID NO: 824097 - DNA, 549 bp, Homo sapiens
tattcatatgatgtatcatgttgattgatttatgtatgttgaaccatctttgcatcccagagataaatctcacttggttatgatgaatgatctttctaatgcattgttgaattcaatttgctagggttttttttttgttttttttttttttgaggatttttgcatcagtattcatcagagacattggctcttagttttcttttttttgatacgtctttctctggttttggtatcaaggtaatactggcttcataaaatgactttggaattatttcctcctcctctattttttggaatggtttgaatatgattggtagtagttcttctttaaatgtttggtagaattcaacagtgaagccatctggtcccaggctttttcttaactgggagattttttattgcagttttgatcttgttacttgttactggtctgttcaggtttgggatttcttcytgataagtggcatgcatctcagaatttgttcatttcttctagatttcccaatttattggcgtatagctgctcatatcagccactaatgatccttg

SEQ ID NO: 824098 - DNA, 599 bp, Homo sapiens
aggcaaaaatctacattttctagaaaacacgatttcacttcaatcaaaactcctcgttaataaaacagaggacattcattttattatggtaaaacatatcataaattaaatgcttttgtaggaaaactagtattcttttatagtatgggcttttcttcagagacattgacttacatcttgaaaaatgagtctgttttcgactgacacatttgaaacacaatttagcatgcctggctgggtgtgatggctcatgcctgtaatcccagcactttgggaggccaaggcaggtggatcacttggggtcagaagtttgagaccagcctggccaacattgcgaaaccccatctctactaaaaatacagaatttagccggtcatggtgggcaccttcctgtaatctcagctactcaggaggttgagggaggagaatcgcttgaacccaggaggcggaggttgcagtgagctgagatggtgccactgcactccagcctgggtgaaaaagcaagactccatctcaaaaacaaaacaaaacaaaacaamcaataaacaaacaatttgcatgccaatgaactaagaaaaaagaggaggacatagaatggg

SEQ ID NO: 824099 - DNA, 599 bp, Homo sapiens
aggcaaaaatctacattttctagaaaacacgatttcacttcaatcaaaactcctcgttaataaaacagaggacattcattttattatggtaaaacatatcataaattaaatgcttttgtaggaaaactagtattcttttatagtatgggcttttcttcagagacattgacttacatcttgaaaaatgagtctgttttcgactgacacatttgaaacacaatttagcatgcctggctgggtgtgatggctcatgcctgtaatcccagcactttgggaggccaaggcaggtggatcacttggggtcagaagtttgagaccagcctggccaacattgcgaaaccccatctctactaaaaatacagaatttagccggtcatggtgggcaccttcctgtaatctcagctactcaggaggttgagggaggagaatcgcttgaacccaggaggcggaggttgcagtgagctgagatggtgccactgcactccagcctgggtgaaaaagcaagactccatctcaaaaacaaaacaaaacaaaacaaacaataamcaaacaatttgcatgccaatgaactaagaaaaaagaggaggacatagaatggg

SEQ ID NO: 824100 - DNA, 545 bp, Homo sapiens
aggcagtcatctaactgggcagaatgggaagaggaaccaggtgtatacctagtttttaaggagactttcatcctatatttagctgccattgtcagaagtatmtggtggtgttaattcctgagcctcttaaatcccatggtgcaaaacaaactgtttcttggcttttctcactgagtgtttgaattcagctttttcagatctgagaaagcagtcatcactccttcatctgcttctaagttttcaaaattttgttgagttacaattctcacagcctttataggtatataatccttaaaaaatggaaaaaaagctcttaaatatataactttaatgaaatttcaagaaggagcagatgaaattatgtgcatttagccaaccatgtttatttggaaacttgtttatagagaatttttttgttttgcctaattaccagcttctctgttagatgtctgaaagtctacaatggggtgtgtgtgtgtgtgtgtgtgtgtgtgtgtgtgtgtgtttgtgtgtctgtctgtctcatccttccctcctcaggaata

SEQ ID NO: 824101 - DNA, 601 bp, Homo sapiens
gataagtatcactttggccgggtgcggtgactcatgcctgtaatcccagcacttttgcaggccaaggtgggggggatcatctgaggtcaggagttcgagaccagcctgaccaatatagtgaaaccctgtctctgctaaaaatacaaaaattagctgtgtgcggtggcgtgtgactgtagtcccagccacttgggaggctgagacaggagaattgcttgaacccaggaggcagaggttgcagtgagccaagattgcaccactgcgctccagcgtgggtgacagagccagactccttctcaaaagaagagtaaagtatcacttctcacatcatggcactgagagattccgatgcattaggcttctaaaagtggtactgaagaaatttccttagaaccccttttagtgagagtgatagtagttccgtgggggatttaatagctgttatttgaaaaacagttctcatgcttaaattaatggggaaatgcrgagctgaacaaaattaaacagatttatttgctgagagttttctcagagcctttgctagctaaggaacattttgaatctctctgtgggagatgtaatgtgccgcattccccaaatt

SEQ ID NO: 824102 - DNA, 599 bp, Homo sapiens
tctttacaatgatgtttaaacaccttctatgtcactgtaaataactgttcataatttctaaattaactcttttaggccactttttgtttcagatttaatccatcaaaatacattcttaaaaatgaaaatatataataaattttaattttcttgtttcctgcaagaaatatttttaaaatacctgagtataatttaatacacttttatattagaaagttttgcttatgggtagctgtactaggtgctatttagtttattacttttgaatttttctttttctaaactttcatattcttccacaagaacatagcttgaagttttccattgttagttaactttcatgttactatctttgaaaacttccacttcctttcattatacatgaagactgcaatctacctgctgaattcagacacctttgtttgaactgattagcaaatatttttagctttcatatgtggctgttasccagatcaatttattcctgtcaatatggccttttgtctatcaaatagtaactaagataattattaaccattttaagcactttcttattattttgtaaaatgttataaaacagttacaaagataaatcttgt

SEQ ID NO: 824103 - DNA, 644 bp, Homo sapiens
aagtcatgacatatgtggactcatcaacttagagagtaacttttcataccccaaacctcagcatcacrttatatacccatgtaacaaacctgtacatgtgcccccgtaccaaaaataaaagtcaaaattataaaagatgaaaatcatattattacttttatttttaaagtaacatgaataatgttataaactctttctagattaaagcaaaataaattcctggcttcttgtagcatgtttaaaagatgaattaacttcacagaactaggcctgtttcaattgatggaatgtttttaaaggaatagtgacaagcataacgaatacaagaaaacataaaattacattatctaagagcaaaatgacaggtaaatatctgaaaaattagttaggaatgtttctctggacatggaacatcaagtgattatgtagctgttgctacccatcacaaatcagatggtgtcagacccatcaaaatataagttgggtggacccaacagcaatccatcataaattagatcaaaatctggtatcaagataaagcagggctagagggtaaattcaagctgtttgaacagatagccacattctcatgtcatcttcaagtgttttatcatagcctcttcttcagctcacacctatggcca

SEQ ID NO: 824104 - DNA, 585 bp, Homo sapiens
atgaatgagagtccatgttactctacatcctgatgagcatttgctgttgtcaacaatttagacattctaatagttgtrtagtgatatctcactttggttttaatttcaatttttctaatgacaaatagtgttgggcatttttatatgcttctctgccatctatatattttcttaaagtgcctattcttttgcacactttgttttcttagtattgagttttactccattttacttttaagtataatactctagaaagtattttttaagtatcagaatagattgagatgaaagattggcaagaggctttagttgatctcctttgtctatcgacttaatcatggtttactcaatgcagtattttggtattcaaacaaatgttccccttgcctttccctacctttctgccatgtatcacttcctgcaaatcctaagtattaatttcttctctcccttgaaactccaccaccttcatgaaacccaaatttatcaactgaaaagatagaaaattaagctagattacttataatgtaatatatagccagaattttgtgattttgtgagaacttccatgattttcaagagtat

SEQ ID NO: 824105 - DNA, 512 bp, Homo sapiens
taatgattatacatagataactaataaaaaagaaatattatggtttgacttcaaagtaaagcaagtttgatatgtttttaagtttatctggaatgaagtcatttctgatagaagttgtttgtctctcttggatttgttgattgagagaaatcttgtcatctggtttttacttaaatacagtttcagactgaattgtatctttcctacagacatttattaaaatagacacatttttaaaacctattttataatttggtatatggccagctctctgtcatatttggtgccttaaaaacacctttcatgaaagcttgtgagaattttccatggccagattcagctatctgtcatagtcgggtggaaaaagaatcctccaaaccagtgtcacactgcaatggcagggtgatgcaagccatttggggrtcaagggtaatgggtgatagcctttttagatttttatcccattgtcatgtaaaggtatatgtacaccttatatatttcagttttactaa

SEQ ID NO: 824106 - DNA, 584 bp, Homo sapiens
atttaaatctaaaatgtttataaagttattctattttttaaattttctataaactttcaagttacattacctctcaggatactgcaatactggtattgaaataggggcggtcttctatacttatgtataaaatctggtccccaaactgagaaatcaaggacaggaggcttccagaaagtagggggatgttatttcattcctattcatttttactctaaaatgttgatgtttgcagcttaaagtacacttatttttaaggtgatatctagtgaataaataacacagatctggttttctttgaaaacataatttggttcatctatttcataaataaattttatagtgccattttcatagcagctaaagtaaaataaatatcttaatatgcattttatgaaaacatgatgaattagtattatcctctgattatttttagaaaacataattggcacaatttgtacaaaatgaaacattgcaactatttgtttatcaaattatatttctgggaaaaaaatggtcatattattgggataccagtayaaaaaattaaatgaacagaaaattttgatacaaaactcagcatt

SEQ ID NO: 824107 - DNA, 629 bp, Homo sapiens
ggtactttattgacgctttacactgattgtcttaagttctcacagtgacyctatgagttagtgtttactcccatttactgataagaatatagaatccctctacacggcattgtcactattcataaatcaagtgattgtatacatgtgtttaactgttactggactttctattattttccatgaatctcttcctcaactttcattgttattctcagtcctttagagctacatattttatacaaatttaccttttttttttgaggcggtatctttgtgatgtcactcaggctgcaatgcagtggcaggatcatggcttactgcaacatcaagctcctgggctaaagaaattcttccacctctgccataaaggatagctgggccaccatacctggctaatttgtttgtgagtgtgtgtctgtgtgtgtgtgtgtgtgtgtgtgtgtaggcagagtcactatgttgcccaggctggtctcaaatccctggtctcaagcaatcctcctgatttggtctcccaaagtgaaatttaaattttgcatgtcgatttgaactaaaaatcttgacatttctgttcatttttccattaaattcaaatattatcattgaaaagactgacatcttaaaatgtt

SEQ ID NO: 824108 - DNA, 403 bp, Homo sapiens
ttagagctacatattttatacaaatttaccttttttttttgaggcrgtatctttgtgatgtcactcaggctgcaatgcagtggcaggatcatggcttactgcaacatcaagctcctgggctaaagaaattcttccacctctgccataaaggatagctgggccaccatacctggctaatttgtttgtgagtgtgtgtctgtgtgtgtgtgtgtgtgtgtgtgtgtaggcagagtcactatgttgcccaggctggtctcaaatccctggtctcaagcaatcctcctgatttggtctcccaaagtgaaatttaaattttgcatgtcgatttgaactaaaaatcttgacatttctgttcatttttccattaaattcaaatattatcattgaaaagactgacatctta

SEQ ID NO: 824109 - DNA, 403 bp, Homo sapiens
ttagagctacatattttatacaaatttaccttttttttttgaggcggtatctttgtgatgtcactcaggctgcaatgcagtggcaggatcatggcttactgcaacatcaagctcctgggctaaagaaattcttccacctctgccataaaggatagctgggccaccatacctggctaatttgtttgtgagtgtgtgtctgtgtgtgtgtgtgtgtgtgtgtgtgtaggcagagtcactatgttgcccaggctggtctcaaatccctggtctcaagcaatcctcytgatttggtctcccaaagtgaaatttaaattttgcatgtcgatttgaactaaaaatcttgacatttctgttcatttttccattaaattcaaatattatcattgaaaagactgacatctta

SEQ ID NO: 824110 - DNA, 444 bp, Homo sapiens
gggttttctaaatataggttcactttttttgcaaacaagatggtttgacttcctctctttctacttgaataycttttatttctttctcttgcctgatttccctggcagaacttctaataccatgttgaatagaagtgctgagagagggcatccttgtcttgtgcctgttttcaataggaatgcttccagcttttgctcattcagtatgatattggttgtgggtttgtcacatatggctcttattattttgaggtatgttccttcaatacccagtttattgagagtttttaacatgtagggatgttgaattttatcaaacacttttccacctctattgagataatcatgtggtttttgtcttttgttctgtttatgtgatgaatcacatttattggtttgtgtatgttgaaccaatcttttaccccagggatgaagcctatttga

SEQ ID NO: 824111 - DNA, 242 bp, Homo sapiens
tattgcagtaagtacttcggagagaagaaaaatcataaaggtcagaaacattgatctacataaagaaagaaagagctctggagaaagaatatatgaaaataaracaaaataaaagttttatttttcttaatctaacagataacagtttgttcaaaataataataggaataatgcatatgattatatatgtgcttatatatacacacatatgtatgatcacttatatataatcatatatatgc

SEQ ID NO: 824112 - DNA, 479 bp, Homo sapiens
cagcacatacatatatcaaagcatcacactgggcatcataaatatatataatttttatttgtcaattaaaaaaataagaagaagaaaaagtwgttctgatatatctcaggcaatttcatttgtcccaatgtatacttgcattagaatcccattgttcataatgctatttaatgagaacactggtcttttcaagtgaaagttttattagatttagattgataaaatatctaaatagtgccagtgagcctttttgtgtgtgtttttattgctttttgaaattttctaaaatttgttgacatttgttttaatgtcaaacaccctccacatagaaataagatccgaggtatgagggtttgtactatgtgtcttttttgattatagtataatacaactcctgtgaaagtcataaaaccaaagttcaaaggattagaggaaatgagaaattatagttgtccctggttatctgcagttttgatttc

SEQ ID NO: 824113 - DNA, 605 bp, Homo sapiens
ttatttatactttttgtggagttcttagtacaaactcttagaagtagtagagtcattggaccaaaagctaaaaacatttatgaggctcatgtacaaggttccatgttttccagaagagttcagccartttactgtggttgtttatacacgtacacatatactcattcttatgtattcattctatacagccttgaacccacaacaagccctagttccttacaatgtcttatagttgttgtgtgattccagcagtgtaaagtgtttccagaagagcccgtgacccacctcaccctctgggtggtaccctggcacctactgccctttgaagcaagctacctgtggttccaagcatgggatggagaagtgacctcctctggcccaagtgctgtgctaagcatctgggctgtgagaatgaactaggcaggcatgttcttgtgcctctcagagtgaaagaacatgggagtggggtgaaactgagaaatgctgtggtctggcctcagattttctggccctgacttcccaccatggggtctttaaggatcaggtgtatcagatacagcaataaatactataggccaggcacggtgggtcatgcctataatccc

SEQ ID NO: 824114 - DNA, 617 bp, Homo sapiens
aaatacaaaaatagctgagcgtggtgcaggcgcctgtagtcccagctactcaggaggctgaggcaggagaatcgcttgaacccgggaggtggaggttgtggtgagcagagatcacaccactgcactccagcctgggtgacagagtaagactgtctcaaaataaataaataaataaataaataaataaataaataaataaataaacgttcagatgtatgtttgttctacttatatatctgtccaacaaagaaaattaataaaattaaagaacatacagtaaaaattattcataatcccaccccacaaaataattaactacaactaaaatttttatatgtgaatacatacatctattagcatagatataatagatgtacatctattatatctacttgtgagtgcaaatagatataatagatatacactgttagaaaattagaaatgagaattacattgaaaaatttttaaagtcacctagatagactcctggagacttttttacacctatgcttgcrtatctttttttttttttgaccaaaaaatggaatcataccatacacaatgttcaataactctccttaaaaatatgctatcattaatcattgttatcaccatta

SEQ ID NO: 824115 - DNA, 568 bp, Homo sapiens
ctcggctcacgctaccagcctggatcccatgcctaccaagggcgagccatgtgcagagcagtgaagcgagtgtgaaggagtgtggggtccggccactatgcacagccaggcatgccagctgcagtggggcaggcagctccaggcaccagcacgggccctggctctctgtgaggttgcactggaccaggcatactgcaagctgcttccacagctggcaccagcaaacacggtggcacccagaagcttggagatgccaggaaccacagagccccaaggagggtattacagccccggcctggggagctcctacatctgggctccccagaggggtacagctcttttctccttctttcttcttcttgttgcccacaacatggcaagcaaggggcatatttcagccctgtttacgttatagctcttttagacttgccattttttgggtcccgagttcctgtcccgtacccaggaagaytgaggtatgtggaaaagtggagggtaagcaaggcaaagaggaactttattgagcaatagaacagttcggaggagactcgcaatgggtagctcctct

SEQ ID NO: 824116 - DNA, 639 bp, Homo sapiens
tgaaccaggaagcacgaacatcagcagggaaatgcttccccaccattagcctacttctctgatctccatcaagtaaattgcaaacatggattgggtctgttagcatcctgctttctacattccttctgaagaatctatactcctaccccttagcacaaagtaatggcattttctattcctttaaaaaatgcttcaccagagcacaagatggtggaactggcatgttggagttcaactgttaatatggtttttttttttaagtagtgaataggggctgggcacagtggctcacgcctgtaatcccagcactttgggaggccaaggcaggcagatcacgaggtcaagagatcaagaccattctggctaacacagtgaaaccccatctctactaaaaatacaaaaaattagctgggcatggtagcgggcgcctgtagtcccagctaccctgggaggctgaggcaggagaatggcgtgaacctgggaggtggagcttgcagtgagccgagatcgcgccactgcactccagcctggacgacagagtaagaccccatctcaaaaaaaaaaaaaagtagtgaataggaagaggcagcaatagaatatgccaaaataytaaaactggcaattgccttttgctgtggg

SEQ ID NO: 824117 - DNA, 537 bp, Homo sapiens
gccccactaagttttgtattttcagtagagacggggtttcrctatgctggccaggctggtctccagtgcctgacctcaggtgattcccctgcctcggcctcccatgatgctgggattacaggctgagccactgcgcacggccaaagatacatagtaactctttgtatgcaaccatgtaagtcctccaattttcttcttcttcaaggttgtttgaattttattggttctttgtatttacatataaattttagaagcagttgttcaatgagcccacatcccaaaaaaccctttatggtttttattgggattgcattgaatctattgaatgtatgaatcagtgtggaaaacaaatcttaaaattatgagggttgttttggatatataagcatgatacatctctataattaagtgtctttaatttcagcaattttgtagttatcagtgtggaggtcttacacaccttttgttaagtgtattccttagtatttgacgattgtgatgctattacatatggtaatgttttaaatttttattttt

SEQ ID NO: 824118 - DNA, 515 bp, Homo sapiens; identical to SEQ ID NO: 813501

SEQ ID NO: 824119 - DNA, 605 bp, Homo sapiens
atgaggaaatgagtgacttgggagcttggcaagtggcaggaggcctgaaatctctggtgtcttggaaaatgwcgcccccattgccaacctcatttacagagctattgtgtacagggccccgcagcaagcccttcgtgtgctatctcatttattgatcacagccaccctcttattttgcccattttgcagatgagaaaactgagtcacacataggtccagcaacttgcctaaaattgcacggctagtaagtagcagatccagcgcttaaagccagctgtctgacttgagaggcccctctcttggccatgatggtattaattcctcttctttcaattcattccttctcccttaacaaatgaaagggcagctttgagctcctctaccacagtctcgaagcactgcaggaaaggtccactgcagtgtccctgacagtggtcagcaacctcggttatactctcccagtgacgaggggctcactgtctcttaaggctatgctgcctctaatcttggacagtttgcaaggttggccagtctttcttctattaagccaaaagttgggtccctgcaagcttgaggcgtcccccagcagtgctgcttctgccctc

SEQ ID NO: 824120 - DNA, 569 bp, Homo sapiens
gtagttatcatgaaaaggggtatagatattgggcaagaaactccatgtctaccacagctcccaaatccatacctccaacccaacctctgagttccagactactaaattgaattgcctattcagtatctccacaggaatatcttacatgcacctcaaggcaacatagccaaaatagatctcttgagccaattctccactcatctgttcctccttcagtcttcccttctcaggaaatggcatcaaccattcacccagttgcttaagccaaaagttccaccatctcataccattctcttcatacacttagctccacctgtcagaggtgttcgaaccacagcgactccatcttgaatagggtctgggtaaaataaagctgaaacttattgggctgcattcccacgaggttaggtgttcttagtcacaggatgagataggaagttggcacaagatacaagtcacaaaaaccctgctgataaaacaggatgaagctgyccaaaccccaccaaaaccaagatgtcatgaaagtgccctctggtcattctcatggctcattatatgctgattataat

SEQ ID NO: 824121 - DNA, 573 bp, Homo sapiens
tgcaggcccagccccctttcttcattgcaagcccgggatccctgacaagacaagttctagtctacagccaagccctgctggagaggccagatgaccaatgtccaaggcctgcygtggctccctgcagctccagccccaccatgctcccatccccaggtgaattctcaagcctggcaggacccctgagaagagggagagcccagagagaaaagctgtgaggaggtggcacagtcctcacgccagatcctccgcaccacctgtcttgtcgttcacttgtgggcccttgtccactgggagcaataacagctccttcctgccatctcccagccgcgctgggcatccctcgcccaccctttctctccctcctcccttcccagagctcggctaagctcgctcttaattggcctgacaaaaacagtcaccaggggaagtccttgaagttggggatttcaacaaagctaaaccactaaatcccacggccgccagcctgtcttcacagcttctccggctctgccagaaatcacacttactcccatgcagaaaccacagccctggcggcttcagtgtcctcct

SEQ ID NO: 824122 - DNA, 605 bp, Homo sapiens
attaaaaatgaatgtctaccagttaaaatgttgaaaaaagtatgtctgtgctatcgaatataaatatgcagctattggaaaaaaagaatatttacatttactaacatagaaaaatgatggatttttttcatttttaattcctcatataacacattctcctttaacatcttctgctttattagcgagtttatctctttttcttattgttcttttatatcccttcatatttttcaaaagttattcatatgtatctgaaggtttgaatttgcccatgccccttactgataggagagatgttttttcagcaagtttactagctaatgtaataccatgatgtggcattcattaaaaacaatgaaagaatgtaatgtttaacaggagcaaatttttatttttttaaaagaagaaaaaggtaaaatctctaagtatgcacctatatttttatttaagtttttgcatgaagaaaggcatagaggtaatcaccatttactgttgacactgtaacttcagggggatgggattgaaaagggggactcacaaaataattgattttttccttatccatctttaygctgggtttggctttttatagcaaacatatatta

SEQ ID NO: 824123 - DNA, 560 bp, Homo sapiens
gtcaattgctttttctacatcaaaatgaccttataatttttctcctttaataagttaatgtggtaaattatattgattttttaaatgttatacaaccytacattcctgagataaaccctactttatctttttctttatattatgggattttatttgttaatattttgttaaggatttttatcaaagatttagttatgataatgagaaactttggtttataactttcttttctataatttccttgtatgattttggtatcaagataattctagcctcatagaatgagttggaaagtattctctaatattctattttctaaaagacttggtgtagaattgatattatttcttccttaaatatttgaaataatttgccagagaaaactagctgggcctagatttctgtttgtgggaagttttttaaattacaaactcaatttatttaatgactatagggtttatatttcctatttcttcttgggtccattttttaagttatgtttttcaaggaatttgtccctttcatccaaatcattgaattaattgtcataaagttattta

SEQ ID NO: 824124 - DNA, 560 bp, Homo sapiens
aaatataaaattattttttcactaaatgctttgttttgggatgtagttctacctttttttttttttttttttttgagtcttgctctattgcaaaggctggagcrcagtggcaagatcttggctcactgcaatcttcgcctcccaggttcgagtgattctcatgcctcaacttctcaagtagctgggattactggcgtgtgccaccaggcccagctaattttttgtgtatttttagtagagatggggtttcaccatgttggccaggctggtcttgaactcctggcctcaagtgatccgcctgcttcggcctcccaaagtgctgggattacaggaatgaaccactgtacccagcctatatcgacattttcataaaattatatacttaacatataattattttaaattaatattctaagattttctcagtattaatctctctatagtaaatatcaatagatagaatccacataagttctttgggattctcaatgatttttaagagtgtaaagatgtcctgaggcaaaagaagacctgaaaccaaaatatattagaactgctgg

SEQ ID NO: 824125 - DNA, 540 bp, Homo sapiens
tcagagtgatgtaatgtgagaaagacacaaccagtggctttgaagacagaagggtcttctctagaccctccagaaagaaatgcagccctactgacatctttattttaccccagtggagcccattttgggctcctgaccttcaaaaccacaagataatacatttttgttgtgggaatttattatagcagccacaagaagtaaatacagtttttggtaccagaagcggggctgctgtaacaaatacctaaaagtgtgaaagtgactttgaaacagcagttgcacagtctagaagaattgtaaggagcatgatagaaaagcctaggtttctttgaacagactattagaaatatggatgttaacaactttactaagactcagaaggaatgaggaacatggtaaagaaaaccaaaatcactttaaaaaacacttcaattgttgtgaaagaactgtttgyagaaatacggatgttgaaggtgctgctggtaagggctcagaagaaaatgaaaaaatgttattcaaaactagaagaaagaggatcct

SEQ ID NO: 824126 - DNA, 610 bp, Homo sapiens
accagagcagaacaaattaaacctgatggattcctttcgctgyctgtgtagtgtggggcaatgcagaacaaagtgctgtggcgttgcggaaggggttccctctggcagttttggaatttggtggtaggaaatgttagttatttataaaaaggaaaaattcctctgttaccattctggttttcacaaaaaccgtaattttatcatcacggcttgtagcaggaagccaacaaggggtgccgatgacggccacgaccccgtatctctgggctgtctctctcacctccatcggccactgcctgcttgctctttaggagcaaaggacatgatttagaagtaattcaaaaccccgtcgcgggacccagaacagcccagatggtctggccctggcctggggtctgcgggggtgggggtgccagccccgggggtggagtcgaggtcggctcccggccaggtcccgcgacgggtctgcacgcagccagggaggcctgagggggcagctgcggggctggcggccaggagctgcttcgcggcttgcggcgcaaagtagaggccccgctagctcgctcccgcacgccgttctgcgccttctcttcctagccccggcaggctc

SEQ ID NO: 824127 - DNA, 625 bp, Homo sapiens
gaaattgtggaaaatcagacacaagctcatgtcatgtgagtggctgacctccaatgaaaggtgcatgctcagtctcagcaggtgtctacttttaaaatgagggcattgattgggaaagaaygggacgcagtggataactggaatagacatacttagcatctggcagaatccccatgttggcttcctgaccagtagggtgagagctgttccggtgggaaaggccaaatggaagccatcagagctggctctacctagaaaaatagtaaatcagaaacaatatcgcactcctggagggattgcagacattggtgccaccatcaagaacttgaaagatgcaaaggtggtgattcccaccatgttcccattcaactctcatatttggccggtgcagaagacggatgaatattggaggatgtcagtggattatcgtaagcttaaccaagtggtgactccgattgtagctgctgtaccagatgtggtttcattgcttgagcaaattaacacatctcctgatacttggtatgcagccattgatttggcaaatgcccttttctccattcctgtccataaggcccaccagaagcaatttgccttcagctgacaaggccagcaatataccctcact

SEQ ID NO: 824128 - DNA, 551 bp, Homo sapiens
cattaatctatatgtccttacttcagtactacactttttttactattgtaaatttatttatttatttatttatttatttatttatttatttatttatttttgagaccaagtctcactctgttgcccaggctggagtgcggtgacacgatctcagctcactgcaacctccgcctcctgggttccagcgattcttctgcctcagccttccaagtagttgggattacaggcacgtaccaccacacttggctaattttttgtatttttagtagagatgagattttaccctattggccaggctggtctcaaactcctgacctcaggtgatctgcctgccttggcctcccaaagtgctgggattacatgcatgagccactgcgcccagcctaacgtttgtatttttagtagagatggggtttcaccatgctggccaggctggtctcaaactcccgacctcaagtgatccacctgtctcrgcctcccaaagtgctgggattacaggcatgagcaaccacatctggccagactattttaaatttgtataaaattttgaa

SEQ ID NO: 824129 - DNA, 480 bp, Homo sapiens
aagaaagagatagagagagagaaattgtgtagggagggatcctggaaacccttctgagagatgaccgaaggaggcctttgaagagtagaagcctagtgttcttttttttttttttragacggagttttgctcttaatccccaggctggagtgcaatgatgtggtctcagctcaccgcaacctccaccccctgggttcaagcgaatctcgtgcctcagcctcccaagtagctgggattacaggcgtgcaccaccacgcccggctagttttgtatttgtagtagagacggggtttttccctgttggtcaggctggtctccaactcccgaccccaggtgatccgcccacctcggcctcccaaagtgttgggacgacaggcatgagccactgcgcctggcccagcctagtattcttaaacagtgaaaggatactgaggtgaggaggcaggacaagtggtaacaggtaaccaaaaattgagcaga

SEQ ID NO: 824130 - DNA, 590 bp, Homo sapiens
ctcaaaaaaaaaaaaaaaaaaaaaaaaagaaagaaagaaaatagtacaaaattgtgttataaataaccataaatttyttagtgattcttactactttattagttactcctattctaccataaaattaatttgcaaatttgttccagaaaaacatgatggccatcactatatctcaaaatttattttactaatattacattttacggtgttagaaaacccattgcaataccatatgagaagtttctattccaaatgatttagcttttaagagttatcagatttgttattggctaataatgagaaaattattttcttctaaatctttatattaagcaaaatctaaagcaatttctccttatttaaaggctatagaacttatataaaataacaaaagttggtaaatcttcatttgctattgaactagcctaatgattatatttctaataactttaaaattttttttgctttttttaatattggaaaaataatcaagatcaaggttaaaatatttaagccttactttctgtgtctctagcttctttaattttttttctcaattatatgaagtaccctactatagctttatagcc

SEQ ID NO: 824131 - DNA, 650 bp, Homo sapiens
aaggtctcacctcgcttcagcctcagtgccctcagatccggaacactgagtatatcccccaggtgggaacaaggtgacatagatcacacaagccaatcctgctcctaagcaggaagaagaatgaggcatcgcctttctgaagcatggcacttcatagacaagagttcgtgggatactctgattccgtccaggtggagaggaaggggaccttaccgtcagagcagcacaccatgaaaggcaggctgtctgcctgctgtaggaaacgggctggtgaaggatccaataaaaagtgtcatccactaacacccgaggctctaaggcttgttcacagctattaacaggaagtgaaatatccctgttcgctgcccaacagaatacggggaagagaatatatagccattcaatacgaggccaccctctggcctcctcccctgggaagccacacacctggcagaggtgagctgcagcagaagacagagaaaccaccacctgccccggagctcccagccacacagaacaatccagaggcaacccgcgccgtragcgtctccccatgaccactcgcccagctccctcgggctcctgcagagaacctgaggggaacgtagggggcagccacaggccaggtggcagccttccccaggggacag

SEQ ID NO: 824132 - DNA, 650 bp, Homo sapiens
aaggtctcacctcgcttcagcctcagtgccctcagatccggaacactgagtatatcccccaggtgggaacaaggtgacatagatcacacaagccaatcctgctcctaagcaggaagaagaatgaggcatcgcctttctgaagcatggcacttcatagacaagagttcgtgggatactctgattccgtccaggtggagaggaaggggaccttaccgtcagagcagcacaccatgaaaggcaggctgtctgcctgctgtaggaaacgggctggtgaaggatccaataaaaagtgtcatccactaacacccgaggctctaaggcttgttcacagctattaacaggaagtgaaatatccctgttcgctgcccaacagaatacggggaagagaatatatagccattcaatacgaggccaccctctggcctcctcccctgggaagccacacacctggcagaggtgagctgcagcagaagacagagaaaccaccacctgccccggagctcccagccacacagaacaatccagaggcaacccgcgccgtgagcrtctccccatgaccactcgcccagctccctcgggctcctgcagagaacctgaggggaacgtagggggcagccacaggccaggtggcagccttccccaggggacag

SEQ ID NO: 824133 - DNA, 618 bp, Homo sapiens
gcccagagaaaccgcgggaaatgctccatggagactgccattttctgtgacattgggccttatgctgcctttagatgtaggcagtgtctctttcatggttttttgttttgtttttttttttktttgagatggattcttgctttgtctcttagactggagtgcagtggtgggatcttggctcactgaaacctccgcctcctgggttcaagcgattctcctgcctcagcctctggagtaactgggactacaggcgcgcaccaccacacccagctaatttttatatttttagtagaaacggggtttcaccatattgaccagactgatctcaaactcctgacctcatgatctccctgcttcggcctcccaaagtgctgggtttataggcatgagccaccacacccggcccccttcatgtttctcaattcctaccttttctcaccggaaaacattgccagaattttcagactaagctgtggctcctggcggactctgttctgagaacccgggtgccggtgggcaatgcgcccaccaatgcggtgggaggctgagggaagactctcctttctggcacaggtggctgtgggactgctgtgctcctctcacacccaggctccagga

SEQ ID NO: 824134 - DNA, 606 bp, Homo sapiens
ctttgggctgcaagtaactgcagtctcactacgagtattatttacgtaataacgtgccagttagytatagctgaattacaaactactctgaaacttagtggcttaaaacaacaaccatttattattgcttatgagtctttggctagtaagttctgctcatttgggcttggtgggcttcactcatcatccgctcagttgagggtcagctagatggatttgctaatcttggctgggctttcattttttttttcttttttcttttcaagaacagcatgagtggtattggctgggcttgcataactcttaaggctttgcctaggacaactaagctaacttgtctctgctctatgtggcctctcatcctccaggaggctagcccaggattgttcatatgacagagtcaaggttctaagagcaagggaaagtgctaaagactccttgaggcctgcacttggaactggtactgtgtcacttctgccatatcctattaaccaaagcaagtcactcagcccgctcagattcaaaggaatggggaaatagatatgactgtttgataggagcaactgcaaagtcatattgccaagggtatggatacagaaaggggtg

SEQ ID NO: 824135 - DNA, 606 bp, Homo sapiens
ctttgggctgcaagtaactgcagtctcactacgagtattatttacgtaataacgtgccagttagttatagctgaattacaaactactctgaaacttagtggcttaaaacaacaaccatttattattgcttatgrgtctttggctagtaagttctgctcatttgggcttggtgggcttcactcatcatccgctcagttgagggtcagctagatggatttgctaatcttggctgggctttcattttttttttcttttttcttttcaagaacagcatgagtggtattggctgggcttgcataactcttaaggctttgcctaggacaactaagctaacttgtctctgctctatgtggcctctcatcctccaggaggctagcccaggattgttcatatgacagagtcaaggttctaagagcaagggaaagtgctaaagactccttgaggcctgcacttggaactggtactgtgtcacttctgccatatcctattaaccaaagcaagtcactcagcccgctcagattcaaaggaatggggaaatagatatgactgtttgataggagcaactgcaaagtcatattgccaagggtatggatacagaaaggggtg

SEQ ID NO: 824136 - DNA, 554 bp, Homo sapiens
ctcactcatggtggattattccctctgagttttgtaattttgcactgtgagctcactcactgggaattcatctttgggaattctgtgcgaatgggttgaaggcacgtagctccagggtcatcagtgctggtgtttgccagactccccagggtgtcaccgacccactatctacttctattgggttttctgtttgggagggtccctgatctttcagggaggtatgaattaaacccccaaatgctgtgaaaatagagctgggcttatgaattttcagagactcccccttcacccctctccttacttaactgtcacctcctcaaggaagcctctcttaacccatcagggcctctctgctacccatgctcctggcactggggcccctctcctacctagccctagtcacagtggtcatttgacatttgcttaggtggctttttgtgcaacacccgcctccsgcactgaactgtgagttccacagagcaaggcctatgtctgtggatcgccactgcccacatgatgttcattacaattctggtcactgacagtatctactt

SEQ ID NO: 824137 - DNA, 520 bp, Homo sapiens
ctccgctcttgatttagtgttcttaatgcttttataattaattaattaatttattttttccatcaaatatttatttatgaattaacacttttttattataaaatataacacatacatggaaaactacttgaaacaaatgtataggttaatcatgaatttataagatgtaaccactactcaggtacagaaaataacattgttagacaatccaaaagtgctgcctgtgctctactccaattgaaatcgtttttcctccaaatgtaaccaccatcctaacatttatggtgatgacttttttgcttttcttatagttttatcacctgtgtgcatttctaaacaccacatttaagtttttttctcctttgtcatttaaatcacttaatctacaaattcctcctcaatctctcctttttctttgccattaatttgttgaagaaaccaggtttggacctattgaatttcccacagtctggattttgccarttgaatccctatggtgaggctatgttcatttatcttt

SEQ ID NO: 824138 - DNA, 584 bp, Homo sapiens
tcctaattgcaatattagcttgtagcattttaaattaaaatctaaatttcttgatatattgccacattasttgtaatgtttaataaatggtggttaaagatttatttgtaatttaatctgtgtacttagttgccatggacctctcttttagcttttcataaataaatatcctttaataccttacctcctcccttcaattgactgatgctgggatagggtgttctttggagcttatcttggtaaagaaggtcagaagtgacatataaccctattccctaggggccgagggtgctttccttacagagttgtattttaagtgagtcaactcctgagccagcatctactaagagaaccttcaaacataatcatagtgcatttaaataatttgaaaaatcaaattccttgccattaaaaacatttatccttagtttcatttcttttataatgttttctctttttagaaaaatgtattgtttatttatgaaggggaatgttggctgtgttttttcttaggcatttatgtaatgtgggagttaccctatttttttctttctcaccaagggaagattggttgaatggtatac

SEQ ID NO: 824139 - DNA, 502 bp, Homo sapiens
gcggcagagcgagactccgtctcaaaaaaaaaaaaaawaataataataataataataataataaaataaagcgttggtagtgagaagggaagatgaggattctggaaaagcagcagtggaagtagggaatgggggcctcaaagacaaatgagaccctcttcatgatttgcctgtgaccaatactggatctttagaataagctttatactttctgcaattcttttgcaaagaaatgtgcaaataattctggtggtttccctatgacttttaggagctggtcccaaaacaatcttctttcataaagaagtaaagcgataataataaacaagtagtaagcagtttcttgctttatgcagacactcttaccaggatgtcctataactcaaccaggacagtgtgtgtgtgtgtgtgtgtgtgtgtgtgtgtgtgtgtgtatgtgcgcgcgcgtgcaagaaatgagaatatcttaagaatgatggggagttggagaaataattgaaat

SEQ ID NO: 824140 - DNA, 559 bp, Homo sapiens
cctttctttcagtgctagaaatggtcttatgagaagctcaagatgttttaaacatctaaatattaattataccaacctccagactgttgtttttgttaaacatacatgctaatgaatgctatcaaacaattgtattgaatagatcagctcatttactcagggtctattttgtagctaatattatctggcacagatactagcatagagtggttttgaaaaaaaaatacttattgaatctgccagggttgtaaggttacctttctgcacaaaataaatatgcaaggggagctatgtaaagatttaatgatggtaagtcatatgaggataaatgtgagtgagggtattttaaaacttccatcttcaaaatggtccagctactcaggatgctgagatgggaagattccttgaggccaggaattcaaggctgtagtgcactatgttggcrcctgtgaatagacactacactctagcctgggcaacatagcaagacacatctcaaaaaaaatcttctaagtcaaagatttttctcctgtattttatgacacagaaccttcagttt

SEQ ID NO: 824141 - DNA, 561 bp, Homo sapiens
ctgaatggctgtaattaaaagggaaaatttaacaagcattggtgaagacatggagaaaatggaacacttgtacactcttggtgggaatgtaaattggtattgtcattacakaaaacagtatggaggttccacaaaataatttaaatggaactatcatatatatacacatacatatatatcatatatcatatatatatacacacacgcatatataccatgcacccacacacatacacaatacataatgaaatgttattcagcttttaaaaagtaattcttgccatttccaatgacatgaatgaatctggaggacattatgctagtgaaaaaagccaaacacagaaagacaaataccttatgatctcacttacatgaggaacctaaaaatttgaattcacagaagcagagagtagaatggtagtttccaggggctggggagtagggaaagtagagacatgtcgttcgaagagtacaaagtttcagttatgcagaataaggtctggagacctaatatgtggcatgataactatagttgatactactgtactgcatactttaaat

SEQ ID NO: 824142 - DNA, 570 bp, Homo sapiens
cagacctgtctgaatggctgtaattaaaagggaaaatttaacaagcattggtgaagacatggagaaaatggaacacttgtacactcttggtgggaatgtaaattggtattgtcattacagaaaacagtatggaggttccacaaaataatttaaatggaactatcatatatatacacatacatatatatcatatatcatatatatatacacacacgcatatataccatgcacccacacacatacacaatacataatgaaatgttattcagcttttaaaaagtaattcttgccatttccaatgacatgaatgaatctggaggacattatgctagtgaaaaaagccaaacacagaaagacaaataccttatgatctcacttacatgaggaacctaaaaatttgaattcacagaagcagagagtagaatggtagtttccaggggctggggagtagggaaagtagagacatgtckttcgaagagtacaaagtttcagttatgcagaataaggtctggagacctaatatgtggcatgataactatagttgatactactgtactgcatactttaaat

SEQ ID NO: 824143 - DNA, 621 bp, Homo sapiens
ccagctacttctttatggttcaaggcaaaactaaggagtcttagcctttcagggcatttttttttcaagccagaccctgtgctaggcactgagaattctgagacaaatgaaacaagatgagttcatgatttacttttgagaagactgataaaaaaaagaaagggcatgtttagggctgtaacagagtttctaccaagtgctcctaggagatgagaagaagctgctaagaagactcctgcatgatgttcttccaggactgaccaccaagcccattagagaatatccttaggacacactctgcacttctcccagcactcagtcctgagctccatgaagacggaaccacactccatttctgtgtcctcaatccccaccccaggttggcatgagagagatttcagggtcgatttatggaataaataattcataaggccttaacatagtgagttaatctctctggccttctacgtgtccatgtgtaaaatgagaaatatgaactaaataaaatactgttaaaactyttcagggacataatctcttcaaggatctgatggcagccacattttctatctctagaaaaatagtacctgtggtattgcacaaaattgcaggggcttcctt

SEQ ID NO: 824144 - DNA, 609 bp, Homo sapiens
agactaatgctgtatcctcacatgcagagagatggaagggccaggcagctcttggaaaccccttttataaaatcattaatcccattcacaagggtggagccctcatgacttaatcacttcccaaacatgatttaaaaatttttcattttttcattattatgggtacataattgttatatatatttatggggcacatgtgatgttttgatacagagcacaacgtataataattatatcagggtaactgggtatccatcacctcaagaatttatcatttctttgtgttagaaacattccagtccactctttcaatattttaaaatatacaataaattactgttgaccgtagtcaccctgatgcgctatcaaatactagaccttattcattctatctaattatacttttgtacctattaaccatcctcactttttcccctccaccttgatccccttccccttcccagcctctagtagccaatattctactctctgtctccaygaaatcagttgtttttcattaccccaatatgatctctgctgggatcaatagttaatccctgttctcatccccagcccttgatgaccattagtctacttgtattgggtact

SEQ ID NO: 824145 - DNA, 521 bp, Homo sapiens
aactcccaagattatatgacctttgtctttcactaccaggttggataggaatggaccatccaatcrgggcaaggctaggcatgtctgagctcagactctccttcaacgggtcttgctgtggctgctgcagaggatgggggtgagattcccagatcactgtagttgtatacctaggaggattatggatgcatctgctgagccatgcacgttgtcaggaaagttgggggaaagccagccatcacgggcttcacccagctcccacacaaactgaagagccgtctcactctcaccatgcatccccccaatagcacctagggtctgtttccaggcagagggcaagactggcctgaaaacttgcctgaggctttccgcctctcagggctttagttcttcctccacctgtgaagtctgcacacctcattcgtgccctcccctgagttctggccaggaggctagagaattccttctccctgtggagttttaacccctgcttatctggccaccttcctgatggatccctg

SEQ ID NO: 824146 - DNA, 608 bp, Homo sapiens
tgggctcaagcgattctcccaccttagcctcgtaagtagygaggactacaggtgtgcaccacaacacttagctaatttttaaatattttgttgagaaagggtctcactacatttctcaggctagtcttcaactcctggcctcaaatgatcctctgcttcagcctcccaaaggactaggattaaaggcatgagccatgttcttgatggggtttttgaagctaaaaggatattagaggttaaaaaacatccctcagagatgatgcagtttcctctctcattttatggattgattaaaagcaaaaattaaaaactccacatacttaaattgctgatagttatcttcatttttggacattaactcttgaatagtccttaccgaatcaatacacaagtaggcttatacatagaaagaaacttatacacacattttaaaggacaaagttaaatacataaaggcctatactttcatttttctccacaagacagttttttattggaatttttcattgacctacttttaaggaatatggagaagaaaatggaggttgattctgtcttgtggatgaaatggtgaagatataggtgatgaaattttttacaatgccaaa

SEQ ID NO: 824147 - DNA, 592 bp, Homo sapiens
ccaagttcatatcacttgcaggaactgtgaactctgatggtgtgaattcagccatggataatctctttatggtaggatgactttggaaagaaaagatatttatgcagtttccatgggtttcataattctgtattctgaatggtgccctgtctttgtgtcccgctttgccattcagaggtgcttaattaattaaggcctcatttggccatgttaacagaaaattatgttttttcttctaccagtacctttttatttgatgttcaaagattccagtggtgcttactcagtccagagtatcaatcttgtttactcttactgcatactgaagctggacagcccagacaactcagaaaaatgaactgttcattataactactgcaactgttgctaacctcagtctttttttttttttttagacagagtctcactctgtcacccaggctggagtgcaatggcgtgatcttggctcactgcaacttccgcctyctgggttcaagcgattctcctgcctcagcctcccaagtagctaggactacaggtgcccaccaccacacctggctaatttttgtatttttagtagagacggggtttt

SEQ ID NO: 824148 - DNA, 616 bp, Homo sapiens
gccaagtgatcaagtgacagattttaaatacagtaacatgtggcttttgctagagactattgtagcacagtattggcaatatagtagaaataattccctattacccagtcctcggatgtatggtgaatagtmttatttcctttcagaattaaccagttacctgacccaaaatgcagcagcaagaccatagcataaattaaagtttgatgatttctgcagtttggatggtgtcagaaaacctgggaaggaaattatctagcttgtttgatctattttgcaatgagcaggacctcaaattacagggatattgagtgctaaaagaacagattgcatgccagtcacaacgggaagaaagaaaacaaaactaatccttgggaaaaaatacactaatctgaattagccaagcctaaattagttaccatttcctagcaacccatgtgcctcaggagccaacgaaatgccacctttggattggggtcaagtcctactcctcacagggactgctcccacaaggaagccattctgacccgtggccaggctcctggacttgcaggggacagctggaggggtgctcgtcctgtttcacgagactggtacacagcacctccattagttg

SEQ ID NO: 824149 - DNA, 624 bp, Homo sapiens
actgaaagggtggagcccccaaaccacaaggggaagaaggaagttaaaagatgttaaatactggggccagctcaccctggtcagcctagcactctgacctagcagtcaayatgaaggctctcattgttctggggcttgtcctcctttctgttacggtccagggcaaggtctttgaaaggtgtgagttggccagaactctgaaaagattgggaatggatggctacaggggaatcagcctagcaaactgtaagtctactctccataattccagagaattagctacgtatggaacagacactaggagagaaggaagaagaagaaggggctttgagtgaatagatgttttatttctttgtgggtttgtatacttacaatggctaaaaacatcagtttggttctttataaccagagatacccgataaaggaatacgggcatggcaggggaaaattccattctaagtaaaacaggacctgttgtactgttctagtgctaggaagtttgctgggtgcctgagattcaatggcacatgtaagctgactgaaagatacatttgaggacctggcagagctctctcaagtccttggtatgtgactccagttatttcccattttgaacttgggctc

SEQ ID NO: 824150 - DNA, 524 bp, Homo sapiens
gaatgggagagaatgaagagagttttccccaacaatyacacatatatggactcatagaaaataatatcttaccattctttccacagcctaacagaaaaaagctggctaaacctaaatttaaaataaaatatctattaaagtttttattccttaccacctgtctttcagctttgctgcaagataacatcgctgatgctgtagcttgtgcaaagagggttgtccgtgatccacaaggcattagagcatggtatgttttaagtgtttaaagggaaaactatcttactctactgttgatatatacaatgagagcagacttttaaagaccaaagtatgctaatgacaccttcaaaattgcagcttttggcttatgctaaatgatgtattacctacatccttgaagaaacaatctactttaactgatccagaatcttactcttttactcctcaatttattttaggggatttctagagttttaagatgcttcacactctatcagttccttgtcatatcttgaaattctttt

SEQ ID NO: 824151 - DNA, 538 bp, Homo sapiens
atttttcccagtcttcctagttttgtttcagagccattaccatgaaacaataattattagaaatgatttccaatgatgttgttggtctttttctcccatttatagttcattaacagttcttggattttcgtgtggtacatcagttctgataaactattgtcagttccagataaatgatatatactttacctttcaaaaatctatattcattttatagaaaaactttaaaaaatgaaatttactactttaatgttatactgagatctgtaggaaaaaaatggtgaatgggaaagggaagtaccttttaggcagagacttgcaaaaagggcttttggcaagaggagcatgctagtaggaactgaaagaatgccagtttggctgaagcagggagtgaagaacatagcctatgtgtggagctcaagcagttggcaaggctaggctctccggagcttgtaggtcacattaaagattgtcctaagagtcatgtggaatcattgaattgtgtgaagtgtcrtaatcaacatttcaaaaagcttct

SEQ ID NO: 824152 - DNA, 515 bp, Homo sapiens
agctctgagctctgggaaccagggcaaccatgtgagaattccaggtttcaacttgtaaccaacttgaccacctctctaaataagtctgattctcrttaaccactaagagctaagagtagagactctcttcctcatgaacatcatctatctgtctgtgcatctgtttgttcatccatctgtctacatatctactttatctactatctaatcttttgatgggctctagtgtcagaaatctctgtatttttatctgtgcctcttgttagctctgggactttgggcaaattcaacttctctgagttcctctttttacaccttaaaaatgggcataataatgttactacctgcctaccaatcatagaatgaggattaaatgagtcaagtatttttaaatgtgaggatgaaaggcacagtggcctatgttaagcgttccatgaatggtggccactattatgcagagatctcctctctgcaggactaatagctttctaacagctaatgggaagaacagaaaa

SEQ ID NO: 824153 - DNA, 661 bp, Homo sapiens
tgggatgcatcctgaattggtagaggagataccccagagtgttctaccagagttgacagaattaccttgaataaatragaagaaggtattttattaccaacagtctcatgggctaagtttaagtacagaggaataaagttatatctttacacacttgggtgtgtgacaatgtaaaatgtcaacattatacttcccaatggactatgccatgcagaaggcagaaagaagtcaaaagcctgttcttttttttcccattccatagtaaatagcagaaattattccctttgttaatctaagcatacaccagtctgtaggttcataatgagaaataactttttgttctttgatttttttaaacaaaatatagaatttataagacaaaccctttttggtttgtgttttattccaccttcttttagctagatttgaatgaaagcaaaataaagctatgtattgaataaatatgttaactccacagtatttttgaatatatatttttcatggtatagttccaactttcattggtgatattgatatgaaagtcagatttactgagaggtaatgttcagccttggaagcatcaccaaaatgtgtatataaggcctttgtccactaatgagtgtccttttatgtgactggttttgtaaagccttacactgtg

SEQ ID NO: 824154 - DNA, 638 bp, Homo sapiens
atattgatatgaaagtcagatttactgagaggtaatgttcagccttggaagcatcaccaaaatgtgtatataaggcctttgtccactaatgagtgtccttttatgtgactggttttgtaaarccttacactgtgaatggaccgtcaatcaactcgcagctgcactgaggccttcggatggctgtatccatggcaacgtgccaaaaatggcggcgcaaattaatccatttgtgtgaaattctcagtgagagtccactttcatctttcagaaactactgttaggaagtctgatgataatgtaaaatactaagcaaaagcaaaatagtgatggactatccacaggatcttctccctgtaaacagtgggacttcttttcctttttatctgctagagatgacagagcagagttggggatgtaatattaccaccataatgttctttttacaaaaaaagttacattaatttaatgttcacatataggcttctttttcaccttctctcacaatgctatctaatcagcctggaaaataagtacaatgatttacacagtggtacaaaattaaaagtaatcttttatcttgatgctttattgctaatagtatttgtatagcatatagcatatagcatgagaggtacttc

SEQ ID NO: 824155 - DNA, 689 bp, Homo sapiens
tgttcagccttggaagcatcaccaaaatgtgtatataaggcctttgtccactaatgagtgtccttttatgtgactggttttgtaaagccttacactgtgaatggaccgtcaatcaactcgcagctgcactgaggccttcggatggctgtatccatggcaacgtgccaaaaatggcggcgcaaattaatccatttgtgtgaaattctcagtgagagtccactttcatctttcagaaactactgttaggaagtctgatgataatgtaaaatactaagcaaaagcaaaatagtgatggactatccacaggatcttctccctgtaaacagtgggacttcttttcctttttatctgctagagatgacagagcagagttggggatgtaatattaccaccataatgttctttttacaaaaaaagttacattaatttaatgttcacatataggcttctttttcaccttctctcacaatgctatctaatcagcctggaaaataagtacaatgatttacacagtggtacaaaattaaaagtaatcttttatcttgatgctttattgctaatagtatttgtatagcatatagcatatagcatgagaggtacttccagcatcgaatctgaaattaattgttagcttcytctgttatgtgaacagaagcagctaagtctttgtctcttagaaaggttcttta

SEQ ID NO: 824156 - DNA, 649 bp, Homo sapiens
gattaatatgattataataattccatgtaaaagaatgtcagatccatattttaatgttaaaattcaatgagttttttttttttttggcaaatatatgtgttactaagtgctaccctctgtgttgtttcaggataaagggagaaaaagacatacttggttcctgttctaatggatcttttattctagtaaaagtcagattaaaatgaagatcctagaaaagtaaacccaataattacgattagcaataagaatgcattctaccaacaaagggccctgatattggggtaggattaggaaagaatcactgaggatttgatatgttctagctaggagttacaggatgagagtcagtttgagaaggaggaaaggcatggagaaggcatccttagaagatggagcatttcattgaaccgatttctggagcttattaagattattccatcagtaataagcttaatatctgtgattccccaaattatgtagaattttagagctatgccatgagaaaacaaatcaaccaaataccaaatgyatcaatcatattttctttgctacagtcatgtatgaaaataggcagaaacatggatccagttctgggtaacacaggttgtaaaccttagttataaggaatgacccctttaactccatt

SEQ ID NO: 824157 - DNA, 584 bp, Homo sapiens
cttggggttttatagaggcaggtaaacaagggagtcaaggggaaggatggggggggtcagttcttggatatgccaagggaggtgrttccttgaagttaactgtttctcacaacataaaaggtttttttttaaaaccattgctttttcctgggagcacagggctctggaaattttcaacaatgtcactgcctttaggaaagctaagaaaaatacggaatcctctactgtgacagcaaggatatgggtcagtatccaggcagtgacaatggtcaaagcaaatgtgtaacaaacctaatcaggagcctaatcccctaaagagatgaggaacccaaaatccaaaatgatttataactttaacttaaagacggatagttcactggccaccgaccagctctttgcacttgattgtaaatcaagaaattcaattaaatatttgctcagcatcttttttttttctagcaagttctttattttaattttaacttgaaatcagtgcattatattaataactccattggtcgtttgtctacttaacaatctttgatgatctttcccatagtgaaatgatcctataaaaccattga

SEQ ID NO: 824158 - DNA, 657 bp, Homo sapiens
cattttaacaggttatgaagtctcatgtcctatgaagagaaaatagggggaagaagggacaaaacaacaaacraaagagcaatcctggaagattgatataggccacattactcggaagtccatacattagtaggcaggtatgaaagtggcttatgtatttaaataggtttctgttattttcttctgaagtttaagttgcctggctttagttcacagggctttaagaaaacacagcttagttttcaacaatttcgaattgggaaaaataggggtaaaaaggaaaagaaagaagaaacacattgaaaacattattttggagacattattcattatagccaggaaaaaatataattcagtccaaactgtagaaaataataaaaatggaaaaacattaggcaagactagaatctaacaatgggtgtactatagtttttgaatttttctctctccagtttgccatttttaccaaagacaaatcatggtaggagtgatttgttttattatacttggccagattatttgtacaacatgcagcaggaataattatttttcacaaaggctttttaattttgctttgttaattaataatttattattaattataattaatcattaatcatcaatttattaattaaatggagctttgtttcatagaaa

SEQ ID NO: 824159 - DNA, 657 bp, Homo sapiens
ttttgaggccaatttttttacaattatttaccacaacaagcaattcsacttgtgtttcttattaacaatgtcacctttccttatcttacctggaaacacttggcattattctctttcataggactaaagtttcctggttcatatcatgtagaggagacaccttttcttttttttttctctcgggaaagaagacaaacttttgaaaacgtaaattttgacagttaatctttttttctcatgagttacaaaggagatattactgtttgtctgaaaagttaatttcagaacttctggttccaaaatggcaaagtccctcttggatcttccctcccagagagaaatattgtaaactttggggaaaaataaaagaatgcaagtaaatctggaaggaaacaagcatttataagaagggaaaggcacaaggtgagtttctagaactaatagcttaagacttagaagtgaccaaatttagtgccacactgcgtggttagaatttgaaagaaaacacacagtctttctaccatgaagaaatataagtgtttcaggcaaccaacaccacttaaaagtgaaagggaatctagtaaaggagaaatccagagcagaaagcaccacatgctgcgtatgtagattctctgccaacacctctgactggctcct

SEQ ID NO: 824160 - DNA, 657 bp, Homo sapiens
ttttgaggccaatttttttacaattatttaccacaacaagcaattccacttgtgtttcttattaacaatgtcacctttccttatcttacctggaaacacttggcattattctctttcataggactaaagtttcctggttcatatcatgtagaggagacaccttttcttttttttttctctcgggaaagaagacaaacttttgaaaacgtaaattttgacagttaatctttttttctcatgagttacaaaggagatattactgtttgtctgaaaagttaatttcagaacttctggttccaaaatggcaaagtccctcttggatcttccctcccagagagaaatattgtaaactttggggaaaaataaaagaatgcaagtaaatctggaaggaaacaagcatttataagaagggaaaggcacaaggtgagtttctagaactaatagcttaagacttagaagtgaccaaatttagtgccacactgcgtggttagaatttgaaagaaaacacacagtctttctaccatgaagaaatataagtgtttcaggcaaccaacaccacttaaaagygaaagggaatctagtaaaggagaaatccagagcagaaagcaccacatgctgcgtatgtagattctctgccaacacctctgactggctcct

SEQ ID NO: 824161 - DNA, 629 bp, Homo sapiens
catttatccatttcaaaatatgttttgcctgtgcatatatgctcttattgtggaaacaacttgaaacaatgccttattttgatgaaacctagaatatctaacacccaaatttaaaayggcagcagacacacctattgaacactttctttgtacatagcagtctgctgaatgtgttcaaggtgtattttacacaaccagaaaaacagaaagcatactcttttaaagtattaaatagaatacagggaatactatcaagttaggtttcagttatctctgaggtagataatttcgaatgaaacccaaatagaaattcattctctggctcaaaggatcacatgatctaatataaaccatctgttgcatgtgcatttatgaatagtgacttaagatgaaagaatgattcaatgggttgtgctaaagagacaccagacaataaaaatgggagtaaaacagtaattacctgaaataatttcattaatgctttaaaactggtaaactcaccgaataaaagagattgtgaggacagaatttgtattctgacattcccatgaactgtaatttctgtgcttgaacttctttctgtgtagtattctctagctttgcatgccaggcaagctcttcctttatct

SEQ ID NO: 824162 - DNA, 620 bp, Homo sapiens
gaatatctggaggtttataactttgttctaataattcactctgcaagtggcaaagagggtggcagcatgggaataaaaattgtgcgcatgtttttgcagaaagatttctaactgctgaattgaaaatcacttagttatttaagttacaaaagtcagagcaaaatgaaattcatgcttgtgttcaaaacctctgaatggtttgctgttttgtgaatccttataaagagaaaaaagttaagcatggtagaagagaaattgtttagtatttccttttgccatctcctttgttttataatttcacttaatgaacaaattcaataggggacttttaagttttttccttcccaattaaagttttccaatggttatgagttcagagacattggaagtctgaaaaatgactgccattcctaacactgagctttactaacattgaactcaacatttgttaacactttctcaagccactcctaaaatgtagacattcctctgtcagtaggcttagcccttcctgcacatcatatcccyctcccactttggaaattgcatctacttcatgatatcagctaccagggtgaatggctccatttctgaatccttgttggaattcccccccagca

SEQ ID NO: 824163 - DNA, 582 bp, Homo sapiens
tttctgacgtaagccacacatatgttaccaagcagggcataggttttctaagctcagtaggagatggaaataatagcaggatggaaaaagattctgtacaaaaagacactggttgtgaagcaaatatacatatgtaattgctaactccttacttgaagactgcatatacttctattaggaaagatagtttcaatcatgttaatggcactttataagctgttactttctttaggaagattatgtaactaaggcaggttatggcatttttcttaagtatcctacacattagtaataaaaagctttgtctaataggaaagcatttaaacatgatggcagtgggtaatttgaaatgtaacatctattttctattttatttccattttgtcagccgcagtcatgtagttaggttagaaaatatttgggaaaaaaagaaataccatttatgaatatgaaagctatcaattttgyttcctgaccagttgcttcagcaaagtaaggagatttagcagataagtaatcacggtattcctaaaactagagaaaattttaaattgaattttcattatgtttgcaacatatgtg

SEQ ID NO: 824164 - DNA, 564 bp, Homo sapiens
aatatgagatttaatgtcttaggctcccttttttggtgtctgggtagtccttttttgaagataaccctatttatttctaaagtatcatttgatcttaaacacataaatacattttgttaattttacctrtaagagaaattccaacttttacaaatatagaaatctcagaagaaagagaagctgattaattatggtttaaaaagacagaatattttttcttttttaaattgataaataaaaattgtatatatttatcatatacgacattataaaatatgtatacattgtgaaatgactaactcaagctaattaacatatgtataacctcacatatttatcatttttgtggtgaaaatacttaaaatctactctgggcaattttcaggattataatacattgttattaactatagtcactatgttgtacaatagatctcttgaacttattcttcacatctaactgaaattttgtatcttttgaccaacatctcttcagtctgtactcctgaccccttacccctagccaccatcgtactctctgcttctgtgagttcagctcctaga

SEQ ID NO: 824165 - DNA, 560 bp, Homo sapiens
gcactggggcttactagatattccactactgggggttaagacttcaacatgtgaattttgggggggacacaattcagcccataacaataactaaactttaaactttttcgtagtcataggtattctcccttctcagagctttgacttagtgactgccaaccatgttaaagatggggagtttattggccggtttaattgtttttgtcttgttcttgtgctgatttacactcttgctacccataaactttggcccttccaggaccaaaacaggtagaagggacgagcaaaaaatatacatatatgttttatttgaccaactggcatcctgctttttagatctgatagtgtttattgctaactttttcgcagggtctcctgggaactagtttcatcattttaaataccacctatgagctctttggagaacctatgtattgttaggtatctcttacttgtatttaaaagtgaatagtacattctccrtggttagcccctaaacatgttctgctttgtccatgcttcttggagggtcaccttgatagagagtctctatttagaga

SEQ ID NO: 824166 - DNA, 603 bp, Homo sapiens
atataacaagtagaggtgtgtgcctgtgcaccagtcccgctgagtcatgcaggccgggatgtctgcctcsgcccattccttgaccaaagcacatccgtgtagcttacagcattcacagcctcagctgaaagctctggtttctagcttcctttaaaaaaaaaaaaaaatactgggagttttcttatacaagtctcctaaatgttttgtggtgtataagccaagcttctaggtagcttatctaccatattactagaaacagttctatgttcagctttttacattttctttgataatcacatagatatttttaactcttaaatttcctttaagttgaatatggttatttcaagtgactattattgcctggtaaaagttatagtacataatacaaagctaaacagtgattattgtaactattggcgattatgaatggtatggggatttgtcccagtgagattgtggcacttgctgaatgtaccaaaacacatcatgccataacattatgaatgttattttattcaactcaaaaataaaatataagctctggatacaagtgactatggaaagtggaataaaaaacgaaattctctgaacattctggat

SEQ ID NO: 824167 - DNA, 518 bp, Homo sapiens
agcttacagcattcacagcctcagctgaaagctctggtttctagcttcctttaaaaaaaaaaaaaaatactgggagttttcttatacaagtctcctaaatgttttgtggtgtataagccaagcttctaggtagcttatctaccatattactagaaacagttctatgttcagctttttacattttctttgataatcacatagatatttttaactcttaaatttcctttaagttgaatatggttatttcaagtgactattattgcctggtaaaagttatagtacataatacaaagctaaacagtgattattgtaactattggcgattatgaatggtatggggatttgtcccagtgagattgtggcacttgctgaatgtaccaaaacacatcatgccataacattatgaatgttattttattcaactcaaaaataaaatataagctctggatacaagtgactrtggaaagtggaataaaaaacgaaattctctgaacattctggatatatttgccttctct

SEQ ID NO: 824168 - DNA, 413 bp, Homo sapiens
tggactgtctgctgcaaattgctaagttgtcgacctctttcttactctatagcttgaggggaaaaccatactactgaatttagtgggtgcaatgaactatgctttccactctctatgtagctccactaggtcaattttacagccattacttaacccatgtattttccaggttgtatcagattatttcaatggctaaagtcctatattttgtaagtcgtacatttaacatttatttcaagtcattttccccctaaatcagccactgaatgtcatttagtataacagtgattggagtcaactacttagaaatattatatgtaattacctttcrtctcaatttgtggagttctaccatgggtcattttcccaagaaagagaatctggggaaaaacaggtagtttagtagacattgc

SEQ ID NO: 824169 - DNA, 588 bp, Homo sapiens
tttcttctaatattttatgaccaacattttattaatacaacaatccaagttatacccyattatttttctgttttttagtttttcatgtaagcaaatatataatatgcaagtcataacagttttttttttttttaaatatggctctctaattcttaagtcatcaatttatttttcttatcttagtgcactggctaggtcttccagtataataataaacagaattggtggcaattattcttttatgattttaaaaagaattctacttacatttcataaataagaattttgtatactgtgatatattagtagaagtcctttaccccttttccaggataattgtgtaacaatgtattttttggtttgttaataattttattatcgatgggtaatacctttttcaaaggtttttgttggtcggtttgtttttaggaaataagatttaaattgaaattcaatttatttaaagttataggtcaacataggttaactaacctataatgaaacagcctgatatgctctataacttttagagaaaataaatggcggtttattttttctggaactgctttcatttaaattatatatatt

SEQ ID NO: 824170 - DNA, 625 bp, Homo sapiens
tcaagaaattctcctgccttagactcctgtgtatctgggattacaggtgcacaccaccatgcccagctaatttttgtattttttttttagtagagaccgggtttcaccatgttggccaggctggtctcaaactcctgaccttgtgatccacccacctcagcctcccaaagtgctggaattacaggcatgagccattgcgccaggcctaaagtgaatttttaaaaatcaaatataattactctctttaaataggctgagtttcatcagtttatatatactgagttactaatgtagttggatttttttatatcatatcattttatcttatcattgtttttgtttgcttcattctttcctattatcagtgaaaatgatttaaaaaattactatagttcctttttccctatctgtacattataagctacaggtagtatttctgttcttttggtgattttcgtacatgtttttaaaaataaatacggttatctataaatttttcaagttattcttctatcacaaatacaagtccactttacatactgtatattttgttactaatacatagaaatatagtttagtctttccaagaygaaaaactttaaacttatttttaaaactattcagc

SEQ ID NO: 824171 - DNA, 618 bp, Homo sapiens
gacattcgaaaagatgttttagaaagtattcaagaaagtatgattaagttttttttgtaaagttcactgtttttcaaagaaacccatgtatataattcttcactaatatagctccatttccagctgctcttcaatttacactttatgctaatgcaatctgaactattcgcagtttgctaaaacacggcatgcagtttcgctcacactgttccccatgcctgtcattcattctctcaagtttttttatctgcctatttggcttttttttttttttcaacttgttttctttgtccttttcttcttctaagctatttgaatttcaaaacccagattacaccccatttaggaagactttcttgtttcttatctctaaggcagaattaatctcattcatttaactgatttgttgaatctattaaatactagaccctctgttaggtattggatatacagatatgaatcaaatataatccctgcttgtatggtccttatactcttactgggttaatccctatactatataycacatttctgttattgggtttatcatgttgacttataattacatgttcccttgtctgtttccttttttggatagtgatgttccaactgggcagg

SEQ ID NO: 824172 - DNA, 511 bp, Homo sapiens
atgtaaaatattgcaggttctgtgaaaaacaatatggcagttcctgaagaagctaaccacagcgaattacaaaaacaacccagcaattccattccaaggaacatacccagatgaattgcaaatagggacttaaaccaataattgtatgccaatgttcactgcagtatccagtttagccaaaaggtgcaaaatgtccacctgaatagagtattactgagcattaaaaaggaatgaaattctggtacatactgcaacacagatgaaccttgaaaatattatactaaatgaaagtagtcagacacaaaaatacaaatattttattattccacttacattaaatatctagaagaggtaaattggtagagacagaaagtagattagaagttactagggattgggaaagaatagatggtagtaatcgttgcacaacattgtgaatgtmattaatggccttcaattgtacatttcaagtggttaaaatggcaaatttaatgttgtataaatatatttc

SEQ ID NO: 824173 - DNA, 476 bp, Homo sapiens
actgggagtttcttcttggtctccttgctgattccccatctcttcctgccttttttttttctttttttcttaattttttaattttagagacaggatctccgtgttgcccaggctggagtgcagtggctactcacaggcacaatcatagctcactgtaacctcgaactcctgggctcaagtgatcctttcgccacagcctccagagtaggtggtgttaccaggcctggcttgtcccctctcttttaacattagaatgctccagggctctcctttgcttagagctcttctttttctagtctatactcagttcctttgtgattttatccagtctgctagctttaatrtctttatgaaagtgactcccaattcactatctttagcctattctcccaaactccagactaacatcttcaactgcctccttgacatctctgaagatgtctaatatatttattgaacttagtatgtccaagcct

SEQ ID NO: 824174 - DNA, 607 bp, Homo sapiens
tttccttctcctcctgttgcaaactcagagaccatgtgttgaggacagcagcatgacaaaatcaaggatccctgagtcaccgtgtggaggakagccacccaggaaagcctccaatccacagtaggctgctgtgatcaagaaataaggatttattgtgtaaagccactgagatttggaattgattttttttttttttttttactgcaaattagccttgcttcttctcactgatggaccttaaaagctgaaccttgtctgtatctccatcttcctcacatactattccttcctcaggcacattcactttttgctccaactgccccaaactagttgcactcccccaatgcaccctcactcttccatgcacttgactaagctgacccctctgcccaccacccccttcctcaccctgtcaagttggcaaattcctacaagcccttcccaattcattttcgcagtcctctcctttataacacgttctataaattgctgcagcctccctcccaggcccagacagtcaatcgttgtctctgtggtatatttccagggtatccagtacacacctctattttaacacttatctctcttacgagactttcttgtccat

SEQ ID NO: 824175 - DNA, 579 bp, Homo sapiens
ctcctccctctctgctcgtcttcctctgggatccaccgggcagcctcctccctctctgctcgtcttcctctrggatccacctggcagcctcctcactctctgcccctacaccctccatgttatgctccttcagccaccctggtccccagccagtccatgtgcttcccggggcctctgctgcacaacgagggtctctgctcgagcccccacagcctctccacctccagggcacatgtacactgcccttccaaggcccagcgctgggaagccacccctaagctgacatcagaatcgatcatcgcccccgccggcactaagccaaattcatttggtgtccttcctactgcctacttcacacccacccaggaaactcccagcatagacaccatggtgcgggccctacctgcaccccatcccccagaaggtcgggggcctgaacctgtcaatagggcctccttccacacctaacgctgctaatccacaccctcccctccaagctgcagccccctctcccttcccaacccagacccaacttagcacagaagaggttccagcagctcagcatctgagtccactgcc

SEQ ID NO: 824176 - DNA, 486 bp, Homo sapiens
catgtcagatttctcttgctgtcataattttgcaaaggcggtttcatatctagcatatatatcgagggttgtttagtacaacaaggcctttagctaaggtagayttactaatctgttgaagaatcttagggaaaagacagcctctttttcagatgagtaaactgaggctcggagactctaagctggttgatgaagttcatgcagccaggcatagagccggacctgaaaccacgtcctctgactccaggtcactccttcccaccctgctgcactacagctagatcaagagtggagtgtccacagccttccccttgctgaggccccaaactcatcttctccccacaggtacagccatgaacaatgacactcaaggacttcagaaagaccaacccaaggcctctgtcctacttgaattgggggacaaggggctgtccaaaggccagaactgatgtcattggatgatctgttagtttcaggtgcccatgg

SEQ ID NO: 824177 - DNA, 585 bp, Homo sapiens
gaaccatttaggaggtgtttaggtcatgaaggcagagtcctcattaatggaattaattcttttgaaaaatatgctcacaataactcattcatctctttcccccattaagacatggtgacgagttgccatcttggaggaatgcccaataccagcatcttgatggtgaatctttcagcctcaagaactgtgacaaataaatgtttgttgtctgtaagctagccaatgtatggtatttttctatatagcaccctgagcatgctaagacatgcagtctcagcataggttttgtctcacccactgggagctctgaagctgttaggccttcagagttggtccaaactgaaaaggggagaatgggcctttagagtcctacatgtgaccaggcattggatatgggctgtcttggaaaggtcactatatgctagatagctttcagcagggttgtactgagagagagagcttataggtgaggtatgtcagttgttcatcacttcatcagctggaaagtaatttctatatwcccaaaaggggaatctcggtgacacgtaatgcatgcactcaaggacaataaaaacattgaacaat

SEQ ID NO: 824178 - DNA, 481 bp, Homo sapiens
aaagactctaaaagcaattgcaactaaaacaaaaattgacaactgggatctaattaaactaaagagcttctgcacagcaaaataaactattaacagagtaaacagacgacctacagaataggaaaaaatatttgcaaactatgcatctgacaaaggtctaatatccagaatctttaagaaatcttaaacaaatcaacaagcaaaaaacaaacaactcccttttaaaatggggaaaaaaaacatagatacagtttgaatatttgtcccctctcaaatctcatgttgaagtttaatctccattgctggaggtgaggctggtgggagttgtttgggtaacggatccctgacrgcatagtgctgtctttgcgatagcgagtgaactgtcacgatatctggttgtttaaaagtgtgtggcacctcctcccactctctctctctcgctcctgctttcaccacatgatgttcctgctcccctttcacc

SEQ ID NO: 824179 - DNA, 511 bp, Homo sapiens
aaaccttaagctggttggctaaagattgggcccagaagaagggaacccagaagaccaacatgccagcaaaagggtattttaccagtctggcttttggcctttctctccctgtgcaaagtgataaaaggcctcagaatttttgagctatccttactcctccccttgtttcattttgatacatgttttctaataacctagtttgtctgttcttgccttcagggcatcaaactccaaacaataatgcaagcagagtctctgacaatggccctttctgctgggggaactcttagataggcctgtgagtgagctctgaccaccatttcccaaaaacagcaccccttgtcagcaggaagcagtaaagattgatcttccttatgctctttcaaatagcattcagatrtacttctttacaagggggaaagagacagccaggtaggaggtggtccccagagaatctccaaagagcttgaacactgagaagaatgttcactggggtggaacctcagcaagt

SEQ ID NO: 824180 - DNA, 634 bp, Homo sapiens
tatgaagaactgctaaactgtttttcaaagtacttgcaccgtttttcgttacttctagctgtacaggagggttccaatttcttcatgctcttccctacacttgttatctcctatctttttgttacagggatcccagtggatataaaatgatctttcattgtggatttaatttgcattttccttgtggctaaagacataaccatcttttcatgcacttactggcaagtcattcgtcttcttttgagaaaattttattcctatcttttgaacatttctaacatttttatcttattattcattcataagaattatttttatattattggtggaatgccttgtcagtctatgatttttaaatattttctcccactctttataggttgattctttttttttactttattgaagatgtcccttgaagcacaaagttttaatattgagaaaataaatctgtaataatttttctgtgctccaaaagaaataatgtagaaaatgctgtgactattgattactattatcaatatatatawggaggtaccaccttagaaaatatactgaaaataccttaccaggaagataataagacagtgaatgattaaaaatagtttaaaagcaaacaggaaagaattagaaa

SEQ ID NO: 824181 - DNA, 602 bp, Homo sapiens
gcacagatcatcccattacccaggtattaagcctagaatccattagctattctttctgatcctctccctcctcgcatcccctgacctccaaaagtccccactgtgtgtttttaccccccatgtatccatatcttctcattatttagctatcacatataagttaggacatgtggtatttggttatctgtttctgcattattttgctatgaataacagcctccaactccaaccatgtccctgcaaaggatatgatctcattcttttttagggatgcatagtattccaaggagaatatgtaccacattttctttgtccagtctgtcattgatgggcatttaggttgagtccatgtctttgctattgtgaatattgccacaacgaacatatgcatgcatgtgtctttataatagaacaatttatgttactttgggtatacacctagtaatgggattgctgggaaaaattatatttctgcctctaggtctttcaggaatcaccacactgtctttcacaatggttgaacaaatttaaactctcaccaacagtgtaaaastgttcctttttctccacaatctcaccagcatctgttgtttttgacttat

SEQ ID NO: 824182 - DNA, 551 bp, Homo sapiens
agccgcttgggtatccagagagctcccagtgcctttctgctacttcctctacccctrtattttgcttggcttggttctctaatttgactcagcttcacataaagtcaggaacttctcctgccaacagaacttcagcttctccagtggggatgtgtattctggagagggggatcaccctttcccacttccattgttggggcactcacagtgtttgggatgtctcccaggtcctgcaggagcagtacgcttcctgcagagggtgtgtggatcctctcagaattgctggtctgttcttgcagttgatctgcagctaaaattcacaatgcaagcctctgcatgctgctctgtctggagctgcaatctagtcctgcatcccatctgccatgatcactggaaaaccctcatttattttttaaagggtccagaaaatgctaatctatagagatagaaattagattagtggttgcctagggtaggatggatgcaaaatttcagagtggggggttagaggctattgtatagaatcttttggagataatactgattattgt

SEQ ID NO: 824183 - DNA, 592 bp, Homo sapiens
gggtaagtgtcttctggccggctctcttcctgcttctgctatcttgctgacacacgctgctgatgcaagtggtcttgcatcttggggctgggcctgagaagggaggagttactcatcccttcaagccttcaggccctgaggagaatctttgaaccccctgcatcactggccaccctcctgatagatccctgtgatgccaggcaggaatgagccgcttgggtatccagagagctcccagtgcctttctgctacttcctctacccctgtattttgcttggcttggttctctaatttgactcagcttcacataaagtcaggaacttctcctgccaacagaacttcagcttctccagtggggatgtgtattctggagagggggatcaccctttcccacttccattgttggggcactcacagtgtttgggatgtctcccaggtcctgcaggagcagtacgcttcctgcagagggtgtgtggatcctctcagaattgctggtctgtycttgcagttgatctgcagctaaaattcacaatgcaagcctctgcatgctgctctgtctggagctgcaatctagtcctgcatcccatctgcc

SEQ ID NO: 824184 - DNA, 508 bp, Homo sapiens
gtttgagtcttgcgggtggatcactcatgaatggtttagtgtcctaccagcggcaatgagtgagtttctcactttattagttcctttgaaagcttgttgtttaaaaaagcctgacccctcctcctctctctctgcttccccctctctgccatgtgacgcacctgctccccttcactttctgccatgagtaagaacttcctaaggcttcaccaaaactgaacagttgttaatgccattcatgtacagcctgcaaaaccatgaaccaaataaacctcttttctttataaatgtttcagtctcaggtattcacttatagcaaaaaacacagactaatacatatagtatgcatctatttatatgtgcataaatataggcattaaatatagcaagtwtaattttagaagtattaatttagtgggtcccagaatttagaaaaaatatgtcttcaataaatttctttcagaaaatttttaaacaccgacctcaaatataaggattttctccaaaa

SEQ ID NO: 824185 - DNA, 594 bp, Homo sapiens
tatcttcacggctgcaggactagaaataacaatacgtccagcttaagaactcatgcagctgtatggatttaaggcatccttactaatgacagcctagtagagaggaggrgaacattatggggaaagtaactcccaatcttatgttctcctcagtgtttggtcccgacttcaggctgactctgaataatttctttaatgggtagaaaacgaagcagaaatagaaactgaattcacaattccaggattcctttacccactctgtactaaactccacctaatgcccagagattctagattattgcaggttttatactagattatcttcaggttggaaggcttataaaaatccaagtcctgtagattgctaagttttatactgtaggtgaaagaaaatgcaaagtatggaagggttacagtcaatataagactctagaattatgtaatgagataaatattatatacataattctatatacatataattgtgtatatacacacaaatacatggatatggtgtgtatgtgtgtgtatctgagtgtcatacacatatatcatgacactcagatcttataagcattcatccacagaaatgaa

SEQ ID NO: 824186 - DNA, 544 bp, Homo sapiens
atgttttacaaagaatgagccagaattttatgggaagagtttgaaactacatcagtaggaaataaagtcaaggaaaccagatagtgtggctttcacaagatattctgtagatgataatggtcgcatagttatgtgtatcattatttttttcaggaaggatatctgaaaagcagacaccattgatttcctttttctagaagggtgtgtgtgttgtgggtgtcagtgtgtcaatggcaggtgcattgcattaataagatggaaaattttgttgttctccagtcttaacctgtgcgtctactacttttacttacaaaccatctaaagaggtcatcttctattctgtaaaacaattgaacgtcttctactgctccctatattattctataacaaaataagtgtgtgtgtatgtgtttttaagtaggagaaaaaatatatggagtaacccatcastcactggagagtagaatttaaaaagattggtcagccatgccccagtccagcaaactgaaatttaaacaaagattctgagcagtgcagtccacaa

SEQ ID NO: 824187 - DNA, 579 bp, Homo sapiens
tgccaaataaaaattgtatgtatttaagctatacaactcaatattttgagatatatatatgctctgtagacattgtgaaatgatcaccataatcaaattaattaatacatctattacttcacataattaactttttctttggtacggtgagaagacttaaaatctgtgtcttagcagttttcaactatacaatacaatattgttaactacaatcatggcgttgtacatagatcccagtaattatttttaattggcacaaaataattgtacatatttatggggtacagtgtgatattttgatacatgggtataagattttatgatcaaataagggtaattagtaaatccatagcctcaaacatttatcatttttgtgttgagagtattccaaatattctcttctagctagttgaatatatacaacaagttgctcactctagttacactatagtgctggagaacattatagcttaatcctcctacctggcttcaacgttgtatctgytagccaacctctcactctccccctctttctcctaccctttcctgcttctgtcaccatcctactctctacctcta

SEQ ID NO: 824188 - DNA, 497 bp, Homo sapiens
ctttttttcagctgaatgatatgcaaatgtatgtatgtatacaccccccccaccccccmcacacacagtttctttactcattcatctgatagatatttaggttaatttcataccttaactatggtgaacggtgctgcagtgaacatgaggtgcagactacctttcacataatgattgtgtttcctttggatgtattacccagcagtgggattgctggatcatatggtagttctgtttttaaagtttttcaggaacctccatacagttttccatagtggctatactaatttatattacaactaagagtgtacaagaaattccctttcctccacatcttctccaacacttacctgttgcctttttgataatagttattctgacagatatgagatgatacctcattatggtttaagttgcatttccctaatgattaatgaagttaaacattttttcatctagcttttggccatttgtatgtcttattttgagaagtgtct

SEQ ID NO: 824189 - DNA, 650 bp, Homo sapiens
actaagaattttcatttgtcatagttgatttccaaaaggaccagaaaaactgttgtaacataatagcttggctgaggacactgtaccgcaaagctgtagagtattttattttaattwaaaatcatctatacctgagctaaagagaaaaaggatctactgggagaagatctgatgctttgttcatcttgaataagcaaatgtatatattacactttacatgtttttcctcatgtatatattaaaatatagatatagtctcaatgatgctttaaatgtacatgttaatgaacttctttttctaaacctaatttgacaaatgtctttaataaaagaaaagaaagcaactggaacacctttgactcctttgatattctcccttaccttttcctttccaagttctgtaattaaaagtaaatataatggccaaattaaaatatttcacactgttctttctcatcaattctttaatgttttcatcaatattggttttgtaattatttttcactgtcacttctgtaatttatagattaaaaattatccagatttattaaattactagaatagttcttttgcccaaaacactttaatatattttttaaaaaagtaaacaaaagccctcctaaaactatatgttacatttattgtatttg

SEQ ID NO: 824190 - DNA, 652 bp, Homo sapiens
tgccacttagaatctattgtgtaaggatgtggatgcattaaacaattttcttatgagaaaatagctgttttcttataatctgataaagtaggtgtgccacttgtttataccaacagggtaagaaaaaagacttgyggaatgtttctttgagaaatacctgatctggattgtatctctttccttctctttctccttctcttgccttcccactgacagggattccccaaccttgatgttcattttactactacatcttcacttgacctgtctggctcaacatacatcctcatctctttcaactatcagcttgacttcttttctctctgacaatgttttcatgttggcaatacccttgcaggcttcattcattcattcaatcaatatcataaacaataaacaaacaaaagatgcagcttagtggttaagaggtggactccaatgccagacagcttaagtttgtatcttggttctaccagctgttagccattagaacttgggaaaatcacttaacttacgtgcatcaatttcctcatctgtaaaaatgaggtgatattgatactgtactaacaatatcacctcatagattgttgggagaaatgaatgaatcaatatatctaaaagtctttgttttttttttttttttttttttttt

SEQ ID NO: 824191 - DNA, 652 bp, Homo sapiens
tgccacttagaatctattgtgtaaggatgtggatgcattaaacaattttcttatgagaaaatagctgttttcttataatctgataaagtaggtgtgccacttgtttataccaacagggtaagaaaaaagacttgcggaatgtttctttgagaaatacctgatctggattgtatctctttccttctctttctccttctcttgccttcccactgacagggattccccaaccttgatgttcattttactactacatcttcacttgacctgtctggctcaacatacatcctcatctctttcaactatcagcttgacttcttttctctctgacaatgttttcatgttggcaatacccttgcaggcttcattcattcattcaatcaatatcataaacaataaacaaacaaaagatgcagcttagtggttaagaggtggactccaatgccagacagcttaagtttgtatcttggttctaccagctgttagccattagaacttgggaaaatcacttaacttacgtgcatcaatttcctcatctgtaaaaatgaggtgatattgatamtgtactaacaatatcacctcatagattgttgggagaaatgaatgaatcaatatatctaaaagtctttgttttttttttttttttttttttttt

SEQ ID NO: 824192 - DNA, 584 bp, Homo sapiens
tatatctggatttcttttttcctttttttttttctttttttgagacagagactctgtcacccaggctggagtgcagtagcctgatcccagctcactgtaacctcagcctcctgagtagcttggattacaggtgcccgccactgtgcctggctaatagagatgaggtttcaccatcttggtcaggctagttttgaactcctgacctcgtgatccactcgccttggcctcccaaagtgctgggattacaggtgtgagccatcgcgcccggctttttttctcaataaaaacagtcagcactccacatctacgggttctgcatctgcaactgaaggcagatggaaaatgaggtatttgtctgatgtgaaacccgcagatactgagggccggctttttgtatacttggttttcacaggattgtgggacttgagtatgcaaagattttgctgtctgctgggaggtgggggatgccctggaaccaatcctcattgtgaatactgagggacaactgtattttcctacttcctagattaggccttcaaagtactttaagcrtttagcaaaggattaagagttaaatgtaaaat

SEQ ID NO: 824193 - DNA, 564 bp, Homo sapiens
cagcaaatacaattattaaagagtctaaagtttggccgggccccgtggcttacgtctgtaatcccagcactttggaaggccgaggtgggtggatcacttgaggttaggagttcgaggccagcgtggccaagaaggtgaaacccaatcactactaaaatacaaaaattagccagatgtggtggcagacacctataatcccagctactcgggaggctgaggcaggagaatcacttgaacccatgaggaggaggttgcagtgaactgagatcttcccactgcactccagtctggacaacagagtgagactctgtctcaaaaaaaaaaaaaaattctaaggtctaatacaggacctgattgtgaggggcatgctgatctgtttaagccacatcgtcattaagcctgtgacatatatatatgtgtgtgtgtgtgtgtgtgtgtgtgtgtgtgtgtstgtgtgtgtgtatatatggacttcattgctttaattaacatggggcatttttttttccactattcagttaaagtggatcctcaggtgatattttactttgtatgaacgtacaa

SEQ ID NO: 824194 - DNA, 559 bp, Homo sapiens
ggcggaaaaccgcttaaaggcgttcctgaaccacaaacaatagcatgagagatctgtgccttaaggacatgtccctgctgcagataactagccagagcccatccctttgtttcccgtaaggaatacttttagttaatctataatatatagaaacaatgcttatcactggcttgctgtcaataaatatgtaggtaaatctccgtttgggggtctcggctctgaaggctgtgagtcccctgatttcccactccacacctctatatttctgtgtgtgtgtctttaattcctctagcgccactgggttggcatctccccgaatgagctggtctcagcaacctacagtagcataacttaaattttctttaagatgtaaccaattttataagtatttcatattgtatccaaatatttccctgtattcctcttatctcaacccatcccaaccacacatatacaaataaaaagaaaaaaaaaggaaaaaaaggaagagtgaactacyactacacctgactatctacataggagaatgtaaagtattaaattaagagagggtaaagac

SEQ ID NO: 824195 - DNA, 637 bp, Homo sapiens
aggttgcagtgagccaaggttgggccactgcactccagcctggcgacaagagcaaaactccggctcaaaaaaaaaaaaaaagatggctctagaagaatataacataaaaaatataaaaaacgatcagctttggtagagaaaatgtctgcttgggtaataattacgtagaataaaacagtaggattttgtcaggaaagaaacttgaatattccagacagataaagcaccaaggcaccaacaatgtgcaaaggccacaggaaattaaccgggcttgaaaagggaaggtagggaattgtatgggaagagtagtgtggctgacgttgagaggatgtgtgcatgagaaagccaggactcgatcatttgtgtgagaatgtcgttgtgaccatctgggccatgtctttctcctacattaaacttgaagtgccatgaaggcagagaatatttctatattatttacatttttttctcaacatcaatttcattgccttttgtgttgaatgaatgaatgaatgaatgaatgatttaattatgrcttgatgggtgggttggagttagattctgtagggccattaaggttctttggatgtttatggaggaaagtgacagacggcacattttgcgtttctcagaacaactc

SEQ ID NO: 824196 - DNA, 670 bp, Homo sapiens
ttgaccgaaaggatgataatgatatggacaatgaaatccaggctgaggtggtctcagatggagatgaggaacttactggaaactggagcaaaggtgactcttgttatgttttagcaaagagactggcagygttgtgcccctgacctagagatttgtggaactttgaacttaagagagatgatttagggaaatttctaagcagcaaagcattcaagatgtgacttgggtgctgttaaaggcattcagttttaaaagggaaacagagaataaaagttcaggaaatttttagctgacaatgcaatagaaaagaaaattctgttttctgaggagaaattcaagctggctgcagataactgcataagtaacaaggagccaaatgcgaatcactaagacaatggagaaaatgtctccagggcatgtcagagacctttgctgcagcctctcccatcacaggcccagaaacctaggaagaaaaaaaatggtttcgtgagctgggcccagggtccctctgctgtgtctacagacttgttgccctgcatcccagacactccagccatgactaaaaggggccaaggtacagcttgggctgtggcttcagagggtgcaagccccaagccttggaagttcccatctggtgttgagtctgtgggtacacagaagccaagagttg

SEQ ID NO: 824197 - DNA, 245 bp, Homo sapiens
ttttccttttaatttccccctatttttaaaaaactcactggagtcctagaatacacacagataattgacgtatctctaggggtatttgcattcaaggtaagtttctttygattttagtaacatgtggcttttgattattatggaggacaatttaagcccaaagtattattttgccatttaggtttgtatcttaatttgggctgtgctgaaatcatcttggggggtgtgtgtgtatgtatgtgtgt

SEQ ID NO: 824198 - DNA, 614 bp, Homo sapiens
cataacctaaattaatcaaagggctaattctatagctttgtatagtttcctttgtatagctcatttgtcatttcaaaatctccttaagagcaggactggatcttgtacatcttaatcttctctgcagggactagataatggggcaaactatatagtttattaatatcaggattgatggcacccaaggccatctcttctcatctcttctctttacttaaaagtgcaccagtaggcacacccatatatacatgcctataacaatgctaccataaaaaagcatcttcattcagcagatgaagtctccaaagcaaactgcctaatgactttattttaccaaagctgagtcagagctgaaaccttagcctcctctttgactcacaacattcttgtctaaagtacaccgcggctaccaaaaggaaggaaaaaaaatagactgttcctttatctgacatccgacatacggttcttactaacaatccatatatatacatcatagagggtcaaattctaacagtggatggtgatattcaagatgaataatgttgcytgtaaattactttacagtttatgtaagtcataatgctagaaaaaactaattgcaattcacagtaatc

SEQ ID NO: 824199 - DNA, 532 bp, Homo sapiens
cacaagatcagatggccctttaaagccatgtgttttactagcaagctgggtgatgaaaactatcagaaggaaagaygaaaggaaaagcagaaatttattcagatggaaaaaaagagagacttggccaaaaccacttgtagtatcggaagtcgaatgagatgatcactagcaataaagtggaaacagacagtcttgtgctgtcaaaactctaagctgtgtgtggagccactctatccctgacaccttatcacacggtaggtaatttccaaaaaaagtcattcttaaagagtgttcttgggggacctcccttgagtgctccaaaaagttgaaaacattacaaatgtacagtgtcatcttcataatctcaaaaccctcccaatgggaaaaaatgccttaaaacaagtgtcttagatgaaaattatgcagtacagttttaacaatctggctttatgttccaaagatctaacttaagacttgaataaaagaaaggattatcagaggatgctttagagaatgtattagtccattttca

SEQ ID NO: 824200 - DNA, 617 bp, Homo sapiens
cccgagctgtatcttgacccttttcagccacagctggagcactggagctcaaggcaccaagtccttagcctgcatacagcaggggagtcctggacctagcccaagaaaccatttttccctccagacctgtgatgggaggagctgccatgaaagtctctgacatgtcctggagacattttccccactgtcttggtgattaacttggtgattaactgtcttggtgattaagcccactgtcttgggctccttgttacttacacaaatttctgcagcaggcttgagtttctccccagaaaattggtttttcttttctacttcatcatcaggctgcaaattttccaaacttttatattctgcctcctcttgaacagtttgccacttagaagtttcttccaccagataccccaaatcatctctctcaagctcaaagttccacagatctctagggcaaaagcaaaatgccaccagtctcttttttaagtgtaacaagaatcacctttgctccagctcccaacaagttcctcatctctatctgagaccacctcagcctggactttattgtctctatcactattagcattttggtcaaagccatycaacaagtctctaggaagttc

SEQ ID NO: 824201 - DNA, 392 bp, Homo sapiens
gccattcttttctgcttttctatcatttttcaatttctgctgcagttaccaaggaaaaatagttaaagtagccaataatgaatgtttaaaacattaaaaaatcataccttataygtgctagaaacagtaatttcaacatactaggtggacttttggcagtgtgttcttcccatcacactatttgtaatccaaatattcattttgtgtttttttccatgtcgggctgcctttgattttcctagattgttgttgttgttgttcttgttgttgttagtagaggaaaatatacagtgtcattaattctgctgcaagtctctcatggggtggaccttgttaggagtacagaatgatctgattcaatttcaccctgttctgtacagttttcaatgtct

SEQ ID NO: 824202 - DNA, 580 bp, Homo sapiens
gccactggcttagagtttacagtgccattctcccaaggccacatagaatgctgtgtttagcagggcaaattatttgacaacatagaaaattttacataaaaattcagagttcttatgtcttttgaaaaactggaaaacttcctaacacagattcttgtttcccagagtattaattagttagatctgaatagcctgtactattgctagccttttctccagctggctgcaggtacccctatgccagtttcttttacacttgatccatttcatttctattgtgcctcagtgatgcctgtgttaaggaagttgttttacactctttaaaagttgctttaggaaatcaagctgatattaagcttactattcatggatgtcattcatctgggtttagaagattgtgttctcattttccctaagaaggatcattgtgagcattcttgctgttatctacattcaggtatatagcagcattcctgtgtcactctccyttaatgctgcctggaatcctcaggtgcataggtgcatatacaaaacgtttcaggagacgcttagggcaggcagcatccttaggaaggtacgc

SEQ ID NO: 824203 - DNA, 337 bp, Homo sapiens
attataaaaataatattaacaggcataattgtagttaaatttcaattcagacatactttcttttgaatgtctggtaggtctgctgtgttggttgtatgtgggttttcctccatatccacttttttggacttaatctcaccattttttacatgtaaacatatcacaatattaataacattaattaattgaaggttaattatataaactaagtgaaataaatctttaaccagaaataagaaaatttatttgtatttgagttacagaacaatatctgctaaaaggtttaaattaaayaatctttacttatatgttactaaaatgttttggaggaagcaaa

SEQ ID NO: 824204 - DNA, 509 bp, Homo sapiens
atgggttttctatgcacaagttgaagcagacaatgccaaaagtattttatatatcatyaaatctttaggaaattttgacctcgagaaatttatttcattttatttttgttttattttttgagacggagtcttgctctgtccccaggctggagtgcagtggcacgatctcggctccctgcaagttccgcctcctgggttcacgccattctcctgcctcagcctcccgagtagctgggactacaggcgccgccaccacgcccggctaattttttgtatttttagtagagagggggtttcaccgcgttagccaggatggtctcagtctcctgacctcgtgatccacccgcctcggcctcccaaagtgctgggatgacaggtgtgagccaccgcgccagccggcctcgggaaatttttagcactgggaacaaaactgaaagagtggattttcacatggcctttaaggaaataagcgtccatttggtgtgaatacttgatgtgggtaaagacct

SEQ ID NO: 824205 - DNA, 579 bp, Homo sapiens
gcttggttggaggagtggagaccttaagagatgtctcgatttttactcatgggattttaattgatacaggcgatgcatgacagcatggagacattgcttcttcctggtgtcatcgcaagaagctttactacttgtaattcccaagagaagggagcacaccaggccacagggccatagggatgcaccagtgttggtcaggaggcagaagggagccaggggcacgctcagcgcagaggcttcgtcgtgtttctgggggaaagggaaggcagggcaaggcaaacaggctagtcctgggaacagcagtctctcctcagtcagcaagcccacaaagccagagcatcaagaatacagaagataagaagcagttaccacaataagaaagagttaatacaattggccctgtgatgaagggatgctcaacagacaaatgcagaatctaagaaagcccagaacaggaggcggtgcagaactggctgtgtgattctgaggggcctcggtgtggctttcttcrtatttctgtttggggctcattgtttcttggatctgtgggtttgtatagtttcatctaatttggacaaa

SEQ ID NO: 824206 - DNA, 614 bp, Homo sapiens
gcaggcttagaaataaccttcatataatgttaataaaaaccaaactaagtagctattcaaagtatactcacggcattggacatttgggggtaattttcaccaaccaacaatgtctgtattmgtatctttatatgatggtattgttatttctatagtcttggtcaacaaaatttactcatgtttgatataatttccacatacccatagcatgtctttggaagtaatgcagtgcttgaaatttaaggaaaaaatatctggttaggattccaaaatataaactattaaataaaatagtgctatttacttttaagatgaggacagtattttgatggtacagattatttcatcatccaggtattgagtctagcacccattagttatttttcctgatgatctcccatctccctgtctccactctctgaaagtccccagtgtgtgttgttcccctctatgcgtccatgtgagttctcatcatttagctcctacttataagtgagaacatgtggtgtttggttttctgttcctgtgttagtttgctaaggataatggcctctagctccgtccatgtccctgcaaaagacatgatctctgttctttgtcatggcttcatagta

SEQ ID NO: 824207 - DNA, 655 bp, Homo sapiens
ctgccaaatcttgatttttggttactttctagattaatgaggcagagtagggacccctcttaaaggccttgtggaccccatcaatcataaaaataaaggaaacttattgagttccttcgagggaaattccagtcacccagtacgccctgagaagaaaatgagcaacctgataaggaagaaggtagaaatagcttaaaacaatagccaaggaagtttgagtcacaaaatgtttggttcccgtagaaactaaagataatatattaacatatgtccctgagttgtttttcaaacacctggacccccaccaaatgaaaaacgctgtccactggcacggagacttcagataagggggaactgtggtcagaactctggccactgttcttttttctaaatttcttcctgaggggcctggactaagtcatgtacacaggccagagctcaacattcctttctgctgaccccaagttttcgataaagctttgctctcttaaccaatcacaaatcagagaatctttgtatatccacctgtggcctgtaagtccctgcttcaagatggcctgccttttaggcaaactaatgtatagccttcatgcattgcytataaccaacctccctgcctttaaaaactcttaacatgtacgccattggagagttc

SEQ ID NO: 824208 - DNA, 583 bp, Homo sapiens
acctacagaatgggggaaaattttttaatgtatccatctgacaaargtctaatatccagaatttacaaggaaattaaacaaatttacaagaaaaaacaaccccatcaaaaagtgggcaaaggatatgaacagacagttctcaaaagaagactattatgcagccaacaaatgtatgaaaaaatgctcatcatcactggtcattagagaaatgcaaatcaaaaccacaatgagataacatctcacaccagttagaatggcaatcattaaaatgcaaggaaacaacagatgctggagaggatgtggagaaataggaacacttttacactgttggtgggagtgtaaattagttcaaccattgtggaagacagtgtggcaatcctcaaggatctggaaccagaaatactatttgacccagcaatcccattactgggtatatacctaaagaaacataaatcattctactgtaaagacacatgcacacatatgtttatttcagcactatttacaatagcaaaacttggagccaacccaaatgcgcattcatgatagactgcataaagaaaatgtggcacatatataccat

SEQ ID NO: 824209 - DNA, 618 bp, Homo sapiens
taacgctttaaggtaacttttgaaaaataataaagtgaatccacatataaaaaataaattgagaaacagactttctgctttcacaaaaattgactcaaaatggataaaagacctaaatgtaaagcacacaaatttaaaattcttagaaaataacataggagaaaatcgaggtgacagtgtattggtagtgactttttagatataatataaaaagtaaaatctaaaaagaacaaattgatgttagagtttactaaaacttctgctctgcaaaatatactgttaagaaataagtcacagactgaacaaatatgtttgcaaaaaacatacctgataaagaactagtatataaaatatacaaagaattcttaaaactcaactataagaaagcaaacaactgtatttttaaaaatgggcaaaggatctgaacagatacttcatcaaagaatatacatatatggaaaatacacatatgaaaagatgcccaacatcacatattagggaaytgcaaattataacaagataccactacatacctattagaatggctaaaactcagaacaacgacaacacccaatgctggcaagaatgtgcagcgacaggaactctgctgctagagga

SEQ ID NO: 824210 - DNA, 618 bp, Homo sapiens
taacgctttaaggtaacttttgaaaaataataaagtgaatccacatataaaaaataaattgagaaacagactttctgctttcacaaaaattgactcaaaatggataaaagacctaaatgtaaagcacacaaatttaaaattcttagaaaataacataggagaaaatcgaggtgacagtgtattggtagtgactttttagatataatataaaaagtaaaatctaaaaagaacaaattgatgttagagtttactaaaacttctgctctgcaaaatatactgttaagaaataagtcacagactgaacaaatatgtttgcaaaaaacatacctgataaagaactagtatataaaatatacaaagaattcttaaaactcaactataagaaagcaaacaactgtatttttaaaaatgggcaaaggatctgaacagatacttcatcaaagaatatacatatatggaaaatacacatatgaaaagatgcccaacatcacatattagggaactgcaaattataacaagataccactacatacctattagaatggctaaaactcagaacaacgacaacacccartgctggcaagaatgtgcagcgacaggaactctgctgctagagga

SEQ ID NO: 824211 - DNA, 576 bp, Homo sapiens
actgagtaacagctctgcctcagtatcttaatcacagtcaatcattgactaagagcagctaagaggtgtggccttggtgcaaacatggtgatggatttcaggatgcagctacttgacccttgggtcaattaatccccatgtagttggatatcagcaagacacatcctcatggctggcatagagtgtatagcctgctcatgaacctggggtcctgactcatatgctaatattaatctaggctaggggatgcagattttccttttccccattcccaaaaactgcttgcttctttgtaatctggtacttaactgggagattagtttcccatttctagtgtgcgtaatatgtatggccacagccctctttcccatagaagcattaaacattaagatatgtttctaatcccaggactatcatcagtcttttctttctttctcacacytgataatttctagttgtgattttcaaccactgttacttactttacacatggtttaaaatattttatcctctaattttatgtatttggagtgaaatgaaaacttgcccatgcttgctcaacataacatcttgatt

SEQ ID NO: 824212 - DNA, 576 bp, Homo sapiens
actgagtaacagctctgcctcagtatcttaatcacagtcaatcattgactaagagcagctaagaggtgtggccttggtgcaaacatggtgatggatttcaggatgcagctacttgacccttgggtcaattaatccccatgtagttggatatcagcaagacacatcctcatggctggcatagagtgtatagcctgctcatgaacctggggtcctgactcatatgctaatattaatctaggctaggggatgcagattttccttttccccattcccaaaaactgcttgcttctttgtaatctggtacttaactgggagattagtttcccatttctagtgtgcgtaatatgtatggccacagccctctttcccatagaagcattaaacattaagatatgtttctaatcccaggactatcatcagtcttttctttctttctcacacctgataatttctagttgtgattttcaascactgttacttactttacacatggtttaaaatattttatcctctaattttatgtatttggagtgaaatgaaaacttgcccatgcttgctcaacataacatcttgatt

SEQ ID NO: 824213 - DNA, 576 bp, Homo sapiens
actgagtaacagctctgcctcagtatcttaatcacagtcaatcattgactaagagcagctaagaggtgtggccttggtgcaaacatggtgatggatttcaggatgcagctacttgacccttgggtcaattaatccccatgtagttggatatcagcaagacacatcctcatggctggcatagagtgtatagcctgctcatgaacctggggtcctgactcatatgctaatattaatctaggctaggggatgcagattttccttttccccattcccaaaaactgcttgcttctttgtaatctggtacttaactgggagattagtttcccatttctagtgtgcgtaatatgtatggccacagccctctttcccatagaagcattaaacattaagatatgtttctaatcccaggactatcatcagtcttttctttctttctcacacctgataatttctagttgtgattttcaaccactgttmcttactttacacatggtttaaaatattttatcctctaattttatgtatttggagtgaaatgaaaacttgcccatgcttgctcaacataacatcttgatt

SEQ ID NO: 824214 - DNA, 627 bp, Homo sapiens
atactgaagggcaaaacttccatatttgttctaagttttaaaggatatggggaaagggaataaaatttacttcagkttataatatctaaatcaaaagagaaactaagaaatatgttaaattttgataattttaacagaggaataatgacaattatgtttgctgagtttgacaggcttagtctaagataatttttttaagaatgagaggaaaagtctaaaacttatactaccaaatattgatgtaaaactagaattttgttttccctttattaaaattatgagttagctttcaaactcttaaagatactgagttactattctttacattttgtataatcagtataggtaacaaagattctctatcgcactaaaataattttctctgagtaaactttgaagtgttttagttattaaagaaaaaactttctgcagttgtgaaagagccagtgttctttacaaagagataattatgttgtgttttatttttaaatattttatgataccttgattaaataagtaaccagtattgattctattttaatcaaataaccaaatcttgtttggttattcttttgcattcccaagatgaggccttaaaatcagaaaaagatattcatcatgtctttt

SEQ ID NO: 824215 - DNA, 536 bp, Homo sapiens
tgcagtatcaactcaagcaccgaagaactacagtgctaccctgaggacaaaaggcattttagatgtcgtaaatatattatgaagaagtcttttctttaaattgtcagcaagataacctcattctttcctttttartagtgatttagtgttgtttcacacaaaaatcaaatgcaatggtatttatggtaccatacattatatgataagaaacaaaaaggtttcaaaggatatcctaaagcttcagttttaagggacataagtaggtgagcagatggttctcagagaatgcagtcacagactttccccttcagaatattcctaaacgatacattttgatttgaagggtcctgttcgtaggtccatcatatgcttctagtaaatcaacactgaaatgagatcatgcataagatttcttttttaaataaaatttctctttaaaatagtgaggtatccaacagtcctctgccttttgaaggccatccttgtaatatacacaatgttgccagctctacttgccacaccagttattcctttca

SEQ ID NO: 824216 - DNA, 598 bp, Homo sapiens
gttttatttcagtgtggtcagaaaaaatacataaagtgatttcaatctacttaaatttgttaagaccrcttttgatggcctaacatgatttatactggaaaacgttctatatgtgcttgagaaaaatgtgtgttatgctgttgttgagtggagtgttctgtatatctgttagatccaattggactataatgttattgaagtcctttgtttccttatgatcttctgtctagttgatctatcccttatgaaaagtgaaatatttaaatatcctactgttaactgcgttactatttcttccttcaattctgctagtgtttgctttatatatttgggtgctctactgttagatgcatatatatttagacttgttttgagttcctggagaactgatccttttatcattatataatgtccttctttgtctcttgtgagtttttgacttaaagtttattttgtctaagtagggctaacctcctttttcctttggttgctatttgcatggagtatctttttccatcctttcactttcagcctaagtcttcatatctacagtgagtgccttataaacagcatttattgtttgaagtttttataatta

SEQ ID NO: 824217 - DNA, 626 bp, Homo sapiens
ttaagagaggggctgacatcattcaaatggaactacttgtcktatctctttcaatagaactattcatggctttgatcctgcctagggtgctgtgaattcacaactggcttctggagctatcctaaatgtttttgggtcatatattgttaagtcagtgtctttgtgggaaaacaaggtctagggcttcctattcttgctgacattactgtaagccattaagttttgaagtggtgtgttatgcaaatccaaactggaacaacttaaaggactgcaaagacattaacataggtatccatggcattgatcaagaatggctgtaagtactacaatactacaataagattgatactgtggccttctggcagagaagaaaagctctccctatgaagtagctttgaataaataagtaaataaaatcaaacttgaattggctcaagcctctagatttaacgatcaatgtataggaaatacagaaggtagcagttcatgttaaatgacaatatggggatgcaatcagcaaaactcagactctacaggaaaacctacagaacaatagtttctttaacaaagtgcaaggagaaaaagcaaaaggagataaagaagaaatctttagattaagagaatta

SEQ ID NO: 824218 - DNA, 575 bp, Homo sapiens
ctatccaggtataatatcagcatttaactaaaccctgtagtcctgaatttgaattgtaagtattagtatgaactcagaatacatttcatcttaaaaactgaactaaacaaagcaaaagtcaaacatccacttacctctaagtggataaattagaggtaattcatctaatgaaaaggccccaaaacaatggccaacagagtagcagagatcactctgtattattcagttttcacactgctataaagaactacctgagactgggtaatttatgaagaaaaaagatttaattgattcacagttctgcatggccagggaggcctcaggaaacttaaatcatggaaggttggggaagcaaggaccttcttcacatggtggcaagagagggtcagggggaactgccaaatacttttaaaccatcagatttcacaagaactcacccactgtcatgagaacagcatgagggaagctgcacccatgatccaatcacctcccaccatgtccctyccttgccacatggggattacaattcaacatgagatttgggtgaggacacagagccaaaacatatcattcca

SEQ ID NO: 824219 - DNA, 645 bp, Homo sapiens
aaggcagccaatcctgggattggacacatgtatgagatggtcctatctgaggagctctgcccgggagactacttcaagcaagtttgaatgaggagccagaggaagagccagctgtcagtagggagaagaaagtgatgtcgcacacaaagatacacagggccagagtaggaggcaccctagcaagagagcacgagaatggagatcttgacatcttgtaactgaggagggtgacaaaactactcagatctgagacctgtcttggatcttgaaggggagggggcaggctgcccttggtttctatgagattcttcacctgtctcttacccccatagttatgttaataacaaactccattacttaagtggtttgaaggaatttctatcccttgcaaccaaaagaacataacaaatgtcaatcttggtcttagtgcatatgaactggaaccatgtgggaaaatgtaatttaccaaaccacacagaggagaaagtctcttccaggggacacagctgatgcaggaataaagacacagaaggccaaggwgagtccagagagtggtgggaaaatcagtgtgaccagagggaaggatgaaggaggatgacagactgtgagggtggaatagcaggatccagattgtcgggggtctgc

SEQ ID NO: 824220 - DNA, 689 bp, Homo sapiens
ggaatagtatcctagggatcctaatcagagaagtttcaagattgttatccaaggatgtttataacagcattatttatgctagagccaacttaaagcaacaaaaaggtcgaaatatagggaacttgtcaaataaatgatgacagagtgatacgatgaatgttaagaagtcataaaaatgttgtttcaaagaatatttaatgtcatggaaaattacaacacaactttgagaaaagaaggacataaaacaatgcatatgcatatatatacatacataataaagtttttaatatgcatttatatattttaaaaaatgctttaaaagaaaatctggaagaaaataacaccaagttgaaataggaaataatcaaaatgttaagagcatttatctgttcacagtaggattatgtgttttaatattttctttttaaatttccaaatacttatcaatgtattatatgctattaataatcagaaaaaaagctatttaagccacatacatatatatatataaatacacacacatatatataaaaacacacacacgtgtgtgtgtgtgtrtatatatatatatatatatatatatatatatatatacatatatatattttttttagatggagtctcgcgctatcgcccaggctggagtgcagtggcacgatcttggctcactcctacctcagcctcctgta

SEQ ID NO: 824221 - DNA, 652 bp, Homo sapiens
agggatcctaatcagagaagtttcaagattgttatccaaggatgtttataacagcattatttatgctagagccaacttaaagcaacaaaaaggtcgaaatatagggaacttgtcaaataaatgatgacagagtgatacgatgaatgttaagaagtcataaaaatgttgtttcaaagaatatttaatgtcatggaaaattacaacacaactttgagaaaagaaggacataaaacaatgcatatgcatatatatacatacataataaagtttttaatatgcatttatatattttaaaaaatgctttaaaagaaaatctggaagaaaataacaccaagttgaaataggaaataatcaaaatgttaagagcatttatctgttcacagtaggattatgtgttttaatattttctttttaaatttccaaatacttatcaatgtattatatgctattaataatcagaaaaaaagctatttaagccacatacatatatatatataaatacacacacatatatataaaaacacacacacgtgtgtgtgtgtgtgtatatatatatatatatatatatatatatatatatacatatatatwttttttttagatggagtctcgcgctatcgcccaggctggagtgcagtggcacgatcttggc

SEQ ID NO: 824222 - DNA, 568 bp, Homo sapiens
agattattgctcagcacatcttttcattttcgtatttataataagtattcatagcagattcttactagcatacttaaattaccataaagagtgtataaaactttaaaaatcccaagaatgcttkatggcatagtcttcataaaaatctagaaactggaaatccagttgtcagttgaatggaggaatttagactgctgactgtaatttgaatcacaaacctagtactgtattcctaatcagcataaacccttttacagttgccaaaataaaaataaagcaaacaaaaataccttcttgatagattaaggcattttgtagtctatggattatatttttccataatagtattttcttttatttatttaaaacccttaacttctttatttgaggttttataaaaattttatattcctatgacctctaattctagtggaagtccaactttgaaaatagccataaaaacgtgataatttatgatagcctaaaagtatccttaatagcacataatttttttctttctttttaatatttgaaaatttggatagatatgtaataaaatagcatagaa

SEQ ID NO: 824223 - DNA, 568 bp, Homo sapiens
agattattgctcagcacatcttttcattttcgtatttataataagtattcatagcagattcttactagcatacttaaattaccataaagagtgtataaaactttaaaaatcccaagaatgctttatggcatagtcttcataaaaatctagaaactggaaatccagttgtcagttgaatggaggaatttagactgctgactgtaatttgaatcacaaacctagtactgtattcctaatcagcataaacccttttacagttgccaaaataaaaataaagcaaacaaaaataccttcttgatagattaaggcattttgtagtctatggattatatttttccataatagtattttcttttatttatttaaaacccttaacttctttatttgaggttttataaaaattttatattcctatgacctctaattctagtggaagtccaactttgaaaatagccayaaaaacgtgataatttatgatagcctaaaagtatccttaatagcacataatttttttctttctttttaatatttgaaaatttggatagatatgtaataaaatagcatagaa

SEQ ID NO: 824224 - DNA, 628 bp, Homo sapiens
atccagctatctggcaaatgtgccaccctccctgcctaagggggcccagcaagtctatgcatcatygagcagttccccaggaaggacatctttttgcgggggggctctgaactttgtttcaagcaactcctgccatctgaaatacgcttcttgatcagtgaactcctcatttcgttctcacacacttcccacctacctctctctcagcactatactataacttacatatttgtcttcactattgggcattgaacttatggagtgtgcttctcttagcactttgaatgactaaatatcaatgtctgctccttacaataccatttctaaggagtcctcgatggaccccagaaggggtggtgatgtctggcccaggccttattgtctttgtatgacctgaatttggcacttaccaggcatacagcaggcacttgagatgaatgggtgaatgtgtccacctgcttggggagcctggggatggatcagggattgattttagcctctggcttctcttattcaccctaccttctaccttcaaaaccttaggcaagatagtgaacctttaagtttttttttttttttgtctatgaaatgggaatgatagtgttgcctacttcataggatgttatga

SEQ ID NO: 824225 - DNA, 490 bp, Homo sapiens
ccaggccggctttccctggcccctttctaccttgtccaggagcctcttaccccctgaggcagcgttgaggctgctcccccaygtccacagtacatgtgcatttgtagcctggagctgacaaggcccaatatgatctggtcctgttctaacgtcatcttgtctgcccgtctcagccttcatctccactgtgcatgttgggagaacctccagtctctcataaaagcccactctctcactatttcaatattcttctgttttagcccattcagctgccatgtggtacctggcagtttcctccagtccagttcccagtggagtgtctgtgctaaagtttctgaggcccgccaagcccatgaaggcccgccacagctgccatctccctcagagttcacctacatcgtgtgatgtcaccttcactgagccacagtgggcaccaagggctcaatgacatcggtgggcccctcttccctgttccgtgtggccagaatgt

SEQ ID NO: 824226 - DNA, 603 bp, Homo sapiens
gcgcatggccctgtgttgaaaatgccgaggcaacaaatactgtaagacaactaatacttgtttaaatttcagttctttttgttgattctttttactccccaaaacaacttgtttgttccgggaaacattgactatatagtctattagctgcatctctccctatcctctctctactctgcctccccttttttgtcttcttctcaacttgcttctcctgttcatttttgccttattctttcaccatttctttcctcctccttcctcacattttctcctcttttcccttctcttcttcctccattatcaagtagtaatggtaccatttctcatacttacaagtgccaatgatggttctactcatcattcaccagacactttccatgtgctggacactgtgcttagctttttactatatgagtgattacagttggcagtgctcggaattcaatgggaagttcaatttaattggcatgtggtttgattaaaattatgctctgacagttttaaaattagattaaaatagactaattratttagattaatcaagataaattttaaaactctaaaattatgtgtatacacttttaataaaatatatagctt

SEQ ID NO: 824227 - DNA, 613 bp, Homo sapiens
gcgcaggctggagtgcagtggtgcaattttggctcactgcaacactgtaacctctgcctccctggttcaagtaattctcctgcctcagcctcccgartagctaggattacgggcataggccaccatgcctggctaatttttctatttttagtagagatggggtttcaccatattggccaggctgggggatttctggtttcttctctaaaagctaaaaagcttggaaggcattactccttccaagcttatttattccttaaaataagaaaaatttgaacaaactgaaaatcaacaatatttcttgggctcatcagataaattaggacataaaactaactgctactcccaaatctagaaaggcaggcgattatagagaaaagcagctaagatccgtttaactgcagcagaagtcactgaaaccataaactggtagggacacttaaatggtaattccgatgaagatctgactgaatgctgagtgtggactagcttgagagtaagaaactcctggggatcacattcttagggaatcccgcacactttgatgactctcacctctagggatcccatcaggttcttacggtaaggaactaagaaaaagcaccttttgtct

SEQ ID NO: 824228 - DNA, 587 bp, Homo sapiens
tttgggttgacacagttcttgcactgattctatttcatctttgtgggcttatctaccttcagtgtttgatattgctgacatttgcatgggtttttaaaaattcttttatcctatttgatgaccttcagggtttgattgtgacattacgtggattcaactgactggctttgtttctggaagattttagggggtcactgcttagcccccaactcctggactatgtgctctcactctgggggcttgtattaagccctgactttgttctcttggctccttgatgttaggaacccactgcactgaggtggggggaggcagtgggtggtggcggaaggtgctttcagaccacaggtcacaacactctgatgggtggtgccagccaaagcattttttagtgcagtaacagtaggatcagtcctcgttctcacgtgctagcagcaacagtagtggcagctgcagcagagtgccagcaggtgccatggttcctgcctccyttcaggcattcaccacagtggtgaaggcaacacagcttggcggtgaggggggtctctgttggcaactgtgtgtatggtcacactggaggtgatgtt

SEQ ID NO: 824229 - DNA, 610 bp, Homo sapiens
agtggcagctgcagcagagtgccagcaggtgccatggttcctgcctcccttcaggcattcaccacagtggtgaaggcaacacagcttggcggtgaggggggtctctgttggcaactgtgtgtatggtcacactggaggtgatgttggctcaggggtggggtgctggtaggcacaggtctgggtgtcttctctgtgtcccggaaggtggagtggtcactcagtacgagggaggatctgctgttcactgtgcagtattagcacaagggcagggtgctggcaggggagaggttggctggttctgtgcctgccaaggctctgtctgctctgcaatggcagttggcggagggtgggggacagacagtctgtgaggtaagcaaagaaaaatccatctgggcagacacacaccagccaagtgatgtgggaccctggggaagctacagtatggggagagagtgtgcaggctggtgtgtggccgtaggcgtcgtgcyactggagctctctgcagctcaggcacaatccaccagtgcagaagctatgggctcccaagtaacccgagactgccctgcaagcagtcatggccagtctggggccccaggagaagccagaagac

SEQ ID NO: 824230 - DNA, 521 bp, Homo sapiens
gcaaaaaaccaaataactcctttaacgatgggcaaaggacataaacagacatttctcaaaagaagacatccaagtgtccaaaaaacattaaaaatgctcagtatcactaatcatcggagaaatacatatgaaaaccgcaatgagataccatctcacaccagtcagaatggctattataaaaaagttaaaagacaacagatgctgccaatgctgctaaaaaaaaaaaaaaaaaaaaagaatgcttataccctgttggtggaaatgaaaattagtctagccactgtgaaaagcagtttggagatttctcaaaggacttaaaacagagcaaccattcaacccagcaatcccattactgtgtatacccaaagggaaatatattattatatcaaaaagacacatgtacttgtatgttcattgccatgctattcacaatagcaaggagrtggaatcaacccagtttcacaatagtaatgacatggaatcaacctaggttcccatcaatggtggactggataaagaaa

SEQ ID NO: 824231 - DNA, 645 bp, Homo sapiens
aatgcgtaatgagtattgccattttatgagtatacagaactaaaagagaagatgctgggaaatatataatgtatatattttagacattccaaatttgagattcttgcagatattcaggtgaaaatatacattattatgtagctaaaaatatcataactcaaaaaaagaagactggaaaaatagatcaaatgttgcatacctatagattaattaaaactgttgaacatatgagatcactttgtatggatgaagaagagacctgagacaaaattctgtaaattgcctacattctgaagaagtcagcagaaaagactgagaagaaccagccaaagatagaaagggcaaacttagaaagggtggtgtcttggaagatatgaaaagggagtcattctaaaaaggaagtcatttaaagatttcatagtatttgcttgaaacttagaagtttcaagtttattagattatctaatggcgagctcagaatgagcaaccttagtaaagtgtttgggtatagaccagaaaacagctgggaatagagtaygaagtaaaaaatatatatataagcagttgtgaacaatttattcctggaaatttgttattgaatgaaaaaaatggaaaaagaagttaaaagtgacagaacacaaagga

SEQ ID NO: 824232 - DNA, 612 bp, Homo sapiens
gtttgtgtgtgcgtagagggtgtctgtgtacacattctttctcttgtgccattcttggaatatggcataaaaattggagaaaagtgaaggacaaaagacaagaaggctmatgtcacacaagtctgaagtctgttacttaaaaaaaaaaaaagttttggaaaactgaataagatctgtttactacttatgggccagacctatgtcctatgattgccacttactacaacggtgtttgtaaccaattcatatccaccattagcaaagaaattcatcagatcagttattactaaactactagctcaagatggcagaacaagctcacattttatcttcttccacttaattgcatctcacaataacaaattaaagataaatagaaatataaatatgaagtatatgaaatatggttgtaatgaaaaaatgcaaaagcatgaataaatttgactcttataaatgacattctatttcttcaattcattatgttttttataaattatgcacttacttctgaattaaatatgagagctctgaataagccagaaaagctttgaaagtgctggaatgttactattggagtaaggactgatcagttgtggtattcacaacaatgac

SEQ ID NO: 824233 - DNA, 556 bp, Homo sapiens
gtgattggagggggctcctccaaggtccaggagcagacctggtgggggtcagagccccccaaccaccaccacagaacactgtcgctaatgctytgaaatacaaaagagccacgcctgtaatcccagcactttgggaggctgaggcgggcagatcccaagctcaggagatggagaccatcttggcgaacatggtgaaaccccgtctctactaaaaataaaaaaaaaaattaaaaaaataaaaaaaaattagccgggcgtggtggcgggcacttgtagtctcagctactcgggaggctgaggcaggagaatggcgtgaacccggggggcggagcttgcagtgagccaagatcgcgccactgcagtctagcctgggaggcagcgagactccgtctcaaataaataaataaataaataaataaaaattaaataaagaaatacagaagagccatgaggcaatgtaagagcctatctgctggccattacacttaagcgccatctcctggattgcatcccaaatggcaacaaaaaattcagccaataaataatcacctgttta

SEQ ID NO: 824234 - DNA, 480 bp, Homo sapiens
ttctactttagattacgtgagttcttgctgattatgagacacgtgactggacaaattattcaatctttcagagtctattttacatttggaaaaaaggggaaaaacaaaacctaccctacctagtgttttggtcctttcagaagtagggtttattgatatgtttatataaatgcacacatgggtcaaacttcatacaccctctctcctaagttaattttaccttatgttaaaatacagaatgaaaaggtttacagtgtatccgtttatttttttagggagaattacacacatttccaagattacttgtgtaatttttaaaagattatttgtacaaatgtaaaatacttttgaagagtcacactcaccaaaataattagrttttttaaaaacacattttatatatgagaatgagttcacatcataaaagagaagcaggatttgacagttcattttttggacataaaaacccagttactgata

SEQ ID NO: 824235 - DNA, 643 bp, Homo sapiens
tgctgcagaatctgtagtgctgttagccctcacattgttcatatttgtaatttgaatttttttcctgattagtatagttaygaaaattaataacagaaaagcaataaaaattaatgaaagtaaactatggttcttcccatccagtcagtctataatttttaatggaggaacttaaaaagttttcattcaagtttgttactgatggataaggacttactcctgttgttttgttaaccgtttcctcattgttttggatattctttgttttttttcttcttttgttattcttttatgatatggtgggttttgtagtaataacatttgactcatttctgtttctcatttgtgtatcttttctaccagtgaattttatacctttgtgtgttttcaggacggtatgtattatcctttaatttcccagtgtaggatcccttaagcatatcttgtagaacctgtctaatgttgataaattccctcagtttttgcttatctgggaaatactttttctctttcttttattcatgaaggatggtttttctgggataggattcttgactgccagtttttgttgttgttgttgtttgtttgtttttaaaaatttttagtactttgactatatcattccattcttcctggcctacag

SEQ ID NO: 824236 - DNA, 643 bp, Homo sapiens
tgctgcagaatctgtagtgctgttagccctcacattgttcatatttgtaatttgaatttttttcctgattagtatagttacgaaaattaataacagaaaagcaataaaaattaatgaaagtaaactrtggttcttcccatccagtcagtctataatttttaatggaggaacttaaaaagttttcattcaagtttgttactgatggataaggacttactcctgttgttttgttaaccgtttcctcattgttttggatattctttgttttttttcttcttttgttattcttttatgatatggtgggttttgtagtaataacatttgactcatttctgtttctcatttgtgtatcttttctaccagtgaattttatacctttgtgtgttttcaggacggtatgtattatcctttaatttcccagtgtaggatcccttaagcatatcttgtagaacctgtctaatgttgataaattccctcagtttttgcttatctgggaaatactttttctctttcttttattcatgaaggatggtttttctgggataggattcttgactgccagtttttgttgttgttgttgtttgtttgtttttaaaaatttttagtactttgactatatcattccattcttcctggcctacag

SEQ ID NO: 824237 - DNA, 601 bp, Homo sapiens
acataggcatgggcaaagattttatacaaaaatgccaaaggcaataacaacaaaagcaaaaattggcaaatgggatctaattaaactaaagagcttctgcacagcaaaagaaactgtcatcagagtgaacagacatcctacagattgggagaaaagttttgcaatctacccatctgagaaaggtctaacatccagaggatataggaacttattctacaacaaacttaaataaatttacaagaaaaaacaaataaccccattaaaaagtgggcaaaggacatgaagagacacttctcacaaaagacatacatgcagcaaacaaacatgaaaaaaagctcaatatcactgagcattggagaaatgcaaatcaaaaccacaaggagatacaccatctcatgctagtcagaatggcaattattaaaaagtcaagaaacagcagaagatggcaaggttgctgagcaaagggaatgcttttacaatattggtgggaaattagttcaacaattgtggaagacagtgtggtgattcctcaaagatctggaagcagmaatatcatttgacccacaatctcattactgagtatatagccaaagcagtataa

SEQ ID NO: 824238 - DNA, 619 bp, Homo sapiens
ccagctcctttctctctgtgtctctcctgctccactgtggtggtatgacaggcttccttcctcttcaccttttgccttgactataagttcctaagcccttccggtcatgcttcctgttaagtctgtggaagagtaagtcaaatctcttttcttcataaattacccagtctcaggtatttctttatagcagtgtgaaagcaaactaatacaggacattggtaccaggagagtggggcattgctataaatatacctgaaaatgtgctaccaactttggaactgggtaacaggcagaggttggaatgtggagggcttagagaaagacaggaagataaaggaaggtttggaatttcctagatacttgttaatgattttgaccaaaatgctgatagtgatgtagacaatgaagtccagggtgatgtggtctcagatggagatgaggaacttattgggaactggagcaaaggtcaccattgttatgctttagcaaagagacttacagcatagcacctgctctrgggatctgtggaactttaaacttgagagagatgattgaggatatcgagtgaaatttgctatgcagcaaagcattcaagaagtgatctgattgttcctaacag

SEQ ID NO: 824239 - DNA, 463 bp, Homo sapiens
ctttaggtcccacttgtcaatttctgtttttgttgcaatagcttttgaggacttagtcatgaattatttgacaagtctgatatcaacaaatgtatttcctagttttyttctaggatgcttatagtttgaggtcttacatttaaatctttaatccatcttgagttaatttttgtatatagtgaaagatataggtttagcttcattcttctgcatatggttagcaagttttccctgcactattttttgaatggagagtcctttccccattgcttggttttgtcagccttgtcgaagataagattgtcctaggtatgtggctttatttcagagatttttattctgttgtattggtgtatatgtccatttttataccaatacaatgctgttttggtaactgcagccttatagtatattttgatgtagagaagtgtgatacttatggctttgttctttttgtttagga

SEQ ID NO: 824240 - DNA, 623 bp, Homo sapiens
cgcgagcgcgacgcacgggttcctgctcggcctcctgaacccagtyccccggcggcgcctggcgtctctatcgcaggcccctgcggtttcgcccgtcgttggcttcttggtcctagcaagtttcgatttcgcggtgccccgtatttctacctcttgtccaaataactagccaaaatgtgatttctcagcctaagcaagtccgatttagggcatcggtctagccctggctgcgatttcttggtcctaggaagtcactgtttagctgtagcaaggcagacttaaccgtgcgatggtgacttttctttttctttggttctttttcttttctctttctttcttgatacggggtccggctctgtcgcccaggctggagtgcagtgcgcgatctcggctcactgcaacctccgcctcccgggctgaagcgatcctcccaccccagcctccggggtagctgggaccacaggcacgcgccaccacgcccgggtaattttttgtatccttcctagagacaggatttcgccatgttgcctgggctggtctcaaactcctgatttcttagtctgaccaagtcagagtttagttatttcttaccgtagcaagttgagagttattccagtttgcga

SEQ ID NO: 824241 - DNA, 595 bp, Homo sapiens
ataagaaccctaaatttacggttggctgggcagaagcgcgggtagcctgttgatcgcatttgtggctggtgtctgaagtgggggcaattttgtggtactgagcacttaacttgctctaaatctgggtggtgtcagattcaattgttggacacccaattgatgtctgagaattgctgttgaaacggagtagagatagaaaagcctctcatcgttctcagtgcacttgggacttatttctatgtgatcatcattgcacactctactgtccaacttggtacctcatactgtagacttatcttaaaactccagtacaaatacagtagaacactggaggactaaatatccagtttgcttcagtacttgaagcaaatatacatcagttgttaacagctgttttatgttctacataaagtgctttccaactacaaaatgttattcaacatacagtttatcaccagtagatagttttcctctactwttgcaatcaaatttactggcattctgggtacactgatagcttctataccttttgggaaaagaaaaatgaactacatctgcatctcaaatctacctcgaaaggtcttgacaaatgtga

SEQ ID NO: 824242 - DNA, 594 bp, Homo sapiens
gaagggccttgacaagtcaggagacccaatttggggtcgcaattgtcactcactccccaggcgtttgctttgatcttcccctcccaccatactacttcttctgctacctggtttctccctggtatttgaggatcctccaattgccttctggtcttacagacgggagaataaaggaaaaatggcatcgtttccaccttaaaagttacaagcacttcaccagatggtacagcctaggtagagcctttgtaaaacaaatgcccgcccactgcttcaccctcctcatttccacctcagcaaagcattttagcagaaaagctgacccagagcagtagctccctgctataatcctagcactttgggaggctaagtcaggagtatctctttagcccagaagttcaataccaccctaagcacaaagtgagatcccgcctctaccaaaaaaagaaaaaaaaaattgaaaaattastcggatttggtctcgagtgcctgtagtcccagctactcgggaagccgaagtgggaggatctcttgagccctagagatgcaggctgcagtgaatggtgatctgggaccgcatcactgcagttcagtctg

SEQ ID NO: 824243 - DNA, 497 bp, Homo sapiens
caattgaaactttatgcccactgattagtaactgcccatttcctcctccctcccagcccctagcaacccgtattccactctttcaatctatttgagatagctcatatgagtggaagtgactattttagattcctcatataaatagaaatatgcagtttatgtctgtgactggcttacttcacttagcataatgtcctcaaggttcatccatgtggttgcatatgcagaatatccttgttcttaagagctgaatagtattccattggatacatatactacattttctttatccattaatctgttgacgaatatttatttcctctcgtggctactgtaaatagtgctgcaatgaacataggagtgctaaaacttcaagatcctgatttcagttcttttggataaatgttcagcaagkgggattgctgaattgtatggtattttaattttttaaggaacattcatactgttttccataatggctgcacctattcctgcca

SEQ ID NO: 824244 - DNA, 681 bp, Homo sapiens
agccactatggaaaacagtgtgtaaatttctccaaaactaaaagtaccatatgattcagcaatcacattattgtttatccaaagaaaaagaaatgagtatattagagggatacctgcactaccatgtttattccagcactattcacaattgcaaaaatatggaatcaacctaagtgtctgtcaacagatgaatggataaagaaaatgttgtatacacacacagtggaatatatttggccataacaaaatgaaattctgtcatttgcagcaacacagatggaactggagattattctgctaaatgaaataacataatatttatgttatgttattaggcatagaaagttaggcagagaaagacagatttcccccatgttctcactcatatgtaggagctgaaaaaaattgacttcatcaaggcacagattagaatgattgataccagaggctgggaagggtgtgtgggttgggccaggtgcaggcggtgaagagagattggtcaatggctacaaatacacagttagatagaaggtataagttctaatgtttgataacagagtaggatgacaatagttaggagcaatatatggtatatttcatggcagcctsaagagagatcttgaaatgtttccaacacataaaaatgataattactcaagatgatagatatgccaaatacac

SEQ ID NO: 824245 - DNA, 508 bp, Homo sapiens
cctgagaactcctccaaaggtttgaaatcaggcccactcaacctgccactacccctgtagctggcacccacccacatgcaccacctataggttagagaaatggcccacccaacacattgcagccaatgccaacatcagcatgggttgcttgggtccctgagggttgtcccactactgttactgtcattgcccatgccatgcttgttgcccaggggcttgagaaaccattcacctatttgacccaccatatccaattttcatatcaaaaaaagccagctggaggcttaagaattgacctgtctatacctgccaatgcaaattccagcatacactgccctgggtcccatgaaaaggcactctcagtccacagctgccattcctggggcctgaagactggcccactgagcatcccagtccccaggaaaaattygtcacagcctccactaacaattataccctaagccaccaggaaatcacagacaccactgacactgtttacagctaaaga

SEQ ID NO: 824246 - DNA, 523 bp, Homo sapiens
gagagagagcataacaagaggttaggtcagagagatgatgagggctaagccatgttgaaccacactggccatcatagtacttgggcactcactcagaatgaatataggagccctcagtagcrtagatttggagcagagtgacatgatctggcttgtattttgaagcaatcacttaggggtggtgttgagaagaggctgtaggggccaaggacaggaggaggaaggccaggcagaagctactgaagtgattctggctggtggctccaatcaaaatggcagcagtgcaagtggcagtgcaggtagtgagaagtgaacatcatcactgctgggtaacactgccctaaaaccaaagtggcttaaaataatttattatcctcattctgtgggctggccaagtggttcttctgatggtttcttctggactcattcatgtggctgcatctgcggcaaggctggctccctcacatggccaggggaccttggttctccttcatccagcctccagcctttcatcccccagtgc

SEQ ID NO: 824247 - DNA, 574 bp, Homo sapiens
attaattttttccatcatagtaactattttactatatatgtattttgtgggtttttattgttgtttttttgagacagaatccyactctgttgcctaggttggagtgcagtcacacaatctcggttcactgcaacctctgcctcctgggttcaagggattctcctgcctcagcctaccaggtagctagaactacaagcgcgcaccaccatgcctggctaatttttgtatttttagtagagatacggtttcaccatgttggccaggctggtctccaactcctggcctcaagggatcctcccaccttggtctcccaaagtgctgggattacaggcgtgagccactgtgcccagcctatatatgtatttttataacatcatgttgtatgccttaagtacacacaataagaaaaaaaaatttagatagaagtttccgggtagctgtgtggaaaaatcaccatagcaaacatgatgggatcccccttcatgtttcccacactcagtaaagcagccctgtgcagacagagctgctcctctgtgcttttcactattgctttgggcgatagaatagctataca

SEQ ID NO: 824248 - DNA, 605 bp, Homo sapiens
attacctagatcttccctggaagaaatgctaaggaaatcctatgaggtgaaatgaaaggacactatatagtaacttaaaaccataagaagaaataaagatcttaataaggataaatacacaggcaattttaaaagctagtgttattataacaacagtttataattctgctttttattttcyacatgatttaagacacaaatacatatattaataaaacaattaatagtgtaagagctggtattattgtaactttgctgtataactccacattttgttttcttcataatttaggaaaataatgcattttttttttttttttgagacagaatctcaccctgtcacccaggctggagtgcagtggcacaatcacggctcactgcaagctccgcctcctgggttcatgccattctcccacctcagcctcccaagtggctgggattacaggcacccaccaccatgcctggctaattttttgtatttttagtagagacggggtttcaccttgttagccaggatggtctcgatctcctgacctcgtgatctgcccgcctcggcctcccaaagtgctgggattacagccatgagacactgtgcccggccaatg

SEQ ID NO: 824249 - DNA, 637 bp, Homo sapiens
cctgattcaaacacgtcatgtctgggcacggtggctcacacctgtaatcccagcactttgggaggccgaggcgggcagatcacttgaggtcaggagtttgagaccagcctgrccaacatggtgaaaacccatctctactaaagatacaaaaacttagctgggcatggtggcgcatgctaataatcccagctactcgggaggctgaggcaggagaatctcttgaacccgggaggcagaggttgcagtgacccgagatcatcccattgcactccaacctggatgacaagagtgaaactctgtctccaaaaaaaaaaaaaaaaagaaagaaacaaagcaaacaaacaaaaaataccataaaataaaataaaaaattaggccaggcacagtggctcacacctaatcccagtgttttgggaggccaaggcggaggattgtttgaggccaggagtttgagaccagcctgggcaacacagcatgactccatctctataaaaacatttaaaatttagcctggcgtggtgatgcacacctgtagtcctagccactcaggaggctgagatgggaggatctcttgagctccagaattcaaggctgcagtgagctatgatcatgccacagcactccagcctgagtgaca

SEQ ID NO: 824250 - DNA, 571 bp, Homo sapiens
gcagagctttctaaatctcgggtacagtgactgaagcactgggctgggagtccgagtgcctgagctgtggtctggttctgctgcctactaagctgaatgacccaaaagcctctccacccttccctcacccactctacctaccttgagggctgtaagagaattaaatgagaagtcatgtctgaagaagtactttatattttataggttatatgagtatacgaaatgattattctcagagtatcatgagatggtaatatttggaaatcttagatgtgatttagtcttctggttttttgtttttggatttcttaggtgacacttcggttgtgtgttttaatttttgttctttttttttttttttttttagtggtatgtgtgcaacagagagaaattatgcgaatcactccaggctgtctttgttcagagttaccttgatcaaggaacacagatcttcttaaacaacagcattgagaaatcgggctggctatttatccaattatatcattcttttgtgtcatctgtttttagcctgtttatgtctagaacatcyatcaatgggtaagtgaatctt

SEQ ID NO: 824251 - DNA, 594 bp, Homo sapiens
tttgtattcatttctcaaaccactagttttaattttttttwaaaaaaaagcacagacaggaatgctcacttttatccatgtaggtaattgccaatccagctagccagttacctacaaaatattggaatagtgagcccttgatccaaaacatttggaagctactagactctgaaaaattggcctaaaggcagctctttggtaaaactataatcaggtactttgaaaggctggctctttttcttcttttccactcattcctctgacatacaccatctgtcagatcatgctgggttgcttctgtcaaccttccgcacatcttgaaagagagagcttttgaacgtttttatttctcatgaatttcctgatgaaaatgcagaggttttcttattggatcaccattactatttatagaagactaggagttagtgtctatccatagaagtagtagctcgcttaggctgccagtacacgtgactaatcatggaactatcttacacaacaattattgacctgcttaagtggtctctcctggtacttacaaaacttaatatgcataggaatcaccgagggatcttgtcaaagtgcagaattctg

SEQ ID NO: 824252 - DNA, 642 bp, Homo sapiens
tttggactccaattaccttttcatggctgcatgggataagtgtccatttacttgagaggtatgatacttctacattatccacgtaatgctatctcttgagtgtgctacaggattgctagctgaaaayagctttcttttagaaaaagaggggatagcttttcttttattttttccaactttgtgggtacctattaagtagaccagggaggaagatacaatctttgttttaaccatttgctatatcaaatctgtagagtacctgctctttgttgctggagtgagagcaatcaataataacaaaatccaaagataatcccattgctcctcttgagaggatatgcttcacatgctagagtgaactaccccatacttccaacttcccttcagtctttgtatatttcacaattaagtgatctttatcttctcaaatagaactaaattaagcaactgaccaaggcattttaaactttcaacatgaccaatgtacatgtggtgaaagtcatcataaagtccgcacctatagcatctgttccagcactctgtatttacaattaattaggaaatacgacagcaataatgagttccacttgaaagaatttcttaagatacagaaccataaaatgaagaattacctttactaga

SEQ ID NO: 824253 - DNA, 458 bp, Homo sapiens
ttaccaatgtctctgaatttttataaaccttcaaatttgaggagcattattttgttcttacatgtggcttcttttcctaataatggcaaaatagtacacaaaattaaaggaacagtaaatgcattaataaaaatatttaaaaagaggcataactttttccattcaagacaaaaattcgtatgccttatacttataagatataattttaaataaatagtgtcaaactttacatagatacgtagatagatagatagatagatagatagatagataatcacagatattaagctatatagggtactttatacatgcctaagatcatcaaaataaccctgcagattagacagggaagattttatgagttctgttttataaaatgrgaaaaacttttacagagagtcaatgactcaccaaggtcatatagttagttaataaaattgtacttacatgtgtaagca

SEQ ID NO: 824254 - DNA, 541 bp, Homo sapiens
cattagtcattcagaaaaggaaaattaaaactgaaatgcaatgcacaacacacttattagaattattaaaattgaaaagaccaacaatatgaagtgctgtcaagaacagagagaaaatgaaattcacacattctgctggtgagaatgtaaaatgcaaccatcactttgaaaacagttcagcaattccttaaaaagctaaacatatacctacatgtgatccagcctttccaccctgagatatttatcacagcaaataaaagcatatgcccatataaaatcttgtacatgaatgttcatagcagctatatttgtaatagccaaagactagaaacaattcaaatgtccatcaacacataataattatatattgaaaaacaatatgataaacaaaataaagtatatgcatacagtgsaaaactactcaacaataaaacaaataaacttgatgcatgcaaaaaatcaatgaaaatcaaaattatcatgctgagtgaaagaaaccagacaaaaaaaatacacacatactgtatgattccatttatat

SEQ ID NO: 824255 - DNA, 608 bp, Homo sapiens
tattatgaggtcatctgtgtttgttaatgggtacccattgaagttaggctcctatcttccccatagaaactgagagatagaagtgttatcttcctcmaaagggatgattccctggtctttgagaaagacattcctggttgtaaaactaacaagatgcagggagaatatttatatgcatttcaaagaagcttaaaaagaatttgcaattagaagttttctgaagtaaatgttctaagaaaacggaggtactagagttagagctagagttagaaaggagcctatttaaagttcagtcaagtgaggagaacattaagattgtcttgaccagagtcaatcaactaaatttaaacttccataaccttgggagagttatttaaaagctttactatatatgtaacagcccatgtgtgagatttttatatttgtttcttgtttatgtaaacaaataaatagtgaagcaaataaatttctgtttatttttcacaacagttcattggttggtactatcatctccattttttaaagaaagaaatgagaaagagtaaggtacatatcaagactatagcactaataagtataaaaaatcaaaattttatcccacatataat

SEQ ID NO: 824256 - DNA, 627 bp, Homo sapiens
tctctcagagaagcgttcataggaatgtgcctcgtctccaagggtgtctgggaaagagctactgactactgagctctgaaacagccacctgaactgcaggaacttagcaagaggaacagctcagatccaagaagagaaaccctttctttttgtactgtttatctactgccctctaatgacagcacttaacaacgtgacagttgaccaaggatatttacagggtccatctctgttattgcagatctggcaatgaagaatggacttggaagtggtagacaatacaattgataactggaagaacagataacagaacagcatacaggttgactttccttggaatatgtgaatccttgagcaagaacttccttaaaagggggtttgggcagacagacattgatgtgacttactttatacagatttcatgcagtcaaaaatgagaactctttttaaggctttgaggaagcacattcagtttgcttgtactttattgtgccattgtataaagtgtccygtattctcaggagtttgtgggctaaatatgctttatattcagtagctaggtaatttggaacattggcttcattcaagtagcttaagtcatcagttgcccagctattgttttcttaa

SEQ ID NO: 824257 - DNA, 499 bp, Homo sapiens
ggggccacagatgcacaccacacatggctaattttatttgtatgttctgtagggacaggatctcaaaatgtttcccaggctggtatgaaactcctgggctgaagcaatcctcccaccttggcctcccaaagtgctgggattatagggtgtgagccactgtgcctggcctaaagattcattctttatcatcattattaaacatttcacattgtttatcatctttagtgactgtaataaaatacgaaacagaaaaaagagaaacagtggaagggcaaaaacaaaaaatatatattttttagaatatatgattgcatagcaagaaaattaaaaagaatcacctcataactactataattaataaaagaacacagatattggccaggcacggtggctcatgcctgtaatcctagcactttgggaggctgaggcgggcggatcacgaggtcaggagatcgagaycaccctggctaacacggtgaaaaccatcttggctaacatg

SEQ ID NO: 824258 - DNA, 606 bp, Homo sapiens
tcaattacctgccactggatcccttccaccacgtgtggggattacgggaactaaaattcaaaatgagatttgggtggggacatagccaaaccatatcatttccaccacttacccctcccaaatctcatgtcctcacacttcaaaacacaatcatgccgtcccaacagtcccccaaattctaacttattccagaattaacccaaaagtccaagtccaaagagtcatctgagaaaaggcaagccccttccacccatgagcctgtaaaaatcaaagcaagtagtcacttcctagatacaatgaaggtacaggcattgggtaaatacagccattctagataggaaaaatggccaagacaaaggggctacaggccatgcgagtccaaaatccaacagtgcagtcattaaagtttaaagttccaaaatgatctcctttgactccatgtctcatatccaggtcatgctaatgtgagaggtgggctcccatggccttgagaagytctgcccctgtggctgtgcagggtacacccccctcccggctgctttcatggctggtgttgagtgtctgtggcttttctaggtgcatggtgcaagctgtcggtgaatctac

SEQ ID NO: 824259 - DNA, 653 bp, Homo sapiens
atataaatttaggtttgcttgactaaaaattgcctcggatgatagctaataaaaaagaactagataaatgtttataaaagtgagggtctcagatcaaattggtcaaaatattgaagtcagagcaataayataaagtatgtctatatggcataaaaatttcactacatgtgtcatgcaggaagcaaaaggaaaaagccagaaaacaaacaaaaactgctgcaaatttttctcccaccggccacagaaacagctttacccaaaattttggtccacagccttcattagattacctatcaggacaaataaagtttagccatgtgatgcacagtggctcacacctgtaatcccacactttgggaggctgaggtgggcggatcacttgaggtcaggaattcaagaccagcctggccaacatggtgaaacatcatctctactaaaaatacaaaaattgtggtggcatgtgccggtaatcccagctactcgggaggctgtcaggagaatcgcttgaacctgggaggtggaggttgcagtgagccgggatgaggccactgcactgcagcctgggctacagagctagactctgtttcaataaagtaaaataaaataaaaaagttaaacatgtgaacaagtcccaattttatgagaaatataat

SEQ ID NO: 824260 - DNA, 585 bp, Homo sapiens
gcctagtggactgctctggggtccatgtgaagatgagggcatttctcctccgggctggagggagagagtgggaggggcgggatgacctctggcagtgcgtccccgtcacctggactgtctggctttcccccagattaaagagtggagggtgagtgtctggcagccagatgagtcagactgggaggcttctctcccagcctggctgcctccttccaccagcagccctgcctccaccccctgctagaggtaggggttggagttcagcctgtttcccctccaatgttgttccccccacatcctgagacttaggggtgaccctgggttgagtggactggtttattctgctgggcccagcgcatgcatctgagtgtgtgcccaggcgtgcgtgtcggcgcaaacatcatccattgtgaaatatcagtgttttcatgggtgagtagtaattactgggtaatgctttaaaacctttcctgaaggagcgcaaagccatttttttctaaagtcaggagtacattaaaaggattaccatktagatttgatttttagataacactaaaatggatcccaaatggacttcagcaaagg

SEQ ID NO: 824261 - DNA, 585 bp, Homo sapiens
gcctagtggactgctctggggtccatgtgaagatgagggcatttctcctccgggctggagggagagagtgggaggggcgggatgacctctggcagtgcgtccccgtcacctggactgtctggctttcccccagattaaagagtggagggtgagtgtctggcagccagatgagtcagactgggaggcttctctcccagcctggctgcctccttccaccagcagccctgcctccaccccctgctagaggtaggggttggagttcagcctgtttcccctccaatgttgttccccccacatcctgagacttaggggtgaccctgggttgagtggactggtttattctgctgggcccagcgcatgcatctgagtgtgtgcccaggcgtgcgtgtcggcgcaaacatcatccattgtgaaatatcagtgttttcatgggtgagtagtaattactgggtaatgctttaaaacctttcctgaaggagcgcaaagccatttttttctaaagtcaggagtacattaaaaggattaccatgtagatttgatttttakataacactaaaatggatcccaaatggacttcagcaaagg

SEQ ID NO: 824262 - DNA, 574 bp, Homo sapiens
gtttgctaatattttctccccttctgtgggttgtctgtttactctgatgattatttcttctgctgtgcagaagccttttagtttaattaggtcccatttatttatttttgtttttgttgcatttactttgggttcttagttatgaattatttgcctaggccaatgtgcaggagagtttttcctaggttatcttcttgagtttttatggtttcaggtcttagattcaagtcttttgatccgtcttgagttgatttttatataaggtgagagatagggatccagtttcattgttctacatatggctagccagttttcccagcactatttattagatagggtctcctttccccaatttatgtttttgtgtgtattgttgaagaccagttggttttaagtatttagctttatttctgtgttctcttttctgttgcattggtctacgtgtctacttttatactggtaccaygctgttttggtaaccatagccttgtagtataatttgaagtctggtaatgtgatgcctccagatttgttctttttgcttaggattgctttgggtacttgggactttttt

SEQ ID NO: 824263 - DNA, 589 bp, Homo sapiens
tctaaagatgccccaaaatatggaagccactttggaactgggtaacaggcagaggttgaaagagtttagagggctcagaaraacatataaaaatgtgggaaagtttggaacttcctagagacctattgaattgctttgaccaaaatgctgatgtgatatggacaataaagtccaggccaaggtggtctgagatggagatgagtaacttgttgggaaatggagtaaaggtcactcttgctatgcaaagagactggaggcattttgtctcttccctagagatctgtggcactttgaaattgagagagattatttagggtatctggcagaagaaatttctaaatagcatagtattcaagaggaggcagagcataaaagtttgaattttttttttttttttttttgagacagagttttgctcttgttgcccaggctggagtgcaatggcacgatctcagctcactgcaaaacattgcagcctgatgatgcattaaaacaggaaaacccattttctggagagaaattcaagccaactgctgaaatttgtataagtaacaaggagccaaatgttaatcactaaaacaatggggaa

SEQ ID NO: 824264 - DNA, 505 bp, Homo sapiens
gaagggacttgctttgtctcagatgagactttgaactatggacttctgagttaatgtgggaatgaattaagactttkggggactgttgagaaggcatgcttggtttcgaaaggtgaggacatgagatttgggaggggccaggggcataatgatatggtttggctgtgtccctacccaaatctcatcttgaattgtggctcccataatccccttgtgtcgtaggtgagttctggtggaaggtaattgaatcatggagtgagttttcgccatgctgttcttgtgatagtgaatatgtctcatgagatctgacagttttataaagggcagttcccttgctcgtgctcttttgcctgccaccatgtaaaatgtgcctttgctcctccttcaccttctgccatgattgtgagggctccccagccatgtgaaagtgtgagtccattaatcctctttttctgtataaattacccagtctcaggtatttcttcctagtagtataaaaatggaa

SEQ ID NO: 824265 - DNA, 374 bp, Homo sapiens
aggagacttataaaataaagcatggaaacaaaatgcacatatactggtttcttcttttttataaagataaaattcacatgacataaaagtcaccattttaaccattttaaagtgtacatttcatggctttcttatgttcacaatgttatgctatcattaccactaattccagaatagttctatcaccacccccgccaaagaaactctatacccaattctcccatcctctatttcctggcaaccacaaatcaactttctgtctctatacatgtgcctactttgaagatttcatataaatatggtaatgggataataaaaatatmatgtaataggcagccctttggtctggattttttcaattagcaaaatatttt

SEQ ID NO: 824266 - DNA, 605 bp, Homo sapiens
ggaaatgtatcaatccctgggcatgtgcctttggcagacgctggattaccaccaaatatgcccagcaattattctccaacatttcccagcttcgctgcaataagggtagcatgtgacttattctggccaatgaaatgagagtgacactgaagcactatcacttccaagcacaagcactttcactgaggcagcgaaaagcctgtttgtgagtatccagtctcttttcttctctgctgtagtgactgggaggtcatgcttcagatgaggcaataataagatgcttgaacttctgtcagatttgattctcttgtggagcccaggaatttgcatccaagtccaatctagtttagaaatcttgatagcctcagcttctacaaaataccaaaaactcatgtcttgtgactgcccattggatatctttttattagctttaatgtcactctaaaatattttaatttttttctcatttccaaacatttttgtacctgtttgccttcaacatcaggcatagttaaaygtcaaaggcagaattatcttgtactgcaacagtgtctttgcattgtatgttaaaaaatacatatgcttagtggtcagattctgattaa

SEQ ID NO: 824267 - DNA, 533 bp, Homo sapiens
ttaaaacaaatgaacttatggagacagagagtagaaggattgttaccagaggctgggaagrgtcctagggtagtggggaaggtaggatggttaatgggtactgaaatatatgtagctagaatgaataaaatctggtatttgacagcacaacagggtgactacagtcaacaataatttattgtacattgtaaaatactaaaagagtgtaattgtattgttcataacacaaataagggataaaagcttgagatgattaatactccatttacttttatgtgattattacacactgtatgcctgtattgaaatagctcatgtacctaacatatactcctactatgtactcacaaaaattaaaaataaataaaaataaaagagaagtcagccaactattttaaaataaagaatctgccttttgacttctccccacaacaccaccttctactcatacatataacttcaaaacaaagcaatagcaatgacagcatactcaaacttgacataatgaaattatctatactccaaatgaaaat

SEQ ID NO: 824268 - DNA, 576 bp, Homo sapiens
ttcccatttatatgtcctgcatggtattgccaaggttgtcttctaggcttttttatagttttgggttctatatttaagtttttaatccatcttgatttgttatttgtatggtgtaaggaaggagtccaggtttattcttctgcatatggctagccatttatcacagcatcatttattaaataaaaaatcctttccttgttacttgcttttgttgactttgctgaagagtagattgtagtaggtgtgtggccacatttctgggttctcgattctgttccattggtttatgtatctgtttctgtaccatcaccatgctgttttggttactgtagccttgttgtatatattaaagttaggtagtataatgcctccaaatttttctttttgcttagcatttccttggctattcaggcgttttttttgttttcacattaattttaaartagttcattatagttctttgaggaatgtcattggtagttccataggaatagcattgcatttacaaattgctttggcagtgtgaccatcttaaccatattgattcttctatccattagcatgcgatgtttttcc

SEQ ID NO: 824269 - DNA, 573 bp, Homo sapiens
aaatcaagtctcaacatgagttttggagggaacattcataacattcagtactgtatcatacaaagtatatgggcttggccatcagactgcagtatattcaagtcctgtgcctgccatgggttagcagtcctcagtttgagcaatgttcttgaaaattctgaacatcagtattctcatttgtaatggagaaaaatactagtgaatttaatgaggcttaaaatagtagacatatatgtgggtgctcaatacacatttattcaaccacacccttctcatatccctttccaccattggcttaaatcaaatttaatttgtaagtagagtaaaaattaatacaatttcagtatgctagttatcacagagcagataaaacaatgtcctgaagtgtattgtgtggtgtacagtgttacaacacctaaattattcaatttaattccaggtaaattataattgmttcctgagattctaggtggaatatgtgtatttggaggacagagttactctgagtgtagttgaagagtaaaactatacttaaaaaggaggattagtcttaatgggaaaaataagataaaa

SEQ ID NO: 824270 - DNA, 634 bp, Homo sapiens
atgatgctattacagaagaaattgaagggggacggatttctgtaagtatgcagtcctttatcacccccttgtggccacttaaacaactggaaggctcctagcagtttacatgcattataaaggtttaagttgcagtcatcattaaagcaccagctgacaggtttgattttgtcatcactcaaatgtgatccagaaattaatctagccaaacatttattattacaattcatataaatcaattgccatttttctttacctgggagagacaacaatgttttcatggtcttgccctggggatatataaagcacctcagctactatctaccacggtgctgttagaaggaatttaatttaaatgtaaacagagacttctgtttacagcctccagggaatgaatgattaagctagaaaacaatcaagactcctaaattgtcgcttgttgagaaacacagtctggaatttgcatacacacaccctaaatattcagtgctctcaatctaaaccactgtcttaggccaatacagaagttaatgtgcctttcacttatgaggttgcctaaaggctttagtctgggaaaagcagcgacaggattccttaaaactccttaatgccawtccagtagacctgaagaacc

SEQ ID NO: 824271 - DNA, 449 bp, Homo sapiens
ataatacaaataaaaaccaatatagtataccaactatttatatagcatttacttgtataggtattataagtaatatagagatgatttaaactatgtagaaggatgtgtgtaggttttatgcagatactacaccatttacataagggacttgagcatccatggattttttgtatcacttgggggtcctggaaccaatccttccaagggatggcaatactcccttgacagccccatctagtctcttggctctaaatatcaactactggctgacagcttctaaatgtgtatctccgtcccagacctctcttctgaaccccacattcatggatccaattgtctacttaacatatctcagattcaacgtttttgaaatkgaattgctaaattttatccccaacctgctccatccacagtcttccccatctcagtggatgacagctctagaaagt

SEQ ID NO: 824272 - DNA, 290 bp, Homo sapiens
aaccttggatcctatacctattaatccatgtaacatcaagcaacagtgagaggagaagagtctttaaaaatatggttcagtgcctagaagtagctattgtaaatgcaaggtgrcaaggaaggtacactaagaggaaagaggcttcctctatccttccttactcaccattgagggaacagaatagattgtgtgtgtgtgcgtgtatagggggcagtcagaaaggaggcatttccagtgaaaccctaacatgcaaaatgcccatactagtttatgcctagtacactcaaata

SEQ ID NO: 824273 - DNA, 706 bp, Homo sapiens
ctgcagcagttcactgccgtcttctcggatccatctgatttttgtaggcaccagagtggtgaactaaatggagatatgatgawgactaactctatcctttaggtctttaagggtgccgctagcttctgccattccccctgggatgtaatactggatttgatttggtcttgatcaggaagatggtgggggcagtttcagagggcttcattagcccttctccactctaatttcaccccagaggagtagtatcaatattagagttgtgccagctgccaagaatctccattccaagtatacatttggaagctgagaaaatgatcactaggtgggttatggacccagtgtgcccactgtgagctagatcttaggactccatttattacttgaccccatatgtcctccctctaagaggagtggcagatgatgctgaatctacatgtatcattgtcaactgggaccttgtgtccaagagtctatgatgtttggctatttctcttttcccagtgtatattacttgaagtaaatgactgtaggttcctttgtgggaaggaagagggaaccattactatgtactgccatagcattgccaggtccttcctcctggggatctggcctctccttcagtcattcagtttcagatctggaaactggcgtatgtctggaaactgggcaagggagcatgagactactgcttccagcctaatca

SEQ ID NO: 824274 - DNA, 706 bp, Homo sapiens
ctgcagcagttcactgccgtcttctcggatccatctgatttttgtaggcaccagagtggtgaactaaatggagatatgatgatgactaactctatcctttaggtctttaagggtgccrctagcttctgccattccccctgggatgtaatactggatttgatttggtcttgatcaggaagatggtgggggcagtttcagagggcttcattagcccttctccactctaatttcaccccagaggagtagtatcaatattagagttgtgccagctgccaagaatctccattccaagtatacatttggaagctgagaaaatgatcactaggtgggttatggacccagtgtgcccactgtgagctagatcttaggactccatttattacttgaccccatatgtcctccctctaagaggagtggcagatgatgctgaatctacatgtatcattgtcaactgggaccttgtgtccaagagtctatgatgtttggctatttctcttttcccagtgtatattacttgaagtaaatgactgtaggttcctttgtgggaaggaagagggaaccattactatgtactgccatagcattgccaggtccttcctcctggggatctggcctctccttcagtcattcagtttcagatctggaaactggcgtatgtctggaaactgggcaagggagcatgagactactgcttccagcctaatca

SEQ ID NO: 824275 - DNA, 602 bp, Homo sapiens
ttggcctcccaaaatgctgggattacaggtgtgagccaccatgcctggcctatgcttctaatcaccacactatatttcctctaaagagagggcaagacttgaatcaactggatttgatgctactgagtaggagtagacaagagaggtttgcaaggtaattactcttccatgatgtgagattatgggctaaaatgtttcatagaacaaaaatgccatgaataaagtttaaaaagaggaaacatacagtgcacaaagaattaacatctggaatagatagtgaaaacaaatatatataagaaaaagacaaccctacagagaaatgggcaaatgtataaatagacaatagatgaagaagtaagaatgaaataaaactgaccacataaaaaagatgcttaactgcactagtgatgctggcatgcaaagcaaaaaaatagagagatccattttctcccacactggctaaaactgaaatttgaaaatatcaattttgtggaaaagtgaatattcttagtagaagtataaatcaggatagccmctgctaggggtgggggtagatttggcagtattaattgaagttaaaatattaaaattaatctttgaag

SEQ ID NO: 824276 - DNA, 516 bp, Homo sapiens
tgtattgtctgtacagttcataaggcctttgtcattgttagtcaccttcgatgtgaatatcagtagggccattaaattaaagctggcctaaaaagttttcaaagtgctactgtttccaactgatgaaatcttcagttttctggattttctgggtgacgattattttcaattctttttttctggtgatatatacaagaagttacagcagatatataaagggaagatcagaagcctgctgtccaagttcatcaccacttgttcctataagacagatttgtagattcaatgacaattagataaaataaaaacaaaaaaccaaactgttgaactgagtgaaccaaaggagatagtgtcctgagtctgagatccacaactccactctccaaactcccacccattagctgtgtgaccttgtcaaatgcagcttcctcactgtaagatggggacartaagagtacctgacttaaaggaggattacaagagataatacacagggggttttgcaaagccagctat

SEQ ID NO: 824277 - DNA, 637 bp, Homo sapiens
ataccaattataatttaaaagttcttttccaaaaagttagggaatcatttgctccttcctgtggctcaatggggagtgattataattgtcgcttttagtacagctctagagacttttagctatctctagacagctaactacttttgagatatgtaactttatgactgacactttaggggcctccaggtctactataggcttacttctggcaaaagagttcctggcttccctagatgacgtacccactgtgccctagcctggtctgccaaattttaatgaccaagtatgtaatgcaaatataaatggtccccaccttaggatggttctacttaaaaattttcagtgtattgtactcctcatcataagtcgaggagtacaattatcctcctcaaccatgtcaataaatactcagacttgtggaaggttctgggccaggctctgggaaagcaaagaggtgacaaagtctttgccagaaaattctgcccttcagaggaagagagcagaagaggtcaaggaaaaattaagtccccagagggcagaaaccrtacctacccgggcacagtaacgaacacataataaacagcctagaaatgtttgttattactcataattgttacggcaaacactttgggtttcg

SEQ ID NO: 824278 - DNA, 540 bp, Homo sapiens
gctcacagcttccacggcctctccaggcgcacgtcttcccagcacctccatatgttcactaacctggaagctcttcaamccctccactccctatttcccactgtcctttgggtttttatggagtctttgttacataggcatgattgatccaatcattggccattggtgatgaaatcaatctccagcccttctctcctcccctgaggtgagaggttgggctgaaaattccaactctttaatcacagagtttgtttaccagggcaaccagccccccatcctatagttatctgggggctttccagacgtcccctcattaacatgaactcaggtgcggttaaccgggcttgttatgaataacaaaagatgctcctttcacccttattgttcttatcgcttacaaaattccaagggatttaggagttatgtaccaggaacaggaggagaacaggtgtatatcccttactctaagtcacaatattatatggcctgactgcatcttcatctcatgccactcttgcccttgttcacaatgcttttgtc

SEQ ID NO: 824279 - DNA, 554 bp, Homo sapiens
ctggtaacctgatcctgtcatcctccatgtcaggggtcagcaaatgttttctgtgaagggccagataataaatattcttagcttcctgggccacatggtctctgtcacaactactcatttctgctgttgtagcttgaaagtagccacagacaaaatataaacaaacacgtgtgactgttccaataagtcttcgaagtttgaattttgtacaattttcacatgtaataaaatatcccttatttgattttctggtcaattatttaaaaatataaagacattcttggcttgtaggttgtacaaaagcaggatttcacccatgagctactgtggtttgccgacccttgctctgtgctatcatcctgttatattttcatcatctcgccgaaatcagaaattatcttatttattcgttctaaaatttgttgttggtggcaaagaggttgaatagaagttataagtaagagttaaaaatatattttaaaattgtcaaagggttttakcagcctatgctgggcctgttaatatcagaactaattagagttagccaagttaca

SEQ ID NO: 824280 - DNA, 539 bp, Homo sapiens
tttatatcccttcttaataacttagtgtgaaactctaggacatattctcttaaagacctcttccttactaatagacaaacacaaatcattcttaaaattaaatattgttttctagctctagcataaaaaaatagtagaggctgtaagacaaaagctgacaaaacacaaagctttcacaaaccatggtttatacaatactttatcttacactattaacactttattgaaaatatttctattgaaaagaactctggaaacacataaaaatatttggtaagaaaacaaaagcacatctttactaccagtgtgaattactacctgacaattatcaacttctcaaataagaacattaacctacttgtgattgaagaaagaattatcctgtctatggatgacataagcaacttggccaggacagaaccaatggatgaaaccacatataawtccaatttggccagttaacttatgtaagtgaaatgaaacagttaactttattcattaatatgatcaaaacattatctttacttccaagatctgca

SEQ ID NO: 824281 - DNA, 582 bp, Homo sapiens
ctctctctgtctctaactttgtttctcatattctcttctctctctctccactttttctctcctttctgacttccttactctttctttcccctctstccttctccttttcttccccatctcctcctcttcctcctttcttctccttctttcttcttctctttctcctccttttcttttcctctcttgtcttcctctctctttctctttctcttcttttccctctctcttctctctgtctctcatttttcttattctctctctgtctctctctgtcttcctctctcccgctcacctctccttttccattaaagtctgcaaagagttcccatttcttctagcaattgagatttctagacatcaccagggtggctcatatataccctaggatgtgattacctatttgggctgttgaaggagtgaaggatgtgccttcccaaaatatgctggattggtatcttgcatattttgagttgaaaacactagagaaattgtagtttcagaaagtgctagccgacctgtttcttcctgtaggcagcaagccataaagattcctttgggaggggactcctccccgtaccaggg

SEQ ID NO: 824282 - DNA, 565 bp, Homo sapiens
ccttttttgaatggaaacaatgtacgtcttacatgtattgatcgatatctcatgtctccctaaaatgtagaaaaccaagctgtacgcagaccacaytgggcgcatgttctcaggatctcctgaagtctgcgtcacgggcggccatggtcactcatatttggctcagaataaacctcttaaaaaaatttacagtttgtctcttctcgttgacaccctagtcttttggtagcatctgtaagacccatgagggaaagctacaactgcaaatttgataaggtttctcaaaccattgtttgattctgcaagagtaatgtcacctggggtgctcttgtagaaggggacccttgaaccacaacatttatagaaataaacctttcctttccaaatttatgagcttcacagttcttcacctaacatcattaatacactgagaatctattgcgaacccaaaatatctgagacaggtctcagtcaatttagaaagtttattttaccaaggttgagaacgtgcacctgtgacacagcctcaggaagtcctgacgacatgtgcccaaggtgttcaggg

SEQ ID NO: 824283 - DNA, 640 bp, Homo sapiens
tctggggtaatcaatatgattttcaataactgtttaacatgactcttgagaatctaggtgagttctgaaaatataagagcaaaaattgtgtatgaaaaggtgtattcgtaggtgacatatctgcactagtgatctccaaaccttcagagggttcattgataaggaaggggtaaaggtcacctaaaatacttctctttaagcaacatggatttgagtggtcctgttctctgtccattttcaatggtctacggccttttagacagctatgaaaagagctttgtctaaagcaaatctttagatggtcctatatgaccttaccctaatttcccagagacattgggtgacttttcctttgtgaggaagatcaggcagagaatatcttaaaagaggataaaaaagatgctgaagaaatgaagggaatgtaattctttcaaaaccttgccataaagctacctccatgtgctaagaataatttcacattatagatgtctgctactttcgggtcttttatgtaaaaatagtaactttcaagtagcgtatataatggtcattttaaccagctggagcagggttcttcatrttaagccccagcagcctgaccatgacttcctgggacataactaagaaacagactggtcca

SEQ ID NO: 824284 - DNA, 624 bp, Homo sapiens
agttgttcctcttcaacttccatttcggccaaaaaaaaaaaaaaaatccaagaattataagccctttccttcagcagatgtcctctttatagacactggacttcaytcaaatttaacctttgaggacaatgccaactctatgtttcttttgatatgtaagtgctacactttgtcaaagcctaattctctacttgagtctgttatgtcagagagggacataatgtgtgattttctgctttcaccttaactgtaaaggtgaacttcaaattttcaattagaagtaatagtctataaacttccacataaaaatgtacaattttctttcccaatacatagtcttattctttctcattagagagctatattaaacaatggggctttgcttgtacatggtaacgaaagtgccatgcctgaaaaaaaaaaaaagccataaaatgggagcccaaaacaaaggcttgagaaatttatataaagatttggggttttggctgggtgcagtggctcacgcttgtaatcccagcactttgggaggcagagacaggcggatcatgaggtcaggagttcaagaccagcctggccaagatggtgaaaacctctctctactaaaaatatgaaaaattagcc

SEQ ID NO: 824285 - DNA, 656 bp, Homo sapiens
ttactcacttccactttggggacctttttactgtaacaagctgcctccactctttgacctactgtcctgatctygttctttcttactggtctcttcttagaccatatctcttttgaaagtatttgaggaagaatttcttctctgtaggttggagtcacaacttgatatgttaacacacaaagccttcagttctgacagctactggaggctgcctcagaataggtttattagccttgagaaatacaccaaagatagtttaatcttctcttctatcaggaatttcccattgcatttcactttttttgtcatgaaacaatttaataaactttatgtaaaccttaagttttcaaacctgccagtctttgagcaaaacactgtttttcaagaagggaagcactgagaagtagagcaagatgctgagtttacacatcattgcaattacattaattcacaaattgtcctatgttgggttaccccagaattagagtctgaatcgaatatttgaatttaagtagtttattagagaggagattccagaaagcactgggataggaatgaggaaagtaagactgggaagaaacaaatgtcagtaaactatgtattatcaagccaattatctcttggggcaagtgaggctcaatcttgctggagaactc

SEQ ID NO: 824286 - DNA, 535 bp, Homo sapiens
actctaagcttctcgcttccctcatcacaactcccactcctctgtctttgcctttcctgcctccatattataagactcttgtgattacatcactgggccacccagacaatccagaaaaatctccccatctcaatatccttaacttaatcacatcagcaatgttcccttcaccacataaggattagtttgtggacattttcagggaccattatctactctaccacatcaccttcaccatttgatttttgctgtgtttgcttaccaatatactattaatactatttacttcatatttgtcttaaaagttttttatttaatcttatctgtgaactcaatgggctaattattttttttctaaaacatagtaaagtaacattttaattatgaaaataaaaaagtttcatttatcttccagcatctcctgggytatgagtgataggcataccacactgattataaattctgctatgaattgactacttgcaaggattggccaaaaatttctctaaaatattacataatggggaaagtctag

SEQ ID NO: 824287 - DNA, 558 bp, Homo sapiens
tttgaactcagattcaactaaaccacagtttttcttaggtatctagcttgctgcctgcagattgtaagactcctcagcctctgtaatcatataataataagccrattccttataatacatgtatgataatatctgtatcatacatagatacagatggagaggtggtatatgtataactatagatatggatatggataggctagagctagagatataaatagttataaatacagatacatcctattggttctgctcctctggataacccagattaatacagagataacatagcatcagtagattggttttagggaggctataaaactcctcaaaatgaaaaactatttctccatgcaaaaatatgtctgtgtgtgtatattggcatctgtatttttctggttgaacatccttaattttagtaagattctcaaagtgttctctcattgaatactaagaaacaaagttagagattctgttttattttaaatcttgtggaggataagaattttgtattttcaacattttctcctttccctttagtaattcaaggttatcaag

SEQ ID NO: 824288 - DNA, 533 bp, Homo sapiens
atgaatgagaaataaattgcagtagtgtttgctgcttggggtataaactggcacaccactttggaaaactgtttgatatttgctcctaaagtcttacatatggctcccccaggacaccgcaatcccctcctagatgtacacccaggagaagtgagtgcatttgtcctccaaaagatgtgtgcaagactgcttacaattgtcaagaacccacatttctatcagaaaccaataaatgtatggtggcatattcatacggcagaatagtccccagcaacaaaaataaaagaacaaaccactggctcaacaacaatgtgggtggacctcacagacataacatcgagcaggagaggccagacacaaaggagtagggactgtgtgactccttccccacacacttcaagartaggcagcactgatccaaggtgacagaccccagatccatcgttccctcctggacagggactgtctgcaaggggcagagggagccatctggtgtgagggagatgccctctgtcttgccctaggtgttagtt

SEQ ID NO: 824289 - DNA, 533 bp, Homo sapiens
atgaatgagaaataaattgcagtagtgtttgctgcttggggtataaactggcacaccactttggaaaactgtttgatatttgctcctaaagtcttacatatggctcccccaggacaccgcaatcccctcctagatgtacacccaggagaagtgagtgcatttgtcctccaaaagatgtgtgcaagactgcttacaattgtcaagaacccacatttctatcagaaaccaataaatgtatggtggcatattcatacggcagaatagtccccagcaacaaaaataaaagaacaaaccactggctcaacaacaatgtgggtggacctcacagacataacatcgagcaggagaggccagacacaaaggagtagggactgtgtgactccttccccacacacttcaagagtaggcagcactgatccraggtgacagaccccagatccatcgttccctcctggacagggactgtctgcaaggggcagagggagccatctggtgtgagggagatgccctctgtcttgccctaggtgttagtt

SEQ ID NO: 824290 - DNA, 533 bp, Homo sapiens
atgaatgagaaataaattgcagtagtgtttgctgcttggggtataaactggcacaccactttggaaaactgtttgatatttgctcctaaagtcttacatatggctcccccaggacaccgcaatcccctcctagatgtacacccaggagaagtgagtgcatttgtcctccaaaagatgtgtgcaagactgcttacaattgtcaagaacccacatttctatcagaaaccaataaatgtatggtggcatattcatacggcagaatagtccccagcaacaaaaataaaagaacaaaccactggctcaacaacaatgtgggtggacctcacagacataacatcgagcaggagaggccagacacaaaggagtagggactgtgtgactccttccccacacacttcaagagtaggcagcactgatccaaggtgacagaccccagatccatcgttccctcctggacagggactgtctgcaagggrcagagggagccatctggtgtgagggagatgccctctgtcttgccctaggtgttagtt

SEQ ID NO: 824291 - DNA, 600 bp, Homo sapiens
ataaaagctctgactcccagagtgcctagtgcagagtttcacatatgatgaatactaatgaatagagtgccattgaaatagacctatacaygttttgatgctaaagtcctaactctcttcttcagagtaatagccagccctcagagctttatcactccttacgttacatgtcatgctccatctatgatgacttctctccttaattgaatggatctttctttcatgatttttactctcttaatctgtttgcagatgccatcctcactactgagcacaaactctgtcctccttcacttctcaccttctttgggtcttaacttagatatcacttcctctaagaagtctttcattactcccaaatccatgttagattccttttctaggcagttccatagaatccatctccgtacagtttataaatattatacgtgtatctgtttctatttcccattagatcataacttctctgaagtcaaggacctttcactgtcttatttagtattataatctcattgtctggcccagtatgtgatacacagtgtgtgcttaataaatgaatgagcattgctttggcaatgccttaccaccaccaatatgcaa

SEQ ID NO: 824292 - DNA, 610 bp, Homo sapiens
tccacccactggccttcaggtagaaattctcagttggttaaagtaatgagctcatcctggatgtctagtcaccaggcatctgtctacatyagccagagggcatggaacccgcagcccagagacatgagcaacaacacacagccagaacaggctgagggcttttcacccagttcctaaggaaggtgaaaacaaagcacctcacctaggaaaggaaggctgctcctgggagaaaagactaggcccacctcttcagccccctcattcaattccaatcaagacacaaggaaaaacaggctgggggagttgggaggctgaggtgcgcagatcacttgaggccaggagtttgggaccagcctggacaacatggtaaaacctcctctccactaaaaatacaaaaattagccgggcatggtggtgcatgcctgtaatcccagctacttgagaggtggaggttgcagtgagccgagattgcgccactgcactccagcctgaaagagcaagattgtctccaaaaaaaaaaaaaaaagatacaaggaaaaacgaaaagacaaaaacaaaagccaagttagaaaacagaaaggaggaaagaggaagtatggtttaaacgctg

SEQ ID NO: 824293 - DNA, 569 bp, Homo sapiens
catagtaagaccttgtctctgaagaaaagaaaatcagatggtgtgtacctgtagtccaagctacttgggaggctgaggcaggaggattactcaaatccaggagttccaggctgcagtgagctatgatggcaccactgcacttcagcgtaggtgacaaggtgagaaactgtgtaaaaaaagaagacagaagttccgagatactaagtggcttaattcacatagtagatgtggatctgggatttcaaagcagtcagtagcttacaaagcccactccttcctcactctaccaaaatggaatgtctctttcatttgagggtattgacaactcttgagctccttgaaaagttattaccaaataatattttagttttggtgacgctttagattagtttcattactggttcacctaatttaacagttgatcagctataggtacaaaagagaatgtataatgaacatggctgaatttcagaatcktaaagaattagttataaccttcacagagaagccagaaggactgaggcgatacggcagggcttggggaataatttgctctgatcaaaggatgt

SEQ ID NO: 824294 - DNA, 548 bp, Homo sapiens
tgagcaacctcagacctacctctgcgtttgataaaaatttaatcactttctgagtgtactgtcctaaaaaaaataactgagaaccatatgtttaaaacccatattactaatttcaagagaatttaatgaaattgattaaaattttaaattaagttattaaaagagcagcaaaattaacgcatggaaaacagaaggaataaattaatcaagataaaaataatagtgaattattaaacagaaagtagtagaattcataaataaatccaaacctatttccttgaggggaggggtaaggagaaaacaaaaactattagtaaatcccattggaaaataagactgtataaattcgaaatgagatcagcagaataactacaactgtagggtgaattaaagaacttacaaacttataatgatttgttcaagcctattcaaataaatatgaaacctgaaygaaatgggtgacttctaagaaaatacaaatctccaaaattgatctcagaagagatctatggcaatggaagaaatgggtaatattttcaaacaccaaa

SEQ ID NO: 824295 - DNA, 643 bp, Homo sapiens
cctattcaggaggctgaggcaggaggagcacttgtgcctggggttaaagacaagcttgggcaacacagtgagacctcccatctcaaaaaataaaataaggctaggtgcggtggctcacacctgtaatcccactrctttgggaggccgaggtgggtggatcacgaggtcagaagatcaagactatcctggctaacacggtgaaaccccatctctactaaaatacaaaaaaattagccaggtgtggtggtatgtgcctgtagtcccagctactcgagaggctgaggcaggggaatcccttgaactctggaggtggaggttacagtgagccgagattgcaccactgcactccagcctggagacagagcgagactgtgtctcaaaaaataaaataaaataaaataaaaaggtaacataaaataaaaattaaaaagatatttacaatttgtaaaatatttcattcgtttttatctgggaagaaataagatataattttctaaggcttctcaggcctgtgcttcataggtggaagcattacatgttctggtttgccagggatggttgatacgtttatgcccacagtcctgccatatttgtcgataaagcctccttttcatctcacaagtgtctcctttggtagataaat

SEQ ID NO: 824296 - DNA, 546 bp, Homo sapiens
ctgaggcaggaggagcacttgtgcctggggttaaagacaagcttgggcaacacagtgagacctcccatctcaaaaaataaaataaggctaggtgcggtggctcacacctgtaatcccactgctttkggaggccgaggtgggtggatcacgaggtcagaagatcaagactatcctggctaacacggtgaaaccccatctctactaaaatacaaaaaaattagccaggtgtggtggtatgtgcctgtagtcccagctactcgagaggctgaggcaggggaatcccttgaactctggaggtggaggttacagtgagccgagattgcaccactgcactccagcctggagacagagcgagactgtgtctcaaaaaataaaataaaataaaataaaaaggtaacataaaataaaaattaaaaagatatttacaatttgtaaaatatttcattcgtttttatctgggaagaaataagatataattttctaaggcttctcaggcctgtgcttcataggtggaagcattacatgttctggtttgccagggatggt

SEQ ID NO: 824297 - DNA, 627 bp, Homo sapiens
aatttttcaaaagacatggtatacattttcaactgtgttctaatggtcatgagaataatttgtgatgagtacattaattttttgcaaaatgataactgaatgtaaaggactagaacgcagcaatcttaaaagtcaaggaccatgaaacatggggaagaatttaactttttaaaacaatcaagttcttggccaggtgcagtggcttatacctgtaaccccagcaatgaggtgggaagactgtttgagcccaagagctagagaccagcctggggaacgtagggagaccccatctcaaaacaaaacaagacaaaacaacaacaacaaaaaacccaaaaaacagcagacgccaaaacaattagctggacatgaaagcacatgcctgtggcctcagctactctggaggctgaggtgggaggattgcttgagcctgggaggtcaaggctgcagtgagctgtgatagaaccactggactccagcctaggtgacaatgagatactgtctctaataataataayaacattgaattaatttctcatatatagaaatagcaaaaaagttattactttaataaagcagtaaacacatatgttaactagattcccatgtttatagaggccattttaggag

SEQ ID NO: 824298 - DNA, 506 bp, Homo sapiens
ttaaacacactgtattttttagcttttctttatgttaaagcaaagtccaaaataatactatttaagcagcatacaagttaatttctctcggcygggcgcggtggctcacgtctgtaatcccagcactttgggaggccgaggtgggcagatcacgaggtcaggagatgagaccatcctggctaacacggtgaaaccccgtctttactaaaaataaaaaaaataaataaataaaaaataaataaaaaaataaaaaaaaaacttagccgggcatggcggagggcgcctgtagtcccagctactcgggaggctgagccaggagaatggcatgaacccgggaggcggagcttgcagtgagcagagatcgtgccactgcactccagcctgggcaacagagggaagattccgtaccaaaaaaaaaaaaaaaaaaaaaaaaaaaaaaaaaaaaaagttaatttctctcgcatgtagtagtccaaagagaaatagtctccaaatataacgctgat

SEQ ID NO: 824299 - DNA, 374 bp, Homo sapiens
agtagttttagtacttcttatccaatgggctactcacctgaaatagtcctcgtgtcccacctctaatcacacacacacacacacacacacacacacacacacacacacaccacaaccctccctttggtataactcatggagactgaagtcagccctaatagtaaaacattctgtaaaaggttgtgcctatgtaagtttattcatggtgggcaccaaaaccctatattaaaggtcaggtagatacaaacttcaaacaaacattgttctataacttgtgtggtaggtacaataatattccccyatacacacatgccatgatgcctatgtcttaatcccgaaaacgcatgaatatgtcaccttaccttgcaaaaggg

SEQ ID NO: 824300 - DNA, 631 bp, Homo sapiens
tcatccatgttgttgcatatggcaggatttctttatttgttaaggatgaataatattcccttgtttatatatcacattttctatgttaatttattcattggtgcaatgggttatttctatgtcttggtcwttatgaataatagtgcaaggaacatgggggtgcagatatatcttcaacatacagattttaattcttctggatatatagtcagaagtagaatttctggatcatatgatagttctatttttaattttttgaagaatcagcatactgaattagaatttcttcacatccttgacaatacttgctgtcttcaatttaattttattttatttttgataaaagccattctagcaagtataaggtcatatctcactgtggtttttgatttgtatgtccttgactattattgatgttgaatatcatttcatatatctgttggctatttctatattatctttagagaaatgtctattcaaggactatgccaattgaaaaaatcaggttaataggcatttttgctattgagttgtaggagctctttatatttgtggatatgaccacttatcagatacatagttacatttttactctgttgattattattttttgctgtgtagaagctttgta

SEQ ID NO: 824301 - DNA, 584 bp, Homo sapiens
tagttgaaatcctcaaatgcaacttscagatacccaggcccttcctggcccccaatccacataattggctcctccagttctaccacccaaacccccaaatttatggcattttttcctcctatttcatggtttaaaatggctccaatctcttcttttacaaagttattccaacctgggaaaagttaatttccccaaaccttataatgcttggcttagagtagagttcaggggaaggcaacgcagaagcctgacatgccggaaaaagagtaaaagggttttttgtttgttttgtttgtttttttaccagttgggcttttggtttctctctacctgtgcaaactggtaaaagggatcatgaggatcactgtttatattctctgtgaagttttaattggtgaaaaaggatatgtgaagttggtcttaagctgtagccagtctggtgtgctttgcatgtctttctgtatggttctgtcaaaagaaagggtaccttaggttaggatgcaggcccaggaccccataagcctgctgttcaagccagcccaacaaaatggtcagtaacaaactttgttacaggcccccatctt

SEQ ID NO: 824302 - DNA, 564 bp, Homo sapiens
gcaagatcacaagatattagacaatgattcaccatgatctttactcaccagtgataataatggcatagaacagctgctaygtattcatagaaacatactgcaattacctccttttgttcaggtagaatgtgttgtttggcacaattagtgtttcattcactgattgatcaagattaacaggatttttagtgtcatatagtttatatttttcctctttattatggcctgtctttgggagaaattacttaacagttgtttgtattctgcaatggtcaatatatgcaaaaactgagtgaaatcctactgtgtgtaaagctcttgccttcaaggaaattttctgtcattaaaatgtgccacactagtaaataggaagcaaaataaaatgtaacattactaatttagagatgattagctatatttcttctagcagataacaaaatggtgctgtaatctacattatagatcttaagaatgtgactccaatcataaaaatatgaaaacagtcactttttttctttctagagtttaatgcaatgtgttctgttcaaaagaacacaatcagaa

SEQ ID NO: 824303 - DNA, 564 bp, Homo sapiens
gcaagatcacaagatattagacaatgattcaccatgatctttactcaccagtgataataatggcatagaacagctgctatgtattcatagaaacatactgcaattacctccttttgttcaggtagaatgtgttgtttggcacaattagtgtttcattcactgattgatcaagattaacaggatttttagtgtcatatagtttatatttttcctctttattatggcctgtctttgggagaaattacttaacagttgtttgtattctgcaatggtcaatatatgcaaaaactgagtgaaatcctactgtgtgtaaagctcttgccttcaaggaaattttctgtcattaaaatgtgccacactagtaaataggaagcaaaataaaatgtaacattactaatttagagatgattagctatatttcttctagcagataacaaaatggtgctgtaatctacattatagatcttaagaatgtgactccaatcataaaaatatgaaaacagwcactttttttctttctagagtttaatgcaatgtgttctgttcaaaagaacacaatcagaa

SEQ ID NO: 824304 - DNA, 723 bp, Homo sapiens
gcccttgatatgcattaactcatttaatacaataatcctatgagatagctattatcaatattctsattttacagatgaggaaaccgagtcacagaggggtgaagtaacttgtgcaaagtgacgtatttaatgagtaacagaattgagcttcaagaccagagagattcatacctcaatgagttccactgcctctcaaagtctgactctcacggcacagagcgggtatttaattgtaagtgcctggcacagagtaggagtttagtgaatgttgaatcagtgctttaggcttttatgtgttttgattgccaagactaaaggcagggaagtcccacagatcggttactaaaaagggcaagtttctatttgttaaacttatctctacaaaacgtttccaggtatgtccccattgttgtgtatcctctcctgagctggcctgctctagatccagcacttgatcttcctgaggcaggggagagcctgtgtctccaggcagaccctgtggccaggctgtgtgttgcatcctcattaccataatctctgcaggctgcgggacctcatccctctgcctgaatattcctttccctctctgctgcaattctgcactgccaccgtgatcttccaggaaacattctttttgtcctgaaaggtcaattcacagggactgtcctctggaagatcccaactgccacctccatttctcagttcccccacaccgggcacacg

SEQ ID NO: 824305 - DNA, 591 bp, Homo sapiens
gcttactgcaacctctgcctcccaggttcaaacaattcttgtgcctcagccttcccagtagctgggattacaggcgcatgccaccaagcccggctaatttttgtatttttagtagaaatggggtttcaacatgttggccagctggtctcaaactcctgacctcaagctatccacccgcctcggcctctcaaagtgctgggattacaggcatgagccactgcacccggcctctattcactttaaaatgatcatgatctactaattgctttcataacccaatagttaacaatctccattttgaaaaataggggcatagaaatctacttgggtttgaattcagattctgctacttccaagctgagtgcctttaagcagggccctcagcctctgattctcggtctgtaacctagaggttttaatcccgcctgctggagaaggtggatgtgaggattaaacatatataaagcccaaagcatcacagctgggcatagcgagcagtcagtaaaaggcagaggttgatatgatgtcacatgagaaactgagactctcagcrgaaggaatgaggatcccttgtctaagcctctaaaaccc

SEQ ID NO: 824306 - DNA, 574 bp, Homo sapiens
gagagatgaaaaggaaagatggagagagagacacacagagacagaggggcacacacacatacacagactgattttatcagggatcgaaacaccatagggagaatgttttaaagttaccctgtasgtaataacacacatttgatgggaagtgattctgtatgtcactgtaagatttattcagatcacagaaatgaaccagcacctcctcaatgatgaatcattaattacttaatttagtaacttaaatcattaatgacttaatttaattttaaatgttttatccccaaaaataacgaaaatggatgttaaaaacttaactgactttaacaactaaattaaatgttaaagctggttatacatccgtgtcaagttcctcactgattcccacctccattcataggcacctcaaatggatgtgaaacatatttaatgaatgggtagcatacatttaaactatttgtaacatatatttgatagcaagtgattctataatacaggttgcatgtttcttgttacaaaataaatccacatgaaggctctgaaaaattctaaaaacaaagtttgtttatttaat

SEQ ID NO: 824307 - DNA, 528 bp, Homo sapiens
gtcttttgataaccagctatggccaatcttggctggttttggacggctttgtgactctggaagggtcactttccatcgctgggtcttaagggacctggccaagctgaactggggactctgctgggacacacatgctctgtccagctgtgatctccctgggcctcctcagccagtgctgcctccccactctcctgagagggtgtgatcccacctccatgctgtagacggtgtgcttattgtcgaacaccaggctctcctgcagcagctggtggtcaccctccagccggtcaatgttagtcttgtagttgataatgttctgctcctgctgccgtagcccagccatctgctcctccagagagccagctagccctgctgccagccgccccacttcctgcagggggttcccaggcagcatgagggctcccaactccctgtggcccagcyctggccccatccccccaggttggacccactatcccagcccttacctccaccttcgcctggatccagggtccaatggcattggcc

SEQ ID NO: 824308 - DNA, 592 bp, Homo sapiens
ggtctgtgttcccaaaaacctgataactgagtaataatggaagataaggtttaaaaatcacaaaacataagggctgatggaagagaccttatatgttacctatactcatgtcattatttcacagatgtagaaactgagcccagaaagtacatgtgttttattgaagttcacatagctagtagcccagctgggactacaactcagatcttgtgacttccacaacatatcattctgcctctcaattacaatatgaagcgtttaaactattcttctcagcatagtctaatctagtacttaaagagattttaccgcacagttaggacacacgagcagtgggatcaggctggagaaaaaaactaagcattgtcatggtgcacatagtctattaatattttgttaggcaacaaataaggtacgtacaaacaagagactaccagacagctattaaaaagatgatagaaaactagacatagatctacacgtggaaaaatgactgttacatmccattcagtgaataaaggttgtagaatgttacatttatccgtatttcatagacgtaaaatttatatatgtctaaatacatatgtgtaat

SEQ ID NO: 824309 - DNA, 597 bp, Homo sapiens
gagtctgacaccttttaaagtcttaaaataaacatttaccatctattttctttggggaaggtttcatctatgtaacaaggccatctttgctagccaagcttcttcctttctgtctctcttcacatgtcttgccactaaacctgactgacctgtttctggccatgctctgagtctgcattctttactgtggcctcagtatggcatataagtttctgttactcactgggaagttggccttttcattttgaagcctcctgtgtatatacatgtcttactctattcttgcattgctataaatactggagacatggtaatttataaaaaaaagaggtttaattggctcatggttgtgcagactgtacaggaagcaggatgttggtatctgctcaacttctgctcaggaaacttagaatcaccgtggaaggcaaagggagcagcaggcacttcacatggccagagcagcagcaagaaagcaagygaggaggtgccacacacttttaaacgatcagatctcatgagaacacactctctattgcgaggacagtaccaagagggatagtactaaaccactcatgagaaaactgcccccatgatcca

SEQ ID NO: 824310 - DNA, 638 bp, Homo sapiens
tatgcaaatagactagaatatccagaagaaattgataaattcctgaacacatacatcctcccaagactgaaccaggaagaagytgaatccctgaataaaccaataacaaattctgaaattgaggcagtaataaatagcctatcaatcaaagaaagcccaggacaagatggatttactgctgaattctaccagaggcacaaagaggagctggtaccatttcttctgaaactattccaaacaattgaaaaggaagaacttctccctaactcattttatgaggccagcatcatcctgataccaaaatggcagggatataacaacaacaacaacaatttcaggccaatatccccgatggacattgatgcaaaaatcctcaaaaaatactcacaaactgaatccagcagcacatcaaaaagcttatccaccacaatcaagtaggcttcatccccaggatacaaggctggttcaacatacacaaatcaacaaatgtattccatcacataaaataaaacaaaaactacatgaatatctcaatagatgcagaaaaggccttcaatataatttagcatcccttcatgttaaaaactctcaatcaactaggtaattgacggaacatacctcaaaacagtaagatccat

SEQ ID NO: 824311 - DNA, 635 bp, Homo sapiens
agacgaaatataaaaaagtggaaagggctctacaaagcttttctaagaactaattgacaayatggtaaggctatggggggtagggcatgctatttgtccttactttttccatgtatatgaaaatccaattgaggcaaaatattttggccatgagcataatttcacagtatatttttcaagctaatgagacaaagcatatactacttaaattctaagtaccctgataccaaaagggtgttgaagaagaatatttttcatttacacagttagcaaaatggttctgaaccctttctatcaactagagtcattgggagcttttaaaattacagatgcattggcaatctcactgcttaaaaattctaatgtaattggtttggggtagagcccaggcatagacatgtctatttgtttgtttgttgcccctgtgttgattccaaagtgaagccagagttgagaaccattggatgaagaaaataatactcaacagcgttgaagatgcagtcaagttggagcacacagaaacactgagtaaaaattagtatcatctgtctaaaatgtaatttggcaatatcttatatgcccaaacaattgactctctttctaagaatatactctaaagaaacaggcaaagaatc

SEQ ID NO: 824312 - DNA, 585 bp, Homo sapiens
agagagtttttatcataaaaggatgttgaattttgttgaatgctttttcagcatcttttgaaatgatcatatgtttttttcctagactctgttgatgtgacttattacacttattgattcatgtrtgttgaatcattcttgtattgctggaattaatcccatttggtcatagtgaatgatctttttaatttgttgctggattcagtttgctagtgtttatttgagaatttttgtgtccatgttcttcagggatattgtcctgtagttttcttttttgatgtatccttgtctggttttgatatcagggtaatgctggactcatataataagtttggaaatattccctcttcaattttttggaatagtttgagtagaattggcaatttaaatgtttggtaaaattcaacagtaaattcatctggtcctgggcttttctttgataggagacatactactgcttcaatttgttattggtatgttcaggttttctatttcttttcaatgcaatttaggcagattgtgtgtgtctgggaatttatacatttcttctaggctttccattttgttggcatatacttgttcata

SEQ ID NO: 824313 - DNA, 509 bp, Homo sapiens
tcagcttcttttaaggacttctctacactggttattctagttagccattcgtctaatcttttttcaaggtttttgtcttctttgcaatggtttcgatcttcctcctttarctcggagaagcttgatcatctgaagccttcttctctcaattcatcaaagccattctccatccagctttgttctgttgctggtgaggagctgcactccttttgaaggggaggggcgctctgatttttagaattttcagcttttctgctctgctttttccccatctttgtggttttatctacctttggtctttgatgatggtgatgtacagatgtggttttggtgtggatgtcctgtttgttagttttccttctaacagtcaggacccttagctgcaggtctgttggagtttgctggaggtccactccagaccctgtttgcctgtttatcagcagtggaggctgcagaacactgaatattgctgaacagcaaatgttgctgcctgatcgttcctctggaat

SEQ ID NO: 824314 - DNA, 658 bp, Homo sapiens
ggggttttggacattcactgaggatcaatgtacattcctcctattctgggttcactttttcttgacctttaactttcacatagtattgattacaacatttattcaatcggaacatatgccaggaactgtgtcataaaatttacatatgtattataatttaaatatcacagtcattctatgaagtaaacattttaaagatgaggaaatggaagagttgcaatgagaaactttcctttgagcacacaggcagaaagaaaaaggaaattgcactcaaacaaatggagagttacaatgagaaactttcctttgagcacacgggcagaaagaaaaaggattcaaattacacccatacaatcaaagtccctaagaaattttcttcagatattgctttatactttttcatgtctgaatcagtgcttggaactctgtcaataatctgtaaagtagactgtgagtgagaaaatggcttttctctcttaccagaagaaggctggatctctgtgccatattataggaaaactcatacgtattgactttcttctagttctctctaaagttccaacctacctgggcttccgtctarggctatatttccaaaatctttaaggacagaaattggttgtttatcttcccgtaataacaatcccatgttcctttc

SEQ ID NO: 824315 - DNA, 652 bp, Homo sapiens
cataagaactcacttattatcatgagaacagcacccagggggaaatccaccccatgatcacctcccaccaggtcccatctccaatattggggattacaatttgacatgagatttgagtggggaygcagatccaaaccatatcaggatggataccctaagtaccttgacttgattattacatattctatacatgtaacaaaatatcacatgtatcctacaaatatgtgaaatattatgtatcaatgatctaaagaagaattagtattaaatgaacacattttgctgaacatagagtaggggtcatggaagacaaagttgaaaaaagcaaacatgggaaccaagatggccaaataggaacagttccggtctacagctcccagcgtgagtgacgcagaggacagatgatttctgcatttccaactgaggtaccaggttcatctcactggggagtgccggacagtgggggaaggacagtgggtgcagcacaccatgcatgagccaaagcagggcgaggcatcgcctcacctgggaagtgcaagggatcagggaattccctttcctagtcaaagaaaggggtgacagatggcacctggaaaattgggtcactcccaccctaacactgtgcatttccaatgggcttaacaaatggcac

SEQ ID NO: 824316 - DNA, 545 bp, Homo sapiens
gggacttgcctgacccagccataacctrgcttttcccctccacctgccctggtagcttaatgcaaaggacagaaacttgcggaaactttatgaccccgctcattgcctgaggcactagagtacctcccttgggtaatataaggaaaacaccaatcccactgctaccaccacagctgagctcttttgcaagtgccacctcctggctagaggccaactgacacagtccattacagcatctgcaggcagaataatacagcattctggaaggaaacttattcatatcatcagctattaccattgtctgcatcactctggctgagcaggaggtcctgagtctgtgcacatgaccagtttattactactgcagctggtatttgagaaagccaacacactaaggctatctataaccaaggaatttcacagactctacatcactcttgtgccatcgccatcagaactggtcctggtacctgcttctgggagacttgaggacatatcacatcactggattccttgcagacattccttagcaccagcctggagtg

SEQ ID NO: 824317 - DNA, 601 bp, Homo sapiens
aagtatctacagtcaccaccccagaggagagtcagaaatgagtgaagccaagcctcagaaacaaagattcagtacatcatgtcagaataaaaaccaaaaactgaaccgatgaccatagctttgtctggaaagatgggataaaggatggaaacaggaatcttgagaaaaagcaaaagatgaaaaaggaaatgagggaaggagactacaaaaaatccatttccagaagttatctgattttgactatgaacttaaaagtgatatatgagagaaacaaataaacactgaataacagcctcaggtgcccaatgagtttgttatcagacatcactcaagtcatgtcagaataaaaaccaaaaactgaaccaatgaccatagctttgtctggaaagatgggataaaggatggacacagggatcttgagaaaaagcaaaagatgaaaaaggaaatgagggaaggagactacaaaaaatccatttccagaagttatctgaytttgactatgagcttaaaagtgatatatgagagaaacaaataaacactgaataacactgaataacagcctcaggtgcccaatgagtttgttatcagacacaggaaaata

SEQ ID NO: 824318 - DNA, 517 bp, Homo sapiens
agggctgatgtccagaatggtatttcctaggttatcttccaaggtttttatagttttaggttgtayatttaagtctttaatcgatctggagttgatttttgtatgtgatgtaaactaggggtccagtttcaatcttccgcatatggctagacatttactgcagcacagtttattgaatgaggagttgtttatccattgcttgtttttgtcagctttgtcaaagatcagatggttataggtgtgcgacctcatttctcggttctttattctgttccgttggcctatgtgtctgtttttgtaccagtactgtgctgttttggttactgtagccctgtattatcgcttgaagtccggtagcatgatgcctcctgctttgttctgtttggttaggattgctttggctatttggactctttttttggctccatatgaattttaaagtagtattttctagttctgtgaagaatgtcattggcaatttgataggaatagttttgaatctgtaaattgctttggg

SEQ ID NO: 824319 - DNA, 681 bp, Homo sapiens
tagttatgctcacagacatcctcaattcccaatttcacttattattaataacagctatcattattaaagaaattattcagctaaaccatgtgaaattgtcattttcattggtctaaagtggataaacactggcaatttcatgtggttcaacctaagcctatcaccagtgcctgtgctgggtactctatgtaggtcaacgaatttaattctcgtaattgctctgaagtgatgtcagcgacaccattcttcaggtggtcaaggagcttgccccaaacccacagctgacatgcaggttggcactccaccaccccatccctcgacctccacttctcaaccacatgcagggggctctgttcacctctttatttgcatttggtgtcttcacattttaagaaaaccaaagcaagtaagttggtgctggcaggatatgtttttaagaaaatgaagatgttacctccaattatcacgccttctttatttccctttattctgcatatcaataaatctggaattgacttaggacacttagtgactgtattactacagaaacagtcaaaatacttcaactggaagtacaaaatacttcagctaaaagtacaaaactkcagctcaaagtggcttaaacgtaatcacatttattatttcttaaaacgagaagtccagggctggatccaatgtctc

SEQ ID NO: 824320 - DNA, 589 bp, Homo sapiens
ctggagtattaggggttgatcctgccccagcccctcaaatacactcctaacttctgttctctgatgactataacaacatcctttaggggacaatgcctgtcaccccacattgagaaacacagcactgagtaagaccattcctgggagtggtgacaaataggtgcaagttcctgctaagttccaagtgacagtgcattctctcctgcttttgaagggaggaacaggggcaggagggcccttgggatgggggaagtcggtagtgggaggtgcatggaagagcagaccaactttccttcttccccgtttgggattggagacatcctcccctgcagtgctggggacagacagtggaggtggctgcctcccctggcctgctctcagccagccctgatactcccactaactagagagaaaacaaaggcttcccctgtccttcatgccagcttctctcagtaaaaggaataaaacggcccacttatttttatcgctcayggatttcctgggaaatgggctattagttcccctaatgtaaagataataggctcatctcccttggcaaatggtacagccccagcatgaaaacactcac

SEQ ID NO: 824321 - DNA, 588 bp, Homo sapiens
ttggactatggaaatgatgctagacaaaaagcaaagttgagtgattttcttatttaagttcaaagtgggtcgtaaaacagcagagacaacttgcaatatcaacaaygcatttggcccaggaactgctaatgaacgtacagtgcagtggtggttcaagaagttttgcaaaagataccagagccttgaggatgaggagtgtagtggcaggccactggaagttgacaacaaccaattgagagcaatcattgaagcagattgatcctcttacaattacatgagaagttgctgaagaactcaacgtaagaactcaacgtcaaccattccacagttgttcagtatttgaagcaaattgaaaaggtgaaaaagctcgataagtgggtgcctcaccagctgagcaaaaatttaaaaaaacaccgttttgaagtgttgtcttctcttattctccacaacaacgaaccatttctcaatcggactgtgaggtgcaacaaaaactagattttatatgacaagcaatgaccagctcagtggctggaccgcgaagaagctccaaagcacttcccaaagccaaacttgcaccaaaaaaggcca

SEQ ID NO: 824322 - DNA, 638 bp, Homo sapiens
caaactatgttggtactatggttcctaaatctcatctctacaaaaacttttcagggttgtatcttttttcttttttctcggtaaagaaggttgttttctttaattaccttgaatttaataagtacagtcttatgattgctgacaaaaaaaaaaaaaaggaaaagaaaaagaaaacttgaggattggggaaattaaggacacatttttttttcctgggatggttttgatgtaacaccagtttgtaatcttcttactgtgaattaatcttcactgtatctgataataaaagagtttataataagttagaaagcatatcccatcaatcacatgtaaggttttgactaaactaacggataaagatttgtaaggaagttaggtgattttatcttactgtccattgtatttttttaatttggtttttgatgttactgtttaaattataccaggttaacgaagggtttgatttttgtttcaaaaatatatattaaatagaaaaactgagtacacatcctaatacttactttgacttggggacagcaaagcmcaattataggatcacactttgagaagtaaataaactgtttgaaaattgagtctgcaaagctagacatagtaacaacaggaaacatcccacctac

SEQ ID NO: 824323 - DNA, 636 bp, Homo sapiens
tttgtgtctggcttctttcacatagcataatgttttaaaggtttgtctatatggtagcatgagtcagaatttcattccttttcatggctgagtaayattccattgtatgcatatagcacattgtatttatccatttctttcttgtttttgttcttgttttcgttttgagacagagtcttgctctgttgccaggctggagtacagtggcacagtcttggctcactgcaacctccacctcctgggttcaagcgattctcctgcctcagtctcccaagtagctgggactacaggcatgcgccaccacgcccagctaatttttgtatttttgtagagacagggtttcaccatgctggccaggatggtctcaatctcaaccttgtgatccgcctgcctcggcctcccagagtgctgggattaaaggcgtgaaccatcacgcccggccccattttcttgttgatggacacttaggttgtttccattttgaggctattgtgaatactgctgccatgaacatgtgcatacaagtatctgttgagtcatttctcttaagttcactacagttaggctttcactctcactggtcaacacaaattgttcttgtcaaggtcatcagtgacctctgagttgctgcagcca

SEQ ID NO: 824324 - DNA, 540 bp, Homo sapiens
ttttttttttgagagtgaccttcgctcttgttgcttaggctggagtgcaatggcaggatctcggctcacygcaacatccacctcccaggttcaagcaattctcctgcctcagcctctcaagtagctgggattacaggcatgtgccaccatgcctggctaattttatatttttagaagagatgagttttctccatgttggtcaggctggtcttgaactgccgacctcaggtgatctgcccgcctcagcctcccaaagtgctgggattacaggcgtgagccatcacacctggacctgatttttttttctggaagttttagttttcaattttacatttacatcaatcattcattttgagataatatttgtatgcaatatgaagtatggattggaattcttttttttttctgcttatggatatcccatctttcagtactttgtgctgaagattatcttctgcattggtttttacctttgtcaaaaaattggttttatggactttgttctgttccattgatcaatctgtttgtctttatcacact

SEQ ID NO: 824325 - DNA, 540 bp, Homo sapiens
ttttttttttgagagtgaccttcgctcttgttgcttaggctggagtgcaatggcaggatctcggctcaccgcaacatccacctcccaggttcaagcaattctcctgcctcagcctctcaagtagctgggattacaggcatgtgccaccatgcctggctaattttatatttttagaagagatgagttttctccatgttggtcaggctggtcttgaactgccgacctcaggtgatctgcccgcctcagcctcccaaagtgctgggattacaggcgtgagccatcacacctggacctgatttttttttctggaagttttagttttcaattttacatttacatcaatcattcattttgagataatatttgtatgcaatatgaagtatggattggaattcttttttttttctgcttatggatatcccatctttcagtactttrtgctgaagattatcttctgcattggtttttacctttgtcaaaaaattggttttatggactttgttctgttccattgatcaatctgtttgtctttatcacact

SEQ ID NO: 824326 - DNA, 540 bp, Homo sapiens
ttttttttttgagagtgaccttcgctcttgttgcttaggctggagtgcaatggcaggatctcggctcaccgcaacatccacctcccaggttcaagcaattctcctgcctcagcctctcaagtagctgggattacaggcatgtgccaccatgcctggctaattttatatttttagaagagatgagttttctccatgttggtcaggctggtcttgaactgccgacctcaggtgatctgcccgcctcagcctcccaaagtgctgggattacaggcgtgagccatcacacctggacctgatttttttttctggaagttttagttttcaattttacatttacatcaatcattcattttgagataatatttgtatgcaatatgaagtatggattggaattcttttttttttctgcttatggatatcccatctttcagtactttgtgctgaagattatcttctgcattggtttttacctttgtcaaaaaattggttttatggactttgttctgttccatygatcaatctgtttgtctttatcacact

SEQ ID NO: 824327 - DNA, 627 bp, Homo sapiens
gtatgagctattctcagtccactggcaagaaatggttagtcttatgctgtgttgcatgggagataaggaagtacagtcacctgaacataagacaggtaacaggattatctgcctagtcagctgctgtatatcagtgcctggtgcagtgcctggttcatagtatcagtataatacacatttgaatgactgaaacattttcccgagtataatcctaatcacatttcccagactttcttatctggtatatctattatctattgttgcataatacattgcacccaaacttagcttaaaacaacaaatgggatcttgccatgtctggggttcaggaattcatgagtagcctagctaggtggttctagctcatggattctgaagaggttatagtcaagctcctttctaaaggttcagctgaaggaggatctcctcccaagcttgcgcatgtggttgttggtgtgagacctcagctccttaccgtgtggatccttccataggctgcctgagcttcctgacaacatgrcggtcatgatgctctggagaaagagacataagcattccaggaggacacagccttcacttatgtattgtataggatcaaggacagagtagtgactggaagtgacaatc

SEQ ID NO: 824328 - DNA, 623 bp, Homo sapiens
ggaaacacacattttacaccaacacagattatgagcttcctggcttccttaaatgtcagctactcatgagtctcttgaagccctccattgatttcacgtggaagtaggtcagggctgtttttaactggagaagcctcatgctgcaggtttcatttaagtgtgaggagtgaatattaaaaattgatatgcaaaacaaacctctgcttaattagcatctggataaagtcttttactaggaaagccattaattttgaaaaatgagaaaattgacaatgaagccatttgtgtctatagcctttcacatataaaaaacattatggatagtcacttatcatgcattgccttctctatgctagcttatctgtatttaggaggttagcattccttctgtgcatttgtggttacacacatgttttaaaataacatttgagtgttttttttctgacattccatttttcaaatgctaatcttaatttttttcatctcaaatwatcactttaaaagaaaatgagctgcttctacttgaatgtacttagaaacaacacttcacaaatcatattttttaacagtcttccatccacatactaattatttttgatattaagtacttcaactattcttgg

SEQ ID NO: 824329 - DNA, 629 bp, Homo sapiens
gcgccgcgagcgccgacgcacgggttcctgctcggcctcctgaaaccagtyccccggcggcgcctgggtttctatcgcaggcccctgcggtttcgcccgtcgttggcttcttggtcctagcaagtttcgatttcgcggtgcccgctatttctacctcttgtccaaataactagccaaaatgtgatttctcagcctaagcaagtcccgatttagggcatcggtctagccctggctgcgatttcttggtcctaggaagtcactgtttagctgtagcaaggcagacttaaccgtgcgatggtgacttttctttttctttggttctttttcttttctctttctttcttgatacggggtccggctctgtcgcccaggctggagtgcagtgccgcgatctcggctcactgcaacctccgcctcccgggctgaagcgatcctcccaccccagcctccggggtagctgggaccacaggcacgcgccaccacgcccgggtaattttttgtatccttcctagagacaggatttcgccatgttgcctgggctggtctcaaactcctgatttcttagtctgaccaagtcagagtttagttatttcttaccgtagcaagttgagagttattccagtttgcga

SEQ ID NO: 824330 - DNA, 627 bp, Homo sapiens
ctgtcatttgctcttcatcataaaagacagtaactacctgggtgatgattataagcagakccctagtccttacctcactttcccagttactaactgtgctcttccagaaagccagagagggactgtggctcgcttatctcatgcttgcagcagcctagagagagcccagcatggctgggacagatgttctctgtttgccctccaaatctgctctccacccttctccaccctttgcaccctgctccgcatcatgagggtgtccttttcttcagcttctgatttgattttgccagtggaaagtaccagcaggagattgaagggaccgaggaaggagagatcagggccactttctgccaggttttggtttggcagtggccacactcccctgctgaaggccacaatgatcagcaagcagcctctccttcacctgaagctctcactcagcctccctgggaattgtatctttcctttcccctcaggcctagggtataaagactccttctctctgtatgcctcttcatcctttgtcaatgtcttttcatcatgccctgcttttatagatactctccattcaactctgttcgttcacccctttaaacaaatgctttttcatgtgttttatgatag

SEQ ID NO: 824331 - DNA, 627 bp, Homo sapiens
ctgtcatttgctcttcatcataaaagacagtaactacctgggtgatgattataagcagatccctagtccttacctcactttcccagttactaactgtgctcttccagaaagccagagagggactgtggctcgcttatctcatgcttgcagcagcctagagagagcccagcatggctgggacagatgttctctgtttgccctccaaatctgctctccacccttctccaccctttgcaccctgctccgcatcatgagggtgtccttttcttcagcttctgatttgattttgccagtggaaagtaccagcaggagattgaagggaccgaggaaggagagatcagggccactttctgccaggttttggtttggcagtggccacactcccctgctgaaggccacaatgatcagcaagcagcctctccttcacctgaagctctcactcagcctccctgggaattgtatctttcctttcccctcaggcctagggtataaagactccttctctctgtatgcctcttcatcctttgtcaatgtcttttcatcatgccctgcttttatagatactctccattcaactctgttcrttcacccctttaaacaaatgctttttcatgtgttttatgatag

SEQ ID NO: 824332 - DNA, 644 bp, Homo sapiens
tcctgctgcaatacaaataatatttacttcagacaataatcccacccaggtgctgtcttcattgaaattatttcaaaatacgtaagttatgaaactttaaattattgtgttttataagtttctgtcttgtttcatggaacaaaaatataactgtatccacacaatttcaagtagctggacaaatttttttttaacggtaaatctttctaatattttgcaactcatctattgttcaatcctatcaggatttcactctgtctctttatgggaggataaagtgatgtagtctctatgtcactgcacactcagatcagggcagctcagagagtatcctgaaatgagtacatttgcccgtcaagttacttgaactttagtgaaaggagaggaagagcaatcagtgcccaaaggcagttactctatttctgatcctgtttctcatggctacaaaaactgggtttgcatttgcctggcactttacagtttatagaatattaacaaatgctggggaatcttggtgwtggaatttaacagtgagtgtggatgattagaacagcatcctggaaattggtaacatgccccaatttacagttttcccttggattttccaacagccttgtgcttctttattttcatgtctggacaaa

SEQ ID NO: 824333 - DNA, 651 bp, Homo sapiens
aaaggtgttcatggtagccttgcataaacttttgtttttctgtggtatcagttctaatatctcccgttttgtttctaattgagcttatttggaccttctctcttcttttattggttaatcttgctaataatctatcaattttatttatctttcaaagaaacagttttttgtttcatttatcttttgtattgtttttgttgtttcaatttcatttagttccgctctgatcttggttatttcttttcttctgctgagtttgggtttggattgttcttgtttctccagttctgtgaggtgtgaccttagattgtctatttgtgctcttttggactttttgatgtaggcatttaatgctatgaactttcctcttagcaccatttttgctgtatcccagaggttttataggttgtgtcactattatggctcagttcaaacattttttaaatttttatcttgatttctttgttgacccaatgatcaatcaggggcaggttatttaatttccatctatttgaatggttttgggggctccttttggagttgatatccaatttattctactgtggtctgasagactacttgatacaattttgattttcttaaatttattgagacttgttttgtggtctatcttggagaatgttccatgtg

SEQ ID NO: 824334 - DNA, 605 bp, Homo sapiens
ctattaaagtcccattgtaactgagtacccccatttttctaagaggaagagagtgaattattttttaaattaatttcttctctctttccttgttctcycctgttttccacttcccacttagctctttagaaatgcaattataacctttactttcccttcaccagacactggctacatggcaagcttacctaactatgggcttacttagaagctccagaactgaaactctctctgcccaggagattgcctcagctgatggcagtcaatttacatcctcaaggatgcccatgacagtactccatcccacctggagagtatctcagattatggccactttaaaacctagcactacctgtgatgatgccagctggaccacctggtagataaggcactgaagtgagtcatataggccccgcatctgcttgcttcctcccctgcatgccattcatgccaagttcccctttaaaagctgctgcattctgcccccaaaatgaagtggtacccttaaaggcaggagcctgtactgcttcccctaagctaagctttggaataaagtaatttataccagacgccactcttgttaatggagttaacaagtggtgagt

SEQ ID NO: 824335 - DNA, 205 bp, Homo sapiens
gaacataatccacgttatacatgaagtgcagtgctgttgccataactagagastaaccactgtgaataacaatatatgaggatgaaatagacccagaaatccagcttaagacagtaaaaacttacgcttactgtgaaatattgtacctttctttaatcttttaatatattgttgatagacatctgctacaaatatagctgtccaa

SEQ ID NO: 824336 - DNA, 608 bp, Homo sapiens
gtgtctttataacagaatgatttatattccyctgggtgtagacccagtaataggattactaggtcaaatggtatttttgtctctagatctttgaggaattgccgcactgtctttcacaatggttgaatcaatttacagtgccatcaacagtgtatagcattcccttttctccacaacctcaatagcatctgttgttttttgacttttaataatagcaactctgactggtgtgagatggtatttcattatggttttgatttgcatttctctaatgatctctgaagctgagtttttaaattagatcccatttgtcaatttttgctttcattgcaattgcttttgaagtcttcttcatgaaatgtttgcccatgcctatttcctgaatggtattgtctaggttgtcctccagagtttttatagttttggtttttacatttaagtctttaacccatgttgagttaatttttgtatatgatgtaaggaaggggccagtttttatcttctgcatatggctaaattctgccagcaacgtttattgaatagggaatcctttccccattgattgtttttgccaggtttgttaaagatcagaaagctataggtgtgca

SEQ ID NO: 824337 - DNA, 588 bp, Homo sapiens
ttgtagtgagctgagatccaaccggggcactccagcctgggcgacagagagagactccatctcagaaaaaaaaaaaaaaagtaaaaatgtttagaccctggaggcgattgtccaacatttactagctacttaacctttctgtgcctcagtttcctcatgtgtagaatggggcaagaatagtgtttacctcatagatttattgagaagagcatataattatatatcgtaattatatatgtatatatatgtgtgagtatatatatatatatatgtatatatataaattggaataacacctggcgtgtactaattgctatgtaagcgaaagctattggtgttgcgcttgtcatggcaggaggaacaagtcctttattcttattacttaacaaagattagtggtgactctggctttcctaggtctcaaagacctcaaaacttccagcttccttcaccctcccacctgcccagcttactgctgcctgcccttcctctgtggtctctacgcaccctgttgcttatygtctgttactctgatttctcttagcttttctttccagctatcactacatgtctctcttcctccctgtg

SEQ ID NO: 824338 - DNA, 441 bp, Homo sapiens
tatttttgatggaaggccaattgctcagggatttactgccgttagcgattctacggaaggcaacgaggcttgctttcagggcgcaacgaagaagccatctgtttgctcagacctttgcctgagtgcaagcctcgtagtccccaggggctttgttgatgttattgttattgttattcttcattatttattgatcgtcccaaatacataatgtactgagggatgataatgttcatgagaaacatagtttatgtgtatgaaaaatgcttaatctaatatgctatacataatgtttggaagaatagtgcttcttatctggcaactgatagagttgactatttaraggtagaaggtttttctgtttttgtttgttttgcttttttaggtaggaatgagtgtttataaaaatcaaccaagaatccttatcaaaatagtttaatgtat

SEQ ID NO: 824339 - DNA, 603 bp, Homo sapiens
aatactaatgtaaatatttattgagcatctactgtatgaagggcaacctattagatttttctcacagtactgaaaatataattcgatgaattaaaaaggaataaacaaatcccaacaaaaggtgaaccatcagtgatatagtaaatggcctcagaaccttttatactttaggcctatattaacactgatgggaggcatcaggtcaggcttcatgggagaagcctagtatttgctgaagacttgaaagatgagtgtgatgtgaacagaggcaaaggcagagaaacagtgttccagaaagaggaagcagcatattaagggtatattagtataacactgtttgtcaagctcaaaccttactagtggtctgataaggtaggagatcagacttcttgtgaataggcccaaatgagagtgaaagtgacagggaggtgctcgtatcaggaactttaaccctagtccacgtatgaaatagtagttagctcacctggagcatctttgcgtatgattcactttggagaaaccattggaagaaaattmactgaacataacctgaaataactctccccaaatgtgggggagaaaagtagttcagctagcagaaaa

SEQ ID NO: 824340 - DNA, 605 bp, Homo sapiens
gtctttaaaatcgtattgatctagttggattctaaatagctaatttagtatgtacattaatgattrtcatattaaaatagtgatcctggcctggcgtggtggctcatgcctgtaattccagcactttgggaagccaaggcaggtagatcacttgaggtcaggagttcaagaccagcctggccaacatggtgaaatcccatctctcctaaaaattagctgggcgtggtggtgcgtgcctgtaatcccagctactctggaggctaaggcaggagaatcacttgaacccaggaggcggaggttgcagtgagctgagattgcaccactgcactccagcctgggtgatgaagcgagattccatcttaatataaagaaataaaaataaaataaaataacgatcctaagcgttcatatactgtccacataaatctgagagacattcttgatcagtagaatttcagtgaatagcaagtgaattggcatgcagatacaagaagaaaacatgttacctattattttaggttttcgggcctgaattcatttagtatttaatttacagtaatagtattcataattaattatattacttattataagattttcaggag

SEQ ID NO: 824341 - DNA, 251 bp, Homo sapiens
tgttttgtacagatacttagtaaggatttacctaatattctatttctggcttgttgctattcaaaaagtgaagtgcaacgtattagtataaaacattgagctctccaaatgtatcacatttgtctcatcctaaatgtatctaaaactccctgctacataataagaatgcctttccatgccatatgcaacacaaaacagaataatrttttcaatgttgattgattctcaatggacagtaatacttaagctat

SEQ ID NO: 824342 - DNA, 643 bp, Homo sapiens
taattttggaaaggtggtttcaagctggcacaactgcactccaccctaggagacagagcgagaccctgtcaaaaawaaaaaaaaaaaacaagaagtgaagtcaagataggaggtaaattcggaagacaggaagtggtggtagaagacaagaagtgaagtcatacaggaagtaaagtcagaagacaggaagtgaagtaagaagacaggaagtggttgtagaagacagaaagtgaggtcatacaggaagtaaaatcagaagacaggaagtgacgtcaaaccaggatttgcagtcggaggcaggcaagaagtgaaatcagaagacgggaagtggctgaggggaacgtcttttctctctcctgctcagcccgaagtgaacaggtagcatcaggtgtgccatttcagtgactgggcacagcccaggcacccacatctctctgcagcgcctattcttggaacaccagagacctctacactattttctgttgcttttttccttcattttcagagatgagatcctggattgaatgactactatggaaagtgattgaccaaggtaagtcacaactatcttgttctttaattttggtgttgtttgttatgacttgttagccgtctagcactcatagctttgcatttccactct

SEQ ID NO: 824343 - DNA, 455 bp, Homo sapiens
tctggaccttgtctaccccttcctcatgcagggctgtgtcttgatttgyctccgtggtcccactgtccagcacaacagctggcctggaggaaaggctggcagattaagtggacccgaggctcctgacttcatatccatgactgaggtgaggcaacggaggtccattttatggatgggcaaactgactttccacatgcttcctgcttgggggcctagctgctttcaaaagccctatctcctgaggccacctttgccccagaagatgtcctgggggaacacagaccccagactcacattgactgggtactgggatacatcagccataacaactgtggagtaacgcttcctctgctctgccaggggagaaagagaatgagcctgggagtccaggcccagcccctcctccatcagacccaggagtccaggcccccagcccctcctccctcaaacctagg

SEQ ID NO: 824344 - DNA, 455 bp, Homo sapiens
tctggaccttgtctaccccttcctcatgcagggctgtgtcttgatttgtctccgtggtcccactgtccagcacaacagctggcctggaggaaaggctggcagattaagtggacccgaggcycctgacttcatatccatgactgaggtgaggcaacggaggtccattttatggatgggcaaactgactttccacatgcttcctgcttgggggcctagctgctttcaaaagccctatctcctgaggccacctttgccccagaagatgtcctgggggaacacagaccccagactcacattgactgggtactgggatacatcagccataacaactgtggagtaacgcttcctctgctctgccaggggagaaagagaatgagcctgggagtccaggcccagcccctcctccatcagacccaggagtccaggcccccagcccctcctccctcaaacctagg

SEQ ID NO: 824345 - DNA, 455 bp, Homo sapiens
tctggaccttgtctaccccttcctcatgcagggctgtgtcttgatttgtctccgtggtcccactgtccagcacaacagctggcctggaggaaaggctggcagattaagtggacccgaggctcctgrcttcatatccatgactgaggtgaggcaacggaggtccattttatggatgggcaaactgactttccacatgcttcctgcttgggggcctagctgctttcaaaagccctatctcctgaggccacctttgccccagaagatgtcctgggggaacacagaccccagactcacattgactgggtactgggatacatcagccataacaactgtggagtaacgcttcctctgctctgccaggggagaaagagaatgagcctgggagtccaggcccagcccctcctccatcagacccaggagtccaggcccccagcccctcctccctcaaacctagg

SEQ ID NO: 824346 - DNA, 635 bp, Homo sapiens
tagaactgatgtggacgcttgttgcctacttgagatgctaacgttgactaattagggtgaccaagcacactggtttgcccagcagtgcccctgttttagccttgaaagtcttctctcctggaaaacccctcagtctcaggaaaagcaggatggttgtttaccccagcactgatatatatgatgggaaacacatattaattatttacatttaagcccctgagtcagggtgactttcacaacttatttggaatattggcctatattaaggatggttaagaaagtgttgcctgcataatcatggaagcaaccattcctgtgttttcaaaaggcaacaaattggaaatttgagtccaatgttgtaaaaggaaaagaaaagaaaaggctatgttaacaaataagacgttaacattaggagagctaatagaaggttttagatattctgatccagcttcctttccagcctgttcttcctgttctttctctccatacctgaggatagaaaycagcaaattttgggctgagggccaaatccagcctactgcctgttttgtaattaaggctttattggaacatagccatgaatctttatggattgtctatggttgcttttgggcttttgggctacatggcaaagt

SEQ ID NO: 824347 - DNA, 589 bp, Homo sapiens
atactaaatgagagactatttattctcttctttcaaattatttcccagagcttttatctacataattccccttatcaaaccaggctctaaggtctcytagatttttctttctttcttttttttttttttttttgagacagagtcttgccctgtcgcccaggctggagtgcagtggggccatctcagctcactgcgatgtctgcctcccaggttgaagcgattcccctgcctcagccttccaagtagttgggactacaggcatgcaccaccatgcccagctaattttgtcatatttcagtagagacggggtttcaccatgttagtcaggatagtttcgatctcctgatccttctagactcttgttaaagacctggtctgttgtattcaccttgaaaaacttagagacaaattagttttttatagtttaccctagagctatgtgagaaaagtgaactccttcactgccctcttccctcttctagctttttttcacctgtaagtttgtaaatcaggacactgtaatgataactctctcagggatcatttaagagaggagctgagttcaccatacagaaacatacaataggtg

SEQ ID NO: 824348 - DNA, 443 bp, Homo sapiens
gaccatcttatatgtccacgtgtcaattacttggtcaaatgctttgtgtacattgcttaaggatttcaataccttagggagtaaatattttatccccattttgcagctgaggaaattaagaatcaaaaaggctaagtcacacaactcagaaatgcagaaatgttgttatcctctctccttgcagctggattaaaaaaaaatcaaaaatcatttcacactcatgagagagacattatgaaaaagctttgcagagctctagttttaaagaaatgttaatgtatgctaatttcaaatgatacaagttaatttttaatagaaaattgtattcatctaaagtttttacacggaaagacaaggtagggagagaaatatccaagacaccaatctagagggcataaagacatacttattagcrccaaaataattgtacaacaaaggaagct

SEQ ID NO: 824349 - DNA, 579 bp, Homo sapiens
caatgctgtatggaataccatgacagtgggtaaggcattccttgagttcacaaatggtagtcttggcagaagcactgggtgcaggataakcaaacccatagccgtagtaagtgtgtattccagtgaggacaaacctctgccctttccatgatgaaagatgtccaatataatcaacttaacaccaggtagctggctgatcaccctgaggaatggtgctatatcgcgggctcagtgttggtctctgctgctggcaaactgggcactcagcagtggccatagccaggtcagccttggtgagtggaagtctatgttgctgagcccatgtgtaacctccatccctactaccatggccactttgttcatagacccattgggcgatgacaagggtggctggggaaagaggctgagtgttgtccacagaacgggtcatcctatccacttgattattaaaatcctcctctgctaaggttgcccgttggtgagcactcatgtgggatacaaatatcttcatggtttttgaccactcagagaagtccatccacaaacctcttccccaaatttctttgtcaccaattttcc

SEQ ID NO: 824350 - DNA, 241 bp, Homo sapiens
gcatatgcttttccttcttgatttaatttacatagattgttctatttttcatttttcctctcattttatgtatgtttactaagaaatttatcactttgttttcttctgaattttgaaatttggccataatttatgtcagaacctrtatttccttgtcaatatttgctaggtttgcagtagtgcttgggaatgtgtgaaaggttattttttttttaagtaaaggtggcatctaagatgataa

SEQ ID NO: 824351 - DNA, 491 bp, Homo sapiens; identical to SEQ ID NO: 820652

SEQ ID NO: 824352 - DNA, 629 bp, Homo sapiens
gtccccttgtacacacggccttcttatcctttatagaaatgtctagccagaggaagttcagagttcgttcctcagaagtgcagggtccagaatagtgacccattttcaacatgtgtaaggtaatctctggtaaggaaagtagtcttctccattctagatttaaaaatgaaagctgcatcatcacgtaatttggattgtaagattctgaattcaagcccttaggtcaggtttacacaaatttttaggtgagtcttggggagtgaatttaatttatattgtgagtagatgaatgcaaatatttgtgacaatgaagacaagctgtagccaattggagtattactgctggttattggcttttctctgtaatagtatgatacatcattctgctccccttgtcatgtgattagtctgatcaccttgtagcaggagcacattaccatgcctcttccatatggggctaggtgatgcaatattctttgtcatatcccaaccacwggacagctccttcagtcggtggtttgcaataagaaaacattttgagccaattgggccaagagccacgagtcacgcagagctacagcttccttgtggcctctaataacatgagccagaaataaagatttggtttt

SEQ ID NO: 824353 - DNA, 649 bp, Homo sapiens
attccattccagccctcaatggaatgactgatgtccgcccccattggagaaggtgwtcttctttactcagccactaattcaaatgctaatctcttccagaagcaccctcccccacacagaaaaatgtttcaccagctatctgggcctcccttagtgcagtcaagttgacacataaagttcggcacacaatgtgttgcatccccacttgctcccagcaggtgcaagcttctttctttcatagcagccccacagctttctgtatcctaggttggcacaactgctttggcagggcgtatgttagaaacctctggttgggccatcatagtgtctcagtttgtgcttgtgtcaccgtttctgaacattaatccaattgccgtccatcctcacataaatggatgcctgctctatgatttatgtgttcctcatccttttgtggaattccactgtctgcttccatctttctctctttcattcttatggccttagctgctgcctggagatgcatgaccacctgggaagcagatcctgaaggtgtcaggaaccaggctggagacaacgctgcagtaagatttagacaaaatagaaatctggggtggtgagagggtcccaacttcattgcgattatgagaatttcaaagaagtgacgtct

SEQ ID NO: 824354 - DNA, 525 bp, Homo sapiens
cactagccaacagaaaggaacatggagttacgaaagcgacatgctcctcacttctccacagatgacctttcatttgcttttgcaggatgaggccgtcagtgccttgccacgagtctgaggtgggaagaaagggtcgcagctcctggcacatggcagaattagcgaagcgtgccatgtggaggtctgaggtctgcaggttctgactggacagtgaaacccactgctcccgccatccctttctctgtcacacacacacacctagtgaccttcaaaagtgtctcgggagaatttggcaggatgctcgtgtcctgtgccagtgacagcactgtcatcactgttagtgtgaccctatctgtttttcaggcttgtaaggtgaccaggaggaacatacgtacacacacacacacacacacacaagcgcrgccaccgtcccatgggaaagtgaggacaggttcacactctggggacatgggaagcaaaatatcacagtggaagctgcccccaagccgaagacgtgggacacca

SEQ ID NO: 824355 - DNA, 525 bp, Homo sapiens
cactagccaacagaaaggaacatggagttacgaaagcgacatgctcctcacttctccacagatgacctttcatttgcttttgcaggatgaggccgtcagtgccttgccacgagtctgaggtgggaagaaagggtcgcagctcctggcacatggcagaattagcgaagcgtgccatgtggaggtctgaggtctgcaggttctgactggacagtgaaacccactgctcccgccatccctttctctgtcacacacacacacctagtgaccttcaaaagtgtctcgggagaatttggcaggatgctcgtgtcctgtgccagtgacagcactgtcatcactgttagtgtgaccctatctgtttttcaggcttgtaaggtgaccaggaggaacatacgtacacacacacacacacacacacaagcgcagccacygtcccatgggaaagtgaggacaggttcacactctggggacatgggaagcaaaatatcacagtggaagctgcccccaagccgaagacgtgggacacca

SEQ ID NO: 824356 - DNA, 519 bp, Homo sapiens
catgagaagagtttaagaaattgtggagggcgacacaggaccatgcctcccatgtctgacaaatggctgtgttctctgatgactagcgtgggatccatcaccctgcctcctaatccagggccttcctccagcccagctcactgcccgggtactgctgccctgtcatctctgcccttcatccctcttagaagccaatccccacttcccagtaggtggcagatacttctggtgtcctttgtacctttctcaacagccctccctgacattgcacattcaggattaggctcctgcactaatagatgacagtaacctgttattttctcagtgtggatctgtcagacttgcttgggcataaacacagttccctggtatcagcagtaccataaggtgccaggatccactgacctaagtttgctgagagatgctgaacaaaggtaaattttcctaatttgcagattgtattgtgaagtcaaattgagactattaatttggccacmtttcccatcgggtaacttaggc

SEQ ID NO: 824357 - DNA, 595 bp, Homo sapiens
aaactcaattcaatttttaaaatggtatagagatttgaatagattttttcacaaaagaatatatattattgacaaacaaagcacagaaaaaagatgcttaagtcattaggaaaatrtgaattaaaaccacaatgaggtaccactacattattttaaaacctgacagtatcaatgccggtggggatgaggtgaaactagaattctcataacactgcttgtgggaatgcaaaatggtgcagccactttgggaaacaatttgccagttccttatggtgttaaacacaatcccactgctcgatttttatccaagagaaatgaaaacctacatccacacaaagtcctgtgtacaaatgttcaaagcagctttatttataatagctgaaactagaaacaactcaaatgtcctttgactggtgaatacacaaacaaaatgtggtacatttgtataatgaaatagtattcatcaacaacaacaaaaaattaacaaattaaattatccgggtgtggtggcatgtgcctgtagtcccagctactcaggctgaagtgggaggtcacttgagcccagaagttcaaggctgcagtgagctatgatcat

SEQ ID NO: 824358 - DNA, 630 bp, Homo sapiens
ggtaggcctttgtgcctctgtctgtgttttaatctgtattctagcatgtgtcagaattcccttcctttttaaggctgaacartgttccattgtacgtatctacattttatttatctattcatctgtcgctggacacttgggtgacttcctcctcttgggtatagtgaataatgctgctataaacatgggtgtgcagatatctgtttgagtccctggcaaattgtacttaaaaaaatatattttgaagaagatagcttagcttaaaaaaaaaaaaaagaagaaagaaaggtggtggctgggcggcattcagctatcacctgaaacctaacgtcttatgtcactctttggggggaactttgtccaaatcatgcccatctttttagaccgctcaagctgtctgtcttctctggagctttctcggacctctgcagttcatagtgacctttctttatataaccctggagcactcattagacagtaaaataatcagactaatggctcatttagccaggaatcacatcctgtttcatctgttttaatgtctagagaagttaactcttaaattttatgtttctctatctaaaagactcacttcctaagctatattataaacttcccaggcacacagac

SEQ ID NO: 824359 - DNA, 631 bp, Homo sapiens
ttatttagtaactgcttaaaatgtatctaaattggatgttttacattaggttcataagtgaaaagcaagcttgtcagagatcttcaaatgaagcttatttaatgagttattttttaaaatcctatacaacaatggaaaaccacagtaagtgggtgtgatggtagttcaagagtaacattttactgatttataagaagagtaaaaaatagaagtgaacagtgaaaagactgaaatcatttttcctccatatgttttgttttatgtttgcttttgcttctggacatgacacaaacgaagttgcagataaaagatagcacctttagttggtaagaacagggcactgattagcagcaatatattgaaactatataaagcaatgagtttaaaagtactttaggaaacctgaggtctttaatcaaggctgcaactgtaagttttttaaaaagccaaaaaagaagccaagtctttagtaaaagggctgttttaaaacattaaattttatttgaatttttttcytaatttataccaaatcttcaaagtagtcgggacttagttacatcttaactgttattcttttgataattttttttaatagaaaaggcagttgtgattagataatgatcaaaatgtt

SEQ ID NO: 824360 - DNA, 582 bp, Homo sapiens
aaaaatttctggagctcacacaaggctaggcataatttatattctcaacagccagagtggaaaaagctctttatacttgatgaaagcagaaattagaaattgttaaattggataaaaaagcaagacccaattatatactacagacaagaaacacatttcaaatataaataaataagtaaaaagtaaaatattgggaaaatgatatatcatgctcacactaatcatagacacctgcagtggctatataaatataaaacaaagtagacttcagagccaaaaatattaacagagataacaagggtcatttcataaaaataaaaggaaaatcatcaaaaggacaaaacaattataaatgtttatgcatctaataacagagcttcaaaatacatgcaatgaaatgtgaaagaactgaaagaagacagacaaatccaggattatagctgaagatttaaatattcctctgataatagattgaataaatgggaagaaaatcaggaatgatatagaagacttgrataatactatcaaccaacttgacctcactgagattgcaaaaactcttcacccaacaggagcagagaa

SEQ ID NO: 824361 - DNA, 649 bp, Homo sapiens
aagtcagtagcactgctgtacaccaacagtaaccaagctgagaatcaaatcaagaactcagcctcttttacaatagctgcaaaaaataaaataaaatactgaggaatatacctgttaccaaggaggtgaaagacctctacaatgaaaactataaaacactgctgaaagaaatcatagatgacacaaacaaatggaaacacatctcatgctcatggatgggtagaatcaatatcgtgaaaatgaccatactgcgaaaagcaatctacaaattcagtgcaattcccatcacagtatcaccaacattcttcacaaagctggaaaaagcaatcctaaaattcatatggaatgaaaaaagagcccgcatagccaaagcaatactaagcaaaaagaacaaatctagaggcgtcacattacccaacttcgaactatactataaggccatagtcaccaaaacagcatggtactggtataaaataggtacataaaccaatggaacagaatagagaacccagaaataaagctggatacttatagctaacgagtcttcaacaaagcaaacaaaatawagtggggaaaggacaccccattcaacaaatggtgctgggataattgtcaagccacatgtagaaaaaatgaaactggatcctca

SEQ ID NO: 824362 - DNA, 649 bp, Homo sapiens
aagtcagtagcactgctgtacaccaacagtaaccaagctgagaatcaaatcaagaactcagcctcttttacaatagctgcaaaaaataaaataaaatactgaggaatatacctgttaccaaggaggtgaaagacctctacaatgaaaactataaaacactgctgaaagaaatcatagatgacacaaacaaatggaaacacatctcatgctcatggatgggtagaatcaatatcgtgaaaatgaccatactgcgaaaagcaatctacaaattcagtgcaattcccatcacagtatcaccaacattcttcacaaagctggaaaaagcaatcctaaaattcatatggaatgaaaaaagagcccgcatagccaaagcaatactaagcaaaaagaacaaatctagaggcgtcacattacccaacttcgaactatactataaggccatagtcaccaaaacagcatggtactggtataaaataggtacataaaccaatggaacagaatagagaacccagaaataaagctggatacttatagctaacgagtcttcaacaaagcaaacaaaataaagtggrgaaaggacaccccattcaacaaatggtgctgggataattgtcaagccacatgtagaaaaaatgaaactggatcctca

SEQ ID NO: 824363 - DNA, 640 bp, Homo sapiens
ttgttttaaggaaatcaatttccagatcctcaaagcctatttgtactctttcctaaaatctaagagacagtgaggtcaagctgtaagttgcccttttacaatggatttcttcccactttacaraagaaaggctcttctctcttccatcccacatcttacagtggtgcgttgttacctcagggtgaaaacacctccaggttcccaagcaaaggaacaatttgaaatattcatatgagaaaaaaaagctttttatctgaggcatgtgggcccctttaaattatcaggcccagagaggcattgaagacgtaacagtagtcatgtctcactcctccttgagctagataattaccttttgaagccatttgctatgcaggctctagaataatgccaagtagccataaagcgccatacatcctacagttcaacaaggtatagccaatcactaacaaatgttatttctgtaaaccaatgagaattcctgaagaattacccactctcttgatttgttccttttatctttaaaaacttgagcctctcctatgttccccagagcactctccaaggcaacctggaagtatgtcctggggtgcagtcttcaaacttggcccaaataaactctctatagtaattttgccttagc

SEQ ID NO: 824364 - DNA, 623 bp, Homo sapiens
actcaagaaggtatagaaataggcatatggtaggcatatagatgtagtaggcttggctttaatgtgtcaaaaaaaaaaaaaaaagtcctgggataggaatccatgtccgtctcatcacaaaacctgsacccttaaatacaatcactaccacacacgatatggtacaaagacagaatttgtgagagacagtaagatacggtgttgaatagtattgcgtttgcaatatactttatagttcaaaaacttgttctattttcaaacttgttaaataaatatgccaattaaaaatagtttgtaaagctcatttgggtaatacagccagaaagaggaaattactaattcagtgaacacatagaataactgatgtaattttaaaatccaagcaaagatgcccatcagtaacaagaaattttccaaactaaggaacacactgaaagtttaaaatttgtattatgaaattcacttacctagaagtagctgttgaatttttgaagccagcttgattatcagagaaaattacttcagtgtgaacattttttttaaaaaaagggaagggaagtaaatatgaagtaaagaaaggcctggaaataaaggaagaagagaatttttgagagactgaagga

SEQ ID NO: 824365 - DNA, 609 bp, Homo sapiens
gaatttctagccaaaatcattgatgatggtggctacactaaacaacagatttttaatatatataaaatatccttatattggaagaagatgccatccaagactttcatrtagctagagaagagaggtaaatgccaggcttcaaagcttcaaaggacaagctgactttcatgttaggagctgatgtagctggtgaccttaagttgaagccaatgttcatttatcattctgaaaattccgcgacccttaagagttaaggtaaatctattctgtcttagctctatgaaaggaataacagaacgtggatgacaggacatctgtttatagcatgatgtattcaatatttgaagcccactgttgtgacttactgctcaaaaaacaacaacaaaaagattcctttaaaaaggttgacaatgcacctggtcacccaagagctctgatagaggtacaagggggttaaagatttttatgccttctaacacaacatctattcctcagtccttggagcaagaattaatttcaacttttaaatcttggtatttgaaaaatacattttgtaaggctaaagctgctatagatagtgattcctctgattaatctgggcaaaatagg

SEQ ID NO: 824366 - DNA, 566 bp, Homo sapiens
tgtatacaattaaccataataaacacttatcagaagtcttttgcccaaaatttytaaggttatgtgctatttatatgaagctcaacctttagtagattccttggggggttcacgttatagttttttttaaaattttatatattaaaaactgttttcctataggtatgatacttgaaggccagcttggttggatgtacagttttttttttggtgttttttttttttcccctgcattttttcacttgactttcctgaacatgctgttctacttttgtcttcctctgtatgttgctcttgaaaaaaatctaagactaacctaattttctcacttttatatgtaatattataatgtttttgtgaagccatgttaaatttttctttttcttatactttaacggctttgttgtgacatgtcttgaagttgaacttttagaccagtattccagggaaatatatatatacacacacacacacatatataatatatatacacacatttctatatatacatgtatgttttatatgtatgtgtatatatacacatacatacatatatatacgtattt

SEQ ID NO: 824367 - DNA, 566 bp, Homo sapiens
tgtatacaattaaccataataaacacttatcagaagtcttttgcccaaaatttttaaggttatgtgctatttatatgaagctcaacctttagtagattccttggggggttcacgttatagttttttytaaaattttatatattaaaaactgttttcctataggtatgatacttgaaggccagcttggttggatgtacagttttttttttggtgttttttttttttcccctgcattttttcacttgactttcctgaacatgctgttctacttttgtcttcctctgtatgttgctcttgaaaaaaatctaagactaacctaattttctcacttttatatgtaatattataatgtttttgtgaagccatgttaaatttttctttttcttatactttaacggctttgttgtgacatgtcttgaagttgaacttttagaccagtattccagggaaatatatatatacacacacacacacatatataatatatatacacacatttctatatatacatgtatgttttatatgtatgtgtatatatacacatacatacatatatatacgtattt

SEQ ID NO: 824368 - DNA, 612 bp, Homo sapiens
tttttcctggaatgtttctatgaatatttgcttcaccaaggttttgagaagtctattggtgaggagagtttcaacaccgttgaagagctttgtgttaaatatcttctgcaggccagggatgaccataagaatggctgccataattctggtttccctggattcaattagtctgattggatcctggggtggccaaaggtagcacttaatcactagagatgtagtggacgttgttactctgctgggcaaaatgaaataaaataaaataaactagtcatcaccatttttaatcttttaaatttaaatgttttaatcagagatctttgatgttggctaattgattatattgtaccttgcactgaaatagatgggcagcctagtgaagacttaacttgtaaaaaagataaaattctgagttttgtaaaaataaataaagtcaaaattaaataattacactggagatccctagtcctttaaccaagtttgacttgaccctgttcaaacatccagattttcttgaataaagagaaagccagtccccctgaaaaagaatctgcttcattactatatgttataccmtaattcactttcttaattgtccccaaatagatttat

SEQ ID NO: 824369 - DNA, 552 bp, Homo sapiens
taaattcatggggttaagagtggtcaaaggcattttctcatatcataaaagctttaaaaggcagtcccttactggcaaggtactttctgacttcagagacaaggcgctgatggaaccagtccagaaaaaaaaaaaaaaaattaatcgtcttgtttttcaggcctgcttgttgtatatctcaaagactgacagctaatgtttgttttgtcttctcaaggcttggggattagcagctttataaatgcagaaagtgctgctcacaaagctaatcgtgtttataccaaatagtagttagcctatcccttgctgccttaaactttagtgctcacatttttttcctcactaataaatgttctttatgtctttttcccccagaatatgtcacatttatctgcattgaaaacctactcaggcagatattctttcttctcaatgatctttaaattgawcttgaaacttttctactgccgcttggtcagcaaacactatttctcctattatcttgacatttttgaagccaaatatctttctaaaattatcgaaccatccttt

SEQ ID NO: 824370 - DNA, 628 bp, Homo sapiens
tgatctttgatgaagttgaaaaaaataaacaaggaagaaaggagatacccttttcaataagtagtgctgggaaaactggctagccatatgcagaataattaaagtggaatcttatttctcattccatacaaaaattaactcaacatggattaaatatttaaacgtaagatcagaaattataaaaattctggaagaaaacctaggaaaaactcttcaagacatcagcctaaccaaaaatttatgacaaagaccacaaaagcaaatgcaacaaaaataaaaataaataaatgcgacttaattaaactaaaaagtttgtgactagcaaaagaaatagtcaacataataaacaggcaacctacagaatgggacaatatattcacaaattatgcctatgacaaacaactaatatctggaatctacaaggaactcaactcaacaagaaaaaaaacaacccaattaaaaactgggcaaagaacatgcacagacgtttgtcaaaagaataaaaatacaaraggccaaaaaacatgaaaaaattctcagcatcactaatcaccacagaaaggcaaattaaaaccacactaagatactacattatactagtcagagtagcttttattaaaatgtcaaa

SEQ ID NO: 824371 - DNA, 226 bp, Homo sapiens
ggaaaaatgagctccttgccggtgcagggtgacagcggggaggaagcctcaggcagaaaagtcgccgttcacactctcccttytttccttcctttgcctccttccaccccctctatccccaccactcgccagttaccggtcgccgctcacctgctggggcgcgaggtgcagagactgtaccgaccgaggacccaaaggctgtcaccacggaggggaagtcctcagc

SEQ ID NO: 824372 - DNA, 226 bp, Homo sapiens
ggaaaaatgagctccttgccggtgcagggtgacagcggggaggaagcctcaggcagaaaagtcgccgttcacactctcccttttytccttcctttgcctccttccaccccctctatccccaccactcgccagttaccggtcgccgctcacctgctggggcgcgaggtgcagagactgtaccgaccgaggacccaaaggctgtcaccacggaggggaagtcctcagc

SEQ ID NO: 824373 - DNA, 616 bp, Homo sapiens
ttcccgtctccttaaacacatcatgcatatatacatatctaggaaagttgctacagacagattaagtcccccgctgacttcaaaaacccatcaacgctrccccaagctcccaggtttaaattcaaataggggcaccataatagtcttggagcattaacagcaattagcttgacaatacattaatatttttatgaactgcagtatttaaaagttcaggaatttctgctcccagattcttgaggaatttcagaatcacagatcccactttcagcttccttgtcgcctcacttttactgccctgggtagacatgtcaaggccaaaaccactggcaagaaaaggcaagtcaaccacgtgccacactgtttcaataaccctgtagatcttaagtcagtggagtcaacagtgtccccaaatcaatgtcccagtttgagtaaaccattcattccttccatgagtacataagtggaaatgtcagagaacggtgtaattggcatactaagagaaaaacatgaatacttttgcaagataaaagcagtgccgggtgagggggtgggggagttatcttttgagtccctgtggttttaatgtggcgttgtcagctggtccctattaaaa

SEQ ID NO: 824374 - DNA, 606 bp, Homo sapiens
atgtgacacgcagtgttttccaacaaagtaagaaagttcagtatgctgccaggcatcacagatgcgccacacgtgcatcgggtaccaagggtgttctgttsgtcaaagttctgtttgacaaaataaaacttttatcattttgaaaatgtcattagctacaggagttttcaaaaggggccaacaaaattaaactttaaaaatctgtttggtgtgtacataacacacaaaacaagagctgactgcactgaaagataccagggattcatagagttgtatgctgaaaggaaatggcatttctgtgagtttatttatgacctacttcaatatattggaagaaatgtcagcaatttggaggttggtaacgtaatttaacagaaaaacagcttcaattttctaactctaccacaaaccccaaatcagcctgaccatttctagggcacacatctgctttgcttggtaacaatagcagcagcaacaataagtaatgacaaatgatcacatataaggaaccatgttaatgtatcactagatattaaacagggcattactttactggtatatgtgtccaatttgaataaacaaattagtatatgtgtcaaatttgga

SEQ ID NO: 824375 - DNA, 578 bp, Homo sapiens
ctgaaaatgacttaagtacaggcacctcctaggaattatacccctaataaatgattgtattgaacatttgtttaaactgatgtaaagtactttgaaggttaacatcctttccctccctcacaatattaagtagtgtagcttggaggttgaaagcagattctgggttcaaatccaggttctgtcagattctaccacttaccagctaaatgacgttggacaagtcacaatatctctaagcccttatttctttacttgtaatgtgggagtacaatctgcccccatgaagctcttaaaaggatacataaaaataaagtgtgacaaacgtcttgcattcaaatgactacttgatggtattttataagtgacaaaatagatgcccagagaagttaatctcctttcttgggtccccccgagtgttaacagcagtgcagggaaggagtcaagcatcctgtctcyggcccatggcttttttatccatgtggagcaccagtcccacacagaaatcatgtttaggctacaagtgatttttcatatatatcttctttaatttgcatttgtctgccaaatccacacattag

SEQ ID NO: 824376 - DNA, 674 bp, Homo sapiens
ttacagtgagtcattcttccatgccttggggtcttactctatataggcagaagccctgactaaatttactacatcccttatttagtcagctaatacattagttgtacactctgatattgtaagtagtggttttattgccattagtgaaaattagtgagccaccaggtgtggtggctcacatctgtaatcccagaactatgtgaggccgaggcaggaggatcacttgagccaagagttcgagaccatcctgggcaacatggtaagaccccatctctacaaaaaaatacagaaattagctggatgtggtggtgcatgcttgtagtcccagctacttgggaggctgaggtgggagcatcacttgagcccagcagactgaggttgcagtgagccaagatccatgccactgcactctggcctgagtgacagtgccagaccctgccttaaaatacatacatacatacatatatacataaagtaatgcttgccttcatctgatatgcttcttccaataagaaaaaacttttcttggaaactcttcccctatccttctttggaaactttacataattgactktaccttctattatttagattgtttattgacaaaccaaaattatttgatgtgtatgtctaacccatatagaatcagggcataatatgaagggtacttggtt

SEQ ID NO: 824377 - DNA, 578 bp, Homo sapiens
tattttgcttcctctggagttaataattgtctcatttttcatttgcctagtttttctatgcatatgccactaatttaatccatactcctctgtagttgtttaagtctcctctcaatatgtccaaacaaacttggtattccatcagtttcatctggaagagagctcttccagagcctactgatctgctcctctctgggctaactgacctctaggcctgctgtgcatctgtcatcttgggacttccctttacccacatcctggggactctcttcacctctgtgttgagtgctctggttcctgaattccacctcttcctctttcttgactcacaacactgttttggtggagcacattcttcagtagtttcctaagagagagtgcagggaagatatagcatttgccatcagtgccctgcccaaattctcttggcacttaacatccaggccttcaaaactgccagcacatatgtctgtttgcctgagggctttttctagctactgaaagtttgctcaggaagtgytggggaattaacccccttttccctgggagagacccttaaccaatgactgatgagagtt

SEQ ID NO: 824378 - DNA, 578 bp, Homo sapiens
agcctcgccagcaactgtggcttttgactatttgttgttttttttttgagacagagtcttgctctatcacccagactcgagtgcaatggtgcgatcttggctcaatgtaacctctgccacccgggttcaagaaattctcctgcctcagcctcctgagtagctgggattacaggcatgtgccaccatacccggctaatttttgtatttttagcagaaacagggttccaccatgttggccaagttggtctcagactcctgaccttaggtgatccatcctcctcggcctcccaaagtgctgggattacaggtgtgaggcactgagcccggcctgactttttaataatagccattctgattggtgtgagatggtatctcaccgtggttttgatttgcatttctctaatgattagtgatgttgagtatttttccacgtttgttgtctgtttgtatgacttcttttgaaaagtatctgttcatgtccttttccaactctttaaatgtattctatttatttatttatttatttatttttgagacggagtcttactttgtcrcccaggctggaacgcagtggcacc

SEQ ID NO: 824379 - DNA, 507 bp, Homo sapiens
tcatgtttaccaccttttctactagaaagttccaatgtgaaaggaggaaattttcctatattttttagtactatatacttaacatttggaataatgctcagaatttattggcattcaatatatacttaaccagtgaataaatggatgaatgacagaatcaggaagagaaaagaacagagacaggaagagccagagacagagagacagagaaacagagtgagacagagtgagacagaagtaatacatatattctcacaggctgtgctgaacatttgactttcttatggggagggatccaaaaggactataactttggggcaaatttacatttctgttatcaaaaatttgaggctaaaaataaaaaaaatttaaagattttttgtatgcaaggtatacagtcatttgtaatattagtcaatatgctgtttgggagttatacaaaatcaaactgtaaagaaagcacatgaaatttaagtcaagaaaagtraaaagtgggtattttacaga

SEQ ID NO: 824380 - DNA, 270 bp, Homo sapiens
cgcttctgctgcctcaccaagtctggaaagagctgctcttatctcaggctacccacttccactccgcgcccctgcctgtcccatctcttggaatgagcgccagcttcctgggagtggagtgtacctctttcccaaacaggccctctgtctggaacgcgcctcttctcrctccctgagtcatcaataaatctgtctcactttgtcctgactcaagctttgcagtcatagagttgggtctgcggagttgccattttcacaggatgagggatc

SEQ ID NO: 824381 - DNA, 839 bp, Homo sapiens
tcagttgttaatcttattgaggatcctttgtatgtcatgagttgcttttcttgctactcttaagattctctttggcttttaacagtttgattaggatgtgtctaggtgatccctttgagtttatcayacttggagtttgttgtgtctcttggttatgtggcttgtttttcatcaaatttggagatttttcacttattatttcttgagtatttctgcccctttctctctgtttctgttttcctttggaatgcccgtcatgctgtgttctactcatttttactcctgttttctttctctttctcacactagataattgcaatggcctactttcagtttcatggattctttcctctgcctgttcaactctgttgtgatattttcatttcagatattgtacttttcaactccataatttctgtttggctcattaaaaatacaaataatttctgtcgccgtattggctgctttttccgcctttgtatgggccatactttcttgtttctttgatacctcataattttttttttttggaaactagacatttacttactattatttaaatgtgacaactcttgaaatctaccccttcagggatgttattgctgggttttgttgtttgtttagtgtcttttcagaaccagttccgtacagtgtattttttttgtatgtggccacggaagtctctacatgatttgcttagtgcttagctaatgactggacagagatttccttagatgcctggaactaaaaagttattggctctttgctgagggtctcttgtatacctgttggtgcttgccctgaacactcagcaggcatttgacaaccctgccttaaac

SEQ ID NO: 824382 - DNA, 559 bp, Homo sapiens
cctcggctgccttcctcgggatccctccttccttctcccagctcacagccttgacctttactgaggatcacagayaccccaactttcccaggaccatcctggtctcaaaagctccctcctggcatccctgcatgtcatcaaactgtcctaggtattatgtggctttgctggccacaagcagaactaccaacagcaatgagcagaggcttgagcaggtgtctcggttcctcggggaaaagcttgttctgtggcctgttgggtgacaccaaaggccaggtgtcaccacagagactctgacttgttggtggggacctggacaccgggctttgaaaagctcatgggggctccaacacacaggtttggggaccctcaggggttgagggttgcaggtgatcctccagcccagccagccctgcatgtgcaggggaccctggggaggggcaggggagctagggtgggtgtggctgcagcaccccctgaggccccctcaggagagccgggttacccatcgctggcaagcagctccctgcatgtgtgagtccctaggttgccgtctcca

SEQ ID NO: 824383 - DNA, 570 bp, Homo sapiens
atcccactgccccccctgcagaaatgccctccatcctcccctgcagcctctgctgtgtctgagatcccactgccccycctgcagaaatgccctccatcctcccctgcagcctctgctgtgtctgagatcccactgccccccctgcagaaatgccctccatccttccctgcagcctctgctgtgtctgacatcccactgcccctcctgctgcttccaccctggcaagcttgataggaccagagcttgtcatcagcagcttctgaaattgctaaagctcatggaatgcagtctgtcccataatttagccccgattgaaagctgaagtgtgttgagggctgagggttgtcctccttagctgctgtagtgggcccttccctggctggcttgctgctggcctgagattccttctaaccccctcctggacacctactgggagaacatgaaggcagcctccagttctctttgaacacagttcaggaaaggtggaaggtaacagccttcctttccatctggttaggctgatctctctaagaaacactggctggaatgaaagaagggcagcccctacca

SEQ ID NO: 824384 - DNA, 617 bp, Homo sapiens
ctctgcccattacccaattccaaagtcacttccacattttcaggtatctttatagcratgcctcacttctttggtatcaattttctgtattagttctcacactgctataaagaagtacttgagactggataatttatgaataaaagaggtttaattgacttacagttctgcaggctgtatgggaagcatgactgcggagccctcacgaaacttaaaatcatgacagaagggtgaagaggaagcaagtatatctgctcatggcagcaggagagagagtgaagggggaagtgccacatacttttaaacaaccagatcttatgagaactcacttactatcatgagcacagcagggggaaatctgtccacatgatccaatcacctaccaccaggcccctcccccaacattaagaattgcaattcaacatgagattcgggtggtaacacagagccaggccatatcaatgtgtaaacaaatctctttagcaacaggtgtgatatatagaaaacacacaaatagaatcagctgaaagtaaacaggagtgaaataaaggatgtaaagcctagaaaaaaactagacatgagggagtattgccagggacccagacgtgagggactat

SEQ ID NO: 824385 - DNA, 534 bp, Homo sapiens
atcttttattttcatatgtgctctactatgttcaaagaaaaatatctttatkacttgaaatatctggttaaaaccttagcaacatttattgagtcctatggttgaccacagataagtatttggtgtactcactggagcccttcaattcaatccacctcttccaactgtcacattctagatgttgctaatctctctccattgctttatattcatacataccctttttgttcctctgctctgctaattatttcatacttattatgtcagggtttcttctaatcaatcacctatatttcacctatttaacaatattaactaacacctactgaatacagtaagaggctacaaaggaaatgtaatacagttcatactgattgttatgcactgtttttctaggtgagcagttcacttagaaaaacaatgcataacacttgatcattcccaattaagcagcagaaacaataggaggttgctggagagaaacaataggtcagggtgttggagagaacatggaggtcatgtgttaaatggatc

SEQ ID NO: 824386 - DNA, 534 bp, Homo sapiens
atcttttattttcatatgtgctctactatgttcaaagaaaaatatctttatgacttgaaatatctggttaaaaccttagcaacatttattgagtcctatggttgaccacagataagtatttggtgtactcaytggagcccttcaattcaatccacctcttccaactgtcacattctagatgttgctaatctctctccattgctttatattcatacataccctttttgttcctctgctctgctaattatttcatacttattatgtcagggtttcttctaatcaatcacctatatttcacctatttaacaatattaactaacacctactgaatacagtaagaggctacaaaggaaatgtaatacagttcatactgattgttatgcactgtttttctaggtgagcagttcacttagaaaaacaatgcataacacttgatcattcccaattaagcagcagaaacaataggaggttgctggagagaaacaataggtcagggtgttggagagaacatggaggtcatgtgttaaatggatc

SEQ ID NO: 824387 - DNA, 537 bp, Homo sapiens
cagcatctaaaaaaactaatttgtaacactgtattactttccaggcactaacctcatcctcaatraatcagtctaactttgttataataacttaagagtcttagtctggtgtaaattttctaaggaagagaagttctgtatttcatattcctgtattgcaatattttttaacaggtattttcttctccactctgtacagaatgaaagaaatgtcatgttgcattatgttttttgatgaaatcatatccagttttcagacctttcaggagaataagcttttttttccttttttttttttttttgttcttatgaatttcttccttcactggccttatacccggatttacgggccagggaacccaggcaaatttcagggaggcctcctctggtcggtagtccactgcggttcaccatgagactcattgttctaatccccatggtccattacaaagaagaggcacccactactttcactgcagcttccaaggccatgatgcttaatgctgagtgctcaggagtctatgtccaggcctgcta

SEQ ID NO: 824388 - DNA, 529 bp, Homo sapiens
ccagttatctggaacttcactcagagttaacctaaatactgatggtcaaatactgatcccttctaattgtatccaaccaattccaagttccatgactatcatagtaacatgcttctcctcccatctccttctctctatgctcgtgtcactggaaacatcttttataaatgcaagtcagatcatattcatatcctggccaaactgttccaatggctttctttaatatttaggtttcacagcctacaagatccaacattccatcacctttcaaacccctccacactcatcttgcactgtgctcttttgtgccgcctagctatgctggccttctctctacagcttgaccacagttcattcttttctcaggagcactgacctactgtcacttctgcctggaaatttctttctcccaaacaattgcatagcttgtttcttctcccacattctacatcactccctatttagtcacagactctattactacataaaamtatatcatatgttatatgtttctttattatcttcctac

SEQ ID NO: 824389 - DNA, 579 bp, Homo sapiens
aacccatagttagtcagtcagggagatgaaytggagactgagctcccatctccttgtctgcagcaccaagttaaagccttcttccttggcagtactcatcatctcagtgattggctttctgtgcagtgagcagtagggcctagaccaaacccttggtattgcagtaacaatgggaccattacatattctatccctgcaacaaacactcacatgtaccccataaatatgtaaaatattatatatcaaggaaagaaaaataatgggtaactaggtaacatgaacaaattaatttgcatcactatggtaataattttactatctatagctatatcttaaaacatcatgttgtataccttacatatatacattcaaatttattttttaaaatggaagatatatttcaataacgttagaaaatgagaagggatcaaaatgataagacataaaaatcaatggaaatgaaaggaagtggcaattgagaaaatgaggaacaataatagtataagactaaaaatccatattagcaattactttaaatgtaaatggtttaaacactccaatccaaaggtagacattggc

SEQ ID NO: 824390 - DNA, 579 bp, Homo sapiens
aacccatagttagtcagtcagggagatgaactggagactgagctcccatctccttgkctgcagcaccaagttaaagccttcttccttggcagtactcatcatctcagtgattggctttctgtgcagtgagcagtagggcctagaccaaacccttggtattgcagtaacaatgggaccattacatattctatccctgcaacaaacactcacatgtaccccataaatatgtaaaatattatatatcaaggaaagaaaaataatgggtaactaggtaacatgaacaaattaatttgcatcactatggtaataattttactatctatagctatatcttaaaacatcatgttgtataccttacatatatacattcaaatttattttttaaaatggaagatatatttcaataacgttagaaaatgagaagggatcaaaatgataagacataaaaatcaatggaaatgaaaggaagtggcaattgagaaaatgaggaacaataatagtataagactaaaaatccatattagcaattactttaaatgtaaatggtttaaacactccaatccaaaggtagacattggc

SEQ ID NO: 824391 - DNA, 558 bp, Homo sapiens
agtatatacaaagctgtgttggctgcagctggctcttttctataagcaccatctaatatcttgtaggcagaaatgcacagtctaatataaaacctgctgaaggaagtaaataagactatagaagcaaacccaaaagaccctattcagcattctctacagtcacaccccctagggagatagggaagagaaaaggaaagaagaaaacgcaataatattataggaaaagaaataaaacacaaaaaatcccacctacacaaaataattacaaatattggaagtgccagcatctccagatgaaaaaacccagtgcaagaattctggcatcacgaaaatctgattgtagtaacaccaccaaagaattgcactagccctctagcaatggtcactagacaaaatggaaattaagaaatgacaatttaagaactgaaagcatggattgcaaggaaccttaacgagatccaagacaaagataaaaatcaacacacacamaaaaaaaacctctatagcaacccagtaaacaaaggaaaacattaacatatttttaaaaaatcaatcaga

SEQ ID NO: 824392 - DNA, 308 bp, Homo sapiens
tattggtcactgtcatggttgtgtttgataaggagtctgcccccattaaaagattatcttccccacctctgcactcacaagttaggcttcttgactgtaactggactacagtccattcattcagggcacacatactcaccccaccaagtcacctattcccattgaaagttctacaaggccaatcaggatacakaaatatagcctagagacacataccaaggactctaagaaagtttgttagttttatctgtgataattaaacttattatcagctattaaaactattgattcttgattgtgtttaagaa

SEQ ID NO: 824393 - DNA, 623 bp, Homo sapiens
aattcatacattcagttactgtttttgtcttcttctgaagtatgttggaaaagatgaaagatgaactctataatttctttactcatcctcactctgcagtctcttagaaaggttaaatgaagaaggcttgacttcgattgtttttcggatttgaattttggaaaagaaaatgatgctggaagaataaagcagcatatttaggaaagactttcagtgataaatatctggagtatcctgttttctataccttgcttctatgccatattttacttattataaactacctcaggatctttgttaaataaacccatttatttgatgaaggagaaggaagtgccacattttaactgttactgaaagaaatgttctttgccctgttggtcttggacttccacaaaatacttgattccagatgttaaattgttttttcagaagccttgttaaagggccagagcattagatttttgaaggcatttccaaaccccagctgattatcacaacacacaggaatccaaactttcaaagcttagctttggctcttcagtgtatcagcagctgcaaaaaatacgtkctaaggcacaggttcataggactgggatccagtgtccttaaatggtaaaact

SEQ ID NO: 824394 - DNA, 623 bp, Homo sapiens
aattcatacattcagttactgtttttgtcttcttctgaagtatgttggaaaagatgaaagatgaactctataatttctttactcatcctcactctgcagtctcttagaaaggttaaatgaagaaggcttgacttcgattgtttttcggatttgaattttggaaaagaaaatgatgctggaagaataaagcagcatatttaggaaagactttcagtgataaatatctggagtatcctgttttctataccttgcttctatgccatattttacttattataaactacctcaggatctttgttaaataaacccatttatttgatgaaggagaaggaagtgccacattttaactgttactgaaagaaatgttctttgccctgttggtcttggacttccacaaaatacttgattccagatgttaaattgttttttcagaagccttgttaaagggccagagcattagatttttgaaggcatttccaaaccccagctgattatcacaacacacaggaatccaaactttcaaagcttagctttggctcttcagtgtatcagcagctgcaaaaaatacgtgctaaggcacaggtkcataggactgggatccagtgtccttaaatggtaaaact

SEQ ID NO: 824395 - DNA, 590 bp, Homo sapiens
tctatttagttaataagtgcactttaaaagttattaaaatcattataaaaacagaaacaaaaaaccaaaaaacaaaaaaacccactaagcagataagtgttctctttgtccttggtaaagccaattctgcttttacacttaaaacccacacattaacagtcaggcattcagggtgtactgaatgtagacatcacaatcctcatcagcaggaaaataaaaaccatacctgatctgttcctacaagtttcccacactagaactaaatgcactgccaacaggctattgatgtataatacattatcacatgaaaatgtgattacgacaaatacaagactgccactgtctgcaagtatataatgcattcaacataagttatgcaggaactttctcaaaatttaagctggttttagtggacatgagctcattcaaggaccctgaatggtatggtatggaaagaaataattactgcataaaayaacatgaaaagagaaacatcaggatagtaccaaaagctgagaagtgggaaagttctatgtgagaggtggcagcaccttttccaagaaacttcaaggtgaatcaggctaagtctg

SEQ ID NO: 824396 - DNA, 480 bp, Homo sapiens
gtactcagatcctaaaccatatggtatcattattattagtgttggattgccctaaaaggggaacacccrggggcctacctcaatgatttgcccaggtgggctcagtttcatttctttctctgacattctcaagcatcagtgctggattaccctaaggggcttcctcagatcgcctgtgctgtgcattttcccaaaagttcacaggcaagagagggaaaaaaaaaagaacaactcaaagctactaaagcaaccgcagaaatgcaggtcaaaatgaaaaggctctgaaattgctgagaaaggaaagaagtgaaagcagcaaaaagatggcagtcaaatgccaagagagattcaagggcaactcaggtgtgtaaagaaagaggtttctgttcctaccaatttgtgtttatgctcacaaatgtgtgcctgcgggatcaattatactctacactgttggccagcttttcttttctctttggagaa

SEQ ID NO: 824397 - DNA, 480 bp, Homo sapiens
gtactcagatcctaaaccatatggtatcattattattagtgttggattgccctaaaaggggaacacccgggkgcctacctcaatgatttgcccaggtgggctcagtttcatttctttctctgacattctcaagcatcagtgctggattaccctaaggggcttcctcagatcgcctgtgctgtgcattttcccaaaagttcacaggcaagagagggaaaaaaaaaagaacaactcaaagctactaaagcaaccgcagaaatgcaggtcaaaatgaaaaggctctgaaattgctgagaaaggaaagaagtgaaagcagcaaaaagatggcagtcaaatgccaagagagattcaagggcaactcaggtgtgtaaagaaagaggtttctgttcctaccaatttgtgtttatgctcacaaatgtgtgcctgcgggatcaattatactctacactgttggccagcttttcttttctctttggagaa

SEQ ID NO: 824398 - DNA, 566 bp, Homo sapiens
agatctgggctcatcccattttgccccaacactgtggcagcttctagatgctgtctccaccatacagccgccagtgtgaactcatgctgtctttaatggccaatctgaaagatccctgctatgctgaaaaccttcgtaagagagccttaccacggattgcctcactgatgtgtttctgtgagttgtgaggtgggctcacaggccatttgctactaataataaaaccccaaagactccatagactcactcctgtatctagatgccttcccccgtcgctgagtcaccagctgtgctgcctggcaaattccttctcctccagcaggtctcggctcagatgctctctctgtgaatccataatccgcagtgcccactcctaccccatccggctcacgtccttctcctacaggcttgctgtgctttgtatagacttccatttaagaattgtcttgtttcattgcaattgtttatacaaacgtctcccatttctttgtaagctccttaaggacagaggccaagtcttagctcttyttacatctccagtaaatagcagtttgtggcacatttta

SEQ ID NO: 824399 - DNA, 460 bp, Homo sapiens
acgtactaaatttttcagggaatttatttaaacatctcaaccatcaaattagcatatgcatcaataaaaaaatgctgtacaaattgtctataatttattgtacaggaaattttatgcttttattccctagtatatgggcttctattctctattcagtttttgttattttaatatattaaacataattgcaaaaaattaatgatctatgccatctgccaactcaaaatctcctaatctcagtttctccaactttccttctaaaaaaaattagaaaagcctttaaagaaagtatttttcaaaaatatagggaaaaaagggaaaggaaattgccttggaaagcaaatttttcttctgtgagaatgctgacagataaatcattttggagagaaatgggcaagaatattayatagaaaaatcagtttcatttttatagaaaacatgggtttccactaaagaccat

SEQ ID NO: 824400 - DNA, 352 bp, Homo sapiens
acttgagactattctaagaaggccatatgcagcaggaggatgaatgcagattcaggctctggacacttgatggttccttaaaatggatgtgtaaatttaacatttaagatagggtcggatattaattaccaaaaaaagggtaattatttaaagaaactttgtggtgattacatctgtgaaaatgaagaatcattctgtaatgtgaatcctgactctaattcagaggtccttcactcaytaattaaaactgatggactggtcagaacccagtagatcccatgtattccaacttaacacgtatggtttataagtataaatttttgcatattgagctggattaaaataggggcct

SEQ ID NO: 824401 - DNA, 332 bp, Homo sapiens
tcgtctgggcttcttaacaccacgtttttgaggtccatccatgttgtgacatgcactagtagtttgctcttttttattgctgcagagtattccactgaatggatatgccacattttgttttatccattcatcagctaaagactgtttgggctgtttccagtttctggctattatgaattgtgctgctgggagcattagcctgggtgtcacgggtgagcttacgttttcttttctcttgggcagattactaggagggcagggtgaggttatycctaccttgaatttctgaaagcatcttccaaaactggctctccttccagttcaacccctat

SEQ ID NO: 824402 - DNA, 657 bp, Homo sapiens
gtttagagtttttcctacgaaacttcagtctttatggaatcctaatacgacgttcttatttctatatgggatttagctactataaattgggagaaaktaagagtgacatctatttatcttgacattctatatatagttttttcaaggtaaatctattaatactgctttattcaaaacataatatggcacaatcaaagttgtatcaaagtctgttaggtagattcatgacaagtcatcattactaaattgttcacagtggtagaaaggggtgatggaaagatgacttgagtaaaactgaggaatccttcagtttattttaagctcagctacaaacctgtctgatgatactgagcaggctacgaaagctttccaggcatcagtttacttactagtaaaaatagaaatccccaacatgtaattagcaaattagatcatatgtgtgtaaacttcaagaatgtataaatgtaaaatattattgctattattattatttttctttgtctttcctaaggaagaaaattgtctgcttgtattctaagcactttgtaaacaaacactaggtattcaatgaacagggagcaaaatctagttctcagctagctgatagagtgagggagagagacagggtgggtggtttgtgattaaacactccaaatg

SEQ ID NO: 824403 - DNA, 542 bp, Homo sapiens
gttgaatatgatggaaagagactttgctttaatcctcatcttccacctgatacaaaactttccccaagttagtgtctctttattcaggagagagcataggttagtaggatttgatatatctacttkaggctgctattcagtgtggggacctaaaactcagaaagcacagtgctcatttccctgtggggcaggattatcttactcgagccactgtttcctaattacacaaggaagccactctttcacttctgcacaatgtgttgctgaaagacatccaagcaggatctacactgagaatgtcttcagaccacgtatcactatgtgctgctcgattcagcctgtgttatgtagggtggtgttgtctttaaatgtcacagaagaaaatccctatgaactgaaaagtgcctcagggcagagtggtgatgaaaataatgccagttccgaatgattatgataagtgcatggttcaaggtgaatgataagtgcatggttcaacctgaatctttcaagtgaaggagttgttaggagccaaaataagtcca

SEQ ID NO: 824404 - DNA, 611 bp, Homo sapiens
ccatttctattgcatgatttcctgaacttcctcccttcttccacaccttgtwttgactgtaagtagcaggaatggacacagatacaaaggtcaagtcctctcccatccattcttacttctgctacaattatatataagtttcaaatttagtacagcatagaaatgggcaagtccacaaactgtgggccaataaaagacagggcaattgacctttatgcttgaaaaggcctacacatgaaagcaaagaaagaacttaaaagaaaattgataggatttaatgagttaaaatttttaaatctgccaaaaacacatcataaaatatataaaataaaattaaaaggcaaaggacaaactgatcttaaaaattgcagattatattaattagaactaaactctaatatataaaagcatttataagaagtaagaaaaagacatttcaaattttcaaaatagcaaaaacttacagaatgttcaaatgtattaattgtaaaaaatactaattataaaattataacgttttaaatatctgatatgaaaagactttaacattcatggtacctagacttggtgaagctacagtgaagggaaagaaattctctcacacacaaagc

SEQ ID NO: 824405 - DNA, 617 bp, Homo sapiens
accctctgctccatcttcatggcccaactcactggaaaccttcctctatttgggcttaaaaagatgacaaaggactattttcagagatcctcattctttttttttttttttgagacggagtctcactcagtcacccaggctggactgcagagtgcaatggtgcgatctctgctcactgcaacctccacttcccaggttcaagggattctcctgcctcagcctcccgagtagctgggattacaggcatgcgccaccatgcctggctaatttttgtatttttagtggagatggggtttcaccatgttggccagactggtcttgaactcctgacctcaagtgatccgcctgcatcggcctcccaaagtgctgggattacaggcatgagccaccacgcccagccaatcctcattctttacatggaacaattctagaatctatagcccagtcatggagatagggtattaccccaaacctcctttagcattagagcaatggaaaktcagccccacctgctctgaggaaagagacttctggtttggtgaaactctgaatgactgagttaggggctgtggatgaccagcagctgggtgaattagggagcataggtaggagtaaca

SEQ ID NO: 824406 - DNA, 350 bp, Homo sapiens
ttgagggctcctcaagagctatcttaagattcttcaaagtatcttgtagaatgcttagcatacaagggtacacatgtttgtggattaaatgaaataaatgatgataaatacttaattgcagagtatgacattaaaagtctcccccataccgaagctctttgagcccatatttaatgtacacatcaaaaaattgcaattgtatatatgttgttggctatctctcacttttgrtgaactagcagtgcacagcaatgcattttactattttaaaacagatttccttttaatgcttctttgatcttttctgatcaattgctgtgctttatttgtttgtttgcttgtttggacat

SEQ ID NO: 824407 - DNA, 635 bp, Homo sapiens
acattaatctccatttgcctttgaatagtctgcagtagaaacagaggaccaaaagggaaaataatctcccctcatttaacctgtgcccctgtgaaaaaytgtgatagcttgtatttcagaaactgagtgtaactaattttgccctctatccatggtcttcactacacagcagcattagaaagagaatcaaaatcggatcagatcaatgaatctataaagccttttttggaatgtattgccaccacgagttgatcagtttctccagaggccctctaatacccagttttctctggggcaattgtagatccttttgcattcatttttaggacaaatcttgtcattcttttaggtagactgtcatttgttcattcatttattcatttgtttttcaaatgcctatgctgctccagtcgctgtgatttgcaaagaaaacacaaatgatgatatacagggcttgagtgggagttcctaacattggatccacagattcctaaaagtgaacgactacttcaagatgtctgtaatcctcctaagatgtgtgtgtgctttaactatgagaaaaatccaagatttagaacaatctttaaagggattgatgtaaaaactattgtagaggctgacagttacacgagcaa

SEQ ID NO: 824408 - DNA, 462 bp, Homo sapiens
gacaagggagggaggctgggggtgaggtggggtgggacagtgggggacacacctgagcacattcttaagaytgtcatctttcagacactgagattcatagagaaggtagtgtccacccccctggaggaaggacttggctgcacttctgaggggcctgccaggcctaggacctgcttcttttattctgctctgaggctcaacatggcagtgctgggcctttggcagtggctcacccctgtctagctcctctcatgttttcctttgaggctggggcctgcggggtcactctcctcccatctccaaaaatagagcaagaagaggaaggtggctccattcagcggaaagatctgaggattgaaacagagttgtggagaagggtggcagggtcctgtcttttcccgaggggctggggtatgggccaggcggctgcttctgggatccggtggccagaaccctgagtgg

SEQ ID NO: 824409 - DNA, 620 bp, Homo sapiens
tcaaactgtttccaagcaccttaactgcacccagaacaaagctcaagaatatttacaaaaatatccagcatccaacaagataaaattcacaatgcctaggagccaataaaaactgccaggcatgcaaagaagaagaaaaatatgacccataatatggagaaaaaccaatcaatcaaaagctacctagaatagacacagatattagaattagcagacaaggacattaaggtagcaattttatctgtcttccatatgttcaaaaatcttgagcaaagatagaacatgttaaatagaaacatagaagacataaaaacactgaaatctaaattttagagatgaaaactacaatgtatgaagaaaaaatacactgagtaagattaatggcatattaaacacattaatgtattaatggcatattaaacacatattaagagattagcaaatgtaaagcataggaattgaacttatctaaaaacacagagaaagaagactaaaaaagaaagatctaaagaagcctaaygtgtatgtaattgtagttcccaaaggaggaatagaaaaactgtgaaaattttctaattttgatgcaaagtagaaattcacaaatctatgaagctcagtga

SEQ ID NO: 824410 - DNA, 552 bp, Homo sapiens
tgatatgtttagggctctctgtgtcaggtggccctcagaaatgtagataaaactttattcatcaccattattactgaatgtggttttgtttttcaaaaagcaagatagagatatggactagaaagattgatttcatagccacatacttgtttctctctgttttccaaaatgattagaaaatacccaaaacagtatacattagtcccccattttccaaaggggaacatattccgtgacccacagtgggtgcctgaaactacggatagtaccaaaccctgtgtatactatgtttcctcctatacatacatcatatgataaagtttagtttataattaggcacagcaagagattaacaatagtaactaataataaaacaattataacaagatgctgtaataaaagttataggaatgtggactctctctcaraatatcttgactgtactcactattttcagaccacggttgaccacaggtaactgaaaccggagaaagtgaaaccatggataaatggggactgctgttgtctgggttttcatatatatcctcctgt

SEQ ID NO: 824411 - DNA, 572 bp, Homo sapiens
acaaaaaaatttaaaattatccagacattgtggtgtgcacctgtagtcccagctactgaggaagttgaggtgggagggtcacttaagcctaggagttagaggctgcagtgagctacratcatgccactgcactccagcctgggtaacagagcaaaattctgtctctaaatgtaaaaataaaaataaaaaataaacactggataatgaagcaatgttcttttctcaaactctacaacaaataaaacctaagtattaaacatggactttgtacacttgtgtatatatcaatcaataaccattacttactacatgaaagttaccacactggtatagagaggacaaaaagaaagaaaatacatacacagctcctgttcttaaggatcctaagagttttgctggagaaacagggcatgacattctaatgtatatataagaatatgcagaaagattttaaatcataatgtatatcagaaaaattctgcattagtggtgaaaatatttcctaatcatagaacagatgaggagtttaaaatagccctaaaccaagtcaccccaaaatttagtagaaaaaa

SEQ ID NO: 824412 - DNA, 591 bp, Homo sapiens
gtcaaacttttatgggagtggtggtgaggaggagatccaatgacaaggaatgaatggtgcctggccagaaaggttttgtaaagttcagtttgctgctgagatctagaaacttcagcagctttctgggattaagaaggatggatttcccctccctgtgtctatgtgttctcattgttcagctcccacatatgagtgagaacatgcggtgtttcgttttctgttcctgtgttagtttgctgagaatgatggtttccagtttcatcgatgtccctgcaaagaccatgaactcaatcttttttgaggctgcatagtattctatggtaagtgttaggacaaatacctaaggcctgaggggcttaaaacctagatgatgggttgatgcgtacagaaaaccaccatggcacatttatacctatgtaacaaacctgcaagttctgcacatgtaccccagaacttgaagtaaaataaaataaaataaggatggatttcagcaataagtaaagagggtccccaatttacaatgatttgacttagaattktttgacatgagcctgatgcaaaagcaatatgttttcaatagagtattcaata

SEQ ID NO: 824413 - DNA, 563 bp, Homo sapiens
acctgaacagctggatactactcgcatccaatttgcttccaagttaacatattttcagaaaatatttgatttggagtacatacaaatatttttctgttcaataattgatttaaatatttcttaattgcgattgtggggtggtcaattgatggcaaaacaaaaaaaaattgaagaaagattccatcactctaacaaattaaaacactgtgaaaactgatgagtttatgtttctcataaaaaacttttacaaaaaatggttaccataaaaatgtatacgcacttctgtgtaactatattgaccatatttataaacacaggggtaactgaagaaagagtaagcaactgcacacattcttcaactcattgttatgaattatgagacactcagtcactgaaatgtgtatgttccaagagagaaagtggataccaccagtaattatatcagggagaaaagaactgccctgcaggatactaacaggtgctttamaaagtgaattaaataataaatacctttaaaaagtgagccccacacctgtccccaatgttgaaaaaaaagaaaaagc

SEQ ID NO: 824414 - DNA, 545 bp, Homo sapiens
ctttcccccaaattcagtttctgctcattacctttatcttgccttagaaatctattcttaaaagcagtaactatgcaagttactaaagataattctgtccctcaaacgatattgtggacttgcgaatcaaggcagaaggtcaaaaatattatactactatatatatatttttattgcagtaagattattgttatggccatattgttcggattgttgcctgtcctaaagaaaataatacattataatgataaatatataaatataatataaatacgtacatacaggtagcgattgctaaatagatattttgtactatttgctgtagtgaagggatcacaaaacagaaggaagccaatttgtatgttctccaattctaatgatgtgactttagacatttgaaaaatgcctctctgggccttatttaccttatcaataaagggattagatttgttcacrtgagagtgttggaaagcattctctttgaacaccagccctatggggtattctcaacataaagaatgacattgtcttctccatttgggcat

SEQ ID NO: 824415 - DNA, 581 bp, Homo sapiens
ataaactttgaacttaaagccaattcacgttcatacccttattttttttccagttcacatatatcttttytaaaaacagagatgtaaaaattagccattttcaaaactaatatataacaagttccaggaccacaataaaaaatttagtattttaagcatctcaggttaaaaagatactcattaaaaaaaattaagtccctggctgtggcacagtggctcacgcctgtaatctcagcacttttggaggccgaggtgggcggatcactaggtcaagagatagagaccatcctggccaacatggtgaaaccctttctctactaaaaatacaaaaattagctgggtgtggtggcacgtgcctgtaatcccagctactctgaaggctgaggaaggagaatcacttgaacttgggaggcggaggctgcagtgagctgagattgcgccactacattccagcctggcgacaaagcgagattccatctcaaaaaaaaaaaaaaaaaaactaagtccctaaagagtatttgatagacttagtctatcaaatacacttcctcacattctcaaagtattaaaacagacagctt

SEQ ID NO: 824416 - DNA, 581 bp, Homo sapiens
ataaactttgaacttaaagccaattcacgttcatacccttattttttttccagttcacatatatcttttctaaaaacagagatgtaaaaattagccattttcaaaactaatatataacaagttccaggaccacaataaaaaatttagtattttaagcatctcaggttaaaaagatactcattaaaaaaaattaagtccctggctgtggcacagtggctcacgcctgtaatctcagcacttttggaggccgaggtgggcggatcactaggtcaagagatagagaccatcctggccaacatggtgaaaccctttctctactaaaaatacaaaaattagctgggtgtggtggcacgtgcctgtaatcccagctactctgaaggctgaggaaggagaatcacttgaacttgggaggcggaggctgcagtgagctgagattgcgccactacattccagcctggcgacaaagcgagattccatctcaaaaaaaaaaaaaaaaaaaytaagtccctaaagagtatttgatagacttagtctatcaaatacacttcctcacattctcaaagtattaaaacagacagctt

SEQ ID NO: 824417 - DNA, 522 bp, Homo sapiens
atcacagaaaataaaactacaagccaattatctcttatgaacatagatgcaaatatccttaacaaactaccagcaaactgattctgataaagaaaattttgtaccataaccaagtgggatttatcccagaaatgcaaaggtggttcagcatatggaaatcaaccaatataatataccatactaatagagaaaaaggaaaaggtcacatgctcatctcaatagatgcagaaaaagcatttgacaaaatacaactcattgatgataaaaacactcaaacatttaggaatataagggaacttcctcagcatctatggaaaaacctgtaattaacataattatcagtgaaagactgcacactttccacctaagatctggaacaaaacaaagatacacacttccaccacttgyagtcaacactgaaccagaaggtctattcagaataataaagcaagaaagcaagaagtaactctattcaaagaaggcatgatcttatatgtagaatttcctacagaattcacaaaa

SEQ ID NO: 824418 - DNA, 560 bp, Homo sapiens
ccctgaactttcttgagctccggatcttaaatgttgacaaccctgatgtcttagcagtttggggtctactcaaagcccagttatcattgatgaggtctataaaacatttatagaagaattaatgccaattctagagaaactcttacatataatcaatgagaaaggaatattccaaaatcactctcgaagaggccagtataaccctgatgcgaaaacctaacaaaaacattaaagtgttagagtgtttgagaaaagtgaaaattacctttctgataaagaccatgtgaagatctctcgaaactaagcaatagaaaaattaacaactcaataaaaatgaatgaaggatttgaacacatatttcatgcacatggaagaggcccaacgtcattaattattagggaattgcaatttaaaaccaccattagatgccactrcatacctactagagtggctgaatttttaaaatcatactgatcatactaagtattggcaaggataaggaagaacagggaccctcatacattgctaatggaatgtaaaatagttgtaccattttggaa

SEQ ID NO: 824419 - DNA, 618 bp, Homo sapiens
tatttgtagtggttacaaataatgacatttgtttaaccacatacagctatctagattggataagactccatatgttatttcagttaagaccgataccagagtacaaaagttattggaactcctttagagagagtgactcaagaattagccccatccttagtatgctctaatcgagtataataataattgcttagtgatatttcttacatcatagacaggtgtccatgtggctgtgatcttcagttatatttgcataaagtagacctagtcttttttgttagtaatattatttctacttttttaacgacaaaattaaaactcagtattttcagagtgttcacaaaaggccttaatgatactaggtcaagtatgagaacctttctttgcttaattattaacaaataaatgagaaaaatcttatgaaaaataacatactgctacaaaattaacaagatgacacatttggcagcaattatattcatccaaatacaaacccttaattaaaacaaattactttttaaagattctcatataatatgaacaggtaaggataacacttcacaatgtygtttattaactgcactctctaggatccttttataaacacctctttgcaag

SEQ ID NO: 824420 - DNA, 616 bp, Homo sapiens
ggaggcccagcgtccgggactgccacatgctgacaatgtccagaaacctcccaggaccgtaaactgggaagaacatgggcctccctcccagaacagctcgtgatggtcggggcggggagcaacagtggtccccccgtggtgggggcataaacccgtctggcctcatctggtcaagttgaacatatgctcctccatgacccagcactgccatctatcagcagatccgccccagaaggactcacgcccatgttccaggagacaaaaaccagaacattcctggcagccagtgcagaagggccaaactgggacccacccagatgttccctttgagggacgggcagagaggggtgttggagccacagaggacacgatgaacaagccacagctcaacggtacagtgtgcgattccacttggataaaggtcagagaaggaagagccagcgccatgttggagggaagccagccatgtgggagaagaaagcaggcccagtcaccgyggccactgtgcccacggcaaggcggggccgcctctgcaggactgggcatgtcaatcagggactaggtcttctggggagctgatagcctcctaattcttgaccttagagtgtttgctttg

SEQ ID NO: 824421 - DNA, 616 bp, Homo sapiens
ggaggcccagcgtccgggactgccacatgctgacaatgtccagaaacctcccaggaccgtaaactgggaagaacatgggcctccctcccagaacagctcgtgatggtcggggcggggagcaacagtggtccccccgtggtgggggcataaacccgtctggcctcatctggtcaagttgaacatatgctcctccatgacccagcactgccatctatcagcagatccgccccagaaggactcacgcccatgttccaggagacaaaaaccagaacattcctggcagccagtgcagaagggccaaactgggacccacccagatgttccctttgagggacgggcagagaggggtgttggagccacagaggacacgatgaacaagccacagctcaacggtacagtgtgcgattccacttggataaaggtcagagaaggaagagccagcgccatgttggagggaagccagccatgtgggagaagaaagcaggcccagtcaccgcggccactgtgcccacggcaaggcggggccgccyctgcaggactgggcatgtcaatcagggactaggtcttctggggagctgatagcctcctaattcttgaccttagagtgtttgctttg

SEQ ID NO: 824422 - DNA, 560 bp, Homo sapiens
aattcctacgtgttgcaggagggacctggtgggagataattaatttgaatcatgagggtggtttctgccatactgttctcatggtagtggataagtcttawgagatctgatggttttatcagggatttccgctttcacatcttcctcattttctcctgccaccaccatgtaagaagtgcctttcacgccctgccatggttctgaggcctccccagccatttggaactgtaagttcaattaaacctcttttatcctcccagtctcagtatgtctttatcagcagtgtgagaatacactaatataccaccctaaatctatagccttatactaagcctgtgtgtgaagtggtaatagagtttgtactaagttggacatccctataccttgagaatttgtgagtattatcctaggactaaactatgttatagcaaatgttaatagattctggcaactggaaagcagatagaggatattttatttaaagagagtggcatctgcagaggtgtgaaagttggagccaataagaaattaggcatgtttcagcttaactggagtatgca

SEQ ID NO: 824423 - DNA, 560 bp, Homo sapiens
aattcctacgtgttgcaggagggacctggtgggagataattaatttgaatcatgagggtggtttctgccatactgttctcatggtagtggataagtcttaagagatctgatggttttatyagggatttccgctttcacatcttcctcattttctcctgccaccaccatgtaagaagtgcctttcacgccctgccatggttctgaggcctccccagccatttggaactgtaagttcaattaaacctcttttatcctcccagtctcagtatgtctttatcagcagtgtgagaatacactaatataccaccctaaatctatagccttatactaagcctgtgtgtgaagtggtaatagagtttgtactaagttggacatccctataccttgagaatttgtgagtattatcctaggactaaactatgttatagcaaatgttaatagattctggcaactggaaagcagatagaggatattttatttaaagagagtggcatctgcagaggtgtgaaagttggagccaataagaaattaggcatgtttcagcttaactggagtatgca

SEQ ID NO: 824424 - DNA, 627 bp, Homo sapiens
gcggcaagtgaaatgatataaccggctaacggtctcacaaccagttagcgaaagagccggcattttaacttaagctcatctgactataaaagtcaaattttmatttgtcttttaaaagaagaaacatggatgaacctggtagatattatgctaagagaaataagccagactcaggaagacaaatacagcatgatcttatttatatacagaattttaaaaagtagaactcacagaaatatagagtagaagatttccaaggatgacagggaaatgaagacatgttgttcaaagggtgcataagttctggaaccctaatgcacagcacagtaactatagttacagataataacgtattatacagttgaaatttttaagagagtagattttccatattctcatcacacacacacaaagttaactatgtgaagttatacatatgttaattagcttgattgtatgaatcacttcacaatgtctacatgtatcagaacgtcacattgtatactttgaatatatacaattttttgtcaggtatacttagtaaacttgagtaaacaaaaaggagaaacggtattgagagctggtaaagaggaatgaaaatactgaaataatcaggcatctgccaat

SEQ ID NO: 824425 - DNA, 540 bp, Homo sapiens
taatgtataatttataatgtatagagttctaaggacaccatgaaatgcagatacactgtacatctttcataaacgaataaggattatatccctttataaaaaacatttatatastctctaatataatgattttgacaaatgaagaaagagggatatatggaatatacatatatattctcttagaattatgtgaaaatcgacgacttgttataaaaggatatatacagtacaattattttttatttatttatttattctttttttggagatggtgtctcgcactctcacccaggctggagtgcagtggcacgatctcggctcactgcaacctccacctcccaggttcaagggattctcctgcctcagcctcccgagtagctgggattacaggcgcccaccaccacacccggctaatattttgcatttttagtagagacggtgtttcactatgttggccaggctggtctcaaactcctgaccttgtgatctgcccacctcggcctcccaaagtgctgggattacaggcgtgagacaccacac

SEQ ID NO: 824426 - DNA, 540 bp, Homo sapiens
taatgtataatttataatgtatagagttctaaggacaccatgaaatgcagatacactgtacatctttcataaacgaataaggattatatccctttataaaaaacatttatatactctctartataatgattttgacaaatgaagaaagagggatatatggaatatacatatatattctcttagaattatgtgaaaatcgacgacttgttataaaaggatatatacagtacaattattttttatttatttatttattctttttttggagatggtgtctcgcactctcacccaggctggagtgcagtggcacgatctcggctcactgcaacctccacctcccaggttcaagggattctcctgcctcagcctcccgagtagctgggattacaggcgcccaccaccacacccggctaatattttgcatttttagtagagacggtgtttcactatgttggccaggctggtctcaaactcctgaccttgtgatctgcccacctcggcctcccaaagtgctgggattacaggcgtgagacaccacac

SEQ ID NO: 824427 - DNA, 609 bp, Homo sapiens
ttagttttaggagaaccatgacaccgtacatatacagggtagctaagaaagcagattgctttttgtcatgtttacattgggaggggaagaggaggaggattcagaaggagacaagtagatgaaaataaagatccctttctatggtgggcttataaaactttttggatgctctggttttgggaattttaaatttgagatactaaaaatatttcccagtgtagctttccacaaaaacttatctgtaactcaggaagaagtttgaattcaaataaataggtctgaaaagcacttacacagagataagcttgtggcaataagggaaatctccaagagacaaaatataaaaggtcaggtgactaaccagccacaatttggcgtgctgcagaggcaacactgggagggcagcaaagaagatagagaagcacaccgtgaggaagaagaaaaaaactgcagaattcgctgtcccagatgttgagggaggagttcgaggatgtcaacactgactctccaggatcagagcaaagaaagamagacagataggagacaagtagcacaggacaattacttcatctgtttcagtagagttggaacggaattcaagtggtaaga

SEQ ID NO: 824428 - DNA, 645 bp, Homo sapiens
atggaggatgttaggcagtgaattatataagtttaggtttgcaaactacattttgtggtgtattggcattccatagagatacatgcacatgtatttacattttctcagaattcatgtgatttcttcttgtggaaagtcagaagcagttttagaaaatttttgcaaattcacaacacactatatcattattttgatgcaaaagtctttgcaaattaacaacaattttctttctaggaacacgaaaaacagtattatttctcttccgtactgccactccatcacccataacctaaactagatgaagaacaggcatttgaatgcgaggtcaatctgaactttattcttagttcaaacactaatttgctacatggtcctgagtatgcttcataaccattgtttgctctagtggttcttcctttgaggcaatattaatctttgtgttccttctgtctcatcaagagagtacaaatgttgtttgctagataatagttaatctctagtaaatgtgggtgaagcacagttcagaaattaatgtttayttattggaatcactgcaaaacatttgttaaatatctcattccacgtatctataaattttgatccctgaagtggactccgtaagtttattgaggtgcaaggagcaaa

SEQ ID NO: 824429 - DNA, 532 bp, Homo sapiens
cctgtgccacacccctccctggatcctatctctcccagcagctctctctcctcccatcagggaagtcaaggccacctccgggcttccaaatggctcatctcctggcctcctcccacctgacgaccttacctgcgcatacatacacagagcttcctgctctactctgtttttccttctttttttttttttttttttgagactgagtcttgctctgtcgcccaggctggagtgcaatggcgcaatctcggcttcctgggttaaagcaattctcctgcttaagcctcctgagtagctgggattacaggcacctgccaacatgcccagctaacttttgcatttttagtagagatggggtttcaccacattggccaggctggtctcgaactcctgacctcaggtgatccatccgtctcagcctcccaaagtgctgagattacaggcgtgagccaccgtgcccrgcctgtttttccatttttttcttacaaaatacatcatacatcccaaggtccctgttttgatatgtctctgcctg

SEQ ID NO: 824430 - DNA, 532 bp, Homo sapiens
cctgtgccacacccctccctggatcctatctctcccagcagctctctctcctcccatcagggaagtcaaggccacctccgggcttccaaatggctcatctcctggcctcctcccacctgacgaccttacctgcgcatacatacacagagcttcctgctctactctgtttttccttctttttttttttttttttttgagactgagtcttgctctgtcgcccaggctggagtgcaatggcgcaatctcggcttcctgggttaaagcaattctcctgcttaagcctcctgagtagctgggattacaggcacctgccaacatgcccagctaacttttgcatttttagtagagatggggtttcaccacattggccaggctggtctcgaactcctgacctcaggtgatccatccgtctcagcctcccaaagtgctgagattacaggcgtgagccaccgtgcccggmctgtttttccatttttttcttacaaaatacatcatacatcccaaggtccctgttttgatatgtctctgcctg

SEQ ID NO: 824431 - DNA, 615 bp, Homo sapiens
aaataagaagagcctgggtccttgatggcactgctgagctgccaagctcgtcctggggccacctagctccagacttcttctaatgtgggatgataaacatttgctattgtttaaaccatttgtaatcaagccttatttcttgaagcccaaatcatcctgatgggttttctttttttattattatttttaaaatatttttcccataagttattggggtacaggtggtatgagtaagttctttagtggtgatttgtgagattctggcgcacccatcacccaagcagtatacgctgcaccttactattttatgccccaccaccccccacccttccccacaagtccctgaagtccatcgtatcattcttatgccttcgtgtcctcatatctcagctcccacatatcagtgagaacatacgatgtttggttttccattcctgagttacttcacttagagtaatagtctccaatctcatccaggtcgctgcaaatrccattaattcatgcctttttatggctgagtagtattccatcatatatatatatatctcagtttctttatctactcattgattgacaggcatttgggatggttccatgattttgctgctataaata

SEQ ID NO: 824432 - DNA, 615 bp, Homo sapiens
aaataagaagagcctgggtccttgatggcactgctgagctgccaagctcgtcctggggccacctagctccagacttcttctaatgtgggatgataaacatttgctattgtttaaaccatttgtaatcaagccttatttcttgaagcccaaatcatcctgatgggttttctttttttattattatttttaaaatatttttcccataagttattggggtacaggtggtatgagtaagttctttagtggtgatttgtgagattctggcgcacccatcacccaagcagtatacgctgcaccttactattttatgccccaccaccccccacccttccccacaagtccctgaagtccatcgtatcattcttatgccttcgtgtcctcatatctcagctcccacatatcagtgagaacatacgatgtttggttttccattcctgagttacttcacttagagtaatagtctccaatctcatccaggtcgctgcaaatgccattaattcatgcctttttatggctgagtagtattccatcatatatatatatatcwcagtttctttatctactcattgattgacaggcatttgggatggttccatgattttgctgctataaata

SEQ ID NO: 824433 - DNA, 617 bp, Homo sapiens
caagaaagtgaaaagaccaaccacgrgtgtgggaatggtatttccaacagttatcactacaaaagaccagtgcccagcacacatgtacaactccttcaccaagtaagaaaaaggcaaacaatacaaaagaaatactggcaaaggaatctaatacattcatcacaaaatgaaaatataaatggccaagaaatatgtgaggatgtgtttaacttcattagtcattgaggaaatgcaaaataaaaccaccgaggaaatgcaaaataaaaccgccaaggaatatggctaaaattaaacactctgaaataccctgtgttggtgaggatgcagaagaatagaaatgctcagtcacactggtaggaacataagatggtgcaaacgctgcagaaaactcagttgaagattttcacactttatgaagaacacccagggcattctttgctgagtctatgcctggaaaaatatatgtacaagtggacacatggaaaaaacaaacaatgttcatagcagctttgtttataattgccccaaactggatgcaacataacacgcatacaacaaaatactatccagcagtgtaaaggaatgcactatagctacacacaatgacatgcatggat

SEQ ID NO: 824434 - DNA, 617 bp, Homo sapiens
caagaaagtgaaaagaccaaccacgggtgtgggaatggtatttccaacagttatcactacaaaagaccagtgcccagcacacatgtacaactccttcaccaagtaagaaaaaggcaaacaatacaaaagaaatactggcaaaggaatctaatacattcatcacaaaatgaaaatataaatggccaagaaatatgtgaggatgtgtttaacttcattagtcattgaggaaatgcaaaataaaaccaccgaggaaatgcaaaataaaaccgccaaggaatatggctaaaattaaacactctgaaataccctgtgttggtgaggatgcagaagaatagaaatgctcagtcacactggtaggaacataagatggtgcaaacgctgcagaaaactcagttgaagattttcacactttatgaagaacacccagggcattctttgctgagtctatgcctggaaaaatatatgtacaagtggacacatggaaaaaacaaacaatgttcatagcagctttgtttataattgccccaaactggatgcaacataacacgcatacaacaaaatactatccagcagtgwaaaggaatgcactatagctacacacaatgacatgcatggat

SEQ ID NO: 824435 - DNA, 587 bp, Homo sapiens
gaggaagtttagcccaggattgcagcagatggtagggagagggacacatctsaaaacaagggtgtgagtgagtctacatacagaacaaggaggctccaggttccctgactctctgggcttaaaaatactggcagcttagggatatacctctcccactaccaccttcccaggcaggaaactggaggattgttagatggggaaatggaatatactcagaatctccagattctgacactcagggttctcccacaaacagctggatcccaactagcacattataattgacaagctctcctctacccaaaaagagtgaccagtcagctctaatgtaatattctcaagtatcaacagacaaaaaaatactaaaattaagctccaggaagaaaaaacaagactaaaacaaattaacagagaaaactcagaggaaatcaagacaatggatagagaagaaaactttgtacagaaataatatctttagagaaatataaatattcatccttggcaaaataacaagacatcattttttaaggaatagaaaacaaattagaactcttaaaattggaaaatatgatatttgaaataaaaga

SEQ ID NO: 824436 - DNA, 660 bp, Homo sapiens
gtgagcagtggccaagttggctacaaatgctagaataatgtgctaagaaatgtcttgatggaggtgagaattgaatagagacttgtaaaaaaaaaaaaaaagaggattttctaatttagtgttcaggaccatttagcaatacttcctgcaatcccagttggtgctagctggaatgcctagccgtaacattttaagcctttaagtgtgcttctatattcaacaaagtaaataaatttttgcacttttacaaaggcaagcaaatgtctgggctctggaggaacgtacaaatgtgaataagataaggtccagctcacaaactggtgaaaacacataggtagggaattctgatggaaagaggcaaagtttaggaacacaatgaaaggaaagcctttggcagcagcctgacagagatggtatctcagcatgttgcctaggctggtctggaactcctggcctcaagcaatcctcctgcctcggcctcccaaagtgttggttttacaggcgtgagccatcgcagccagacaggcttatcttcgtggaacaagytggattgagtttggcataaaggagtggtcaggattttggcggggagatagggggaaggagatttcagggctgagatctgaatgggctgcctcttcacctcattggcttagctcc

SEQ ID NO: 824437 - DNA, 658 bp, Homo sapiens
aagattgccatttggttgtagtatcagatcaaaaactcagagtgccaaggtcattggcccctggatgcacacatcttataatctatggctgccatataagacagaagaaagaaatgtgcgctgtgcctgctgaacccttttatatcactattttatttaattttctcaacaatatgcttggatcatctcatgagctctattatacagatgaaaaactaaaatttgaagagattaagtagtccaagttcatgcagctggtaagtgtcatcagctaccatttaagctcaggtctgtctggcatcaaagtttgtaccatacctttacctcctaattcaagagaggacatacaacaattttcattatagtccaccctgatttatttgcaagtatattatccttttttcagtgactatggatcttaggggccatccagtttataagctcttaaagtgatgatatcagtggtatcagttttaaaaggaaacttggaaaaaatacagaaaagtgaaatgtgtatggggtgttatattagtcagggttctctagagggacagaactaataggatagacayacatataaaggggagtttattaaggagtattgactcacacaatcacaagtaaggtgccacaataggccatctgcaagctaaggagt

SEQ ID NO: 824438 - DNA, 621 bp, Homo sapiens
ttacagacaaaatgatgcaatactgcaatttgcttcaaaatcatatggctggaggagaaaggaatggataagggtatagatgaaacagattgaccatgagctggtcattgttactgctaggtgctgagtacatagagattcattttactattcttttctttttatatatgcttgaaatttctatagttaaaagttgttttaaggacatctctagcaaagcctacagcatatgcaaaagcccctggacacgaaggagtctgcatattccaggtcccaaaggtgtgactaggcctagggggtgaagaaagtgtgtaggactgggggatgagggggctagattgtgtagggccctggagcctaaaacttgcccccttggagcttatgggggggctcctttgaccctcggggtgaatacaatccagggaagtcaattctccttttgcaaaccaaagagggagggtggaaacgtataaatgggcacctggcatatgaatacctcttgaatcactgatgcaagggtctctcttgcaggtagcccagtcactgtgggtcatttctcagctgggaracaagacataaggccaagtaaacagtcttgaactaagaacacaaaaacacggg

SEQ ID NO: 824439 - DNA, 525 bp, Homo sapiens
ttgcattcctgtgttaatttgctgaggataatagcctccagctccatccattttcctgccgagggtatgatcacattcttttttatggctatttagtattccatggtgtatatgtaccacatttttttaaatccaagctctcattaatgagcatttaggttgattccatgtctttgctattgtgaatagtgctggaatggacatatacatgcatgtgtcttaatggtagaatgacttgtattcctttgggtatgtgcctagatatgggattgctgagtcaaatgatatttccatctttatgtctttgagaaatcaccaagctgtcttccacaatgattcaactaatttacacccatcaacagtgtataatgttcctttttctccacaacttcgccagcatctgttattttttgaycttttaattatagccattctaactggtgtgagatgatatcccattgtggttttgatgtgtatttctccaatgatcagtgatgttgcacttttttttcatatgattgttgg

SEQ ID NO: 824440 - DNA, 525 bp, Homo sapiens
ttgcattcctgtgttaatttgctgaggataatagcctccagctccatccattttcctgccgagggtatgatcacattcttttttatggctatttagtattccatggtgtatatgtaccacatttttttaaatccaagctctcattaatgagcatttaggttgattccatgtctttgctattgtgaatagtgctggaatggacatatacatgcatgtgtcttaatggtagaatgacttgtattcctttgggtatgtgcctagatatgggattgctgagtcaaatgatatttccatctttatgtctttgagaaatcaccaagctgtcttccacaatgattcaactaatttacacccatcaacagtgtataatgttcctttttctccacaacttcgccagcatctgttattttttgaccttttaattatagccattctractggtgtgagatgatatcccattgtggttttgatgtgtatttctccaatgatcagtgatgttgcacttttttttcatatgattgttgg

SEQ ID NO: 824441 - DNA, 525 bp, Homo sapiens
ttgcattcctgtgttaatttgctgaggataatagcctccagctccatccattttcctgccgagggtatgatcacattcttttttatggctatttagtattccatggtgtatatgtaccacatttttttaaatccaagctctcattaatgagcatttaggttgattccatgtctttgctattgtgaatagtgctggaatggacatatacatgcatgtgtcttaatggtagaatgacttgtattcctttgggtatgtgcctagatatgggattgctgagtcaaatgatatttccatctttatgtctttgagaaatcaccaagctgtcttccacaatgattcaactaatttacacccatcaacagtgtataatgttcctttttctccacaacttcgccagcatctgttattttttgaccttttaattatagccattctaactggtgtgagatgatatcccattgtggttttgatgtgyatttctccaatgatcagtgatgttgcacttttttttcatatgattgttgg

SEQ ID NO: 824442 - DNA, 601 bp, Homo sapiens
tccacacatgttattgcccctgaagacctgggacaagatgtggaggtagaagacagtgatattgatgatcctaaccctgtgtaggcctaggctaatgtgtgtgttcatgtcttagttttcttaaacaacagtttaaaaagttaaagaaaaccccaaaatttaagaataataaaaagcttgtagaatgaggatataaagaaaatagtttcatacagctgtacaatgtctttatgtttttaagctaaacattattacaagagtcaaaacatttaaaaattaaaaagcttttaaagataaaaaattacagtaaactaaagttaatttattattgaagaaaaataagatttttacataaatttagtgtgtcctaggtgtacagtgttttataaagtctacagtacaacagtaacgccttaagccttcacattcgctcaccactcacttactgaggcacacagagaaacttccagttctrtaagctccatttatggtcagtgccctatacaggtgtaccattttttgtcttttctattatatttttactatacctttttcatgtttagatatgtttaaaagcacaaatacttgccatcatgttaca

SEQ ID NO: 824443 - DNA, 576 bp, Homo sapiens
tattatatttttactatacctttttcatgtttagatatgtttaaaarcacaaatacttgccatcatgttacaattgcttgcagtattcagtacagtaacatgatgtacagctttgtagactagaagcaatagctacaccttatcacctaggtgtgtagtaggccatatcatctaggtttgtgtaaacacactcttgatatttgcatgatgacaaagtcacttaaggatgaatttgtcacaacgtattgtcatcattaagtgatgcatgactgtaaaatgaaatccattattatgattaagcagaagaataaatcaaagaagttggactctatgctattttcataaacactgaaaagatttcaattaatatgatatttatttatttattttgagatggagtctcactctgtcacccaggctggagtgcagtggtatgatcttggctcactgtaacctctgtctcccaggttcaagtgattgtccttcctcagcctcctgagtagctgggactacaggcatgcactaccatgcctggctaatttttgtgtttttagtagagacagggtttcaccatta

SEQ ID NO: 824444 - DNA, 576 bp, Homo sapiens
tattatatttttactatacctttttcatgtttagatatgtttaaaagcayaaatacttgccatcatgttacaattgcttgcagtattcagtacagtaacatgatgtacagctttgtagactagaagcaatagctacaccttatcacctaggtgtgtagtaggccatatcatctaggtttgtgtaaacacactcttgatatttgcatgatgacaaagtcacttaaggatgaatttgtcacaacgtattgtcatcattaagtgatgcatgactgtaaaatgaaatccattattatgattaagcagaagaataaatcaaagaagttggactctatgctattttcataaacactgaaaagatttcaattaatatgatatttatttatttattttgagatggagtctcactctgtcacccaggctggagtgcagtggtatgatcttggctcactgtaacctctgtctcccaggttcaagtgattgtccttcctcagcctcctgagtagctgggactacaggcatgcactaccatgcctggctaatttttgtgtttttagtagagacagggtttcaccatta

SEQ ID NO: 824445 - DNA, 576 bp, Homo sapiens
tattatatttttactatacctttttcatgtttagatatgtttaaaagcacaaatacttgccatcatgttacaattgcttgcagtattcagtacagtaacatgatgtacagctttgtagactagragcaatagctacaccttatcacctaggtgtgtagtaggccatatcatctaggtttgtgtaaacacactcttgatatttgcatgatgacaaagtcacttaaggatgaatttgtcacaacgtattgtcatcattaagtgatgcatgactgtaaaatgaaatccattattatgattaagcagaagaataaatcaaagaagttggactctatgctattttcataaacactgaaaagatttcaattaatatgatatttatttatttattttgagatggagtctcactctgtcacccaggctggagtgcagtggtatgatcttggctcactgtaacctctgtctcccaggttcaagtgattgtccttcctcagcctcctgagtagctgggactacaggcatgcactaccatgcctggctaatttttgtgtttttagtagagacagggtttcaccatta

SEQ ID NO: 824446 - DNA, 529 bp, Homo sapiens
cttgaaggagatagcatgctctaatttgcttttttctaggagttgattgggaaaaatagctagaggtctcagaatcttgtgtgtgtrtgtgtgtgtgtgtgtgtgtgtgtgtgtgtgtgtgtgtatatatataaattgattccatctatttttattatatacctgtgtccttaactatgtctcatttctcccaggccagttcctctgtttatctgctgtagggaataaacctccagcattctgccagggtagaagagaagcagtagctagcctagagagggacctaagaatctgactgcttgttaattagtgccctttttctttccctctcacttccagaggtacctggtgtcactagctccttacccttttggttattctattgtgtaaatcagattggtcctcagcattccccattgctggccacaggctcagtgttcttggtcctgataaattggttaatgctgtcacctcctctcctgtgttctccatctctgtgggtttatgccattttatgaaatattttcca

SEQ ID NO: 824447 - DNA, 529 bp, Homo sapiens
cttgaaggagatagcatgctctaatttgcttttttctaggagttgattgggaaaaatagctagaggtctcagaatcttgtgtgtgtgtgtgtgtgtgtgtgtgtgtgtgtgtgtgygtgtgtgtatatatataaattgattccatctatttttattatatacctgtgtccttaactatgtctcatttctcccaggccagttcctctgtttatctgctgtagggaataaacctccagcattctgccagggtagaagagaagcagtagctagcctagagagggacctaagaatctgactgcttgttaattagtgccctttttctttccctctcacttccagaggtacctggtgtcactagctccttacccttttggttattctattgtgtaaatcagattggtcctcagcattccccattgctggccacaggctcagtgttcttggtcctgataaattggttaatgctgtcacctcctctcctgtgttctccatctctgtgggtttatgccattttatgaaatattttcca

SEQ ID NO: 824448 - DNA, 643 bp, Homo sapiens
tcttttcacaatatcaatgagaagacaagcccaggaatgaatttaagaagatgtagaaaatcccatatgaggaaatcattcaaagcactacggaggatacaaaggtttgtgaaatgggaagrcgtatcttttttcttcctaggtgaaaagagtaaacatggtaaataatatcaaattgttcataagttaacataaacacttcagagaactctcctccctctaattctagataagctaattctgaaatttatatggaaagtggtccagcaggacaaacgagaagaatgcagaaaaagcaatgaggaagattagccttaccaacaataaaggatattataaaggcttatgaattgaaacattttggttctggcttatgaacagtcacactagtggaacagatgagcaggtctagggatagacccatggaacttaattagtgtgtgattatgataaaggaatggtaagtgtgatcaagaaaagctgaacttttcaacaaatggtgttggggaaactggatagccatctgaaaaaacaaaagttttgtccatacctcacattctgcctcaagataagctccaaatatatgaggatttgtttttcatttttgttttttttgtttttgtttttgagacaagagtctcac

SEQ ID NO: 824449 - DNA, 620 bp, Homo sapiens
gagtgatattgctgggtcatatgatagayggacaggcatacctcattttattgcacttcactttactacactttgcaaattacagtgttttttttttaattgaaggtttatggcaaccctgtgttgagcgtctgtcagcatcatgtttccagcagcgtgcactcactttctatctctgtgtcatattttgataattctttcaatatttcagaccttttcagtattacctgttgtggtgatttgtgatcggtgatctttgatgttactattgtaattgttttggggcaccacaaactgcacccacataagagagtgaacttaatcgataagtgttgtgtgtgttccaactgctccaccaactggctgttccctcatttctctgcctctactgtgaccccatttcctgagacactacaatattgaaattaagccagttaaccctgcagtggcctctaagtgtgcaagtgaaaggaaaatttgcacacctctcactttaagtcaaaagctagaaatgattaagcttagtgaggaagatacgttgaaagccaagagaggctgaaaagctaggtctcttgtgccagtaagccaagttgtgaatgcaaaggaaaaagttcttaaag

SEQ ID NO: 824450 - DNA, 638 bp, Homo sapiens
agcctagctacatcagtttcagagaggtctactttggtgtttttatatttgcattttattataaaaggactacatagtcattgtaaatattaaaacaaggtagaagaaataataaagtgaaaagtaaaatttccttctttccaatgtctgtctactactctaattccaaagaaatagctactaatattgatacctttctggaagttttacatttataaagaaacatattgtgtgcatgcatttatgtctaatacattttggatatataatacatacatttggctgggtgcagtggctcacgcctgtaatcccagcactttgggaggccgaggcggacggatcacgaggtcaggagattgagaccatcctggctaacatggtgaaaccctgtctctactaaaaatacaaaaaaaaattagctgggcatggtggcacgcgcctgtagtcccagctacttgggaggctgaggcaggagaatggcatgaacctgggaggtggggcttgcagtgagctgagatcacgccactgcactccagcctgggcgacagagtgagactctgtctcaaaaaaaaaaaaaaaaaaaaaaawtttaatataaatgtacaatattttgttttattacataaattggataatgc

SEQ ID NO: 824451 - DNA, 325 bp, Homo sapiens
gtaataagccactctgagctccctgtraagaccctttatcttgtagagaccttaggcagctgacaccacagagtacaaaatggcagcgctgttaagaaccaagacagactggaaaatgatgtccaagggctaattcagctaagagtgagaggcaatccttcctctgcactgcaagttacccagagcagagaatgatgaaaactacaacggagcaggaaagagaaaggaaggagaccaactcaggccaatttctcctaaatctccctttcgcagattacttcaaattctgcattcttcccccgcttccatgatttattcttccctc

SEQ ID NO: 824452 - DNA, 604 bp, Homo sapiens
gaccggggctccgaggcctagagtcaggcctggcgtccctgcggcgggaagaagggtcaatccaccgactagagtggcggggagcatcacgcggcgctgcatggggctcgtggggaggggaaaacgtatggggctggggtcgctctggaggccggggactcggactcgggtagccgcggaggcctttctcaccatcgcgccaaactctcttcgctacagcagctgccgacaccgccgccgttacacgagcttaactacaacgccgctaacagccaatcctcgcgagaggagccgccggaagtcgtcgaaagtgcaacgcaaaagagccttttggatcatagaggcacagtcacttccggcagctagagcagctactgactctgtttcagccatcttcgataaaggcaaaaaggtaagggaaagtttccaagctttaggaagaattattttttttcaagacgctgtcttccgtactttcgttattaaacatacggctcaagtgatcaccggtatagacagtgacatsagacatctttcattagccctactcaaaaatggcggcaacgtaagtatcctgggccggaggtcggttgtaacccggaag

SEQ ID NO: 824453 - DNA, 606 bp, Homo sapiens
cttgctgggtgcctactggattcgactgacagatacctcgtgatttaagttcactttcctctgcccccttacctcaaccaccatttcacaaacagatgccaccacttactaagkagtcaagagggaggctgctctcaccatcccaagaaaaatgaacaataaatatgtgtatttgagattctgaattcttccttaagctgctgcacagaaaacactccttactggtgaggtttcattcaagctgatgtattccagtctcctttcatttagtgcctaagactttcatttagtgtccaagactgaatgagactgccctgttgggcaggagaagtggaagaacaacaacagaacaagtaaaaaccagccttctctttgcacaactctaattgttcggccctttattttaggatgtaaaagtataaatttacttaaactattttcatgaccttttgctcaagtagttaacaaacgattaaatagtaatctaaaaacaaatgttttagtaagaaaataaaaagatgcaatgaaggaccttgaaacaaacaataaggtagccattcctgttttttagaaaggaaaaacaaaacacttttattcatacacatt

SEQ ID NO: 824454 - DNA, 529 bp, Homo sapiens
actcacatttaatctttttctgttgtcttgttatcactcacctgactttctctgtctttgtwtagtgttctagcttcagagtcaaattgactaaatttttttaattcatggaaggcattttataataacttttgtctggcctgtaacaaccattttctggtgagtattctttgtctgccatttatttttgctttttcaaaccccatctcttcctgtagtatcttggtttagaagttattttgacttcttttaaaattatttatcagtttttaaaatcagtttttctttaaacaaatctttaccaggagtttgcatgaaagaagagtctaaggttgtattccagactggcaggaactgcaatcatgacttactatttattctcttatgctttacttctttgctagtggatggagatagccaattctatagttgttcataatgtaaagtctctctctccctccagttgtatcaatagaccacctcctgcgaatatcacttgtctaaaagagcctttgtctgtgccctgaaa

SEQ ID NO: 824455 - DNA, 647 bp, Homo sapiens
ttcactatcacaagaatagcacaggaaagactggcttccatgattcaattacctccccctgagtccctcccacaacatgtgggaattctgggagatataattccagttgagatttgaatkgggacacagccaaaccatatcaactccgagggcaattctactttttcattactgttgttttatatataaacactgagattcttgcatttacatattcaacacaagttcacatgcctcagtttttcaaaaggctgcctcacttaagaatggtaaacaccagtaatgcgattatagtagaacccattactgctactgaatatatacccaaaggattgtaaatcattctactataaagacacatgcacacatatgtttattgcagcactattcacaataccaaagacttagaaccatcaatgatagactggatgaagaaaatgttgcaaatatacaccaaggaatactatgcagccataaaaaaggatgagttcacgtcctttgcagggacatggatgaagctggaaaccatcattttcagcaaactaacataagaacagaaaaccaaacaccacacgttctcactcactcataagtgggaattgaggagttgaacaatgagaacacatggacacagggaggggaacatc

SEQ ID NO: 824456 - DNA, 513 bp, Homo sapiens
cctaatggtgaggtttaagcttctagtgtacccatcacctgaatagtaaatatcatactcaataatttttcaaccctgatcccccttccaccttcctccctttggagtcccccttgtgtrttatttccctctgtatgtcttgtgtacccattattgagctctcatttataagttagagtatgcagtatttaattttctgtttttaagttatttcacttaggataagggcctccacctctacctgtgttgctacataagacagaatttcattcttttctatggctgcatagtattccatggtatatacacatcacattttttaatgcagtcatccatcgataaacacctagattgattacatgaccttgctactgtgaatagtgctgcaataaatatacaagtgcaggtgtctttttggattaaagacataaatgtaagatctgaaactataaaaattcccagaagaaaacctaggaaatcctcttctggacattggctgatgcaaaggattta

SEQ ID NO: 824457 - DNA, 513 bp, Homo sapiens
cctaatggtgaggtttaagcttctagtgtacccatcacctgaatagtaaatatcatactcaataatttttcaaccctgatcccccttccaccttcctccctttggagtcccccttgtgtattatttccctctgtatgtcttgtgtacccattattgagctctcatttataagttagagtatgcagtatttaattttctgtttttaagttatttcacttaggataagggcctccacctctacctgtgttgctacataagacagaatttcattcttttctatggctgcatagtattccatggtatatacacatcacattttttaatgcagtcatccatcgataaacacctagattgattacatgaccttgctactgtgaatagtgctgcaataaatatacaagygcaggtgtctttttggattaaagacataaatgtaagatctgaaactataaaaattcccagaagaaaacctaggaaatcctcttctggacattggctgatgcaaaggattta

SEQ ID NO: 824458 - DNA, 534 bp, Homo sapiens
ttttattttcacaggtgtagtatctcatgtggctgccgtggttcctttaataattattaacccctccctgcactgagttcctctgccttcccatatacaagtacttgagtagcattattttgttccactgcataggatcaagtaattatcttctgtcttacttgatcacacatttcaagcctcatttctgatagagcacaacccaatgggggctctaaaaaggagcagagggaatgaaaagagtgctttattcttctgaaaaataaaaaaggagatggaaggaaaagaaaagaaagacgtgttagataaaatgacagatttgggaagtatagagtaaataattttgtaattaattataggtttttataaacaaagttgttactatgctgtatctgggtcctggtatgtgtcatacagggatattctataattttcaaaaatgttttttttattttatgatactcacaractcattttttgctttattttctcccaatattcatttgaagttcagctgcatgagtgttgtctgaa

SEQ ID NO: 824459 - DNA, 647 bp, Homo sapiens
ttctgttaccacattgtttgaatttaagcaattcaaatgagaaacatgttactcatagttttcaacattgtaacaatacagagggagagtagtaaaaatgatatgaagatacatttatagggatatgttatacttgggtgaccataattaatgccctgtaaaatatacttttccctgagttcatggctttgtgtgtgtataaaccgataacatgtttgtgtacatgtgcatttatatgtgtataaaatttgaccctaagaacatactaatatattgctttactcccattaaaactgtcatacattttattttgtaggctttattttccccagtaatagaaatactgccatttcccccatgattcattaatcgaattgaggaagctgcttattagatgaatcataaaatgaatgtatgttttacttttaatgtctacataaattcatcttaaatgccatttatgttttgaatatttaaaaatgtcatagtagctgggcgcggtggctcacaactgtaatcccagcactttgggagaccgaggcaggcagaccacttgaggccagcatggcgaaaccccaactctactaaaatactaaagttrtccgggcatggcggtgcactcctgtgatcttccagccactcgagac

SEQ ID NO: 824460 - DNA, 653 bp, Homo sapiens
atatgtaaaaattgtaaagtgcagacatttataagtacatttttaagttgctgctagtgtgactccaccttgacttgaagtttaaatctacaacctacaaaagaaaagaaaagtagatccagataatacagtcattataaataaatctgacttgggtgtcagattttgcaatgaaaaaatgactgcttaagaggaatttttattctttcagcattatatcaattatcatatttactttatggaaatacagtaacatatataaatgtatggaataaatgttagattaactatatttgtaatttatagtttctgtgcaattttagtgctagcttaaaaatgaactcctgcccatcagtttttaattgctgataaatttctatattgctattcagatcaaatttattttatattcaatgcagactccccatttattttttattaaaactattatttgaaacttatactatgaaattatttcttttcatattgttctttcacatcattgttttgcttgtctatccatactagaagcctgaataaaatagaaacaattatgttctagctgtatgtttcartgctatattgtaatgattatgagtcttcacaaaatgttctaagccctgatgagcaatttgttgcctgtcagccacaac

SEQ ID NO: 824461 - DNA, 454 bp, Homo sapiens
agtaatggttatcagaggctgggaaggctactggtgagagggagataaacagtgaatgttaatgggcacaaaaaataataattattatttacaattattgaaaataattaaataaaaataaataaaagattaaaaaaaaacaaagaaaaatctctttcctattagtttctccccattcacctctttcctcagtggtaaaaaacaatttgcattaagcatctatggattcactgattgattgatttaatgatatgatttggctctgtgcccccatccaaatctcatctcaaactgtaatccccatgtgtacagaaagggtcctggtgggagatgattggatcatggggraggcttctcccatgctgttcttgggatagtgaggaagttctcacgaaatctgatgtttaaaagtgacagtttcccttgcactctctctctcgctgctgcctaagat

SEQ ID NO: 824462 - DNA, 615 bp, Homo sapiens
cctccccaagtctagcttggaaaagagcaaggctctcatatggctcctgagtgattattctaatttagaaaaattaatgggttttattaccgcctttttcattcctttcaacaaacaarttatcatatcatcttatctgccctgcctctgtttggattggcattgagaggcgacagcatgctgcagccctcacttgctctcagcacctccttggcctgggtgcccactctggccatgcttgaggggcctttcagcccgcggctgcacagtgggagcccttctctgggctggcggaggcctgagccggctccctcagcttggtttgtaaatgtaccaatcagcgctctgtgtttagctgatttggtggggacttggagaacctttatttctagctaagggattgtgaatgcaccaatcagcactctgtgtctagctcaaggtttgtaaatgcaccaataagcaccctgtgtctagctcagggtttgtgaatgcaccaatcagtgctctgtgtctagctaatctagtggggacttggagaacttttgtgtctagctcagggattataaacacaccaatcagcaccctgtgaaaatggaccaatcagctctctgtaaa

SEQ ID NO: 824463 - DNA, 561 bp, Homo sapiens
gaaaagagcaaggctctcatatggctcctgagtgattattctaatttagaaaaattaatgggttttattaccgcctttttcattcctttcaacaaacaagttatcatatcatcttatctgccctgcctctgtttggattggcattgagaggcgacagcatgctgcagccctcacttgctctcagcacctccttggcctgggtgcccactctggccatgcttgaggggcctttcagcccgcggctgcacagtgggagcccttctctgggctggcggaggcctgagccggctccctcagcttggtttgtaaatgtaccaatcagcgctctgtgtttagctgatttggtggggacttggagaacctttatttctagctaagggattgtgaatgcaccaatcagcactctgtgtctagctcaaggtttgtaaatgcaccaatmagcaccctgtgtctagctcagggtttgtgaatgcaccaatcagtgctctgtgtctagctaatctagtggggacttggagaacttttgtgtctagctcagggattataaacacaccaatcagc

SEQ ID NO: 824464 - DNA, 627 bp, Homo sapiens
attctctgcagatttttttgaaggcgatccaaatcatttmtatacccttcaataattgccaaattgctggtatccacagcaattgtgattgttaggctgctagttctcaaaactattgcggacctgagaaagtgggaattaaaatgggctaattaaaacgccacaaatgtctttatacttaacaaagatgcagtcattttggttctttctttctttctacgtgctaaagtaatttaaattcatttaaagctgattttccatgctgctcaatatttgtgcaacaaaaagtaaaaacaaatacatatttctcactgtagaggtttagttagaaaacataatatctaaaaacagagatataaagataaacatttttgtcactgtataccaaacatattttttaaaacatagagagtatattaatttataacttacgtgagtttaaaatatgtcagtacttaaaatttacatccatgaaaaaatttacttttttttggtgaaagttctcttttttaagttatgtttaatagaaaacaatattaaataacaacaaacagtagcacttttaagtatactgaatcttttacccagaggcaagatatcttcatgattatcaacttagtttttatc

SEQ ID NO: 824465 - DNA, 493 bp, Homo sapiens
ctaacctgtaaaatctagaacagcacataaaatgtcctcaataaatatttgttaaataaatgaatttgttctttactttttttttttttttgagatggagtctcgctctgtcgcccaaggtgggtgcagtggtgcgatctcggctcactgcaagctctgcctcccaggttcaggccattctcctgcctcagcctcccgagtagctgggactacaggtgcccgccaccatgcctggctaattttttgtattttgatggggtttcaccgtgttagccaggatggtctcgatctcctgacctcatgatccgcccacctcggcttcccaaagtgctaggattacaggcgtgagccaccgcgcccagccgaatttgttcttttcatcagtttgagggctgtctgcataatattcctagctatcaataaataatactttgtttatmcattcttctattgataagcatttggtttcttcttaatttctcacttttaaaat

SEQ ID NO: 824466 - DNA, 586 bp, Homo sapiens
ccacatgctatttatttatttattttattttatttatttattggagagagagtcttactctgttgcccaggctagagtgcagtggtgtgatctcagctcactgcaacctccgcctcctgggctcaagcgattcttgtgcctcagcatcccgagtagctgagactacaggcgcatgccaccatgtccagctaattttttgtattttagtagagaccatgttgcccagggtgatttcaaactcctgagctcagccagtctgtccacctcagcctcccaaagtgctaggattacaggcatgagccactgctcccggcccccacatgctctttagataaacacaaacactttgtacaattctttaatgttacagaaagttcagattagattaatgttgcaacacaaaaattatttttatcttccaaggcacatattatttattttaagtatttgtgagtttttcttagacagtgtagaagtcagagcacaaagctcatcacttgtaacatgatactgaatgctctgcttcatttttcttacaacaggcaaagtaaaaccagaatcacaaawacatgttgatgaaaattgg

SEQ ID NO: 824467 - DNA, 577 bp, Homo sapiens
tagcttctttttccatcagtgattccttccactgttacagttttcctttctagataaccatgagtaagtccctcagaatagttagagtaatttcttgctgtatatttttcttaaagcagggccagccagcacaagcctctccatcaagtggaagacaatctgggaatagtgaacgtaaacggaaggaaccacgagaaaaagataaagaaaaagaaaaggaaaaaaatagctgtgttattttgtaacaagtgttggcttctgttggaaccacctatatgtcttgagaaacaaaaccacaggaggaaaggaagaaaaaccgatcaataccgtctgtgcctgatttcctaatggattttgttcgttttttcaggggaacggttgttacttagttacaatcagactttttcaagtcacacaatacactctttatgagctggagtttcatgttacaagttggaaatgctgtgtgttgwcattcatgaaaaatactgcacttgtagccagattagcaaatcacagcaaattttgtgtcatagtgacattcataactcatatcagttagtaagctattatatct

SEQ ID NO: 824468 - DNA, 474 bp, Homo sapiens
tccacaaagcatatttagattatattgaagtcagaattgtrcatcttattcattacctacataggattgcgataaccttgcagtaagaatcgcttagctgtggaattctagtttgaaaataattttccttagaattttaaacacattttccacttcctcattgtttttattgtaaatgttgagaaatacaatgccacttttgatttctgatgctttgcatgtgacctatttttctctgtagaaagtgatgtctcgtcatcagaagtatctgttgaatttgttgcctgcttcttataggttttgccttagttagcctttttttttttttttttttttttttttggaaacattgtttttattgtaaatgttgaaaaatacaatgccacttttgatttctgatgctttgcatgtgacctatttttctctgtaaaaagggatgtctcgtcatcaaaagtatctgttgaatttgttgcc

SEQ ID NO: 824469 - DNA, 572 bp, Homo sapiens
gtctcgatctcctgacctcgtgatccaccygcgttggcctcccaaagtgctgggattacaggtgtgagccaccacgcctggcaaattcttttttatttttgtctagctgaattgatttgaagaaccagtctttgttctctgagattctttcctcaacttggtgtgtactgctgttaacactgctgaatgtattatgaaatccttgtagtgagtttttcagctctaccaggtcagtttggttctttcttaaaatagctatttcgtctttcagctcttgattcattttactggattccttagattccttggattgggtttcaacttccatctgcatcttaatgttcttcactgccatccagattctgaattctgaattccaaatgtctgtcatttctgtcatttcaatccggttaagaaccattgctgggcaactagtgtgctcatttggatgtaagaagacactctgtgttttagacttgccagaattcttgctctggttctttcttatctgtgtgggaaaatgttcctttaatctttgaagttgctgtcctttagatgggacttttttgctt

SEQ ID NO: 824470 - DNA, 605 bp, Homo sapiens
agttctggagatggatagtagtgatgtttrcataaaattatgaatatacttagaagcactgaattgtactactcaaaatggttaaaaaggtaaattttattttatgtttattttaccacaattttttaaaaagataatgtgggcagagtacctaataggatgcctgatacctggaagacaattttaaaggtttcaaaagctccttgttaggccagcagtgctctttggaattacttaggatgcaatttgggaacattccctactctcaggagtatgagagtagagcccatctcctactctggaaaggatgggagtagaggatgagtcagtatttgctcccgattggtggatatggtggctgtaaatggcccctagcttcctgagaaaaagaaagaagaaaagccgaaaaggagatgagatggtggtttggaagaactgcagaaggtgttctgagcacagagcactgtgcctgatataagttctcaggaattgaggaagggaaagaaaggaaagatgaaaggggactggatgttggtgtggcaggagaaggaggtaatgaaatagggggtgatggaagaagaattactttagacccagctgatccc

SEQ ID NO: 824471 - DNA, 583 bp, Homo sapiens
attaacattattttgatgagaatttcagctgaaggatgaacagaatggttgtccagtaataataaaagcttgcagttgtcatctagtctggcttccctgcagtgaacatgagccactggtacaaaatgtctgtgaaaccaaacagaaaagatgttcttggaagtatatgcctttttgttagcataatacaataatgaactggtatgaaattcactctttgaaaacagggaggatctaagttttcgcccgacacagcaagtttacacttcggtgtgcctgttgcattagcacactccagcacagtcattctatctttggtatcattagttcacgtcggggctgtctcatcagatatagtctatgtctttttggggcagttacaacaacagagtgatgtttcattcacatcatatacttgttctggcatcatttacatcagtgataatcttggcaaacccatcaatgaatttgtccactttgtgatcagcagttgctttatcacaagtctttacagatttaatgctaygtcttttcttaaatttctgcaaccagcctgttgaatagtcaccgttcccttcaattt

SEQ ID NO: 824472 - DNA, 563 bp, Homo sapiens
atgtattacgtatatatttacatattgtgcattttgatgtgattcacaggttgtacatytaactttagaagaagtaaagctcttattaaatatcccatgcttgaaaatgttagaataatttgcagaaaatatttcagagcttctctaaatggctcagaggcatttacaacttaagaaaaactacagcttgctgaaaagcatgaattgcttactgtctttttttaatgagaatttaagaaggcttattaaaaaagaaataaattttccatttcagctcatttggcttcatctgctattaaatcctacatatacccaagagttgcactgatgtacttaaatattgtttctgcattgagattgcctaatgaggcaattagtggaactcctcagatagctggaccaaacgcttttcagcagacagaagaggtccactaaagcaacaatgcaaagtgcttacattccctgcccacttctatttgaccatgtgtcttagacaaggcgagtggtgattttggaaggtggacaaaaccatgcacttcgcctagatgaaagaggagctttga

SEQ ID NO: 824473 - DNA, 478 bp, Homo sapiens
tgtaattggagccactgggcttcttaattctggatgtctatttccttccccaaatttgaagagcttttggccatttttttwaaaataagccttctttcctttccttttttctctctgttcttcttctgggactccattttgtgtaaattggtgagctaaatggtgtttcattaagtcccttaggctgtcttcactctttttgttttttgagacagggtctcactctgttgctcaggctggagtgtactggcatgatcatggctcactgtagcctcaactttctgggctcaagcaattctcctgcttcagccttctgcatagctgggactacaggcatgtgccaccacacctggctatttttttatttttttttttgtagagacagggtctcactgggttgcccagcatgatcttaaactcatggcctcaagtaatcctcctgccttggccttctaaagtgctgggcctagagtcatga

SEQ ID NO: 824474 - DNA, 515 bp, Homo sapiens
cagtttgcaagaacattggcccattcttcatactttatgtaaaaattaactaaaaatagatcacagatctaaatgtaaaacaaaattctcaaatttctggactaaaacgtaagaaaatcttggtaatcttggtttaggcaaaaagttcttaaattaggtgacaaaagcttgatccagaagaaaaaaaatcgataaattggactttattgaggttaaaaattgtcactccaaaaatcatgtaaagaaaataaaaatacatgctagatccttttttacaaaccatgtatctcacaaaagcttgtgtacataatatattttttaaaaaaactcttggccaggctcagcgactcacgcctgcactttgggaggcagaggcaggtggatcacttgaggtcaggagttcaagaccagcctggccaacgtgrtgaaacgcctcctctactaaaaatacaaaaattagctgggcatgatgacaggtgcctgtaatccaagctactcaggagactgaggcagga

SEQ ID NO: 824475 - DNA, 543 bp, Homo sapiens
caaatatttatattactatgactattgtaacactagtcacagctgagccatatagtawactgtgattatttttccttttctgcacaaccttttattttccctggagttcatgattgtcttcctttttcatttgcttcattttctatattcttattgctaatttagtccaagttatataaactttttttttttctttaatcacccaggctggagtgtagtggcacgattttggctcactgcaacctccgcctcccagattcaagtgattctcccatctcagcctcctgagtagctgggactataggtgtgcaccaccacacctggctaatttttgtatttttggtagagatggggtttcaccatgtcgcccagactggtcttgaactcctgatctcaggtgatgtgcccgcctcagcctctcaaagtgctgggattacaggtgtgagccaccatgcctgtcgatgtataaaccttctttcagtgcatccaaacattaagtagtttatcacttgtttttcttttcttttcttttttttttttttg

SEQ ID NO: 824476 - DNA, 445 bp, Homo sapiens
aactaaaagagtgaaattggrgtttctaacaaaaagaatgaaaaagtcttgagaggatggataccccatttaccctgatttgatcattatacattgtatgcctgtatgaaaacgttacatgtaggctgggcacagtggctcatgcctgtaatcccagcatcttaggaggccaaggcagggggatcacctgaggccaggagttcaagaccagcctggacaacatagtgacacagtgtctctacaaaaaatgttaaaaattagccagcctggtgtgataacatgagcctattgtcccaggtacttggaaggctgaggcaggaggatcaatgaagcccagaagtttaaggctgcagtgagttgtgatcgtgccactgcacttcagcctgggcaacagagcaagaccctatctctacaaaaaaagtactccataaatatatacaactac

SEQ ID NO: 824477 - DNA, 445 bp, Homo sapiens
aactaaaagagtgaaattggggtttctaacaaaaagaatgaaaaagtcttgagaggatggataccccatttaccctgatttgatcattatacattgtatgcctgtatgaaaacgttacmtgtaggctgggcacagtggctcatgcctgtaatcccagcatcttaggaggccaaggcagggggatcacctgaggccaggagttcaagaccagcctggacaacatagtgacacagtgtctctacaaaaaatgttaaaaattagccagcctggtgtgataacatgagcctattgtcccaggtacttggaaggctgaggcaggaggatcaatgaagcccagaagtttaaggctgcagtgagttgtgatcgtgccactgcacttcagcctgggcaacagagcaagaccctatctctacaaaaaaagtactccataaatatatacaactac

SEQ ID NO: 824478 - DNA, 573 bp, Homo sapiens
atccaaaatccaaaatcaaatgttttgagcattgacatgatgccacaattggaaaatttcacccctgcagccaaatgcagttgaaactgtttcatacacaaaattatttaaaatattrtataaattaccttcaggccatgtgtataaggtttatatgaaacataaataaatcttatgtgtagtcttggatcccatcaccaagatgactcattatgtatatacaaatattcctgaatctgaaatccaaaacacctctggtcccaagcattttggataaggaatacttcacctgtgcttttaaaggcagccctggaaaactattatgcctagagacagaaaagtaagtgggtgtggaggcagacaggagacctgcttagatgaaacaaaggttaaaagatggggaggaaggagcaaggcatgagttgaattatgtaagaactttccagaaataacactaaatgcagctaataattttctatagcgcatactatctgccaaacatcattataaatgctttatgtatatctcatttaattctcacaacaacccttagaggtaggtactaatgtgtta

SEQ ID NO: 824479 - DNA, 278 bp, Homo sapiens
aacccgcagtccagtggagaggattcaaacttccactgagagcctactgaaaatataataaccatttctacaaaggcatatgtttcttggattgatctggagagcaagtcaataactcagagaaaaggcacatggtaagagaagacaaggggacaaaatgattgtctgaaatttatagataatacctgacaactccaraatggttgagtgcattttcacaatgctggtcaggccagatcttcagccaagtcataattctggaaccgtccatcttggtg

SEQ ID NO: 824480 - DNA, 627 bp, Homo sapiens
gggtaatatgttttgaggaagaaaaccacaggggtaaagtgccactttcatcacattatatcaaggatacctgttagcaatatgacttacagaaggatattttttaatggcccaaaagaaattctgaaagagaaaaaatataattagcaaaaatttcaaagtattaatagaaggaataaatataggacccaaagatataattataatataattatataatatgggttttaagtcactaaatttgttgtagtttgttacgcagcaatagaaaatgaatatatcaaatatttgaagaaaactatatgaaagaaagacaccaaactcaactaacatccgaagaaacacttaatataacaagtagaatgtttttctttaaaaaatactataatttctaaagtaattttaaaaattgtggtaagaacatttaacatatctatcttcttgacaaatctttgagtgtacaatgcaatactgttcaatacagtcatgatattgcacaacagatttctagaacttacttattcaccttgagtaagtaaaactttmtgcccactgcacagcaactccccattttcccctttccccaaaccctggagattacccttcaaagtaggaaggaataaatac

SEQ ID NO: 824481 - DNA, 531 bp, Homo sapiens
ggtaggtatgtagctgcaggtttaaaagtgacaaggrttgtctctgaatacaagtttcataaaatgtacctaaaaatgtatactatgtgtttttgtgtgctttgaacatatttttaaacttttaaaatatgaaaatgacaattacccaaaaatattcattctctatatgccagatatacatatatatatatatatatatatctccagtgtactcaaacagaataagaatacagtcaagaaagataagtaaatgttaaagctattacaaataaataattttgatgatacaaagaattataagatgttttataatgaactgtgtttttataatactgtaagtattataagcatataatacccaactacaataggctgaataatgtgcccccccccacaaagatgtccatattcgaataccaaaacctatgaaatattgccttatatgacaaagtgaacttcgttgttgcaattaagaatcttgagataaggcaattataatgcattatcttgttggattctatataatcaaat

SEQ ID NO: 824482 - DNA, 654 bp, Homo sapiens
catttttatttatttatttatttatttattttaatatgaagttatttccattttccaattgcaggcttttcctcttaactgggctttgtattctatctcctattttctgaggcatttttttttcacatttaaccactttttatttactgacttattctgttgatgatgatgacgatgatgacaatgatagttgtatcagtcaggacaaagtcaggaagacagaacccatgccaggtagttcagtagaggaatataacatgggaacctacttgtaaaagtgaaaaatgagatgaaaaaccaaatgggtcatagtaagacaacccagagcttagcaacaggtgaaaggtgttatcatccctatagctggaagtacaaatgggacacaatgatgcttctcaagttcagagactgaaagtcttcaaggagagctcacaccatggagaagggacaggttctgttgagatctagcatggaacagacagaaagagagaggaagaaatataaatatcctgatttctccttttctttctycctagtgttctgctagtgcattcaggatcctgaaacaaattagaagtcaatggacaagggtccttggaaatgcaggagtcagacatttgtggtgacaagcaaagcaatgggcatcagggaatg

SEQ ID NO: 824483 - DNA, 654 bp, Homo sapiens
catttttatttatttatttatttatttattttaatatgaagttatttccattttccaattgcaggcttttcctcttaactgggctttgtattctatctcctattttctgaggcatttttttttcacatttaaccactttttatttactgacttattctgttgatgatgatgacgatgatgacaatgatagttgtatcagtcaggacaaagtcaggaagacagaacccatgccaggtagttcagtagaggaatataacatgggaacctacttgtaaaagtgaaaaatgagatgaaaaaccaaatgggtcatagtaagacaacccagagcttagcaacaggtgaaaggtgttatcatccctatagctggaagtacaaatgggacacaatgatgcttctcaagttcagagactgaaagtcttcaaggagagctcacaccatggagaagggacaggttctgttgagatctagcatggaacagacagaaagagagaggaagaaatataaatatcctgatttctccttttctttcttcctagtgttctgctagtgcattcaggatcctgaaacaaattagaagtcaatggacaagggtcctwggaaatgcaggagtcagacatttgtggtgacaagcaaagcaatgggcatcagggaatg

SEQ ID NO: 824484 - DNA, 629 bp, Homo sapiens
acccaagagtaaacaaattaatcacaggtccaatagccaaaggacaaaaacatatgtagtctttaccaacctttgatttagatactactattattcccactttagaggagagaaaactaaaacaacgtcatgtttaaaaaaaatggtaataaaaataaagaacaggttgtttagggggccgaaggaaaaggagaggtgtggagagaacattaattcttcttttagattgattaacttgttaaaatcaacagataccccttcagtaaataacaatgaagtgaaaacgatcaagcagctcccattaaaaaaaaattcctaattcttaatttttccttgatgttcttctatcattcgtaatcaaacttcttgaaagatttttataaattactcatctttaattcttgtattttcactaacattatacatggaaacattttataattcttccactccattggaacaatactggacaaggaccccagatggttgttcatcatgacacgcagtgagggcttttcatgtttcattccatcttatctgacccttctctgttttttcttggcaaatttctgcctgttaacataaaacacmctagaaactaaaaaaaaaaaaaaaaaaaaaaaatccag

SEQ ID NO: 824485 - DNA, 472 bp, Homo sapiens
ttgaagcttcttgatttgtatacttaagatttatccatttcactgcatgtaaattttgccacaatgaaaaacaaaatcaaaggtaccaaagtgtatcagaaacagttacacacatgacaagatttcacttattacctgcatgtatattttgagctagatatcattacactttaatatgaagatacatattttaagagaggtaaaaagattctttcaaggacacaggattagttagtgacagaatcaatattcaaacttagtttggtatttttctactataccatacacaaattacaatatcctatggaatataatactatatcttataaaatcatatgccattaattttttgttttgcttyttctatttttgtctccttcattagccatcagtgagtaatgcagttgtacgctcaaaggtttaggtcttcagcgtggccattttcaaaagatatttgttagaagtggaaaag

SEQ ID NO: 824486 - DNA, 570 bp, Homo sapiens
tctgtcatttggctgattatatttctggtagcgcctttaatagagcaaaaatttgttacttttaataaagtctaacttataagttctttttaacatgaatcttgtctttggtattgtatttaaaaatgcactgccaaaccctaggtatctaaattctctcctttattatcttccaggagttttatattttgccttttacaactaggtctataattcattttaagttactttttgtgaagagtgtaaagtctgcgtttagattcatttttttgtacgtaagtgtccagttgtttcagcatcatttgttgtgaaaaccacctttgtttcattgcattgcctttgctcctttgtcaaagattagttgcctatacttacatgggcctattttggagctctttactctgctccactaaatgatttatctgtgtttttttgttgttgttgttgccagttccacactgtcatgattgctgtagctttgtattaagtcttatgtcargtagtgtcagtctttgttcttcttcaatattgtgttggctattctgggtcatttgcctctctatataaact

SEQ ID NO: 824487 - DNA, 444 bp, Homo sapiens
ttttccttctgtgtttcaacattttggcaggttttyttgctatttattgttttaaatgtatttacatttactaatcttttcttctgcattgtctattctgctgtttatcctattcagtatatttttcatcccagacattgtgtttttaccagaatttcaattgggaatattgtatatcttctatgttcctacttaacatcctcaatatttcttctaccttctttaacatatggaatatagatataaaattgttttccagacttttactgtgttgaaatacccatcacataaaatttactgtcttaaccatttttaagtgtacagttcaatggtgttaaatacatatataatgttgtgcaaccatcaccatcatccaactccataaatcttttcatcttataaaactgaaactctatacccattaaacaataactcccattcccc

SEQ ID NO: 824488 - DNA, 647 bp, Homo sapiens
tagaaagttgtttctttttaatatttattcttttggtcccaaacctttaattaatgctcattttctaaaaatccccaaatttcataaaatgaaaaataaaaattgaaagagataagcattgttgataaatccytaatggatttattttggatataataattcacatttttttttaccagtgcagaatcatattatatttggtgatctacaatcagcttttcctccctcacttattgatatattgtggttacctttctaagtcagtacatatacatcttccgggttatttctgttataagtaaaaattttagccaagtgcacagagatcatacccatttaatcatcactaagatcaagaaacatatgaccagaagctcacctcaagcttctgacccctatcattcctcctgccagggtaactattctgattttgctcactctcagttacttttgccctgtttgcaaaattttataaatggaatcagatgttatgtacacttttatgtctgacttcttttgctaacattgtttataagatccattcaaatcatagtttgcttattctcattgctacatattattcagttttgtgaagataccacaatttatccatttttaggttgattgttttcagttttgcactgttt

SEQ ID NO: 824489 - DNA, 632 bp, Homo sapiens
gatactatctgaattttagaattactacaaaggcrcagttattaggaccatgttgtactggcttaggatagacaaatatattaataaaacaaaatactgcatataaattgatccatatatatgcagtcaattgattttcaaaaacatgacaagagtattgaatgaagaaagtacagtcttttcaacaaatggcaccagaatgcttgaacatcaacatgtgaaaaaaaatgagccagctgacttctacctcacatcacacatacacaagtatttgaaatgaaacataaacaaaacataaaagctaaaactacaaaacccaagaagaaaactttaagataaagtcttcatgatattggaatattcaaggatttattagcacacagaaggcactacccatataataataaattaataaattcattttttacctgactcaaaaacttttgtttttcaaaatcaccaagaaaaatatgaagtgagccacaggcatttgcaatacatttatctgacaagagacttgacaaaaaattcaatgtaaaaaatgagcaaaagactcaatgaacattttggaaaaaaaattcatgaatgatcaataaacaaacttttaacatctcaatatcactcttcaccag

SEQ ID NO: 824490 - DNA, 670 bp, Homo sapiens
ctggcacctaaaattttccaaagttaaaattgcagttttttttattttgtttttccartgaggaaggatttaaataggctccaatctttgttcccctccttgaattcattttggaaagcttgactggaggacatttaatggggtgtacttcttccttcttcgaccccacaaagtactgccatgaatgcagcaagctcctgctgggttttattatatattagcaagttggaagactcatttgtcctgctattccctggtgtgctttttggtcaaatagctcaagttaggaggtgtgcagtgaatttgtgctggtaaaagggcatttaagcatgttcaagagagtggcccatatgcctggactatgactcaatctctccagtcggcctcactttcatccacaaaagccacagggaagatgcaggcactcactccccactgacccatcaaactcacagcctggcaccacctgctcctttgatcccaccagcccaactgtatctcgccctttatccgcagtgatgtcagtttgatcaagaagcccagactgcaaggtcaccgttcaactctgccccgtcccggctctccacgctttgccttgtgcctctggaccctcttttctgaaggttctcttcactttctgctctgcctgtttctcactgaggatattgct

SEQ ID NO: 824491 - DNA, 596 bp, Homo sapiens
atccaccagcactttttatttttaaaagaagttgtcagattactttccaaaaggactgaaataatttacatttccttggtcaaaattatgcaggggccttttccctacatctcaccagcaggcggcatgactgctgcttcccactagtctgacggggtaataatctccgtattactttactctgcattctctaacttctaataaatttgagcaacctttcctatgtttgttgacaactgaatttgcttttccacaaagtgcctatttataatacttggccattttttactgggatatttgtcttttgcttgccatttgtaagagtttatagtatattttcattacacatattctacctgtcacctgcggtacagttattcttttcaaatcacttgcttgtctattgactctgcctatgatatctttgcaatacaggggtgtgaatttttatgtggttaaatgtgattaacctcttgttaaaagagtcttcccccatcatctcgcattcttagaaaatctaggaaagtagtcccccagattatcctgcaagatattattggttaatrttttatatttagtttatatgtctctattta

SEQ ID NO: 824492 - DNA, 593 bp, Homo sapiens
atattcacaacaaatatgccaaatggctaattttttcagtttaaaagactgcttataaatcaataaggaaaagatgaacaacccaagagaagcatgcttagaaggtaagttagcacctcrttaaaaatgaaatataaactgccaataaatatctgaaaagatactcaaatgtactcataattaaataactgcaaatgaaaacaatgaaatgacatttcactcttagattagcaaaatttatggggaaataaaaactcttgtttgaatttggtggaatatgagttattaaaaacattttaaaggcaatatgtcaatgtatataaaaaatttcaaatgtgcctattctttgacccaacaattctaagataatcctacagtacaagtgtacaaagacatatgtgtattgatgttcattatagcattgtttgtaataatgcaaaactagaaataatataaatatttgtcagtaggatcatgtaaattgtggtacactcatactatataatactatgcagttattcaaatagaatgaggtagaaaaataaaaactgttatggactaaatgcaacatgatgtcttagactggatcctgg

SEQ ID NO: 824493 - DNA, 608 bp, Homo sapiens
catactgtactcaacagagaaacagaggctgaacaatgtttgttcccartaggggcttaatagtttccccatataataatatattactctgtatgtgaggattttctcttttctaacatttaaattaccttaagtactgattaagttttatcaaacttcaaacattcatatttcttgagtgagagaccaatataaaaataattaattcaccaaaagagaatgtggaactaagttaaattgtaaggtcctgaaaatgctggattataataaaaatatctccttaaccatgactgcagtggttaaaatttaatgagacattaacagtgaagtatggttcttcagtctctgcttttgctttgtgaaagttcagcaaagatttatgctccaaacagactctgtattcacggaaatatacagcttagtttttaaatatccctagcacataaaaaggtcatttgctttgttttatgtaattcatgtatctattggtttgtaataataaccacgaccttcagaggctggacatttgctgggagctaatgatctgtcagggttagagacccaaagcttcatgctgagaccattaatcagcccaccagcccataact

SEQ ID NO: 824494 - DNA, 594 bp, Homo sapiens
tcacttctcagcctcatctctgctctttcttactcagtaagaaatctcagctggtgttctgaytttaaatgccaactataggctgatcattctggaatgtgcatttctatatgcactttctgtcctgaattccagacttgtatttccagctgcctacttggcatattcccttgggtctctagtagacatctcaaactccacacgtccaaaacaaagctcttgatttctccatgtcaaattgctccttcatggcttctccatccttgttgcccaagccaaaatagagagtcacccttgattcgtctctctcttaccttccactctactctatcagaagaggtctgtaatccatttactttgctccagaccaccatcatttctcagtggaacaactatccctgctttcgctattcccctgccttcatttttcatacagaagccagggagatcacttagcaacttacattagataaggtcattcccttgattaaaaccttccacaagcttcccatgatactcaaaatctaggttcccaaaccttacttccaaagtcctgtgtgatctggcctctggccgatctctctaatcttacct

SEQ ID NO: 824495 - DNA, 611 bp, Homo sapiens
tttatatgacattcttgaaaagataaaactacagggatggagaacacattggtagttaccagggttactaaaaagaaagggtgaccagtaagggactgcatgaaggaktttttgggggtgatgcaaatgttctacatcctgatttttacagtggttccatgaatctatacatgtatgaaatttcataaaactacatacaaaaagagaaaaattcattttacagcataataaaccagataaaataataataaattctattctttaatgcaattgtatgtaggatgacagatgtccatcaaagtttctaaagtttcattaggttttatttttgttcctgaacattacttacaaattgttctccctccatattttaaaacctaatttcaaatctgagggaaaaaaacttcatttttctgtatcattgcatttactgaatagatatctaatgataaataacttgcttcctaaaaaaaaattcaataccaaaaactgttcatctttccatctggagaaaaaattggaaatgaggaattggaactacaaccttaactttgccaaagtacttctatacagcaggatattaattcttgtcatcttcagtgacaacaagg

SEQ ID NO: 824496 - DNA, 680 bp, Homo sapiens
aaagaggttgctaatgtttgacaaaagaagagatgatgaactaaaacatattatatacttttcttgtatgcccgaaaacttcataggtaagactatcttctgaaaacaacttttggaacgctgatattgtcctttgggctgataatgataagaaggaagtgagaaggtgaagtgtacttggctataatattcatatttagaagatactttcagattatagcctttgttatatgcacacaatttaatcaatgctatcattatacagtagacgtttgaaacatgtagtcttcacaaaataacacactttaagtaagtttatgtcaattaacaggaatgactgtctttagaatggaactgttaaacttttatctctttgagctacatattctttgctcattgggtagtaaaggaggtgggagagacaggaagtgacggtggaagagttctgtgccagtgtgttttgagataaatgcagattatctactcgtcgttctgcaagtgcatttacttagcattgttgagtatgcaaaggacaaacaaggccccaatgctgagaagtgcccaaagtatgctgaaagtttaagaagtaaaatrattctttgataaatgtcctcttgttagagtttttagcaaggcttgttgtctgggagtgactgttgttaacccatctcgtagagcta

SEQ ID NO: 824497 - DNA, 646 bp, Homo sapiens
attatttcattcattcagtaaatatttgtaaacttcttcctgctaatagaatagaaaaatacacacacacacacacacacacacacacacacacacacactttgtagtatataatttttwaaaatcttgtatagatcatacctttctacttattaaagttaacaaagtaaaccaaaacttttttattctccttttgtatgtcagttacatttttatcacttataattggcattcctccttcagcatcagtatgaactcacagccttttacagtctcagctggtttcagttacccattattattgatattactacttctttttctttttttctttttttgagatggagtttagctcttgttgcccaggctggaatgcagtggcacaatcttggctcactgcaacctccgccccccaggttcaagcgattctttcacctcagtctccccagtagctaggattacaggtgcccaccaccacgcccagctgatttttgtgtttttagtggaggtggggtttcaacgtgttggccaggctggtctccaactcctgacctcaagtgatctgcccgccttagcctcccaaagtgttgggattataggcatgagccactgcgcccagcctactacttcttttctgatacacaaa

SEQ ID NO: 824498 - DNA, 656 bp, Homo sapiens
ttaaacgcaaggcctgacgagaggtcaaggtcaagtttgaagagagatacaagataggcaagaacaagtggttcttccagaagctgcggttttagatgctttgttttggtcattaaaaattaaaaaataagaaaaagaaatagtaacaagcattttctctgatcacaatgcaataaaactaaaaatcaataataataggaattttggaaactatacaatcacatggaaattaaacaatgtgctcctgaataaccagtgagtcaatgaaaaaattaagaaggaaattttaaaaatgtcttaaaacaagtgaaaatggaaatgcaaaataccaaaaccaatggggtacagcaaaagcagtactagcagggaagtttatagctataagtgattacaccaaaaacaaagaaaaacttcaaataacaatgcatcataaagaactagaaaagaaagagcaaaccaaactcaaaattgtagaagaaataatacagatcaaggccatagaaataaatgaaatgaacataacaatacaaataactaatggaaggaaaagctgttttttacaaaacataaacaaaattgacraacccttaggcagactaagaaaaagagagagaagacccaaataaataaaatcagagatgaaaaagcagacatta

SEQ ID NO: 824499 - DNA, 495 bp, Homo sapiens
tgcctcatcgtggttttggatacgcatctctctgatgatttgtgatgttgggtatttttccatgtttgttggctgctttatttcttcttttgagaagtgtctgttcatgtcctttgcccactttttaatgaagttttttgcttgttgaactgtttaaattccttacagactctggatattagacctttgtcagatgctgtattactgtgttctcactctgttaataacgacatacctgaaactgggtaattataacggaaagaggtttaattgactcacactttcacgtggctggggaatcatggcagaagacaaggaggagtaagtcacatctaacatggcagcaggaaagagagaagttgtgcaggggaactcctctttataaaaccatcagatcttgtgagacttactcactatcacaagaacagcatgggaaagacccaccccaagattcakttacctcccactgggtacctcccaggacacatgggaatt

SEQ ID NO: 824500 - DNA, 642 bp, Homo sapiens
aattataagtcaacccattgtatgtcagggatcatctgtccattagaaatagtacttctgtagtaaaacgagcacaaactcctttggttttcatgtcctcagaatcactttcataatcatcttctgtggttcacaaggtgcatcttttattggttaaaaaaattaacacaatttatttcactctcaaattaggtttaataataaataacacaactttcttttgttttcactaataatgctaacattggcttgatttaaaattaaaattattgcaaaaataagactttatagaatagatgttcccatttttcagatgtgtgagattatactatagttgacaaactaactttaaagaacacagcttgcaatgtggtctttgtgtatgtgactcgtttgcagctcacagcctgtgcatctttccatagagtctgacaaaacctgagttggtctgtaactgctcattgagacaagtcccctgatgtcacatacagatgctgggagaatgtcaagtttatatagaaatttctacacatttaccgtgaatttmtatgtttgtgtcattacatagagatgacagagtgttgacagactttgagtggtctttagtaaccaattgttgaaagtctggtttagctaaagtag

SEQ ID NO: 824501 - DNA, 573 bp, Homo sapiens
gctaaaactggatcccttccttacaccttatccaaaaattaactcaagatggattaaagacttaaacgtaagacctaaaaccataaaaaccctagaagaaaacctaggcaatactgttcaggacatggggatgggcaaagacttcatgactaaaacaccaaaagcaatggcaacaaaagccaaaatagacagatgggatttaattaaactacagagcttctccacagcaaaagaaactatcagcagagtgaacaggcaacctacagaatgggagaaaatttttgcaatctatccatctgacaaagggctaatatccagaatctacaaagaacttaaaccaatttacaagaaacaaacaaacaaccccatcaaaaaatgagcaaaggatatgaacagacacttttcaaaataagacatttatgcagccaacagatttatgaaaaaatgctcatcatcwctggtcattagagaaatgcaaatcaaaaccacaatgagatgccatgtcatgccagttagaatgatgatcattaaaaagtcaggaaacaacagatgctggagaggatgtggagaaat

SEQ ID NO: 824502 - DNA, 592 bp, Homo sapiens
cagctcttctttgtacacctggtagaatttggctgtgaatccacctgggctagagcttttttcagttgtaggttatttattactgattcaattttggagctcattattggtctgttcagagattcagtttcttcctgtttcagtctcgggagggtgtatgagtccaggaatttatccatatcttctagattttctagtttatgtgcatagaggtgttcataatagtctttggtggttatttgtgtttctttgggacatcctttctcttccctttattatatttatttggatcttctctccttcttagtagtctagctagtggtctatctattttattaacttcttcaaaaaacaagctcctggcttcattgatcttttgaatggtttttttttgtgtctcaatctccttcagttcaactctgattttgatcaattcttgtcctctgctagctttggggttggtttgctcttgagtctcttgttcttttggatgtagtgttagtttgttaatttgacatctttcyagctttttgatgtggacatttagggttataaatttccctcttaaccctgccttagctgtgttccaggg

SEQ ID NO: 824503 - DNA, 593 bp, Homo sapiens
tgtttgtttgtttttgagatagaatcttgctctgttatgcaggttggagtgcagtggcacaataatagttctctgcaacctcaacctcccagttcaagtgattctccaacttcagtctccctagtagatgagactacagacacatgccaccaagcctggctaattttttttttctttttcattcttgctattttttttttttaagagatggagtcttgctacgttgcaatcctcctgcctgggcctccctcccaaagtgctgggattacagatgtgagccaccgcacccaactggaaattatctttgatactgctgttttctaatcactttgccaaatatccttagccttgccagaataagtaggcatggataaaggtgaatgcttaatatttgtcataatggaaaaattaaattgctaacattttcagccattttgcatttcaaatcgggaaacgccaacactgagcccagatataaagggcatgggttggcacaggagcccaggaaggtattggagaatatgcagaaatagaagttraagtgagaagatgctcttatttataattcaaaaggggaagaaaggaaggcacta

SEQ ID NO: 824504 - DNA, 635 bp, Homo sapiens
gggatcctaaggtgttcagatctcagctctgccacattctagctatgaaaactttgttaaactaacctaagcctccratttcttctgtgtaaacttgagataataacagagcctcctccacagagtatttgccagaatgaagtgaaatgatacacataaagagtaaatgtgtgttaacatgtgctctttgccgcatatggtgcccggcatgtaatgccattttcattcaataatcaattgtcggctaagcgcagtggctcacgcctgtaatcccaccactttgggaggccaaggcaggcggatcacttgaggtcaggagttcaagaccagcctaaccaacatggcgaaacctcatctctattaaaaatacaaacattagctgggcatggtggcatgcgcctgtaatcccagctacttgggaggctgaggcatgagaatcacttgaacccaggaggcagaggttgcagtgagccgagatcgcaccactgcattctagcctgggtgacagagcgagactctgtctcaaataataataatgataatcaattgttgagcgcttacaatgttttaaacatggtgctacaatctggggctacccatcaaaataaaagctcttatttagtaactgccttcct

SEQ ID NO: 824505 - DNA, 635 bp, Homo sapiens
gggatcctaaggtgttcagatctcagctctgccacattctagctatgaaaactttgttaaactaacctaagcctccaatttcttctgtgtaaactkgagataataacagagcctcctccacagagtatttgccagaatgaagtgaaatgatacacataaagagtaaatgtgtgttaacatgtgctctttgccgcatatggtgcccggcatgtaatgccattttcattcaataatcaattgtcggctaagcgcagtggctcacgcctgtaatcccaccactttgggaggccaaggcaggcggatcacttgaggtcaggagttcaagaccagcctaaccaacatggcgaaacctcatctctattaaaaatacaaacattagctgggcatggtggcatgcgcctgtaatcccagctacttgggaggctgaggcatgagaatcacttgaacccaggaggcagaggttgcagtgagccgagatcgcaccactgcattctagcctgggtgacagagcgagactctgtctcaaataataataatgataatcaattgttgagcgcttacaatgttttaaacatggtgctacaatctggggctacccatcaaaataaaagctcttatttagtaactgccttcct

SEQ ID NO: 824506 - DNA, 426 bp, Homo sapiens
tatactgtgagacatttgttaagtgacatctattgtttatcagcttttaaggataaaaaaggtattttaaaagttggatatttaggatatttgaggatattcctttatgagctctccatatccttcttgagaaactggttaaaaaaggaataggggttgagtgttacagagagtagtctgaagattcctgtgtaaaagcaaagctaacaagcaatgaagacatgaagcaaaatactaatctaattgtgtaaagaaaggatattttaataagttctttctgcttgctgctaagagtttgctaaastgtcatgaattattctggttattactaaagtttctatgaaacaagtagattttaagaataaatgtttctggaaaagaactatgttatgattttgtagaaatgtaaagattacttgaggtgtt

SEQ ID NO: 824507 - DNA, 518 bp, Homo sapiens
accgtgttagccaggatggtcttgatcttctgacctcgtgatccgcccaccttggcctcccaaagtgctgggattacaggcrtgagccaccgtacccggccaagctaaaggttttattgagctcaaaaggacactcggtaattttcttccttctaacttgttatacttggtgaagaaagatggctctaaggaggaaaggacacaagtgggaaggagatgtaggaagctggcgtttcttttttccttctccctccaggagaagaatagacctgtcaaattgagaatagtagctctatttccaggaaatcctctctatgaggcttaagatgtccaggaatttctcatagtccccacagaaggtgagaataaggtaggggtcagagctctccagaatctagagggatgatgtgatttaaccaagaacataccccaggaacaaaactggcttcagaatggcatacctatatacagtgacctctaaacgtactaagtttaaacacggctcacttgccaccctt

SEQ ID NO: 824508 - DNA, 619 bp, Homo sapiens
taatatccactaatactattatcattcttttttaaaaatatatttataatctaactctaaatatgaatatttaaaaacatatttttatgtaatgagatccattgctcaaaatggttttctagtctcaccatcttcctttatctctactcagactttttctgttttgtttttctcgtggcccaggctggaatgcagactgcaatcatagctcatgacagcctcaaactcctgggcttatccttcagcctactgagtagctaggactcggggtgtgtgccaccatcatgctaatttttgaaacaattatttttggtagagatggggtctcaatcttgctgtgttgcccaggctggccttgaactcctggcttcaagtgatcctcctgccttggcctcccaaagtgctgggatttcagatgtgagccactgcactggccagaggttttgtttgtttatattgagtacttttgtgcatattagtctcagtaaggaaagtaaatcttctgagatgctgcatatattaaaaaaaattcttttcttttttctgtttcctttttccttccagtaaaatagttagtgtatataggatgcttggatccsagctgttttccagtcatagt

SEQ ID NO: 824509 - DNA, 576 bp, Homo sapiens
aaatagcagggagcatgatggctggatcctatggtaagagaatatctagtttttgttatgycaaatggccttccaaagtagctataccattttgcattccaaccaacaatgattgagcattgctgttattctacatgctcaccagtattcgatgttgtcaatgttttggattttggccatagtaataggtaagaagtggtggctttctgtggtgacatgtctgctcaggttttttgcccatttttcagttaggttgtttgctttcttattgttgagttttaagagtttctatatgttgaatatcaatcctttatcatatatataatggaaatattttcttgcagtgtgtggtttgtcttttcattttcttagtagtgttttttgcagagcagaagtttttacttttaatgaactacaacttaccaatttcttttttcataaattgtgcttttagtgttgtacctaagatgtcatcactaaacctaagtttatatagattttcttctatgttaccttttagaagttttatgattttgtattttatatttaggtctatgatccatttttaattaattt

SEQ ID NO: 824510 - DNA, 497 bp, Homo sapiens
ttagatgaaagatactatttgattcttctgaagttttgaagagtacccacaggatgcaagtgctactcttaaatgtcctaaatggaggtaaaaacagasggcgtttttttttttttaaacaatggggaaatcactgaaggatttgcttaggatttggagctaggctctccttgcccgtgtgaacccctccaataatctctatgaagaatatagggaaggagtatgatgatcgttgctgtcatatgacagctaggtagcaattcatcgtatttagctgattaggagcctagtttattgagttttaattccagaccacctctaagtagtcatgtgactttagagaagtttcttaacctcctctgcctcagattttccggatgtaaaatggttaataacagtaacctgtgtagtagagttgatgctaaaattaaatgagttactacatgtgaaatgcttacaagaatactaggctcatagtaagcataaatgttaactat

SEQ ID NO: 824511 - DNA, 624 bp, Homo sapiens
taaagtatccatgatcttggcttcctctgggtccttcttcttctgctgtcctccgggtttgcagaatgccattctctgtattcctctgtccctgacaaatgtctcaagccttaatcccacagaacaggcttttcctactaccctgacccatactgaatcctttgtgtgtcttaaacttggagctcaggagaacaatttccgagttgcttttcagtaagagcattccatccatctgacattttaacttcattttcataaggaatttgggtgtatataaatgttccagttctatatgggaggctactcctctgtgacatcaacttctgttcacagctgcagagaaagaaatttcagtgttcttggcagttaatcttctaagagctaccttttggaagaagtctgtggaaaatatgcctacagacatgtgcatgagactttgcttcttgccaggtgaaaaataccctgcaaggagtatgccaaggtaaacagctctgcacagggttraaaggcctggttaacatcagcatcttgctctcataagttgttgggagcagtgggcctccatccacatccatggcagccctaattcaggcccttcagatcatcgctgtcttcctcctccag

SEQ ID NO: 824512 - DNA, 575 bp, Homo sapiens
agcgtttattaggaagattaaatgaattgatacagaaaagtgctcaataaatgttagcctttattattagtkgggagataaaatacttatgcacataaaaaacaaaagataaaattctgtgatgaaataataaatgatccatcataggcaagtagaaaataggtgaactctgttaaattgggatttcctggggtgaaatagataaagcacaaagacaaattgactaagagaagcatcagtatgggtggagcttatgcttggatggggcctggaaggatgagtgggaggtggctgggcagatggaggggatggcaagatggtaagctgtgaatgattgaaacttcagtatcagtttactacacacatgaatatttaagaattcaactttcagggtgctatagaaatctacatatacaatgttgagataaatatgggcttgtataagttgaattattggagagactctatcttcatgttattgtgtgcactcacatacacgcacgtgcttcagttttcaaatgcatagcatggagcaggcatgaatcacatcttccccagtgattcaggaacaaggg

SEQ ID NO: 824513 - DNA, 589 bp, Homo sapiens
tcctaacctgacttagatgttttattccaatattcagaaggacttgaaaaataatctttttcrgattataaaatgaacacttatttactttagaaattgtgtaaaattataaaaaataaagaaaattaaaatgatctatttctgtgaagaacaaaatattcaaaacttgaaaatgggccagaaatacaggtggcatatctttccaacattatatgagggcgacagctcactcaaggattctctagaaccagtacaaatatcatgtgaaacacgggaggacttgtgaaactgcataatgggttcaagcaattctcctgcctcaacctcccaagtagctgggactacagatgtgtgccactgcacccagctaatttttatatttttagtagagacggggtttcaccatgttgaccaggctggtctcgaactcatgtctttaaatcatctgcccgccttggcctcccaaagtgctgggattacagacatgagccactctgcctggtccataatttaaaattttataatagtcgtattcaaaatgtaaaaggatacaagtaaaactgatttttataaaataatttacttaacc

SEQ ID NO: 824514 - DNA, 589 bp, Homo sapiens
atgacattttacaaaacaatctaggtaaggaaaaagttaatttatcatcagagaaacaaagwttgtagctgcctgttacatgactcaggtcccacaatcacattttctttaagactcaaataatttcaggttcaaacagctttaatttgaattacttatttcacagtataaacatcaaaatcatagggacctttttacaaactacacataccccatatgccccaactgcaccccctgaccaagctccaagtatgcataggttgcttccagataccctttccccaaattctccattgaaaatcattgttttcattgaattactcttactgaaagtgttaagttttatcccttgataatgttgaggaggacagaaaaggttgagaacctctgtactacatcaaactgccaaagagaaaagagaatgaaaagtgtatatatttggacacattcaccagcttttctacctttgtatctcccacacatggcacagtgccttgcacagtggaagactagaatatgccaccccaaaatatcttctttggcataaggattattttaagctgattattttgggaaagagcaaagacag

SEQ ID NO: 824515 - DNA, 589 bp, Homo sapiens
atgacattttacaaaacaatctaggtaaggaaaaagttaatttatcatcagagaaacaaagtttgtagctgcctgttacatgactcaggtcccacaatcacattttctttaagactcaaataatttcaggttcmaacagctttaatttgaattacttatttcacagtataaacatcaaaatcatagggacctttttacaaactacacataccccatatgccccaactgcaccccctgaccaagctccaagtatgcataggttgcttccagataccctttccccaaattctccattgaaaatcattgttttcattgaattactcttactgaaagtgttaagttttatcccttgataatgttgaggaggacagaaaaggttgagaacctctgtactacatcaaactgccaaagagaaaagagaatgaaaagtgtatatatttggacacattcaccagcttttctacctttgtatctcccacacatggcacagtgccttgcacagtggaagactagaatatgccaccccaaaatatcttctttggcataaggattattttaagctgattattttgggaaagagcaaagacag

SEQ ID NO: 824516 - DNA, 681 bp, Homo sapiens
tttggtaattatgagagttaaatggatgagaacatgtaaagcatctagaacagccctcagtacacagtgtcaataaacacaagctgtttttatttttaattaataatttttgttttttagagacagggtcttactctgtcaccaagactggtatacagtgctgccatcgtagctcactgcagcctccaattcctaggctcaagcgatcttcccactgcctcctgagtcgctgggaatacaggtgtgaagaagcttttttttttttcttttgagatggagtctcactctgttgcccaggctggagtgcagtggtgcgatctcggctcactgcaacctccacctcccgagttcaagcgattctcctgcctcagcctccctagcagctgggactacagtcacgcaccaccacacccggctaatttttgtatttttagtagagacggagtttcatcatgttggtcaggctggtctcaaactcttgaccttgtgatccgcccgcctcggcctcccaaagtgctgggattacaggcaagagccacggcaagccataggtttagcagttatatgccactcccctgccttatgttccgctctcccaataccatattgacaggtaaatckctagtgagtgaatatattattatcatctaaaactatttatgaataacaagctctgagact

SEQ ID NO: 824517 - DNA, 524 bp, Homo sapiens
ttcagtaaaggcctggcaatgaataaaagatgtttgtttgtttgttttttttccacagtatttaagtagctaaatttttccttccatgctaaggttctgattaagttacctcctagtaatattagttttgatttccaaaataatgtcgaacattattttccatttccgttaggctagccaaccttttgggttagacaaaagattctctagctgcttttaccaggtgcacgcataaattaactcatcctcacgaaaagtcactctttaaccatatgctaacaataaagttagccaatttgttatgtgtgtgtctgggagattgtagaactaagaagcattagaatgaattaagataacatcaagaacaatgaaaaatccttaccattcaatttcttaagaaaagtaactgctgayactgttctttgggcaaactctgtcttaagtctgcagattatacacacacacagacccacatttcttctgtggacagttatattgccaagagaatacacatcaaatagagg

SEQ ID NO: 824518 - DNA, 616 bp, Homo sapiens
ttgtcagaaacaccacaggagtattttgtgtgtttgcagttttgtgctttctgggtagataaagataagtrgggctttgtgtagttaattcttcactgggttttaaaatgtattttattgatgtattcaaataatattgtcagctatttatgttctaactgtgcagttggaaaaaatggagctactatgttttaaaaatctgcaaaagctaaaatagcttctctacaattgcacatatcattttgaaggtatgtttctctgatatatttagtctttgctgtggaattcagtaaattaagatgttaaacattatccattcaactatgtttagctttgtttatttttaacatgctaatgtctttaattaaaactgcacctgttaccatcagtgaatgtaagggtctcatgtttccattacaattctatttttagaactttttctggtatatcagctctgtcaaacattttcaattctatattgatttaaactagatttcaatacatagccatgaatatttcttcaagcatctcttttgttgttactattgttgccctcctcgctttgttttagaaaatttccagtgaattattgggacattattaggtttctttacaa

SEQ ID NO: 824519 - DNA, 598 bp, Homo sapiens
gtttaaaatgatgaacgattatcattgaacacatacatggcagatatgataaaacaaaggtccaaatactgttctttcattatagaatcaaagaatatgatacaaattaataattaactattttagggtttaaaatgttgtcaaattataaatattaatctgaaaataatgaaaaaatggttttaagtaatacatatgctagtagaaaagacactgtacaacaagcaaattaacttccacatgcacacaagaactaagatttcactgaaatagtaaattttgaaagtatcagagtgttacattagctcctaaacatggctactttatatcctgagagtataacttacagtgctgaaattcaggcacatcttatacataaatagttatcaccagggcgattggatgatgtattttcttttcttttcagaaaatgcatatgcagctataaagacgtcatatttacccagtgtgaatacctttcaatatatttcaaagcagagacaaatttataaaagyaaagcttatagttgctatacggagcaggaatttcactagcacaaattcaaaccagagcctttcatttttattccttaccatg

SEQ ID NO: 824520 - DNA, 583 bp, Homo sapiens
gtcattgacattagatgtatctcccaacgctctctctccccacttcccccaccccatgacaggccctggtgtgtgatattccccttcctgtgtccaggtgttctcatcattcaattcccacctatgagtgagaacatgcggtgtttggttttttgtacttgcgacagtttgctgagaatgatggtttccagcttcatccatgtccctacaaaggacatgaactcatccctttttatggctgcatagtattccatggtgtatatgtgccacattttcttaatccagtctattattgatggacatttgggttggttccaagtctttgctattgtgaatagtgccacaataaacataacgtgtgcatgtgtctttatagcaacatgatttataatcctttgggtatatacccagtaatgggatggctgggtcaaatggtaattctagttctagatccttgaggaataaccacactrtcttcaagagtggctgaaccagtttacagtcccaccaacagtgtaaaagctttcctatttctccacgtcctctccagctccagcacctttttgtttcctgactttttaat

SEQ ID NO: 824521 - DNA, 657 bp, Homo sapiens
taggacagattcattttctaaattagacatttttcatcttcagtataaaatgttatcttgaaacatttacaaaaatatcattgttgtttttcataactcartgtatgtgcaatctgattttctaaattgtgactaaaagacttagctgtcataattttggaaagtgaagagaattatcatctgtatgtttctctacagtctaagtttcatctttacatggaaaaaaaatcaaaactctagctcatctgcatctggaaggaaacatataagacactctgaacactattctgctagtcaaacaaaacttcctaatcttttttccatttaagatcttcgaaaattctcactggtcagtaacacctatgaacactaagtggaagtataagaaggttctgctgcagggtgcagtggctcacacctgtaatcccagtactttgggaggctgaggctggcagatcacctgaggtcagtagtttgagaccagcctggccaacacggtgaaaccctgtctctactaaaaatacaaaaattagccaggcgtggtggtgggtccctgcagtcccagctactcaggaggctgaggcaggagaattgcttaaacccgggaggcggaggttgcagtgagccgagacatcaccactgcactccagcctgggt

SEQ ID NO: 824522 - DNA, 657 bp, Homo sapiens
taggacagattcattttctaaattagacatttttcatcttcagtataaaatgttatcttgaaacatttacaaaaatatcattgttgtttttcataactcaatgtatgtgcaatctgattttctaaattgtgactaaaagacttagctgtcataattttggaaagtgaagagaattatcatctgtatgtttctctacagtctaagtttcatctttacatggaaaaaaaatcaaaactctagctcatctgcatctggaaggaaacatataagacactctgaacactattctgctagtcaaacaaaacttcctaatcttttttccatttaagatcttcgaaaattctcactggtcagtaacacctatgaacactaagtggaagtataagaaggttctgctgcagggtgcagtggctcacacctgtaatcccagtactttgggaggctgaggctggcagatcacctgaggtcagtagtttgagaccagcctggccaacacggtgaaaccctgtctctactaaaaatacaaaaattagccaggcgtggtggtgggtccctgcagtcccagctactcaggaggctgaggcaggagaattgcttaaacccgggaggcgsaggttgcagtgagccgagacatcaccactgcactccagcctgggt

SEQ ID NO: 824523 - DNA, 502 bp, Homo sapiens
tatttctctactcagctttcattgtaacttttagggtgattaccactgacatatactgattcctaatactggatattcagtcagagtcacagcttattgagtttaaagagttccccatagatccagagatagcatataaaactgagttatgcattgcttcttaagttcttgggtatagcttcagtgaataaaaatattgaataaacctgcaacatttaagtagcactgtttcacatcaaaggtgacaaggagtagatcaaacaagaatgccttcaacatggatgcagctggacgttattatcctaagtgaattaatgcagaaacagaaaaccaaataccatgtgttctcacttaaaagttggagctaaacaactgctacacatggacataaaaatagaaataattgacactgggtactccaaaaggaggaagggagagagagagaggcaagggttgaaaaactacccrttggatagtattttcacttattgggtgacggatt

SEQ ID NO: 824524 - DNA, 629 bp, Homo sapiens
tctcctttcttccttcatggctcctgacatggtttcttagatgctccacttgaagagtcagtatttatgtgccagtttgcttcttttccatgagaatggtgcacactacctgcttctagtcagccatcttgaccaaaaatacttttttaaatatataataaagaggttcttatccagacactcaaatacatataatttagaaaatataaaagtcaaaaggattgtccttaatcattagtattcatgaaactctagagctggagatagttatatttgttatctattgctgtgtaacaaatgatctctaactttatcagtttagaaatgtgaaaggaaattaaatctttggacctcaaactcattaagccaaagggaaaagtcaaggtgagaactggggacatgcaaactgcctccccctttttggttcctaaatgaaatggctacaagatgaaaatctgtatgcctgccccatattggtccataagagaatacctagtgagctgcaagatctttactctaagktgtttctattaaaatttcaccatgacaatgtaaattgatagcttatctttatagatgcagtcacccccagcccaccagacgcaaatgaatatatgattgttctcctt

SEQ ID NO: 824525 - DNA, 635 bp, Homo sapiens
ttttttattagaaaagaaacacatgttttatacttagccctatatcctgtatcttcccctcccttcctcttttggtttttcttgtcctacaataaaaagcactagaatatccactggatgtattgtttataaattaagtaacatattgttcatataataaaacgattctcttccccacatgatttcatcaccactgtctcttcctaagtgtgacaatgtcttctgcttacttcaacattaaatattttatatttacttctagattaataaactgtagaccctaccaattgtctctatagaagattactagtttgctcatttatgtaatactcatattcccctttcatgtaccttccttaaattttaatagttgcatttatccttccaagtagcattcaaactttaaatataaatacatcttcatcacttgttccctcatttacacaatacttcctaattatttactacataagagagtggtcttataactatatttttctctatatctcttgtatcaactttmaaactggaatttttgacagataccacttctatatataggtgtacaggtcctgctaatgctgagagacaaaaaagagaacagaaaggaccactcttgctgagacaaaaaagag

SEQ ID NO: 824526 - DNA, 253 bp, Homo sapiens
attgttttgtacagatacttagtaaggatttacctaatattctatttctggcttgttgctattcaaaaagtgaagtgcaacgtattagtataaaacattgaactctccaaatgtatcacatttgtctcatcctaaatgtatctaaaactccctgctacataataagaatgcctttccatgccatatgcaacacaaaacagaataatrttttcaatgttgattgattctcaatggacagtaatacttaagctat

SEQ ID NO: 824527 - DNA, 507 bp, Homo sapiens
gggggaaaataatatttgctaaacacaaacttactttatagaaaatcttggatcatgtygaatttaactagagatatctatagattaatatactcatcttcagatatatagattgtgctataaaataattcagaataatgatgtaaatgtttgcttagtaacactaagaataatagttaagaggtattgaaatattattatgtatgtgacactttttaaggttgtttttttaattccttaagaatcttttcaagtcaatgggttttcaatatttttagtcacagacatctaataaagaataataatctctctccatgtgaaagcatttaaataaacccaactgactgtatacaatttgaggagctgatagtccctttgaaatccatccatggatgccagaaatggaaacaacaagacccaacattcacaaagtgtattctcagagctcagcaaaatattagtaagcattaagtgattttctggtttctgtagtctattacattttta

SEQ ID NO: 824528 - DNA, 632 bp, Homo sapiens
taggcttaaagtttctacttttctataaagtgtttaatttaagtaaattttacttaaattttacacrcctgtaatcccagcactttgggaggcgaaggtgggtgtatcaccggaggtcaggagtttgagaccagcctggccaacatggtgaaatcctgtctgtactaaaaatacaaaattacccgggtgtgatggtgcatgcctgtaatcccagctacttgacgggagaaatactggaacctgggagggggaggttgcagtgagctgagattgtgccattgcactccagcctggacaacaggagcaaaactctgtttcaaaagtaaaaagaaagctacatacctccctcacaatttgcttgtgcgccccaagatctttaccttaaaacagttctgttgactttcaccctggcattgtaaactgatagcttatcttcccaggtgcagaacagaaagtcatccctctcctcacttgagacaaatgcatatctgattgcttcctctgatctatgtttaagtgaaaacgcagattcactgagtcagactaaattgtgtattcagtgaaagactggtcaaggactcaaaagaatgcaaccaggctgggcatgctggcttacacctgtaatcccagca

SEQ ID NO: 824529 - DNA, 627 bp, Homo sapiens
gatttttgacttcaatccctggatcccatacagcatctctggtcaggcccagggcctcaggtaactcatgaagggaagggccttgggcaaggcccagtgttttgctggcttcaggtctgacctagcacacttccagtggtggtggccacaaaggtaattgcatcaccatacccccagtaccaggtggctcagcacaaagagaaagactctatttgtttggaagaaaataagggaaaataacaagagtctctgcctggtaatcagagaattcctccaggtcttatccaagaccactaaggcagtacctctacaagtctgcaaaaaccagagcgttattgggcatgggggccaagtccctttgaatacctggaaagccttcccaaggaggacaggtacaaacaagcccagactgtgaagactacaataaatacctaactcttcaatgcccagacactgactaacatctacaagcatcaacaccattcaggaaaacatgacctcaccaaatgaactaaatagatcatcaggaaccaatcctggaaaaacagacatatatracctttcagacagataattcaaaatagttgtgttgaggtaactcaaagaaattcaagataacacagagaa

SEQ ID NO: 824530 - DNA, 624 bp, Homo sapiens
ttagtgatacttaaaattagactttttttgaattacagtttttaatttgaatattctcatcttgtgtaaaaaccattcataggttgggcgcagtggcttacgcctgtaagcccagctttgggagtctgaggctggaggattccttggagcccaggaatttgaggctgcagtgaactctgatggtcacaactgcactactgccctccagcctaggtgacagaggagaccctgcctccaaacaaacaaatacactcatacttaaaggaatttatcaattaattaaaaaattttctaactgaaaaactactccaacttaggtgacagaagagactctgtctctaaacaaacaaacaaactgatactttaaggaatttatcaattaaaaaaatttcctaactgaaaaactactccaacacatacaaacctaaattattagttaaaaatttgagagcaacttggaaacatgcttaaacatttaaatcccaacagcagaaataytgaaaaattatttactttaaaaattgatacatacatattgtaattatacatattttaaggatacaatttgatttttccatatatatctatgttatacaatgattcaattagggtagttagtgtatc

SEQ ID NO: 824531 - DNA, 626 bp, Homo sapiens
tgtgataacacctaggaaaaataataaccatctcaatacacacatttcttgcttttttcactcaacaacacctcataaaaattttactatgtctactagtatagctaacattccattttgatgaacatttacttttgcttatttacttatgtattcatttattctattcatttgcttatttatttttatcacaacaaatgatgcagcaatagaaatctttggaaatatattcttacgtgctgaggcatataattccatgggatgtttttcaagtgaaggaccactgggttaaaatgcatgtgtgtgtgtgtgttttaattttaatagatgtttcccagttgctttttcaaaaagttatcaaataaatattttcataagcatgtttgagaattcacattttaaaattcacattccctgtatcccagaagcagctggtgttaacagcctttttaattttagccaatccggtagatggaaaataatatttattcgtgagtttaaatttgccctttcctgatcattagtgagcttggtcttcctctcagctcttcytggtcatttggatttgctcttttattaattgcctaaataagtttgtcatattgttaagttttctatttgttata

SEQ ID NO: 824532 - DNA, 626 bp, Homo sapiens
ggatgataaaagaaaaaaaaagataaaagtaccttagtagtcactgaggtatacaaaaatacataggtaaaaaagattttctactatactctcataargagataaaatatatacatcaataagcatagcatgaagcagattacagtaagtataataagaccgttataagcaaaatgtccttaagttggggaccacccacattaatcttatttgagtgtcttaaactacttgatggtcgacatctagcaactttgcttaaaagcaatacactccgagtcacaggatttttctgtgactaaattctagctgtcctccaatgcaatgtgagaaggaccctagttgactatggcaaatcccataatgcagttcttccaaaacttgctttaagactaacctaggccacttatgaaaaatatagatttcccagactccatgctgaccaaataaatgagagtctccagtggagaagcctgtaaatttgtgttttggataaatgccccagctctcagtttttattttagcataagagagactgagctttctctgaagtgtctttaaggacagaaatccaatcattcattcattcaatcaacaaatatttagtaagctcatgcagcatgcaagat

SEQ ID NO: 824533 - DNA, 614 bp, Homo sapiens
gtttcatctctgagggagaaaatggggtcttctttaaatacagkttcagctgttacaaacaacttgaatggctgaaaaaaatggttttaattttttaaattacatggctatgtgaacaaaatttatttgatggtagctataaacaaagtaatcatcatctgaaatcattaataaggaatttactatagccattgagaacataagacctaataacaaaatgttatgttcatggaagcaaatatgagttttttattaaaaaccttggaagattccatttgtaaattttaatcatgttcaattggtaacaactaaaaagtatatatcatataaaataaatgtaataaaatttttcactaagcaccacggagattcctccagatccccccatttactccagtgtattgtatgattgtaattttatggttttctatttatttcactatgttaaatataaaattgtcatgaagaactactcttgagaaggttagaaatgcacatttctttggggtcagagagacacaaatcttgtagctctaattccatatgtcccccttatatcccaacattatcttaacattatatcccagtgggctggcattattatgaaggatatt

SEQ ID NO: 824534 - DNA, 634 bp, Homo sapiens
ccaagtccccagatctgtacaatgcacaaagggagataaaggaaaaaagaataaaagaggagggaaaaagggaaaggacaggagggaagggagggaggkaggcaggtgcaatttcagccccttgaaaaggtaaatctttcataagttaacaaaaagacatcaggactaagtgtggctaaggtcctggctttttcagatcacttcagatctctgtggcctggagcaatccagtactttcctgaaagaagtgaatactaatcaagaataagactgagcacaataggtgtaggagactggtcacataggagaatgtcctctcctgaaggaagtccacgcgtgggccagggacacaggagacaggctgggacaccctgggcaacaaactcctcagggatgcatgggcagccccatcactgagcaagttagcacagcctcagttctcagaaaagaacagaatggggaaaaatagaatcctctttactgagatattgtgaagagtaaagagaacattcatgaaaaaggcttgggttagaagaagtgctccacccactggttagctactgtgatgattctggatttgactggtgaagcgggcaggaccgagggtttggagttagatccgcttggttctgaa

SEQ ID NO: 824535 - DNA, 614 bp, Homo sapiens
agagacgagcaataagggtgcttccagaactgcagtgtcctatagagatgagcaatgagggtgcatctggaactgcagtgtcctatagagatgagcaatgagggtgcttccggaactgcagtgtcctacrgagaggagcaatgagggtgctttcagaactgcagtgtcctatagagatgagcattgagggtgcttctggaactgcagtgtcctatagagacgagcaatgagggtccttccagaactgcagtgtcctatagagacgagcattgagggtgtgtctggaactgcagtgtcctatagagatgagcaatgagggtgcatccggaactgcagtgtcctatagagatgccatcacaacaccagtgagtgagagatgctcaccccagctgggaatgagatagagctacagcgggaaaacacccaggaaccctcagacatacaggagggaaggactctgaaaaaaaaagggatagggcaggaaggaattcctccatcctccagtggggccacaggagctgcagggtttggattttcttcttttcccttcgaagtatgtaatagtccaactcaatttattacctggctgatctctccttttaagtcacctgaaa

SEQ ID NO: 824536 - DNA, 605 bp, Homo sapiens
gcgcctatagtcccagttacttgggaggctgaggcaggagaatggcgtgaacccgggaggcggagcttgcagtgagccgagattgcaccactgcactccagcctgggtgacagagcaagactccgtctcaaaaaaaaaaaaaagaaagaaagaaaagaaaaccagttctaccagaactagaattctactatccagtgcaatgttaacagtattaatagctttgaaaaatcatgtaacaaagagaaaaagaagggcttttggcttagttccacactttgtacattccatttgttttgttgctgtctgggtagcttataagcagcaagtatataacattttaaatgctgtatatctgaaaatacagaccagaacagaatagctatgccatggtggttaattcactttgtttaattgtgagatatattattatagaatgtttgtaactcagatccttatgaggatcataaattaatatcaaacaaaatttttatcctaaatatttttaaactaagttgatattaagacatcagcttaaatctctgttccaaaaccatctatattgttttaaatatgcyatctgtaaaggatatcgtttgctcattgtt

SEQ ID NO: 824537 - DNA, 562 bp, Homo sapiens
ttacacctccagcccagatctttcccctaaattccagacccctctgtctcacaacccatttagtcaacatctcatctgcaagtcttggactttggctcctgggagctcaaagctgktccccatgcagtcttcctcacttcttttactgccaagatgattctgacagttgcttagatctttcaaaattgatctccaacctgatcacttcccatcaccccactgccactgccacctgtctgattgaaaccaccattatcttttgcttttgttactgaaatgagtttttacaagaggtttccctgctgctgcccttggttctttctgtcttttctcaacaggactgctcacagcgatttgttcaaatgaatgttggatgctatcattcttcttcttactctcccttggtttctacatgatctggcttctgttattctcaggccccatctcttccctcccttcctctctttccctgtactccagccatctggacctcctcctcttcctagaatgcaccagggatgcttctgcctcagtctttgaacttgcagttctgtgtttgctc

SEQ ID NO: 824538 - DNA, 562 bp, Homo sapiens
ttacacctccagcccagatctttcccctaaattccagacccctctgtctcacaacccatttagtcaacatctcatctgcaagtcttggactttggctcctgggagctcaaagctgtkccccatgcagtcttcctcacttcttttactgccaagatgattctgacagttgcttagatctttcaaaattgatctccaacctgatcacttcccatcaccccactgccactgccacctgtctgattgaaaccaccattatcttttgcttttgttactgaaatgagtttttacaagaggtttccctgctgctgcccttggttctttctgtcttttctcaacaggactgctcacagcgatttgttcaaatgaatgttggatgctatcattcttcttcttactctcccttggtttctacatgatctggcttctgttattctcaggccccatctcttccctcccttcctctctttccctgtactccagccatctggacctcctcctcttcctagaatgcaccagggatgcttctgcctcagtctttgaacttgcagttctgtgtttgctc

SEQ ID NO: 824539 - DNA, 633 bp, Homo sapiens
agcatgaattaactgtaagataacttcaagtgctctagtttatatgtaactggaagacttaaaaggaagaaggagaaagtatatttgaagagattatagrcatttatttttccaagtatgataaaagttataaatccacatatccaaggagctgaatatctctaaacatgagaaacatgaaggaagcataccaagtcacatcataatcaaattgcttaagataagagataaaaataagttttttaaaaatggcacatatctacaaagaaacaaagatgacaatgaaagcagccttctgattggaaatggtggaagccaggaaacagtggtacaccatccataaagtacttaaagaaaaaaaatagccacactaaaattctgtactcagcaaagatatttttcaaaagcgaaattgaagtaaagactctttagatataaaaatgccgagagttgcaccaaaagccttgcactagaaaaatgtaaaataatttctccaggaagtacaaaaagacaccagtggaaatattggtttacacaaagtaatgaagaacagtggaaatggtagctatatgggtaaatataacatattttaattgtttaagtaccttcagtatataactgtttaatacagaa

SEQ ID NO: 824540 - DNA, 633 bp, Homo sapiens
agcatgaattaactgtaagataacttcaagtgctctagtttatatgtaactggaagacttaaaaggaagaaggagaaagtatatttgaagagattatagacatttatttttccaagtatgataaaagttataaatccacatatccaaggagctgaatatctctaaacatgagaaacatgaaggaagcataccaagtcacatcataatcaaattgcttaagataagagataaaaataagttttttaaaaatggcacatatctacaaagaaacaaagatgacaatgaaagcagccttctgattggaaatggtggaagccaggaaacagtggtacaccatccataaagtacttaaagaaaaaaaatagccacactaaaattctgtactcagcaaagatatttttcaaaagcgaaattgaagtaaagactctttagatataaaaatgccgagagttgcaccaaaagccttgcactagaaaaatgtaaaataatttctccaggaagtacaaaaagacaccagtggaaatattggtttacacaaagtaatgaagaacagtggaaatggtagctatatgggtaaatataacatattttaattgtytaagtaccttcagtatataactgtttaatacagaa

SEQ ID NO: 824541 - DNA, 517 bp, Homo sapiens
tatttgtttgtttttgttcacaaaatgtgaaggcattgatgaaaactctgtctgtggagttaggcagccttctttcatacccaattccaccacttcgtgactgtgaattttggcaagtcactcaatttttctaagggtattttctcatctgttgaaacaggaaaattaaaaaattatgaagtttaaaatttttacatattaagtgcaccacattttaagtgtgagctgtttgtcaataataattttattgctatctttactattgttattacctcatttcaccaaattgtgattcaacactagaagttggctgtaagtcttacaatttgatatatgtatatattttttaactctgaggtacgttcatgttccaaattattctgccttattttctgtgcaaattttctgaaatttacacagagtattgaaatgagcatgtcttcawaagtgcatcagagcaaaacaaaaaagacctagagaaagactacagttttacgtgagccagagaataatatag

SEQ ID NO: 824542 - DNA, 557 bp, Homo sapiens
ttgattttcatctttctcctcagctacccctaaattaaattagtcttattgattataactcagaaatccctgtcttgttactatgattttcaaattttaatgaaatgtacaatttagttgaacatagttaagttggttttcttaaattacaatatagaagattaagtataggctcaacaaatctcctcattactatagctacagacacattgaaagccaattcctttgcttgcttatgacaactgataaattcatgcattacaaacctgttttcaagtctgtcatgacagatgatcactcactgaagtaagatcttatgaactgattatcagtgttatttaatgaagcactggctgcacctaggtactggagtgaaatagaagtcctagtccaattaaaatgtggtgctgtgtacaaatggttgttaataactttagwaaatgcataaccaccatttgaaattcacaagtcatcatcctagcaaacagaatagtacacagtatgtcttctttttttttcttactatttttttgagacaagttcttactctggctcta

SEQ ID NO: 824543 - DNA, 557 bp, Homo sapiens
ttgattttcatctttctcctcagctacccctaaattaaattagtcttattgattataactcagaaatccctgtcttgttactatgattttcaaattttaatgaaatgtacaatttagttgaacatagttaagttggttttcttaaattacaatatagaagattaagtataggctcaacaaatctcctcattactatagctacagacacattgaaagccaattcctttgcttgcttatgacaactgataaattcatgcattacaaacctgttttcaagtctgtcatgacagatgatcactcactgaagtaagatcttatgaactgattatcagtgttatttaatgaagcactggctgcacctaggtactggagtgaaatagaagtcctagtccaattaaaatgtggtgctgtgtacaaatggttgttaataactttagaaaatgcakaaccaccatttgaaattcacaagtcatcatcctagcaaacagaatagtacacagtatgtcttctttttttttcttactatttttttgagacaagttcttactctggctcta

SEQ ID NO: 824544 - DNA, 589 bp, Homo sapiens
agcacccaaaattactgcagcttcacagacatcacacacttaaaaaaagactcctggcttcctttcaaattccatcagtcaacttttatcaaccataggggaagcagaggaggataaacactgcctgcgataccatttgggttttaggttttgggtttcttccagttaagtttgcaaaagtgtgaaagtactaaagaacagaatattgttcctcattcttactatacaataaatacttccaaatatgtccttaaatgcaatcctttgtgattcccttaattaatcttgactaatccttgaaggaaccatgatagcaaaaatttagtgtctagcataaccttactacagtttccctttttaagttctcatttgaatttgataagttaatatgtactttaaaaaaatccacatcatttctattcaatggcacttgaacttttaaaaaatgtttcaaagaaattaragctagatatgattggaaataagcaaaacgagaaagagttgtcctatgtgtatgtagcacaaccctccctgtgtcctttaataaaaagcaggactctggtcattccatgatgtcactggcattccg

SEQ ID NO: 824545 - DNA, 537 bp, Homo sapiens
  misc_feature 495, 496, 497, 498, 499, 500, 501, 502, 503, 504, 505, 506,507, 508, 509, 510, 511, 512, 513, 514, 515, 516, 517, 518,519, 520, 521, 522, 523, 524, 525, 526, 527, 528, 529, 530,531, 532, 533, 534, 535, 536, 537: n = A,T,C or G
atcatgacattaatctattttgttttattttactttatcatagaaagaacacctaacatgagagctaccctcttaataaaattttaggtgtacaataaattactatggactctgggtacaatgcagtacagtagatctctaggccttacacatcttgcttgactggaactttatgttcattgaacagtaactttccatttccccttttcccacagcctctggaaaccaccattccactctttgattctatgaatttgcctattttaaataccttgtataagcagaattatgcagtatttgtctttctgtgatcggcttatttcatttagcataatgtcttcagggttgaatctattttagatacctcatataagcagaatcatgcagtatttgtctttctgtgattggcttattttatttagcataacgtcttcgaggtttattcacgttgcrtattgcagaatttcgtcctttttaaaggctgaatggaattcnnnnnnnnnnnnnnnnnnnnnnnnnnnnnnnnnnnnnnnnnnn

SEQ ID NO: 824546 - DNA, 627 bp, Homo sapiens
  misc_feature 618, 619, 620, 621, 622, 623, 624, 625, 626, 627: n = A,T,C or G
gatttggagaaagtcttaagctgagaggatctgaaaggcttcttgtagctggtggcrtttgaaataggtcttggaggttgaatagaaggtctacagggcaccagataggcaagtaagtgtgtggggatcttcaggagagcagggggtcatgcttggaaggcctcaaggggtcttgctggctggagcagtgagttcctgtgagaggctgatggggatgaagctcaaatggtagaaaggcatcagagagtaggggggccttgggtaccccacaaaaagcctggattctggactctatcctgaaggcaatgggagggctgctgcaggatttgagcccaaagatgacatgacttgagtggcatcttagaaagtatcaccaagtaacacagacaggatagctaagaggaggggttaggctgtggaagaagctaacagggtctcaggcaagacaatgtcagggaccatggaaaaataaggaatcaatctaagagacactgtgatggacctgacttggcaatggattggccatggcaggtaaagaggagagagctggggacaggaatcttgaacacctttctgaacctcaccctccaaacacacagttcttccttaatgagctgnnnnnnnnnn

SEQ ID NO: 824547 - DNA, 561 bp, Homo sapiens
ttcttttgggttttattgaatgaaatgaaagggaaagtagagstgttcctatgtcccgggctccggagcttctattcctgatccctgcataagaaggagacatggtggtggtggtggtgggtgggggtggtggggcacagaggaagccggtactgggctctgcaccccattcccgctcccagatccctctggacacagcatttttctccagtgagcacagcctccccttgccccacagccaacagcaacatgcctcccaacaaaagcatctgtccctcagccaaaacccctgttgcctctctctggggaaattgtagggctgggccagggtggggggaccattctctgcagggagattaggagtgtctgtcaggggcgggtggagcggggtggggccctggcttactcacatccttgagagtcctttgctggcagatttggggagcccacagctcagatgtctgtctcagcattgtcttccaagctcctaggccacagtagtggggggctcccttctctggcttcttctttggtgacagtcaaagtggggttgggggtgac

SEQ ID NO: 824548 - DNA, 606 bp, Homo sapiens
ttttttttatgttattctctttatatccataggttgctgaggcctgagaaagtcaggtgtgtcattgttctctgtcagctaaggacttgcttctgaattatttgaagttttacactggatacggtctcttatctcaatctttagcgatgtgttttactgaccaatttacatagtttatagtttgacttgtaaaagaggccctttaatttgaccatctggaagtagtacaaactattgatgttaattactcctcttttatattctacttttgtgatcctctcagttttcagtttttggtgatacataagatcattattaatattttgtgttatatgagatggcttctaggtattcattaagtgagcttatattggtgaatgaatatgttaaatctgggagagcaaaagcatttattgcctcaatatttttgcctgaattgggttatattttctcaaacctacttttatctttcagccttatgattactctrtaagaaaccaaacatctgtagacttaccttcatatacaaacttcaatttaactgccactagcaatgcctccatatttcaaaaaaggagctcttcttctggatatagtttgcaatgg

SEQ ID NO: 824549 - DNA, 573 bp, Homo sapiens
tctcctgttaaagagcaaattctggttttgcctgttcagcttctcctgctcctctgcccactaagcagagaagcaaggatagttcctggaattcatgctgcaaaactctgccagtagttaagagacagaactgaaaaatactgggggaaagaggatttgcatttgaaaaggtacattcctaattaaaacaaaaaaatgactgaatgacaacagaacagaaaagggggctgatgtggggagaagaaaggaaaatctagcagctcaggtgtgctgggtgtgttggggacagaatcccactgggcgatgagacttcataaggagaggattggggtgacagcagtctctttagaatacgaagattgggaacagtgttgaatattttgcatgtgaattaacttccctctccctcttgttagaagagtacctaaatttggccttcttccaaatgaatttttctttcagaccatttgtttttaattyaacacctagcaaatacctaggccatgtaagacctttctggtagggttacacaaaatatcaaacataaaagagtgatgggggaggagtaacatt

SEQ ID NO: 824550 - DNA, 609 bp, Homo sapiens
catagtattctagtaaatgtatattttatgatttatttaatcaactccctattactgaacatttagtttctgatatatttattcattttcttcaatataaktttttaattgtgtgatcttaaaaatgaagtttttcttagtcctacagggctaagttgatggatgaagctgagatgtttagagggcttggtgttattaagactgatctaaaactgggtaggatacattgaattgttctattctgggtgtaatgacatgctcttttgactaggctagagaatgatgacaaaatatcaactgacagataatatgagaggctagaggagagaatattcaatagtttttcttttcaattttcctttattgtgcgtccctatgtgcctggctttgggttgagctgccttttcctattattattgttttacttacccctaaaattagcccaaagatcttagtgggtagttaattctttaagatggattaaaaacatcagtctcattctctagtggcatcttgtctctactgttcacttgtcttttgattctgacacaaccatctaaccccattcttcagacatgggtgctgacatccaacagaggctcggcttgt

SEQ ID NO: 824551 - DNA, 555 bp, Homo sapiens
gccaggcaagagaaaaaaataaagggtatacatataggaagagaggatgtcaaattgtctctgtttgcagatgacatgatcctgtatctagaaagccccatcatcttggcccaaaagctccttaagctgataagcaacttcagcaaagtctcaggatacaaaatcaatgtgcaagaatcaaaagcatttctatacaccaacaacagacaagcagagagccaaatcatgaatgaactcccattcacaattgctaaaaagagaataaaatacctaggaatagcggtaacaagggacgtgagagacctctgaaaggagaattacaagccactgctcaaagaaatcagagaggacataaataaatggagaaaaattccattttcatggatagaaagaatcaaaatcgtgaaaatgaccatactgcccgaagtaatttatagattcaatactactcctatcaaactacgattggcattcttcactgaattaaagraaaagctactgtaaaattcatatggaactaaaaagagcccatatagccaagacaatcctaagcaa

SEQ ID NO: 824552 - DNA, 474 bp, Homo sapiens
caataaatttactgtttccagtgaatagatcagatgcatggcttggagtaatgagaaaccctcttccaggaagtctttcacatcccttycaatctgtgccaagtctctcacccactctaacctcccagtgaactaatgaaagtttcctttagatcactagtatcatcgtaggctgctgtattttcacgtctgtttctaccaccaaattggacgtccttcaacagcaaggattgttccactcatgcttatattttttgcagtgagtacttaaaggatatacattgaatagaattaaactagatccctaggatctaacaagttatagatccagaaacaaacaaaatgcacctgattctgtaaaactgagaccagatcctcaaacatcctggagccccagcaaagaacagccagcccacaggtgagacttggggaaatccctggattctgtacattttactccaagtcttttcacaa

SEQ ID NO: 824553 - DNA, 626 bp, Homo sapiens
gcaagagaacaaaccagtgaaggatccactcagtagctgacaattggagaaaagttagggagtttcaagagctgtaccgtgcaaagccaccagggtggggctgcccaaggccatgggagcccgcctcttgtatcggcatgacctggatgtgagacatggagctgaaggagatcatttcagagctttaagatttgacaacctcgctggatttcagacttgcatgggacctgcagcccctttgttttggccaatgtctctcattgggaacaggtgtatttacccaatgcccatacccccactatatcttggaaggaaataacttgttttttgttttactggctcataagtagaagggacttgccttgtcttagatgagactttggacttggactattgggttaatgttgaaatgaataaaggctttgggggactgttggaaaggcaagattatgaggacatgagatttgggaagggcaggggtggaataatacagtttagctgtgtccccacccaaaatctcatcytgaattataattcccataatctgcataatccccatgtgtcaagggagagaccaggtggagataattgaatcatgggggcagcttcccccatgctgttctcgt

SEQ ID NO: 824554 - DNA, 577 bp, Homo sapiens
tcctaaaatctatatactcctaattgccctaattttacagaggatcattatcttagcaaggtaacatatcgaattgatgatgatgatgtcagtaatggtaatgatagtagtactgaagatgtaatgatgctcttttttcttctgcaaatttttctgagtactgaacagggccactgctagcctataccctatctttttgtgaatgcaaaagaggtgaccctttctcagacaggcacagccccacaccctggagccctgctatgcaagtggactacaagcttgacttcagctccctctaaccatctctgtaggatatccttgtgcagggatctacctacacacctgtatgcaatggtgctcgtgtgggcaacagcctgaataaacagtaaaagactaggcagcctgcaagaaagaggcaagtctgtgtttatatttgggcaggggaaaagcagctatrtggtgtggaagagaagttggttgcattgtcttgacatttcctacctccctcagtaactttgggattgctggaaagaaaaagtcatttcaccactaatatgtggtcctagaattgacataa

SEQ ID NO: 824555 - DNA, 396 bp, Homo sapiens
gtggcctgagtttaaaaattaatgaaagatatcsggaggatgctaaagcatgtctgaaaagtgtgggaaccattgctttaatgtgaggtcctcagaaattacttctccttgtaggcagtctattgccattgcctgggccagctccttctaggcagtctattgccattgcctgggccagctcacctccacaacgttaatctggtatgttctggaaaagctttctagaatatatccaaaataagaggaaatgaattcagaacaatgcaagcaaagtttttgaactgtagaatcctaattttttttttttttaataaactgtgtctgctctgagatctcagcttttttctggatagctgagctgattgaataagtgaacaccagataagtggagtttca

SEQ ID NO: 824556 - DNA, 611 bp, Homo sapiens
tgcaggtgcggagccctcatggagaccctctgctagggcagtggagaaggcaaatgtggggttggagccctcacacarggtgcccactgaggcactgcctagtggagcttcaagaagagggtcaccatccttcagaccccagaatggtagacccactgacagattgcactgtgcatctggaaaagccatagacactcataaccagcccatgaaagcagctgggaaggaggttgtaccctgcaaagccacagaagtggagctgcccaaggctgtgggagcccacctcttgcatcactgtgacctggacgtgagacatggagtcaaaggagatcattttggaaatttaaggtttaatgactgccccattggattccagacttgcatagggcctatagccctttggtttttgccaatttctccaatttagaacaggagtatttacccaatgcctgtactccccttgtatctagaaagtaactaacttgcttttgatttttacagtctcataggcagaggggatttgccttgtctcagatgagactctggagttgggattttgtgttaatgctgtaatgagttaagactttgggggactgttgggaaggcatgac

SEQ ID NO: 824557 - DNA, 611 bp, Homo sapiens
tgcaggtgcggagccctcatggagaccctctgctagggcagtggagaaggcaaatgtggggttggagccctcacacaaggtgcccactgaggcactgcctagtggagctkcaagaagagggtcaccatccttcagaccccagaatggtagacccactgacagattgcactgtgcatctggaaaagccatagacactcataaccagcccatgaaagcagctgggaaggaggttgtaccctgcaaagccacagaagtggagctgcccaaggctgtgggagcccacctcttgcatcactgtgacctggacgtgagacatggagtcaaaggagatcattttggaaatttaaggtttaatgactgccccattggattccagacttgcatagggcctatagccctttggtttttgccaatttctccaatttagaacaggagtatttacccaatgcctgtactccccttgtatctagaaagtaactaacttgcttttgatttttacagtctcataggcagaggggatttgccttgtctcagatgagactctggagttgggattttgtgttaatgctgtaatgagttaagactttgggggactgttgggaaggcatgac

SEQ ID NO: 824558 - DNA, 665 bp, Homo sapiens
cttccccctacaccttaccaccacatcgttaaaggcacatttatcatgtttccttctgctctgcacttaygtccagctatcagaaaacaattacaaggcatactaaaagagaacttcaaacttcttagtttgaagagacaaaggaagtatcagagccagactcagaaatggcatgaatgttggaattactggaataaaaatttgaaacaactattattaatatgctaaggggtttaatgaaaaaattggtcagcatgcaaaacacaaggacaatgtaagcagagaaatggaattctaagaaaaaagtaaaaggaaatgctagagataaaaaacattgtataagaaataaaggatgcttttgttgggctcattactagactagacacagctgaggaaaatctctgagcttgcgcatatatcaacagaaaccttcaaaatgaaaaagcaaataaaaaaactaagaaacaataacagttatttaaaaaacaagaacaggttatttaaaaacagtgggacaactacaaaaggtataaaatatgtgtaataagaagagcagaaggagaaaaaagagagaaaggagcagaagtaatacttgtagtaacaatgactgaagagtttcttaaattaatatcaaatatcaacccacagatccaagaagctccaag

SEQ ID NO: 824559 - DNA, 261 bp, Homo sapiens
agcagggccggcttcgtgggtaaaccagcagtgcagtctcacaggagggacccttacgttttcattttgcactgggccccatttgtagtcggttctgctctgaaatatttaggggagggcatcctcaggattgagggagggcttcaaggagggagggtgtttccttacgaattaagggattatccccaagartggggtctctgccaagcaatgcggacatcctttaaggggttggggatggggatccgggtggatttggga

SEQ ID NO: 824560 - DNA, 601 bp, Homo sapiens
gggatccgggtggatttgggagtgttgagccccggggtttttgtccagggtgaagcttcttgctcaggtgaggcagkctttcctgtgtgggagagattcttggttgggatttatctctgaggaggaggtattctaatggacgaaaaagcggccgttagagagatgacgtcccctctggcttagggaggagacacgaagtggttaaaaaagcaagatcttgggggagttgagggacaagtcagatctggatttaaatcccagcactgtcatttactagctatttgaatgtcttctttaagtaaaggaggactaaatgtaaaaggaaaccagttcatacgcttgttagcagtattaaacatttgaagttctctcagcacaatgtgaggcacatagtaaatgatcaatgaatcttatcaataattgtcagtttatacaactatcccaaaggccacagcaaggttttgaacaaccagctctgaaatgcctataatgtatttttcgaacctccataaataagttatcaggttaatcatgtatctggaagcttcctatttacatttctacattttcctctgaccatctactctcattactccttaaa

SEQ ID NO: 824561 - DNA, 668 bp, Homo sapiens
cggtgtgccttttgtcctttggagtctccaccagggccagcgcagagataaggggtgrggcgggctctggtggtttcgggtgaaaatctgccatcgcggagagatgccagcaagcaaccaagtggcaatctttatatggaagctctgctctccaagaaaggttttagtttgcttaatttttctcctatgggttgtgcggcaactcttgtctctatctgggctttgtaaaaccccagcagaccctgatacgatgctgttcttttcagtgagaggcaaacagcccatctgctgaagcttccaacatcttcttctctttctgatggagactcttctagtgtataagctcaggccactgttaacatcgggaatggtagtaacagctctcaccttcgaggacagcttggattaccacctgcacagagccccatctctgagccaagttatggttgatttcaattccacgtcacatcgacagggatttgttttcacctccacatatataaataccccaactcacaatttgtaagtcacctggaatttctaattttagaagcactttgaaatatttgaaacagcttgggttgtgaatttagacaacataaatgtaggcaccttccagtcactttctagctctgtgactttaagtagggcacacagcctctctgagc

SEQ ID NO: 824562 - DNA, 607 bp, Homo sapiens
gttcaagtggagcagggcccagaagacagagagagcaagagagaagggggaaaagattcttcacgggataaaattaccagccaagacagaaggcgaagaggcagaggggcgggctcccccgcccagaaggcagccctggccacccccagcctccacccgggctggaagagcagatgctcccagcctgtggtgtgagcccagaggggggctggtcgctccctgcagtgagcacaagggcagggtgggagacggagacggggtgaggccgggggagccttctggagtaaatggctggaaggagggagggggcagaagctgctggccacctttggccactgcaaacactatcccttttcctcctgtgatgtgagtaacaacaaaaaattaacacagccacaactgctgtttgtgtttaaagcttaatgagaattttaaaatacgtatctcagtgatacttaaatgaatactttctttccaaaaaataaataaataaaaagagagagagagamgaggagggggggaaaacaaagatgatggctttgagatttacgctgccactcatgcttggatgccgatcacttatctggataattaagcagtatcagtg

SEQ ID NO: 824563 - DNA, 637 bp, Homo sapiens
gcatcagaatcatattaaaacctcaatatattgaatggattttcaatctagcaaaatcaattttgttcttcctaatttaattttacatgactgttagaaataacagaaaaataaataatagtcacttcaacctttttaaagcagtaactaccctcttgtcttctccatatcattccctcagttcctgttttttcccatgaaggaagaagagacagggggaaaaaaaaaaaaaaggcaagcgcagtggttcatacctgtaaacccagcaatttgggaggcagaggcgggtggatcacttgaggtcaggagtttgaggccagcctggccaacatggtgaaaccccgtctctactaaaaatagaaaaattagctgggcgtggtggtgggcacctgtagtcccagctattcgggaggctgagacaggagaatcacttttacctgggaggtggaggttgcagtgagccaagattgcaccactgcactgcagcctgggtgacagagcaagactccatcatatatatatatatatatrtgtgtgtgtgtgtgtgtgtgtgtgtgtgtatgtgtgtgtgtgtatacgtgtgtatacatatatatgcatgtatatacatatgcatgtatatatacacatatataca

SEQ ID NO: 824564 - DNA, 613 bp, Homo sapiens
acctcttaatcaacttactcaacacacatccacatagcatcaccatgggccaccctgtgcagatgggacgaaccccmaaaaattgaacagtagaaacactgaaattgcaacagaaaaaaggaatgattacttcaattgtatcgttgtgaaaaaaacttctgtaacagcaaacgtaaaagtttcctaggccaagataatctgccggaaactaagcagatggtaccgagctgaattaccttgtagttacttcttctgaggcaggttggagctcatcacagttaactgaaagctccccacataaagtcaaaacataaaaatgagatgcacattgtcgatcagttgtagcggccttgcagcctctgccaacctttgattaagatgctttgaggttaagaacttcctatttcatgaacaatggcatcccgtggctgttacatgatgcagataaaatgtgcagaaagaccatgaggacaatatacaccattaatttgtgtgatgagaacaggaataagaagttcctataatactagaatgtttctgtaaaacacacggtttatgttctgaaaattctgcctttaatctcagtttagtatggtcttctaggaaataggga

SEQ ID NO: 824565 - DNA, 562 bp, Homo sapiens
ttgtttacctaagcaagcctgggcaatggtgggcacccctcccccagcctcactgccgcctttcagtttgatctcagactgctgtgcgagcaatcagcgagactctgtsggcataggaccctccgagccaggtgcaggatataatctcctggtgcaccgttccttaagcccgtcggaaaagtgcagtattagggtgggagtgacccgattttccaggtgccgtctgttacccctttctttgattaggaaagggaactccctgaccccttgcgcttcctgagtgaggcaatgccatgctctgcttcggctcatgcacgctgcgctgcccccactgtcctgtgcccactgtctggcactccctagtgagatgaacctggtacctcaggtggaaatgcagaaattagctgtcttctgcatcgctcaggccgggagctgtagactggagctgttcctattcggccatcttggctgccccacctatgtaacatattacatataatttatttatatataatttacttgtattatatatgtaatatattgtatctattctataatatat

SEQ ID NO: 824566 - DNA, 592 bp, Homo sapiens
catacaaatattatcaactgatttttgacataggcacaaaggcaatttgatggaaaaatgagtcttttcagcaaatagtgctggaacaattagacgttcatacataaaaaaatgagcctagacacagacctcacaattgacagaaaagttaactctaaatggatgacagacctaaataaatataaaatctaaaatttctggaagaaaacacacatgaaaatctgtgtgaacttgagctgttgatgaggttttagaaataatataaaaagcacaatccatgaaagaaaaactgataagttagattttattaaaaattaaagcttctgccctgtgaaagacactgttaagaggatgcagagataagccatagagtgtgagaatatattttaaaaacacttatcaggtaaaggacttcatctagaatatacaaagaactcttaaaactcaataataagagaaaacaattttaaaatgtgcaaaagatctgaatggacacctcaccaaagaagagacacgcattacaactaaatatataaaaaagacactcaattttattcrtcagggagacaaattagaacagcaatgaaatact

SEQ ID NO: 824567 - DNA, 614 bp, Homo sapiens
taaaactggttttcctgccctaaycctttctcctttataccatcatgcacaataatgatatattgatattttaaagagtaacactaatcatatgtccgaaggctcaaaatgtcaccattttctacaatgtcttagattagcattgaagtcctctcttcgacctaggcaatgttttcaccataagtgtccagtgcttctcactctatacttaatgccaatcatcggagttacttgctgttttgaattgctgttttgaatttagtatctacctttacctacgtttttgctttttgcttccacatttctgcgctttacaacacatctccatacacatctgccatacatccagtaagagtctgttcaaatggagatctggaataaagctgtccatgatgactctaattagatggtagcatttcttcttctgagcactcagaagccattctctgttcccctgtagtagcatatatggcttttctcttaggcagacagggtcatgatgacagggtaattttcatatatgccttagcaattacaggatgaaagaactgaccaatatgtttgaccaatacgtttttctgttctctttttctatggagtctgaaaaatctgta

SEQ ID NO: 824568 - DNA, 561 bp, Homo sapiens
aaaatgtatttcaagttatacacaactggtggctaactgcatgataagtagtaataagcaacatttatttttgtttctttttatttagatttttcttttttggaacagaagcacataatctgtgagtagctttgatggtgagaattgagagtaaatatcacacacagaaaaatacaaatgctttatttaaggcagattcaaatctattctaattcacctcctatagcagacagcatcatgactctcacacagaattttaagaaaagtctaaccggttcagaagagtaatacttaagaggtcaattgagccatattgtgcttgactaggcacagtaaacaaataagcaaacaaacaacaacaacaaaaaagaacataatttacaagaaaaagtaatggctagtgctcttatttttttaaatactgactttttagataaaaattttgataaaattagagtcagagaagtgacatcttagcatatataatggatattatraaataagattttggcaatgattatagcatattgattcattgtgaaagagttataaaaaggacta

SEQ ID NO: 824569 - DNA, 630 bp, Homo sapiens
tgaacactggatcctgctgaaatttccagcctgcaaatctgcctcatggatttcagaccctccagctcccacagtctggtaattccttaaactctctctctctctctctctctctctctctgcaaatttgtgtgcatgtgtgggtacgtaaatgcacacatacacccgttgttggttctctttctctggagaactctaatacaattttattatctgtggttgaagatccaaaacaaatatgtgctgtattgatcttcattaaaatagtttatctgtgaagagagtacttgaattataagaatcaaccaaatacactatgcaatatgtgggtgctattcaaaagtgaaccgtcacagcacaacagcctctttctgggaagtcactgaaagacaatggtgaagagaatttctctcattaggcagaaattttagaggtgcgcctagttattcattttgcttggaaggagaaatggccagatatgcaattatataatgattcatargatgtggcctgtaaggtctgggacttgaaaggaacgtgactggtaaaatgatgacaaagaagcctgggaaataggtatgtggctagagttctctgaatacacaaaatgcatgaaaatatttgtgcccc

SEQ ID NO: 824570 - DNA, 621 bp, Homo sapiens
tagctgcaaaaaatgtttcaaaccaaatggcccccagtgagtgcactcctcaaccaggcaaataaaggcacccacccacccatcagcccaggccacagagcgcaaaggccggggacttagcagcaggaatctgctggcacaactgtcgccatgggcctctatccgctctggacacccagcacctaggccaaggccaagtgttacaagatttgccttttccactgaagtgcagaacgctttcctggtggttgttttgggtggcggggggagggtgttgagagggtcaggggatcagaatttcctggtccttttaactataaaagatctataatgttgtacatgtctctctgcttctagttcagctagcgtcatgcgaaatggggctttctgcgtgactgcacaaaaaccagcaagtccaaacaggaggtgtcttcccaagaggtaggcaggttgtgtgagcaggagggccaccgtgagaggtgaatccagctgggcttctgggtcaggtggggggacttggataacttttctgtctagctaaaggattgtaaacacaccaatcagmgctctgcgtctggctaaaggtttgtaaacacaccaatcagcactctgtaaaaacgc

SEQ ID NO: 824571 - DNA, 508 bp, Homo sapiens
ccgggatgccggctgtgtttgcagatgcaatgttactggagaactgccatgctcattcattacctgctgtccctggctgctgctcccgctgcctgcagacttgagtagttgcaacagggacctatggtccacaaagctgaaaatagacaccatctggcccacaactggctacagagttgtagtagctcagtgcaaaatgaaaatgcaggggcgttgtttataaactaaaaatgtggccgggcgaggtggctcatgcctgtaatcccggcactttgggaggccaaggtgggcggatcacctgagggtgggtgttcgagaccagtctggccaacatggtgaaaactgtctctgctaaaaatacaaaaattaaccgagtgtggtggcatgcrcctgtaatcccagctacttgggaggctgaggcaggagaatcacttgaacccaggaggcagaggttatagtgactgcactccagcctgggcaatggagtgagactctgtctcaaaaataa

SEQ ID NO: 824572 - DNA, 643 bp, Homo sapiens
tgtcatttgatggttgttgtagcacagcagattgttaacttccttaacaacttaaaggtrtatctgcaattactaataatattaactaaagtttgtaaagttgaccaaagttgtgagtagattcaaaaaattaatatgtagtgagcacaaatttggtggcctttttcttcctgtcaaatctaccaaatcgttttttcataatcatctccagattcactggtttgctaggaggacctacgggacttagtattgagtcctatgactacgattcatcacagcaagctgatatgaagcaaaagccaaaaaaggaaaaggtaaaagacagggcaaaacaggcactaacttccaagagtcctttcccaaggaagtcaaacagaatgtgcttgattcccccagcaatgaattgtgaatatgtgcaatattttctaccaggtgagcttattaagaatccaataaccagggtttttaatggaggctggtctcgaggtaccctttgcttagcaccttccaaatttaagactctcataagaaaaataggaatttggcataaaccacattgttaatgcaaacaagccaggcaagtgaacgtcctcctgaaatctaagttctcagatgtcacccaagagccaatcttgcgaacagg

SEQ ID NO: 824573 - DNA, 550 bp, Homo sapiens
aaccaaggcaaaaggttactgctgagacaaaatagaccactaaacttgaatagtggttagaataatttgagaagcgtttctttgagaaattagctatatctcttggggaatttagaaagcctygtgatggccaatagcaagattcatgctcagaaaatgagggtcataacatttcagccatgactgaactctcagctcattgcaagcaagaaaggaagtctaagacagagtagtaaacgtcctggttgagtgttgaggaagacctccagtacacaggcagtgtgcaaaggcagggatgaaaggtttattatttaaaaaaatttcttagtttctgcaatttaggtaaatctccatcaaaatgatagttgaaaactagataaagtaagagagacataatgactgcacataaagaggaataaaacctttgcaaagacaatttggaaaactcagtaaaaaatggacaactatcattttcaataattaaaaacaggaagcccaggggagcagagaaaataaggtatcagagttaatacataacaacattcaaatg

SEQ ID NO: 824574 - DNA, 623 bp, Homo sapiens
attcaaaagaaactaaagagaagagaaaatgagaatatgagaaataaagcctccgtttcttatacagtcgtatttgtatatttataaaatagataattaggccaattaggccagacgcggtggctcacgtctgtaatctcagcacttttgggaggtcgaggtgggtggatcacgaggtcaggagatcgagaccatcctggctaacatggtgaaaccccgtttctactaaaaatacaaaacatcagccgggcgtggtggcacacgcctgtagtcccagctactcaaaaggctgaggcaagggaatcacatgaacctgggaggcagaggctgcagtgagctgagatcacgccactgcactccagcctgggtgacagagagagactctgcctcaaaaaaaaaaaaaaaaaagataattattaattactttacctcccaaagtcctctacagattgaccctttctggacattttatataaatgaaattatacaayacatgttcttttgtgactagcttctttcacttagcataaagctttcattgttcatccatgtagtgatacgcattagtacatcattcatttttattgcctaataatattccattgtatagatatgccacattt

SEQ ID NO: 824575 - DNA, 604 bp, Homo sapiens
ttgctaacattattattattaaaatccttcagtgctgggcaccacttatttctacccttataaccccatggacctgtactgtatcttgtaataaaaccctcaataaatatttgatacattgctgaataaaaggtaggttgacttcttaaagtacctgcaaaatacctcatccacaagagaaaaaggcaagagaataaccttgcttcatgaagaaagtatcgatcattcaggcgttaaattttccatttgttcattttttttttttttccagcagaaactcttggagaaattgcatagcattattttaaacaattcccctcagaggcccattaaataggcttttctgcagacaggatagatgtcttttacagctggtcagtgtttagttctcccaatacttgactgaagaaagaaaataactgggatgtaagatatctgacctatagattgctcattctctgcatgagtcaatctttgaagtcggamgataaaaatcaccattaatcacaaaactttcttaccatcataaggtcagatatcccagggcccttccaaaattaccacatggactggcatagggcgagattggctcagctgtggtcac

SEQ ID NO: 824576 - DNA, 584 bp, Homo sapiens
catgaattttgtttctaataaagttcattttattcaaatgtatttgcaaaatcattgctgattggggaggagaaaaacaagatcagacagatgtcatcacatccatattacagatgctccagcttattccaatggttaagttgtcggacttgggctgaagcccaaatcctcaagcgccagatacagagccccacctattgaccactatcacatccgtgctcctcccattaagcatcacataacctcatccatgaaataaacaatctattaattaaacttcaataagaaaaaagggactaaatcaatcctctctgtgtgatttcgaaacaataaactggaaattgaaaattaaaccattttactttttgttttaatctttaaaatgctaaccaacttaaactatttagacattagaaaaacaatgagtcaactcagtcacttaataaaataatctwgtttcaacacaaatcattccactggacacttgactgaatttttcattttttaaccagcagtcttgtctttatgcagccttaacttcatacagtcaaagaggaatttttttaaagcaattcagaaaatgc

SEQ ID NO: 824577 - DNA, 583 bp, Homo sapiens
caatggaatggattcaaaaggaatggaatcgtacggaatggaatctaatrgaatggaattaaatggaaatgaatcaaattgaatagcacggaattgaattgaatggaatcgaatgcaatggaatctaatgaaacggaaaggaatggaatggaatgggctggaatggaaaggaatcgaaacgaatggaatggaatcgaactgaagagactggaatggaatgcactggaatggaagggagtgtaatggaaggttctcgaaagaaatggaatcgaatggaatggaattgaattgaacggaatagagtcgaatggaattgaatggaatggaatggactagagtgaaatggaatcgaaccacaaggaatggacaggaatagaatggtctcgaattgaatggaatcgtatggaatggcatcaaacggaatggaatggacagccacggaatggaatgcactcgaatgcaatggagtcgaaactaatggactggaatagaatggactcgactggtacggactccaatggaatggaatcgaatggaagggaatcgaacggaatggactcgaagggaaaagactgcaatggaa

SEQ ID NO: 824578 - DNA, 613 bp, Homo sapiens
gaatggaatcgtacggaatggaatctaatggaatggaattaaatggaaatgaatsaaattgaatagcacggaattgaattgaatggaatcgaatgcaatggaatctaatgaaacggaaaggaatggaatggaatgggctggaatggaaaggaatcgaaacgaatggaatggaatcgaactgaagagactggaatggaatgcactggaatggaagggagtgtaatggaaggttctcgaaagaaatggaatcgaatggaatggaattgaattgaacggaatagagtcgaatggaattgaatggaatggaatggactagagtgaaatggaatcgaaccacaaggaatggacaggaatagaatggtctcgaattgaatggaatcgtatggaatggcatcaaacggaatggaatggacagccacggaatggaatgcactcgaatgcaatggagtcgaaactaatggactggaatagaatggactcgactggtacggactccaatggaatggaatcgaatggaagggaatcgaacggaatggactcgaagggaaaagactgcaatggaaaggtctcgaatggaatggaaattaatggaatggaatggaatcgaatgaaa

SEQ ID NO: 824579 - DNA, 598 bp, Homo sapiens
catcaagtagcctgtttcctctaaataacacagtatttactctaacacaacaagtagcttgggcgagtccagttctgttctcatttgccttacgggtgtctgaggtactggcttcaggttgtctggaagagaccccatgagggttcaggaggtcaacatctgaactacatctggggcctttggattagtatctacacatttgggttaagacaccttcaaaaagggatgcatgggagtcactcacattgtagctagtattatccgcattgagtgaagtagttggagtttaaggagggtcattcacacaggtggtagaagggctaagattcaaattcagatctgattggttctagaacctgcacactcaagtccttcatgatacatctcccctattagtaacatgtaacagacccagaatttctggctcaatgctccagaaagcaaggaaactctaggataaagggcattcccttracttctctaagtgcaacttgcaactacacccaatttcccccaccctcggctctagtgcattttctagctaagagacatacatgtgtgactcagagacatggtatccaaagaggtctggagcaga

SEQ ID NO: 824580 - DNA, 598 bp, Homo sapiens
catcaagtagcctgtttcctctaaataacacagtatttactctaacacaacaagtagcttgggcgagtccagttctgttctcatttgccttacgggtgtctgaggtactggcttcaggttgtctggaagagaccccatgagggttcaggaggtcaacatctgaactacatctggggcctttggattagtatctacacatttgggttaagacaccttcaaaaagggatgcatgggagtcactcacattgtagctagtattatccgcattgagtgaagtagttggagtttaaggagggtcattcacacaggtggtagaagggctaagattcaaattcagatctgattggttctagaacctgcacactcaagtccttcatgatacatctcccctattagtaacatgtaacagacccagaatttctggctcaatgctccagaaagcaaggaaactctaggataaagggcattcccttamcttctctaagtgcaacttgcaactacacccaatttcccccaccctcggctctagtgcattttctagctaagagacatacatgtgtgactcagagacatggtatccaaagaggtctggagcaga

SEQ ID NO: 824581 - DNA, 635 bp, Homo sapiens
ataaaataaaaatatatgagaacaattaggtagcatatgatgtatctcttaatgataaatattcttaaaaagcagctaaaattttttctgatctacttagttgcgcgtaacttggttattatcactgatgtgatcaaggtagcatttgagatacattcacgataatttaaatcctcaatacctttttaatccacataataactgttattctaattgctagttacgaattacatgattcctaataggagaatattattttatgctttaaataaatattttaatttaaaatggcatatgatattgagagaaataaagggcatcatatatattctgggtggaacaacatctggcaaacacatgattgtaatattcctttagctctgaacatcacatgcagatttaaaccttcagcataaattctctggagtgagaacacagaagaaaaagttaatgagattattatatctaactggacattttccttatccgtcattcttttctctagttgcccattattaaacattggtgtttatgacagtccttaaaacaacatggttagaagtccccagagctgattgagccatttgctcgtgggacasaatgaacctctgcacctccagctggaaccttttatg

SEQ ID NO: 824582 - DNA, 627 bp, Homo sapiens
tgatgtttgattactcctttcacacatttgttcaacaaatatatagaccaattttaatatgcaagacaatgcactagatactgggatacacatagacatggcccttgtccttacagattccagaaatttagtgattctctattatctagaacagcattttgcattgatgtttatatgaactagagtaaatatgaccaatgtcaagcaatgtggaaaaatttggatgcagtaaataagttttaaatgtacaatatacctctggattttcaaaggtaaatatagtatttagtatattctgaatttttgattcaattatttgtgtatatgtgtgcttatgtggagaagctttggctatggcaaaaaaaagtcacattctgcagaaatgcttcttaattttgtatatcatgtaatttcataaatgttcttctatatgtgtatttgcacaaagaaatttcaataaacacttgttgaagggtaaaataccttactgtcccrtgaaaaatagtgaaaaattagaccttagatttttaaagatggtattgtggagatcgtgatggaataattgcaaaacgccttacaagaaataataaagcacattctatttatcattctaggattcattattga

SEQ ID NO: 824583 - DNA, 553 bp, Homo sapiens
gcatttgacaaaggtctaatattcagaatctataaggaacttaaacaaatcaagaaagaaaaacaaattaccccattgaaaagtggacaaaggacacagacacttctcaaaagaagatatataawcagccaacaaccatatgaaaaaatgcccatcatcactaatcagaggaatgcaaatcaaaaccatgagatacaatctcacaccagtcagaatgactattactaaaaagttaaagaaaaaaaaaaacagctgatatcagagcttcagtgaaaagggaatgcataaacactgttggtgggaatgtacattagttcagccactgtggaaagcagtttggagatttctcaaagaactaaaaatagaactaccattccaccctgcaatcccatttctgggtatattcccaaaggaaaatatttcattctatccaaaagacacatgcactcatatgtcattgcaggactattcacaatagcagagacatgggatcaacctaggtgcccatcaatggtgaattagataaagaaaatgtggtacaaatacaacataa

SEQ ID NO: 824584 - DNA, 610 bp, Homo sapiens
cacacacacacacacacacacacacgacaaagctctaacaagacttacaaagaaaaaaggaaagaagtttcaaattaccaatatgataaataaaataaaatattattacagatccagcaggcatcaaaaagataattcaattttataagcaactctgcctaattttcacaaaatacataaaatagaccatttcttgtaaaaacacaaactaccacaactcacctaatatgaaaaaagataattttggatagcactatacctattaaggtaatttaatttgtaattaaagaaaaagatgaaagataaatctttaggctgagatgttttactggagaattctataaacattgaagatgaattcaacacaaattcttcacaaactctcctctgacaaaataaaagaggacagaatacttccctacttactctctgaagtcagaattacactgatatcaaaataagaacttacacaagaaaaaaaggtacaagccaatatgcttcatgaatatagacacaaacatccttaatagcatgttagaaacagaactcagcartatcaaaaaataagacaaactatgaccaaatggggtttcctccagggatgcaagga

SEQ ID NO: 824585 - DNA, 615 bp, Homo sapiens
tgaggaaactgaagttgagggtgagggatccacccgggggctacaaaacccgggcttgaatgcagggcttggttctcataggcctcagattaatccatcaggactctgggaaaatgggacaatttcccccagatttgtgctcaatgtgggacttggtgctggatgctgtcatcgacttgcaggacattaggcaaatgagaaaaacagaagacaaggtgtgggatgttaggaagcaggacagcacacgcagtgtctaaggaatattctccccagggaactggtctcggctgctccttccagctagaaagccctcagcaggggctggcaagccagtggccgggcgcctctgccacgcctgtgtccgggccaacattgctaatcagtcactgcattttaggtccctacgtggcctcctcctgctgctcaattcagcatcccagctatccccgacccactcatcagaactggtccacagaaaagactgggggccgatacagcaggactagagctcagcggcccccatcgggcctctctgcagcttctctgggcttccacaccstctcgggctccaggccacaccctctcgggctccaggccactggggaaggaatccct

SEQ ID NO: 824586 - DNA, 572 bp, Homo sapiens
ggatccgaggagagatggagggaagaggagaggggcgggaaatggggggmaaaataagttctagaggtctccacttggggacttggaatttacagggtgagctgaagatgggtcccacacctgtgggatgaacacacttgaaccagttattcttttgctcctgaacttaaacctcctttaaaagacaaaggactggtctggctttagcgtccaccttgcattttggctgttcaggcaccaccctgcagcctccccagagggaggattgagggaagcccaaccttgcacctggacgctgatcacttcatagacacgcttcgcaatgtcacccagcagggtggagacgtcagccacaggcagtggccgtggcaggcccagtagcagccgcgacactgtggtggaggcgttcccaggggctgagtgcaggtggtggacggtggaggccattggttgcagggcgctggtgacctgtgaaggcagaatcagagtgtcacacagcagaaggacaccccgtcagacagacgaggagactgaggcccgcagagctgaaatgaactgtccacacacacgta

SEQ ID NO: 824587 - DNA, 572 bp, Homo sapiens
ggatccgaggagagatggagggaagaggagaggggcgggaaatggggggaaaaataagttctagaggtctscacttggggacttggaatttacagggtgagctgaagatgggtcccacacctgtgggatgaacacacttgaaccagttattcttttgctcctgaacttaaacctcctttaaaagacaaaggactggtctggctttagcgtccaccttgcattttggctgttcaggcaccaccctgcagcctccccagagggaggattgagggaagcccaaccttgcacctggacgctgatcacttcatagacacgcttcgcaatgtcacccagcagggtggagacgtcagccacaggcagtggccgtggcaggcccagtagcagccgcgacactgtggtggaggcgttcccaggggctgagtgcaggtggtggacggtggaggccattggttgcagggcgctggtgacctgtgaaggcagaatcagagtgtcacacagcagaaggacaccccgtcagacagacgaggagactgaggcccgcagagctgaaatgaactgtccacacacacgta

SEQ ID NO: 824588 - DNA, 383 bp, Homo sapiens
ccgcagttcccaggaattcgtctgattgataacgcccaaagcctcgtgtctatcaccttgtaatagtcttaaagcccctgcacctggaactttacttttctgtaaccatttatcyttttaacttttttgcctactttacttctgtaaaattgttttaactagacccccgctcctctttctaaaccaaagtataaaagaaaatctagccccttcttcggggctgagagaatttttagcgttagccgtctctcggtcgccggctaataaaagactcttaattcgtctcaaagtatggcgttttctctaactcgcctgggtacaacagtctcaggccacaaggatgggtcctgcaggatccccttcgtggcacccaggagctggtg

SEQ ID NO: 824589 - DNA, 506 bp, Homo sapiens
atggtgttttgttacagcagcccaggcagaataacatgttaccctgcagttcccgatgtcagaagtctaaaatcaaggtgtcagcagcgccgtgttccttttggagtttcaggggaggatccrtttcctgcttttttggctcctagacgctgcctgcatcccttggctcgtggcccctcctccatcttcaaggccagagggcagccagcctcttcaaacttctctccagctctgatctccacttccttcaatgaccctcctgccctccttctttccctgcatggacccttgtgatgacatttggggcccacctggatatccaggaaaatctctccagctcaagatccttcacttagtcacctctcccaagtgcctttgccttctggggtcacatatctggggatgaggatgcagacatcttggggggcctttattcagtctaccacagaatgaacagtcatttgtgtgcttgttctcaagacgtcagagtgtagaaggccgtgagg

SEQ ID NO: 824590 - DNA, 582 bp, Homo sapiens
ggaactgatatttgggtggggtaactgacagtaaacaaagacacaagaacgcagcagatattggtaagagcyacaatgaatcaaattcaggatcaggatgggaagaactgaatgaaagaaggagacacaagaagaacaaagaggaaggatgtcccaggtggagaaaagagcccacacaaggcccctgggcaggagggaaggcagagaacagtgcagctagaggtggtgaaagggacagcagagatggtccggggctgggtgcccctggagcaggcgcttcctgcaggaggtaaatgagggactgctctgggctcaacacctgtggatgtccacaagcacggagactccatgagggcaggaatttctgttctgcttactgaagtatcctaagggatggaaccatgcacacagtgtgtgtcgggagtgcagcaccatgaatgattgaatgagtgaagacaaatacatgactccgggatttggtcacacaaaggctactggtgaccctgacaagtcgtggagactccagaagactgactggcagtcgggaggtgagatggagacagggacacataggctttgaag

SEQ ID NO: 824591 - DNA, 582 bp, Homo sapiens
ggaactgatatttgggtggggtaactgacagtaaacaaagacacaagaacgcagcagatattggtaagagccacaatgartcaaattcaggatcaggatgggaagaactgaatgaaagaaggagacacaagaagaacaaagaggaaggatgtcccaggtggagaaaagagcccacacaaggcccctgggcaggagggaaggcagagaacagtgcagctagaggtggtgaaagggacagcagagatggtccggggctgggtgcccctggagcaggcgcttcctgcaggaggtaaatgagggactgctctgggctcaacacctgtggatgtccacaagcacggagactccatgagggcaggaatttctgttctgcttactgaagtatcctaagggatggaaccatgcacacagtgtgtgtcgggagtgcagcaccatgaatgattgaatgagtgaagacaaatacatgactccgggatttggtcacacaaaggctactggtgaccctgacaagtcgtggagactccagaagactgactggcagtcgggaggtgagatggagacagggacacataggctttgaag

SEQ ID NO: 824592 - DNA, 584 bp, Homo sapiens
tcaccaaactacaccgcaggagctcccacagcccacaccaagaatcatctctagactacatcaggcccacggaacgagttgaaacaagcccagtctggatctgagctttagcttccaaatccttccctgtctcttctgaccacacctgagggcagggctttctctgttttgtccacccctgcgttcccagcatcaagaacagctcctggcacagagtcggtgatccctgatgtctgctgagcacggggctgaatcttaggtctcaggaagcgaagttcaggttggtgtagcgctgtggtggagtggaagaaggtcgacagaatgaagctcactcagattaactcagggtagctcaccctgtcatgtaagacaagtccccaacccctgggctgcagaccagtccgtggcccgttaggaatggggccacacagcaggaggtgagcggcaagcgagggagctttatggcttgagctctccctcctstcagatcagtggcggcattagactctcataggagtgaaaaccctattgtgagctgagcactcaagggatctaggttgcacgcttctaatgagaatctaaat

SEQ ID NO: 824593 - DNA, 610 bp, Homo sapiens
tgggctggctcctggcacaatgctctgtgggtcatttgctcagagtcggcagaggaactgggctgagctcctccctggcgttctcaccaagtggccccttacccagtcaaatacactctgattctagattccaggtttactggaatctcatggcccgaattaggcaatcgacagtgttctagctcctccattaagccaggaaagcacagtccgtccattccacagggaaaattagtggatggatgagtagctctgtgaccacaagctccctaacagaatgaggtaatataggacgcaatttcccttggaagtattccgcactaggggtggggaacggagactcattcatttgccttgggttctatttttaagacctggattgaaccttcagtcattaatgtgatttgaggctgtctgcactctgctcccataaaatcccggaaaccctggggtggaggtggggagggggcatcactgccctcagtgtccccgccctgtccccagccagcagtcctgggccacacaccaggccasaggcacacggccccacctgggacaggcctgtcccgtttctatctgcagccgaccagaaacacttccctgactttga

SEQ ID NO: 824594 - DNA, 562 bp, Homo sapiens
cctcaagtatgttttccaagttgcttgctctgtctttctatcagggactccaaagagttgtaggtttcatgtttttacataatcccatatttcttggaggttttgttcattctttttctttatttttctctgagttgattcaaagaatctatctttgagatctgaaattctttcctcagctttgtctattttgctgttaatacttctgattgtattatgaaattcttgtagtgagtttgtcagctctgtcacaccattttggttctttcttaaaatggctatttcatctttcagttcttatattattttactggattccttagattttttgaattgggtttcaactttctcctcaatcctgatgatctttgttgccacccaggttctgaattctatgtctgtcatttcagtcatttcagcctggttaagaaccattgytggagagttagtgcagtcgttggaaggtaaaaagacactctagcttcttgacttgccagggttctggcattcatttttcatcgttgtgggttgatgagaattctttcaatctttgaagttgcct

SEQ ID NO: 824595 - DNA, 385 bp, Homo sapiens
actggaaagaacaaaaatttccttatatatagaaatgtattgtgataatacatcagagaagtaagccagcacatgagatgaccttgtaatcaagtctcctggaggccctgtaatgtcacttagagcaggagtccccaacccctgggccttggactgatactggcccctggcctgttaggaaatgggcccacagcaggaggcaagtggtggatgagggagaattactgcctgagctccacttcccgtcagatcagcagcagcattagattmttataggagcgtggaccctaatgcgaaccctgatacttttaccccaacactatgccccaactctcctgtccatggaaaaattgtcttccatgaaaccagtccctggtccctggtg

SEQ ID NO: 824596 - DNA, 609 bp, Homo sapiens
gatttgtgttcgtaaaatttgccaactataaccactaaggaaaatacatcagaatgattattggttatattgccatttaagtgttctcgataattgttttcactgaatttaaataaatataaaactcttaagttttaaaggaggataaattgctatgtgacttttcttagtaatgtcacaattagtaatcttgacaaggcatgttttaaaatagtaactattcattagcacaattacataaagaactaatataataatgtttaaagaacttttatattttttcaaaattttttccaagttgaaattcttaattctacatttctattcccgcagttgtttttcataataattaatatctttaagtaatatataatttttaaaatcaatgttatttactgaccataaagttcctttctatgtaatatctactgaaagattttccctgttagttgcccactaattttatatgaagtaactgtcatcagctatctaaaccagtaaatatttccaaatatattgtaaattttgaaacattatttattataaaaataacttcatatattatatttagatttcagaggtttaaaagmtgaaaactacatcttattt

SEQ ID NO: 824597 - DNA, 631 bp, Homo sapiens
gttttttaaataaaggtttaaaaaatccttttgcaaagcgatgatagaggcacgtggttcgaaattgacatgcacaggagaacagaccatgaaaagtctctctcccaccccttcctcccagccaaaagtttcctcccactccatgccaatgactgttaactgtttcctgtgtccccaaagagatgttcttctatgtgtgtcaaagcaaagtatattttcactattcttcctctttggtttatgctgcactcatttttctgcgtctggctgttctcgacaggagtagcaggggctcttggtggcctgcccataactctgtggcccttgtcagttctgtgcctactggcctgactccctagtgccagcaagtgaggattctctggcctctgagcccacatgccccctgggagcagccctccatcaatggctggttggagttggtggatcaatatcccagctccctctccacttgagtggaataacctaggtgcatgttctatgctgtgcccagcatccccttttgtgggctgtcttcccttacctgcctcatttgccatgtcycctgcaggtgttttctgggatcacctctcaaataaaccacatgcctttgaattattgtttcagggtcagc

SEQ ID NO: 824598 - DNA, 525 bp, Homo sapiens
gagtgtgatatcgtgtgtttgtgctgcgctgtgatgggtatgtggttctacgaccttcactgtaattctctgagactccctcctgaacgttgctgagaatgtgacagtggcctgtgtcaccctctggctggtttcatctctgaggctgtgcagcggggcggcactgcatggccttctgtctgtccctgggtgtttttgcctgtgtgacggtgttgcgcggtcagtcaggactgggcgctatggcagctgcccaaaatatctccagctgcctgccgcgggccaggccccatcccagggtggggtgtgggtggagtttggtccatccttgcccttgggaaacccatgtcatggagggatggaaaaggcctgtgaaaacctcctctgtgtctcagacggtgttggacstccaatatccacccaggatcttacccccaaatctaatccctcaacccaaatctgattcatcagcaagtaccctcacagctcctagccccatgggagagaaaaaaagaagagaaaactgtc

SEQ ID NO: 824599 - DNA, 630 bp, Homo sapiens
cacagttttgaaggctgggaagtccaagatcaaggccccagcagattcggtggccagtgagggcctgcttcctcatagactcactctagtctcacatggcagaaggtggagaagctctctggggcctcttttataagagcactaatcccattcatgaggactccacccttatgacctaatcacctctaaaaggcccccacctcctatcactgtgggttaggatttcaacatatgaaccgggggaaggggcacaaacattcagaccaaagcacaggtgctgtttagttaggcacagggtgggggttgtggcagggggaggttacagcagtaaacaacagacacaaacctctgctgtcacagatgtgagcgttctaatatgtaagacaacaaacaaggtaaatggggcctggtctccacacctgtaatcccaatactttgggaggccaaggccagaggattgcttgagcttaggagttggagaatgacctgggcaacatagtgagacccccgtctgttcaaatatatatatatatatatatatattttaaaattagctgggcatgttggtgcgyacctgtagtcccggctatgcaggaggctgagatgggagtcccttgagcccaggaagtc

SEQ ID NO: 824600 - DNA, 644 bp, Homo sapiens
gactaaacatagtaaatatgtcagcactctccaaactgctctatttattgaaaacaataccaatcaaaatgttgcagtatctttttwatcgagagtaactcattctaaaatttatatagaaatacaaaaatctggaatagctaaacaaatttggagaggtcacactacccaattaaaagactatcatccttcagcaatcaaaatggtattggaatagttacatagatcaatggaaaggaataatgagtcaaggttatctactacacagatgtagcagagatttttgatgaaagtacaagagcaattcagtggagatattgcagtcttttaaaacaatgacattggaaaaaattattcacatgtaaaaaatgaaccttaaactaaatataacactatacaaaagttaaataaattataaatctaaatataaaatgtaaaactatattactattagaaaacatgggagaaaacctttgttaattgggattagacaaggagttcttacacatgacaccaaaagtatataacataaaattttaaaaaatggcttgttagactatatcaaaattaaaaacttttactgtgcaaaaggcactactaagaatgagaagacaagctacaaagtaggggaaatatttgtgaac

SEQ ID NO: 824601 - DNA, 644 bp, Homo sapiens
gactaaacatagtaaatatgtcagcactctccaaactgctctatttattgaaaacaataccaatcaaaatgttgcagtatctttttaatcgagagtaactcattctaaaatttatatagaaatacaaaaatctggaatagctaaacaaatttggagaggtcacactacccaattaaaagactatcatccttcagcaatcaaaatggtattggaatagttacatagatcaatggaaaggaataatgagtcaaggttatctactacacagatgtagcagagatttttgatgaaagtacaagagcaattcagtggagatattgcagtcttttaaaacaatgacattggaaaaaattattcacatgtaaaaaatgaaccttaaactaaatataacactatacaaaagttaaataaattataaatctaaatataaaatgtaaaactatattactattagaaaacatgggagaaaacctttgttaattgggattagacaaggagttcttacacatgacaccaaaagtatataacataaaatttwaaaaaatggcttgttagactatatcaaaattaaaaacttttactgtgcaaaaggcactactaagaatgagaagacaagctacaaagtaggggaaatatttgtgaac

SEQ ID NO: 824602 - DNA, 513 bp, Homo sapiens
tccaccccagagacacgtgggagtttcagagccatggacataggcctaagggacaaagaacaactgcactttttgaagtaacttgctccttggcatttttgacccatattttccaagtatgtgyggatgggtgtggacgtgactcccaggagtgaggcagagcacaccccggctgcacctgtccacgtgcagtcacacaccagcagtggcgtcccctggggtgcttgttagaaatgctgagttgccggctgtaccctagaccccaaaactctgcatgtcaataggcccaggtgactcctgtccatggtaaagtctgagaagcactgggctggagtacagactgtattcataatgaaagaacctcaaggccagccagtccacccagcccgttttacagatgataaaactgaggcccagaaaggcagagagatacactccaagtcatgtgacaaatgggtagcagagccaaggcacagctttggactgtgcgctgctgactatgtgaaagggtcc

SEQ ID NO: 824603 - DNA, 600 bp, Homo sapiens
agtatcgaggcaggcccttttgattgacatcagaatcaggtttgcaatggaataggagctttccttcctcctgtcactttagccccaggctccacctcagagtctggaatgctcatacctatggcaggtgaccttgtgtaacaggttggggttaatgccattctgtcctccagcatggcactgaacttagctggactagagggacattttggggagatgtgctcagagtcctcctctggtcctcctcattcaccttctgtctttctaaatgactgatggagaaactactaaggccagaccaggctctcaggaaaactctgggcctttagaagaaccactggggatgagttggtcttcagatatattcgttaacattattagctcagggtaaaaaaaataactcagaggacagggcagtctagcacaatggtcaagagcatgcatgggtttcggccttccayagagctgctttatcacaagtttatcagcagggtatacaacctctccaggcctcggtttcttcatcaataaatggggatagaaatggtacctaccttagagggttctggtgaggatccagcaaatgtgtttcaaagcagt

SEQ ID NO: 824604 - DNA, 579 bp, Homo sapiens
aatactaagagatactctaagggagcttctgtattaygaatatattcttccttacttccattatggaatagcagtcaaatttttccttagtagtcaggattaagcccatttatgcctaatgttccattattggaacactgagcatgtggaagttatttatttcttactgctcagggtcatcaccaaggtctgttttttcacacatgtctggaattcaaaaaattgcaggctctgacataaatgggttaataaacccagccagaatagtaactccttctttgcctgttgattagaggcatgaagaccacagagtggctggatagcattattaacttctggtttaatgaaatcattgtgtctcctggtggaagtattccttccttgggaaggaagacctctgggtcagcaaagcataaggtcacaggaaaaggaagaaaaaattttgctagtgggtcactaggagcaatagtcagtgttgccacttccgcttccaccccttgattcctggatctgtgaattctggctgtgggagaaacagcaccatgtattagatgttgattcagaacatatacagcctcc

SEQ ID NO: 824605 - DNA, 579 bp, Homo sapiens
aatactaagagatactctaagggagcttctgtattacgaatatattcttccttacttccattatggaatagcagtcaaatttttccttagtagtcaggattaagcccatttatgcctaatgttccattattggaacactgagcatgtggaagttatttatttcttactgctcagggtcatcaccaaggtctgttttttcacacatgtctggaattcaaaaaattgcaggctctgacataaatgggttaataaacccagccagaatagtaactccttctttgcctgttgattagaggcatgaagaccacagagtggctggatagcattattaacttctggtttaatgaaatcattgtgtctcctggtggaagtattccttccttgggaaggaagacctctgggtcagcaaagcataaggtcacaggaaaaggaagaaaaaattttgctagtgggtcactaggagcaatagtcagtgktgccacttccgcttccaccccttgattcctggatctgtgaattctggctgtgggagaaacagcaccatgtattagatgttgattcagaacatatacagcctcc

SEQ ID NO: 824606 - DNA, 579 bp, Homo sapiens
aatactaagagatactctaagggagcttctgtattacgaatatattcttccttacttccattatggaatagcagtcaaatttttccttagtagtcaggattaagcccatttatgcctaatgttccattattggaacactgagcatgtggaagttatttatttcttactgctcagggtcatcaccaaggtctgttttttcacacatgtctggaattcaaaaaattgcaggctctgacataaatgggttaataaacccagccagaatagtaactccttctttgcctgttgattagaggcatgaagaccacagagtggctggatagcattattaacttctggtttaatgaaatcattgtgtctcctggtggaagtattccttccttgggaaggaagacctctgggtcagcaaagcataaggtcacaggaaaaggaagaaaaaattttgctagtgggtcactaggagcaatagtcagtgttgccacttccgcttccacccyttgattcctggatctgtgaattctggctgtgggagaaacagcaccatgtattagatgttgattcagaacatatacagcctcc

SEQ ID NO: 824607 - DNA, 579 bp, Homo sapiens
tagataccaatgaattttggatgaaagattgtaattaaaccatgaccaattgcagttaagaattakaaggggaaatttttaggtgctatctagctaactgtccctaaagtagccttaccttactaaaataccaagaagctatggaaatagatgaaaactcattgtggtcggggaggctgggactgcaatcagcctaattactgagttggggagagcttgttgctaatgatagggctggtcgaactggctggagaaccaatcgctaacctcctgcagctgagtctccatcacaccactgggcagatggagccactaattcaggatcatctatctggcctccagttatgttcctctgccccacctcccttctactttattcagtgactggggctcaccatctctatacccctcacattttgggctcaactccccttcctccttacccacagcacatttacccctactcctactccaaacatgaacttgatttctatctcacagaggaaaaagaaaccatgacatggtaactccctcaacttcatgtatcaaacccacaaactcatccttccttcattcctt

SEQ ID NO: 824608 - DNA, 579 bp, Homo sapiens
tagataccaatgaattttggatgaaagattgtaattaaaccatgaccaattgcagttaagaattagaaggggaaatttttaggtgctatctagctaactgtccctaaagtagycttaccttactaaaataccaagaagctatggaaatagatgaaaactcattgtggtcggggaggctgggactgcaatcagcctaattactgagttggggagagcttgttgctaatgatagggctggtcgaactggctggagaaccaatcgctaacctcctgcagctgagtctccatcacaccactgggcagatggagccactaattcaggatcatctatctggcctccagttatgttcctctgccccacctcccttctactttattcagtgactggggctcaccatctctatacccctcacattttgggctcaactccccttcctccttacccacagcacatttacccctactcctactccaaacatgaacttgatttctatctcacagaggaaaaagaaaccatgacatggtaactccctcaacttcatgtatcaaacccacaaactcatccttccttcattcctt

SEQ ID NO: 824609 - DNA, 611 bp, Homo sapiens
ctgatgttaaatctactggctagaatgtcagccctgaaattcctaaaaagaaaagtcctgttgaaacaactccctcgtaccacgcaaagcaatatgtcctgtaattcctggtggaaaccgctaggctyagcaagagattagggaaggcgagtgggtctaagcatttctgaagcttctttcctctgttggtgtttggtggtaaaggattctaaactctgaagattctgaatagtgtcctttggatttctgcagactgatcagcctgcgtcctttgtctcctcctgagttaacttgtggccagaggtcaacatggtgcaggagaagttagagtgcacactccccagtccctctgatcctctaaggcttgtctgccagtgagaatggaggatgtgtgttagaatcactgctacagactggacaggctggactactgctaagagttgctatttctgaatccttaaagggttggcatgacccagctgggtttcacttcagtcccttcagaagagtaggcacaagtgttccactcttccctgatcggggtgctgggagttttcttgggagcagagactgaagtttggcaggacaggggagcagagaggtgaggctga

SEQ ID NO: 824610 - DNA, 611 bp, Homo sapiens
ctgatgttaaatctactggctagaatgtcagccctgaaattcctaaaaagaaaagtcctgttgaaacaactccctcgtaccacgcaaagcaatatgtcctgtaattcctggtggaaaccgctaggctcagcaagagattagggaaggcgagtgggtctaagcatttctgaagcttctttcctctgttggtgtttggtggtaaaggattctaaactctgaagattctgaatagtgtcctttggatttctgcagactgatcagcctgcgtcctttgtctcctcctgagttaacttgtggccagaggtcaacatggtgcaggagaagttagagtgcacactccccagtccctctgatcctctaaggcttgtctgccagtgagaatggaggatgtgtgttagaatcactgctacagactggacaggctggactactgctaagagttgctatttctgaatccttaaagggttggcatgacccakctgggtttcacttcagtcccttcagaagagtaggcacaagtgttccactcttccctgatcggggtgctgggagttttcttgggagcagagactgaagtttggcaggacaggggagcagagaggtgaggctga

SEQ ID NO: 824611 - DNA, 611 bp, Homo sapiens
ctgatgttaaatctactggctagaatgtcagccctgaaattcctaaaaagaaaagtcctgttgaaacaactccctcgtaccacgcaaagcaatatgtcctgtaattcctggtggaaaccgctaggctcagcaagagattagggaaggcgagtgggtctaagcatttctgaagcttctttcctctgttggtgtttggtggtaaaggattctaaactctgaagattctgaatagtgtcctttggatttctgcagactgatcagcctgcgtcctttgtctcctcctgagttaacttgtggccagaggtcaacatggtgcaggagaagttagagtgcacactccccagtccctctgatcctctaaggcttgtctgccagtgagaatggaggatgtgtgttagaatcactgctacagactggacaggctggactactgctaagagttgctatttctgaatccttaaagggttggcatgacccagctgggtttcacttcagtcccttcagaagagtaggcacaagtgttccactcttccctgatyggggtgctgggagttttcttgggagcagagactgaagtttggcaggacaggggagcagagaggtgaggctga

SEQ ID NO: 824612 - DNA, 515 bp, Homo sapiens
tttactgaagatctatcaagggtcagacactgtcccaggcatgcaggatacatcagtgaacaaaacttccctgctcttatggagctgacattctagaggagggagasagtcaatgacaataataaataaatgagaaattatatgagaggaggagtactatggaaaaaatagctcagagtcagggagatcagggctacagtgagatagggagggaggttccacagtggcattaaataggtcatcaggacagatctcttaagaaatgtaacttgtctagttatgaagaccacattccatctcattttcttaatcttatttgcaaattatatttgtgagacgtgaacactgagatagccttgcatttctattctcgtcgagaaacattaagtggaaaagagatgaacccatcaatatcaactcatcataaacaaaagctcagggcttgcaactcaaacccttgaggtgccttctcactgcacttcagtgtcaggaacaaataggcgttcaagcattat

SEQ ID NO: 824613 - DNA, 595 bp, Homo sapiens
aaaatgactgctcagcattgtagacaggtgggtctcagaagccacaatcccattagcaacaggtggctctccaggagatgacagggaaacaggatgtcatctgtctgtccctctgggccacaccacatcctrcccttctccagggctctgtacctgaagctgacctgcagcactgcatcaacagattcccttgccctctcttgttggcatatggatggttttagccaagtaggggacagcagcaggagaatggaatgaggaagaaaataaggtcaagcatttgtgcccctggctcccaccctctcagtttgcagcagacacactgacttctctacttgtggctgaagctccttgggcaaccctctccttagagttccctgttccattttcagccatcactccccgccactgcccttcaagttcagagatagaaatgggcaccccacaattcctagcctgaggggactgcagaggttgtttccctaaaacttgcccacactgttattaggctcttttcaaatcattcactgtgaaggtcctgttgccatccaaggaagagaagaagaaaagtgcaatgtccaaatgaggaagagac

SEQ ID NO: 824614 - DNA, 555 bp, Homo sapiens
cccagctagtcaggaggctggggtgggaggattacccgagcctgaagaggttgaggctgcagtgagtytcaaacttcaaggctcaagcaatcctcctgcctcagcctgggtgacattcaaagaccctgtctaaaaaaacaaattggctaggtgtggtggctcatgcctgtaatcccagtactttgggaagccaaagcatgaaggtcacttgatcccaagagtggtagaccagcctgggcaatatagtgagaccctatctgtacaaaaaaatttaaaaattagccacatgtgatggcaaatgcctgtagtctcagctactggagaggctgaggtggccttgaacctgggaggtcgaggttgcagtaagttgagaacataccactgcactccagcctgggtgagagattgagaccctgtctcaaaaaagaaaaaaaaaaaaaggccgggtgtggtggctcacacctgtaataccagcactttgggaggccgaggtgggcgggtcacgaggtaaggggttccagaccagcctggcgaacatggtgaaaccccatctct

SEQ ID NO: 824615 - DNA, 637 bp, Homo sapiens
tttttaaataaggaagcaaataactgctttgaaatgtacctcagctgagcatggtagctcatgcctataatcccagcactttgggaggctgaggtagaaggactgcttgaggccaggagatcaagacyagcctgggcaacaaagcgagaccccatcgctattagaaaagaaaagaacctcaacgaagtgtcatacatggtacatggggtgggtgtagagagataataaaagggagaaaaggtaagaagatgaggatcactgaactagatactaaaagctatcctaattccactgataatgatattagtagctcaccattaatacattatcacattgaggtaattctgtcaacaacattttgagataaattctgtaataaccactcttttacagatgaggaaactgaggccaggagagattcagtatcttaataaaaggcagctagaaacagcaaagtcaggattcaaacctatgcctatgggcttaaactgtagatctgcactgagtagtaactactgttgatggaagtatcagaataaattaatcaggtatatcacaagccaatccaaacttgaaagcactggcatacatgtataaaagcttttagactacaaaattctttactaatatggtttag

SEQ ID NO: 824616 - DNA, 561 bp, Homo sapiens
aggacaggttggctgcttctytgttcccggtgcccagcatacagcagggcataaagccagcggatggagtgggtaaacaccagaagggtggaacctgtggtccaggccttagccagtcagggcagagcattccctgtgctacgtggttggctccagtgaggacatatgaccaaaacttgcccagtgagacggagctctgaatgtttcatttctgaaatgttgggagggttgatcattatggtgccagcttgctgaccaataggagacagattgaggatgatgcctatacatgggggagggtggagccaagacaagaaacattgtttaagattctggatccagccatgcctaaaactgaactggactgtttgattatctgaggagggaagagccatgtctaggaaaggagccccatggtcatcacagctggcaggcacatcctcacacattctgtgtgcctggcacacacaaactcccagactcagccacatccacagctccatccgccctccctgacagctctctgccatggactgcaaatctcagctcctgcaccacctc

SEQ ID NO: 824617 - DNA, 546 bp, Homo sapiens
caaactaatatagaaagatttacagtgagataactattctcattaatttcttgtgyatcttttgctgtattattatttttttttttgaaacggagtctcactctgtcacctggaccggagtgcagtagcatgatctcagctcactgcaacctctgcctcccgggttcaagaaattctcctgcctcagcctcccaagtagctaggactacaggcacacgctgctacacccagctaatttttttgtattttagtagagatggggtttcaccgtgttgcccaggctggtctcgaactcctgagctcaggtaatcagcctaccttggcctctcaaagtgctaggattacaggtgtgagccaccacacctggcgctgtatttcttttgtttgttttgacacagagtcttgctctgtgtcagaggctggagtgcagtggcatgatcacaactcactgcagcctcaaaatcctggctcaagcgatcctcccacttcagcctcctgagtagctgggcctacaggtgcttgccacctgtaatttttcggtttgtt

SEQ ID NO: 824618 - DNA, 639 bp, Homo sapiens
ataggggtagctggtttctgaggatccctgaggcccctctttgtcttctgttccacctgggctcagcccaccttcccccctcacctgggtgccaggtgcagctgccaggtgggtcatctgycctttcaggatcatcagggcctcctcatgagggtctggccgcttcatgaacactttcccgccatccttcctgtgggcattggagtactgtggtgggttgacactgagtctccctttcccatcacatagtttgacagtaggaaacttcctcctcctccaccaccccctatcattataaatgagaatccagggagaagcagagactggcctgaagtcctacagcacaacctagacaacagcagggcctcatctggactcatcagtataaagaaactccctccctaacaggagctgggcagggcgcttcaacccggtaagctggtgggccatgatggacactcaggtacagtgagggggctggagggctgggggcaggggcagtgctgacctgagggcctcaggcggcctccccggaacggctgctggtactgcctgacaatattcttgatctgctgtgtgggctgtgggaagtggtcagagttgagcgtagagtcaccggaccagctctggggagggtga

SEQ ID NO: 824619 - DNA, 591 bp, Homo sapiens
caagcgcgtgccaccacactcagctaattttgctttttgtatttttagtagagatggggtttcaccattttgcccaggctgctctygaactcctgacctcgtgatccacccacctgggccttcaaaattgctgggattacaggcgtgagccaccgcgcccggccaatgttattatcttcaaagaaaaattaggaatgtctttgttctccaaatattgggatatttgcacactcccaagtctgggtctgtttagtaaacattacgaatttgttcccttaactgtaaacatctagaggttaggaatgcctaactttctgagcacgcagcctagcaatctcagcctcattttcctagccctcatgccaaatagagtcgctctggttcaaacgtctctgacactatgtgaaaataaaccttggtccttataactgtagttctaattggtaatcttacttactaatgtcttaataataggttgccttggtaacaatattgtaattaatatttctgtctcctggaaaatataaattattatgcgttttcttggttaaggtggaagctctaaaattaattaaatgctttacacgtgcc

SEQ ID NO: 824620 - DNA, 633 bp, Homo sapiens
tgtttgcagccaatgctctgggccaggagctttgctgtgatgtctttagttcagactgagggttattgagagagtccactctggaagtctgtgatatcaattgtacagttttggctaaagatgttgtctatcatgaggaattctgcagagaattttcacctggcaattgaatcaaatcatgttggttctcacctgcgattctgcttattttgatgttagtgacattctttttcttttgataggagaaaacttcaacttcatgaaggcttagattctgtccctgaagcccattctgaactcacttggcctcacacattgctccactacagcacttataacagtgtacttcaaatatttgtcctcacatctttctcttcaaccgcaccctgaggtctttaagagcagagaaactgtcttggaatttctagtgcaacagactaggtgtggaatttagaagagtgttggtaactatttctctcaagcagctcctacctgaaaatcacagggtcatccagcatcttgcaaaggctggctcagtcaccagmtctcactggaactcctacaggaacctcccactcaacagagtgtcctctgcagttggtcgttctgagaacagctgttccccttcattgc

SEQ ID NO: 824621 - DNA, 595 bp, Homo sapiens
ctcatgcctgtaatcctagcactttgggaagccgaggtgggcagatcatttgaggtaagtgggtcgagactagcctggccaacatggcgaaatcccgtctctcttaaaaatagaaaaattagcctgatgtggtggcatgtgcctataatcccagctactcaagaggccgaggcaggggaatctcttgaaccccggaggtggaggttgcagtgagctgagatcatgccactgcactccagcctgggggacagagtgagactctgtctcaaacaaacaaacaaaaaatttataaaatctgatactttttcaccatggagtttcttctgtaggaatttatcctagagatatatttgtacatgtgcaagagacatatgtacaaggttaataaatgcaccattatttgtaatatcaaaaggttaataactgtcaaaacagccattaatattgtataaattatggtccatccatgcaatggaatactgtgtagctgtaaaaaaaaaaaaaaaaaagcaacaagcccgacatggaaagacttccaataaatagtaagtttaaragaaagtgcagaataatacatatttatatgaaaaaagag

SEQ ID NO: 824622 - DNA, 558 bp, Homo sapiens
cagatttcaactggagaatgaggattaggtctaatctgggagaataacagcagctgattgagagtttgtaaggtwttgtctcttttaatcacctgaagagcctaggaggtaagaattggtattattcccatatggcagataatgcaattggagcacaacgaaagggagttatttgtcccaggggttatgtattacatagtatgaatttgagtccggcaggtctgactcacaatccagtcttggagcagccctttatacccagcaccaccctgtgtcgattatatatgttacagggagtaaagcagaggagtgattctcaagttaaatccaaattggcagccaaaattgtggattgaaaaaaaaactgacctaagcaaactccacatagagaaggagaggcaaatcaaagagggaacaaaatagaggtgagtgaatgccatttaggaataaattcaggagttcctttttgcctatcagaggtcacatttgctctggaatcctgaggatgcacaggggcaggaggcctcctggtggacagaagatgcaccctttgctggg

SEQ ID NO: 824623 - DNA, 546 bp, Homo sapiens
aattacattttattttctatgcatttttgacaaatgcaaacatttctgcataaaagtgacagtagagaaagacatgccaaacattaaagtagtctcatggagctgaaatgagacaggaatcaatcaccttcaggcagagcaagcctcaggaagtaggaggatataagaaggtaagaggaatagtctcatttggcatgaggatttgctttctgttcttctctatcctgtttgacatcccaagtgagtggcttccgtgtaccacattagtaggattctttttatttctggtttctaatgaaattgagacactgggacatactggcaggagactggaagacagcaggagagtgacttgggatttccatctcctggctctctgcctgcgtattagttccttcttgcattgataaaaagaaatacctgagactgggaaatttatgaggaaaacaggtttaattggctcatggctctacaggctatrcaggaagcatagcagcttctgctttaggggaggcttcagaaagcttccaatcctggtgaaaggca

SEQ ID NO: 824624 - DNA, 551 bp, Homo sapiens
aaactgtcagtggatctaccattctggggcctggaggayggtgtcccgcttctcacagctccactaggcagtgccccaataggtactctgtgtcggggctttgacccacatttcccttctgcactgctccatcagaggttctccatgacagccccacccctacagcaaaattctgtctggacatccaggcattatcatacatcccctgaaatctaggaggaggttcccaaacaccaattcttgactactgtgcactagcaggctcaacaccatgtggaagctgccaaggcttgaggcttgcaccctctgaagccatggctcaagctctatgttggctcctttcagccatggctggagtggctggtacataaggtaccatgtccctagggtacacacagcacagggaccctgggcccagcccacaaaactattttctcctaggcctctgggcctgtgatgggaagggctgctgtgaagacctctgacatgccctggagacactttcttcattgtcttgaggattaacattgggctcctcgttacttatgcaa

SEQ ID NO: 824625 - DNA, 551 bp, Homo sapiens
aaactgtcagtggatctaccattctggggcctggaggatggtgtcccgcttctcacagctccactaggcagtgccccaataggtactctgtgtcggggctytgacccacatttcccttctgcactgctccatcagaggttctccatgacagccccacccctacagcaaaattctgtctggacatccaggcattatcatacatcccctgaaatctaggaggaggttcccaaacaccaattcttgactactgtgcactagcaggctcaacaccatgtggaagctgccaaggcttgaggcttgcaccctctgaagccatggctcaagctctatgttggctcctttcagccatggctggagtggctggtacataaggtaccatgtccctagggtacacacagcacagggaccctgggcccagcccacaaaactattttctcctaggcctctgggcctgtgatgggaagggctgctgtgaagacctctgacatgccctggagacactttcttcattgtcttgaggattaacattgggctcctcgttacttatgcaa

SEQ ID NO: 824626 - DNA, 645 bp, Homo sapiens
aaatgaaagaaaacctatgcattaattttaaaaaacaaggatttaaattagcttgtattgagaatatttaattataggataataacctaaataaagcacaattgaattctaaaaaacaatatgaccatagcatgaatgttctaataataaataaaatttattgagtattatgttctacatgcatataaattattctattctttacatgataagatagatgaaagctaaataattttattttttgaaagagagaattgaggatcaagatcaaataattaattcctttcaagaaacatatactttcaggtgcgccactgaaaataactacaagcaaaatatttaagataatgtcatcatatttactatcctgcagtcatttttaagcaagccccttctatagatagaatgtatataggtaattgaatttgtgtaaggatagagcaatgagccactgtcttgcagtattgacagatggctagacatttacgaatggagaacaaataaaaaactcactgataacaacctttcacccagatttttctataaagatgttaaataggagagaatagattatacattttcacaagtatcaattgttcaaawaaaggtttatatatttagaatagctgaatgtgtcatgtgaaa

SEQ ID NO: 824627 - DNA, 579 bp, Homo sapiens
cctgattattaataaaacttaatttacttaaaggacagctattctgagattctccttctctttatataaatatgttaaaatttattgcttattatgcaataatgatgagtggatgataattgctacttgttattggcaaatgttccttttaactgtacgtgtagtttgtaacactaggccattctcctgttcccaccaatcaatatttttcttttgaagcgtggggctgaattttactgctacatgacaaccaggtgagaaagttactgtttcatactgttctttaacacatgtgcactttcatcttgtatccaagaatagccctcaggttcttgtcaacaacatcctctctattcacatagccaaaggttaggtgagtttgtgtatctgatttctcagcatattactaatttaaggcagcaaagtagagaatgaggaggggctactttagtcaaaatgaagcaaaaatgaaattttagtgaaccagaaaggagaattagaatggtatyaacagtaaagcatagtctggaccatttaatttaggaataaaacagttgaatatctacccaactattacag

SEQ ID NO: 824628 - DNA, 606 bp, Homo sapiens
tataattgtactaagtgggatttgtaagtatcaaggatgttaatcagtcacataactaaacacatgtcatatacctagatgaccatcatgctattatagaaacatagtcctgatccccaaaatgaggtgcccrtgaggtacagcctttcaattttggacatagaccaaactgtctcaagcttggtcagaaatcgattaaagacccatggcattattcagtctctgaaccaaaatacactatactgattgccagtgttgtatctgtgacactttcaagatgctctgaaacctgtttgaagcaaattatctccaaactatccacaggctttgacagagcaatctcaatgcaaaaaatcaatgggaataagatcagtgttcaacaaaccgtaaactcccactgccttcaatgatatctaaatactgaaattgctcaagtctaaaaaaatctaaatccagaaaatgcttaaaaatgtttggaagctgttgtctaatttcagacacaatgatttttttaaagattttattaaaaacagccccactcttctagttttgtaactttccgtttttagaatattaactaaagtctgttccagtgcttactatgtg

SEQ ID NO: 824629 - DNA, 606 bp, Homo sapiens
tataattgtactaagtgggatttgtaagtatcaaggatgttaatcagtcacataactaaacacatgtcatatacctagatgaccatcatgctattatagaaacatagtcctgatccccaaaatgaggtgcccatgaggtacagcctttcaattttggacatagaccaaactgtctcaagcttggtcagaaatcgattaaagacccatggcattattcagtctctgaaccaaaatacactatactgattgccagtgttgtatctgtgacactttcaagatgctctgaaacctgtttgaagcaaattatctccaaactatccacaggctttgacagagcaatctcaatgcaaaaaatcaatgggaataagatcagtgttcaacaaaccgtaaactcccactgccttcaatgatatctaaatactgaaattgctcaagtctaaaaaaatctaaatccagaaaatgcttaaaaatgtttggaagctgttgtctaatttcagacacaatgatttttttaaagattttattaaaaacagccccactcttctagttttgtaactttccktttttagaatattaactaaagtctgttccagtgcttactatgtg

SEQ ID NO: 824630 - DNA, 540 bp, Homo sapiens
gattgaatatttgtctccccctaaaatgcatatgttgaaatctttttttgagatggagtttccctctgttgtccaggctggagtgcagtggcacaatcctggctcactgcaacctcagcctcccaggttaaaaagattcttcctgccttagcctcctgagtagctgggactacaggggcatgctaccacgctcagctaatttttgtatttttagtagagacagggtttcaccatgttggtcaggctggtctcgaatgcctgacctcaagtgatccacctgcctcagcctcccaaagtgctgggattacaggtgtgagccactgtgcccagccatatgttgaaatcttaacccccaatgtgatggtattaggaagcagggctttggggaggaaattggataataatagtagaggcctcatgtatgggattagtactcttataaaagaaaccccacrgagctttctcaccttctttcccccatgtgaggatacagtaaaaagatagtagcctgcaacccagaagaggatcctacaaagaaac

SEQ ID NO: 824631 - DNA, 542 bp, Homo sapiens
tttgtattgagacagagacacttactatgtattatctaattagacaggtaataactggcactatgagctaatatattttgtagaatatgaggtttacatttaataataagacttcatattctatccattgacaatataataccatttttaggtgaatcttaaaacatatattgtagcattctgaatagggaggaagataatactggttaaaataataatcttcaggctaggcgcggcagctcacacctctaaccccagccctttggggggccgagctgggggcagatcacttgaggtcaggagtttgagaccagcctggctaaaatggtgaaatttcaacactactaaaaatagaaaaattagccagatgtaatggcacttgcctgtagtcccagctacttgggaggctaagacaagagaatcacttgaacccaggaagcagaggctgcagtgagctgagatcatgccactgcaccccagcctgggtgacagagagagaytccatctcaaataataatagtaataataatcttcagatatat

SEQ ID NO: 824632 - DNA, 618 bp, Homo sapiens
aatatcaactatatatttttccttttaatataaggagaatgagatgacattattaaatgttaaaaagcctataaaactaatttcagtgtttctaaaggacctacaaagctctagtattcttcattcctcttsatctcagattaggttcacgtactccattccatctatcaaaatttcctatgcacatatgaataaagaaaagaaggatttaaaaaaaggaaggaagaaaagaaagatttagaagaaggaaaggagaggagaaggggaaagaggaaaaaagtggaagggagtagacagtaggggaaaaaggaagcaaggggaaaagagggagaaaaggaacgagctctcagaggtttaactttaacctaatcctaatgctgcagagacatttctttcatgtgaatatatgtgtggcttttaaaatctgattggctgattgtgagacactctggaaaacaattttggcagttcttttaaatactaaatattgattaccaaatgcccttggcatttatctcagagaaatgaaaatgtatatttaatactaaaactgtacatatttatagcagctttattcataacaggcaaaactggaaactacccacatttcctcaacag

SEQ ID NO: 824633 - DNA, 670 bp, Homo sapiens
ttcatccagccaatagccaagtcaacaacctcgaattcaaccctccaaaacagtctgcattatgatctgactttaacaagaggttgaaggtttactaatcccaaatgcaagtggtcctggaataatgccagaaaaaaggggtgttcaatcttcagaagagaaaccaacaagatctggcccaatgtacatgctttcccacaaacaaaagttccccaaataaaccagaaagcattagttactccataaggaaaaatgcatataattagcaagatgagctgaacctcccccttcttttcatttagaaggcccttgttctaagactccagcatgtagaaattctttgaaaattacatcacttttatttctactgattttattttaaattctaaggatgtgccaaatgagtcagatactaagatttatcttttgaaattatgtactgtgtttcattccgttatcttttatgtgggtgcaattcaaaaacatgagaaatgcctaaactttaagtattttagagtaaaattaaaagaacaattggtagtaacttttgctccatatgggtaagtggttgatgaggttgccatgtttttctggaaaagtaaaaaaattattccaattcaggggaagtatctcatcagagtctttcrcatagcctgatgccaaaaagatg

SEQ ID NO: 824634 - DNA, 638 bp, Homo sapiens
gaattcaccagtataaatggacaaggcaggaataaattgtttttcactgactagtgaaatcacaatgcaagctaagcaatattacatatagggtgatagctcccgccacaattctctctctcaggtaaaaacaaytgaatgtcttctatcaacttttcactatttccatataaaatattctattgtttaaacaatatttctggatatgaaaaagagacagttatttaaataattcccagtcatttagcttctattttacaattccttggtaatgttagagttccctaaccagacactctctaacagactatagttccccaaagatgggccttaaaagatggattctttaacaactgtaacagctgcagcaacaaccgtgaatcttcaagtgtagctgttaagataagatagtttgagggcaggtataataaaaggaaaaagtttaaatatttatttaaaaaataataattcctacttttgattgcctgttatgtgtcaaacattcttattaacactgataatctccttttggtgtaaataaattaactatgagagcgtagttaatacatttttttaagacaatatagctaaaatatagcagaaccaatcatcaaccatgaacctgcctttatcattaa

SEQ ID NO: 824635 - DNA, 623 bp, Homo sapiens
tctttttttccccagcttactcaggacaaaatgtaataacgacagcagaggagggtgtatcatataactaacgaggcctaagtttcaggtttcctgaattgcaccagctcctttcaaggctctctagctaattttatatttctatatgttttctttttcttaaggaaggcctcccagattaaataaatttcagtgggcaaaatatggtttggcccctgagtgtgccaggtagagattctgtagcagagttacacaggtaggccactctgatgtgagtcatggatgaaatgcttaaatgtgcttcttttactttgatgtgcaagaaggaccatatgtattttttataaatcaacctgatttccatttggaagccccactctgctaggtggtacacacacacacatgcacatgcacacacacacactactcccaggatggctgctctgcccatgcttgagactcagcaattgctgctggcactgagaactccagagcatgtgtcctcgtctcttccagcacagcatgcaaccatctyctttgagcattagctgcttccttgagctcttagaatgaaaggcacattctctgcttgacattcataaacctcttctgctatgggagaa

SEQ ID NO: 824636 - DNA, 593 bp, Homo sapiens
aggctcacattataccatttctttggcttcattagacacttcttcatgtagtatgagccaaattattgccctatgatatatctaacaaagaaaatattctctaagtagaactggaaaatgtcacaatttaaattccttcatgaaaatatcaacgagttaaccttcactggcctctcatgcctgaaatgagataagtaggggttattggggtcttcaattgttgcccagaggatgtgctttgcattcagaggttgcattgctaaccaagaaatggcacagaaaaatgggaaaatcaactgccagctgctcccctcagctaaactgcctgtttaagaaggtagaagacacgctctacccagggctggctcacctggggttgtataaacacctctcttattcttaattcacatcaattttttgtgaccttctctttgccatttcttagctgtgagatgatggctcctgtatttctaacttcatgccatggaaaagaaaatgaaaggcaggaccatgccrtttattgaggtaatgtgatagcagatattcacaccggtggccctgactcacccagaaaggattcaattactcctatg

SEQ ID NO: 824637 - DNA, 555 bp, Homo sapiens
gtttatggcactttgttatgcagccctagaacactaatataatatgctagatgtttttgtaagaaaaaaagaaaaataaaaatgtatttgtctatttacctttttttcttttgcaaatgaaacataaaagaaccagaaattaacacaattatttaccatagaggattagttgaaaggccatggagaggatatgttggggagtgagccttctttaaacataccttgtcatagagttttgactttatacatgttatacataacttacttattttttaaaaaaagtaaattgaaagaaaacaaaacaaaaaaggaaacattgaaattgaacacaaatgtaatcaaaagaactgaaatatatatcaaattgattccatagcacatagagaaaagggtgatttcagaaaacttctgaacacagtactctagatatccagtgcaggatatactytaaaaacaataggaagtgcaaaatgatcttaggcttctctttatttttagtggcagtattaaaattgtaaaagaccactcaactcaaatcgttggttgacttgcttt

SEQ ID NO: 824638 - DNA, 617 bp, Homo sapiens
agtaatctgtatttttaacaagctctctaggagagtcttctgatgtaggtgatgttgtcatcacaaattgagaaatgctgtttgtgtccagtgctattttaggctgagctatctacctcatattacttatttctattttctttttaccaaattacacaataaaaaattgcttttaaaaataagatatagaaaaatggcagagagggtcatggccaggggagtggagcgcaactcttctgttttcacttcagaatccttacttagttatcagctgacatataaataaaagatgaattttccaatgattaggagactctgtcttggttttagagaagatgaatggaggaattttctgactttaaggacacagaaatacatgaaagaaaaggtttgtcaaagaataattaaaaggatttttactaaacaaaaagaatatggttcattaatgtggtcagtgaggactcaagtaattatacgagtaatttttatatgttttcaggaatgaaaattgactccaaggttctaattatgttaaaccacarcatcaatatttcctggatttgggaagagaaaaatcatgtgcagataaaattaataatgccttaccctcttccatg

SEQ ID NO: 824639 - DNA, 547 bp, Homo sapiens
atgaaaaaataaatgagtatgtattttctaaactaaaaattaggacatatttggacaagtatttggaatgagggtcagcttcagatatatgggacagataacttctaaatatgagaacagttaaatgtcatttcttaataactatttttgttccattggtgaagtgagatggagatgacaaaaacactggtcatctaaggcaagtcctaggtatatacatttcgcttatttttttttcaatagtaatttttttttattatcctcactcactcaggaatcaaccaaaaacatgacattgagccatctttcctagggaaattacaggatttttcaattgggatggctcaatgtagttattgactgtatctcacaggtgggtggaaggatgaagcactcttcaatccagggaagggcttggatagattttttattttattttattttattttattttatttattyatttatttatttatttatttatttatttatttattttgagatggagtcttgctctgttgcccaggctggcgtgcagtgatgtgat

SEQ ID NO: 824640 - DNA, 553 bp, Homo sapiens
tggtaccatattggctcgctgcaacctctgcctcccgagttcaagcaattctcctgcctcagcctcccgagtagctgggattacaggcacccaccaccacgcccagctaatttttgtatttttagtagacacagggttttgccatgctggccaggctggtctcgaactcctgacctcaggtgatccgcctgccttggcctcccaaagtgctgggattacaggtgttagccaccgcacccagccaccatgtacttttaaaagttactccagtgactttccagcttaaatttggagggaaattttccttaagaggtgatcaagtaccagtatcttcacatgttgataagctgttaaatacatcccagcaactcacaatttaataccatatacactacaaactctaattttcagtctttcacaacacactaacaatgttattaggaaaatataggactaccataaccaaagatgtcacagagtgcayacaattctgacagggaaagccatgatcaaagagtggtttttataaggaaacaattctactaaaaaataa

SEQ ID NO: 824641 - DNA, 597 bp, Homo sapiens
attattgtcttccttcagctaactttgggtttaatttgtgcttcttgttcttccttcttaaggtagaagcttaggtcatttattttaagcctttcctattttctatgtaagcatttaaagccataactttctaagcactgctttatatgacaaatacaactaattttgctatgttgtgtttttatcatttagttcgaaagattttctaatatatcttatattattttggtcagagaatatattctaagatttctgtattttgaaattcactgagacttattttatgggccaatgtgtgatctttcccagtgaaagtctggagtgcacacaagaaacgagttttctgtgttgtggctgtagtatcttataaaccttaattagctcagagtggtaaacaacgtgttcaaatcttccgtattctcactgatttttttcctactcattctatcaattactaagagagagatggtaaaatatctaatgataagtctacctctctctccagttctgacaggctttrttttatatattttgaagccattattggttacatatacacattggtgtcatgcctgtgtaatgaagtgaccctttttt

SEQ ID NO: 824642 - DNA, 559 bp, Homo sapiens
ttggagacggcaacctagggactcacacatgcagggagctgcttgccagcgatgggtaacccggctctcctgagggggcctcagggggtgctgcagccacacccaccctagctcccctgcccctccccagggtcccctgcacatgcagggctggctgggctggaggatcacctgcaaccctcaacccctgagggtccccaaacctgtgtgttggagcccccatgagcttttcaaagcccggtgtccaggtccccaccaacaagtcagagtctctgtggtgacacctggcctttggtgtcacccaacaggccacagaacaagcttttccccgaggaaccgagacacctgctcaagcctctgctcattgctgttggtagttctgcttgtggccagcaaagccacataatacctaggacagtttgatgacatgcagggatgccaggagggagcttttgagaccaggatggtcctgggaaagttggggtrtctgtgatcctcagtaaaggtcaaggctgtgagctgggagaaggaaggagggatcccgaggaaggcagccgag

SEQ ID NO: 824643 - DNA, 647 bp, Homo sapiens
cacatagtcctagggatcaaagtgctcccaagtgaggagagagtgactctctccttcgcgacaggacattgatcaggaaaccggggtcaggatrgccctgtattcaccaaataaagcatgtagcatagggctgaggctggagccagtgccaagtaaatatcccttcttctccctctactgttaaccagaattaatgatttgtaggtatgttaacagaaaataagtgacccctaatccacttacacaagaatatctgggtaagagaaacacagtaaccatgctagtaacttctgttgagatggggatgtgtcagtctttggaggcaggcattatatttcaggaccatgattttaagatgaggaaaccaaagctcagagaggtttggaaatgtaggagattggtcagagtcgtaggaaaaactacagggaaaggacacaaaccttctgaaagtttggaagcttctgcagagccctgggggagaacagctgaaggcagagggcaaggagtgtaggggaatgtatcttaaacaggcttgtttacttatgttgaccaggaactgacctttgatcatctgctggcttgatgttccctgaaaggggaacaataaatgttaattacctacaggttgtgttggctccaggttttcg

SEQ ID NO: 824644 - DNA, 631 bp, Homo sapiens
gatcttcctctccttataagccaccaatcctatcaattagggaccctcccttatgacttcatttaaccttaattatccyctaaagaccctatctccaaatacagtcacagtgtacaattatggtcctgaagaccctgttatccaaatacagggttagagcgtcacatataaatttgggggggggaataaaatttggtccatagcagatacaaagattgtgttatatgacagtggtggaagaaaatcttatctatccagtggagaataagaataaggaaataaaatcaattgaatgaagtaagaaataagacctactctaacaatctgaagtcgcaatattgatctctgacaaaataaagatttaattcagcaaatatcttatgtgacaaaagagatgttgtatgttagttcacagagcaatcagaaaataattgtattcattaaaaatgaatattaacatatccatctaatagtatagcttcaaaatatataaagcaatgatcaacccacctgagaatttcatttttatgaaaaattttattttatgctgtctataaaattccttaacttctactgatatattaattttttacacatgtattttttttgaatttttgaaattcactatcat

SEQ ID NO: 824645 - DNA, 498 bp, Homo sapiens
agtttgctcagaggtatatgctgcagtcctgactcatcgtggcccagagccaggagctgggtcacaggaagcactaactggcctttctcccttgaaaactcatgatgcctttgcatggggkgggaaagaagccacctttgtggtctgaggaaagcaagacatttcatttagggaacagactggtgtcttagaacctcagaatgcaagaggaagagggggctttagaaccctcctcatgtcagagatgggacaaaagttgagaaagggaaaggaatcttcccaaggtcatattgctagtgaggtaagcaggaccagacttttggtcagaatatgcatattgagattttttcttttgtgacagagttggggatgagcataagtaaagaatcaatgtaggagagccagcttggagcataggaagagatggtggtgaggaaatatgtggttaggatatctccagccttatcctagaaagacagtattccctgatttattcca

SEQ ID NO: 824646 - DNA, 498 bp, Homo sapiens
agtttgctcagaggtatatgctgcagtcctgactcatcgtggcccagagccaggagctgggtcacaggaagcactaactggcctttctcccttgaaaactcatgatgcctttgcatggggtgggaaagaagccacctttgtggtctgaggaaagcaagacatttcatttagggaacagactggtgtcttagaacctcagaatgcaagaggaagagggggctttagaaccctcctcatgtcagagatgggacaaaagttgagaaagggaaaggaatcttcccaaggtcatattgctagtgaggtaagcaggaccagacttttggtcagaatatgcatattgagattttttcttttgtgacagagttggggatgagcataagtaaagaatcaatgtaggagagccagcttggagcataggaagagatggtsgtgaggaaatatgtggttaggatatctccagccttatcctagaaagacagtattccctgatttattcca

SEQ ID NO: 824647 - DNA, 641 bp, Homo sapiens
cttcgttccttcagttcttctggaaggaatttagctatgagctcctccattattacatttttgctgtattttcttgatgccaagcactacatggggggaggcaattagacaatatgcaattaggtaatacgyagcaatcagcaaaacacttctgatgtaatcagtgaacaagtcaaatgacccacatattggagtaatctggacccacaaattagcagctgttaccatcataatatatgtattttctggatgttagtttcatttaaaaaaacacacatgcaattgattatctttataattagaaaaaaatttttaacaagggggtaaaacctgcattgaagttttaaaactctcacagtttttctgaaacactgaaatcaagatcatgttcttgtccaaaaagtagggtggggggaattcttccctttccattttctgatgattgtatttacaagctcacagaaattgtctccatctgggatatgctcaaagttagtggccaaaagtttcagggaactaaaaagcaattttcaatcactgaacctttcctgccctgtcccactcccagcctaacccaatgcttggcttctggatattgccaaatatacctattttttctcttttaattttagtttaaaaaa

SEQ ID NO: 824648 - DNA, 574 bp, Homo sapiens
gctcttggcacctcctctgcctgggctcccactttggcggcatttgaggagctcttcagcccaccactgcactgtgggagcccctttctgggctggccaaggctggaggccactccctcagcttgcagrgaggtgtggagggagaggcaccagcgggaaccggggctgcgtgcggagcttgcacgccagctggagttcccggtgggcgtgggcttggggggcccgcactcagagcagctggccagccctgctggccccaggcaatgagggacttagcacctgggccagtggctgcggagggtgtactaggtcccccagcagtgccagcccaccggtgctgtgcttgatttctcaccgagccttagctgctttcccgcagggcagggctcgggaactgcagcccaccatgcctgagccttccacccactccatgggctcatgtgcggcctgagcctccccgatgagcaccaccccctgctccactggcgcccagtcccatcgaccacccaagggctgaggagtgcaagtgcatggcgcgggactggcaggcagctccacctgcagccccggtgta

SEQ ID NO: 824649 - DNA, 572 bp, Homo sapiens
aaaataaaataataatcatgctgcagatgtaaagtaatttaagcatcctatacctacagaaatagcaaaatgttaacaccagaaattaatgtgcctttcagcaataaaaaaaagaatatattttgttaaccgtatggtcaaataaaaatttattttcacaattggtggacacgcaaagcagttgaaatagtctgaaaaaaaacttggacatatataattaaagtgacaaacacatctcttttttctctctctcatcaggatctaagccaagaaactaaaaataaaaacatgaatcaagaatgatcccaacaaccatgctggaaactaaatatttcatttttgtttcactaaagatgtgtcattagtgtaactaaggaaaattatactctaattggaaacacaacacgaaaaattatactgtattgaatcctgcacacaataaattgaaaaatgaaaccatgaaaaaatgcacagaaaaaagcaaatgcgacattatacataaaaataagaatatgacacactgaraactataaagtattgatgaaattgaagaagacataaataaataaaaa

SEQ ID NO: 824650 - DNA, 610 bp, Homo sapiens
gggggtctagtaaggcaaggatgaaatctgtgttgttagttgagtattgaagataacaacataaacatgatttttaaaaatctatstatcaatatatctatctacccaccctcctaccaacctactaaattatagttctctttgttaaaaggatccaagtgcaatatcaacccaataggcattaagtcatcaagcaattatatctggctcctcaaaactattattcacttaagggaacaagtaatttttgaagaaatagttgatttaaaggatggggcagagaaagtacaaagtaaactcataacacttcatttgccagaaagtaagaaaataccattaaagggggagggactcaagtcaatgtgaaaatgttcgcactagccaattatgggacaatttcagcatgaaacgtattgtaaaaagaacggattataatccactgactatgaacccatagtgattataagtaagtgtattaataaataaataacgtaggtgtaaaaacaatagattttaaaaataactcccggcaccaattttttatttatatttcagccaagaatagtccatgactgccaaaaccatcagttaaaatgtgatggagaatgga

SEQ ID NO: 824651 - DNA, 620 bp, Homo sapiens
gtgctggacagaggcaagaaccaggggaatgtacagcagggaagggagacaagagggtgggagagggcgcagccccagcaagcccccttgagaaggaggcaagtgagcaaaggcccagtggaggggasgttgagaccacgggctcacctgccacttcttccccttaggtggtgattttggggaaaatgggtgactgttcaccgtacaatgccccgctccatgggaaggccgtaaaccccaccctgtggactcaggcatgccttcgtgacttgcttcagccaatggaatgagtggaagtgacatgagctacttctgagctgaagctccacctgtgcctgctccaccagtccctggaaatgctcctggtagagcgtgctcctcagcccaggaggattctgacacccaagggaccgttcacaatgtctggagacatttttgggtgccatgacttggaggaagggtgctacgggcaccctgcagttgaatttgtttgctagggctgcagtaacatggtaccacagactgggcagcttcaacaacagaaacaacaggctcacagttctggagtcccagatcaaggtgtcggtggggtcggttcttctgagggctgtgaggagaat

SEQ ID NO: 824652 - DNA, 683 bp, Homo sapiens
ccccagcgtccagcagggtctggatccccccatttgctcagacgttcaggctgcttctgtccagggacggggccrtcactctgctgttcaaggcagacctgagagccacctggaatccctcagtgtggcttttccactctgacccaaggcaggccgcctctgcacacctgccctgtccacacttaggcagagcccccgtcacttctccctgggtcaccgcagatgcctccacccggggcctctgcagtttactgtctccatggcaaagacaggacactttaaacctgcaagtcaggccttgtcatatctctgcctgctgcccccacggctccccacctgactcagaatgagtgccagcgccccggccttggccccagcctgtgccacatgactgccctttgtcctccgggtcctctccccaacctccccctgctctgtgacctgcagactgaccaggtggcccacaccacagggctcccttgcctctggctctggatgtgtccccccagtggggagtcccattgggaggtcagcaggggtggtgttggagttcacctggttccttttttggggggtcgcctggggctggctgtgccctggcctcctttctatcctccactacaggaccatctttcctgccccagggcctttgcactggctgctcccattgcccagactgctcc

SEQ ID NO: 824653 - DNA, 683 bp, Homo sapiens
ccccagcgtccagcagggtctggatccccccatttgctcagacgttcaggctgcttctgtccagggacggggccgtcactctgctgttcaaggcagacctgagagccacctggartccctcagtgtggcttttccactctgacccaaggcaggccgcctctgcacacctgccctgtccacacttaggcagagcccccgtcacttctccctgggtcaccgcagatgcctccacccggggcctctgcagtttactgtctccatggcaaagacaggacactttaaacctgcaagtcaggccttgtcatatctctgcctgctgcccccacggctccccacctgactcagaatgagtgccagcgccccggccttggccccagcctgtgccacatgactgccctttgtcctccgggtcctctccccaacctccccctgctctgtgacctgcagactgaccaggtggcccacaccacagggctcccttgcctctggctctggatgtgtccccccagtggggagtcccattgggaggtcagcaggggtggtgttggagttcacctggttccttttttggggggtcgcctggggctggctgtgccctggcctcctttctatcctccactacaggaccatctttcctgccccagggcctttgcactggctgctcccattgcccagactgctcc

SEQ ID NO: 824654 - DNA, 493 bp, Homo sapiens
gaagcatggatgggagacctcaggaaacttatagtcatggtgaraagtgaggaggaagggagcacgtcctgcattgctggagcatgaggaaaagagagagatggaagggggaagtgctacacactttcaagaaaccagatctcatgagaactctatcaccagacagcactaggcgggtgttaaaccattagaaatcaccccattattcaatcacctcccaccaggttctcctccaacactgggatttacaagttgacatgagatttgggtagggacccagaacaaaactgtatcaaatcccaaactccacttccatagccaagaacttggtggttattgattgaaggcctcctaggggccagccccttcctacatactttgcatgaactctcttgtctcatgtgtaagtaccacaggctaatgtctgcaccttgcaccctctataatgatatctctcattttcatgattgagcagactgtaatggttgttgtg

SEQ ID NO: 824655 - DNA, 515 bp, Homo sapiens
gaagttaacaaaaattatacagagatttctcatacacccaacactgtttcccctattgttaacaccttacattattattatggyacattagtcacagctaataaaccaatataaacacattatgattaactaaaacccatacttaatttatatctcgttaattttaacctaatgtccttttaatatttccgttctaagatccgattcacataccaaatgacatttagtcgtcatgtctcctctggcttctcttggccacggcagtttctcagttatttcttgcttttgttggccttgatacttttgaagagtactggtcaggtattttgtagaatgtctatttactgtgtttatttgatttttttgtttgcttttttgatttgactgttttatgggtttgggggaggaatatcacagaattaaatttactttcctatcacttcatattaagagtacattgctaggctagcaacatgacttattgctgttgatgttaactttaatcatctggtgga

SEQ ID NO: 824656 - DNA, 581 bp, Homo sapiens
gcttacattatttgaaacataaaatttgatcccaagcagagactatataattattttatgttgattttccttctgatatatttctttttaaaaagcrattttgcttttttgaatcataaaatctttcaatctgtttatttataagcagctcccatggttatgcaaaaatatagacttatgcaacttaaaatgtatgaaatgaatattgtattttctcacttaacgggtatcaagtagattatttttaatgctgaagttgacaaaagtgaagtgagaaaaacatttctgcttatatattacaaaactgcatagcagtaacattatgtaaatatttctacatgaaatctatattgcaagtcataagtcaccaggacctaaactagatattaaggtttatgaaggtggtttcattcagtgatttggttttatattcactacatttaagtaacaattaactacataaaaataaattaaaacatgaacatatagatagatctccatcttgaaaatagacatgaagtcataattctgcttccaacctgcctatgttggggcattttaaaaattcccttaattgtaca

SEQ ID NO: 824657 - DNA, 564 bp, Homo sapiens
gatacagaagggctgtacacttggaagaaaaaaaacgggttcaaaagtcagtgtcattatttttgtgagtggcaggaattcgctttgacatgcccctgggagagagataggaattaacaaccacatcaaatgcatatcattggccaacaggggagttttcctaagggaagatttatcggaaaaagtttgggttggtggaaggaatagcacagatgcctgagggcccctgggaggaagggaaggggcccagaggcctggtgggcatgctgaaagcaaccttcaccttcttcataacccacctgatctccttgcccagagcagaattcagttcccctgggaaggaatgtgctgggaagcaatttttccttcccctgggaaggaaggaaaatgctgtccaaaggtttcgggttttgggcagttctccttcagtttaggaataatatatatatatatatatatwttttgagacggagtcttgctgtctcccaggctggagtgcagtggcgcaatctcggctcactgcaagttccgcctcccgggttcacgccattctcctgcctcagc

SEQ ID NO: 824658 - DNA, 524 bp, Homo sapiens
actaagctgcccagcttgaagagtctgaactyaagagctttgatcctgcaagaagagtccattcccttgttcttcagtgggaaaaccctgtcacctgagttcatttaaaactgatgcaaatccagagagcaaagccacgctgcattcagaacatgtcttaagacaataggttcaaggaaacagcgttgttactgagcaaattccctttgcaaatttccaggcccttccgtgccaaagcaaggtaatccagtttaatgcgagttgcctttttgggagagaaaaataaaaggcaaaatatttaaggattcctttattctgcttttagcttctgagcccagcaattaattcgtatgtgctaaaggacttctgtgtttatgaggcattattatttaatgtaggcctattttaaattgtaatttttttcattaagttgcctcttttcacttattaagaccagttttataacctagcatagactgtattccttgagtaataactatttttcttttaaaatattccttaat

SEQ ID NO: 824659 - DNA, 540 bp, Homo sapiens
cactcggacggcatataggaagatcaggcacttgtacagcttcatgagagaccttagtaagattagtagtaacagcagaaataaaggtcaagtttgcaagcttagcatcccttttaggctgatagttaagatactcctgaggaatgagagtaacacacttaccatgtgctactgtggaaaaacaaagaggggattactaaacaataaaatcaaggagtcattaagtttaatccatcccaaattttcagttaaggggtatgacagggacacctatcgacctcctgtccaagaagtatcattagataacaaaggcaggtcagcatcccactgtgtaataacattaaaaacaaggggatttagaatatgactccaataaacatgttcttgagctgatctcacttggcaaaggacaagaattaccaaccagcccaacatctgtgtctgtcttacttttctcagaagtttccccarttaccgccagttacataagaaactgattctctgcagttgcaggggcctccacagcggcaagccggatag

SEQ ID NO: 824660 - DNA, 644 bp, Homo sapiens
ctcaactctggtttttcccactctcaaaatgtaagaatttctgattataatgatctttaagttccaatatcctctgcttctaaatatccaggatctacttatttgcgtgtcagttttgccagctctgaagmagcaggtgcctaaaatctgcatttctatctcctgaataatttcattatcaaatgtgccattctgaatgaatgaattctgtttttcctatgccctttgaatgtatgaaatgaatgtattgaacgtgtctgtgtcctactgaatgtaattccataagaggtttcttactaatttcaacctgtttttcccatgtccttatttaagaatatattttctattcctaaatctctcattttatcacctttattttacaatttgaaagtctggaagataaaaaggagtgtgattttcatcagacttacttaagaataactccatctacagttcaactccactgtgcctcctccttctcacatcctcatacagggaggcaattttccaagtttagtggaaatgaggacccctcattagaagccctccaccacactcccctgtcccttgcagaagtaggagataatgtatgtaaaagtactttacaaagggcagattgataatatcaccataataggactgtt

SEQ ID NO: 824661 - DNA, 644 bp, Homo sapiens
ctcaactctggtttttcccactctcaaaatgtaagaatttctgattataatgatctttaagttccaatatcctctgcttctaaatatccaggatctacttatttgcgtgtcagttttgccagctctgaagaagcaggtgcctaaaatctgcatttctatctcctgaataatttcattatcaaatgtgccattctgaatgaatgaattctgtttttcctatgccctttgaatgtatgaaatgaatgtattgaacgtgtctgtgtcctactgaatgtaattccataagaggtttcttactaatttcaacctgtttttcccatgtccttatttaagaatatattttctattcctaaatctctcattttatcacctttattttacaatttgaaagtctggaagataaaaaggagtgtgattttcatcagacttacttaagaataactccatctacagttcaactccactgtgcctcctccttctcacatcctcatacagggaggcaattttccaagtttagtggaaatgaggacccctcattagaagccctccaccacactccccygtcccttgcagaagtaggagataatgtatgtaaaagtactttacaaagggcagattgataatatcaccataataggactgtt

SEQ ID NO: 824662 - DNA, 644 bp, Homo sapiens
ctcaactctggtttttcccactctcaaaatgtaagaatttctgattataatgatctttaagttccaatatcctctgcttctaaatatccaggatctacttatttgcgtgtcagttttgccagctctgaagaagcaggtgcctaaaatctgcatttctatctcctgaataatttcattatcaaatgtgccattctgaatgaatgaattctgtttttcctatgccctttgaatgtatgaaatgaatgtattgaacgtgtctgtgtcctactgaatgtaattccataagaggtttcttactaatttcaacctgtttttcccatgtccttatttaagaatatattttctattcctaaatctctcattttatcacctttattttacaatttgaaagtctggaagataaaaaggagtgtgattttcatcagacttacttaagaataactccatctacagttcaactccactgtgcctcctccttctcacatcctcatacagggaggcaattttccaagtttagtggaaatgaggacccctcattagaagccctccaccacactcccctgtcccttgcagragtaggagataatgtatgtaaaagtactttacaaagggcagattgataatatcaccataataggactgtt

SEQ ID NO: 824663 - DNA, 592 bp, Homo sapiens
tttcagctcactgcaacctccgccttccaggttgaagcgattatcccacctcagcctcctgagtagctgggattacaggcactcaccaccacacccagctagtttctgtatttttagtagagacagggtttcacyatgttggccagtctggtctcaaactcctggcctcaagtgatccacccacctcggcctcccaaagtgctgggagtacaggggtgagccaccacacctggcctacaattccttttcaaagtctggtttgaagaataaaataatgcattaaaaagcattgaactccattgctcgcaaatagaaagttgtcaaaaagcagctattttctttttcttcagtcaacactgttgaaatgaatgactaatggataccattttctaaagatatctttatctcctcagagcgaaagccccatacagttaagtcatggacttgcatggagtggaccagttagtttcacgcacttcccaggtcacagggcacactgctcatcttggtcgagtttttgtttttttttttaaagaacatgctctgccaaacacaaggggaacttgaggagcaagcatagagatcaatacat

SEQ ID NO: 824664 - DNA, 563 bp, Homo sapiens
ggaagtcagtaaccattaggccttgtggttaaccataactcatattttccaaatattacttggttagcaaatgtctccctgaacgctgctttaagtaataattgattgtatgcatttggttttgtctggatgtattctgtgagcataacatgacacaagggactggaaaatcatgaggataaaatggctgcccatggttaagtatattttaaaaaatgaggcagggaagtagaagtttaggagattaaattaatatatttctgactggaaagccaatctaatcgcaattcaaaatccagttgagtgcaagaggctgagcttgcttgaagtcactttatgaaggaaatttttaggaagaaatacctcatccaaatcagctgaaaaaattgctggctgaatatactctcggtttgacttttccaagaacagaaaacagcaacattccacataacaaacagcactgtctcccttacataaagtaaagtttggctggcagccagaggcactcttgctgtgaaaataaattaaagaaaagcaaatmcagcattgcaacttagcaaggg

SEQ ID NO: 824665 - DNA, 620 bp, Homo sapiens
aaaacaattcataaccaaagtcctatttattttacagrtaaatgtctattttttgtaggttttttttttactacatgccttaacaaaattatattcatatcattaaatgggataggcttttcaaggaatgtaaatcatgttgaaatgtttcagttcttgccaacaaacatgcttaaattaataacaatacaaaagtaataactttttatccaaagtttgctctctaaaggttcttttttttctattttttgacttgattttattttattttaatttttattttactttaagttccaggatacatgtgcagaacatgcaggtttgttacataggtatacgtgtgccatcgtggtttgctgcactatcaaccccgttatctaggttttaaaccctgcatgcattagatatatgtctttaagctctccctccccttgtccccaaccccctgactggccccgttgtgtgttgttcccctctctgtgtccatgtgttctcattagaactcttttttttttaacttttattttaagttgaggggaacaagtccatgttggttacataggtaaacttgtgccatggagatttgttgtgcagatcatttcatgactcactagttattt

SEQ ID NO: 824666 - DNA, 607 bp, Homo sapiens
tctggggaagtgggaccgtgccaccccatcttaaaaaaccgtggccactgagtgagcctgacgcccaccgttgcaaatgtcagcctggyaagaataagatcgccggcaaggggtgggggaaggggagagaagacggaggcacacctgggtggctccggaaggtttccaagcagggtgttgggaggcggagggtggggagtttggagggaacccacctaactgactcactaaacgaaggtaaagggacgtgggtagtgaggggagctggggggcgacttgaaaattaaactgacccttcctaaaacccaagtagaagagtctatgctcatgaaagaaaacaacgcacaaagaaaactaaagcgctgatcaaagaacaatagggcccccgccagcggagtgttccctaggcaacgagggagagagggagggacctccagaagggagagagagaaatcggttgccccaggctctgtgaggtcggcgagacctccctccgtgtcacctcgactttcaataacagtggccgctacgatgcccgaagacaaccgatgcctgcaagtgtcagtcagcacgaaaaataatgtatttatttatttatttatttatt

SEQ ID NO: 824667 - DNA, 569 bp, Homo sapiens
cattcttatatctgaaagatgcacttttctggatctcaatgcatccagattcataatatgtttgcctttgaatagaatgatccagatacrcattcagcctcaaaactaacctggacagtcatctctgaagggttctggggtagaccctgcttatttgaaaatgctctagttaaggacttaacaaatctacaattggaaagggacacaattattcagtacgtaggtgacttgcttattgctaacccaactaaagaagactcataataatactgttaagttggtaaatttcctgggaacttgcagatatagggcatcaccacacagggctcagattttgactgaaagacttaaatatttggaatctgtcttaacctctggaactgatcaacatccctagaagacaaaaaagttattttagtcacccaatggtccctgtccaaataatgactgtgggcttttttaggagatggctgggtactgctgcttatgggtgcccagatttgggcatgtagccaagcctttatatgatacactaaagggaaagatttagagctcctagaatgtaatga

SEQ ID NO: 824668 - DNA, 655 bp, Homo sapiens
taactgcagtactatgatgaataaagggataatttatttaacaataggaaacagataaaaatcctaataggaaaagagacaaagatgtatagtcaggtcacagaaaaggcaacacaaatagccaataaatgtgtgaaaagttattctatctcattcactaatctacaaaatgcaaattaaagcaagtgtatcagagttttcatctatccggttaggaaaggcaaaactttgatgatatgtagcatttttagtgtgtgggagaaaagtacttatattctatcgtttggaggaaatttggcgcaaattctgggtaaagcaatttggctgatctaaaatgtaaaatgcacagagcatttcaatcaatgcttcatttcctgggagcttactctacaggtatgccattgggaaaaaaaaaactcattcatcaggatgttccctgcagaatttgtatggtagtccaagaccaaaaaagcctagttatccatcaagagaggaattgttaattaaattaaatcatagtattcctatacaatggaatgttgcatagccatgggaaaaaatatgagtcagctccaaatatggtgatatgaacaatctccaagrtaggctgataaggaaggcaaagggctcaaattatgtacaacatgctctctcc

SEQ ID NO: 824669 - DNA, 525 bp, Homo sapiens
acctaatagacatctacagaactctccaccccaaatcaacagaatatagattcttctcagcaccacatcgcacttattctaaaactgaccatataattggaagtaaaacactcctcaggaaatgtaaaagaaaagaaatcacaacaaactgtctctcagagcacagtgcaatcaaattagaactcaggattaagaaactcactcaaaactgctcaactaaatggaaactgaacaacgcgctcctgaatgactacagggtaaataacgaaagtaagtcagaaataaaaatgttatctgaaaccaatgagaacaaagacacaacgtaccagaatctctgggacacatttaaagcaatgtgtagaaggaaatttttagcactaaacgcccacaagagaaagcaggagagatctaaaatcaacaccctaacatcacaattraaagaactagagaagcaagagcaaacaaattcaaaagctagcagaatacaagaaataactaagatcagagcagaattgaaggagacag

SEQ ID NO: 824670 - DNA, 513 bp, Homo sapiens
aatttatagataggtaaagtagattagtagttacctaaggctgaggaaaggggatatgggagatattgcttaacgggtacagaatttctgcttggggtgatgaaaaagctctgaaaatagatagtggccgatggttgcacaacactgtgaatgtacttaaatgccactgaattgtacactttcaataatataaatggtaaatttatatgtgtatttcaccaccgtaaaaaaaaagtctcaaaaaaaaaatactactagttaaaagttaaaacctaatgccaaaacctcaactttaaataactttcttttcctatttttcctatttttctgtgatggtcactaattcatattacaaatttactcatccattcaacaaacacataatgagctcatgctatatactactattgtaaatgcctgggctaaaagaaacaacggataaacctaatgaaatagcatcaaagaaaamcaaaaggtagaaatgtattggaaagtgaaatctttagtcatttt

SEQ ID NO: 824671 - DNA, 547 bp, Homo sapiens
aatgagctataattaaatacaattaaaattttagttccttagctgtactagccacatttcaagtacttggtagccaatatgtaactactgactacttttgatacagtgctgctctaaagactcccagattaacacagtttctattacactgataattccacatatatgtgtgttgtgcctgagacacttagagcttacaaaaagttgaatttgctcagccatagtaattgtcacgtgcccactcagttcctatgtaaagcttcaagttgtgggaagaacttcccttatatggattaaaattgtggtaattgtatcttttgtttgattcctctggctttacttttaattattttttccccctcagacagtgcagtgcttgctagacagtggtgctgatattaacaggccaaatgtatcaggagcaactccattgtactttgcttgcaggtatgatattttatatttccagatgctatatatrctcatatatatatatatatatatatatatgtataaataaagaaatatatatatttccagatgtata

SEQ ID NO: 824672 - DNA, 568 bp, Homo sapiens
taaacatcctcaatgattacataaatattcaacaactgtaacmgattctacttgcctgagagtaagattattctctgcagtggtaaaaatactactgttaatttattgaacacccacattatgtactatgcaccattccgaatgctttgcatatattattgaacttgaccttcacaacaatgctgtaaggtagtaattattattcccagtttacagatgaggtgatgggattcacagtgatttagcaacttacccaaaaccatgcaattattaaggcctagagtcaggactccactataaaataaagcttctgtgttccctttcttcttattacttctacaagcatggatatcacaaaccatcatagttttgcctgctaatctagtgtaaagggtatcactcctccacatcatctcagaaagaagatgtaagacagattatctgttacagagacagaaggaaaatgtgaggatgagagctatcccacttgccagcactgtcatggggaaaacgtgattggcaatagcctcttatagttgcttatactcaaaagcatcgctgctggata

SEQ ID NO: 824673 - DNA, 435 bp, Homo sapiens
acagttccaaatctgaaagaattttaagggcagctagcatcattgggaaatgcatggaagaagcagtctgtagaactggtttattcaacctgaatgataagtgttttggagaacctgwcaaaagaacagaaagaaacccccatatagaattagatcatgataaccccaaagaatccacattgtgttaaagcattttcaaaaactttgagttataggcggtatttgagattttgtctaaacttcacccacaacatcaattaacaagggcaaatattcaaaatagttatttggtaagacaatttttttttaaatcaagtaagctttttgcagcctattaaaaacccacatatgcaacaaaaccaagttctatacacatagtataaactactgtttcatgcaaatatatcagtggattactcattaagaatttccaaa

SEQ ID NO: 824674 - DNA, 581 bp, Homo sapiens
tggtttaaaccaaaatcttttctcatttctgcagaagctttgggctgatgcttccattcttattcccttgctattagtcctccagatggctgccaggaggatcatttaaaaccataaatcaagtcatgttacttccctgctacaaaccctccaacggctttccatttcatttagtataaactccatgcccttggtcatggcttaaacgtcctgtgaacttttgcaacctgtattagtctgttttcacattgctaataaagacatacccaaaactgggtaatttgcaaaaaaaaaaaaaaaaaaaaaaaagaggtttaatggactcacagttccacatggctagggaggcctcacaatcatggtggaaggcaaatgaggagcaaagtcacttcttactgtggtggcaggcaagagagagcatgtgcagaggaactcccctttataaaaccatcagattccgtgagacttattcaygatcatgagaatagcatggtaaagactcccctcaatcccccatgattcaattatctcccactgggtccctcccatgacacttgggaattatgggaggtacaattcaa

SEQ ID NO: 824675 - DNA, 511 bp, Homo sapiens
tccatcaataaaagagaaattcaagtaaaagtttaaatatatgtatgacttttcagccagcaggcatagtgaagctggtttgattctatcttactctgagccatttcagagtttgagaaataccagaaacctttggaggtcatctatgttcacatttatgtctccagacagagaaaagtcattctgcctacctagtgagaggttgcaatcatagtattccatcccatttattttctcactttcaaaatatagtccttgcatattatattttggatatgggtaagaggcaagtgtataaggtatgaggaaaaaaaataaataaaagcacatcatgactcacacccaagaaatggaattgctgcatcatcagagctcacaagcctagcacagatttggaacttagtaaagtctgctcaatacatgttgaataaatgtatgagtgaatggatwaaaagagatgaaatgcaatagggattacacagaatagtttttagtgcagctattgtccatt

SEQ ID NO: 824676 - DNA, 626 bp, Homo sapiens
aattaggttgaataactgttcattcaaattaattttactccctttttattgcagtttttctagtcattgtgaaayagaagggatagctgttgtgaggttggctccagtagcaaaagctagattatgttaattctgactcattatttagatgctttagatagaaaatcagttaattatataagtttaattatgttattctaattcattatgcaaagtatagtttttgagcattttctctgtcaagttttattctgtaaaacacttaaccttattgtgaatgctatttttaattcagttaagaagttcagcattaaagatacagattttcatgtagcaatagtatgaatgcatattttgtttttagaggacagcaatatgataaaaacaatcaatgttcttgtaaaattgagaaacgttttgttcaaaaatgtacttggaataatcttggtgtgaacataatttatgactatatacagataattctttcaatttctttgatttatatatacatttatagtaaccaaattaggacattttgtggcaaagattatattaatttaaaaataaaaacatcactattaaagtacagttttttgttgttgttgatcatcttcaatcagattcta

SEQ ID NO: 824677 - DNA, 442 bp, Homo sapiens
gtgagtgttaagttggaagtttaggrtattgattcgatatctttattcttccttaacacaagcatttgcaatgataaatttcactgtaaaaactgctttggaggcattctatgaattttgacatgttttgccactatttttattaaaacaaaagtttgaattatgaaagtgtcaaagtattatttcctcacagtttggttgactcattgattactgtcgtggtgtggtgcttacttttgacatatttgtgagtttctgaaattgatttttgctactgatttttaatcttatcccattgtggtcaaagaatatactttattcttatttattaattatttatgtcattttatatatattgcaattttattatggtgtagcatacggtctatcctggagaatgttccctgtgcacttacagaaaatgtatattctattgttgaat

SEQ ID NO: 824678 - DNA, 750 bp, Homo sapiens
aggtttgttatataagtaaacttgtgtcgtggagggggggtttgttgttcagattatttcatcacccaggtactaagcctagttcccagtagttattttttctgctcctctccctcctcccagtctctatcctcaagtaggccccagtgtatgttgttcccttcgtgtctatgagttctcatcatttagctcccacttataagtgagaacacgcagtatttggttttctgttcctgcgttagtttgctaaggatagtgaccttcagctccatccatgttcccacaaaagatatgatctcattttttcttgtggctgcacagtattccatgctgtatatgtaccacattttctttatccaatctgccgttgatgggcatttaggttgattccatgtctttgatatttgaatagtgctgcaatgaacattcatgtgcatgtgtctttatggtagaatgatttatattcccctaggtatatacctagtaatgagattgctgggttgaatggattttctgtctttaggaaaattaccatactgctttccacaatgattgaacgaatttatactgccaccagcagtatattaagtgttcccttttctctgcagtctcaccagtatcttattttttgactctgtaataacagctattctgggtttgagatggcatctcattgtattgatttgcacttctctaatgatcagtgatattgagcttctttycatatgcttgttggctgcatgcatgtct

SEQ ID NO: 824679 - DNA, 621 bp, Homo sapiens
cctgatgtttacttccagcaatatgacagactctgtatcctgaaaattctcccccaaaaagcacctttaaaatgctggataaaatgagtagctaacttggcaagaaattaaagtatcttaatccccagaggccaaaaatgaagttggaagccagaattcagaatgagcatggtaaatattcactggagcaggcatcagaccctgagggcatttgccagtgttttgtaaattagagctttcagtttttacatccgtgtcgggggaagggggacaggagaggcaggcgacaaagcagtgcagtgtcagcatggagactttggaatgagtcccgaaaggcccacattcccaataaaatagtgaattagaaaatgttcgccatgcaaaggaaatagcaaagaagattttgcatcttagccttgattttggttggaagaaaaaataaaagttcctaccccctaccagaaattataaataatcaccagtcaggcctcaagcctgggttcaaattcactctgtgtacctattctgaaactatattttaaacaaacaaaccaaaaaaaaaatttwaaatgacgagacacttggcaaaggtaaacacaaatagaaggaatgttctccaat

SEQ ID NO: 824680 - DNA, 632 bp, Homo sapiens
tattgcagaacagcaaatgttgctgcctgatccttcctctggaagcttcatctcagaggggcactcggctgtatgaggtgtcagtcagcccctattgggaggtatctcccagttaggctactcgggggtcagggacccacttgaggaggcagtctgtttgttctcagatctcaaactccggggtgggagaaccactgctctcttcaaagctgtcagacagggacgtttaagtctgcagaagtttctgttgccttttgttcagctatgccctgccctcagaggtggagtctacagaggcagggaggcctccttgagctgctgtgggctccacccagatcgagcttcctggctgctttgtttacctagtcaagccttagcaaaggtggacccccctcccccagtctcgctgatgcctcacagttggatctccgactgctgtgctagcagtgagcaaagctccatgggcgtgggacccaccaaaccaggcgcaggatatartctcctggtgtgccatctgctaagaccgttgtaaaagtgcaatatcagggcaggagtgtcccaattttccaggtaccgtctatcacggcttcccttggctgggaaagggaattccccaacccattgcacttccc

SEQ ID NO: 824681 - DNA, 632 bp, Homo sapiens
tattgcagaacagcaaatgttgctgcctgatccttcctctggaagcttcatctcagaggggcactcggctgtatgaggtgtcagtcagcccctattgggaggtatctcccagttaggctactcgggggtcagggacccacttgaggaggcagtctgtttgttctcagatctcaaactccggggtgggagaaccactgctctcttcaaagctgtcagacagggacgtttaagtctgcagaagtttctgttgccttttgttcagctatgccctgccctcagaggtggagtctacagaggcagggaggcctccttgagctgctgtgggctccacccagatcgagcttcctggctgctttgtttacctagtcaagccttagcaaaggtggacccccctcccccagtctcgctgatgcctcacagttggatctccgactgctgtgctagcagtgagcaaagctccatgggcgtgggacccaccaaaccaggcgcaggatatagtctcctggtgtgccatytgctaagaccgttgtaaaagtgcaatatcagggcaggagtgtcccaattttccaggtaccgtctatcacggcttcccttggctgggaaagggaattccccaacccattgcacttccc

SEQ ID NO: 824682 - DNA, 521 bp, Homo sapiens
actaggttacacctattaacaaatcttttacctttgataacagcacatgcatttgtattctgcctcagcaatccaaatatcaacaaagaaaaaaccacggacaggtaagattagaaccagatatcactaagcagagagctatttcagcatattttgagcaactatagtcaggaaaaatgatgatagttactcattgtatatacactgtattagccagggttctccagagagacaacaaataggatctaggtaggtaggcaggtagatagatagatacatagatagatatagatatagatgtagatatagatatgtatagagatgtatatctgtatagatatgtatatctatatctacatctatctatctttatctatacatatatcaagaaagagacagatagacagacagacagacactggcaggcaagacatccagaaaagtgttgcagtttgaktccaaggtggtctgctggcaagaagtcaaccttttgcttgtatggtcttcagctgattggacga

SEQ ID NO: 824683 - DNA, 488 bp, Homo sapiens
ggttaaactctatgataatataataatagtgtgtgtgccttgggagataagtaatatgawactgtgagacaactctgggtataaagtaaaaagtgggaaaaattgttccccacataatatgataagttacacaatattatctaattcctatgtattgctgataataaatatttttcttccctgaaaatagtcaaacaaaaatgtgtaaatgcaagctaaattacatttggaaaataatctaattttctaattgaatacaaaggaaattttgaaaaatttaggttataaaaatttattatttaagtatgaaattgtagaagaaataatgtatcatggcactaaatgtataaactgtgactagttgttttctatatttttccatttataaggaattaatattcagtctagttctatggtatttaaaatatatgtaacaagaaatctattggacatatcaaccaacaaattttgaaaagctgaagatatta

SEQ ID NO: 824684 - DNA, 500 bp, Homo sapiens
aacaattgataatgggaatgcgaaatagaasaaatgcacaaatgaataatcgtttatagagaagaggataatacaagggtcattagaaacaaaaatataataaaattttaaacttttggtcaatacatttgaatatgaagttgaactagataaatactgaagaaaaatcttacttaaattaacaaagaagaaatgtaaaatttaaataattcaatcctatttgtagaagtagagttacaaatttacagctttctacaaataaaaacctaggcccagatttttttcaaacactaattttgtttacagatctttcaataacagaagataaagtggcacactccagtttattttatatgctcaatgttatttggtaacaaaatataaaggaaattaataggtccttctcatccataaccatagttataaaaaccctaaactaacaataaaaaatgataatctaggaatatatttttaagaaagtatgatacatcaccacaaag

SEQ ID NO: 824685 - DNA, 553 bp, Homo sapiens
tgaaccccacacttcgagtattcttctgagacctcaattgctgatatgttaaggcaagtgacatagtcccacagttcaataaggctcatggttggtttttctttttcatattctttctcctatgtgctttattttggataaggtctttcatatgtcttcagtttcaaggattttttttcttctgaagtgtccaatgtgcttttaataccatccagcatatatttcatttcatttattgtatgtttcatctctagacattctagttagaatgttgcatatagtctccagacagaaaaccctaattggtgaattcctagctcctggtattctgctcagtttctctgggcagttccttcaacttacagaaccctgtagtacatatctcatctacttctgcatcctccaaactgagtctgagctttcagaattggttgaatcccagagaagtttttgtctttcatctgttkggctgtacccaactctctttccccagtgttcttttcctgccagccataaggtagataacagatattcattttggaatgatatggcc

SEQ ID NO: 824686 - DNA, 622 bp, Homo sapiens
tcacttgcacttccttccttactgcaagtcctctctccctctccagctcttaaaaatatttagtttttaagagcgagagamtgggctgcatgaaatgtgatttgagggacctgggaccagcctgcagcacctcaaaatttctgaaagcaaccaccagacaggtgttgcccctagaaccaggacgaggcgctgtgtgtggtggggaggactctcggggtctggccctctacaggcctgcattctcggacccctctgggtcccatactgtgaaaccctcagttagatcattctcactagcgcctgggggccagctccgaagcagaaatcagagctggtggcctccggcaagccacgtgaccaacctgaccctcggtgtgtctgtctgtaaaacgggcattccaaaacctacttcaagggcaaccgccaagtttagacgtcatcctgtacggagcacagtgagccagccacgcgtgctgcgtacgagttaagggtccctattgtctgacaaatgagcacagagccggccctgctgccttgggggtctctgtgaagggggctgctctgctgcagctccgagatctccttccctagaggggggcagaggagggccaggctcccacga

SEQ ID NO: 824687 - DNA, 576 bp, Homo sapiens
aatctccaatatcaagatcactgaataattagataaataattttagttaacaagcactgaagaattagataaataattttagttaacaagcactttcaagggcttgcatcatgtctaatagaactgtatagaagggaaaatttgctttaaagttggtatggattaaatttttattttttttttatttttgagacagagtctcactcagtcacccaggcgggagtgcagtagcccaattttggcttactgctacctccacctctcagcttcaagtgattctcctgcctcagcctctcaagtagctggaactacaggcgccctccaccatgcccagctaattttcatatttttagtagagacagggtttcactatgttggccaggattgtctcaaactcctgactcaggggatctgccggcctcaggctcccaaagtgctgggattacaggcatgggaccccctgcccagcctggaataacayttttaaattcatacatatgcacacacattagtattttataccagtaagtagcatatcatgctatgaaaatcattggcatcaaatgtgtaccaaga

SEQ ID NO: 824688 - DNA, 609 bp, Homo sapiens
tacaaatttctcctctgagaatttagaaactggttaaaagtcttctgtaccttgtgtgaatgcgaaattagatacatagaaactgttagggagatcaagacaccctcttgcaagaattcctattcctgcccatgccatatgattggaaggaaaccctcagctcctagcttctccctgtagagggaaagagttggaccatgcatccaatgccacagcttttctgagggataccccaaaaaatggcttctgttttgcctgtttcagagggctgatgagaaccagaatactttagacatcaatgggccagtgagaacaagacagtggtttgattgagcatgcaactagttgccacagccccatcccccaatttagcacagaaggaacaggcaaaaaatccaagatctcagatttttcctggagagaaaaggtttggacagagcatccagttattcaacttttatgtgggctactctggtaactggattctgtctcacttgtctcaaagctctcggtaggacaagcataatctggacacttaggggttgctaagaacaaagaaagcagattcaactagcrcaaagatttgagagatcccaagaatcaaccagc

SEQ ID NO: 824689 - DNA, 609 bp, Homo sapiens
tacaaatttctcctctgagaatttagaaactggttaaaagtcttctgtaccttgtgtgaatgcgaaattagatacatagaaactgttagggagatcaagacaccctcttgcaagaattcctattcctgcccatgccatatgattggaaggaaaccctcagctcctagcttctccctgtagagggaaagagttggaccatgcatccaatgccacagcttttctgagggataccccaaaaaatggcttctgttttgcctgtttcagagggctgatgagaaccagaatactttagacatcaatgggccagtgagaacaagacagtggtttgattgagcatgcaactagttgccacagccccatcccccaatttagcacagaaggaacaggcaaaaaatccaagatctcagatttttcctggagagaaaaggtttggacagagcatccagttattcaacttttatgtgggctactctggtaactggattctgtctcacttgtctcaaagctctcggtaggacaagcataatctggacacttaggggttgctaagaacaaagaaagcagattcaactagcacaaagattygagagatcccaagaatcaaccagc

SEQ ID NO: 824690 - DNA, 619 bp, Homo sapiens
cctatagtaacaggtggtgtttggaaaaaattttacgaaattttatgaatatgataaaattcagattgaagattctctcttaaattaactgctttggaaaggccagcattcacaattaagagctataaacatttaggagtaagtcatcccagcttttgtagtttttttaacacttaacataaaaataacacacatacctatatattctataattgaggaagatgtttttataaagaacatcacttgctttctgccttaaatccttccaccagggaatgaggagcaaacacgtgctcatttgtaagcccacgatgacactcagtaaatctgtccagtagtcaaagctcaatcattgccacacgaaatcctcccaaatctcctccagcttactcctgaagttgcagactttccgatattgtagtactcctaatgaaagacagatccctctgatagagattccctgcccaagactctcttaggtcatgaaagatactaattcatcttttcatctggtccttaatgaccaataatggatcctcttyccatttgttaggcttagtttagtaaaagcactttttggaagcaagttcctgtttaagtttgtaagtggcatttctta

SEQ ID NO: 824691 - DNA, 539 bp, Homo sapiens
tttgtactgacatattgtaaataacctgtatcttgaattgttttktagatttctgatttcaagtgtacaatgtaaatgagcagatcattattttcagaaaacttaaggcttaaatcttactatgactcactgaccactacccaagaaagatctcacaatacttgctgtcttattctactgtagaataaaaatcatgtgtaaatatctgattatttaaagcatgccctaaaaatcaagggttcaaaatcaattttttctccttacgaattctcagagtcttgtgattgacttctaggaagtagaagtcatcaagggattggttacacagtaaagcttaaacaagtctataaaatagcaaggccctgcctgtcaatatactagaaggaaatcaaaaaggttgtatgcaactcgataagccaggcccagcctactcagaggctgtatttctggtacctcaaccatcttgccttacactacttcagttttctctgggatccttattgtattccttcagctgccactcagaactggatttatca

SEQ ID NO: 824692 - DNA, 610 bp, Homo sapiens
ggtggtttggggagggaataggtctttggatggagggatcccccaatggccaataaactggcacatctagcagtggcttctgaagcaactgaaaccatggcaactttctttgctgccaatcacttgtttttaactgatgtgtgtagaacaatttccccttaaatagttatatagctaatttaaacttagttaactatataacttaagtagttaatttcatctttaaatagtttaatgtttgtcaatttttaaactcttcagtacttatatgttgtacaaggcagtttacttctactaattttagtggggttttctaagggatttaaatttcagtaaaatagacacgttctaagtgtaccagtttaatctgttttgagacatacataaccctgtaactactaccataatcaagaaatagaatatttgcattacaccaaaaagtttccttgtgcccgtttacagtaggaattttaataaaacttgtattttgacgactctaaaatttagatctccagcttaaaccttgttttcgaagtctagaaccatatttttagctacctgctcgacctacatactacaracaagcatctcaaaccaaacatggctaatg

SEQ ID NO: 824693 - DNA, 539 bp, Homo sapiens
caacctaggatcagccttcttgaccaagcgcttttagactctttattgtgtttttatttcaaagcaccaggggatgcaatcatataaaaagtcatttataatcttctacttcagttttttgaaattgtttttagaggatattaaccaaacccataatcccaaagagctttcaaactaggtagttattatttcttttatttaaaaattgaaaggagaaatctagcaatatctgaacatagcgaatgacgagcaaaaatgggcgatattaggctaccaaaaccacaaagacaagaaaagtcaaaaatagaatgtgaagtgtaaatcagtcattggcactggtacagaaaatgggaacattttagggaaaccattaaaagaaaatcagaaaactgctgctgagggggaaaaacagcctcatggaattcatgaaacagtaccacattgtattgcctayaaagggaaaaatcttacatttctgggtgttttctgaaagaatatttgatactttgatgtttgaaaagaagggctaaaaatggaaa

SEQ ID NO: 824694 - DNA, 563 bp, Homo sapiens; identical to SEQ ID NO: 816497

SEQ ID NO: 824695 - DNA, 563 bp, Homo sapiens; identical to SEQ ID NO: 816498

SEQ ID NO: 824696 - DNA, 612 bp, Homo sapiens
gcaggagagacattaagatgtgttggctattacagtgtaccaggcaataggataggcacttctgcatctaatctcacctcatcttccattaaactcagaagaaaggtggttattattattattatcatcactattactattactcccattttacaaactaggaaactaacaggaagagaggagagaggttaaataccttgatcaaagttacagacagtaagtggtagaggttacttaccctgcagccaaagttagcctaatttgaaaaaaagataggaagaacaaatatcaatattactaaagagattgctggacacttgaaaaagcatttgctgagttttgcaactgagactgccatgttcaggaggcttaggcctctctcaaaaaacaaacatagaaatggaaacaattctttcttctttccagagcttttcggttagagagtgagcctggcatgctggtttctgcagcctttcctgggtagggctgcatcttggagggcagggatcttccacacagaaaagctgctcrttgtgcttaggagatagagtagaaataaataggattttcctccaagagaaagaggttttgatggattgaaatcacattggt

SEQ ID NO: 824697 - DNA, 520 bp, Homo sapiens
tttcagtaaacaatttcaggaaaaaaaaaccaataaattaaagcwctatgacctgaaaaaggactttaaatccctgcatggtatagtaagtcaaaggagaaaaaaaaaagaaactaagaagtcaacaaagtttctgaaaactaaatacaagggttgaaagggttgtcaagactattgtagaaatactgtaggccctgaaacgaggtgggaggtgtggaactgctggggtcagtgactactgagggcatattttgatatgaaatatgaaatatgaattaaatgcatagaggtttgatcactttgaggtaggatgctggtacagaagacagatcctttcatgagttgctatagcagaactctatgtgtgacaaagacaggcagagcaaaccactggacggagtggcacggcgatctctattttttaggaagaggtatggggagctatcaagtcagattcacaatgagactctggggaatttctagagaaaattaggtttattaacttgaatgagtttctatc

SEQ ID NO: 824698 - DNA, 520 bp, Homo sapiens
tttcagtaaacaatttcaggaaaaaaaaaccaataaattaaagcacyatgacctgaaaaaggactttaaatccctgcatggtatagtaagtcaaaggagaaaaaaaaaagaaactaagaagtcaacaaagtttctgaaaactaaatacaagggttgaaagggttgtcaagactattgtagaaatactgtaggccctgaaacgaggtgggaggtgtggaactgctggggtcagtgactactgagggcatattttgatatgaaatatgaaatatgaattaaatgcatagaggtttgatcactttgaggtaggatgctggtacagaagacagatcctttcatgagttgctatagcagaactctatgtgtgacaaagacaggcagagcaaaccactggacggagtggcacggcgatctctattttttaggaagaggtatggggagctatcaagtcagattcacaatgagactctggggaatttctagagaaaattaggtttattaacttgaatgagtttctatc

SEQ ID NO: 824699 - DNA, 520 bp, Homo sapiens
tttcagtaaacaatttcaggaaaaaaaaaccaataaattaaagcactatgacctgaaaaaggastttaaatccctgcatggtatagtaagtcaaaggagaaaaaaaaaagaaactaagaagtcaacaaagtttctgaaaactaaatacaagggttgaaagggttgtcaagactattgtagaaatactgtaggccctgaaacgaggtgggaggtgtggaactgctggggtcagtgactactgagggcatattttgatatgaaatatgaaatatgaattaaatgcatagaggtttgatcactttgaggtaggatgctggtacagaagacagatcctttcatgagttgctatagcagaactctatgtgtgacaaagacaggcagagcaaaccactggacggagtggcacggcgatctctattttttaggaagaggtatggggagctatcaagtcagattcacaatgagactctggggaatttctagagaaaattaggtttattaacttgaatgagtttctatc

SEQ ID NO: 824700 - DNA, 510 bp, Homo sapiens
agtagttgctcaatggcggtcggtattcaamgaatctgctctgattagtttgaacataaaggagtgtggagaactcacagaatctttgggagggttggagaaacatgccaaaattcttgcatcaggtgatgcagagctggcctcgtaaggaagctgccaccactgtggtcaaatggtaaatatcagaaacttatcttcattgcagtttctactctctcagccccagtgcaacttctggttgattgcttcaacctggccactcctagacagcctctgctgctactgctctccaagtcttgcccaccacgaatagcaaaatagaagctccaggtctccggcagcacccactttacctgtttgtgttctcacagcaaatgaagctgggaattttgaagattaatctcatactgaaaaggggcagaagtttctcatatcatggaaattaccctaacatctaggaaagctactttaaaaatgatgtgctaaaaggggggtcaccttgcatataac

SEQ ID NO: 824701 - DNA, 584 bp, Homo sapiens
ttttataattactagaaaatgtgtgtttcagagatgatgatgttagaaagtgatcaaaccccaatgatgtaggttaaaaacatggtaacaataaycaagtgccaccagaaacattttaaaacagccacttatgctctagtaagttccaatttctaattttcaaagactgtatttcttgttcttggtgctaatttggccaatttttaatattcagtccaagtaagatcaaccacttagagtgctaaaaagattgtttttacagtaaagatttttcattggttagttcattcattcatcctccaaatatctgtgactccaaatgcttattccctcacagcttccacaaaaggaggaacaggctcatggttcctgattctagtctttccctcactgtcctacaaagaggtaccttccatgtgaccccaaggcaaagttcagtagcagttagtgagcttcctttgttctgctctttcttccattccatttcttctttttctacaaatgctgccaaaaccagactattagagcatcctcattagcaccgagagaatggaatgttctcgccagggatgcgctcactgatg

SEQ ID NO: 824702 - DNA, 531 bp, Homo sapiens
tgtaactgaacattatgaccacagtaagttgagaaaattaaaaatggattgagtcaagcctttttgtacaaatgaaataaaattaaacattgtataaatatcagagggtcagagacctgggttctagtgtttactgtgtaattggagttagtatattttaatgaaactgctatctctatttgtgtatacaggcaaaatcgcgtgtgtgtgtgtgtgtgtgtgtgtgtgtgtgttgtatttgtttcttgtcctaattaaaactgcacttcttactgtgggtcacagtcaagaaaatgagaaaaccactactttaacctgacttagttatgtttatgtttttttcctgagaagaaccaatcttattctcttctagtgattgcatctatctgaatgttttggaaggcagagtattttaaygtctctttgttggagagcctcttcctgtttacaatcccattgaaagacgaaatcccaatgctcatggaatcatgacctttccatgttagaccagtagacatgccccagatgagg

SEQ ID NO: 824703 - DNA, 504 bp, Homo sapiens
ctcagcactttagggaagagccaggtggaaaaatgacttragcccaggagtttgacaccagcctgggcaaaatagcaagatcctatctctacaaaaaaaaaaaaaaaagccaggcatggtaatgcgtgcctgtagcctagttactcacggagctaaggctggaggatcccttgaacctaggaagttcaaggttacaatgagctgtgatcacaccactgcactccagcatggttgacagagcaagaccctatctttaaatatatatatatatacacttgtgtgtgtgtgtgtgtgtgtgtgtgtgtgtgtgtgtgtgtgtgtgtgtattaggcagttcaggaacagtttgttcaatgagcatgaatcttttaactgaaatgatgaaacaaactctttagtgggtcatctaaggaaaatatcctgtaattagttttcttacaaggtttaggaaaattgtttgataagccactaggatagggctcagcagcctatgcgcccacaggt

SEQ ID NO: 824704 - DNA, 567 bp, Homo sapiens
gcatatgatttagaatagcataaccctcttgtccaaaagaattgttcctagtgtatttggaaataaactcaaattttcaaaatggatgaaaggcaatattgaatgaatcacttttctttcattttacctgagggtttaagagaagacaataataggatgaatgctttttataatacctttgggtggattgggaattttgccaatttggttagagaatgagccaagaggtcaaaataacaaatgggattcccataaaggtgaattagctactgatgctgtggctatcaacgtgtccttgcttaaaaaagcactggcaggtatctgtgattgttcttgtttagttatagcactcgaaaacacacacacacacacacacacacacaaaatgaaaaaactaccagcactactacaataataagaccaagaaaaacctaaattagaaagcaagagatcatcaaaaaasagtgtgtgggatgaccaaatgaaggagctgaagacagacccttaggaaaacctacattttctcagacacacttgaaaatagcatcattctgtttgtttctgttt

SEQ ID NO: 824705 - DNA, 624 bp, Homo sapiens
ctacattaggtatttctcctaatgctattcctctagccccgcaccccctgacaggccccagtgtgtgatgtggccctccctgtgtccatgtgctctcgttgttcagctcccacttatgtgagaacatgcagtgtttggttttctgttcctgtgttagtttgctgagaatgatggtttccagcttcatccatgtccctgcaaaggacatgaactcatcctttttatggctgcatagcagtccatggtgtatatgtgccacattttgtttttccagtctatcattgatgggcatttgggttgattccaagtctctgctattgtgaacagtgctgcaataaacatacgtgtgcatgtgtctttacagcagaatgatttataatcctttgggtatatacccagtaatgggattgctgggtcaaatggtattgctagttctagatccttgtgcatatcctacaactcagtaatgccattcctaaaccagagaaattcatrcacatctataccagaaagcacataggagaatattcatagaagcattgttcatttaaaaaaatggagaaaagaaacatttggggtgacccagcatcaggggaatggataaatggcacccaggtacttcag

SEQ ID NO: 824706 - DNA, 496 bp, Homo sapiens
tgccctcccttcatctgtgcccatcagaatatcaaaggcccattttttagtctccaaaattttaaactcttagaagatggaaaccaagtatttcttttcacacccatcagtgggttatgggtggtaagcaccaagcacatgttgaatacataaatatctttcatcctctcttttcctctattcctacatataactaagagtgactgtatcccttagataaagaggccttccaattgtatgatactttagactttccaaaggttatggcgtagcagtcccaaacacctcatctgaagccaggctgtctgggttcccaccattgctgtgccagctgtgtgaccttggacaagttacataacctctctttgcctcagttttttcatcaacataaagggaagaataaaggtacttatttcataagagtttctagaaggattaaatatgttattcgtaaaatgctgaaaastatgtctagcacatagtgagcattatataa

SEQ ID NO: 824707 - DNA, 642 bp, Homo sapiens
aggatactgaaggaaaagaagtggaaaacataatgccaatttgacggaattttaaaaatctggtcttcttccccaaactacctgctactttttaattttcagtttttaaactgctgcgggtattcagtgtttttaaaaatgccttcagtgggaaaggcatggtggagtatacttagtcaatttacccaaaacctatttttatcttttgatttcatctaccttttggggagggcacaggtctttacctagtgtatcatttaacttttgctgtggaacaaaacatccaaatttagtggctttaagcaacactttacttagctcagttttctgtgggccagctgggaggttcttctgttgtgagctggcttggctgtgttctttcttgcatttgcaatcagctggggtcagctggcaattggatgatctaagatgtcctcaatatatgtgtaatatttggctggctgtcacttaggaggcttcagttgccttccatgtagtcttgtgcctcatccagcaagctagctaggacttgataacttgttacatgtccaaaaacatcaaaagagggcaggccacaatctggaagcacttttcaagtatctgcttgcttcacattwaccattgtcccattgaccaaagcaa

SEQ ID NO: 824708 - DNA, 494 bp, Homo sapiens
agtggcttggccatgacatacagcaacaacagaaacttcagtttaaaaatttgccatttgcctgcattggcatttcttccagctgatgacattacaaaaacttttaatgaattaaagctgcatttgcctggagaagccagcaaagttaatgaatggttgaaaaataattaagtgcatggtaagataagaaggcacttacataatggcgttcccttcaaacaccagtattgtttctgccaaatgtgtggtatgtatatgagtgcgtgaggaatggatttccacacacccaaaacaacatcgaggcatggcacagaagatgggaaattttaatatggaatgttcatgttgttgtatgtcaaatcacargagaatttcaaaaagaacaacatcgtgtagaaaatgaatgtgaacatattctccaatgagagccatggtctaaaaggaaaaaagcatctattcattatgatgcaagacttcaaaatatagttaacgat

SEQ ID NO: 824709 - DNA, 658 bp, Homo sapiens
ttgtcaggttttggtacctgggtaaaactggccttgtagaattagtttggaagtattcyctcctcctctattttttggaacaatttgatttgagaaggattggtattagttcttctttaaatgtttggtagaattcagcagtgaagccattatgtcccaggcttttcttttccgggggacttcttattgtggctttgacctcattagttgttattaatctgttcaggttttggatttcttcatgattcaatcttggtaggttgtatgtgtctaggaatttatccatttcctctagattttccaagttattgcgatatagttgctcatagtagtcactaatgttccttttagtttctgtggtatcagctttaatgtctcctttaaaataaatctctgattctattcatttggggcttttttctttttttcttcattagcctggcaaaaggtttttcaattttatcttttcaaaaaaccaactttttgtttcattgaacttttgtattgttttcttcatttcaaattcatttatttctgctctggtctttattatttcttttcttctgctaattttaggtttggcttgctcttgcatttctagttctttaagatgaaccgttaggttatttgaaatttttctacttttttgatgtagaag

SEQ ID NO: 824710 - DNA, 579 bp, Homo sapiens
tagtttaaaataaatcacagcctccatctcctcatctgccaactgatggtttagaccagctcagtaagttcgcaccctggatgcccattagaatgtcctgggaactttctgaaaacacagatgtccaggcggcaccccagaccaactaaggcagaatcgttagaggtgagaggtcccagtgggcagtccctgggggagagtgcttggaaggaaatgcccagccctttgatgattcttctttttcaccttctgtatagactgtgggaggaaaagagttcagtgacttttactcaaattgaccaaaatataaaacagatttacctttgatcaagaatcttcaatagagagaaataccttactaagtattccaaaatgaaggcttgtttctatgttctgtaatccccctactggaggcatttttttttctttccccagagagagctacagaaaagaaggattaaaaggaaaagaatcctgagtctggaatcttggaggtgttgcaagtcagggcaggttgagactygtgctgcagacacagccatttctccactacggcctcactgaccatcccccacacat

SEQ ID NO: 824711 - DNA, 616 bp, Homo sapiens
ttaataaatggtgctgggaacacagattttaaggaagaatgaaaccagacctctatctctcaccatatacaaaaatcacaaccaagtgaattaaagacttaaatctaagacctcaaactttgaattactaaaagaaaatattggggaaactctcgaggacactgaactaggcaaagacttattgagtaatatcccaaagcagaggcaaccaaagcaaaaatggacaaatgggtttacatcaagttaaaaacttctgcacagcaatcacaacaatcaacaaagtgaagagacaacccacacaattggaggaaatatttgcaaactgccaatctgacaagagattaatagccagaatatataatgagctcaaacaactttataggaaaagatcaataatccaattaaaaaatggacaaaaaatctgaataaacattttttgaaagaagacatacaaatgacaaacaggtatgtaaaaaggtgttcagcatcactgataatcaaataaatgaaaatcaaaagkacagtgagatattgggcatagtggttcacgaccgcaatcccagcactttgggaggtcaagtcaaggcagaaggatcccttgattccaggagtttga

SEQ ID NO: 824712 - DNA, 327 bp, Homo sapiens
aatagcatttctgagaactttccagtctttgtgagccatgtcttcttcaaaatcttttatcatggarccaggcatggtggctcacgcctgtaatcccagcgctttggaaagctgaagtgggcagatagcttgagctcaggagtttgagacaagcctgggaagcgtggtgcaaccctgtttctaccaaaaatacaaaaaaattagctgggcatggtggcgtgcacctgtggtctcagctacttgggaggctgaggtaggaggattgcttgggcccgggaggtgggggttgcagtgagccaagattgtgccgctgcactccagccttgg

SEQ ID NO: 824713 - DNA, 534 bp, Homo sapiens
cttgaggccaggagttcaagaccagcctgtctaacatggcaaaaccccgtctctactaaaaatacaaaaattagcggctctcggtggcatgcacctataatccaagctactcaggaggctgaagcatgagaatcacttgaacctgagaggtggaggttgcagtgagctgagattgtgccactgcactccagcctgggtgacagagtgagaccctgtctcaaataataataataatagagagggcttgaggcatagcaactgttgccatggtaacgtgcaagtgactgatgttcaggaaacactggctttgctaccctgagccacacttttccttcttgcctgcaaggcgataaggatgttgcacctggtggctggtgtgaggaggtcaggcgcagcaagaggcagcacacstagcagttacagtcacagactttgcctgcgccagggtctgtgtcccagcggagatgcttaccggctgtgtggtcttgagcaaattgctcgacttctctgttactctgtgtggtgttttctgac

SEQ ID NO: 824714 - DNA, 527 bp, Homo sapiens
taactaccaaatctggggtgacttcaaagttagagtttgtacacacttcatctgttcccaagtaggataataatggtcataattgctaatatttactggactcttgaggccaaatatcaagctaagcacttagtttgcatcatctcatcgatttttatgatatttaatttaatttaattatatatttttttgagacagtgtctcgctgtgttgcccaggctggagtgcaatggcacaatctcagctcactgcaacctccacctcccaagctcaagtgattctcctgcctcagcctgccggttacctgggattacaggtgtgtgccaccacacctggctaatttttgtatttttagtagagatggggttttgccatgttggccaggctggcctcraactcctgacctcaagtaagccacccatctcagcctcctaaagtgctgggattacaggcattagccaccgtgcccagcctctttaggatatttatactcaatgaattagaccctcttactattactagccaat

SEQ ID NO: 824715 - DNA, 610 bp, Homo sapiens
agagctggctgccacattttgcaatgccactagcaatgcacaagggatccaatttctccacatcctcaccaatacctattattttgtttttacttttgttgtttctttaaccccatcctaatggctrtgaagtgccatctcaatgtggttttgatttatatttccctaatgattagtgatgttgagcatgtgtttttgtggttttggccatttgtaaatctttggagaaatgtttattcaaatccttttgcccattttaaaattaggttctttttgttgagttttaggagtcctttatgggtattaatcctttctggatattaatcctttatcagatatgatgtgcaaatattttcttctgactctttggttgcctcttcactgttaatggtgtcctctgatgtacaaaagtatttaattttgataatgtctaatttatttttctttgtacttgtgcttttgatgtcatatccaagaaatcattgacaaatacaatgctgtgaagtttttgtcctatgatttcttctaagagttttatagttttaggtcttactggggggtagggggtactttgatccattttgagttggtttttatatatggtgttaga

SEQ ID NO: 824716 - DNA, 492 bp, Homo sapiens
gtagaaaatgcagaaatgaatggttatagtttgttccaataaaactgtttgtcaaagcaagtgaagatttggcccatgggttgtgtttgttgacccctggtatatagaatcacactacagcagayatcatgttctcaccacaggtttatggaaaatgacatcattacctgtgtacgctttaatggatatataacattctaccacattgctgcgttatttactttcccaacaaatagtctgtggttggccacgttgtctctttttggcttcttgatgttataggtgatgatatagtgaacatcttcttaggcatacagcctttttcctttgattgaattatttcattaggcccaatttctagcatcaatcacaatatgcaaagattaacattgctgtgcttgagcttttttttgtaaaagggaaattttaatgaaaagggtcagaaggccagtgtttatcctggaaatgaaccccacaaggcagagatatgga

SEQ ID NO: 824717 - DNA, 406 bp, Homo sapiens
aggggaaatatcttaaattcttctccttttcaaaagtacatcactagagagtaaatattgtatcagttttccttgttaactttaatcttgggtacaaacatgaagattcttgtctagaggtggaattattgccacagaagccccattgccatagagtggggaaaaagacacgagccaaggttacgcaattatctttgtttgaagttatacccatcagggctgatggcctcagtgtatatttctgtccttcccctcccctggcttgccttctgatcacasggccccttggacctgggaagggagagagcaggagacggagtcacttggggaagggatgcagatgcagacatttgtggcagcctgtcctttgtcattgatttggcttcattaagggatttccaagctg

SEQ ID NO: 824718 - DNA, 632 bp, Homo sapiens
agattaaatatctggacacttagaggttctttgagatatgtgtgtggagtatgagtgaacaaaggtgaagcagtctgaagaaaatggtttaatttcatgcttgttgacccttagtttgtaaggttacgttctgcmagagaaaaaaactgatctactatccagtatttgctgagaaatgacagtagattaatcagaagacttctgaagtgagtcagtaaagcagcattttaggttttgtttctttttgttttatatgatgtgtgttaaatgatttctgattagagaactgacagaaatgtaaacacttgaatgaaactttcaaaccatttgcagaacaattccttaccctttcttattacgtctttgcttataaattgtgttttcttttctgtgaattttaccctagaggagtttgctgtgtgtgttctcattccgttccggatgaattggcgggtggataggccagcttgctcccaagcgtcttctttcttctagggggaaggccatgctaggtgagcatcagagtgtgtatgtgagcctttgtgctgtgatctgtaggaacagaatggttctgcatgcttcctggtcatgaggtgaggagcacagaaatgtggatccttcagtcctgacac

SEQ ID NO: 824719 - DNA, 624 bp, Homo sapiens
ctcctgctcgtgctgctggcaggcagtggcatggaggttggagtgtttagaggcagttgtggtgttgtggtggccacacttagagttccaggccttagtcccacctgcctgggcgcgggaatctgttgtggcaasagcagcagcttcctgacctctgaatcacggccacctacaatgttgtgaccttgaacttaaaagtctaaggtgccggctgggcgtggtggctcatgccggtaatcccagcactttgggtggttgaggtgggtggatcatgaggtcaggagtttgagaccagcctgaccaacatggtaaaaccccatctctattaaaaatacaaaaatgagctgggcgtggtggcgtgcgcctgtaatcccagttacaaagaagctgaggcaggagaattgcttgaacctgggaggcagaggttgcagtgagccgagattgtgccactccactccagcctgggcgacagagtaagactctgtctcctccaaaaaagaaaagtctaaggggcccctgatgtctgctcctccagcctttttaataattctacaggcacctaattcccatatcaaattcctttctgactgtaacacctggagtggtttctgtttctgcacccac

SEQ ID NO: 824720 - DNA, 594 bp, Homo sapiens
cactttatacagaataatgaaggaacagtagaaagcctgatttatgatattctggacagctttttagatttactatacaaattttagcttagtttctttttgcttcacactgtgtgcggtggagattttaaaaataggataaagctttaataataacagctaactttattaagtatgtcaatatgattgttattctcattttataaatgaggaaagagaaccttaaaatgcttaagtaccttgcccaaggtcactaggctcttaagtggagaagctggtatttaggccctggccttcaaagcctaaccattatactctactgcctcttatagtggctttatgaattatagaccttcttttgagttgttgatgttaaattttactcatatgcagagctgtatttaaatttaaaaagaggcttattttataacatagccactaatatttttcattggaattgccrtctacctctacttgttctccagtgtagatttaattcttatattcttttgtttaaaaatctaaggtcctaactgcccttagaattaagtgcccaaaatcttatgtagtattcagatcccctacaacctgatc

SEQ ID NO: 824721 - DNA, 534 bp, Homo sapiens
aagggcatacagaagttctggggtctgctgggcccttcaaacactgtttggctacacaaccaaccttcaaaaaatggagtgtctgtggccatggtctctagcagccaaggaggatttccaaatggtgaagatcacctctgacttctgactaaatgtggcagattgaacatacacattaactctgccctctccccacaccctactaaaatgacagcaaatttaaatccatgaggacaaatgacaacaaatttcaacccatgaggaaatttaaacccatgaggacaaagagaatgagaagagttggcagcagatgagcaatgttaataaaattgtggaaaggcaaaagaacatggaaaaatgatagctgacttagcagaactgagaaactgaaacatacttcctatgaatcraggacagatttgctcagcagaactagaaaatctcagaatttggaggaccaaatacttctaaatgctagtgtagtgtgagggctaaaaccaggattgattgaaagtttaattgatatgaaattag

SEQ ID NO: 824722 - DNA, 547 bp, Homo sapiens
aatccacaggtccttacttaaaatctgttgtgccaaacatgagcctggtgtgagcagaaggtagcttcatttatttttcacggtggctcatctggatttgcaggaaggaaccaggtcagcatagggcagtcagctgccctccacccagaggccaggatgccacctgggaagttctgaggcaacacatctttaggacaaactttaactgaagggtacctaggccctcctcttgggaagaggccatgtcttcattaccttgccccaagtcccaagaagtaagaccactttcctttcctctctcccccagcaccatcctccccagctcttttttttttttttgcaacctggtttgaacacactatctccagctcttggggtctcccctcctgtcaagcctggtgctaccttcccagattacctttctttattgtccttgtagaaaagcccatgagctctttccatgtaatatttttacgatttactgcagacagactgaaagaaagtcaacaaataygggaaaaaagtttttttaaaaaaatcataaaat

SEQ ID NO: 824723 - DNA, 462 bp, Homo sapiens
caggttggtgcactctaccggacccctctcgctgtcttctgtttagagcaggaaagcccactgcacagagcctcttagtgtctgctctttctcatgtgatacaaagctgtttttccttctctcgcttacttcctgctccaaagccacttggatagaacactgactctttgctaggtaaattctggcctcccatccttgatttcctcatctatgcaatggggataataattgtccctacaatactgaattttgggggaatcaaatgaggatgccacctctatggatatggtttttattacagttacaatcagacaaacacttgatgacagtgccccttatgtaaccattgacccctcctgtggacccaraggtgcctgcgttcagcacaggaaagtggaggtgcagaggagatggtttcctgcctcactgggcccccaggtattgctaccaagcagcccaccc

SEQ ID NO: 824724 - DNA, 462 bp, Homo sapiens
caggttggtgcactctaccggacccctctcgctgtcttctgtttagagcaggaaagcccactgcacagagcctcttagtgtctgctctttctcatgtgatacaaagctgtttttccttctctcgcttacttcctgctccaaagccacttggatagaacactgactctttgctaggtaaattctggcctcccatccttgatttcctcatctatgcaatggggataataattgtccctacaatactgaattttgggggaatcaaatgaggatgccacctctatggatatggtttttattacagttacaatcagacaaacacttgatgacagtgccccttatgtaaccattgacccctcctgtggacccagaggtgcctgcgttcagcacaggaaagtggaggtgcagaggagayggtttcctgcctcactgggcccccaggtattgctaccaagcagcccaccc

SEQ ID NO: 824725 - DNA, 486 bp, Homo sapiens
agagaaattagatcaagaaattcctgactgcttcaagctaatgtagagaagggccacacttccttctgacaatccctgaaaaaaaaaaaaaartgctgcttgtgctgctgttttctcccagccataaagacatccccgagcctctctaaaacagccagggaaaaactgcaagcatctccatggcatgcggcatccatcctatcctctcacacgctcccattccctagagaatgttgaaggatgtatgggttggaaagaaataacagatttaaggacaattcttggtgaaacaagacattggtggcttgggtagggacacattggctgagctgacagataatttcagagctttatgtttgatcctttccatatacaggtgttccctggaattttccattgtgttatacctcctctgactgccatgtgaaaaagtgcctgggtgttttttgttctctctgagtgtctgggcagctcttcatgggcact

SEQ ID NO: 824726 - DNA, 586 bp, Homo sapiens; identical to SEQ ID NO: 822792

SEQ ID NO: 824727 - DNA, 530 bp, Homo sapiens
taaatatgagataaatagaaaataaatgtttccataactgttgatgagtaaatgaaagtggtctgggtaatgtttcccaaccttcagtgcagtatagatcctataarggtctaaacatctaacaattcactcagaaaagtagaaaataaacctttctaaccatcttgcttcattgaaatctctatttactatgtgtggttgattttttaaatctctggattagactaaactcctactcctgtctacattctctccagctcttccttctgctgccttctgctttaagagggcaaacttccttccgctttaggcagcattctcccacaataagggctcctatctcattcaaatcttcctttcttcatccagaagagtttccagagcccaccttctccatgacagctacacatttctaaagcactgtttgtctaccaactcctccttcttggctagtaaatacaaaataaagctagggggtaagagagtgatagaggggcaacagcaaaagttacaaatgttccctgaaggaa

SEQ ID NO: 824728 - DNA, 530 bp, Homo sapiens
taaatatgagataaatagaaaataaatgtttccataactgttgatgagtaaatgaaagtggtctgggtaatgtttcccaaccttcagtgcagtatagatcctataaaggtctaaacatctaacaattcactcagaaaagtagaaaataaacctttctaaccatcttgcttcattgaaatctctatttactatgtgtggttgattttttaaatctctggattagactaaactcctactcctgtctacattctctccagctcttccttctgctgccttctgctttaagagggcaaacttccttccgctttaggcagcattctcccacaataagggctcctatctcattcaaatcttcctttcttcatccagaagagtttccagagcccaccttctccatgacagctacacatttctaaagcactgtttgtctaccaactcctccttcttggctagtaaatacaaaataaagctagggggtaagagagwgatagaggggcaacagcaaaagttacaaatgttccctgaaggaa

SEQ ID NO: 824729 - DNA, 629 bp, Homo sapiens
atctggtatttatggaaataagtwgaaatgtacattttcttctaaatagctaacctaatcttcctactaccatttagtgaataattcatttcctagtaattgttttaaatatatcagattctatttcagggctgtcttttctgtctgccatttctcaattcttttacaatactaattttgcaactttccctatgtaagcttcagaatttttttttaacttttattttaagttcaggggtacatgtgcaagtttgttatttaggtaaactcgtgtcatgggagtttgttatacagattactttgtcactcaagtatcatgcctagtacccattcgttattttttctgattctctccttcctcccaccatctaaccactgataggccccagtgtgtgttgttcccctctgtgtgtccatgtgttcttatcatttagctcccacttaaagtgacaacacacagtatttgtttttctgttcctgcattaatctgctaaggataatggcctccaactccatgttcctacaaataacatgatcttgctcttttttacggttgtgtaatattccatgctgtatatataccatattttctttatccagtgtaccattgatgggcatttaggttgact

SEQ ID NO: 824730 - DNA, 611 bp, Homo sapiens
gttaactgcttcctttaacaaatattcaaaaagacaaaaaaaaattttaacctgttttagtggtataattgaatcatttaaagcattttggcaagggatcagctttgcaattagggtttttctgacttgcattccagaaaatatcatgttcttttgaaatacatatgtgtatgtgtttatgtttgggctcgacattgggtcagtacctgtgcatattaaaatgagcaacttctaaggaccaaatctatttaatgtcaaacccatcaagccagacttagagagtcattctcacagtgacctagccattgtcaattttaaagtaatttatcctaaagtggtggggtgtcaaatgggagaagtaggacaacgaaaaagccacaaattgtgctgctccaggcttgtttatcaggatggttcactctcactcaacacacctccgcttcagcattcattaaccttttatgtcactcttacctactctgaaagcagtcttcagggaatggcccactggcaaaagggagggaatacctsagataaagcagttggtggtgggaagaatgaatttggcatgggagtggaaacttgaaagaaaagaatggagagtcctaagg

SEQ ID NO: 824731 - DNA, 515 bp, Homo sapiens
ttggaagataatttctactactcccaactctctcctgacaagtttcttcctttttaaatgggttccaagctggccagatttcaaatgatcctcccaaagtacgccgggacaccagtgcgtgtgtgacaaagatctgctaacctgcagaggaggcagcacgtggaacagggctgccatccacgccattgctactgccaggcaggacgtcgttcacagaaaagaccccacttaagcatataattcgacaggcagagaactattttggcacgaaagccagaaaatctgacaagctctataatctaaaaactggaagtaaagatataattaaaccattaggaatgttaatggtaatcatttaaaaatgtggggccagtcccatttctatagatttactgtaatgaagggaawctgtgagctgggcatgcacaagaccttcccactggttgcatttgtgttcacacaaccccatagtgggtggctgcagtctcacagctggttcagagggcccggggaag

SEQ ID NO: 824732 - DNA, 410 bp, Homo sapiens
gggatctgtccctcatccactatgctccaggtccctcctgtcctgcctcccctttgtacaacagcagtgctgtccaacagaaatatattgagagtcacatatatccttccagctattccagtgggccaaaaagtaaaaacaaagaaaacaaactaacccatgggtgaaagtaatttaaataatatattttatttacccaatatatccagaatatcattttatcatgtaatgaataaaaaataatttcagactccagtgcgttttgtatttacaacacccctcacttcaraccagccacactgcaaatgttcctagccatgtgtggctagtggctcccctggtggacagctcagttctgcagggaagtacggtgctgtcctcatttacctctttggcccctcccctccctc

SEQ ID NO: 824733 - DNA, 272 bp, Homo sapiens
ccataatttatttaactgttctctagtttttcaacatttagctgctcctaattgttaaattttataatcatcctcggacataaagccctgttcaagctactgaggtttctgtggcatagattyctgggaggggactaacttattgggtcagagggtatgaatatttggaaagctcttcatacatattgccaaattggtttccagaaaggttatgccgatttgcattcccactgataatgtaggagggtgcctattccattgcattcttgcca

SEQ ID NO: 824734 - DNA, 495 bp, Homo sapiens
aacgtcccctctagagcatgggccgaggccggggtggggtctggctccagccaaccgcacacagcctacgcgccgttgctgagcaacgcttgcccgctgaatcccgaggttttagctctagtcaagtgccaaaagagcccaatgtgtgttcgggtttcaattctccagtcagcgtcagagttggaggcctcaattttaaagaaggcaaagccatggtcatcgttgcgggtaaggaacaacgcagaagcctcttccacccccaaatttaatgcaacagcaggcggaagacctgcagggtcccgttcagaaaaagggccgtcagactgtcgagcctaagaataaaaagaccctgtttctcttagatacccggttagcaaggcaacatcgctggcctcctgycctggacacttatcaccccggtgctgctgcggccgggtttagccggcccagcgaggaaggaagccgaaagagccaggtttttgatgagggggagcg

SEQ ID NO: 824735 - DNA, 612 bp, Homo sapiens
actatggatgtgaaatggcttgtatagatacataggcagagatgactcagcctgtgtgagctgtaactgaagccaaccagagtgcccaggtacttggaacgctgtacttataaaaaccttgtacttgtagracttacaaaaaatatttctcctttttaaggtactgtgggagcctgcatctatcaactcctgccttgagccaatcaggatgccaggcctttcacagtctgctcaggaaaaaggccaccaggtcaacaaacccttctgacaacgcagttcagagctacagcagcaccctgtgatcatttcccaccaccctcatattctctgaactttaggctgcagcatgattactgcaaaaccatccagtaggtgtcatcaaagatgtaacccttaacagtaagacctcaaacactccagactgtgtagtttctgagcaattctgattgtgggctcaacttggttcccatcaaaatagtaggttacaagaccaaaccatgaatgctgcatctagaaagtggattaatgacgcagttctcaaactgtgtgctgaggcaccctggggcattgctggatatttatttattccctttgcccctctgtgtgtgtgtg

SEQ ID NO: 824736 - DNA, 644 bp, Homo sapiens
tatttcccatttgctatcaggtrcattatagtctcacccttctttgcaatgacatctttgaacatcacaatgctcatagtgctgcagaagctcttgataagcattttcctctaattctcaggatgcatctttttcaggaatatgaattcccattctcaacatctctttctgaaagatgtcactattattgcatattgtacacctaaagaaaaacactcctgcatttattgcttgaacctgtaaacagtctctatgaaaccaagcgttcttacaacaagcactttgtaatatgttataacttagaataggctcaataaattctgagcaaatggtgcatggtaaggagtctctataattattagatgtaattatttgaacaggtcgatggttccaacaaaatgatgtgaaattgccagtaaactggaaaatacattctctctgaagtccacatgggaaataacttcgtttacattagggtgcaacacatccaactgaagcaccatttttcttgcaaagacagcatttcagtttagaaactctattcacttccttcctggtatcttctaatagaaaaccacaaactccttctttacctctctgccaaattccacttgacatcaacaaagaataataatgtacggtga

SEQ ID NO: 824737 - DNA, 608 bp, Homo sapiens
cccttctttgcaatgacatctttgaacatcacaatgctcatagtgctgcagaagctcttgataagcattttcctctaattctcaggatgcatctttttcaggaatatgaattcccattctcaacatctctttctgaaagatgtcactattattgcatattgtacacctaaagaaaaacactcctgcatttattgcttgaacctgtaaacagtctctatgaaaccaagcgttcttacaacaagcactttgtaatatgttataacttagaataggctcaataaattctgagcaaatggtgcatggtaaggagtctctataattattagatgtaattatttgaacaggtcgatggttccaacaaaatgatgtgaaattgccagtaaactggaaaatacattctctctgaagtccacatgggaaataacttcgtttacattagggtgcaacacatccaactgaagcaccatttttcttgcaaagacagcatttcagtttagaaactctattcacttccttcctggtatcttctaatagaaaaccayaaactccttctttacctctctgccaaattccacttgacatcaacaaagaataataatgtacggtga

SEQ ID NO: 824738 - DNA, 510 bp, Homo sapiens
actttggacactatacaatctatccagttaacataacgtatggatcctgacctcctcaagcttaaaaacactgacaacttcttaaatacttacattggctacagaaaaatatattgaagaagaataaataccagttttaacttgccttttttatatatattaagaagcttagtttattcaaaacatctgtccacaagcctttaaactgtaagaaggcaagcaattaattacatgttaaaatttataaccaatattttcattttatgtaggttgagtacagaattgggtttgtgtaccacatgggttctttgtgttacagaaagacttctgagcatatacatgtacgtttgtgcccatgccatagaatttgagcctcattttactaatagggccattatagagctttataactctccacctctacagcccatagtcagtcataattacatagagacccagatcaagaatgctatccagaatcgcagsattgagctcctagtggcaaaatgt

SEQ ID NO: 824739 - DNA, 579 bp, Homo sapiens
cctagactgtgacagcagaagggagaatgaccccctgtcacaagatttaagggagaagagtagccctggtgaccactaaggcagctctggtggtgccactgacaccaggattctcgggccaccttgaattcgtaggaaatgctcctgtgccatcttttgttgccactgccgtttttcaggggcagatctcttagactccttttatcttcatgttgggttggattgatgacattatacatttttaggccgtgtctatttatactggctgagttttaaattactgtgttcctcctggatggttgtcatggttcttcttttggttctttttgctcttatttcttttggactgtcttcctttatctaacttttctacccatctgaaggacctataattatatttcccatttatgttctttataaatgcttttcaacctctaaaactccccaatgacttcattttctaggggtatataccctattttttaaaatctaggcagaatcttaaaatgctctgagtttttgtccttttctgtctcattaargttaacaatacaaatgtgatagaaagggaaattattc

SEQ ID NO: 824740 - DNA, 600 bp, Homo sapiens
attgtcaggagcctccatgtagaagggatttataaatcattcagggctgggggaagtgaagcttaagggggagaggtgggcgggcagggaggcagtggcatggggttggggatggctgttaaacagggcagtgaggatcctaggggaacaggtagagtcatggccaggggaataggtttttcagagttggaatgcctgggtaaaagtgggtattgacaccttttacctgcttcctaattctcttgaactcccctaggaaaagaataaaaggaatggggaggtaaggaaaaactgaagtgaggaatatgggatttcctacctcaaactcaggctcctttgaaacagttttcaggcaactgctctaagcaggacagagcaccacaccacatccacagacctcaagtcagggcccctgaactgtttaaagttggctctctgagcacattgacagggcccacagcagaggacgctgctgcccaggccctggagtctatcccactaggattggcaggaggcaggaggacacagccagaaggtragcagatttgtatgaccaagttaccccattgccatccacagggaaatgttccactgcagccg

SEQ ID NO: 824741 - DNA, 619 bp, Homo sapiens
gtaggcctgctttcattttcagtggcagtggataaaaattcggtggcaactttggaggtgacacctgcccagatacattacataccctggaaacctccccatggctccacttcctgaagaaggtctagtatttgtggtcctgtgttgagaagaacccaaaatgcctgtggccctttccccagaaacttagggtttaagttagagatatcctaaccctccctttctcaacagttgaacctgccaaaaacaaaaacaaaaattgctaaaatggcattactgaaagtcaagctgcctggctcacagaaccaagggagagaccagaggctgggcagccatggcttgtcctgcaccaggattgttccctgtgagacgtggatggcagggccagccactctgcagtcccctccccttcagctcctgtgaggcagggattctaagcatgaggaaaggctgttcacccacctccacaagaaactgaatgtgagtgaggcgccaggcctctcaccctcctccttgacttgccgayacactccctgtctcagagaaattgattttttctcccagtttttattgaggtattattgatgtacaataaactatggagacttaaggtgttcag

SEQ ID NO: 824742 - DNA, 562 bp, Homo sapiens
gctgtgtaacaaattaccctgaaacttagcagcttgaaacatttatcatctcccagctgggaatttggaagcagcttagctggatgattttgaagtttcagtcaagatgtcagcaggggctgcagtttctgaaggcctgacggacactggaggatctgcttccaaggctcactcccgtgactgtggcaggaggcctcagctcctcactggttgtaggtgggaggcctcggctcctcactggctgttggtgggaggactcagctccttgcgttgtggacctctccgtggggctgcttgagtgtcttttttagcatggcagctggcttccccagagctagtgatcgaagagggagcccaggtcagagcttgcagtgtcttttaagacctacccttggaagccacacgccatcacttccgactttgttagaagtgagtcactaagtacagcccgtactcaaggggaggtaaattcagttccacctcttggagagaagaatttgcagacattttaaaactaccacagggaggytacctttccccattacttttttctctccttttc

SEQ ID NO: 824743 - DNA, 634 bp, Homo sapiens
tcttttctccctttggaggataattgttagtttattgattatatacattatatatgcacacattcttatttaaycattttaaacaatatagaaatatactatgtacaacatgaaagtcctctttcatctcaccccaattctactcacgccccaaaaatactcagtgacttttttctatgcatttttatatacaggcacaagtacatcaattggatttttgtcccacagagatggaattgcacagtctgtatacctctgcaacttgcctttttttcttagctttgccatccccagtcccagacacctctgattccatgagtgatctggctgtgtgtgtatgtgtgtttgtgtgtgtgttcctctgtgtcaagggctgacaagtacctagtctaagagggaaatccatctttcctgaggtgagcctgagtgattttttcatcaaatagatcatgaccagttccctcttctgcacacccccctccctgctgagcactgacaagcatgagggaaaagccaagggcatccaccccaacccaagcaaggacggggtgagagaaagcggacagaagtacaagttaaccggccagacactgactcacaagtgcaggagggaggtgggagcagcttgggaaga

SEQ ID NO: 824744 - DNA, 550 bp, Homo sapiens
tttccttcatctccttagcccctggctctttctccagcccataagcctctgtccagctggctggagatgtgcatggtacatcattagccctcartggatctgagcaagcatgacaagtctcagcgtcatgacagcagcagccctgctgaggacagggctcccgtccctactgcccagtgctgcctggcctgagccttcctgtgcttcctccacagggcagcccatccagtacgctcgctccacctgcgaggccggcgtggctgagctccacatccaggatgccctgccggaggaccatggcacctacacctgcctagctgagaatgccttggggcaggtgtcctgcagcgcctgggtcaccgtccatggtaggagcctctgggcacctgggtagaagcacctttcctgcaggcacttctgctttggaggaagggcacatttgtagaaaatggtatcatgagctcaaatccagggagcagaggtgcacatggcactactccacaccactggcagcggcaggtgccgtgacagaggagtggctgctgcaacc

SEQ ID NO: 824745 - DNA, 412 bp, Homo sapiens
gcgacctcagcctagtctctcacacagaataggagctgaatctatgatgactgctatcgttaatggtgttactgcttttatgattttaaagtttctgtcagaggctcagagaataaaagcaaccttgctcaaagtaggtgcacaggagaaatccggatggcactggagggtgagatagcacagaagagtcagtgactctcatgcttattgtggtgctgccacccaaaccagctgtgtgatctcaggaaagccaccttccttctctggtcctctctacacggcctgaagggtctctctgggcatttcctgtcctagtgcacctttctctaagactgccaccagctctccacaagacatgtgcgcaagtaggaaaggttccagcagggggatccragcccaggcagggatgagc

SEQ ID NO: 824746 - DNA, 603 bp, Homo sapiens
ctccacccagccctcaaccccagacctctctcggcttctaggcccctctggaaactttttgaggcaagagcccagtaggggaggggatggctaggccataagtgaagcgaggtgccacttttacagccatttcggctgctcataaacaccccctgacacccagctgagtcgctggaggctcccatggcagctggctgggcagcccccttcccttgcagcagaagcatggctgcctggctttcttgcctctcaggaaggtgaagggaggggcgatgggggcacctggggccagcaggctctgtcccaaccagggagcactcctaaggctcccaaggagctagaggtatgggctttctgtccctgctggcctcatggttacaagccccctgctgtcataacaccaggtccacagatgtgtctccatgcgggcatgtcttgtctgccccatagcacggcccaggtatttagacactcacccccagggaaaccacagacttgggcytcccagctgtgctcaggcccctaggctcccctggcccccactcacctgcagcccatgggccttccaagtcgggcctaaagctgcagagcagactcaagttg

SEQ ID NO: 824747 - DNA, 631 bp, Homo sapiens
taatgtttacgtgttccctgtggcttggctttgctgtggggccttgaagggagaagtgaccacctggatccagcccctgctcaaggcaaacagggtcctgcctgcctgccaggcctgctgagggctccacttccactgccaatacctggatggcccaggtggggctctgaggcctctctgagtggaggccagccctggcctgggggctcctagtctaagggaagagaactggtcctagcctaggggacttggactgaggtgagaggtccagttctgtcttggacatccagactgaggggaaaaatggtgcctagtctaaagggggaggcctggcactgccctgggtgcagatatcctcagggcagggcagtcctcctcttagaggcatccagctggtgtgggatgcccggccctggcctggggacaccaaacctgagatgggggtacccagtatgtcctgggggcattagttcaaaggggaaggacagccctatctggaggggagttccatctaaagggaagatggwgacaagtctaatgggggtgacagccctgtcttggggtgacccagtagggcagaggagaggcgcacctctgccctggggggcaccctgcctgagacagaggctca

SEQ ID NO: 824748 - DNA, 375 bp, Homo sapiens
tataagaatcaccttttaaatcctcctgcctttcaaaggacagcatttctctctattgaagatagatatttgaagtaataaggttcaagttgtagtactttttttaagtacctgctttaaggcatcgaatttaaattcagattattcctgaaatttatttaaaatgtatatacattaatggcccagaaagctgtcaacttacatttcttcaactactgagttttgaggcagcaatcttactatgtwtatctttatatccctggttccatgcatagtgttgtgcacatagcaggtcttctataaatatttgttggagatagagtaagtgaatagctgaatgaggctttagggttaggagatctacacagtaggtat

SEQ ID NO: 824749 - DNA, 633 bp, Homo sapiens
gacagagacttccctagcaaggttggggtttgggaggtttgtggatgtgaggtttgaagagagtgagtaatttacttgatgttttctctttcatttaaaggttgggaaccaataatwcaactcctcaggtaattacttttcccaaagccagtgtgttctcctttagttgcttcttcaaacaatcacattaacagcataatctgcatttattctttgcacataatgtcactcaggcactggcatttaacgcgtgaaaacataaaactagaaagcctgtcgaagatttttttcttgtgcttttttatggatttctctttctacttctaagagctatgtttgtatcattaagagcatcatatggttattattttaggaaaaaaggtaatattaaaatcgaaagttcccacatttgtgaaataacactggattctgacaaccaagtgcttctgtgtccctgaagaaaagcagttttgaaaatagttatcgtctttattcagcttgtgaaaaatcattttcctttaccattttaaaataagagaaagatgactgaattctggtgctaaaaaggtattttaaaatctgatatacaatataagatgaaagatgtttgtacctcatgtaaactgaaaaggt

SEQ ID NO: 824750 - DNA, 594 bp, Homo sapiens
tagaaactcaaattccagcattaagcaatagatcaatgtaataaacatgcacatgtaaaaaaaaaacaacataaccttccaccttaagaaaatggaaaaagaaaaacaaagtaaactcaaagcaagcagaaaaagataagagcagaaatgaatgaaataaagaatagaaagataatagagaagatcgagaaaacgagttagttctttgaaagtgagaagtcggggtaatagccaaaaacctttgtatcatttttgaaggcagacaccacagggaaaggcttttactggcaggcctaaagggagaaagctgcccccttgcctccccagattttgtgcacagttggtgcattgccatctctgatgagagttacagtcaagaactaagacctcgctgacctgtcatgctcttacatatgtcagcattcctggactaggcccccattcagaggtctctttatttggagccatagcagaggccttctttgggtacctctgcagagattccttattggggaraggaggaaggaaacactaaagatactttttttcactctgactgaatactcaatacttttccactccaagtccttttcc

SEQ ID NO: 824751 - DNA, 596 bp, Homo sapiens
aactgggagacacctcccagtaggggccaactgacaccttatacaggcaggagcccctctgggactgaagcttccagaggaaggatcaggcagcaatatttgctgttctgcagcctccactggtgatacccaggcaaacagggtctggagtggacctacagcaaactccaacagacctgcagctgagggacctgactgttagaaggaaaactaacaaacagaaaggaatagtgtgaacatcaacaaaaaggacatccacaccaaaaccccatctgtaggtcaccatcatcaaagaccaaaggtagatacaaccacaaagatggggagaaaccagagcagaaagctgaaaactctaaaaaccagaggactcttctcctccaaaggattgcagctctgcaccagcaatggaacaaagcaggatggagaatgactttgatgagctgacagaagtaggcttcagarggtcggtaataacaaacttctccgagctaaaggaagatgtttgaacccatcacaaggaagttaaaaaccttgaaaaaacattaggtgaatggctaactagaataaacagtgtagagaagatcttaaatgacctg

SEQ ID NO: 824752 - DNA, 595 bp, Homo sapiens
caccacatccatgccaacatctactatttttttattgtttttattatggccactcttgcaagagtaaggtgaatcacgtcaatggtatcaattgaaatgaaagcaaccaacagtcctgcgctcagctggtttactgagcaattttgagtatggttcttttgtgaacttttaaatccaaacccagaaaaatatgtgacttttctgatttttctgctgtgtccagggctcatttggtacatttcttccatgaggaataaaacatctttaaacagatttctcagaattatattagggttcttttaatgatccgtccttcagaagagctatagctacttctgaaaaggaagaccagaaagagtgatgctcagcctaaagggattgttagttgtgtcattttaggaatcttaagaagtgacctctctgtttacaatagacccaggacctcagcatgaggctgaggctgcctgaactgagacggccggtcccgacacacagacrtaacccacaatggctattttgagctaatatttcctgttttttttttctcctgcagcccctgtaaagcaacacattttttggcaagaatgcctgggac

SEQ ID NO: 824753 - DNA, 547 bp, Homo sapiens
gcctctacaaaaaatacaaaaattagccaggcatgatggcctatacctttagttccggttacttgagaggctaacgtgggagaactgcttgagcctgggagattgaggctatgagtgtaccactgcactacagcctgggtgacaaagaaagaccctgtttaaaaaaacatgcactcggccgggcgcggtggctcacgcctgtaaacccagcattttgggaggccgaggtgggcagatcaggaggtcaggagattgagaccatcctggttaacacggtgaaacaccgtctctactgaaaaaaaaagaatacaaaaaattagctgggcgtggtggcgggcgcctgcagtcccagttactcaggaggctgaggcaggagaatggcgtgaaccaggggggcagagctttcagtgagccgagatcgtgccactgcactccaggccgggcgacagagcaagactcctgctcaaaacawaaacaaaaacaaaaacaaacaacaaacaaaaaaacaaaaacatgcactcaaaagagttagctcaagcatctggtg

SEQ ID NO: 824754 - DNA, 590 bp, Homo sapiens
tgccctctgggccctggtgagcttcagraacatcaggaatgacctttggtgtcaagaactgatgactggattaacccttcttggtgtggtgctttttatccttgcagttatgtctcctaaaatctatcctacaaatgaacttgaggtcatgggttagttctgctcaccccttctctggatcttatttctgatttactgagtatcccctactgaactggtgactcctgctcaatatcttcatacatctgagtcactgaccacatcagatggaggagatagaaatcctgggctaaacaacaaacaactcgttgttgttgttgagacagggtcttgctctgttgcccaggctggagtgcagtggtgcaatcatgattcacttcagcctctacctccctggcttaaggaatcctcctgcctcagcctcctgaatagctgggactgaaggcacacaccaccatgcctggctatattttttcttttattttttggtagagatggggtcttcctatgttacctaggctggtcttgaactcctgggctcaagggatcttcctacctcagccttccaaagtgctgagaatacaggtgtg

SEQ ID NO: 824755 - DNA, 643 bp, Homo sapiens
tagggtttttgcgatataggatcatgtcatctgcaaacaaggattgtttgacttcctttcttcttatttggatgccctttatttctttctcttgcctgattgctctggcctggacttccaatactatgttgaataggagtcacccatcctcaatgatgctgaaaaatccctgcctcatgtgaccttgattttccaaacacagccccaggcagagacttgggaagatcccctggattagaaattaagaagggagacaggctgagcaggatggattattgagcaataaaacaagatttgcttcccgcctttgtgccccgaatcaccagaatttattaccttttcaagaggtctttgtataatatatacatgatattttacacaccctctgtctttattttctgtagagcaagcaaggaaagatggaggactcttaggtacgtgtgttcagccagatttctatgtgtatgaacatcacaaccaaaacccacattccccttggaactcatcaaattgatgaccaagaagttctcccagcatctcttgctaataggactagagggtgtgagtaacrtacaaatcacaggtttcaggggcttgattcttaaacacaggcattcggctgattctttaattgttaacatgg

SEQ ID NO: 824756 - DNA, 621 bp, Homo sapiens
ttgcaagaaagtacctggaaaaaataattcgtgaagtggtgggaaatattccccacatagcctgttattcataaataggagcattataagcttcttaaataagataaagttaatttagaattatatttttagagaaatataatgggtttgactcatctacctttataatgaaaaacaaagaacataaaactattcaaaatcagaatgattaataacttaatattttattttagttccatattgtgattgattaagagagaaaaagaagatagaagagaaaacatgaaatacaagagaatggaactatttttgcagaattagcatgggtcagggaagctgagaatccattctggattttctcatgagagatcttggtagaatagttctagttacacagcagcaatatcgagctaatggtccctgtgttctcttcttaagacatgtgtcacatagaaccaggaaggaggaatataaagaaagataaacctagagagaatagtcagacaaagaaatttgggatctctggttttatgaaaattaaagcccayttttcacctgtcaaggtacttaacataaagatttttgaccaaaaacacttccactcatatacttaggtagtaa

SEQ ID NO: 824757 - DNA, 601 bp, Homo sapiens
atacctttatgagtcatatttacctacactaatgactgttaacaatattaaagctgaaactttaaaaacgagtcaacttgcaataatctaatggaagccagaacatacctaactcattcccattttagatttgactttgggatacattgagtattttgaaaatgacagactcctctattttcttggctccgggtgattagactgagtttgccttctgtgggttcccctgagtcaaaggaaagagaggtagctcagaagcatattgcatcaccaagaaaagttggtctgagagtgaacatctataacagaaagcccagaatgtgaattattcaaaattagacaatatagattgcacatgcttcttgttaaatagatttcaggtgaggaacttgttgcttctctgtgcagttgagttcctcatccatgcccaaaaatataggtagaatttatgttctgacagatgcttatttatcccgttttgtacccataatctacacttgtcttaatttcctctcaattatgctcaggcattaactaataatgactaactacaaccccarataattattgctatctgttccctttgtaaatataactccag

SEQ ID NO: 824758 - DNA, 607 bp, Homo sapiens
cttctagtgggtagaggtgagggatgctgctcgatcgtgagccccgtaatcaagaattatcaacccaaaatgtgacgattgccaagtctgagaagccctgctctgcagacaatatgtctcagagtyctggtgctgatcagacagcacgtttctggggctcaatataggcgagccagagataatgcccacagaaaagggaattgtaattaggagaggatgatctttggcagtatgcatttgtgagcagacactcctgaaaggacagggctgagggtaccttatggttctgtttctcccttaggatggcagcatctgataaccagatacaaaacctgagaggaaatttttaagctgtgactagtctgattcccagctggccagctgagccaccctacttctgtgttttctggtgcaaagaacaaggttctaccgagtgaccttagacttggcttctggataaaattgtcagagagctcctagcattttgcctgagccatcacagggaacctgggtttggaatctcaaccactcatggcaaagttattttcattccccttgctctcacctgcccccatgggaatcttccataggagaaatgttctaattg

SEQ ID NO: 824759 - DNA, 630 bp, Homo sapiens
gataaaccaaaaattatgttaaatagcaattttaaggaagcaggtaagactagaagccttctgcataaatcaggcttgagctttgcggaagtggcttctttccctgtactgaggtgtgagaagcagcacatggrtttttattcctttaaaggattttcttcaagcaacagtctgtagttcaggttaatgggaaggcaaggcagtagcattgggatgaacatttatgatcccaaacattctaattctaggtgtctacagcattcaaatattgagtaggcacttacacttccaaagaccaattcttcaagataatgctgaggttaacttacagttttatatattattcaatggggcagttcacaggacatttgaagtgacttggagagaaaaaagaataccgccgttcatattattaatatttatggtacagttattatattcaggccatgctattgctggagagagttggtccattgaataaatgtgcaatgttcatgaagcagtgaatatatcattcaattaaaaattcagcaactgatgtagtcagggatgtgctggtaaatgtctcacaactggctttccaggaccggtttgcagcatttgctgattttcatggtgtagacccttccc

SEQ ID NO: 824760 - DNA, 563 bp, Homo sapiens
attgctggcactcatcttctatcgcatttcagttccttcagacaagtcccactttgcatgattgatcattatttttactttcatgaggtttaggtgggtgggatgaaaaccacagcaaaacagtwtggcaggaagttcccttgcaaaagattcatgtattacctttgggttatggcttcttaaaacccaaattcttaagtgttctgaggttaaaagcttcctatttgccacaaagtttaagaatgatgatttagcttgtgttagtttacaaatgcaattttgcatttggctgtctttagatgaattagtctttaattttcacgggggaaggtcactattagagagatggattctggattcccgacagagctcatttgggaaatgaaactgaggaattctgcttaagatacacagtctacctcttctccagaaatgttcttggttgggagtgaggtgagaagggaactggctgagtggttcaggtctggaaagtgtgttaggttgttctagatcactgaggtaaatggaggaaaaataagggtgtagtaacagcctataaactt

SEQ ID NO: 824761 - DNA, 556 bp, Homo sapiens
aaatgtttgtcaaaagccttattgagagaagtcatatttagcaaaaaataattggagatcatacagtattccatgttctcagatgctctaaaatctaaccatggattatggcagcttggtaaagaactgatgatttatgtagaattgtaatgactatccccaaatagcttcactgaattatggacctgtgtaatgggtcagtatgagagacagtccagtgaaagtctttgttgggtctactatgacaatattgttgctgtttcaaatgatgtccactttatgcacagaagaaaattcttacttcatcctggaactgagaagtcaattttgtaaattattagacttctgttttcaagatagcacttagaaacctgagaaacaaaagcacagtccattaaatacaagtcaattttaaataaaattatttaataaccttaagattattactacaagttccattttatgtctccaycattattttattttctgttacttaaaaaaattagtctattggtgtataatatatatacaacaaaattcaccaatttgaagtata

SEQ ID NO: 824762 - DNA, 619 bp, Homo sapiens
gaatttcacatcaataaaatcatatagtcttttgtgtccgaactctttcagttagaataattgttgtgagatttatctgtgttgttgggtatattggtagttcattcctttttattgctgagaagtaattccattgtgtgactatgcagatatgccaaaatttaggttgattctaatttggggctactataaataaagctgctatgaacatgaattcactagtctgtgtgaatatatattttcctttattttgggtaaatgcctaggtgtgagattgctggattaaatggcacctgtatgtttaactttatatgaaacagccaaattgttttccaaagtggttgcaccattttgcatttactagcaatacacaagcattccagtggcttcacatccttggcaatacttggtattgttagactttttaattttagatattctagtgcatatgtagtaggattttattgtggttctaattagtatttcccaatggctatcaatatcaaacatattttcatgttatttgccattcatatattttctttggtgaaatatcagttcaaaatttttgcccttcttttttttwaaaaaaaatgaaattgggctgtggtcttcatat

SEQ ID NO: 824763 - DNA, 613 bp, Homo sapiens
tttgtttatatgtttatagatgtttatgccttgcaaaacatattaacacataattttctgatttgatcttttcaataaccttaggcttgaaaagtattactatccaatttgacagatgaggaaagtaactcaggttaagtaagtcatccaaggtagcacagtaagccatggcaggttctagattagaacttgagttttaaaactcttattcaagactgagcctgagaaacagccttaatatatataagtatcaaatgtattttaggattgtgtaaaacttgctttatgggtgatatacaacattttgtaaacttgcttttctgtactatgaaggcagtcaccataaaaattttctgaaaatatgaaattggaagaccatgtgtatttttaaaaagagcagaattagcctctaaacccttagtgagaggataatttggatgaccataccttttcatcaaccgaggcattggttcaggccctcaggcctgaaccccagttggaggatcatttagaaarcactttaatacatcttacaatataatgatacatttgtcacaattaatgaactaatactaatatttaagtcattaagtataattaatactttactcac

SEQ ID NO: 824764 - DNA, 593 bp, Homo sapiens
tttcacaaaaattaaatcaaagtgtattgaaggcttakatgtaaaatgaaaaactttaaaacttctaaagaatacaagaatctacatgaatttggaattcagggacgagttgtaaatacaacacaaaagcacaatccatgatagaaaagattgataagttggaccttgttcatttcattttttatattttcgctccagtttttataattctattttcaacaggtataacataaactttatatagtatgtgttctgtgttttccaccattagtatatatttttctgtaccattataaaaagaaaacactgttaataatataaagaatttctttttaaagaatggtattttctgtgagatgcattgttcagtgggatactactatggtgggtatattcctttttgggtttgccctacccaaagccactccctataatttgagtaatgctgacccacctctcattagagggaagacaagaaacttgaggttagtaggtaactctgaccatggtggttggttcagggagggcacatgtactatgttaggtcccaggtcattttctggagctattgggactgttagcttccagcttcc

SEQ ID NO: 824765 - DNA, 604 bp, Homo sapiens
ttccaatttctccatattcttaccaaatcttgctatttctgtatttttaaaataatggccatcctagcaggtatgaggtaaaatatcattgtgacattgacttgcatttccccaattattcrtgaaattgaacatctttttgcatatttactacttgtatgtcttctttgaagaatgtttattcaagtcctttgcctattttctaattgattttttttttctatttagttttaaaagctcctcatgtattttggatattaacccattattatatgtgtgatttgttaatatcttcccccattctgttgattgcctttttattctgttgattccttcctttgctacacagaaactttttagtttggtgtagtcccatttacctatttttgctattgttacctgtactttttgtgtcgtatccaagaaatcattactaagaccaaagttataaggctttccccctatgttttcttccagggggtttatagcttagatcttacatttaagtttttaatctcctttgagttgatttttatgtgtggtgtaagataagggttcattttgcatgtaaacattcagtttccccaacaccaattgttaaaga

SEQ ID NO: 824766 - DNA, 630 bp, Homo sapiens
tttttatgtgtggtgtaagataagggttcattttgcatgtaaacattcagtttccccaacaccaattgttaaagaaactgttctttcccccttgtgtagtcttggcatcattgtcaaacgtcaggtgactaaaggtatggctctctattctgttccatttttctgtatgtctgtctttatgccagtaccagactgttttgattcctgtagctttgtaatatgttttgaaatcaggaagtgtgaagcctccaactttgttcttctttctcaaagttgttctggctattcatggcctttgtagttttgtatcaattttacgtttgttttatctacttctaaaaaaaatttcaattgaggttttgacaaagattgcatttaagtctacagattactttggatactcaaacgcttccaaaagatcaaaaagaagcaataaaaactaccaaattctttctctgaggccagcattatcctgataccaaagccaaagacactgaaaggaaatgaaactacagactaatatccttgatgaatatagatacaaaaataatactcaacaaaayattagcaaactgacttcaacagcacattaaaaggatcatacaccacgatcaacggggatttatccct

SEQ ID NO: 824767 - DNA, 566 bp, Homo sapiens
aaagtaaaaatcatacatgtcctctgcaaagacacaacacaatgtggggaagactagttatgttctttaccctctccatccctcacactcaagtaacaaatcttaatagtttgttgttaccttccattattttctctctgtgttttgattgtagggactaaggtgagatatgtttgtagttagtgttatgtgtttctgagtcacataataaacaatttgatttattagtttaatttgttaatttcatcaagatgaaaccatcagaaatttagggtgaaatcttatcatctcagctcagggctctaggaatagaatatcatcatattaagatgtattagtgagttccagttattgatatctctatattcttagaagttacaattaaataagttgccatttccacattaatctactaaatataggtcctgtttctgcaggtatatattcattctggaaattcaaaagaggattgtttrgggcatcttgaggaacataccctgcacaaaggaattacttaacacagccatggtgttactatgatcatatctgccactatattaattagt

SEQ ID NO: 824768 - DNA, 662 bp, Homo sapiens
ggaactagagttaaactgtaccttccaaactagagattaaagtagcttattgcccttcagtttttgaaactactgggagaagcagaacagatacargattttttgtattatatagagtttcacaaaagaccacaggtaagctgcaataaaaattccacgataggtgtgtggttttctcattcactgtttccgtagaatatgcttattacagaaagacattaaaaggtatccaatttcacagcagctggccagtgccaagtgctcacacagcataagatcagacactgtgccttttttattatatctatttgaattggaatattacaatattttcatctaaaattattttcatgtgtcatatgaaccaaggtacctgagatttccaatctaatataagcatacagcatgaggtttaatttttgggtgctcatagcagagattaattatgagtgctgaaagataacacatgaaatggattagagtttccaataatcctaaaattgaaaaaagcaggtaatacactttaatcacagaataccttatgaaaaactaaaattatttatgattacggttcaactgatggtggcatgagaagcaagaacttgaacagcgcaatttctttagctatatggcatgtcatataaggaaataaatgatctctc

SEQ ID NO: 824769 - DNA, 586 bp, Homo sapiens
gttggtaaaacattgtttctgggtatgtctgtgaggctgtttctggaagagattagaattgggattggtagactgagtaaagcagactcatgctcaccaatgtggatgggcatcatccaatccattgaggacctggatagaacaaaaaggtgaaggaagggcagatgtgctctctcttcttgagctgggacatccatctcctcagacatcagagctgcagactatcaggctttcggagtctgggacttaaacttcccctctcacagttctcagacctttggccttggactgagagttacacaattggcttccctgcttctcaggcctttggactcagactgaattacaacactagttcctagttcttcagctttcagatgacatattgtgagacctcttggccgctatgactgagtaagccaatactcataataaatccccgtttttaaatatctctctatatagcttattggttcagtttctcttgagaactttggctaatacacatggctcagaaccaggatctactgggaaaaagagtttgtaccaataaattggagaaagmgtgttccttgtcatcaaagga

SEQ ID NO: 824770 - DNA, 629 bp, Homo sapiens
ttctttctaacaccttctttccctctgtattcttttttcttaacaccttctttccctatgtatttattttctgttgtttcttaacttaactctcattttagtgaattgaaaacctatagcctcaaaactgagagggaagatttttcttggttaccccattggcaattattgtagagtgtttaaaaaaatttcaagtgtgatgtctttagatagataaataggtaaatcatctatttaccatactcattactactccttatggttttcaccagaccttcttctctcatttatatacccagtgtggattctatacatttttaactctatgacccagacctagagggctgctgcttttctgagaaaagatgaaacttacaagctcttacacaagctaactaagatcagaattgaaacccctggcttgtaatgaggcctattttaatgttctgtgaattttctttgattcacctgtgttttatcacagttgttcacaaaatctttttgaagaggcaaacagttttttagctttaccagggggaagtgaasaggagtgtgtttccacttttggatgctgacacgatggtggcagtggtaagcaaagtgattccactgagaaaagagaaacgagc

SEQ ID NO: 824771 - DNA, 567 bp, Homo sapiens
taacaggttaccaagaggctggattcctatagtaccataccagaaagatacaggttttttttttttttttttttttaacattcctgcaccatgattacatcaatagattttaataaaatwgtttaactggcagaggttcagagatggaagtggtatccacaggtatagctagctaagtcctataaagtcataaaactgtgtttgatagaagttatactgctattctagtcatgtgcaatgaataagaaaaatttgatgtgtatgcatgaaaatattcaaagaaacagaacccattcttagaaattatataatgacagatcagaggcaggatgtatatctatttgtattgtaataaccagtaactggcatggtatacaatcaaaaattgcctcccgatgttgtgtgagacagataattaatgtaacaaacctgtgtggagccaaatgtttgattagtgtggtgccttcaattcaactcctatagtacttcttctgatcttacctgaaaaaaataatttttacaggccaagtactaatgctttcttcaaatggcttctggagaaaataa

SEQ ID NO: 824772 - DNA, 646 bp, Homo sapiens
agatattatctagattatcatgttatcagataacttttatatcccccatttgctatttgtatcacaaatagcttgatrgcaggcaaaagaaaggaaacatcataaataatgcaagcagttacatctgtttttaaaaatttaggttccagggtctcttagaaatcagaatatatatttagcatttggttgacaatgtgacatgttgttcagtgcctgctgagccctcttcttttttcctttattcaattttagaagtgttggcaagataagaataaagtaaatcaaataaatcatctgccaaaaggctcacatgtaaggtacaggcaaatagtgcagaactactgattaaaacaagcagattgaaatccttataacctaaaactctctaagcacagagaatggcaagggaagagcttcaagcacttgaagtggcctagtaatatcaggaacaatgatgtgaacatgaatctaagtgcttgccaagtgctgtgtatttaactgaagagataattgtatgcaatctatggaatccctgggtggatgaaaagtgtggagtttggtagattattaaatatttcgtaatgttttttacattcatgaaagtgtaatataattagatcttggcttaatttgtgcttttgactgc

SEQ ID NO: 824773 - DNA, 646 bp, Homo sapiens
agatattatctagattatcatgttatcagataacttttatatcccccatttgctatttgtatcacaaatagcttgatggcaggcaaaagaaaggaaacatcatarataatgcaagcagttacatctgtttttaaaaatttaggttccagggtctcttagaaatcagaatatatatttagcatttggttgacaatgtgacatgttgttcagtgcctgctgagccctcttcttttttcctttattcaattttagaagtgttggcaagataagaataaagtaaatcaaataaatcatctgccaaaaggctcacatgtaaggtacaggcaaatagtgcagaactactgattaaaacaagcagattgaaatccttataacctaaaactctctaagcacagagaatggcaagggaagagcttcaagcacttgaagtggcctagtaatatcaggaacaatgatgtgaacatgaatctaagtgcttgccaagtgctgtgtatttaactgaagagataattgtatgcaatctatggaatccctgggtggatgaaaagtgtggagtttggtagattattaaatatttcgtaatgttttttacattcatgaaagtgtaatataattagatcttggcttaatttgtgcttttgactgc

SEQ ID NO: 824774 - DNA, 634 bp, Homo sapiens
cttacccaaagcatagcctattaaccaattatttgacataactatggggattatttccagagttgagtgcgtgccattgattgtacactctattttcctttctgattggttcttgtgatggagtgaagatagtacccttagacatgctgtctaatgtgcacaggaataaaaaacctggaaggagaagagaatcattttttctcctattccatctttcttggaggatctgtcatagtattctctttaatcagaaagtggaatgaagcctgttcagccatgatgtaacaccgacactcacgtcactggcgtgaatggaggaaaagagcaatgcttataagttctaatagcagagaacttcaaattatttctgtttaccattggggacaattatgtagttttccagcataccattgccttctgaattatattttaatgcagtgatcagttttcattcttcacacagaaagagttagtccagaatcaggcaaacagcaaaggtgaactgaggtggaggacacatgctcccmagatggtccacaaattggatagtgtcccaaagtagattaaaacttaattgtattatcatctacatttgatgtttgtacagtgtggtgtcagcagatggtgtcaaggg

SEQ ID NO: 824775 - DNA, 612 bp, Homo sapiens
acaaattttataatcagcttgtcawcttcaaaacaaaaagtcttttggggttttgattggcattacattgaatctataggttaatttggggaaaattgtcatcataatattgataaacaatttaacactgtatgtctctctgattataaaggttttctttaattattattattattatttttttgagatagagcctcactctatcccctaggctggagtgcagtggcacgatctcagctcactgcaacctctgcctttggggttcaagcaattcttctgcctcagcctcctgagtagctgggactacaggcgcatgccaccacgctcaactaatttttgtatttttagtagagacggggttttaccatattggccaggctggtctcgaactactgacctcaggtgatccacccgcctcggcctcccaaagtgctgggattacagatatgagccaccgagcctggccctctttaattttttaatagttttttgcagttttcttttttcttttttttgagatggagtcttgctctgcggcccaggctagagtgcagcgacgtgatctcagctcactgcaacctctgcctcccaggtacaagcgattctccttga

SEQ ID NO: 824776 - DNA, 534 bp, Homo sapiens
aaaaaagggtgactgctttagatattaccataataaggctgtgtaaaaaacaatctcaaaacttagttgcaaaaaatagacaaataaattagcattttatactcctgcatctgaagttcagttgatcctggttgtgcttggctgggcttgattggatttcacaacaaactacaagttgggtttatatcatctccatgtatctttattccttcttaaaacccaaggctaccagtcatagccttcacaggtgaaaggcaagagcataagaatgcaagctcaagtgcaaaaaaaaaaaaattatattttttctggtgtcacattcattaacattttatggccaaagccagtcatgagatcaaacccaaagcaagagttgggtaatacagtgcttccaccatgacaggaatgtggatatacactattactgcagaagagttaataattaagagtaatgattcaatttttcacmcttttttttgttggtcaaaattacccatgggaaaaatgtactcattcttacccaaacacccctaa

SEQ ID NO: 824777 - DNA, 644 bp, Homo sapiens
agatgactaagatattaaacttagaagacaggaatttgaaaatggccatatgactatgctcaatgaggcaaagaaaatgtgtgctcaaaattatgaacaagtagagaatctcagcatgggaataaaagtggtaagaaacaagcatactctaaattctggaactgaaaagtacaaacaaaacaaaattcactggtttggtttaataccacagtgaatatgacagaagaaaaaatcaaggaatttgaaacagattaacaaaaatgatctaatctgaaaaatagatactaattgcaaaataacataatgggaacttcagtgacctgtggttgagtatcaaaaagtttaccatatacataatcggagcctcggaaggaaaagtgaaataggaagaatgtggcagaaaaatattttcaacgataatgtccaaaatttccctccaaaatgtattaaaaggcataaagaaacaaggaatgctcaatgtaaatgatgagttaatgggtgcagcaaaccatcatggcatatgtatacctatgtaacaaacctgcacgttgtgcacatgtaccctagaacttaaagtattaaaaaaaaaaaaaaaaaaaagaagcaagaagttyggactactccagtaagataaatacaaagaa

SEQ ID NO: 824778 - DNA, 617 bp, Homo sapiens
ttccttgtttaacaacacttcttccttgtcacacatgattactgggaaattagtacatctaggaaactccactaggagagagcacctggaacattgtgcctagttcctcctggattttgccccatttcccttttcctttttgctgattttagtcgatatcctgttgttgtaataaataaataattttgtaagtgtaacagtttttctgaggcataggagtccttctagtgaatcaccagtattgaaattgctcttgggaacccccaacacaactacaaaatagttttatatgtttcttaaagttatggtgacatgcaactcattttccaaactgcatgtactcttcagagtgaaatgaggcactattaatagttacatgcaatataagggggagattaaggttcaaattgaacatatttttacgaggaaatttttatcataagtgaaaataaagacaaaagaatttagtaattaggtatcttaaggagagagccaaaactttggaatagacagtgtgaagagtattcactgtgtcaaataracaaacataactgaattgccaaagagtggtcagagcccagttggatttatgagaatcaatttggaatgagtcagat

SEQ ID NO: 824779 - DNA, 624 bp, Homo sapiens
ttctagaagagaatgtgtttgaagtgacattcaaatttttgccaggattgagttccatgaagacataggagccctaattttcctggtagctgttggccagcagtcattctcagcttctagaggctgccctcattgctttgatcttgactcccctcctccctcctcgaggccatcaaggaaaggtcaagcttctctcgtgttttcaatctttcctctacttccctcttctgttgcatctctctcactgctcttctaccttcctcttctaattttcagtgtccatgtgattagattgggcccacctgaatagtccaggttaatcgccctattttaagcacagctggtgagcaactttttattacatctgtaaaaccctttgccacataacattaatatattcacaggttccagggatatgaacatggaggttgagggggaccattctttctacaaaaccaaaagcttatagcattcagtttttcagcattcctaatattccatcagttackcaaattctaccaaacttttgcatactctctaagtaatcctgggagttcagtttatgtccctactctgaaaaagcaaagcagacttctgaaggtgtgttttcattatttcttactg

SEQ ID NO: 824780 - DNA, 599 bp, Homo sapiens
aaagccaatttaaaaagcctctataaaataatcattcttggatttgatggcaagatggccaaataggaacagccctggtctgyagctcccagtgagaccgatgcagaaggtgggtgatttctgcatttccaactgagtacccagttcatctcattgggactgggtggacagtgggtgcagcccatggattgcgagccaaagcaggctggggcatcgcctcacccaggaagtgcaaggggttgaggaattctctcctgaactcaagggaagccatgagggactgtgctgtgaggaatggtgcactctggcccagacactgcactttttctaagaccttcgcaacccgcagaccaggagattccctccagtgcctatgccatcagggcccagggtttcaagcacaaaactgggcagctggttgggcagacaccaagctagctgcgggagatttttttttttccatatcccaatggcaactggaattccagcaagacaaaaccattcactcccctggaaagggggctgaagccagggagccaagtggtctgcctcagtgggtctcacctccacagagcccagcaagccaagatccactagcc

SEQ ID NO: 824781 - DNA, 540 bp, Homo sapiens
gcttgcaggtgtccagctgtcctttcgcagtagacacatggtggtctcaggagctaacatcggcccttctacaagccagggggacaccaaacacttgcctgtcaatcgagctccactcagctgggttcagacaagctcaggggctaccccaggctcagcagtgccgactatagccttgtgcagttactgctgcacacacgtgaggacacacaggaagggtacgcatttgacacaagcttcccatggaaataccttctcaaacctggagcagggtgagaatgttgcagccctgggcccctcctgggtcagaagctggctcagcccagcgttcacagaggccagcctcccagagcctgagaagaggcctgcaccaggcgtgggcacagaaggatgcagattgtgcaacaggagccaagggctggagaggcattctggcgagagatttggaaagcttctggaacagggtgaaacattcatcaggtgacccargggataggctctccaggaaggaggcccagctccagcagtagccagagttct

SEQ ID NO: 824782 - DNA, 612 bp, Homo sapiens
tcaactaatggaggtgctgtgtaccagtctcgtgaaacaggacgagcacccctccagctgtcccctgcaagtccaggagcctggccacgggtcagaatggcttccttgtgggagcagtccctgtgaggagtaggacttgaccccaatccaaaggtggcatttcgttggctcctgaggcacatgggttgctaggaaatggtaactaatttaggcttggctaattcagattagtgtattttttcccaaggattagttttgttttctttcttcccgttgtgactggcatgcaatctgttcttttagcactcaatatccctgtaatttgaggtcctgctcattgcaaaatagatcaaacaagctagataatttccttcccaggttttctgacaccatccaaactgcagaaatcatcaaactttaatttatgctatggtcttgctgctgcattttgggtcaggtaactggttaattctgaaaggaaataakactattcaccatacatccgaggactgggtaatagggaattatttctactatattgccaatactgtgctacaatagtctctagcaaaagccacatgttactgtatttaaaatctgtcacttgatcac

SEQ ID NO: 824783 - DNA, 590 bp, Homo sapiens
aaccccgtctctactaaaaatacaaaaattagccaggtgtggtggtgggcacctgtagtcctagctacttgggaggctgaggcaggagaatcgcttgaacccagraggcggaagttgcagtgagccaagatcacgccattgcactccagcctgggtgacagagtgagactctgtctaaaaaaaaaaaaaaagactgaggttagcaacagttgcagtagttataatgaacagttcatttttctgagttgtctgggctgtccagcttcagtatgcagtaagagtaaacaagattgatactctggactgagtaagcaccactggaatctttgaacatcaaataaaaaggtactggtagaagaaaaaacataattttctgttaacatggccaaatgaggccttaattaattaagcacctctgaatggcaaagcgggacacaaagacagggcaccattcagaatacagaattatgaaacccatggaaactgcataaatatcttttctttccaaagtcatcctaccataaagagattatccatggctgaattcacaccatcagagtccacagttcctgcaagtgatatgaacttgg

SEQ ID NO: 824784 - DNA, 590 bp, Homo sapiens
aaccccgtctctactaaaaatacaaaaattagccaggtgtggtggtgggcacctgtagtcctagctacttgggaggctgaggcaggagaatcgcttgaacccaggaggcggaagttgcagtgagccaagatcacgccattgcactccagcctgggtgacagagtgagactctgtctaaaaaaaaaaaaaaagactgaggttagcaacagttgcagtagttataatgaacagttcatttttctgagttgtctgggctgtccagcttcagtatgcagtaagagtaaacaagattgatactctggactgagtaagcaccactggaatctttgaacatcaaataaaaaggtactggtagaagaaaaaacataattttctgttaacatggccaaatgaggccttaattaattaagcacctctgaatggcaaagcgggacacaaagacagggcaccattcagaatacagaattatgaaacccatggaaactgcataaatatcttttctttccaaagtcatcctaccataaagagattatccatggctgaattcacaccatcagagtycacagttcctgcaagtgatatgaacttgg

SEQ ID NO: 824785 - DNA, 538 bp, Homo sapiens
tttttaatactattatgcactttgaggaatcagggctccttggagaaatgccttttccatttttggaagcaaggaaggaacaaggtgagccttagaatatcttgtgccagaaaacaagaaagtgcttgaagaatgatggaaatatgtcgaaatggcacagaagacaacttgcaggggctcactggccaaatcgaggacagtgtgaacatcaaaataaataatagtaatggactataactccttatgatttgaataaaatagaagccatgggtccatactgatataataaataaatgcatgaccaggcacggtggttcacacctgtaatccagcacctgggaggccaaggcaggcagattgcttgagctcaggagttccagacaagcctgggcaacatggcaaaaccccatctctactaaaaatacaaaaattagccaggcatggtaacgcgtgcgagtagtcccagctactcaggaggctgacgcgggaggattgcatragcctgggaggcagaggttgcagtgagctgagatcgcgc

SEQ ID NO: 824786 - DNA, 636 bp, Homo sapiens
aatccatggttgattctgctggggaacaaacattaacacagattagatttttctgaaacaggatcacaccatcctcttttttaatttwgtacaaaatcttccttcataaaggttcaaatacaccaaaataaattgtaagtgaacagaaaagttaaatataaaagcaaaaacattttccaaaagtaggaaaagaaacagagccaagtattttcctgatctagaaaacagaaaaagatttttttccgcaaaaagaaaccctttgaaacaaattacaaaggaaaatatcaatatattgaaaaatataaaacttccgtgcctcaaataaaaatgaaaaggaaaacaactaattatgggtaagtgtttgctaaatatgtcagtgagtattggtcttgttatataaattttattgatttctcatacatcaataagagcattataaatggccttataggcaaatggacaaaaagacataaacaagctggagtcacaaaagaggaaatacaaatgtcccataacatatgaaaaatatgcaaacaattaaaaattaaataattaaacaattaaaaaggtagttactaccgttccctgtttaagtgacgaggactcagtgtgagacaatgtgttaaagtagactca

SEQ ID NO: 824787 - DNA, 655 bp, Homo sapiens
caaaaagaaaccctttgaaacaaattacaaaggaaaatatcaatatattgaaaaatataaaacttscgtgcctcaaataaaaatgaaaaggaaaacaactaattatgggtaagtgtttgctaaatatgtcagtgagtattggtcttgttatataaattttattgatttctcatacatcaataagagcattataaatggccttataggcaaatggacaaaaagacataaacaagctggagtcacaaaagaggaaatacaaatgtcccataacatatgaaaaatatgcaaacaattaaaaattaaataattaaacaattaaaaaggtagttactaccgttccctgtttaagtgacgaggactcagtgtgagacaatgtgttaaagtagactcactcatataatactgaagggcgtgggaaattagtgctatcttcctggaaataaagatgcatacttgtctcaagagcattaaaatgtgcataccatttaatccaagaatatattagagaaactcatcagaaatgctacaaatactgatgtgcaatgatattcatcataggattccttgtaatacaggaaaaaatgagaatgatctaacattagggaaaggattaaattgtggggcatacgttggttagagtatcctctgcttctat

SEQ ID NO: 824788 - DNA, 596 bp, Homo sapiens
aactggctgatcataatcaaaagcattgcgatacctttctgactaattatactgcacatcttctggaaatggatattttgtcctctttggtgtctatgtaaatgttataaaagtttratttttttgaaaattgtttttactctttgtatcacttattgtttctaatacggtgattgttcaagcactgtagccctgtatctgaaagtagcacttggtgtagaagacattcttgtttaaaaacattggcagaatttatcgttttgtttgttttttgtttttttcttgtcttttggtacagaactgaaaaaatcacagtagtatgtcaccaatgttatgtaatcagcaatggtatctcttgttacagatttttaaacagaagttattattaaagaaaagatctgcagctttaagtattataacagtgaatttccatagtaagaaaaggcaaaaatatctctttctactgattctggagtttttccataatatttgccttacatgagatagattcatttgcttcagtgcttcttcatatatgccaagaaacatgtgaagtatatacttattccatattaatttacctcctgtcacttaca

SEQ ID NO: 824789 - DNA, 607 bp, Homo sapiens
gtttgggtgggagtgccttgtgggaaggacagcactagtgcctgggggatgcccaggtctctgtggggtgggaacctggactcctgctaagggggctctgggggctctttccagggctgaccgtggcgagtggctcgtcagcaatggcgttctggtggtgagtgtgccagtgctctgggaggcggtctggggtccccgggactccctcatgccagcgacttgaggtacaggcccaccgctgcctcagcctggggaccctgggatttcagtttgttaagggaatacaatctcaagggcccaggtaatgaagtgcagaccagcagcagccagggtgctgcgagggtggggtccctgaatggggggtggggttagtgtctgaggggctgtcttcatgactcaggcccgggagctctcctgcttgcacgttcaactggaggagacaggagaccagaagtgtgagtccccaacccactgggacagcccctggctctcagctcttgtcttccccctttaagcattggacaattctccttggggcctgagctttccccttaggccttctcgggggacygtggtgggggatccatctccaccagaccatttcagc

SEQ ID NO: 824790 - DNA, 607 bp, Homo sapiens
gtttgggtgggagtgccttgtgggaaggacagcactagtgcctgggggatgcccaggtctctgtggggtgggaacctggactcctgctaagggggctctgggggctctttccagggctgaccgtggcgagtggctcgtcagcaatggcgttctggtggtgagtgtgccagtgctctgggaggcggtctggggtccccgggactccctcatgccagcgacttgaggtacaggcccaccgctgcctcagcctggggaccctgggatttcagtttgttaagggaatacaatctcaagggcccaggtaatgaagtgcagaccagcagcagccagggtgctgcgagggtggggtccctgaatggggggtggggttagtgtctgaggggctgtcttcatgactcaggcccgggagctctcctgcttgcacgttcaactggaggagacaggagaccagaagtgtgagtccccaacccactgggacagcccctggctctcagctcttgtcttccccctttaagcattggacaattctccttggggcctgagctttccccttaggccttctcgggggactrtggtgggggatccatctccaccagaccatttcagc

SEQ ID NO: 824791 - DNA, 634 bp, Homo sapiens
ctggagctgcttgtccccgatctagaccagagctcgtagctgcctgtccccaccctgcttcctctcacctggtgttagcagggacttggtacaggcagagtgttgcttgaggcacctggagcccrcatgggagctacctcatagggctggctttcctactctgtttcttggttctcagcctagcctgtctgaggagggagacagatatctggtatgaggcctgttggcccagggtgcttcaggaggttcatattagcctgggccgtctcctgggggagtgatggcaatttgggaaaattctgaggcgggccctggggcttccagaaagtgagcgtcaggctcgggggctgagggcaaggagatgaggctcagaacttgcctgggccattttttcctggagcccttaggactggaggagctgggcactcaaaaggctgtttctggcccccagggctgactgagaactggtcccaagacctgtgatcaggccttagctgtgggctgggtggccacttgacctgctacctcttcttcctgtgacttggccttccccatccctagggcctctacaggcctggctctcttcttttccagatcccagtggtagctattatggccactggtggtgggatcc

SEQ ID NO: 824792 - DNA, 428 bp, Homo sapiens
aaggcaaacagggtctggagtggacctccagcaaaatccaacagacctgcagctgagggacctgactgttagaaggaaaactaacaaacagagaggaatagcatcaacatcaacaaaaaggtcatccrcaccaaaaccccatctgtaggtcaccaacatcaaagaccaaacgtaaataaaaccacaaagatggggagaagtcagagcagaaaagctgaaaattctaaaaatcagagcacctcttctgcaaaggattgcaactcctcgtcagcaatgggacaaagatggatggagaatgactttaatgagttgacagaagtaggcttcagaaggtcggtaataacatacttctccgagctaaaaaaggatgttcaaacccattgcaaggaagctaaaaaccttgaaaaaagattggacgaatagctaac

SEQ ID NO: 824793 - DNA, 428 bp, Homo sapiens
aaggcaaacagggtctggagtggacctccagcaaaatccaacagacctgcagctgagggacctgactgttagaaggaaaactaacaaacagagaggaatagcatcaacatcaacaaaaaggtcatccgcaccaaaaccccatctgtaggtcaccaacatcaaagaccaaacgtaaataaaaccacaaagatggggagaagtcagagcagaaaagctgaaaattctaaaaatcagagcacctcttctgcaaaggattgcaactcctcgtcagcaatgggacaaagatggatggagaatgactttaatgagttgacagaagtaggcttcagaaggtcggtaataacawacttctccgagctaaaaaaggatgttcaaacccattgcaaggaagctaaaaaccttgaaaaaagattggacgaatagctaac

SEQ ID NO: 824794 - DNA, 625 bp, Homo sapiens
ttcctgaagttgcttatcagcttaataagcttttgggttgagactatggggttttctagaaatatgatcatgtcatctgcaaacagggatarttgacttcttctcttactatttgaaagttctttatttctttatcttgcctgattgccctggccagaacttccaatactatatttaataggagtagtgagagagggcaaccttgtcttgtgccagtttccaaggggaatgcttccagcttttgcccattaagtatgatattagctgtgggtttatcatatatggtgcttattcttttgaggtatgtttcttcaatacctagtttattgagagtttttaacatgaatgaatgttgaattttattgaaagccttttctgtatcttttgagataatcatatggttttggcctttagttctgtttatgtgatgaataacatttattggtttgtgtaggttgaaccaaccttgtatcccggggatgaagtctaattgaccgtggtggatacgccttttgatctgctgctcaattcggtttgccagtattttgttgaggatttttacatcaacattcatcaagaatattggcctgaagttttttgttgttgttgttgttgtatatctgcc

SEQ ID NO: 824795 - DNA, 492 bp, Homo sapiens
ttttcatttgagacagggtctcactctgtcattcagtctggagtacagtggtgtgatcgcagctcactgcagcctcaacctcccaggctcaggtgacccttccacctcagcctcccatgtaactgagactacaggcatgtgccaccacacccatctggtagtatctatacagatcagagtttacttctatatggtaatggaacaactttgacatgacagaacattcataagcaattttggcatgtaagtaactgttctgatattcgaagctctcaattgtatgataagcaatccaactcaactagttaaacaaagacaaaaaacctctactatataaacattagagaatcttaccacattttgagtattttagtagctgagtaaaagagacaaaatatatgaacatttaaaatgccctttaatgtcagttcatttttttctatgattataatagtaagagytgtgcgtgtgttctttggtttaaatagcact

SEQ ID NO: 824796 - DNA, 682 bp, Homo sapiens
tcagttgctatgatttttattcatgaatcttttcctttgcaatgtttaatctgctgttaatctaatccaatkaatttttatatcagatattgtatttttacctttagaagttttattttagtgtttgtatcttccatgtctctccttaatgtatatagcttttcatctaccttcttaagcaaatggagtacagttacaatagcatttttaaaccattcataattgaagtgattattgatataggtggagtgatatctactatgtttgtcattgttttctgctcattgaatttgctgtttgttatttcctactctttttctgtcttctttttaattgatcattttatatgattccattttatttcctttcttagaatagtaattatacttctctttaaaaggtttttaattgttgctctacagtttacaatatatgattctgtactctcagtccactttcagatgtcattatattactttgtgtacagtataggtacctcatacagaatattctcaacttctctctcatgtcccttgtaatactgctatcattaatcgcacttattcatatttgataatcatgcaatacattgtaatactattatttttaaatgttatgctttacacatattaagaataagaaaaataaaagatttaattttgataccatttattccctctcc

SEQ ID NO: 824797 - DNA, 469 bp, Homo sapiens
gaggagatatgtgtactccaacgtttattgcagcactgttcacaaaaccaagataaggaatctacctaactgtccattaatggataaatagatttctatatatatgcacaaaggaatagyattcagccataaaaaagaatgaaatcctgtcatttgatgcaacatggatgaagctagaggacattgttcagtgaaataaaccaacacagaaggcaaataccacttgatctcattcatgtgaaatattaaaaagttaatcatgtaacgtagagagtagaatagtggttaccactggctggtcaacaggaatgaagatacagttacatacaaagagtaagttctggtgttttattgctctatgaggtgactataggtaaaaataatgtattgcatatttcaaataacccaaagagaagattttgaatgttctcaaagaaataataaaggtttgatattatgtatatgctaa

SEQ ID NO: 824798 - DNA, 340 bp, Homo sapiens; identical to SEQ ID NO: 818992

SEQ ID NO: 824799 - DNA, 619 bp, Homo sapiens
caataatgaagtagttgagaccacaggcctcatcaccctctacatgctattagtattagattcccaaggggcaactgtacagtgaaccgcggtaatsaggttgatagttcatgaaggggctgatgtgacaaattgccaacctgctgcaggaaagcctccctaaccctccagaaggccaatgttattccaattttcatccagttttgctctcattctaaatgtgccagtgctgacaccatacatatttgaatgatttaaatggatacactcactgccccccttagaaaggagagcacctggcggcatgtacatttataatccccttttcaaattgacatgctctcagggtgaatttaatcagcatttgtcacagattttaaagcacaaaaagatgttttattttttataacttatgttagaggtatttgtgagacctgtatcttcttttgctgttctggatccgtaagcactttttagctctattattcctctcttgatagtcgtattaatggacttttgttgtattctctcatatttgaatgaaacatcttgcaggcatcttttcactccttttctctccctgagtgtaattcatataagaaaggcgaaactccactta

SEQ ID NO: 824800 - DNA, 625 bp, Homo sapiens
aatcatataaaaagtggccttttgtgactggattctttcaagtatgattatattttcaaggcttatccatgctgtagcatgsatcagtatttcattcctttttattgttgactaatattccattgtatggatacactgtatttttaaaaacctattccttgatatttatgttatttcctcttttgtgcactggtttttatgtgaacatacattttcatttctcttgggtatatgcctgacagtggaattgcaatgttacattgtaactcatcggttaatactgtgaggaacttccccattgttttctaaaacagaacattttacaatctcatcagcagtgtatgaaagatttatttctctaaattctcgtcaacactcattattttccatctctgtaattacagccatcatagtggacataaaatggtatctcactgtggttttcatttgaatctctgggaatgttggggatcttttcatgtgtaatagtatatctgtatttttgtatatcttctttagggaaatgtgtgttcaaatatttttctcatttttcagttaggttatctatctttcattattgagttatcaaagttcttatgtattctggatatgggtcccttgtcag

SEQ ID NO: 824801 - DNA, 647 bp, Homo sapiens
tacttcctagatacaatgggggtacaggcattgtaaatggttgtaaatacaaccrttccaaataggagaaattggccaaaactatggggtacagtcccagtgcaagtccaaaatccaacagggcagtcattaaaccttaaagttccaaaatgattttctttgattctgtttctcaaatccaggtcatgctaatgcaagatgtgagctccctggacatcattgtccatatcactatcagcattttggtcaaagcctttcaacaagtctctagaaagttccaaagtttctcctatcttcttgtcttctgaaccctccaagtctctaggaagttccaaactttcccacattttcctgtcttcttctgagccctccaaacagttccaacctttgcctgttacccagttccaaagtcaattccacatttttgtgtatttttatagctgcaccccactctctgtggaagcaaattactgtattactctgttctcatgctgctatgaagaaatacccacgactgggtaatttataaagaaaagagcttatattgactcatagttccacatggcgggggaggcctcaggaaacttataatcttggtaaaaggcacctcttcacagggttgcaggagagagaatgagtgcaagcag

SEQ ID NO: 824802 - DNA, 585 bp, Homo sapiens
agggaccccaacttttttacctagtatttccctgcctcctgtacatatcacaagcattagcatagaggtaggaaatagttccttctcgtctatgtagaccatctcttttctgagccagataggagttgaagagattctagtaactacaacaaaattggtgttgggtttctgagtctctaggtagtggaagcttctactgaacctgaattcttccttgacagttcagtgcagttttttgatgcaactgaagcaagtaggtggtggttttgtggtgagcaggagtggatcaaaagaaggaaactagtgggttctgagtttgaccttgagaggcacctgtgagttcccatgagaagctacaggcagcgaaaaagagaacagatactaagaaaaactcactagggagctttggagctatcgagagaaggtaaccttttgaaaagacagaatttctattcgttaattaaccactgccatttaagatatcgwtatcaaagtgcctcatttctaggagcagagtggtgaagcctgtccatatgatttatgtgaggaatcactctgcttagaaaagatgctcaaatgctcttt

SEQ ID NO: 824803 - DNA, 646 bp, Homo sapiens
acaaaatctcagacatggaagagcttatttcagagaacaataaataaaaatacagaaaacccatatattaaataactaaaagatgtgaaayaaaaaaatccctttaaattcacgaccaaaaaaataggccatcaacaaaaactcctaggattaattaaggaaagtagagatgggagaaaaataactaagcatttcttcgtccttctttgctaaggagtcctaagcttctacatatactctatagctatgtttaggaaactacattttaagacttcaacaatgacttattttgtctacagttagtgaaagaatgcagaactagaaaatgaaacatctaggttgaagtacataaggcatctatggcagggctaagtcccagaacttactttcatgtcagctccaggcaagtattctgggaaactaatcacatattatgaatatgactgcgcaatgctagtaacctaaatattacttcctcctttatataatgcctgcaatttttaaaagtatgcaattttttattgaccctgaattattcatttattcatctcacacacacacacacacatacacacacacattcctttaaaaagcagtcaaaaatagagttctatgtttctttatcaaagaatgttacgaaaaaaac

SEQ ID NO: 824804 - DNA, 584 bp, Homo sapiens
tattttgaactcaggaatgaaaataatgctgtttgtttagggctttattgggcaccccaaagagctcattttgtttatcttattaatcctcaaatgctccttcctcaktgaaaaccagcagaagggtttcgtaaggacatcatgtacagttgtacagattgtacagtgcacaaaaataccctgatttgggcaagtggggctaaaatctagccttacttcccttaccaagctgtgaaccccacagggtagtatctacctagagggaatggcttcactaaattctcacagaaaatgggctagaagcaaccctttattcagcgtacaggttcctgttgtgagcagaggagaccatgagaaactcctaaagaaaacatctaagcatcatggtctctagactcaatttccacctacattctctactctctcgggtagactctaacaaagatattttaggtcatggcaatcagctggcaggggccttctcaatataaattgcctagctcagatgttcctgtattagtaatacccaaagtaaagtctgaaaaattactgacaccatcacctgggatacttgaagggaaatg

SEQ ID NO: 824805 - DNA, 605 bp, Homo sapiens
agattgcactattaaagctttagaggtttaaaacttaggactaccattatttgctattttktaaaaagaaactgctagtcatcacaatatgtttcttctactctttctcgtatattgctgacattaaatttaaagactgaactgtacacatttcaattgacaactggctccttaaatgttgctgcttctaaacgttcaatcttagacctcctctcatactgggctttcacacatgaatctacttccacagtttcaacgaccacctattagaggaaaactttccatttttatttttctaactaccatctttcccttgaacctagactcacatttccagctgcctgctggctatttccaccagcatatcattgattttctctgtgaattaaaggcataattataaattctttttccttaccaaacaagaactacaatactaatatgcttgatttttggcactagatgtaataattttaaaatatgcataacttcaactcttgcaaattacttataagcttttaatggatcttgatatttaatgaagtcttacataaattcgtggtaagtcaagaatactttttcagagcaaattaagctactaaagt

SEQ ID NO: 824806 - DNA, 586 bp, Homo sapiens
ttggcctagaggtcacagttttgctatcctaacatatggtatagcattagctgccatgttgtggaaacgttctgcttctcagtgtcrgaaaaaccaatcttcttgcttactcttttttaaccacataaaatggcagttgcctgctcgatagatccttggaattaaagcgctggctggtgttaacaaagtataggcctggattgccatgtgcccattatttaatgtatgccagtggcaataaaagggaacgagaattggataatttagaagttaaagcaggaatcaaatttgctgaacatatactgtcttttctttttctaatatataaataagtatatgtatatatataaacagtgcaatgaaaacagaagacatctttttgattaatagataattatcatgttttctaaaaactagaccatccacaagcatatctttccagttgtttaaacaataaaaatccaataattgccgcctgaggggtgcttaatggtatttatacatgactgtgtataatagggagatttctttttaattaggacctttatctaaaagttacacttttggcagaataaaaattctttta

SEQ ID NO: 824807 - DNA, 564 bp, Homo sapiens
cgctgcaccccgtggttcctgagccctgggctgaagtagccctgctgcattgcctgtgccacttttgctgtgaaaggagaactcctgccctgggaagcttcctcttgctgcttagcctgatgagcaccacaggctgcagcgagacccatctgaagcgtgggttgggaggagactgcggcggccctgtcctctccaagctgctctccatgccgaagcgtgggctgggaggagactgcggcgccccgtcctctccaagctgctctccaggatgggagcgactttgtggggtttgtcggcccttctctgaggtgtcctgtgtctcatggatctgcttatgagcccccttagatgcctctctctcgtctggacgagcaccctccaaaacactgcctaccacccggatctcctggcgcagagtgaggtcacacctgcagcccttaccgcacagagtccctgagatattcggcaagaatgggaatgggctgtgtgtgagtttccsctgcggaagccggctctgctccgtagtctgtctttggggtgtgggatgttccgacctgctgtgtc

SEQ ID NO: 824808 - DNA, 631 bp, Homo sapiens
cccatcattattttggctgcatttcatagattttaatttttgtttcagttcacttgaaaagtattttcctttgaacactcatggtggttttatttagttcacccaaatctcattttagcaaaagataaaaattcatgtaggtttagttcctgtgtgtgcctcataatatcttcacattctgtgcattgaccagtaaatgattgggcttatcagggagatggttgcatggtatattggtgttgtaaaaactatgatgtgggaatttgaatgtttttgagacagggtcactatcacccatgctggagtatagtggtggaatcatagctcagtgcaacctcgacctcccaggctcaagcaatcctcccacctcagcctactgagtaactgagactacaggtgcatgctgtcatacccaattaattaattttgttttttgtagaaatggagtttcactatgttacccaggctggtcttagactcctgggctcaagtgatcctcccacctcagcctcccaaagcastgggattacaggtgtgagccagcacacctggccaggaattgaagtgccacgaaggtgcagaggttttatgttttgtgttctgatattgccaaatacctggcacagtgcct

SEQ ID NO: 824809 - DNA, 570 bp, Homo sapiens
catacacatccaaatagtgtacaaacatgtgcactgtaacatgtacatgcatagagcaaacatccagatccatagtgtatgtacgtaagtrcagtataacatgtatgtacacatagtgtacacacatccatatcaatacagcatacataggtacactataatgtatgtacatgcagagcatacacatccatatccatatagcatatgtacataggtacactataatgtgtacatgcatagcatgtacacacatctgtacagtgtacatgcatatgtacactataacacatgtacatgcatctagcacacaatctatatgcatacaatgtacatataggtacactataacatgtatgtacatgaataaagcacagccatagccaatgtacatatacaggtacactataacatgtatgtacatgaatagcatgtacacgcatctctatccagtgtacacaggtatactataacctgtatgtacatgcatatagcatacacatgcacatttgtatgtacataggtataacatctatatacatgcatatagtgtacacatatccgatgtacagt

SEQ ID NO: 824810 - DNA, 592 bp, Homo sapiens
tcacaaaaccccgactgaaaacagccccttttcatactgtcagctgcccttctttcactagaagacagagtccctgggagccctgtgggaaggagacaccacttcgctgtgggaagtctcaccatcgctgtcgtgccaggagccgttggagtgtccccttctctaaagccatgtcaagcacagtaagaataaatagaggggaagtggaaccgtgagaacatgctcttaaaccctattttacagtattcctttgttaaatgaaatgaaagcaattacaagagaaaaagtaggccgggcacggtggctcacacgtgtaatcccagcactttgggaggctgaggcgggtggatcacttgaggtcaggagttcgagaccagcctagctaacatggtgaaaccctgtctctactaaaaatacaaaaaattagccaggtgtggtggcacgtgcctgtaatcccaggtactcaggaggatgaggcaggagaatcacttgaacttgggaggcagaggttgcggtgagctgagatcgcacaacygcatgccagcctggctgggcgatagagcgagactctatcaaaaaaaaaaaaaaaaaa

SEQ ID NO: 824811 - DNA, 623 bp, Homo sapiens
aataaacaatgatagcatttcattatagccctcagaaaaaagttaagtatccatgagtccawacttacataaataaataattgaatgaatgagtaaaaaataaaggaaggaaaagagacaattcatccttaaggaattccaattaataaatgtaaaaggaatgcagaaaatggaaactcactatgaagcaagctctaccgtaataattgttgcaggcaagatccattgatggatgctaaaattagtaggtaaaaatttgatgagaaacagaatagttgcagagtttcaaagtctttaccacaagatatttgttagtttctaagggaagtactgtaacttcacaacaaagaaacgcagcagacactacctttaccaagaatcaagctgaatatcaccaataataagacataaggaaggtcacaccactttgtaatattcgtgccagaaatgttttattttgatctaatcatgagaaaatgccaggcaaacctaaattgaggtactgaacagtaaccttcaaaagtttcaaagtcatgaatgacaaagaaaaatttagaaactgtcatggattgaagaagactaagaagaaatgaaaactgcatgcaacgtgggaagctgacttg

SEQ ID NO: 824812 - DNA, 623 bp, Homo sapiens
aataaacaatgatagcatttcattatagccctcagaaaaaagttaagtatccatgagtccatacttacataaataaataattgaatgaatgagtaaaaaataaaggaaggaaaagagacaattcatccttaaggaattccaattaataaatgtaaaaggaatgcagaaaatggaaactcactatgaagcaagctctaccgtaataattgttgcaggcaagatccattgatggatgctaaaattagtaggtaaaaatttgatgagaaacagaatagttgcagagtttcaaagtctttaccacaagatatttgttagtttctaagggaagtactgtaacttcacaacaaagaaacgcagcagacactacctttaccaagaatcaagctgaatatcaccaataataagacataaggaaggtcacaccactttgtaatattcgtgccagaaatgttttattttgatctaatcatgagaaaatgccaggcaaacctaaattgaggtactgaacagtaaccttcaraagtttcaaagtcatgaatgacaaagaaaaatttagaaactgtcatggattgaagaagactaagaagaaatgaaaactgcatgcaacgtgggaagctgacttg

SEQ ID NO: 824813 - DNA, 613 bp, Homo sapiens
agtgtctcaccttgttgcccaggtgggagtgcagtgcagtggtacaatcacagctagctgcagctttgtacaccaccacacctrgctatttttaaaaattttttgtagagacaaggtcttactacgttgctcaggctgagctctaactcctgggctcaagtgatccacccaccctgaagtgatcccccctccatggcctcccacagtgctgggattacaagcatgaatcaatcaccaccccggtccctttttcttcttttaaataaaagtagagatttcgccaaacactcgaacctattgggaatttaaaccaaatcaataaggaaaactctaaatattatatagggccttaagttatttggggttatttttctgctgcaaaatttttaggtgggtttattgtataatgaaaaggaaaaaaggaaaagaagcaataataatcaccaatgaacgaaaacaaccaatttattaaattccatcaacccgttaatttagttgggggtgggggtggggttagtctaatttgttatttgactgacttaataaaataaaacaactatacctcacgtgcagtttgtttgcaaatgttacttgcttttaaaactataagtaa

SEQ ID NO: 824814 - DNA, 476 bp, Homo sapiens
gcatatggcagaaaatcaatgaggattaaaaatgctggcaccttagaaaaaatcaaggcagtggtactaaactgctaatagtcattatgttatttactgtcacacatatgcaagtagaaacaagccagttataccggaaaacattcttgatgaagcggtaaagactatcaaggctattaaatctaaatccctgaatacacaactttttaataattttttgataaaatgggaagtgtacataaagcacctttgttgcatactaaagtatgatggttttctccagaaaaagcagttgtatgattgtttgaagtaaaagatgttagccattttgaaacctaaacaacacattgttttatttgaaagcatgagagaaaaatcatggtcatttagacaggtatttggtagactttttctcaaaaataraggaagcaagacatcagtgaaaaaaaaatgacagtatttatcaaaaatatttg

SEQ ID NO: 824815 - DNA, 467 bp, Homo sapiens
gtgatgttacccatttatgaaaaccaaaatcatcaaatttttatcaattgattaaaacaactaaaaatcattaatccagaaattaccctcccagagataaggtaaaattgtcttaacgaatgtgggcatggggaggcagctcagcaattcccctcgagggttagttttatattcctattatttgagttacttgtaaaaataaaaaaattgattgtcttctttcaaagaataacacttgagcaaagtcaattttgggttgcatttacgtaacacaaaataattacttcaaagtggaagggagtgggcagggtaaagcaacttattttatatcatatgctctgctgtgttttgtatacaggtttatttgtccttactaaaatttatgtggaaatttgaycccccatgtagcagtgctgagaggtgaagcctgttgggaggcatttgggtaatggaggtggatcccctgt

SEQ ID NO: 824816 - DNA, 633 bp, Homo sapiens
taaaataatgaagttgcattgtttagaaatggtctgcactaagatttctctctttgttcaaaataccttatctaactgaattaatttgaaatagaaaacactgtatttttaaaattattatttatgtatctgtttattagtagagatagggtctcacaatgttgtgcaggctggtcttgaactcctggcctcaaacaatcctccctctttggcctcccagactgctgaaatcaaggaagtttctacaccaactattgaagtaaataaggactaaaaattgtggatctcttctggtgtccatttacccctttttgtgtagtagtctctgtgcttctttggggaccagatgacacagatcttcggtggtaaggcaagagtgggcttcaagatcaggaagaaagatgctcagagagtcacttaggtaaatacagtgcgggcaattggaacatgggcaactcttagggcagtgttattgtacatggactgtagttggaggtacccaggttcaagcctggctctgctacttrttagtcatgtgattatgactttatgtctctgtgcttcagtgtcttcatctgtaaaatggggatgataataagactgcctcaaaaagttgtcgtgaagaataaatga

SEQ ID NO: 824817 - DNA, 631 bp, Homo sapiens
aactgtaaaaataacataatatgtaatttgtgtattagtgagaggtgaagccagctggacttcctgggtcgagtggggccttggagaacttttctgtcttacaagaggattgtaaaatgcacccatcagtgctctgtaaaacacaccaatcagcgctctgtagctagcaataggtttgtaaaatgcacccatcagcactctgtaaaacgcaccaatcagcactctgtaaaatgcaccaatcagcaggattctaaaagtagacaatcacagggaggattgaaaaaaagggcactctgatagggcaaaaacggaacatgggaggggacaaataagggaataaaatctggccaccccagccagcagcagcaacctgttcaggtcgcctgccgctgtggaagctttgtccttttgctcttcataataaaccttgctactgttcactctttgggtccgtgccatctttaagactataacactcaccgcaaaggtctgtggctccattcttgaagtcagcaagaccacagacccaccggcaggaacmaactctggacatattggctgtcactgtttcaaatggtctttgacacctgcattgctgtcctgaatgcccctacctggtatcccacctttt

SEQ ID NO: 824818 - DNA, 487 bp, Homo sapiens
tagtttaaaaaaaataaaaaaaaaaaatcaaaacaaaaacagtgaaaccgagacactattccaaagtctgggcccttccagccttccaaatacaagaggctctgaaagttgtatayaccaattggaagaacaagacaaaaatatgaacagagccatgacatttcattaaacaaattgtatgtaactgaaggaatcctttctgggactagttcatggcctttacaaaagaaaaaaacaaaacaaaaaaacaaaaccagaagaacagaatgagagtccagtgttccaaatcaagttgttacacatcaatataaacccacagtgtcctggcaaacaacatgctttcattttctgtcttatcctagagctcgaatcctgattcatttcagcagagactccacaggcaacaggaaagactgtggcattaaaatattcatttatacttttgtggtagttcaaaacagtggtcttatttctgggcaagcttaca

SEQ ID NO: 824819 - DNA, 624 bp, Homo sapiens
tgcgctcactaccgtgtgagagttagcttatgaatcttcacaactccacaatgaaagacggtgaaatcacgtgcccaggatcacacagctagtaagtggcagggctggaattcagggccaactggctgcaaggtccgtgtgctgagctgcctctctctgctgtgtgagtttggattctggaacaatcgttggcataactaaccactgagaaaagagacgggggtgaggaggctgccccagttttctttactgttagctctgtgatgtgctgttgttggctccatttcacagaggaaggtgctgaggctaaaagagtttgcccaaggtcccgcagcgggtccgaagtgcccgggcactatgggaaccctgttgcttgtcggtgtctgtttccaagacggcagaaagcctgaccatcgcggggccctggcgggagcgttgccatacaagtttccttccaccagggggagcacgtgccttctcagcaaacccgcgacctgtgagcttcagaaccgggaaggaggggacctkgggcttgtccagcctggagccttttttttttaacagattcggaaaccgaggatcagagcgggggtgtgctgtcccccaaacacatgcgtactggtt

SEQ ID NO: 824820 - DNA, 672 bp, Homo sapiens
ctttgaaggggtaatttggttaaactgagttaattagggtgagtcttaatccaaagtgactgttctcctgaagaggagattaggacagacgcaaacagagggatggccacataaggacatggagaagacggcgtctacatgccaaggggagcagccacatccctgcctccagcatctctgtttagccagcttctcagtaccccacacaggcctccaaaggaatctgccgacactctttttttttttttttgagacagtgtctcgctctgtggcccaggctggagtgcagtggcatgatctcggctcactgcaacctctgcctcccgggttccagtaattctcccaactcagcctcccgagtggctgggcttacaggcatctgccagcacaccccctaacttttgtatttttagtagagatggtgttttgccatgttggccaggctggtctcaaactcttgacctcaggtgatccacccaacttgtcctccaaaagtgctgggattacaggcatgagccactgtgcccgactcctgccaacaccttgatcttggacttccagcctccrgagccacgagagaagaaatttccattgctggggccaccctgtctgtgctgtgttactgcagcccccagaaattgatacggatcccaagcactcaatattgccctg

SEQ ID NO: 824821 - DNA, 640 bp, Homo sapiens
agagatggtagccatcagttgacaggatcaccaaatcccaaatctccatttcctgttgttcctggcatgctgttttaggacagtcctgaactggacttgcagtctatagaagacacacgcttgggtgttccttgaatgacggggctgatggagataaagctgccattcagatgcaggtggactctgaactctgcgaggaaagagatgctctctgcagctggggacagtgctgctctcccaggccaagcacgtctcccaggcatctgatgggtcagtgcgcagttaatgagtgtgttgactgcacagacactgcgtgcagctctggggatgaaaagatgcgtaagacaaaggggccaggggttgaaggatgagggtgtgctggtgggtgacggggagcgggcgtgagcaggtcggatagcctgctgtttgctttctggtggggaagcacgctctccactgatgggggacaccatatggggctggggacctagaggaacacattatagcccatccagcacagcctccagggagaggaccccgcaaagccccaggatgwctacccagcccacgcatgtggccttacctacagcctgggttgctccctcagctggagaggctaccttgtgtggccagaaccact

SEQ ID NO: 824822 - DNA, 605 bp, Homo sapiens
gattgaaaatattacaggacagagtgtcacgggcactatgtcttttgaacgatacaaacaggaatgcgttaggctgggagaagctgtaagaaggtgtccctgtccaccacctcatgggtagaagatgctcccagctctgcagccctggatattgtaggtgagactcacggtatcaaaaccgaagctggggtcagaggggagagtgccagcaggtgacggggtcaggctggagtttggactgacgggggaatggccgagtcgcctgtccccaagccgggccccaggtctctcatgccagcagagcctccttggggatgaatcctcagcaccaggcccagctcctgggcgctgggctgcatcctagaggaaattgtaacggccggcgtgggttgagcagccctcgtggtttgtacttgcagcctagctaggccctcgatgggaagtaaggctgttttctcatcagaccccatcagtgtcaccacgagcagctgtgaattctccttcttggtcttagkcttctctggggttgacagtgtgaaggcctctggccaccaggcctccctgctagacactgggtgggggcaacgtcaagggggcacctggct

SEQ ID NO: 824823 - DNA, 651 bp, Homo sapiens
tggatttgctttcatttgagctagtatcagctcttttcagatgtatcaacagataaaaagttaaataggaaagtggcttaattgctgtggcaccaaagcgtgggcggcattctctctttaaatgttgtctgggtacattgcaatacgcttaggagaggcatgagtattgtccctgttgagtatcatttgcttaggcgtattctttttagttatttcattttgttacactttttgataatgataaataggaaattattggcttcattttaaaacgtggtaggattgcaagtccgatgctgaaatttaaaattctcaaagatggaaagtggggaaataaaatgagtggttttcattcttcccaaattcccactccccttttctgcttcctgttctttgctttctcttctgtctgtgactcggtgactcttgtcttcttctctttccatcattctctgtcttctgttaagccagccaacagcaagacaaatgagactgattctctggcatgtcagttactctgttgcatgatctgattatttttccgttttggtttattatatatggctgaaagcttcrtcgtcgtattccaatgactaaagtaaacagtatttatggtttttatgttaagttttatgttatataactacacag

SEQ ID NO: 824824 - DNA, 577 bp, Homo sapiens
aaggaaaggacagactagctacacagagttaacggataaaggtaaaaacacaccataaaatctgcagagcaagaaaacacctaaacttcagtccctgaaaaacagaatatagttcttaattttctttaaaacttttcaaagtttctcctgaagtctgcctatagccaggcatcaaatacacacttacacttatatatacaaatgtacatccatttatgtttgtgctaataaaggtatgttttacatatgcgaatatatgtggacacagacaggaaaataaataggcagatgatagatattctctcactcacacatgttaattttcagataattccctctagaccagggattttcatggagcaaagcatttgtcctgctgatggggctgccttggtctacactgacatatgcgatgagcaaaggacagtggcttttttaatgtagaarccacaagagaatatgtcatctgatgtgcaaattacctctccagaagtatgattacttacaggcgagtcctaaaacacatgccctctgccgatagcacaccaaatacagccaaccacggtgcaactttgga

SEQ ID NO: 824825 - DNA, 643 bp, Homo sapiens
attggtgatattgatatgaaagtcagatttactgagaggtaatgttcagccttggaagcatcaccaaaatgtgtatataaggcctttgtccactaatgagtgtccttttatgtgactggttttgtaaarccttacactgtgaatggaccgtcaatcaactcgcagctgcactgaggccttcggatggctgtatccatggcaacgtgccaaaaatggcggcgcaaattaatccatttgtgtgaaattctcagtgagagtccactttcatctttcagaaactactgttaggaagtctgatgataatgtaaaatactaagcaaaagcaaaatagtgatggactatccacaggatcttctccctgtaaacagtgggacttcttttcctttttatctgctagagatgacagagcagagttggggatgtaatattaccaccataatgttctttttacaaaaaaagttacattaatttaatgttcacatataggcttctttttcaccttctctcacaatgctatctaatcagcctggaaaataagtacaatgatttacacagtggtacaaaattaaaagtaatcttttatcttgatgctttattgctaatagtatttgtatagcatatagcatatagcatgagaggtact

SEQ ID NO: 824826 - DNA, 684 bp, Homo sapiens
aatgttcagccttggaagcatcaccaaaatgtgtatataaggcctttgtccactaatgagtgtccttttatgtgactggttttgtaaagccttacactgtgaatggaccgtcaatcaactcgcagctgcactgaggccttcggatggctgtatccatggcaacgtgccaaaaatggcggcgcaaattaatccatttgtgtgaaattctcagtgagagtccactttcatctttcagaaactactgttaggaagtctgatgataatgtaaaatactaagcaaaagcaaaatagtgatggactatccacaggatcttctccctgtaaacagtgggacttcttttcctttttatctgctagagatgacagagcagagttggggatgtaatattaccaccataatgttctttttacaaaaaaagttacattaatttaatgttcacatataggcttctttttcaccttctctcacaatgctatctaatcagcctggaaaataagtacaatgatttacacagtggtacaaaattaaaagtaatcttttatcttgatgctttattgctaatagtatttgtatagcatatagcatatagcatgagaggtacttccagcatcgaatctgaaattaattgttagcttcytctgttatgtgaacagaagcagctaagtctttgtctcttagaaagg

SEQ ID NO: 824827 - DNA, 613 bp, Homo sapiens
tctattgcatagacaggctgcaattttccaaacttctatgctgttttccttttaaaactgaatccttttaacagtatccaagccaccttttgaatgctttsctgcttagaagtgtcttctgccagataccctaaatcatctctctcaagttcaaagttccacaaatctctagagcaggtacaaatgccaccagtctcttagctaaaacataacaagcatcacctttgctccagttcccaacaagtttctcatctccatctgagaccacctcagcctgaatttcattgtctgtatcattatcagcattttggcaaagccattgaacaggtctctgggaagttccaaacctttccacatgtttatgtcttcttctgagccctccaaacttttccaacctctgcagttactcagttccaaagtcgcttccatgctttcaagtatcttttcagcagcaccccattcttgataccagtttactgtattagtccatttacatgctgctgataaagacatacctgagactgagaagaaaaatagctttaatggacttacagttccacgtggctggggaagcctcacaatcatggtggaaggcaaggaggagcaagtcaca

SEQ ID NO: 824828 - DNA, 549 bp, Homo sapiens
attggtatttcaaaagggaaaagatagcaccttctcagaactttcagtcccaatttctcacttgtattacattattgtagttgattatccttggtcaatattagggatgagtcagattttttactatgtctttattagtatatacagcaattaagagtgccgattttggaaaagacagatctgggtttgaatcttgggtcatcatatatggtttacgtgatattggacaggttatctaagctctctacacttaagctttctcatttgtaaaataggaatgttaatgcttactgcatattgtcattttgaggattaaatgaggtaagatatacgaaacaaacagtacagttactgtcaaatggaaagtcttaatgaatctgacatgattattaatcatttggtacattttcagcaacataattactcaaattgttaataaattattgaaataayataaaggaagggattatataaactattgggttataaaaggtaacatattgtctgcaatatctgcatatccactaaatcattctctgttaccacttg

SEQ ID NO: 824829 - DNA, 598 bp, Homo sapiens
ggggccaatattcaacattcttaaaggaaagaattttcaaaccagaatttcatatmcagctaaactaagtttcataagtgaaggagaaataaaattctttatgtacaagcaaatgctgaggggttctctcactaccatgcctgtcttacaagaactcctgaaggaagcactaaatatggaaaggaaaaaccggtaccagccactgcaaaacacaccaaaatataaaaccaatgacactatgaagaaagtgcatcaactaatgtgcaaaataaccagctagcatcatgatgacaggatcaaattcacacataacaatattaaccttaaatgtaaatgggctaaatgtcccaattaaaagacacagactggcaaattgaatacagactcaagacccatcagtgtgctgtattcaggagacccatctcatgtgcaaagacacacataggctcaaaataaagggatggaggactatttaccaagcaaatggaaagcaaaaaaaagaaaaaaagaaaaaaaaaagcaggggttacaatcctagtctctgacaaaacagactttaaaccaacaaagatcaaaaacaaaaaagggcattatataa

SEQ ID NO: 824830 - DNA, 620 bp, Homo sapiens
agaataaacgattaacacacatatagataaatcttggaaacattacgttgaataacagaagccagacataaaagactacatactatataattccactgacaygaagttcaagaaagacaaaagctaatctatggtgaaagaaacagaaaaatggtgatagaaaaaaaaattttttttttttttaagacagggtgttgctctatcgcccaggctggagagcagtggcaccatcatggctcactgtagcctcaacttcaaaggctcaagccatcctcccacctcagcctcctgaatggctgggaccacaggcatgtgccaccatggcccaggtagtttctttttttttgagacggagtcttgttctgtcgccaggctggagatctacgcttatgatctatgcattattttattatatctttaaggatgtggggctaaaaggaaaaagcatttaaagctttgaattttcttgagcctggtttgggttgtttccataggttttaatatcaagtactgttgtgatggttaattttatgtcaacttgagtgggctgagggatgcccagatacctggtaaaatatttctgcaagagaccagcatttggattagcagacagagtaaag

SEQ ID NO: 824831 - DNA, 552 bp, Homo sapiens
tatggagactccagagaagtctggcttcatttgagttttggacaaagacctgggaagatcttttttttttcacatttttctgtcattctcacatgcttataaccaaaaccactcttaaacgaatatgtgtttttccttgctagtaagggagaaagtgaagaggcattcctgctttgcatgtactttctgtgtcctcctcagtattttccatcctcttgttgaacagaatagattgcctccagataacatttgtttcattctgtgattttaatagcaatgaagcaacttgttttgcaggccctgaatccaaaattgagacatagcaatctggacaaataccaaagcttaattaagtctgctatcctggtgataaatatggactaaaaaattattctaggagatagagtacatataacattacattcttctctgtcagrtgcctcatcagcacagaccacagtgagatacaacctcatacacatacagttttagtaccttaatcatattcataaaattatagatatggatggtttctcccaaggttaccatttc

SEQ ID NO: 824832 - DNA, 578 bp, Homo sapiens
tatttttgtaaatcaaataatgtgtatttataaacatataaaagattgcatgtctaatcactaaaatttcaagagtagtagttgtcactgtgtggtgggattatgagtaattatctgcactttctggatatatgcaatgaaaaacaagacactataaccctcacatgaactcacttgactccatattttgcctcttttttcagaaatataagccgtacaacaatggagctgccaatcaaaagtggcattacatgaaaaatataaaagcacttgtggcctttcatagcactgccttggataaggaaattacatcagcaaattatgctggtgtctgtacatcatctgtgattaaagaagaaaacattgatcaaccagtaagtggttccttcctctcaaagataaaagaaaaatagggtaaaagagagtaatttaataaaatgagaaaatttttttccctagaaaactttatgttcmtacaagttgaatgctgatgtttgagtgaaatcacttagactctgattctggtaggaaagaatgaaggaaaattgtgagagaaaaagaattaggtagtttatatt

SEQ ID NO: 824833 - DNA, 515 bp, Homo sapiens
caaacagaaatgagcttcggggtaagcctaaatgttttggagtctctttgccacagcagcttagcttaacacactttctagtataatcttgggttttttcattggccccagtcttttacattttcctgtgcacttcctctgaacattttactgctttttctgctatctacttctgggaaattttcatgtgtttctgccaccattaagtcatatccttcctaattctcattgctgttttcgtaaattcttgtcctgtttttccttctgattttcatccacttctccaagttcttcaaggaacactcctataggcaggaagcgttagctcttcagaaatattggcactaaaaatatgtttttttaaaaaatctccagggccactcctagggtgtgcagtgccctgcaaagatagtttttgtagggtacttgcctatgtaaacaacacaattttagaattcattccaaaacttacaggtctgtgtgaggtatartgattaatggatagagaagagatg

SEQ ID NO: 824834 - DNA, 517 bp, Homo sapiens
acgatgcacaaacatacactttgtacactatttcaagagattaaagaggtccctggaggcccaccatatcacactaatggtagaatttgaagcaaaccaatytaaaaaacagggaattgttttcttttttgttcgattaaagaaatgttccatatgcacccaaaaaaaaaaaaaaaaaaagagagagagagagaaatgtgtaatcaaccagcatggacctaacagccatcaacattctgccattctcatttcatccattcccctcaacttttaaaatttttatttatgatagaatgtcttacaacaaatctaagatagcttttaattttatctgtaaatactacaatgtttccaacttatcaggactttttttttaacattaccattgaaccattattggacccaacaaaattaataggacttccttaatgtcatcagatagccaagctgttttatatttctcctgattatctcaaaaataacttttttacagtactgtagttggttcaaatttgga

SEQ ID NO: 824835 - DNA, 451 bp, Homo sapiens
gccagcaggcacccactgaatacctacggttacacggtcagtccatttattttcatcarctttctcctgagtggtctttgttgatcttgctttgtagttgcttatggccacacagccccaaaccatgccatttatgcagaattctaatttactgtgtcgagaacaaaactgttactctttcattctacttacctagcctcgtagaggggacacggggttgagatattttcaaagccaggagggaaccagaaccagcggttcaatagaaacaactgagagtcaccactgagtctaaatttcccataactggggacatttgcatctgattttgtgatgtactagaataacgcagatttgtgtgttttgatcattcgcttccaaatgacgcagatttgtgtgttttgatcattcgcttccaaatgatgcaaaaaaaaaaatgctgccatggtga

SEQ ID NO: 824836 - DNA, 543 bp, Homo sapiens
tcctgccactctctctaatgaagacccctgttccactgtggctcactatcgtcctccctgwccttggcaactactggtcacagctctcattcttttttttaggccaacaggttatagtaatttacttcacataagaacagcatatttcagccctacgatttccatttaatatcaacaaaaataatctgtatggaaaacccagaagcaatcatagaacataatatgcaaagtgtgcaaatgtactttaaagtgcaagttattctatagcattagcaaggtagaatgtcatagatattaaggaatccatctcattgtagctaataatctttttgcatgtatagccaatgcaaatgtacaaattacaagttagtgttgatattaaaatgtgtaactcatcctcagatcatttgtttgaagatactaaaataatgtcatgtttatatttcattatttatgaaagtcatcagctcatttctaaagcttcataaagcattgcactgataacgtatgtgtagccaggagaaactgttccctgaacttaaa

SEQ ID NO: 824837 - DNA, 577 bp, Homo sapiens
ataactggtgaaatctgaataagctytatgggttgtagcaatgtcatttgattgttttcgatattataatatagttgcataagatgttaatgatggaggaggctgggtaaagggtgcattgttcttccctacgcatttctttgcaacctcctgtgaatctatcattatttcaaaaaaaatttttttaagtatttaggaattgtctacattgtgctgtgcattttcttcctttgtatttgtctcctcatttacctccctacttctgccctgttttaggcccttcccacctgtctctgacttgtctattctgtctcaaatgtatcttccatgctcctatcagagggatcttttaaaccaatgcttcttaaactctaccatacaaatgggccacctgggatcttgttaaagtgcaggttctgattcagtttgtctcggggacttgggattctgcatttctaacaagttcccagctgatgccagtgtagctggtcctggctcatactttgagtagcaaggatcttaagtaattttctttcatggtatacccatacttaaatccatctagttgattctgatt

SEQ ID NO: 824838 - DNA, 428 bp, Homo sapiens
tctttttttgagtaggagtctcactctgtcacccaggctggagtgcagtggtgagatctgggctcactgcaacctccgcctcccaggttcaagcgattctcctgcttcarcctcctaagtagctgggattacaagtgtgcctcaccacgcccggctaatttttgtatttttagtggagacggggtttcaccatgttggtcaggctggtctcaaactcctgaccttgtgatccgcctgcctcggcctcccagagtgctgggattacaggcgtgagccaccgggcccggccgcttatttccttcttactgtgcatgtgctaaaaatagaggggaggtggagcccccagggtggacattcctggccccaggtacctctttctaactgtgcagcttctggcatcccctcgtgcaagtttccagcttccttat

SEQ ID NO: 824839 - DNA, 670 bp, Homo sapiens
caactcctgggctcaagggatcctcccatcatagcctcctgagtagctgggactacagatgcgcaccactatgcwtggcttttttttttttgagatggagtctcactctgtcacccaggctagagtgcagtggcacgatcttggctcactgcaacctccacctcctgggtttaagcgattctcctgcctcagcctcccaagtagctgggattacaggcattagccactttgcctggctaatttttgtatttttagtagagaggaggttttaccatgttggccaggctggtctggaactcctgacctcaagtgatccacctgccttggcctcccaaagtgctgggattacaggtgtgagccaccgtgcccggccctatgcacggctatttaaacatttttttttgtagagatgggacgtcgctatgttgcccaggctgctcttaaactcctgagctcaagtgatcctcctcccttgatctcccaaagctctgggattacaggcaccatttcttcagcctcgaatgccctcccttcaccatccttttttcaagcccaccttgcacgctccctcctccccagcctgaaaccaactgtcctgccttggccatctcctagttctttgcttatgtgcatcatgcgcatgtgcccagtgctgaatctgtgaacagca

SEQ ID NO: 824840 - DNA, 636 bp, Homo sapiens
atgatgcacataagcaaagaactaggagatggccaaggcaggacagttggtttcaggctggggaggagggagcgtgcaaggtgggcttgaaaaaaggatggtgaagggagggcattcgaggctgaagaaatggtgcctgtaatcccagagctttgggagatcaagggaggaggatcacttgagctcaggagtttaagagcagcctgggcaacatagcgacgtcccatctctacaaaaaaaaatgtttaaatagccgtgcatagggccgggcacggtggctcacacctgtaatcccagcactttgggaggccaaggcaggtggatcacttgaggtcaggagttccagaccagcctggccaacatggtaaaacctcctctctactaaaaatacaaaaattagccaggcaaagtggctaatgcctgtaatcccagctacttgggaggctgaggcaggagaatcgcttaaacccaggaggtggaggttgcagtgagccaagatcgtgccactgcactctagcctgggtgacagagtgagactccatctcaaaaaaaaaaaagccawgcatagtggtgcgcatctgtagtcccagctactcaggaggctatgatgggaggatcccttgagcccaagagttg

SEQ ID NO: 824841 - DNA, 530 bp, Homo sapiens
cctgaaaattcacaaagtgacatcatagwcactggtgatccagacattggcaatgagttaaaaggcagtaaatgattctagggaggaatggaacttatcactgaaataataatttctgattacctttgatcagtcagaaacttttggactataaactccatagatggaccacttttatatgtattttgagtttgatggttttgttttttagtttgctttattgtgtacgtgaaaacaaaaaataaggcctaaaggaagtgaatagttgatatttggataaatctctcaaaatgttaaaacttaatatgtaacttaagttaaatataaagctataaaatgtattcataattaagtgcaatttacactttaatgcctagaaagtaggaggcattttattcatttcagtgtaaagtgctgtattttcctttctttgctatttctaatgaacatttgtatgtgaattgtccaggtgttacctggaatactattttcattaatactcatgttaaaacaaggaaacaaattttgat

SEQ ID NO: 824842 - DNA, 587 bp, Homo sapiens
ataaaacatcagattcacagttctttacaggatccctcaacaactaagataggggtattactctttggatttctcttatgaaataaaacttctctttaactgtagaaaataattgctttagtgctgggaacatgttgatactggaatatgagctataatcaacttggactatattggtttatctccaagttcataatactagaaagatgttttaaagatgttgtctcattttattattttaaatactcttatcaatcaggtaagtatcagatttgggggttttaaaggagagctggttgggatataatcttccatgttttaaatgtgtctcctaaagttcatgtgttgaacttagtccccagtgcaacagttgagagtggaacttttaagaagtgattaggttatgaggactctgcccttatgaatggattaatgccattatcatgggaatgagttagttattgctccttaactcatgttatgccttctgccatgatatgatgctgcaagaacaccctcaccaggtgtggtctctcaatctcggacttcycagcttccagaactgttctctataaattacccagtct

SEQ ID NO: 824843 - DNA, 510 bp, Homo sapiens
ggtggaaaaagatttatggacagaaaaagcaaagtgacatacagaaaatgggggtgagatacagaaacagccagattgattacagctygagatttgccttactcgaacatggtttaaacagctgatgtccttttattgccaaaaacacagtagttggtacaagagtgggttacagtctatttacatatcaagttaggtttcagtttgctatgtacagagaacctattgacaaaaattaaacagaaaagaaggcagctttaggctataattgatttaataatttctcctttttggtcatcttcccaattttgagagacagacccaaactttagacattgatagcatcagttaccatcaaaagtatacttatttagtctcaaatcccactgtgaaatagcagaactgtgggttttgtaaagtaaaaacaaggacttcaggttattatttttaaaaagaattacagtagaaaggaactccttgtgttaaaatctgctgtttacagaagaaaac

SEQ ID NO: 824844 - DNA, 571 bp, Homo sapiens
gccaagggctatgttccactgttttctgtgggcaaggtgcaggcaaaacaaattcatcacctgttgctgggcccagcgatgtgtcacaattttccctgtgggcaaagtggaggctaaaaacaagggtcatatttcttgggtcatgatgcagagatacatcacaaggcctcctgtggacaggccacaggtagaaatcgccaatttcctaggtgttggagcccacgatatgtcaaaatacacaatgtatgcaaggcccaagcaggagaaaagattcacataacttagatgctgagcctagcaatacatcccaatttcttcttggacagatcccaagagatagaagagtcttatcacacaggttttgggtctagctatgtgtcaaaatattccctgaagggagagatcagaaaggagtgtaacctcacctaggtgagaagcccagagatgtttctgattctgtgtaaggctcaggaataagrtaagagtcaggtaacctagaaactaggctagattatatgttgcaattacccaagttgggggggggctctcatgagaagggagttacattatg

SEQ ID NO: 824845 - DNA, 660 bp, Homo sapiens
tggtcacatcacatgagtgctgggaaagggtaaaatcacaatcatttttgaggccagggaccagggataaaagaaacatcaccttagtgctaggccaagggctatgttccactgttttctgtgggcaaggtgcaggcaaaacaaattcatcacctgttgctgggcccagcgatgtgtcacaattttccctgtgggcaaagtggaggctaaaaacaagggtcatatttcttgggtcatgatgcagagatacatcacaaggcctcctgtggacaggccacaggtagaaatcgccaatttcctaggtgttggagcccacgatatgtcaaaatacacaatgtatgcaaggcccaagcaggagaaaagattcacataacttagatgctgagcctagcaatacatcccaatttcttcttggacagatcccaagagatagaagagtcttatcacacaggttttgggtctagctatgtgtcaaaatattccctgaagggagagatcagaaaggagtgtaacctcacctaggtgagaagcccagagatgtttctgattctgtgtaaggctcaggaataaggtaagagtcaggtaacctagaaactaggctagattatatgttgcaattacccaagtkgggggggggctctcatgagaagggagttacat

SEQ ID NO: 824846 - DNA, 627 bp, Homo sapiens
acatggaatcccaaatggactgtttgaatgagtgtccatggcctgacactccttttttacactatcctttgtcaaacggggatatatgggacacattgattttcgtatattacaccctttgctcaatttgtttaagatctagtcatagaagtaaatgttattcacctcaagacttcatttctcattctattaatttaccatgtagccataaatatatacttaatgtgtacatttcttctttcttagggaaaagaagaaatacacacgttgcatatatgaagctcataatttacatttgcctcaaatatatgaatccatgtattttccctccttctgcttgtaatttgaacaggtgaatcatgtgtgttatttgaatattataaaatcctatccagttttcaaaataaatgtatcttcaagaattttaacacttcccgttaaatatcaactaattacacatctcgtattactaatgatttaaaattaaaataaccatgtcctaatttaaaaaatatattaaaattaaaaataactattttggttattcatgcaattaaaaaaatcaagtctgtttttatgtaacttccatagcartcattgctatagacatttatatagtgtccttat

SEQ ID NO: 824847 - DNA, 611 bp, Homo sapiens
aattatatagataaatttgtttactcctgtctccagaaaccaacctttgatcattcgtgtgcaggactgctctctacttgaggggtcaacaatgtttattacccacaaattgtgttcactccaagcctttgtcattaagtctgtactaaataaatgtgagcggggccagcttatgggggcagcacttttgtccgcggtgctaagccgtgcggtcccctagccacactgtcagacaaaatacctgtgtgtacctgtgtcagtgtacttcttttatctgtcactcggccagagtctgcaggacagactcggcaatgcaaagccacaaagtgttctaacatatctcagtatcgtttacatggctctgactgagtattccatttccataattcacagaactttggtaagttactccacctttctctagtctatagaatgtcacttttaggctagattcaatttaatgtcttttataaaaatgaaatatatcaatggtagagttatatctataagaatgattattaatattacaattttaggaacaaytattcagaaaaatatgattaaatattgtgcttaaaattaatgccaagattatgtataaacttgttctg

SEQ ID NO: 824848 - DNA, 571 bp, Homo sapiens
caaaaacagggatcaaatactgtatgacctcacttgcatgtggaatctaaaagtcaaaatcatagaaccagacagtacagtggtgattgccagggttgrgaatgggagtaatattggtaaaaggctacagtttcagtagacaggatgaataaatgttggggatatattaaaaaacatgttgactataggtaatgataatgtatatttgaaaattgctgacaggttagttctcaagtgtcttcaccgcacgcaaaaaatatctatgcgaggtgacgaatgttaattaatttgattatggtatttattttataatgtatagctatatcaaggcatcacgtgtaccccacagataggtacaatttgttgtacctcaataaatctgatgaaagaaattggatgtatagtaaaaaatataaattattcaaatgtaaatatatttaatttagatacaaaattaacaccatattattaaattctgatagatgtacattttaaaaataatatagcacttaaacttcattttgggaatcataaaattatatgaatgacttccactgcaatattttaaacc

SEQ ID NO: 824849 - DNA, 588 bp, Homo sapiens
ctataaaatgaagttagaacaagaaataatttataaagggagcaaatttcatttgattttctcacagtcagagtgagagatgttagagaaaatgtcaattcttcaatgtttttgagaaaagaattgcaaagaataattacaataagaacgagtaagttccatcttttttttttcctttccttttttttttttttctttttgagacagagtcttgctctgtcacccaggctggagtgcagtggcacgatctcagctcactgcaaactccacctcccgggttcatgccattctcctgcctcagccacccgagtagctgggactacaggtgcctgccaccactcccagctaattttttgtatttttagtagagagggggtttcaccgtgttagccaggatggtctcgatctcctgacctcgtgatccgcctacctcagccacccaaagtgctgggattacaggmgtgagccactgcgcccggacaataagttgcttgtattttagcctgagattttatttctatcaaataacattatgttctaggcatgggcccaagattattctgcagggattcatatctttgtgattta

SEQ ID NO: 824850 - DNA, 609 bp, Homo sapiens
acttaaacaaaatccatctactggagagtgagcatttgtaayggaagacagaggctttacaatgggtgccaccgttctctaagccctgccagagtcttgagggcatctttcttatatcctcactgagaacctggcagggtttctggaggtaaatcccacaaaagtgtggggcttctttaaggttgtggctctgtagacttcagagtctccacattgagcctctagcaattatcaatattgccatttaagtccatatctaagatgttacttatgacacagtttataagatacagaaagaaataattcattcaattaacaaacaataagacaaaacaaactaaaaaaaaagctggaatgaattattgttggaattaaaatgaaaatcaaatattttatgatgatcttttaaggccatgtatgctttaaccatattccatttcacccctctcctaatgagcctgctacaaccataaaagtcacaaagtttttggatatgttatttcctctggctgaaattctctcatttctcataggcctctcttgttttgttctttcaatctcaccttatacagttctggttagagacattttttttcttaatcatcttat

SEQ ID NO: 824851 - DNA, 463 bp, Homo sapiens
tgaagatatttcatttttcaccataggcctcaaaggcctcccaaatatcccttcacagattctataaaaacactgttgccaaactgatcaatcaaaagaaagaaaggtttaactctgtgagatgaatgtacttaccacaaagcagtttctcagaaaatttctttctagtttttattagaagaaattgcctttttcaccataggcctgaaagggttcccaaatatcccttcgtacattctaccaaaacagtgtttccaaactgctcaatcaaaagaaagttttaactctgtgagatgaatgcacacatcacaaagctgtttctcagagagcttctttctaatatttctaagaagatagttcctttttcgctgtaagcctcaaaacgctcccatatgtcyctttgaagattctacaaaagcagtgtttccagactgctcaatcaaaaggaaagattatctctgtt

SEQ ID NO: 824852 - DNA, 523 bp, Homo sapiens
atagagcagttttgaatcagtcttttggtaggacctgcaagttttcatttggagcgctttgaagcccatggtggaaaagggamtatcttcacaaaaaactaggcagaagccttctcaggaacttcattgagatgtgtgcattcaactaacagagttgaaactgtcttttgacagagcaggaatgaaacactccttttgtagtatctgattgtgtatatttggaactctttgagttattcgttggaaacgggtatcttcacataaaaagtagacccaagcattctcagaaggttctttgtgatgtgtgcgttcaactcacagacttgaaactttcttttgatagagcagtgttgaaacacactttttgtagaatccacaagtattcctttggagcgctttgttgcctatgtgggaaaaaggaatatcttcacttcaaaactagacagaagcattctctgaaactcctctgtgaagtgtgtgttcaattcacatcgttgaacctttcttttgatagagcagtgtt

SEQ ID NO: 824853 - DNA, 523 bp, Homo sapiens
atagagcagttttgaatcagtcttttggtaggacctgcaagttttcatttggagcgctttgaagcccatggtggaaaagggaatatcttcacaaaaaactaggcagaagccttctcaggaacttcattgagatgtgtgcattcaactaacagagttgaaactgtcttttgacagagcaggaatgaaacactccttttgtagtatctgattgtgtatatttggaactctttgagttattcgttggaaacgggtatcttcacataaaaagtagacccaagcattctcagaaggttctttgtgatgtgtgcgttcaactcacagacttgaaactttcttttgatagagcagtgttgaaacacactttttgtagaatccacaagtattcctttggagcgctttgttgcctrtgtgggaaaaaggaatatcttcacttcaaaactagacagaagcattctctgaaactcctctgtgaagtgtgtgttcaattcacatcgttgaacctttcttttgatagagcagtgtt

SEQ ID NO: 824854 - DNA, 523 bp, Homo sapiens
atagagcagttttgaatcagtcttttggtaggacctgcaagttttcatttggagcgctttgaagcccatggtggaaaagggaatatcttcacaaaaaactaggcagaagccttctcaggaacttcattgagatgtgtgcattcaactaacagagttgaaactgtcttttgacagagcaggaatgaaacactccttttgtagtatctgattgtgtatatttggaactctttgagttattcgttggaaacgggtatcttcacataaaaagtagacccaagcattctcagaaggttctttgtgatgtgtgcgttcaactcacagacttgaaactttcttttgatagagcagtgttgaaacacactttttgtagaatccacaagtattcctttggagcgctttgttgcctatgtgggaaaaaggaatatcttcacttmaaaactagacagaagcattctctgaaactcctctgtgaagtgtgtgttcaattcacatcgttgaacctttcttttgatagagcagtgtt

SEQ ID NO: 824855 - DNA, 572 bp, Homo sapiens
gtgtatcttttatgtgaagatatttccttatacacattaggcstaaaagcactccaaatatccccttacagattctacaaaaagagtgtttcaaaactgctccatcaaaggaaatgttcaactctgtgagattaatgcacacatcacaaagcagtttctcagaatgcttctgtgcagtttttatgtgaagatatttccttttccacaatagaccccaaagcgctccaaatatccacttgcagattctacaaaaagagtgtttccaaactgctcactcaaaagataggttcaacactgtgagtttaatgcacacatcataaagaagtttcacagaatacttctttgtaatttttattttaagatatttccttttccaccataggcctcaaagtgatccaaatgtccacttgcacattcttcaaaaagagtgtttccaaacggctcagagaaatgttcaactctgtgagatgaatgcacacatcacaaagaagtttctcagaatacttccacgtactttgtatgtgaagatatttccttttccacaatatgcctcaaagtgctccaaatatcca

SEQ ID NO: 824856 - DNA, 499 bp, Homo sapiens
tctttctagtatttatatgaagatatttccctaatcatcgctgcattcccacatatccytttgtagattctatgtaaacagtgtttccaaactgctcaatcaaaagaatggtttatttctgtgagatgaatgcagtcctcacaaaacagtcctcacaaagcagttctcagaaggcttctttttagattttatctgaagatatgtcctatttcacaataggcctcaatgccctcccaagtacaccatcacagattctgccaaaacagtgtttccaaactgctcaatgaaattaagtttatctctgtgaggtgaatgcacacttcacaaagcagtttctcttctcagaaagattctttgcagtttttctctgaagatatttcacttttcaccatgggactgaaagcgctgccatatatccctttgtttatactgcaaaaacatgtttccagactgttcaatcaaaagaaatgtttaactctgtgagaagaaggcacacatc

SEQ ID NO: 824857 - DNA, 490 bp, Homo sapiens
ttttatctggagatatttcctttttcaccataggcctcaatgcacttccaaatgtcccttcacagatttaaaaaagcagtgtttccaaactactcaatcaaaagaaaggtttacttctgtgagctgaatgcactcatcacagagtagtttctcagaaaacttctttctagtgtttatgtgaagatatttcctttttcaccatgggtctcaaagcactgaaaaatgcccctttgcagattctacaaaaacggtgttgccaagctactcaattgaaaaaaaaagttgaactctttgagatgaatgcactcatcacaaagcagtttctcagaaagcgtctttctattttttatctgaagatatttccttttatactacaggcctcaatacgttcccaaataccccttggtgaattttacagaagcaatgtttccaaactgatcaaacaaaattatgktttaatactgtgagatgaatgtataaataacaaatc

SEQ ID NO: 824858 - DNA, 588 bp, Homo sapiens
tgaaacagtctttttgtaatgtctgcaagtggatatttgtagcgacttgaggcctwtgatggaaaagggaatatcttgacataaaaattggacagaagcattctcagaaacttcttcgtgatatgtggattcacctcttggagtggaacccttcttttgatagagcggttttgaggcagtcttttatgaagatctgccagttctcatttggaacgctttgaagcctatggtggaaaaggagatatattcacataaaaacttgaaagaagcattctctggaacttcactgagatgtgtgcatttaactaagagagttgaatctgtctttagatagaccagcatttaaacactccttttgtagtatctgcaggtggatatttggaactttttgaagaattcgttggaaacgggtatcttcacatgaaaagtagacccatgcattctccgaaagttcactgggatgtgtgcattcaactcacagacttgaaactttcttttgatagaacagtgtagaaacacgctttttttagaatctgcaagagttcccttggagcgctttgttgcctatggtggaaaaagaaatatctt

SEQ ID NO: 824859 - DNA, 473 bp, Homo sapiens
atattccttttccaccatagttctcaaagtgctaaaactatacacctgcagaatctacaaaacaagtgattcaagattgctcaatcaaaagaaaagttgaactctgtgagttgaacgmacacatcagacagaattttttcacaatgcttcagtgtagtttttatatgaagatatttccttttccaccatagccctaaaagcgctccaaatatccacttgtagaaactacaaaaagagtgtttcaaaactgacgaatcaatagaaagtttcaactctgtgagatgaaagcacaaatcacaaataagtttctcagcatgcttcagtctagtttctatttgaggatatttccttttccaccacagtcctccaagcactacaaatatccacttgcagattctacaaaaaggctgtttcaaaactgctctatcaaaagacaggttcaactctgtcagatgaattcacacatcataaag

SEQ ID NO: 824860 - DNA, 473 bp, Homo sapiens
atattccttttccaccatagttctcaaagtgctaaaactatacacctgcagaatctacaaaacaagtgattcaagattgctcaatcaaaagaaaagttgaactctgtgagttgaacgaacacatcagacagaattttttcacaatgcttcagtgtagtttttatatgaagatatttccttttccaccatagccctaaaagcgctccaaatatccacttgtagaaactacaaaaagagtgtttcaaaactgacgaatcaatagaaagtttcaactctgtgagatgaaagcacaaatcacaaataagtttctcagcatgcttcagtctagtttctatttgaggatatttccttttccaccacagtcctccaagcactacaaatatccacttgcagattctacaaaaagrctgtttcaaaactgctctatcaaaagacaggttcaactctgtcagatgaattcacacatcataaag

SEQ ID NO: 824861 - DNA, 495 bp, Homo sapiens
ttagaaagcttcttcctaatttttatctgaagatgatatttcctttttcaccrtgtgcctcaatgcattctcaaatatcccttcacagattctaccaaaagaatgtttccaaactgtgcaatcaaaagaaaagtttagttctgtgagatgaatgcagacatcacaaagcagtttcccagaatgcttctttctagtttttttctgaagatatttccttcttcaccacagacctctatcccctcccaaacaacccttctcagattccacaaaaacattgtttcccaactgctcaatcaaaagaatgtttaaactccatgagatgattgccaacatcacaaagcagtttctgagaatgtttctttccagtttttctctgaagatatttcctttttcaatgtaggcctcaatgtgctcccatatatgcttacatagattctacaaaaatagtgtttctaaactgctcaatcaaaagtgaagttaaactctgtgagaaga

SEQ ID NO: 824862 - DNA, 567 bp, Homo sapiens
gtgagatgaatgcactcatcacaaagcagtctcttagaaagcttcttcctaatttttatctgaagatgatatttcctttttcaccatgtgcctcaatgcattctcaaatatcccttcacagattctaccaaaagaatgtttccaaactgtgcaatcaaaagaaaagtttagttctgtgagatgaatgcagacatcacaaagcagtttcccagaatgcttctttctagtttttttctgaagatatttccttcttcaccacagacctctatcccctcccaaacaacccttctcagattccacaaaaacattgtttcccaactgctcaatcaaaagaatgtttaaactccatgagatgattgccaacatcacaaagcagtttctgagaatgtttctttccagtttttctctgaagatatttcctttttcaatgtaggcctcaaygtgctcccatatatgcttacatagattctacaaaaatagtgtttctaaactgctcaatcaaaagtgaagttaaactctgtgagaagacttcacacatcacaaagcagtttcccagagagcttcttt

SEQ ID NO: 824863 - DNA, 339 bp, Homo sapiens
cctcacatccctttccctgcacatcctcttggagtctctttcctgcttttcactccaaactgcattaagagtcttgctccagatrtttagccccaccctctcacccccaagtcctgagccctgtctctgactctttcaccttccccagctcactccctgttggagccattgcaccaaatacttaagatctatgatattactagcataaggtttcaatatgattttaataggtgctctatttcactgagttccagtcagaagggaccttctgaacatcatggtttaaatgggttgtgggctagctcctgaaatgtgttgtcatttacatcacttctatgg

SEQ ID NO: 824864 - DNA, 339 bp, Homo sapiens
cctcacatccctttccctgcacatcctcttggagtctctttcctgcttttcactccaaactgcattaagagtcttgctccagatgtttagccccaccctctcayccccaagtcctgagccctgtctctgactctttcaccttccccagctcactccctgttggagccattgcaccaaatacttaagatctatgatattactagcataaggtttcaatatgattttaataggtgctctatttcactgagttccagtcagaagggaccttctgaacatcatggtttaaatgggttgtgggctagctcctgaaatgtgttgtcatttacatcacttctatgg

SEQ ID NO: 824865 - DNA, 339 bp, Homo sapiens
cctcacatccctttccctgcacatcctcttggagtctctttcctgcttttcactccaaactgcattaagagtcttgctccagatgtttagccccaccctctcacccccaagtcctgagccctgtctctgactctytcaccttccccagctcactccctgttggagccattgcaccaaatacttaagatctatgatattactagcataaggtttcaatatgattttaataggtgctctatttcactgagttccagtcagaagggaccttctgaacatcatggtttaaatgggttgtgggctagctcctgaaatgtgttgtcatttacatcacttctatgg

SEQ ID NO: 824866 - DNA, 624 bp, Homo sapiens
cacattgtgcttagacattctcagttttctgaaaaattatgaggttcatgacccccctgagaagcccaccttggaaatgaagatgtctattgtgagaggaaatggtctcatatctcaggtaatgcaaaaaattatattcatttgtagtcagggcatggaaacatttctgtaaatcattcaaacttttcatcttacacttttaatcctgatttatacttttattactaaaatatcccttagtccatctaaatattgactatgctctgtgagagagaagtaacagttataaccatgaggaataaaataattctttttgggtctctcttttcatactgtctattttgtcagtacctgtctttctaaaattctgtttaatctgctgaatggttcccttgtctttcaacctactattattctctgatgtcgttttctccatcttttgggcaatatttgaaaaattcctataatcattcattctctgattcctttagttagttctattcagtcagcaaaatttcaaagtgcagtgaaattaaaaattacaagcactgccaaattccaaacytactgacctcgccaaatggacttgagaaaatgttctccaatataaactttaattttttc

SEQ ID NO: 824867 - DNA, 677 bp, Homo sapiens
catgggttttcaggaggaagattttaatgtttaatgaaaatataattcagttcatctactttcaagttaaatttatctttttaaaactggcccagtgaaaagctttatttgctcgacattctagaaatataatgctaacaaataaagaggactggaaagctgcaattctttggaacagaatattccagaacagaactgaaaccatgtgcctatttcaagcatatttgaaaaagcttgtatcacattttgtctcatcatgggtttaatgtcattggtaggaaagggaaggtaaaaataactgtctaaaccctgactaaagattcttgacctgttaagaatttctcttaagatgcaggaaatgagattatcatcttttcagaggggtcagcaccaggggaaggtttagaagagtgtgtggcaatcaaaacaaaaacaaaatgaaaacagaacacactccttctctgcgctaacacctcataaaagtaaaatcccaacctaaacaatgaaaatccaagagctctaaataagacctagtatactgaaakatcccaataaaaatatgtagtactatatatatatatatagatatacataaagtaataggatgttttgaaagctgtgggacatctggccaggtgaggaaggagtataaaaaggtagaaaagagtaaggtccta

SEQ ID NO: 824868 - DNA, 637 bp, Homo sapiens
tcaagaagaaagaacgccttgctaaataaagtgwcaatatctacatgtaacataaacacacactgacaaaaagcaaatctgcacatgctcctatcagtagctatacattttcccaatacttggtaatttttggcaacaaggtcatcctgtgatcaagatctcaccaagaaataaatcaatgatcagtaacgcaaagattatacctcatacattcatattttgttattattagaaacactttcttcgtttacatttgtcttcagtctttccattatatcaaaaatgaaacaaacatcattaaggcattgtctttgtcagcctcatcaagaatgttttacaggaattccacatgtcatctgaaatgtctctgatgccatcctttttatgtaatacatgaaatgacagaatatagactcttttggtgtcaccacaggatagatttccattcacctcagcaaatattacatgaaatagaggtaagtttcttggtctgggaaggcttttctctagctaggcattcatatgatagaatggaggtcctatttcattcaacaagtaactgttgaatgccttcgttgaactggcatggtgaaataaagcatattaccaggtagtaataattgtccacttcataaga

SEQ ID NO: 824869 - DNA, 606 bp, Homo sapiens
acattatataatgataaaatgactagtccaacagaaaaataccacaatcctaaatatayacacacctaacactgaagttcccaaatgtataaaacaattactactagacctaagaaatgagatagacagcaacacaacaatagcaggggacttcaatactccactgacagcactagaaaggtcagcaagacagaaaatcaacgaagaaacaacggacttaaactataccctagaacaaatggacttaacagatatttacagaacattctacgcaacaactgcagaacatacattctattcgtgagcacagggaacattctccaagatagaccatatgataggccacaaagcaagtctcaaaaaatttaagaaaatcaaaattataccaagtactctctcagaccacagtggaataaaattgaaaatcaactccaaaaggaaccctcaaaaccatgcaaatgtgtggaaattacaaacctgctcctgaacaatcactgggtcaacaatgaaatcaagatggaaattaaaaagttctttgaactgaacgataatagtggcacaacctatcaaaacctctgggatccagcaaagtggtgctaagaggaa

SEQ ID NO: 824870 - DNA, 624 bp, Homo sapiens
ggtaaatgagcagtggcttcaacctaaagtcactagctgcattagtgactgactttccctaacaagagagtcagcctgtcctttgaagctttgaagcccmgcatcgacttctcctctctcaatagcaaagttctagattgtaccttcttccaatagaaggctgctttgtctatattgaaaatctactgtttagtgtagccaccttcatcgatgatcttagctggatcttctggataacttgctgcagcatctccatcagcacttgctgcttcaccttgcattttcatattatggagatggtttctttccttaaacttcattaaccaacctctactagcttccaccttttcttttgcagcttcttcagctctctcagtcttcgcagaattaaagagagttagggcctcactctgggttaggtttcggcttatggaatgttgtggctggtttgattttctattaatacccataaaacttgctccacatcagcaataaggctgtttcactttcttatcatttgtatatttactggggtgacacttttaattttcttcaagaatttttcctttgtattcataactaactggtgcatgaagcctagctattggttagtctcaaccttca

SEQ ID NO: 824871 - DNA, 606 bp, Homo sapiens
ataatggagggaagaatgtgtgtactgaaaagtgatttagtatctttagtaaatattatgaaaattatggccacattgacactgtgctgatctcttcggaggcttgggagagccttgtatatgaatgattctgaagtctgtttctttctttccatagtaaatccacctctgcttgctttatgtctttttgtgccaatgagtttccagtctctttagggaaaccaaggtggcacccagtatatgcccattaaattaggttgaataaataatacagttaattagctaatgaattaagcatttcatggttttcatgaaatcaaggtttaattattgtgatcacattcagcaaggttgatactgttcctctatgtgctcttaaagaaaggttaataaaaatgtttttcccattgctcttcaaaataatttttaaaaagttattagaatcacacataaaaatgtgattatctcaccataaggctctggatatcaacgtgtttccccattttgctcagaacaataagaaaaggcgagaaagagaactgagttttattttctttgtctttatttatcacttrtctcactcatcattctgtactcatgtccata

SEQ ID NO: 824872 - DNA, 350 bp, Homo sapiens
tcaaagtcatgttcttgtccctcacccggaagtctcctggccacattctaggtggggagactgayggctggaggcccataagctgtctaaaacttcggcccccagatttctggtctccccacttcagaaccaggatctgcagaacacacagctcagaaggtaaagctgtggggatcaacacaaaggacagacttgctactacttaagggagatgggggtgttaccagtacactcctccagcaggatgggctgcagaatgagaacacgggaattacagctgactgacccaaccgggtttggggcactgcattagttacttaatccttcaaacaccccatagggcaaggact

SEQ ID NO: 824873 - DNA, 350 bp, Homo sapiens
tcaaagtcatgttcttgtccctcacccggaagtctcctggccacattctaggtggggagactgacggctggaggcccataagctgtctaaaacttcggcccccagatttctggtctccccacttcagaaccaggatctgcagaacacacagctcagaaggtaaagctgtggggatcaacacaaaggacagacttgctactacttaagggagatgggggtgttaccagtacactcctccagcaggatgggctgcagaatgagaacacgggarttacagctgactgacccaaccgggtttggggcactgcattagttacttaatccttcaaacaccccatagggcaaggact

SEQ ID NO: 824874 - DNA, 568 bp, Homo sapiens
ctgttccctcactttatatattgaggcttttttgtctggcccatttccagagataatctgaagtacctttctctccttagatytgaaagtcacattttattgtattcttactgtatgccatgcccatgtgcaacatctcattacacatggggcccttatcctcaacctcattctatgaagaaataggctcatcgatggatcctaaacttcaaggccaagtagcagagccagaattctagcagttcctcctgccctctgggacactgctccacactgccccccgatggccaggccaggggcttcagggagaatagttcccagggtctgttcccatccaggtatgggaaaccctgggatgactgagcaacccgggggcatgggtaagtctaaggaactgctcccctgctggctgccaggggatgtgctcccctcctactcccaacaagtgctgatcagattgacacctggggtgtacgtggggttgggggaaggccagggtacagagcctgctggaaatggagaccctgggggctgggtgtgagcatgatacctcaaaacatgccctttc

SEQ ID NO: 824875 - DNA, 559 bp, Homo sapiens
cacctcattaggaaaatggggcagttaaagaagaactcaccaactaatctgcttaaactttaattaataattcatttatatatatttatgtggcacgctttctctagggaacccaatgtgcttagcaaacattttaaataattaactctctcatatctgagtgaagtggagaggcagcagagttactctataactcgttaagcagattggcaggtgacaactagatgtcttgcttgggagaggagagaccgaccatctgtaacttacctgatgccacaagcaaatgatctctctgggggcctagtactgtaaggctctgtcttagcaccttcccagaagaagcagtttttgtttagatagatagataatgaggatacatagatggagataaataggtatgaatgactgtagcaatcaagaatattttgagggggggatgttattagaagaaagtcaaacagggtacatttaaaaaaatactgccttcaagayaaaaggaagtatttcaaatcaggaatattggttatggcattaaatgaaatgaatttgcagaggccaa

SEQ ID NO: 824876 - DNA, 576 bp, Homo sapiens
ttctcaacctggagaaataaagccagagcacaggcagctcaataatgctttccaaacacaggacattcaaaagccagtggccaatarggtgtttaattttctttaaagccaaagtctgagaataaaaactcgattttctagcagatatgatttaggtcagaacttcctccagaaaggatactaggcagtgaagcaggttcctaaggaagtctgtggaacattcgatggcaggaatcttaagaataaaaccagttctactcctagtaatttatcctccaaacatgcttatgagtgtgcacagagatacatgtacagggatgttcagtgaagccttgtggttaaaagcaacagcatgatcatcagcaaaagataggttaaataaattacggtctgtcaggcgatgcaacgctaaggagctgttgaaaagaatgaggtcggcagcatgtcctggtacagaaaaatctactgtattgttaatgagcgcaggtctgtttctagaatcctctcatttgtgcaggaagaaaacgggacacaacttaacgcttgtatgtgcagagaacatttctagaaggaaac

SEQ ID NO: 824877 - DNA, 677 bp, Homo sapiens
cgtccttcatacatttcattccccaggatcctgagactrtggggcagaagcccatcattcttggatggacagggcagaagcctactccctgagaactgggttactggtaaaagcaagacttagggctggcaactggcaaggcagtccatgtagagccaagtgtcagatcagtccgggcccttcacctgtgccagcatggatatggggacaggtacgttccagggtctctgctggaacaagcatacaggcagcagaaaagaaggggaagcctgcttaggtaaaacaaagccaaggagatcttccatggttgcagagcaggcagccactatcaccagactgccttattggatttcattttggcgttcagcatgatcttcagttctttcgttaacttagcaaggctttcctaagtgttatgtggagtacaaggcagttctgtacatgatacctcaagtactgaaatgagcgctggacagatgatggcatcagtgggtcagtgacccaaaaccagaagtctgggtacagttctgctgtacttctggagggagtcccagacgctttttagctttcaccctgttggcatagcatgtttggtctgaagaggccacagttagggaagagtacagatggctaatctgtctttgtttcctagaactagacagtgaccctgaatatgg

SEQ ID NO: 824878 - DNA, 677 bp, Homo sapiens
cgtccttcatacatttcattccccaggatcctgagactatggggcagaagcccatcattcttggatggacagggcagaagcctactccctgagaactgggttactggtaaaagcaagacttagggctggcaactggcaaggcagtccatgtagagccaagtgtcagatcagtccgggcccttcacctgtgccagcatggatatggggacaggtacgttccagggtctctgctggaacaagcatacaggcagcagaaaagaaggggaagcctgcttaggtaaaacaaagccaaggagatcttccatggttgcagagcaggcagccactatcaccagactgccttattggatttcattttggcgttcagcatgatcttcagttctttcgttaacttagcaaggctttcctaagtgttatgtggagtacaaggcagttctgtacatgatacctcaagtactgaaatgagcgctggacagatgatggcatcagtgggtcagtgacccaaaaccagaagtctgggtacagttctgctgtacttctggagggagtcccagacgctttttagctttcaccctgttggcatagcatgtttggtctgaagaggycacagttagggaagagtacagatggctaatctgtctttgtttcctagaactagacagtgaccctgaatatgg

SEQ ID NO: 824879 - DNA, 597 bp, Homo sapiens
gggtcgggttaccctcgagaccccttcttgtcctcgactccacccgggagcctcgccgcccggagttcgctccccgccccgccgcgcgcagtctccagcaccccccaaccccccacccctcctgggcttccctctcaatcttctcgcagctcctttccttcccgtgcccaacttcgcctcttactctcggcgcccgccacccgcgtcgaccctccttttagtttccaccgggtcctcccggcccggacagttttctgccaacgcacctcgcatctccagcgctcttcaactcctccttggtcactccagccaagttgcggatgccggaaagaaatctagttctctgtaacacgcttaccgccagagtggtgactttagctgcgtcttgaacattgtcatttcagagaatatgtttggctcatgcatgtcagtttgcaatttgcacacttcttggcttctgttttagtcatcaactaaagggcagtaacctatttttcaaaaccmatttattttaaataccagagtagctgagacccctcagaacaaagtggggagaaattttctcagttcctttgagggcttgcttgcttctgtttt

SEQ ID NO: 824880 - DNA, 564 bp, Homo sapiens
ctttatgtattcttctaatagtttcataatttttgctattctattaggtttttgattgactgagataattttgtatattgagtgaggyagaggtccaacctcattcttttgcatgtggatatccagttttctccatattatttgttgaaaagattattctctccctcactgaattatcatggaaagaaagacaattctttcccccattagcacaactgtcaaaagtcaattgaacacagatatttgagtttattgctggactttcaattctacttaattggcctatgtatctatctttatgccagtaccacattgttttgataactgtagctttctagtacattttgaaattgggaaatgtgttgttggaattagtttgctagtatttttgttgatgatctttggatcaatattcataagggatataagtctgcagttttcttttcttgtggcatatttgaccatgatataagggcaatgctggcctcacagaatgtgttaggaagtgtttcctcctcttgtatatttgggagaagtttgagtgttcactttcttcttcttctt

SEQ ID NO: 824881 - DNA, 527 bp, Homo sapiens
gatcccttatctttgctactgtgaatagtgctgccatgagcatgaggaggcaggcagcacttyatgttccaacttcctttcctttggataaacacccagcagtgggatttttgtggtatggctcctcttaaggagcctccatactgtttcccagagtggctggactaatttacattcccatcaacagtgtgagagagttcccttctctctatatccttgccagcatttgttaattttgtctttgataatagccatcccaaatgggtgagacgatacctcactgtggtttggatttgtcttcgcctgatgattagtgatgttgagtattttttcatacatctgttggccatttgtatgtcttcttttgagaaatgtctattcagagcctttgcccacttttaaatgtgattatttgttttttttgctgttgagttgtttgagttccttgtatattgtggatagtagtcccttgttggatgaatggatccaagtctttagggttccactacacatcacacacatacacg

SEQ ID NO: 824882 - DNA, 630 bp, Homo sapiens
tagttgtgtatatattaaatatagctccttgcactttgggagctttgcacacctgaggtcaagagttcaagaccagcttgggcaacatggtaaaaccacgtacctactaaaamtacaaaaattagctgggcatggtggcatgtgcctgaggcaggagtaatgcttgaacccgggaggcggaggttgcactcagctgtgatcatgtcactgccctccagcctgggcgacagagtgagactctgtctcaaaataaaaagtagcttccctttcactttgccttcaacctgcttcagatacagggtgacaaatgttctcatgtgaattatcaatttgccgcggaccttgctggactgaacaaagtaggacaaacctgggaataaagacaaagacaaaagagtatatttggaagaaggggtcgggggctccttgcttctagtgaacaagggccctgagcttctatagcccttcatatttattgagtaaatgagatagggagaagggggtggttgtggtcagctgcttgactgggtgcaggcctgcaggactgcattctttgaacagtagtctccaggtattccagtagataacctcaaggagcatgacaccagggagtaactgccctcagcaaac

SEQ ID NO: 824883 - DNA, 522 bp, Homo sapiens
ctcctagcaacttgcaagaggctcagagggaaaacttgtaattgaatcttcttccagcatttttgaagatggatattcaawgactggttaacattagctttgaagagaggatctaggaggtggtaccgggagggacagggagggagaattttacttttcatcttacaacttatgcacttttagaatttttttctggccatgtggcaaaaatgttttacataaatatttttaaaacaagatggtcactttcagttatgttcatttggggcactgtacctatgctatgatatatacactatgaggagcaaggaaattaataattggttttaaagatttaagtcagaaatgttagtgattttggcatgagagagaaatgtttttcccaagagtcaccagcccctccctcttccaacagatacttctaattacccctgacatttattccctctgggcccagagaacacctatgagtctttctctacccagcgtattagacagttcttaagaattaactggagttga

SEQ ID NO: 824884 - DNA, 522 bp, Homo sapiens
ctcctagcaacttgcaagaggctcagagggaaaacttgtaattgaatcttcttccagcatttttgaagatggatattcaatgactggttaacattagctttgaagagaggatctaggaggtggtacsgggagggacagggagggagaattttacttttcatcttacaacttatgcacttttagaatttttttctggccatgtggcaaaaatgttttacataaatatttttaaaacaagatggtcactttcagttatgttcatttggggcactgtacctatgctatgatatatacactatgaggagcaaggaaattaataattggttttaaagatttaagtcagaaatgttagtgattttggcatgagagagaaatgtttttcccaagagtcaccagcccctccctcttccaacagatacttctaattacccctgacatttattccctctgggcccagagaacacctatgagtctttctctacccagcgtattagacagttcttaagaattaactggagttga

SEQ ID NO: 824885 - DNA, 466 bp, Homo sapiens
gcgggggtgactccccgcagcgtcccaagttcccagggctccccacaggccccaaggacgcagtgttatcttcmctgctcaggggacccaggagggagctaccagccgggacctcacctgccacgagcctcccctcatcggtgtcggttcagaactgtccagctctccctgcaggagcaggcagcctgcgacccccgccccaaggcccttgcaccaggcgagggtcctctgtcaggtgggggctccaaggagctgtggcgggtgtggggtcttctcctcgctcccaagttttgtatccagccctggcccatgaggggcagctggggtccctcccttgtgcctgctgtgtgcccggcaccgggaggagagctggcccctgccctgccagtgtgcagaccccagagggaagaggaggatgaagggccttgggaacaggactgggcagacggggatcctaagccttcct

SEQ ID NO: 824886 - DNA, 466 bp, Homo sapiens
gcgggggtgactccccgcagcgtcccaagttcccagggctccccacaggccccaaggacgcagtgttatcttcactgctcaggggacccaggagggagctaccagccgggacctcacctgccacgagcctcccctcatcggtgtcggttcagaactgtccagctctccctgcaggagcaggcagcctgcgacccccgccccaaggcccttgcaccaggcgagggtcctctgtcaggtgggggctccaaggagctgtggcgggtgtggggtcttctcctcgctcccaagttttgtatccagccctggcccatgaggggcagctggggtccctcccttgtgcctgctgtgtgcccggcmccgggaggagagctggcccctgccctgccagtgtgcagaccccagagggaagaggaggatgaagggccttgggaacaggactgggcagacggggatcctaagccttcct

SEQ ID NO: 824887 - DNA, 349 bp, Homo sapiens
gaatgtggcttccaggctgtggctctgtcctggatatcggctcaggagacccttcctcctccccaactccctgggcctggattcctctgagggctgtgctgctgtcctggggttggagtctctctctctctgtctcctggaggtgccctgaggcgatgctttaaggttcctctgtcctagggcgattgttggcgtaggtttaatctctgctctctcttccagttctgccccctcaaggaagccctcctgaagaccctgyggctccaccagaccctcctcctctctgagtccctggatggatcccggggggtttccgaattctcccctgggtgagtcgaccccttccact

SEQ ID NO: 824888 - DNA, 443 bp, Homo sapiens
ttatggttgtcaccttcaggggatgccacaggcttccagtaggggaaggccagagaagctgccaacaccttgtgaagaccaggttggccccaccacaaagggtcatctggccccaaagtctaaagtgttgagattgtgcaacgctcgtccagggtcactttgtgagatccgtctgcctccttcctgcacaggccaccgtgccaggaatccctgtgcctgctgctctgggcccagcctcagccttgtcacagggtgctgctctggctttcctctcctgggtgagagaagctccaggggcatctgctgtctctcccyaccccaacaggtgtcattctgtgggtttggggccaacgtggggattctcccagtggccagctatgtccagtccaatcatgcattccgggactgtggacgtgactcaggccacagagctcacgtggaag

SEQ ID NO: 824889 - DNA, 601 bp, Homo sapiens
gcaaggcattcatacacgggtgccggaacaaagttccatgaaccaggcggctgagagtcatggggattccttctcccccagtctggaggatgaggtttgaaatccagtgtccacgggtgctctgggagggtcctccttgccccttccagcttctgcaggctctggctttccttgactcccggccacagggccccacgctctgcatcctgtcgcacagctgtcttctccctgtgtgtcacaacctcatgttaacgtgacgacatctgcaaagatcctatttctgaataaggcccgttcacaggtcctcagagttaggacctcaacgtatctttttggggttacaattcaatctacaacaatgaaccaaaagcagcctggggtcctctgaagggtggggagcctgggccaagcaggacaaagtgactacccagggacctttagctggcctgaggggcttcccggagagccgagccrgcaggcaggagagtgccctgaacctgggaccccttcctccagcccccagcctcatgtcagcggtggtgggaggggtcttaacgcatcttttctatctctttccactcttggaaacctggatctcaga

SEQ ID NO: 824890 - DNA, 602 bp, Homo sapiens
aagcaatatacctctctagaaagcagtttgttaakctcttataaaactcaacatgtaattaccatctgacatggcatttgcacatttggacatttgtcttagagaaattagaatttatgttcacacaaacacctgtacacaaatgttggtaacagctttatttatcacagctacaaactggaaacaagccaggtgcccttcagttgggttaaacagttaaacaaactagtatatctataccatgaaacactactcaataataaaaataaactattgactacactcatccacttgaaagaatctctagaaagttagtctgagtgaaaaaagccaatcacacggtttacatgctaaaaaaactccatttgataacattcttgaaaagacgaaattacagagattgagatcagattcgtggctatcagggttaaggacagggaaggagaaaacaaatgtgggtgggtttataaaagggcaagatgagggatctttgtagtgatgggactgttctgtatcttgactgtggtggtggatagaagaaactgtcaggtgataaacttgcacagaattaaatgtacacacattacacacaaattagtgta

SEQ ID NO: 824891 - DNA, 602 bp, Homo sapiens
aagcaatatacctctctagaaagcagtttgttaatctcttataaaactcaacatgtaattaccatctgacatggcrtttgcacatttggacatttgtcttagagaaattagaatttatgttcacacaaacacctgtacacaaatgttggtaacagctttatttatcacagctacaaactggaaacaagccaggtgcccttcagttgggttaaacagttaaacaaactagtatatctataccatgaaacactactcaataataaaaataaactattgactacactcatccacttgaaagaatctctagaaagttagtctgagtgaaaaaagccaatcacacggtttacatgctaaaaaaactccatttgataacattcttgaaaagacgaaattacagagattgagatcagattcgtggctatcagggttaaggacagggaaggagaaaacaaatgtgggtgggtttataaaagggcaagatgagggatctttgtagtgatgggactgttctgtatcttgactgtggtggtggatagaagaaactgtcaggtgataaacttgcacagaattaaatgtacacacattacacacaaattagtgta

SEQ ID NO: 824892 - DNA, 478 bp, Homo sapiens
tttttttcaataaatgatattggaaaaactggatgtccatgtattaaaaaaccaaggggattgggttcctgttttacatcactccccccaaaattattcaaaatggattcaagacttaattacatgacctgaaatttttaaaactcctaaaaatgagaaaaaaactctttgacattgatcctgacaatgacttttggatataacatcaaaagcacagacaacataaaaataaataaattggattatatcaaactaaaaagcttctgctctgcaaaggaaacaattaacaaaatgaaaaggcaacccgtaacatgagaaaaaacatttggaagccgtgtatttgataatgtgttaatatctgaaawacataagaaaattatacaacattgtagcaaacaaacacacacaaaaacaataaatattcagattacaaaatgatcaaaggactcatataaagaaaacatacaaatgggcaaca

SEQ ID NO: 824893 - DNA, 478 bp, Homo sapiens
tttttttcaataaatgatattggaaaaactggatgtccatgtattaaaaaaccaaggggattgggttcctgttttacatcactccccccaaaattattcaaaatggattcaagacttaattacatgacctgaaatttttaaaactcctaaaaatgagaaaaaaactctttgacattgatcctgacaatgacttttggatataacatcaaaagcacagacaacataaaaataaataaattggattatatcaaactaaaaagcttctgctctgcaaaggaaacaattaacaaaatgaaaaggcaacccgtaacatgagaaaaaacatttggaagccgtgtatttgataatgtgttaatatctgaaatacataagaaaattatacaacaytgtagcaaacaaacacacacaaaaacaataaatattcagattacaaaatgatcaaaggactcatataaagaaaacatacaaatgggcaaca

SEQ ID NO: 824894 - DNA, 616 bp, Homo sapiens
cagagagacaaattctgcatgattccacttataactgttgaactcatagaagtagatggtagaatagaagttaccgggatctagggrttggggaaaggtattggaacgatattggtctaggtatacaaaatttcaggtacataaaaggaataagttcaagagctctattgtacaacatggttactatactaaataacaatatattgtatgtattcttgaaaattgctgacagattttaagtgttcttaccaaaaaaaaagcaactacacgaagtaatgaatatgataattagctcaatttagtcatttcaatatatatacgtatttcaaaatatgttgtgcacaaaatagatgtacaattttatgtgtcaattaagataaataaataaatgcctttaaaaaggaaggaaaaatatagaagaaaaatttccagaaattataaaagtcacatttcttcttattgacaaagcataaaaaacttaaagtaattaaaatgaaaacaatccacaagagatttattgcagtacaatttcaaaacccaaaaacaaagagaatatttcagatacaatgagaaaaatcttattataaataaatcaaaacaattataccagtgcaga

SEQ ID NO: 824895 - DNA, 506 bp, Homo sapiens
gttttgaactgaatctccaaatggctttcagactctgctcctcggctgactccatatccttagagactgagatccgctctttcgaagcttttattaaattatgtgtagttttatgtttcagacaatagtgtaacatgttacatgtttcctttatctttgcagcttgctaggaatgagagtaaacaatgtttatgatgtggataataagacataccttattcgtcttcaaaagtaagaacattttataggcttattttctctttgacaattaagtatgagattactgattttttttaacctacattttaagcctgtttagcaattagctttggcatataccctaaagaaaaattcgacttttttcttctacagaccggactttaaagctacacttttacttgaatstggcatacgaattcatacaacagaatttgagtggcctaagaatatgatgccgtctagttttgccatgaaggtaaacttgttacgcttgaagctaaatttta

SEQ ID NO: 824896 - DNA, 603 bp, Homo sapiens
tttggcatatggaaatgcctgcaaacatatttgtgatagttgtcaacctggcaactgtttkcagatgtgtatattttaaaaaatttaaccattaaaaaacaaatagcagactgggcatggtggctcatgcctgtaatcccagcactttgggaagccaaggtgcgtgattcgcctgaggtctggagttcgagaccagcctggccaacatggacaaaccccgtctctactaaaaatacaaaaattagcctagtgaggtggtacacacctgtattcccagctacttgggaggctgagttaggagaattgcttgaacccaggagaggaaggttgcagtgagccgagatcaccactgcattccaccgtgggtgatagagtgagactctgtctcaaaaaaaaaaaaaaaaaaaaaaaaagagggagagagaaagaaaaaaggtatgtgtgtgtgtgtttgtggtgtgtgtgtgtatatgtgtgtgtcaatgtgtttatggtaacacccccttggtcattgtgaattaagcttctactgtttctgttacaaattttaagagttcttgagatatggccgggtgcggagatacaattcccataccatccaca

SEQ ID NO: 824897 - DNA, 603 bp, Homo sapiens
tttggcatatggaaatgcctgcaaacatatttgtgatagttgtcaacctggcaactgtttgcakatgtgtatattttaaaaaatttaaccattaaaaaacaaatagcagactgggcatggtggctcatgcctgtaatcccagcactttgggaagccaaggtgcgtgattcgcctgaggtctggagttcgagaccagcctggccaacatggacaaaccccgtctctactaaaaatacaaaaattagcctagtgaggtggtacacacctgtattcccagctacttgggaggctgagttaggagaattgcttgaacccaggagaggaaggttgcagtgagccgagatcaccactgcattccaccgtgggtgatagagtgagactctgtctcaaaaaaaaaaaaaaaaaaaaaaaaagagggagagagaaagaaaaaaggtatgtgtgtgtgtgtttgtggtgtgtgtgtgtatatgtgtgtgtcaatgtgtttatggtaacacccccttggtcattgtgaattaagcttctactgtttctgttacaaattttaagagttcttgagatatggccgggtgcggagatacaattcccataccatccaca

SEQ ID NO: 824898 - DNA, 603 bp, Homo sapiens
tttggcatatggaaatgcctgcaaacatatttgtgatagttgtcaacctggcaactgtttgcagatgtgtatattttaaaaaatttaaccattaaaaaacaaatagcagactgggcatggtggctcatgcctgtaatcccagcactttgggaagccaaggtgcgtgattcgcctgaggtctggagttcgagaccagcctggccaacatggacaaaccccgtctctactaaaaatacaaaaattagcctagtgaggtggtacacacctgtattcccagctacttgggaggctgagttaggagaattgcttgaacccaggagaggaaggttgcagtgagccgagatcaccactgcattccaccgtgggtgatagagtgagactctgtctcaaaaaaaaaaaaaaaaaaaaaaaaagagggagagagaaagaaaaaaggtatgtgtgtgtgtgtttgtggtgtgtgtgtgtatatgtgtgtgtcaatgtgtttatggtaacacccccttggtcattgwgaattaagcttctactgtttctgttacaaattttaagagttcttgagatatggccgggtgcggagatacaattcccataccatccaca

SEQ ID NO: 824899 - DNA, 621 bp, Homo sapiens
aaactttatatgtatcaaaattattgttttttaaatacatggggcatataaaaaacatagacttacaacatgaacawttttatttcattggattatatgactgtgactatacttaagatttgttttaatgctgaatatgaattaactctgatttttcaattattcttataaatcacagtgcatagttcataataggaactgtagaaattacagctattgctattacaagtgatataaatgtgaagctaatgagaggaagcttagtagaatggggtatgagcataaacagaaagagacagtatgaaaccaaaattctgtttaacagtccttcagcattaattctattggagagtaagaatggaaaataaattgtcattttaaatgttatctatttaatatagttttattcaggtactgttttttcaaaactgctttgtttttcctgcaattaaaataatcagacctctgaactttctttgaattaagtaagaataaatagcatgttcaaggtaatacatatagctaaaggattgtttagatgttggcatattatcaaacattccagagctcagtttggccctggtcccaggaatcctgctgcttgcaatagaagaggcagcc

SEQ ID NO: 824900 - DNA, 621 bp, Homo sapiens
aaactttatatgtatcaaaattattgttttttaaatacatggggcatataaaaaacatagacttacaacatgaacaattttatttcattggattatatgactgtgactatacttaagatttgttttaatgctgaatatgaattaactctgatttttcaattattcttataaatcacagtgcatagttcataataggaactgtagaaattacagctattgctattacaagtgatataaatgtgaagctaatgagaggaagcttagtagaatggggtatgagcataaacagaaagagacagtatgaaaccaaaattctgtttaacagtccttcagcattaattctattggagagtaagaatggaaaataaattgtcattttaaatgttatctatttaatatagttttattcaggtactgttttttcaaaactgctttgtttttcctgcaattaaaataatcagacctctgaactttctttgaattaagtaagaataaatagcatgttcaakgtaatacatatagctaaaggattgtttagatgttggcatattatcaaacattccagagctcagtttggccctggtcccaggaatcctgctgcttgcaatagaagaggcagcc

SEQ ID NO: 824901 - DNA, 293 bp, Homo sapiens
agaggttgcagtgagccaagatcacgccactgaactccagcttgggcgactagagygagactccatctcaaaaaaaaaaaaaaaagcttcttggccgggttcagtcttaaacaggctaatacagagtgtggaatgaaggaatactctccggttactattatgagactttcataatcttgatacttaaacctaataagaccagtatgaaatggaaaattacaagctagttacactcattagcacagacacaaggatcctaaaactgaacctcaaagtatagagaaaggattatt

SEQ ID NO: 824902 - DNA, 674 bp, Homo sapiens
ccaccaccagctcttttatctatgacatttgcgtagaccaagggcagtgggacctgcacagtgacaccaaatttgtcacattcacctgcagaaggatgcttttagcagccttttcctcttgatgtgaattagaaatttgcccctttttttcttttccttctttcctttttttcccccatcttgtttgcactgatatttgttttggttactttaatgcaactaatggatttagagtcacttaatttttctctgtattgttgatatttgttactgtttcacctgaattggaatgaagtctttaaatttatttgataaaaatatagagaggtctctgtgtatagtttagctaacatccactttcaccaaaaggtatttttcacatgcttgaagctatgaaaacttttgtaggacatttgtgagaaatgtaagacaggagaactgcatcaggagcttaaaatttgttatcaagagaatttagaacagtttgaaaacagagtgtagtaaatgactcaaaatgttcagtattcggtactcaggtcttaatatagaatctccaaagagaaggtcagttggaatttgaatatcaaggaagccttcrtgagggggtttttatctcaccatcacaaactgggacaaaaataaagaaaaacaataggaataaacatacacaatgc

SEQ ID NO: 824903 - DNA, 575 bp, Homo sapiens
attgagaattaacagatggagtgaaagttctcagccttcctctgatatctgcctaagagtaggacacagatttacctttgtaaagatagtataaacttttctcccctctcctagatgtaccaagatgagaacaaaccttatcactggagacagagagccagtggcaccaacatgagtctgtgtaaatgaaactaaataaaataacatttatctttcattaaatcctcgtgtatatatcctattactttcccataatttatcagccctagatgccctaattctctttcttgtattttgtcaattctcgacaatttattgctctttgttaaaatggtacatatgcccctaagtttaacagcttctttgagccttcgacttcttttctgtgaagccactgtgcttgtaatattaaaaattataatgacaaggcacaatggctcatgcctgtaaacccrgcactttgggaggacgaggagggaggatcacttgagcccagaaatttgagacagcctgggcaacataatgagaccctgtccttatacctacaaaaaataaaaataagtaactgagcaaag

SEQ ID NO: 824904 - DNA, 584 bp, Homo sapiens
atgggggtggagactgaatatttaagtgtactaaattagactctattagtcaaaaggtgaagcagagratatgaaggcactcagtacatagcactcagcactctttattttattttattttttttttgagacggagtctcactctgttgcccagactggagtgcagtggcgcgatctcggctcactgcaatctccgcctcctgggttcatgccattttcctgcctcagcctcccgagtagccgggactacaggcccccgccacagcgcccagctaattttttgtacttttagtagagacggggtttcaccatgttagccaggatggtctcgatctcctgacctcgtgatccgcccgcctcggcctcccaaagtgctgggattacaggcgtgagcctccgcgcctggccaaagtacatagcctctttagactggccagaaccattctaagggtggtagtcccttaacaagaagaaatgccagtcaattactgtgttgaaactgcaaaaagggaggggagcctggcaaggctttcaaaagggctgggttctgtttaacccttaagaaagtaagcctaatggccctt

SEQ ID NO: 824905 - DNA, 480 bp, Homo sapiens
cctaaactgtgtttttgtcatttgtgtagtatatatttttccatttcttcactttcagcttatatgtgtccttgaatccacggtgaatttcttatagatagtatgcagttggatcttgatttttttgtttatttgttttttttccagtctctctgtatattgtttttattggagagttcagttcatttaaagtaattatttgtaggaaaaaatttgctattgtcattttgttaacagttttctgtttgtcttgttctttagtctttttttttctctcttgccttctcataatgtattttgatggttttatgtattgataaattttgattcctttctcttattttttgtgtaacttctatacctattttcattctgactaccaagggacttacctaattttttttttcataattacaacrgtcaatcttaatataataacgacttaatttccctcgcatacaataactctctgcttttacc

SEQ ID NO: 824906 - DNA, 557 bp, Homo sapiens
tagcagcagcagaacaacaaaatcaatgtggtttaattggggttgtcacccataaacaatgttagacattaaaggctctatctctttcattatgtatatgaagaaaatgttctagacataaacgtttgcattcaaattttctttctagtttaactcactccacctacaaggcaaaccgctatactacaaatcatctccattttgtcaatagctgattaaattaaagatgaacagctgactcaagggaaaccagtacacacagaagaataaactgttttttctcctgtaataatctgaagaaagagacactggcactgtggtcagtctgtactgggtgatgcagttgaaatgctgtgaatgtatggagtagtaaggtataatggagtgtacatgcccatgatgagtaagcaaagaaaaataatctgcagggaggaacaggaggaagaatgaggcaaaaatgtaaaggaaagtagaggcgataaagacatcataatagctcaggrtaagataaattgttggactttctggccttcaacttccagccccatataaggctt

SEQ ID NO: 824907 - DNA, 628 bp, Homo sapiens
taataaatataattttttaactttaccagcagcttgtttgacccttaactataaaggctcaacctcagaacgaatcctcaaaattcagattatgattctaaaacaatgtgtctgactggccccatgctacttttagtggtaatagaaaacataaatttcataagatggtaaaatgaaaactagattttatctgttttaaaaacatgacaaagaaattgcttttttaagggtgttttcttgcttagaatgcaagaagtaaaatctaaagctgggcaaactgatagccatgaagggaagtaaacatctttattcaggaacctttattcaatatttagtcttttttcagcttacaaagccacactgctggcaggggcttctctgctggataggtatgtacctgggaatatttagctcaaaggggtctactccggcttccccaactctatgtgttaatctgatttctgccttattattgccctcttctctagcataagccacctggtggtgttggtaagctttctggcaatgtctataaaagrcagttcagagctaggttaggaacactggcctgaggtctcacagtctaccctggaaacctcataaaataccagccccatgacctttgcca

SEQ ID NO: 824908 - DNA, 561 bp, Homo sapiens
atgaaagaaaaaaataaaaaagaatgaagcacacctacaaggtatagaaaatagcctaaaaagagaaaatctaagtaagttattggctttaaagaagayttaaaaagatcaggttagaatgtttatttgaagggataataacagagaacttcccaaacctagagaaagataataatattcaagtacaaataggttacggaacaacaagcaattttaacccagataatatgacctcaaaacatttaaccaaacttccaaaggacaagagaaaaggaacaaataacacatgaaaaagctctaatatgtctggcagcagatttctcactgaaaaccatacaaaccaataggcagtggtatgatatctttaaagtactaaagaaaaaaccttttatgctaggatagtatatccagtgaaaatattcttcaaacaaacatgaaggagaaataaatacttcccaggcaaacaaaagatgagaaatttcatcagcaccagacctgtactacaagaaatgctaaaaggagttcttcaattggaaagaaaaaggatgtcaatgcacaata

SEQ ID NO: 824909 - DNA, 476 bp, Homo sapiens
gtagtatgtgtaatcaaagttaaacccagttaatcccaaataggaatgaattataatttgagtttattttytaatggtcagtacagtccagatgaagaatacatatatttcatatagtttgttttcagttcattaacaaagtggacatttggaatttgtgttggctttcctaagtcaaaaaagatagtattctatatagtgcagttttacggtcattcacatgtcttcatagacatcaaatgttcccccaaccagtgtgtgaggttataccaagggtgagcttttcatttttcatttgggtttagtattgcttctagcccatagtaaaactctgatatccaaaaaaaaaaaaaaaaaaaaaaaaaagggagagaagaagccattaacaccacatagaaagaagtcatgtaattttgtcatttaacattggggaaaatcaggttctttatgtgtaaaatgagatattgtaataatta

SEQ ID NO: 824910 - DNA, 636 bp, Homo sapiens
aacaggcatatgaagaaatgttcaaaatcactaatcattagagaaatacaaatcaaaaccacaataaggtactgtattagggttctccagaggkacacaactaataggatatatgtatatatgaaacggagttgactaaggagaatcaactcacaggatcacaaggtaaagaaatcccacaataggtcatttgcaggctgaggagcaaggaagcccagtagtggctcagtctgagtcccacagcctcaaaattagggaagccaactgtgtggtcttccgtctgtcgccaaaggctcaagagcccctggcaaaccactggtgtaagtccaagagtgcaaaggctgaagaatctggagtctgatgttcagggacaggaagttcccagcacaggagaaaaatgaaagttagaagactcagcaagccagatattttactttcttccgcctgttttttccagccatgctggtagctgattggatgctgcccacccacattgagggtgggtcttcctctcccaggccacgaactcaaatgttaatcttttctggaaacaccctcacaaacacagccaaaaacaataatttgcacccttcagtctgatcaaattgacaatgttaaccatcacaggtaccatct

SEQ ID NO: 824911 - DNA, 585 bp, Homo sapiens
aaatgttcaaaatcactaatcattagagaaatacaaatcaaaaccacaataaggtactgtattagggttctccagagggacacaactaataggatatatgtatatatgaaacggagttkactaaggagaatcaactcacaggatcacaaggtaaagaaatcccacaataggtcatttgcaggctgaggagcaaggaagcccagtagtggctcagtctgagtcccacagcctcaaaattagggaagccaactgtgtggtcttccgtctgtcgccaaaggctcaagagcccctggcaaaccactggtgtaagtccaagagtgcaaaggctgaagaatctggagtctgatgttcagggacaggaagttcccagcacaggagaaaaatgaaagttagaagactcagcaagccagatattttactttcttccgcctgttttttccagccatgctggtagctgattggatgctgcccacccacattgagggtgggtcttcctctcccaggccacgaactcaaatgttaatcttttctggaaacaccctcacaaacacagccaaaaacaataatttgcacccttcagtctga

SEQ ID NO: 824912 - DNA, 236 bp, Homo sapiens
ccaggatggtcttgatctcctgacctcrtgatccacccacctcagcctcccaaagtgctgggattacaggcgtgagccaccacacccggactccaacttttttcttaatgggggatttcacataaaaatccatactctgagcttctcatcaggcatccccagctcgtgctcctgcagggtgcgaccggtgcacccaccctgactctcaccacctccacctctgcagcatcctcaca

SEQ ID NO: 824913 - DNA, 610 bp, Homo sapiens
tcagtgatgacaacactggccgtgtgggtcctggtgggccttgagtgggttcctctgctcagacatgaggtgcttagacctcgccctagctctgccctgtgaccttggcaggtcacccggggtcactttcccatcggagtgggggtggggactggaaccagccactcccaggtccctcctctgaggttgctcttggcactggtcctggggacagggctgcaggggactctggcctctctctcccctctcagttccacttgcctttgtcctgctgcctgagaagagggcatggacagccggggacaagacgggacaggcaacctcgcagtggtggtaaccctgtgcatgaaccctgggcctggcacgtggacctcctgtgaccgtccccacaggcccgtgagctagagcttggcactgcccaagaccacacagtccatgcgcagtggagctggggtccaggctgcccaccaggcagtgactrcaatggtggcagcaggggacagtcaccatggtgagctcaagccaggcgctgcactgaccttgagggagggctccatgcttccccttcccacagctgcagtgagggctaggagagcagggtcggctgcag

SEQ ID NO: 824914 - DNA, 610 bp, Homo sapiens
tcagtgatgacaacactggccgtgtgggtcctggtgggccttgagtgggttcctctgctcagacatgaggtgcttagacctcgccctagctctgccctgtgaccttggcaggtcacccggggtcactttcccatcggagtgggggtggggactggaaccagccactcccaggtccctcctctgaggttgctcttggcactggtcctggggacagggctgcaggggactctggcctctctctcccctctcagttccacttgcctttgtcctgctgcctgagaagagggcatggacagccggggacaagacgggacaggcaacctcgcagtggtggtaaccctgtgcatgaaccctgggcctggcacgtggacctcctgtgaccgtccccacaggcccgtgagctagagcttggcactgcccaagaccacacagtccatgcgcagtggagctggggtccaggctgcccaccaggcagtgactgcaatggtggcagcaggggacrgtcaccatggtgagctcaagccaggcgctgcactgaccttgagggagggctccatgcttccccttcccacagctgcagtgagggctaggagagcagggtcggctgcag

SEQ ID NO: 824915 - DNA, 502 bp, Homo sapiens
ctctttttttggttccatataaattttaaaatagttgtttctagttctgtgaataacgtcaatggtagtttaatgggaataacattgtatctataaattactttggctagtattgtcattttaacaataaccatgagtatttatacagacacttttcaaaagaagacatgcatgtgggcaacaatcatatgaaataaagctcaacatcactgatcattagagaaatgcaaatcaaaaccacaatgagatatctcacaccactcagagtgactattattaaaaagtcaaaaaaattatagatgctggtgagtttgtggagaaaagaaatgcttatacactgttggtgcgagtgtaaattagttcaaccatggtggaaaacagtgtggagattcctcaaagacccaaagacagaaatactattttacacagccatcttgttactgagtatatactcaaaggaatayaagtaattctattataaagacagatgtacacatatgtt

SEQ ID NO: 824916 - DNA, 627 bp, Homo sapiens
taataattactatgaataaaaattgaaatacattattctgaagtaagaactcgaacactgaatarttttgccataatttttgaaaattaagatgtgtataaaagaaaaaacatgcaaaggaaaacaatgagtaatcatgctggaagaaactaaattaatgtagaaaatgcttccagctgttttcacattaggctcagctttcaccctgagtccctatgctttaaatatctagaattttgaagcgattgagtgataagtagaacatttaattctaggtgttaaaatgtattaaattttacatacaacatgattcatttacattttagaagttgttaagcataaaataccaaataagccccaaataagcctatttttaactgacacatacatgaaaatatgagcctaagaattaatttggaatcaaatcaaatagtttactctccggagaacatttctctgtgaataaatgattgaatagatagttcagaattgccataatgtatcaatcaccatgcttttccagataatacccactaaagcattagaaatacaatattattaatctaaatttgtaggtaatgttactgaggtccagggactttattaaatactaaaatttcaacagga

SEQ ID NO: 824917 - DNA, 627 bp, Homo sapiens
tagtaaaagctatgcaaaaacaataatctaattctacaaaacattgctgagtaaagttaaggaagacctaggtacatggaaaagcatttgtagctcatggattggaagaacttaaaatattaagagataaattctatccgaaatattcaattcaatctaaagtattaagacatcagttctgacaaaatttgtttagaaatccaaagtgagtccaagcaaccacagtagttttttgtagaatttatttttaaatgttggttctaaaaattattgaaaatgcagagtgcctagagtcaagaaaagcttgagaagagcaaaattataagatttagactatcaaagatacagcctaaaactagcaattaagaaaatattcagtgttgtcatcaatgttattaaaatggccgtactgcctgaagcaacttattgattcaacattatttcattaaactacaaatgaatttcttcacagaactaggaaaataatttaaaaattaatatggaaccagaagacagcctgaatagccaaggcaatcctaagtaaaaagaacaaagctagaggcatcaataccacctgacttcaaactatactgtagggctayagtaaccaaaacaccatggtactgg

SEQ ID NO: 824918 - DNA, 582 bp, Homo sapiens
ctaatataatttgcttcaagatctaaaaacatctgtcatttgatacaatgtggttttatgttaattcatggagaagaagaaaaatattgcataaaatgaggtatacttttattacaatgaatcatggaacacagttttatttaacaaactaaattattggtactgtaaacaagattagaaagataaatgtcatttttaatgaagtattttatctcactgtagtatgaaagcaaacaccacataaacgtatcagacccaccaaaattttatacaaactgcttgtccttggttaaaccctagaagttcaaaatgaaatgtaatgtttactctttagaactctaaaaatataagagttacttaatttacctatatcattcctcaaggcattttataaaagaaataggataatttaatcttaggcaatagaaataaatttttcatgttcagctaagttacaataatgtagacctacattttttaaattttcaaactcagagtttgttttaaaatgattcaaattttatattttttwaaaaatttatcaaatagcagcttaaatttatattatttttgaattatgag

SEQ ID NO: 824919 - DNA, 445 bp, Homo sapiens
ttgctctagcattttgcaagctacatcaaatcatgaagcaaaaaccaggtgacaaacttcctggtatcaattccaactatcatcttttaccaaactaaaattcargttatcacattcaattaacttcgagtcaagtgctccaccagtatatataccagcaacataaaatgtttcataatgttttataaagttccctaaaatttaagaatatcatataaatgtttcagttagaaaagttgagaatgatacagtagggaacagaaaacatgaaaatatcacccaatcaatgatgcaaaacatgggataaaagggctctccatgcaactgattaattcaactatatctacccctaagtattttgtatcaataaatgttatcataaatagagtagtgtagaaaatgggatcaatacttttaattgtgtgttttcctttgaaaacgaaaa

SEQ ID NO: 824920 - DNA, 631 bp, Homo sapiens
gtcccagctactcgggagactgaggcaggagaatcacgtgaacccaggaggcggaggttgcagtgagctgagatcgyaccactgcactccagcctgggcgacagagcgagactccctctcaaaaaataaaaataaaaataaataaaaaaagtagagggccagccagccttttgaaggctgcgcttttatcgctctccgcattctgttgtccgtaacttagtcatatggctatccctggataaaagtaggatgtaggctggcgctgtggaacatggctgtaatcccagccacttaggaggctgaggtgggagggatcacttgagcctgggagttagaggctacaatcagctataaccatgccactaagagtacctcactgaatatccactgcagtctttggaatttgatactgttttaatcatttttctaggggaggtaactgaggctttaggatgttggggtagcttttctccaacacattagaaagcaagtaggagaacctcacaatctgtgcaccagaagaactggcatcacccgaaagctcgttagaaacaaagaacctcagtcccacccagatttagggatcagaatctgcattttaaaggatcccagatgattcaagtacacatga

SEQ ID NO: 824921 - DNA, 631 bp, Homo sapiens
gtcccagctactcgggagactgaggcaggagaatcacgtgaacccaggaggcggaggttgcagtgagctgagatcgcaccactgyactccagcctgggcgacagagcgagactccctctcaaaaaataaaaataaaaataaataaaaaaagtagagggccagccagccttttgaaggctgcgcttttatcgctctccgcattctgttgtccgtaacttagtcatatggctatccctggataaaagtaggatgtaggctggcgctgtggaacatggctgtaatcccagccacttaggaggctgaggtgggagggatcacttgagcctgggagttagaggctacaatcagctataaccatgccactaagagtacctcactgaatatccactgcagtctttggaatttgatactgttttaatcatttttctaggggaggtaactgaggctttaggatgttggggtagcttttctccaacacattagaaagcaagtaggagaacctcacaatctgtgcaccagaagaactggcatcacccgaaagctcgttagaaacaaagaacctcagtcccacccagatttagggatcagaatctgcattttaaaggatcccagatgattcaagtacacatga

SEQ ID NO: 824922 - DNA, 492 bp, Homo sapiens
caattgttatgttgatttaagggcacggtctttagaaatgacttgttcaaattctctactttattctattgaagtatatttgggctcagtagatcaaagcactgcacgtgaaggcctacctcatttttaaatgatgataataataactgtagccataatggctatatagtctactaatgggtgagtcagtgcccattctaagcaccaacaagtcaccctagtctataagtagcagagcatgtcacagatcttaatctcagttccagcctgtttcctgtgctatccgtggttggtgacagatcttaaggctgagcccttattttagcttttctttctgtgaaaagagacccaacaggcagctttcatatatgtgctacttctgcttggtatgcgctttcctggrgcgaattgttcaaacctcaccttcagctaacacctttgagaaaatgtaagctccggtgtgggcgaagtctggattctgagagacaggag

SEQ ID NO: 824923 - DNA, 523 bp, Homo sapiens
catactcttgcttacctccattgtgaagtagtagatcgatttcatctccatagtcaggtcaatcacygcagccaataccataactccctttttagcctgttgacttagaggtaggaggagccaaaagtggccaagtggcaatcttaacttccagtttaatagaactattgttgtgtctcctggaactgagatctctaggccagcagaacataatgtcacgggaacaggaagcaaaaattttgttagtggttcactgcgggtgatggtgagtggtgccacttccacctcttgattcctggacccatgaatcctggctgtgggagaaacagtaccatatattggatgctgatttatggcatacacagccttctggagaactttgttcagccttgtgaagtattgtcacctagttggcattgtaattgtgactttcaaaaggccatttcaccgttgtatcaatccagctgcttcaggataaggaacatggtaagaccagtgaattccatgagcatgagcccactgc

SEQ ID NO: 824924 - DNA, 523 bp, Homo sapiens
catactcttgcttacctccattgtgaagtagtagatcgatttcatctccatagtcaggtcaatcactgcagccaataccataactccctttttagcctgttgacttagaggtaggaggagccaaaagtggccaagtggcaatcttaacttccagtttaatagaactattgttgtgtctcctggaactgagatctctaggccagcagaacataatgtcacgggaacaggaagcaaaaattttgttagtggttcactgcgggtgatggtgagtggtgccacttccacctcttgattcctggacccatgaatcctggctgtgggagaaacagtaccatatattggatgctgatttatggcatacacagccttctggagaactttgttcagccttgtraagtattgtcacctagttggcattgtaattgtgactttcaaaaggccatttcaccgttgtatcaatccagctgcttcaggataaggaacatggtaagaccagtgaattccatgagcatgagcccactgc

SEQ ID NO: 824925 - DNA, 300 bp, Homo sapiens
tctattctattttctctctttttatggttatacatattacatctataartgttacaaatccagcaatacattattatgattaatactttatgtactttttattgctttttgaaaattttttattactttttgaaaatcatttatggtttttttttgtttttttgttttttgagatgaagtctcactctgtcgcccaggcagcctggagtgcagtgacacaatctcagctcagggcaacctccgcctcccaggttcaagtgattctcctgcctcagcctcccaagtagctgggattacagg

SEQ ID NO: 824926 - DNA, 439 bp, Homo sapiens
tatattctggatgttgatcatttattagatacatagtttgcaaatcttttctcccattctgtgagttgtcagtattcttgaaggactagatagattagatggagatgagggaaagagtccttcactctgggagatccaaggtatctcctggatttggacttaggagattgggtgagtagtggtactattgatctaggtaggaaagacctgagaagacttggtgggagcgagggtgggaggcaggtgttcagtttgggatgtattatgtctgagaagcttattagacatccatttggaggtgtaaaataatcagcagtgaaaatgacatttcaagaaaagttyaatgctagaaatataaatctgggagcactaagatgataggtgatattgatagaactggatgtggtcacctaggaaaatgattgtagcctggccagag

SEQ ID NO: 824927 - DNA, 584 bp, Homo sapiens
taataacaaaatcttactggtattgttgctggtaggtaaaaataagtacaggatttttattcaattcaccagtaaagtctgctgacaactagaaaaatggtttattttataaataaatggtcttggcgtaatattgaaaaggaatatacaagacatggtaaaagttgttatacagttgatgaatattataacaaattttcaattcatggctacagttaaaataatctattttttagttttatgttttataataaaaacatgtaactaaatatataacacttgttctcaactttgttgacacattagaatcacttggggagctttgaaaaaaaaagtttattaacatcataatcattgtaactaaagttgtagcattcataatttttaagagctcctaaggtgattccaatgctcaatcaaatttaagaatcactggtataaacactttggttttaggaccatgttracatatgggaatgtatataatacctgcatatatatatacacacacacacacacacacacacataaacacacacacacacaaacagatttatatacagaaacaataaaatgctattctt

SEQ ID NO: 824928 - DNA, 584 bp, Homo sapiens
taataacaaaatcttactggtattgttgctggtaggtaaaaataagtacaggatttttattcaattcaccagtaaagtctgctgacaactagaaaaatggtttattttataaataaatggtcttggcgtaatattgaaaaggaatatacaagacatggtaaaagttgttatacagttgatgaatattataacaaattttcaattcatggctacagttaaaataatctattttttagttttatgttttataataaaaacatgtaactaaatatataacacttgttctcaactttgttgacacattagaatcacttggggagctttgaaaaaaaaagtttattaacatcataatcattgtaactaaagttgtagcattcataatttttaagagctcctaaggtgattccaatgctcaatcaaatttaagaatcactggtataaacactttggttttaggaccatgttaacatatgggaatgtatataatacctgcatatatatatayacacacacacacacacacacacataaacacacacacacacaaacagatttatatacagaaacaataaaatgctattctt

SEQ ID NO: 824929 - DNA, 544 bp, Homo sapiens
tgtaaacccattgtgtaatgaaatttcattttgcaatacaggatatagtttcatgataatttaataaaataaattgagagcaaatgaaaagaaacatttgcgagggggaggtagaatcacttactttgcagcatgatcattataaatagaaggcaataaaatcctgatgctgatgttgtcttagtttagagtccttttgaatcatgttcagggtgcaggacccacttccactgaaatttgtcaggttcttgtagtttagagagcagctggttaagtctttgcaaaatttgatgaagataaaggaaataaatttggttttattttcatcagacttctttgacaagatgataattatgcaacatctgcagaacttttcttaaattttcattttattcaaattccaacacatcaaattccagtgctttttgagataacaggaaataaattcaatctatcaggaaaagtctgtgtgttatcaatatttgactatagggrtactcccagtactatcaactttggattagaagcctagaagttgtatgtc

SEQ ID NO: 824930 - DNA, 547 bp, Homo sapiens
aacatcctcaactattatcaatattcttctgttttcttgttatttgtcctttgtatttgaaatttatgaaataagcaygtggcattcttggatagaaatattttttcattccatttgctgtttttctacaattcttccatatgatcgatgggaagcaggaggcctgtagtatggtgaacagcgtagagataatgcagtatcatctatagttagactgcactctgccactcacaagccacctcatgatctcaagcatgtcccttagcctctggtgactcagtctcttcatacatgaaatagagaccataaaaattcctacttcatagggtttttgtggatattaaataagttaatgaatgtaaaggccatagagtatgccaggcatataataatgtttgccattagccagacttgacttcctagtaagtttaaagctctttgaagaaaaagaacttgacaaaaaattgtttttcacaaagcacttacatttatgttggacacatactaaatatgcaatacataaaggcttgttaactggttattttat

SEQ ID NO: 824931 - DNA, 565 bp, Homo sapiens
attatcagcattttggtcgaagctattcaacaaatctctagggagtttcaaactttccgcattttcctttcttcttctgarccctccaaactgttccaacctctgcctattacccagttccaaagtcgcttccacatttttgggtatcttttcatcagcaccccactctactggtaccaatttctatattagtccgttttcacactgctgataaaaaagttacctgagactgggtaatttatacaggaaaaagggtttaacagacttacagttccatgtggctggggaggcctcacaatcatggtggaaggcaaggaggagcaagtcacatctaacgtggatgctgcaggcaaaaagagagaacttgtgcaggagaactcctctttataaaacgttagatcttgttagatagacttagtcactaccacaagaacagcacagcaaagacttgcccccatgattcaattacctcctgctggtcccccctacaacatgtggaaattcaagatgagattcgggtgacacagccaaaccttatcaggtatcatagccaagaaaacttcag

SEQ ID NO: 824932 - DNA, 614 bp, Homo sapiens
acatacttgcctggaatgttaaagatcagggtaattttctgtctcgttaatctratattgacagtggagtataaaagtctctcactattactgtgtaggagtgtaagtctctttgtaggtctctaggaacttgctttacgaatctgggtgctcctgtattgggtgcatatatatttagaatagttagttcttcttgttgcgttgctccctttaccattatgtaatgtaatacccttctttgtctttcttgatctttgttggtttaaagtctgttttatcagagactaggattgtaacccctgtttttttttttattttttttaattttttatttttttgctttccatttgcttggaaaatattccgccatccctttgctttgagcctatgtgtgtgtttgcatgtgagatgggtctcctgaatacaccacactgatggtcctgactctttatccaatttgccagtctgtgtcttttaattggggcatttagcccatttacatttaaagttaatattgtcatgtgtgaatgtgatcctgtaattatgatgttggttagttattttgcctgttagttgaggcagtttcttcatagggtcgatggtctttacaattt

SEQ ID NO: 824933 - DNA, 588 bp, Homo sapiens
agtaattcttggttgtggatggctgcatggtgcattcctcttgcgtcactcttcacaagaggccagtagtacatcctttccttatttgtgacaacgaaaaaggtctccgtacattgtcaaacgtcctctgcaggacaaaatcacctctatttgtgaaacacttacctagaatgatcttctaagattcttatactctcccattttccatgcttttggctatttatactgctttatgagatatttcttcaaatttatcttctacttttgaacttttatttctgctcttcatttttaatagacttgattttttaaagcaattttacatttatagcaaaatcgaggggaaagtacagagatttcccgtatactctctggcccccttcctcattacacacagcctaccccgctatcaacatcccacaccagagtggtacatttgttataactgacttacatacattgatatatcattaacacycgaagtccatagtttacattagagtttgcttgtgatgttgtatcttctatgggtttggacaaatatataatgaaaggtatccaccattatagtatcacacagagtagttt

SEQ ID NO: 824934 - DNA, 588 bp, Homo sapiens
agtaattcttggttgtggatggctgcatggtgcattcctcttgcgtcactcttcacaagaggccagtagtacatcctttccttatttgtgacaacgaaaaaggtctccgtacattgtcaaacgtcctctgcaggacaaaatcacctctatttgtgaaacacttacctagaatgatcttctaagattcttatactctcccattttccatgcttttggctatttatactgctttatgagatatttcttcaaatttatcttctacttttgaacttttatttctgctcttcatttttaatagacttgattttttaaagcaattttacatttatagcaaaatcgaggggaaagtacagagatttcccgtatactctctggcccccttcctcattacacacagcctaccccgctatcaacatcccacaccagagtggtacatttgttataactgacttacatacattgatatatcattaacactcgaagtccatagtttacattagagtttgcttgtgatgttgtatcttctatggrtttggacaaatatataatgaaaggtatccaccattatagtatcacacagagtagttt

SEQ ID NO: 824935 - DNA, 619 bp, Homo sapiens
catgaagtctatctgaaagcttcattttttgacacyattccaagactcattaatagcgtgctctctttagtatatgaaaatggtacattggtgcctgtaatgctcagcattgtttgtaggattttttatcccacatcaccttattggcagtgaacatctactaaattattcttctctctaacttgacatcttttatttttagcattaactatttaacatgcagttcaattgatgtattttcaatttttggaagcatatatatatatatacaattacatataacaataatatttatcaaatatcaataacacattttcattagaaaatcattatgctcttttttatttttgtattttatagtttttacaaaactgaaagatttaccagtatactaagattgttataaatggatgaagattcataaatataaaacaacattaccactctctggtttgcaaggtaagggaaatgtcctcaaaacaacaataatagtagtaatattaataatacaatttatgtttttactagtacttttcaattcacaggtatttacaaagacatttggagagatattatcaacattttatagaaaaggaccctcatcctgactatgctatgt

SEQ ID NO: 824936 - DNA, 611 bp, Homo sapiens
gagtttgtattgcacaacattcaatgttaagagagaatcagtaaaaataggtaattagaacaattccttagtcaactgtaatggaaaaaaatataaaaatatatctgcaaaggsgtatggtgtgagataaagagacagagactaccatgtgcaagatacatttatgatgtagaatgatatgtaatccatcagcaggtgaataaaatggaatgtgctctcttggttgctaatttgtagcggtatgactcaaatgcacataatgataaaaatgacaaggagttgggagttgcagtaggcaaaagtagaactaggaaaagtaatcatagtaaaattaaataggaattccaaataatataaatgttttttacatttgtgttcaagaaatataaaataagaaaaaggctaaactgttctttctagcctccaaacaccatcaaccaaattttacttttataatttatatttgaaaaaatgaaattcgaccatatcttccccttaatgaggagtgtgtgtgtgtatgtatatcaatacaccttgttttccccttctttagtttcatgattctaccctcaaattaaggtattattttatttaactataaatatttattg

SEQ ID NO: 824937 - DNA, 436 bp, Homo sapiens
tactcaaatagctcataatcttggctgtctgttcgtattcaggagtaagacctcaaaagttgacctggagagtggatagcttttttatgccttcactgtcattttaatgtgatctgaacatagtagcaataaaagcttgtatttcatatatcttgacaaaccacagatatcttgtcttagtaatccacctctggtgttgggcatttcttgtttgcttttcttttttccccctctgctatggtgaacatccttgcatgtatattacatttgtctaattatttctttaagataaatcctaaaaaayagaaacttgaaaagcatgcaaattttaacttttgctatgtattgcctgattgcccacccatcaggaatgttatttataattccactgaaaatggcatgagtcttatttttcacatacatacctgtcggttta

SEQ ID NO: 824938 - DNA, 436 bp, Homo sapiens
tactcaaatagctcataatcttggctgtctgttcgtattcaggagtaagacctcaaaagttgacctggagagtggatagcttttttatgccttcactgtcattttaatgtgatctgaacatagtagcaataaaagcttgtatttcatatatcttgacaaaccacagatatcttgtcttagtaatccacctctggtgttgggcatttcttgtttgcttttcttttttccccctctgctatggtgaacatccttgcatgtatattacatttgtctaattatttctttaagataaatcctaaaaaatagaaacttgaaaagcatgcaaattttaacttttgctatgtattgcstgattgcccacccatcaggaatgttatttataattccactgaaaatggcatgagtcttatttttcacatacatacctgtcggttta

SEQ ID NO: 824939 - DNA, 604 bp, Homo sapiens
gtcagtgataaagaaaccactattatattaagatgctaatctttatagttacatgttttaacaatttatcttgataaaaataattctaaacaaaattatgtattttatatagtaaatactttggggatggggtgagagtggtggtagaggagagtatggtttgtgcttatccaatattaattgcagtcgtgtatcacttaatgatggggatatattctgagaaatgtgtccttatgtgatttcatcactgtgtgattatcacagagtgtactcacacaaacctagatggtatagactactatacacctaggccttattcctaggctatgaacctgtacagcatgtgattactgaatactgtaggcagctgtaacacaatggtaagtgttttgtatctaaacacagaagaggcatagtaaaaatccaatataaaagatacgaatgggacacttgcataggggacttaacatgaatggaacttgcaggactggaagttgctctscgtgagtcagcgagtgagtggtgacagaatgtgaaggcctaggacattactatacactacgatagcctttataaacactgtacacttaggctacactacatt

SEQ ID NO: 824940 - DNA, 610 bp, Homo sapiens
gtagtcccagtgctttgggaggcgaggcaggagagtcacttgaggccaggaatttgagaccagccaagacccagtctctacaaaccaatttaaaaagcttgtccaggtgtggtggtgcacacctgtagtgctggggaggctgaagttactggggaggctgaagcaggacgatggcttgagcccaggagttctaagctgccgtgagctacaatcatgccactgcactccagcctgggtgacagagtgagagcctatctcaagaaaaaaaaaaaaaaaaaagatggcctgtatgacagtactactaagttccccaatcttactcccagagttttgataaaatatgtaggttttggttctgtaaaaaatgtcatgtaattgaaacagataatctacaacaatggcagagcattaaatatctcagcaccttctgacacaaagcaacaactttcatacacaagtatcaatgttgagaagcacaaagaagcttcaatatgattaagtataatcaccaacgtatgtttgatgatttatgctgaataagaagttaatgtctaataatctaaggtagtayagttctttgcaaatcaattctgtaatttaaatttctata

SEQ ID NO: 824941 - DNA, 573 bp, Homo sapiens
gtggcgcgatctcgactcactgaaacctccatctcccaggttcaagcaattctcctgccttagcctcttaagtagctagaattacaggcacccgccaccacgcccggctaatttttgtacttttagtagagatggggtttcgccattttggccaggctggtcttgaactccggacttcaggtgatctgctcactgtgcctggccagaaagtggtttattgagatgaatcaactcctggtgattccatggagtaaagattctgtgaacattgttgaaatgacaacaaaggttttagaatattccataaacttagttgataatgcatgcatgcggggtttgaaagaattgaatccaattttctggtggtaaaatgctataaaacaacatcgaatgctacagagaaatcttttgtgaaaggaagagccaattaatgtgctaaacttcattgctgtcttattttaagaaattgtcacagccaccccaaacttcagctatcaccatcctgatcagtcagcagccatcaacatcraggcaagaccctccactagcaaaaagattacagctcgctgaagg

SEQ ID NO: 824942 - DNA, 604 bp, Homo sapiens
caacaaaaaactatagctaatatatctggaaatggtacttttagaatattaatttaaaattattagtaaaatcttatgtaatatagcaatgaaaaacaaactttcaaaataaatagcacattcctaaattgtactaaatttttttctgcaggttcaagtagaaatttattacattgctttgcctcagagtaaccataatgataatgagttatcagtatagtgggccagttttcactgaattgaggtactctatgcagtaagcaatagcactactgttatgacatttcatcaataacagttgattctggaagttcccagctaattttgaggaaaagaaagatgttaaagaattagaatcgcaaaataattctgcactcttgtggtcataatttttgaaaaggtgtatgtttgcatgcatatttttagatgaagcttgaattaatttatctattatgtgaattcaaaggtttcttctttcatttctacatttcccattttgaaaatttcaatctaaaycctcccctataataggacaagcctttggctgctcccacagtaccacgttttgaatgagtcggtactttttgctttgctctggctctat

SEQ ID NO: 824943 - DNA, 579 bp, Homo sapiens
aaaataacagaggaaaaaacacttaaatacaaattttgtacatatatttattttcaagagagaccagaaacattaattattgaagggcttttttgtgtccyagaaacatttttgatggtacaaaagagtacagggtatttgaagtgtgaaaatacactaaggactatattatgtagggttttttgaactgacctaacaaatttgatgtatctttaatagcacagatacgtatatgagtccaagactggtatacacacctctagattttgaagaagaaagctagaaaccatttttaagaatattggtagagagaccagaaaattatcttggaagaatccaagtgtatcagtcctttctcatgctgctatgaagaaacacccgggactgggtaatttacaaagaaaagaagaggtttaattgactcacattttcacgtggctggggaggcctcagaaaacttaaaatcatggcagaaggcacctcttcacagggcggcaggagagaatgagtgcaagcagggaaaatgccagacacttataaaaccatcagatctcatgagaactcactcattatcatgat

SEQ ID NO: 824944 - DNA, 683 bp, Homo sapiens
tactcattccctctaactatattttgtaccaattaaccctctcctcctcccttgccccactacccttcctagcttctggtaaccaccattctcctctctatctctatgagttcaattattttaatttttagctccccaaaataagggaaaatattcaaaatattcaaaatctttctggatttggcttatttcacttaatataataacctccagttccgtccatgttattgtaaatgacaggatgtcattatttttatggctgaatagtactctattatgtatatgtaccacattttcattcgtttctgtccattcctctagtgatggacacttaggttgcttccaaatcttggctattatgaatagtgctacaataaatatgggagtgccgacatatcttcaatatactgatttcctttctttggggcatacacctagcagtgggattgctggatcatatggtagctctgtttttttgtggaacctcccaaatcttctccatagtggttgtactagctgatattcccaccaacagtgtgcaagggttcccttttctccacatccktgccagcatttgttactgcctatcttttgggtataagccattgtaaccagtgtgagatgatatcgcacagttttgatttgcatttctctgatgataagtgatattgagctttttttca

SEQ ID NO: 824945 - DNA, 572 bp, Homo sapiens
aacttctctgtgggaactgaagggtctatcaaagataccttttcttttgcatgactagagtgctacttttccaaattaattgaacgttttgaggacttaagaagaaaaaaggaagaagtgtattcataagtgggagctaagtaatgtgtatacaaggacagagtgtgaaataataaacattggaaactcaagggtctgagaaggatgagaaagtagtaagggagtgagtaatgagaaattacatcatggtacaatgtacactattcacgtgatggttacactagaagaccagacttcaccactaaacaatatatccatgtaaccaaactgcacttgtaaccccttaaattcatacaaatggaaaaaaaaaaaagaaataattgtagactctttttttgaaacatatacatttttaagtacccatatttctctggagtaccacatacctaaatcgytaactcatttatttaaatcttagcttacatacgaaaagtgtcttttaaagaaatgaactaaagcaatataatttagtgtgtgtgtgtgtgtgtgtgtgtgcgcgcgcacatgcatgt

SEQ ID NO: 824946 - DNA, 646 bp, Homo sapiens
atttgtacccagtgtattagactactatataatatgtattaaatgcaagttcagaaaaacaagaatataaaaccttatagacactaacttctctgtgggaactgaagggtctatcaaagataccttttcttttgcatgactagagtgctacttttccaaattaattgaacgttttgaggacttaagaagaaaaaaggaagaagtgtattcataagtgggagctaagtaatgtgtatacaaggacagagtgtgaaataataaacattggaaactcaagggtctgagaaggatgagaaagtagtaagggagtgagtaatgagaaattacatcatggtacaatgtacactattcacgtgatggttacactagaagaccagacttcaccactaaacaatatatccatgtaaccaaactgcacttgtaaccccttaaattcatacaaatggaaaaaaaaaaaagaaataattgtagactctttttttgaaacatatacatttttaagtacccatatttctctggagtaccacatacctaaatcgttaactcatttatttaaatcttagcttacatacsaaaagtgtcttttaaagaaatgaactaaagcaatataatttagtgtgtgtgtgtgtgtgtgtgtgtgcgcgcg

SEQ ID NO: 824947 - DNA, 597 bp, Homo sapiens
ctctggagattcatctaagttgttgtatgtgtcaatagtttactatttgttattgctgagtagtattccatggtatgaatgtaccacattttgtacaacttttcactgttaaagggaatttakattttatccagttattagctcttgttaataaaattactatgactatctgtatagaggcattgattgattgagacagagtctcgctctgtcacttaggctggagtttagtggcacaatcttggctaactgcaacctctgcccccaaggttcaaatgactctcatacatcagcctcccgagtagctgggattacaggtgcccaccaccacattaagctaatttttgtatttttagcagagataggttttgccatgttagccaggctggtctcaaactcctgacctcaagtgatccacccactgtggcctcccagtgtgctgggattacaggtgctgtgtagaagcttttgtgtgaacatcattcacatttctctttggtggatacctagaactaggatttctggatcatatagtaaggggatatttaactttataaggaactgccaaacttttttccagagtgtctgaaccatttt

SEQ ID NO: 824948 - DNA, 495 bp, Homo sapiens
gggaggaggggtggactgccatctttgctgtttgggtgccttagtcattccagccttcaggctttgtaaagtccaagctgatgggtggcagaagggatccctcaacacagcccagctgctctaccaaaacgtggccagactgctactttaatcaggtgcctgatctcatttctcctcactgggtgggaacttccaactggggcctccaaccattgctgttggcattctacagcaaacagagatttgtaatctccctgggatggagctctgagagggaggggtggaccactatcctttctgtctgggcgacatatcctttccagccttcaggcttcatagtgtctgaggcaactggtgcgctgaagcagattcccagcacagcacagctgctctaccaatwtgtggccagactgctttttaaagtggatcacggatcctgttccaactcactgggtgggaacccccaactgggatcttcagccacctcctacaggt

SEQ ID NO: 824949 - DNA, 608 bp, Homo sapiens
agccaggcacagaaagataaactgcatgttttcacttatattctgggagctaaaaattaaaacaaactaatggagatagagaatagaatgatggttatcagaagataacaagaggggcagtgtgaggtggggggagtagggatgattaatggttacaaaaatatagttagtgtatctaactctaatgaataagatctagtatttgatagcacaacagggtgtctatagttaataataattttattgcacatttaaagtagctaaaagtacaattagatttttgcaacacaaagaaatgataaacacctgaagtgatagatatcccgtctacgcatatgtgattataatgtattgtatgcctgtatcaaaatatctcttataccccataaatatatatacctagtatgtacccaaaaaattgaaaacaaaaggaacaaaattgaaatacaccaaaatgttaaaaacacacacaaatatttactcatggtaggatmttctggcattaactgtagctgagtttataagaaatagaaaaatcattaagatttataagatatttaaaaaataatcatttacatcaagtggttaaaagctctagataagaaaag

SEQ ID NO: 824950 - DNA, 617 bp, Homo sapiens
gagttattattgttattatcaatgatcacaactgactattttgtacatacaaggaactgtgctagatgtttcacatattttcactttaatttcatgagggtgatgaacctgatttctctccattttacagataagcaaaatgaggatcagaaaggtgcagatacttttccaaggttttttagcttagtagaaaaacagtcttgaaactcaagtaaccctaatctatctgacttaaactaatctaggtggaaaaatctcacaatgtcactctttaaagaactgttaccttctacactggaaaatatggatgcaggtagcttggctcaaaatctcttgaggggtcttagaagagcctgacatgctgcataaaaggagtttctgcttctcaaatctagtctcctctcccagatagattggtacagggacccatgacatcggctcagaaatacttctggtccactgtttgttttgtacacacagcccagaatgtctccaggcatacgctgctgctttcactcagaaagsaaagtttgtacctggtaataaacattggggtctgaggggtttgcagttaattggttggatcattcttcatttgtaatctatagaagttttga

SEQ ID NO: 824951 - DNA, 513 bp, Homo sapiens
acccctgaaacaggtttctgcctggacacccaggctttttgatgcatcctctcaaatctacacataggcttcccagcttcattcactcttgcattctgtgcacatgcagacttaacaccataccttgtagaagctgccaaggcttacggcttgcaccctctggagctgtggctcaagctgtgcctgggccctttgagccacagctgaagctggaagatagggatgcagggagccatgatcccagactgcactgagcagcaggaccttgggcctagcccaggagaccattgtgtcctcataggcctcaaggcctgtgaagagaggggctgcctcttaaatctctgaaaacaacctttaaggcagttttcccattgtctcagcwattagcacttgtcttcttatttttatgtgaatttctttagcaagttgttcagcagccttgttgaattcttttttttatttaaccacataaccagccagcaaatttttcaaacttttatgttctgcttccct

SEQ ID NO: 824952 - DNA, 588 bp, Homo sapiens
ttcaagattgcctatttttaatcatgtaataatttttattttattrctattttatttttataaaatgtttggatatttctatttgattaaaaaaaatatttttcattatatcccagcaatactttgtaaatattttttacttcctgaagtccctcttttaggcttcactttagggaagaagactttggtataaattttctcaatttttatctataaatgttgagatttaactttgctcctaaatgatagttttgttcatatgtgttgacaactatttctctcaaaatttgtagttattctctactgtttttctgttttccattatttttgttgaaaggtctgttattctttctttttttctttcctttatatgcaacctctccttttccattggttacctttaagattttgtctttgttatcagtgttccttagttccattcaacgtatctgatttctttacactgattttgtttataatactctgtacttccgaaattagtggattcgtgctgtatgaatctagaaaaatccacaattatctctttaaataatttctttcttacatttttccccatttttctccttc

SEQ ID NO: 824953 - DNA, 588 bp, Homo sapiens
tgtaaagattttattttttttatttctagcctcatcttctttcctgagactcatatcttcaaataccactcctaactttgcrtattcacttgaatgtctatacatttaacttattacaaaccaaatactattttctctcactagtattatcaaatttcctctattatccatctttttcatctcaaataatgataattttataatttcagttgcttagaccaaataaatgcaatcatctttttctcttgctttcacatctcaaaatattcagaaaattttcaatgttctacttttaaaataccatcataatcttatgattgtttttatctctctcttatcaaactctaatttaagccaccatatccatagaccacaagaggcttagaatggctctgtctgcttccatgtgctctacataagcccatctcaacaagcagccattaagatatattggaaatctaaataaaagtatacagtttttccactcaagacatattatagcttttcatctcattcagagactttccatggcctaattggccataattaataccccattcgtatgctaacaatgattttttttgtctt

SEQ ID NO: 824954 - DNA, 515 bp, Homo sapiens
aactaaatttatctaaaaattaatcccttaaaatataatatagacaagtcatttaatgagtgagaatatggtcagaagagcaaaatatgtctgttctaggtataccctagaacaaggtttatcataggaaattacagataataaaactgttggtaagtcaaggggagcttaaatcacagaaagatgtcagaaattggtgattcacaggagatcacctagaagccacagtgaatttcagcaatcttatcagaagctgccaccacagagatttttcagcagctttcttggaagcttgagtaaatctcagcaattgaattgcgcattgttaccaattttagcagtctgctgtgccagtgctgttgattgaaaacaccaaaaatmcaaaaatcttgactctgctcaaatttgcctgtaacttccttcacagaagaaggtttcttcttcacttcgttttctttcagtgtcattgagagatcttggaatagttcttaatgcaaaccacatggagaaatgta

SEQ ID NO: 824955 - DNA, 627 bp, Homo sapiens
tgcttttctttataaacatttaaagttttagaaagtattaatatattctatgattataactcaaatgatataaaaataaaggwtaatttacttaaagaggcttataaacaaaatactatcaaatttaaacttaggaatttcatgttacaaaaatatcttcagcttagtactaaatactcaggataaaatgttaataaaatacatttactttttatcacaattcctgataatatggtgaacaagagttttaaagaataatttgacagaaatggttatttctaaattattcaccgtcatgcattagagaaatatttccacaactttcgtctcataattttcactatgagagaagaattttactctgacccatttatgttggatgtgtttaatagtttatacagtataacaaataaccataatttctgtgtttggatgtgcataagaatagctaaattgcttcttgcaagcgaatcattcagtggccacagagaagacttaaggcaggaaatgagagatatgtacaatacattgtaactgagttaaggtcctgtcagtttaaaagtgtatccagccagttgccatagctctggctacagaaaaaaacaaaaacaaaacaaaacacacaca

SEQ ID NO: 824956 - DNA, 475 bp, Homo sapiens
gatgatcttcttgtagagaatcttgcagaagttctctgtatttcctgaatttgagtgttgtcctctctaacaagattagtaattttttctcagtttcttgctttcttctcatccctttcagggatgccaattatttatagatttggcttccttacataatcccatgtatctcagaggttttgttcattcctttttattcatttttctttatttttgtctgactgtcttgtttcagagaaccagtcttcaagtcctgagattctttcctgaccttggtctattctactgctaatacttgtgaatgtatcgtgaaattcttgtagtatgtttttcagctctatcagatcagctaagtttttatccttgctatttagtacatcagcttctgtatcattttattgtgawttttagtttccttggattgggttttcccattctcctgaatctcgatgatcgttattcctatccatattct

SEQ ID NO: 824957 - DNA, 642 bp, Homo sapiens
ctgtgccactggaaaattaacatgaaacctaatatgagtatttcctaactagtctatacaatattttttttaaaactcagaaaagtaataataaatcattcatgaattaccaagccattttayatgttgacatttttgtttcaggcattctgtaaattaaggctcatctcacttggctattctgttatctaaagaaagtaaatcatgagaatttatatatcacaaatgctccaaatttcataccagattgcagacatattatattcactatagccatgccaacaatgttagtgaaaatgagaaaaatagaggattcgacttatatattttatgcctcaaaactctattaatgcttgacaagagctgagaatgatttcaaacactaagcaaggaatctctaaaagtttctcacacattaccaccaaaatttcaacaaagaacaacagtttgccttcctgtttcagaaatcaacagaaactgagacaatatctgcaagatttggaatgtcatcatgaatgtggctaccattgtaggtcagattccctgattctgagttggagatgttttttgcagccaggttactgcaggagggttacacccaagaagaaagggaagcagaactgggcagaagggaagcagaac

SEQ ID NO: 824958 - DNA, 649 bp, Homo sapiens
gaattgcactttgaatagcttttcaacaccctttaacatttttctttgaatgctgatctaagcttaagatgttcattagtaactcattaaagacttagttacagtccagtgggcgagtcctaaatataatgatgggatgtgtgtacaaacgtgtagactcataattagagaaactgtcacactggggattaagaatatacaatgcagtctttgaaaaagaactgtggaatgtaagtgaccccaagatggtgttgtattttaaattttgcttactattcagaacatttgttttttttggttctaattcctaaaggtatgttttaatgaccccattctgccaggattaaatgtgtaaggctttgtattagggcctttttatacattattttatttaatcctcatactataacaaagtaggcctaattactcatttaacaaataaataaactgtgatttaaactctttaaggccatatatcttggaagtaatagaactggagttaaactctaaggcttaagatctttytactccatttaataggaccatacaatataggattctaaagcagtttagattagatgatactgtaaacttcagtttctgggcttcatgtaagcaatgcttcctaaatatggtgacatcatcttct

SEQ ID NO: 824959 - DNA, 649 bp, Homo sapiens
gaattgcactttgaatagcttttcaacaccctttaacatttttctttgaatgctgatctaagcttaagatgttcattagtaactcattaaagacttagttacagtccagtgggcgagtcctaaatataatgatgggatgtgtgtacaaacgtgtagactcataattagagaaactgtcacactggggattaagaatatacaatgcagtctttgaaaaagaactgtggaatgtaagtgaccccaagatggtgttgtattttaaattttgcttactattcagaacatttgttttttttggttctaattcctaaaggtatgttttaatgaccccattctgccaggattaaatgtgtaaggctttgtattagggcctttttatacattattttatttaatcctcatactataacaaagtaggcctaattactcatttaacaaataaataaactgtgatttaaactctttaaggccatatatcttggaagtaatagaactggagttaaactctaaggcttaagatctttctactccatttaataggaccatacaatataggattytaaagcagtttagattagatgatactgtaaacttcagtttctgggcttcatgtaagcaatgcttcctaaatatggtgacatcatcttct

SEQ ID NO: 824960 - DNA, 531 bp, Homo sapiens
tatatcgcatctagtgacaatgtgtgttataaatggaattccaggatttgatttaaatataaaatcagtatcatccttatcctgtgaaattctaaaatcattatcaatgcaactggcattatagtcaagtttggttaaaaaaaattccatagccgggtatggtggctcacacctgtaatcccagcactttgggaggccgaggtgggcagatcatgaggtcaggagatcgagaccatcctggctaacacagtgaaactccgtctctactaaaaattcaaaaaaattagccaggcatggtggcgggtgcctgtagtcccagctactcgggaggctgaggcaggagaatggcgtgaacctgggaggcggagcttgcagtgagccaagattgtgccactgcactccagccggggcgacagagcgagactccatcaaagraaacaaaaaacaaacaaacaaacaaacaaaacaaaaaaaaaaaagcattccatagctgagactaatgagctttaaatatcttcttaaataatccaa

SEQ ID NO: 824961 - DNA, 621 bp, Homo sapiens
agaaaaggaatcactggactaatctggctaatatctttaaatatatgagcagaatttatttaatatatttaaatatatgagcagaatatattataagtyaggtcctatttatatgcccataattaaagaactttataacagaacacactatacttagttattaacgtaatcttattaattcatatatattatatattttatataaatgtacatataactacatatgatagcatatagtttttaattatgacttcattcatgtatttataaactaaatattggagctcaaaattttataatttatttatttatttttttgacagaattttgctcttgttgcccaggctggagtgcagtggcatgatctcggctcatagcaacctccccttcccgagttcaagcaattatcctgcctcagcctcccgagtagctgggattacaggcatgcgccaccatgcccagctaattttgtatttttagtagagatggggtttctccatgttggtcagggtggtctcgaactcccgacttcaggtgatctgcccacctcagcctcccaaaatgctggatttacaggcgtgagccactgcgccaggcctttaattttctttaataacacag

SEQ ID NO: 824962 - DNA, 543 bp, Homo sapiens
atggggggcggtgtgtgtatttatatgtttaaacattacatacrtctaaacatctctttataagctcctttttaaattatgtaaattttctagcataagtagtttatttatactcagggattatataaggaaaacttagattctggttggaagcttggtgtcaaaaaaagaaaaaaatgttgaagagtcaagatgtcaagaggcatctccctgatacttttgtctagagttgatctgctaatagctcacatctaataatttttaaaagaaggggaaaaaaaggaaaagaaagagaaaaattttgacagttcacctgtcagttcagctgaagtatagctttaatgcctatcaattggacaaagatctgtgaagtattttctatatgacccacattacagaaagaaactcttaagagttttttagggtatatctctataggttttttctttaccatggaaacataacattaactgaaataaaatttgtgtttttcttttgagttcacattaatatagataaaactcacacatgtgcacacagaca

SEQ ID NO: 824963 - DNA, 624 bp, Homo sapiens
tggcgcccgtatatccatttagccacaggtgacaggggtgggtggctccactgctcctcttttcattttattaaaaccctattttaaggccaytgtcaagaagagtgacttaattcctttggaacatagagctaagagactggcaaactgtaaatctggctctttcttgactgctcctcagaaagtacaagaaatgggaatttagactcaatttcaaataccatgtgtaaactgagacacagggcagctcattaggagtgtgttcacagccaacaggaacccaaggccaccctcaaacattccttttccagaaagtcctctctaattacatacacacagacagacatgtgcatacatacatatatgtatatatatgcctgtacatatgtgtatatatgcacacatctcgtatatggatacacacacgcacagcaggactattcaccccaagtgcaatgtgtttgagttcgacaatgaggtttagattctaatctggcacaggacattgtcttggcagggtattcagccttttcatctgcactggtctccttctcggggagccaatgagatccattctattcccaaggcccaagagtggatcccagcagccatgttatcctacat

SEQ ID NO: 824964 - DNA, 486 bp, Homo sapiens
aaactgtaaatctggctctttcttgactgctcctcagaaagtacaagaaatgggaatttagactcaatttcaaataccatgtgtaaactgagacacagggcagctcattaggagtgtgttcacagccaacaggaacccaaggccaccctcaaacattccttttccagaaagtcctctctaattacatacacacagacagacatgtgcatacatacatatatgtatatatatgcctgtacatatgtgtatatatgcacacatctcgtatatggatacacacacgcacagcaggactattcaccccaagtgcaatgtgtttgagttcgacaatgaggtttagattctaatctggcacaggacattgtcttggcagggtattcagccttttcatctgcactggtctccttctsggggagccaatgagatccattctattcccaaggcccaagagtggatcccagcagccatgttatcctacatgactac

SEQ ID NO: 824965 - DNA, 601 bp, Homo sapiens
gggacacaggtgggcagcaattaaggggagctgatatccgatggcccaacctcaacctcagcacatcaccttcagcctcagtgtcctcagctataaaataaggtactcaccatacctatctcacagggccgcactgagggcagatgaagtcctaaatgaaaatgcacggtgcaaagaaccatgcaaaccattcattagaaagcgctctctctccttcacacacacacacacaaacacacacacacacacaccccttccaaacagctttctagctttccctgttagaattgcccattgcaacaatgaacaaaagtcaacattcttcacctttgccttgatggaactgcctatctttaaaagtgaattaagaaaataagcaaaatcctcacttatagattgtaattccacttctcaagatctgcagcagagacatatgtaccaggaacgacagaagtatctattgcagcaaaatattggaaaatactgaaatatccatcaatcagaaaatgcttaataagctaggatgcaaccaaaatcattagatgtttgcatttgtggtagtggtgarcacagctgccttccaaaatcatgagctatttta

SEQ ID NO: 824966 - DNA, 512 bp, Homo sapiens
ggcatccctgtggagttgagatggaaagagtcctgggtgggtggatttatggaatattctactataagcagtgaggaacaaagaacactggtctgtagaggaagagtcaracaccaacagaaatgtgtgtgtgtgagacagaggtagtgcaaaaaagctgaaagcttcctgtgggttcagagagagacctgtgccttcccataataaacattgctgttttacataagatccctggaggtgactctgattggccccagagtgccttaactagtgcatctgggcagctcaggaggttgccctaccctgatccagagcagggtgctctgtacccctcaaggtgccatagggagagtgtggcagccaagcacccagaaaccctgggtccttagcctggctcagccagttgatgtccccagtgatgctggacgagccatttcctctggggcccaaacgttcccttttctgacatgagggctggatctggtgatacctcagcccaacccagcactgtg

SEQ ID NO: 824967 - DNA, 526 bp, Homo sapiens
ttttattattccatttatattaaatatccagaatagacaaattcatagagacgaaaagcagatttgtggctgctaggagttggggatgagattaatgggatacagattttcacttgggatcatacaaattctgaaactagatgatggcaatggttgcaaaatattttgaataaaataatgtcactgacttttaaaaaatgatttaaatggtacttttgtttgtttgtttgtttgtttgtttgtttgtttttgagatggagtctcgctctgtagcccgggctggagtgcaatggcatgatctcggctcgctctgccttctgggttcaagtgattctcctgcctcagcctccctagtagctggaattacaggtgcccacctccacgcccggctaatttttgtatttttagtagagacagggttttgccatgttggccaggctggtctcgaacttctgacctcasgtgatccacccacctcagcctcccaaagtgctaggattataggcgtgagccactgccttttatg

SEQ ID NO: 824968 - DNA, 628 bp, Homo sapiens
tcaaacacagctctcctccattaaataaataagatatctaataggatgacatgtgcctctgaccatgacatgtcacggaagagaagaattcaggaatcaaatttacctagaagctagtcatggcataaaataactaaacctgcaattatagtaacccaccaccagctggcagtagtgttaaatcatgttctgacagtggtttttacaaatcgagttcccatttaatgtggaattcatgcatgaagcgaacaatagagattgcaattcagcaattcaaatctctatagctttaaaaaattccccaaaatatttttctagataataaataataatccatgctctttataagcatttgaaaaaaaaatcttaaaatcacctgtaatactacctcccagaattgtcatgtgttcttttactgtcttttttccttatataagtacttttcttaattgggatatacatgtgtgtgcatacatacaagacaacacaaatacatatatacatacacatatatagtcwtcattttatccacacacttaacatagtacttagcacatagcaagttaatataaacattggttaaaaaattaatacttgaatacattctagatttaaaaaaaaacagagt

SEQ ID NO: 824969 - DNA, 492 bp, Homo sapiens
aatagcctagaacaggcaaaattgccactatttstaataccataattttcttataaaagaaaaatgcacaggacaaagaaaaacataaagtcctaccatgtgtgtgacatcttgagtaaaggaggcattgaggacatatactttaaatgacctttctgtttcatgccctttgtttcatggccaggtaccatagtacagctgttaatatgtgagaggtatgccccatttccctttgtagtaaactagaaagagttattgtgaaggaaaaggtgagaaaaaaagaaatcaacatggcactatacaggtaaattctcaggcagatcaactttagaagaaatatatataggagttacagaaatgaaaattgattctttacaatgtattcatacctttactgctaatgaatatgggttttcttgaggtaataaaaatctaaaattagattgtggtgatggttgcacaactctgtgaatattcgaagaacattgaatt

SEQ ID NO: 824970 - DNA, 423 bp, Homo sapiens
tagcctaccatctttgcagagtcgtatcaacgccatggcctcagcttactgtgctggcctcagggaggaataagaaaggccaccatcatgaacttgcccccagggaggaaagggccagtgggcagattgcaaatttcattcatctcagtggctttcacttgccatccttggacctttctctgagagcaggacatccttgtggcatggttccctattcaaaattggtgcccagacaaaatgcaacacagtagcaacaagcaaacctctgtgggtggtggaggaatggttcttcaatggctgccttggttatatccatgaccttcccacacgaccagtaagccamacaaagccttctccaggaaccacttatcttaggagtaattttcaaaatttggagcttataggagttgctcctgaaagtat

SEQ ID NO: 824971 - DNA, 468 bp, Homo sapiens
aaatttggagcttataggagttgctcctgaaagtatcaggtgacaaggcaggcagaagagaggttagtgaaaggggtgtgtgcttaagggttgggaggaagattcagwccccggttccccatgtcatctctgggatctggactggacatagtcttttggagccttctagcctcagcctgaccccgggtagtgataccaaccggaaggacttgggtgagggagaagtggaaacgagaaggattcacactgcaatttcttggtgtccttcccacattgattatgtgcaagtatcagaatgttagggggaaaatacatatcaggcagggaattgcactaataaatctcctaattctcttccagctgtgtaatttatgactctgttggtgatgacttattggcttgcaggtgatataatcaaggacacccagagactaacaaagtgaagggaaattacatctatggcaacag

SEQ ID NO: 824972 - DNA, 616 bp, Homo sapiens
cagcagagtaaacacataatccagagtgggagaaaatattcacaaagtatgcctccaacaaaggactagtatccagaatctacaaagaactcaaacaaatcagcaagaaaaaaacaaataatttcatcaraaagtgggcaaaggacatgaatagacaattctcaaaagaggatatacaaacagcccacaaacacatgaaaaaatgcttaacatcactaatcatcaaacaaatgcaaattaaaaccacaatgagacaccaccttactcctgcaagaatagtcataattaaaaagtcaaaaaacaatagatgttggcttggatgtggtgaaaaggcaacacttttatattgctggagggaatgtaaattagtacaacctctatggaaaacagtatgaagattccttaaagaactaaaagtagaactaccattcaatccagcaatcccacaactgggtagctactcaatggaaatgaagccattatgtgaaaaacaaacatgcacattcatgtttgtggcagcacaactcacaattgcaaggatattgtaccaatctaagtgcccattgaccagctagtggattaaaaaaaatgtggtatattgacaccatggaatact

SEQ ID NO: 824973 - DNA, 678 bp, Homo sapiens
ggtcagtaaaactgactttgttctattgccatctacctatgaggggaacaggccacactgtctttctccaggcactcaagttctatggtgaggttagattacattgtgttcacagctctaagagtctactgttctaaatgtgtgcacatctagatctacagactaccaagcattgtcagtgtgttgggtcaatttctctgttccaccaaactgtagttcggggagcctagcaaagcctgcacttttgacaactttctttaaagcttatctctctggtggatatcttcagaatccagagatcccactaataattgaacactgtggaatctctagacaattaaagcaatatttcccaaactaggaaaaatatgttatttaacacacttaaataattaatagttattatttatttttacaataccttctagttatagcaagtgatggtggcttttcatttatgtcactgatagaagttttaaggcaactttaagttaaaacagtgaattgacttaaaaaatagtaaataatagtagctgtggcatgaaaacatggctaaaatagtgaaggtaatagataaatgactgaagtttgggaaayactcgagacataggaagataaaatgccactgtagaccgtctttctgtttctccctttttggccgggttattcacacctagg

SEQ ID NO: 824974 - DNA, 633 bp, Homo sapiens
atggggacagagctgccctagggggatyccacggattaaaaaaaaaaatcatcttacctgccttattgaacttgggattgtttataaaggttaaataacattcccaggtggcctgctgtggtttcagagccacttgttaggccctgggtcctctggaaccactcaggactgtggccccacctctgaggttggcctctatagctatactgaatggcctatacatatcagctctctcgtcttcctcccacatttcttcaaggcccaccctgccccctcccacagaggtgctatttgctgagactgtttttctaaagcagatggtctagaaaaagccggccacttggagcacagaaggcaaggttaacgcaagtgatgtgggctgtagcatctgggctgtcccaaacccaaggctctatctccacccaacatgaaatgaagcggtggcagaacctttcccagatggggcctgggccaggaggatgacacagtggattaaaaggagtttttggtttcccttaagcatagttgtaaacttgcatcttacttgctagaagcaagaagtcagtattttgaggggcatgtattcatccatcaaaccaactttaacttaccatctagaccagcggttctcaa

SEQ ID NO: 824975 - DNA, 632 bp, Homo sapiens
ttttaaataatctaatgtcaaagtgggagtctcgagaaattttaaaatgcagacaatggaatgaaaatgaaaaatayaacatatcaaaatttgttagatacagctaaagcaatactaagagaatttagagcactacatgtatataaagaagaaacttctcaaataaacaatctaagttcctacctaaagaacctagaaaaagagcgaaataaacccaaagcaagcagaaggaagaaaataataaagataacagcaggagtcaataaaatcgaaaacagaaaaacaattatgtgagaaaaatcaacaaaaaaagagctttttttaagattaataaaactgacaaaccttgagcaagacttgagaagatacaaattaccaataccaggaatgaaaggggatatcactacagattttgcagacatcaaaataataagtaaatactacaaacaactctacacacacgaatttgacaacttagataaaatggacccattcctcaagaaacacaaactatcacaactcactcaatatgaaatagatcagttgaatagccccaaaatttaaaggaattgaatttgtaatggaaaagtttcagaaaacatatgtgactaccaagttggggtttattccca

SEQ ID NO: 824976 - DNA, 564 bp, Homo sapiens
aaattttaagccagattttgaaaatgtaattatataaatacatccaaaatgtgtgtgtgtgtgcgtgctgtgtgtatgtgtgtgtgtgatggttcatttttaaagaattttatattttgttattcttgaactttttcacatacagattgatttcccataagctcttgttaaaatggcctcagtttaattttttgtgctctgctcaaaacagtattaatgaaatgaatcaatgtccaaagtatgctacctggtaagttggtgaggatcccagaaatgaaattaggagacctacatttcagtcttagtcaatattttgtgttgtttctcattaaaaggaatgtatttcaaagaaggaaattctagaccagttgttcttaaagggtagtccagctccctgtgagagtccccaagacacttgcagaagggccaggagctcaagattatttttatgattgtactaagttgttctttgccttsttcactctcactgtctcatgagtgtatagtggaaggtgcatgtacagaaagagaacatatagaggctgcataacttgtgatgacatc

SEQ ID NO: 824977 - DNA, 281 bp, Homo sapiens
ggccaaggcagggtcaggggcatggtaagaccagcaacagggctggggctaggccagtgacaggaccagagtcagggcaagggccagagcagtgcaaggccagggtagggccaggcatttcagggtcagggccaggggagaaccagggcawtgtctcaagcagggaagggccagggccaggccagggccaggacaggtccagggcagggccatgacagggccaggggctgcgttagggcaagggcagggccagagcaaggtatgggtcagggccaaggcca

SEQ ID NO: 824978 - DNA, 600 bp, Homo sapiens
cttaacatacaatgtgatacatcatatcaaccaaataaatgacaaaaacagtatgatcatgtcaactgaaactgaaaaagtatttgataaaattcaacatcccttcatgctattaatcctyaaagaaacaggtacagaagaaacataccacaacataataaaaactacaggaaagacacccacaactagaatcatatggagtgaggtccaggctgcattgagttgtgatcccaccactgcactccagcctgggcaacagagtgaaacactgtctcaaaaaaaaaaaatacgtaaaaagaggtatgagcctcttttataggtgcagtgactcacaactgtaatcccaacactttctgggaggctgaggtgagaggatcttttgaggccaggagttcaaggtcagcctgggcaacatagtgagaccctttatctacaaaaaaaattttaaatatttgccaggtgtggtggcacgtgcctgtagttttaaacaattatcatatgacccagatagtgtattccttagtgatacaaccaagggaaatgaaaatatacatccacactaaaatttgtacacaaatgttcacagcagcattgtgcata

SEQ ID NO: 824979 - DNA, 600 bp, Homo sapiens
cttaacatacaatgtgatacatcatatcaaccaaataaatgacaaaaacagtatgatcatgtcaactgaaactgaaaaagtatttgataaaattcaacatcccttcatgctattaatccttaaagaaacagrtacagaagaaacataccacaacataataaaaactacaggaaagacacccacaactagaatcatatggagtgaggtccaggctgcattgagttgtgatcccaccactgcactccagcctgggcaacagagtgaaacactgtctcaaaaaaaaaaaatacgtaaaaagaggtatgagcctcttttataggtgcagtgactcacaactgtaatcccaacactttctgggaggctgaggtgagaggatcttttgaggccaggagttcaaggtcagcctgggcaacatagtgagaccctttatctacaaaaaaaattttaaatatttgccaggtgtggtggcacgtgcctgtagttttaaacaattatcatatgacccagatagtgtattccttagtgatacaaccaagggaaatgaaaatatacatccacactaaaatttgtacacaaatgttcacagcagcattgtgcata

SEQ ID NO: 824980 - DNA, 602 bp, Homo sapiens
ttccattcaattccattccattttaatctattacattgcaatccattacattcgagtccactctattccagtccattccattctggtccattccatttgattccaytccattcgattccattcaatactactgcattccattcgattctattctattcgaatgaattcctatcgaacccattctttttgagtctattctatttgattaaattccatttgagaccgttacatttcggtccattcgattccattccattccattccattcaatgccattccatttgactatatttcttgagaatccattcaatttgagtccattccattccattccatttcattctattccatttgatgacattcctttcgattctattccattggactccattactttccattccgttccatccgattccactccattatattcctttccattccatttctttcgtttccattccatttgagtccattccactccagtccattccattggagtcttttccactcccgtgaattccattcgggtccattccattccattcccatccatttgagtccatttcattcccttccactccattggatatctttccatt

SEQ ID NO: 824981 - DNA, 602 bp, Homo sapiens
ttccattcaattccattccattttaatctattacattgcaatccattacattcgagtccactctattccagtccattccattctggtccattccatttgattccactccattcgattccattcaatactactgcattccattcgattctattctattcgaatgaattcctatcgaacccattctttttgagtctattctatttgattaaattccatttgagaccgttacatttcggtccattcgattccattccattccattccattcaatgccattccatttgactatatttcttgagaatccattcaatttgagtccattccattccattccatttcattctattccatttgatgacattcctttcgattctattccattggactccattactttccattccgttccatccgattccactccattatattcctttccattccatttctttcgtttccattccatttgagtccattccactccagtccattccattggagtcttttccactcccgtgaattccattcgggtccattccrttccattcccatccatttgagtccatttcattcccttccactccattggatatctttccatt

SEQ ID NO: 824982 - DNA, 621 bp, Homo sapiens
cccatctttgtggttttatctacctttggtctttaatgatggtgacctacagatgtggttttggtgtggatgtcctttttgttgatgctgttcctttctgtttgctagttttccttctaacaatcaggaccctcagctgcaggtctgttggagtttgctggggttccactccagaccctgtttgcctgagtgtcaccagtggaggctgcagaacagcaaatattgctgcctgatccttcttctggaagcttcatctcagagggacacttggctgtatgaggtgtcagtaaatccctactggcagctctgtccattctcagagttcaaacttcatgctggagaaccactgctctcttcagagctgtcagacagggatgtttaagtctgcagaagtttctgctgccttttattcagctataccctgcccccagaggtggagtctacagaggctgccaggcctcgttgagctgcagggagctccacacagttcaggcttcccagctgctttgtttacctactcaagcctcagcaatggtggatgcccctctcccagcccaggctgccaccttscagttcgatctcggactgctgcactagcagtaagcaaggctgtgtgggcat

SEQ ID NO: 824983 - DNA, 579 bp, Homo sapiens
tgtcaatcatgctgggagctgcagaccggaactgttcctatttggctatcttggaacccatccaagacatctggtagaagaaatttgtaagcagcaaagtgttcaatttatgacctgagtgctcttaaaagtgttcagttttatgcattcacaaaaatatggtttggaattagaacttatgtttaaaagggagcagagcatgaaagtttggaagatttgcagcctgatgatgtgatagaaaagaaaacccattttctggggagaaattcaagctgactgcagaaatttgcagaagtaacaaggagccaaatgataattgacaagataatggggaaattgtctccagggcatgtcagagttgttcacaacagcccctcccgtgacagggttggaggcctaggagggaaaaaatggttttgtgggccaggcccagaactttgctgctctgtgcagtcttgggacttggtgccctgtgtcccagccatggctaaaaggagccaatrtacagctcaggttattgcttcagagttcaatccccaagccttggcagtttccatgtagttttgggttgatatgcta

SEQ ID NO: 824984 - DNA, 612 bp, Homo sapiens
aaatagaaagcaatgaaattgaatggaatggaatgaaatggaatggacttgaatggaacagcatcgaatggaatggcaagaaatagaatggaatggaatggattggaatggaatggaatggacccaaatgtaaargaatcaaatggaatggactaaaatagaatggactcgaaaggaatggtatcgaaaggaatttattcaaatagaatggaatcgaattaaacgcaatagtagggaatggaattaaaagaaatggaatcgaatggaatggcccagaatggaatggactggaatagaacgaactcgaatggaatggactgcaatgtcattgattcgaaagcaatggaattgaatggaatataatcaaatgcaatggaacggaaagcaatggaatggaattgaatggaatgcaatggaatggaatgtagtggaatcgagtggaaaggaatcgaatgcaatggaatcaattggaatggactggaatgcaatggactagaatggagtggactggaacataatggaatcaatcagattggaatcaaatggaacagcatggaatggaatgacatggaatggtcacgaatggaatggagtcgaatgtaatgtaatcga

SEQ ID NO: 824985 - DNA, 521 bp, Homo sapiens
acttgttctttataaattacccagtctcagatattgcatagcaatacaaaaaagactaagacactcagtcaccatcgcattggaatctcccctgactgctgagtccctcttaaaagagcactgtaggctggatgtggtggctcatgcctgtaatcccagcactttgggaggtcaaggtgggcagatcacgaggtcaggagttcgagactagcctggccaacatggtgaaaccccatctctactggaaaaacaaaaattagctggacatgttggcgagcacctgtaatccagctactcgggaggctgaggcaagagaatcgcttgaatcttcggaggtggagttgcagtgaggcaagattgtgccattgcactccagcctgggcaccaagagcaagaaactccgtctcaaaaaaaaaaaaaaaaagcactgtgatgggayactgggcccacaggcaacataggataagttcccatctcaagatgcttaatcacatctgcaaagtcccttttgtcatggaaag

SEQ ID NO: 824986 - DNA, 524 bp, Homo sapiens
cagtgaggccccggccccagacacattactggtcatggtgaagctgggagcccagtgcagctgtctgactcccaaagccaacactcaggccaaatgtcactgagccctgaggcactctgcccctgccagcccaggcactcaatggccctgagattcaccatggcctgttcttggtcttgagggtgttgctggcctgctggaataggggcccgtctgacaaaacaagtaggaggagcttcagaaaatagtggcagctgtgaggctaccaggagccacacctcaggcttcccactgcctgcccagggtccccatgcagcaggcctaatgttgaccagggagctatggccccaggttctctgaagctggccacaagatagagtcttctcctagtctttgctaatctgctaggcyctcatcttttattctgactgtgcagcttcatgcactggaaccaaaccccaaattcctcctcagtcagaagatgacgattatctcttgtcactgaagcagctgcatttcctgga

SEQ ID NO: 824987 - DNA, 621 bp, Homo sapiens
tttaggtcaggaaatggtaggaaacctgtagttgtggctcataatcctagtgggatattagaaccctcttcatttgtcagaacagattcctggggtctgctcccaattattcacacggtggytcatgcctggtaatcccagcactttgggcggccagaggcaggcagattgcttgagcccagaagtttaagaccagcctaggaaacagaccccatctctacaaaaaattcaaaaagccgggcgtgaagccctgtttttttttttttaaaaaaagagtctgctggtgatgtctgggcatgtgtctgcttcacagtccagtgttatgatcagtagctgtgatggacaatgaacattgctgcttgttcaaaatgaagaaaaaaaatatcaaagaaaaccaggtttggaagtttcagatttggaaaaggagctgggccagcccatctggaatagctgaggggccctgttagccccaccctaccccaccccacccccgtatgcagcatctctggcggtgcccagaggcaagcccccttcagtttcccacctctcactctgccttccagagcctagtcaagttttaaattcccaggtccactcagcagaacttgctcccttctctga

SEQ ID NO: 824988 - DNA, 621 bp, Homo sapiens
tttaggtcaggaaatggtaggaaacctgtagttgtggctcataatcctagtgggatattagaaccctcttcatttgtcagaacagattcctggggtctgctcccaattattcacacggtggttcatgcctggtaatcccagcactttgggcggccagaggcaggcagattgcttgagcccagaagtttaagaccagcctaggaaacagaccccatctctacaaaaaattcaaaaagccgggcgtgaagccctgtttttttttttttaaaaaaagagtctgctggtgatgtctgggcatgtgtctgcttcacagtccagtgttatgatcagtagctgtgatggacaatgaacattgctgcttgttcaaaatgaagaaaaaaaatatcaaagaaaaccaggtttggaagtttcagatttggaaaaggagctgggccagcccatctggaatagctgaggggccctgttagccccaccctaccccaccccacccccgtatgcagcatctctggcggtgcccagaggcaagcccccttcagtttcccayctctcactctgccttccagagcctagtcaagttttaaattcccaggtccactcagcagaacttgctcccttctctga

SEQ ID NO: 824989 - DNA, 504 bp, Homo sapiens
gggtgctgaggaagttgggctgccataaccaattagaaagcttcgggtggcttagagcaacaggaatgtrtcgtctcacagttctggagaccggaagtgtgagatcagggtgcctgcagggctgcgttccctctaaaggtgccgagaaggagcctcccttgcctcttccagctcctggtggctcctggcttccttggcttgtggcctagtcactcagatctccctttgtctttgcgtggcctttccctttgtgtgtctctatgtcctctcctcttcttcctaggacactagtcactggatttagggaactgcctaaatccaggatggcctaatcttgacatccttcatttaataatgcctgtaagtggcacaggacaggcgagcccccaagggggcttagcctgcgagggttcttggctttccctaggagagaattcaaggcaagctggtggtagaagaaaacagctttactgaagagatgttatagctctgtgccagctcctg

SEQ ID NO: 824990 - DNA, 504 bp, Homo sapiens
gggtgctgaggaagttgggctgccataaccaattagaaagcttcgggtggcttagagcaacaggaatgtgtcgtctcacagttctggagaccggaagtgtgagatcagggtgcctgcagggmtgcgttccctctaaaggtgccgagaaggagcctcccttgcctcttccagctcctggtggctcctggcttccttggcttgtggcctagtcactcagatctccctttgtctttgcgtggcctttccctttgtgtgtctctatgtcctctcctcttcttcctaggacactagtcactggatttagggaactgcctaaatccaggatggcctaatcttgacatccttcatttaataatgcctgtaagtggcacaggacaggcgagcccccaagggggcttagcctgcgagggttcttggctttccctaggagagaattcaaggcaagctggtggtagaagaaaacagctttactgaagagatgttatagctctgtgccagctcctg

SEQ ID NO: 824991 - DNA, 604 bp, Homo sapiens
tgagaatgaagaataatctattcactcatctttgtcagcctcctgcactgcaccctcggctcagcaggaagcgcacctgggaagatgccatccttctgtggctctgtaatccacctgttaaatggctgcttcaaggtcaaacaaaacttgctaaaaggagggtttgaccttgcctttgcccctcgaacattttccaaagaaactcagagccaaccatagaagaaagagcttttgtgaatgatagaacttattataggcagcatgctgcccaaaacgtactttgtaaaactctttggctaaagccattgatatttatacaattcttacaatcacaacacaagtcttcagaggaaagtagcgcacagatttgggtaatgacaattagacataataagagaagcagagacaatgagagggctagtcatggaggacatgcagattaaaacaggctgatgtgcttcttgttggtggggaaggcttatgaaactggaagtgttatgctaatttttaaycttagcatcccaaatgagaaagagaattaagaaatccacattcttatgcagtggaatgcaattttacaatatttgcccaaagttctaaaaca

SEQ ID NO: 824992 - DNA, 627 bp, Homo sapiens
aatgagctaacatcacaagtaacatttcacaagcatttacaaagctcttctgggtgcagaccactttgagctggaattatgaaaaacatggtccttgcctcttaaagcctcaggttgtggcctcatgggatttctgggaaggggagggagggtaagaccagtggtcaaagaaaaggaagaaaatggttctagtatattaaaaaaaaaaatatttagattgcttgagtgccctgaagtggccaaacctgtaggtttcagtacaaagagaagccctcatcaagcaactgtcatggcactttttcatcctggcttctaaaaatggaagggagggcattttccagagaaaggttgtgtccgcctataaaccacagaggtaattaaatgccaaccccgaagtcctccaggcgcttgcatcgtggtggggtaagcaaggggcttcatgtgaactgtgggaagtggccagtcccttaccgaacataacaatgtcccccttcaggaaggcaccaccgaacacaaagcggacttcatcagcgtggtcggctttgacaaaagcyggcttcgtgtcttcaaagcactgaggccggtgccgaaactcatagaagtagacaggtgcaccagcatctgaca

SEQ ID NO: 824993 - DNA, 627 bp, Homo sapiens
aatgagctaacatcacaagtaacatttcacaagcatttacaaagctcttctgggtgcagaccactttgagctggaattatgaaaaacatggtccttgcctcttaaagcctcaggttgtggcctcatgggatttctgggaaggggagggagggtaagaccagtggtcaaagaaaaggaagaaaatggttctagtatattaaaaaaaaaaatatttagattgcttgagtgccctgaagtggccaaacctgtaggtttcagtacaaagagaagccctcatcaagcaactgtcatggcactttttcatcctggcttctaaaaatggaagggagggcattttccagagaaaggttgtgtccgcctataaaccacagaggtaattaaatgccaaccccgaagtcctccaggcgcttgcatcgtggtggggtaagcaaggggcttcatgtgaactgtgggaagtggccagtcccttaccgaacataacaatgtcccccttcaggaaggcaccaccgaacacaaagcggacttcatcagcgtggtcggctttgacaaaagctggcttcgtgtcttcaaagcactgaggccggtgccgaaactcatagaagtaracaggtgcaccagcatctgaca

SEQ ID NO: 824994 - DNA, 615 bp, Homo sapiens
tatgtatttattttttagagatgaggtctcactgtgtggcgcaggctgctctgcccgccttagcctcctaaagtgctgggattacagtcgtgagccaccgcacccagcctgtgctgtgttttccagcacagcccyagtttcaaacattcaggctcactgcgggcccatgatcctaggttttagttcagaaagctttgctagggaacttctgggtgttcgcctcatcccagctgggaggagaagctgaaaaggtttgggtgggtggggataaaggctgggggtggcagaatcttgggttctagccctgccctctcttcccagtggccgatcctacctgctccgattgcgaggagttgagctgccccaggaattggctgggcttcacactcctcacctctggctactttggaactcatcccccgaaacctccaggtaccagacaagaaagttccccagaagtaaggggagaaagtcattcccttacaggatctctgtcctgtaggcccgtatgcctttgctatggcatctcctcctaggaggagaggatgctgggaacagggtgggtggaggaaagtcccctgaggaggctgtggtggggttgaggtaggggagcaa

SEQ ID NO: 824995 - DNA, 612 bp, Homo sapiens
ggataaagaatgggatggtgggaggaggcagcagaacttcagggaagtatctggagggtgagagttaaaggaggactgcagggagaattggggcccaaggagagctgaggaacaggacagagggtgccaggtcctaagaaacagtacttatctcctcaggtggactttgagggcagccttgctgaaaatcgcttcacagtcctccccaacatagatcctgaaattgatgagagtgagtgttgggtgtggatgggcctgtgagccctgcgcagtgatggagtaccatccttggcaggtggtcaccacagctggggatcttcatagcaaccagggcaggagactcacttttgataaccacgtgtcttccaccctcgtagaaaagcgaagactgatgggacttcccagtttccttactgaggttgcccgcaaggagctggagaatctggactcccgtattccttcatgcagtgtcatctacatccctctggtgagggcaggagagtgggtgtagccttcagatgtmttttgggggagatattaggcttatgaaagacatactggtagataagaaaacttgtggggcagcctgaagaacatgaacacttttttgtg

SEQ ID NO: 824996 - DNA, 701 bp, Homo sapiens
aaggatccatctcccctcacacttgtgcagcaytttaaggttgatcaaggcactgggtgggcgtgtatcatctcattcaatccacaaaacacactttgtaggatagatttgcatatgttcattttacagacgagaaaccaaagtttcgagaaattgaatggttagttcatggtcatccagcaaataccagttgttgagagccccagtctgtctgccgtccacaccatgtgcaggtccacctggcaatgtgcttcaggagacaaggcgggtgggcatcatggatggccattctgggctatggttcagtaagttttgcagaaagcacgctggatgggagtctagatacacctgaaaagcatcagatacatctagatacatctgaaaagcccatggcttttcaaggtttatttctcccttagagaaacggaaggtgatttgaagggacaatgaggctccaggatctggccccggggtactctctgcctcctgctacccccgggttttagaggctgggaactgccagttttcaaactgctttttaggtctgcagaaacttcaaccttttaaaaaaggaaacataagaactccaacttataaaatggacgcaaacggcactgaaggtaggagcctcttccgacctcctcgaatgatcaccccagccagtttcaggtcctggctttctgggtgagaatagtgaccga

SEQ ID NO: 824997 - DNA, 688 bp, Homo sapiens
tctcagggggtgtcatccccggggcatttcatgttatttgttacatatttctagaaagatggaacttttttggtcatcagaaaaagttaagagatgaaaagcagaagatattctgttaaattttctgtccagatactgtctaaacaggaatctgtgcaggacggggacctgtcttttagactgaggctgtttctggcatttctaagaatttgatgacttcaaattatgggggagagtagtaaaagctgccagttaccaaggaaacaactgtagacaaatgtagtggacatctgtagatttttttctgcccagagtttctttcctcttctgttactcacatcctgaaataccacccctctaagtccagaagatagggtgtgcatgcgcccaggtctggccagtgaggagaatattttgtgctcacagccacagtgattgctttagggtggggcaggtgactcaagctagtccagtgagactcagtctaggaccttttgttgtaaccacagagagaatggtactccctttccactaagctgagagaaagtaagcctgcaggtgcagggatggcctgcctgagaaggaagccaaggtggacagagaaagagtaagggccagagtgaagtgtgtgagagagaagcctgacaaatayagaacccctggatccagctgtgcctgaagtcattgg

SEQ ID NO: 824998 - DNA, 522 bp, Homo sapiens
tttttttttttttagagacaatgttttgccatgttccccgggatggtctcaaactcctggactcaaatgatcctcctgccttgggctcccaaagtgctgggattacaggcatgagtcacyaagccaagccaacataagcattttttaaaaaattatttgagataaaaagatccaagtgggccagacaatgaagagtttgtttcttttttgttacatggagagaatgagaatgtggcaaatttggggagcacatttttctatagttggagaaaaccttgttgatgaccaagacttttggattaaagttgggtttaaccatgtgggttgcttctatgagtcaatacttttaaggtaattcaatacaaagacagtgggtaatatcttgaaaatggcaaggacaactgtatctcacagtcaaacatacccttttctttgggggtcaataaactctaagccaccaatcttcagtgttgtgggaaattcttagaaacctcagaatcgtttcacgaagaccagatgacg

SEQ ID NO: 824999 - DNA, 643 bp, Homo sapiens
agtggctaaagagacaggctacggagtgagactacctggactccaatgcctgctttacacctaccagctgtgtgaccccaggccagctgtgccgagaacagcctctcccaggagggtggcaggagacactgtataaagggtgagggctcagtcaggccagtggtgattactactgtggctaggactgtacaccactcacctgatggcagcagaggaaaagctgaggtccccacctattaagggaggctctgtgaacagcaagtcatcttccccaaccacaggccttgttattttattctaaaaccaatcctaaaacgcgctttttactcaacgagtctgcaagcttcagttcattccatgctttcatctccctgaatagttcccatagattcctaccctttagagtgtggtctcggtgctctatccttccacctgtcacactcgtccttcagcatgaacatcagtctcttgtgagtcagaaccacaaactctagatagattcaccttttgctttcttccatgaggtaactcataatgacactttagaattcctttgcatttcacaggacatgcaaggtatccttttctatatttttggccatcatttcatcgttgtccwtccattttttaataatgttttaca

SEQ ID NO: 825000 - DNA, 619 bp, Homo sapiens
agggcagtgggatcaacttagtaatagcagcaactccacaagagccaaacactcagggggctcaggaagggacagagggaagaaccgtgtgggagttttcttgtgcctcctaaaggaggcacagtgctctgaagccaaggttctggggaagccaacattgctacgaacctgggcttgcaggacaagtgttccccacatcttctgcaaagcaaagatagactgctatcaacttaagagaactgggttccagaggtgactcttgggtaagtcatcaacccccacctgcataggaaagacccctttcctaaactagccaatgcaggacacctcgtgaacaggacttttcaatcactgtattttcatatattcacacggctttcctgcaaacttttatttatttatttatttatttatttatttatttatttatttattttgagacagagtctcgctctgtcaccaggctagagtgctgtggtgcgatctcggctcactgcaacctccaactcyccagttcaaaggattctcctgcctctgcctcccgagtagtcctgcaaacttttcttaaatgacatattttaaagaatgttcatctgagtgcagcacagaaaggttctcc

SEQ ID NO: 825001 - DNA, 619 bp, Homo sapiens
agggcagtgggatcaacttagtaatagcagcaactccacaagagccaaacactcagggggctcaggaagggacagagggaagaaccgtgtgggagttttcttgtgcctcctaaaggaggcacagtgctctgaagccaaggttctggggaagccaacattgctacgaacctgggcttgcaggacaagtgttccccacatcttctgcaaagcaaagatagactgctatcaacttaagagaactgggttccagaggtgactcttgggtaagtcatcaacccccacctgcataggaaagacccctttcctaaactagccaatgcaggacacctcgtgaacaggacttttcaatcactgtattttcatatattcacacggctttcctgcaaacttttatttatttatttatttatttatttatttatttatttatttattttgagacagagtctcgctctgtcaccaggctagagtgctgtggtgcgatctcggctcactgcaacctccaactctccrgttcaaaggattctcctgcctctgcctcccgagtagtcctgcaaacttttcttaaatgacatattttaaagaatgttcatctgagtgcagcacagaaaggttctcc

SEQ ID NO: 825002 - DNA, 620 bp, Homo sapiens
ccctttctgccccatagacacacatgtatgcacacaatcacatgtgcacacacagagtcaaggacaaacatatgagaaaccactgggttcagtaaggaggtcgccaggtgaggaaggaagaaatcaaagcagmccctgacgctcacaggggggtcaggttatttttctcttggacataaacattctcacagaacagctcccccggtgagcttactcagagcaggagtaagtgagacaaaccaaggagctttataattttgtctaagcacagacaaaaacaaggtcgctgtaccacctcctgattagagtgagtgacagctgcttcttatcccctgcaggcttatcttcaccgcagcttgccctccctacagatgagactaagacacatgggggagacgcaatcataggatcttccctgctttctgacagcaaccaatccacagcaaacacctgctgccttacaccctctcccaatcacccaaccaaagcccaaatcctatacctccttctcctactgagacgccttattgttcttcaccatgtgtgttctttcttgtcaaaatgagtaataaacccagcttgttaacctttagatatcctcttggtggccttcagcttgt

SEQ ID NO: 825003 - DNA, 534 bp, Homo sapiens
ttggcttaacaatgttgatgaagaaagcccccaaagggaatatagatgaaagtaaattctggttcgtgcttctcactgccccatttctatttatttaaagtaaccatcagcaggtgaaatgacccacaagttatcatgctgtgaaaacataagcagcagattaccccattttttatactgaaagcagtcttgtgagctacacctattgctacaacttttactaaagcatttattgcttatttcatggattgctaactccttggcattggttgggatggctgtgaggatttatggataagtcttcatgggtctctctctggagaaaaaaccaaatgtctctctccctcagttgaacacaggacgttgggcactgtgctcagtctgtcaccaaggcaggcaggagggaagcayggacccatgaccactctttctagaagaaattaaagaggaaatatatctggcatattatcttttcttaaatggatattttccttcagtggtaactaaatgcacataatacaacattctaaaaat

SEQ ID NO: 825004 - DNA, 599 bp, Homo sapiens
tttaacattctttttcagttgtgatgaaattacttgaaggaagcctgggtaggtttgggctgcctgttcagaagttagacttaatttgaataacctttcatagccagcctggatgcaggcgtttcttttcatagctttaaggaagtagtagtgcacctttgtggtacagctgtcctttttgttttttgtaccgggttcaaggattcagacacaccgccctgcacaacgcccagtgtttaccagttcagtctgcaagcgccagctcctctcatggccggcttacccaccgccttgccaatgcccagtggcaaacctcagcccaccacttccagaacactgatcatgacaaccaacaatcaggtacgtggccctctggcacccttcccgctggtggcccctgggaacagcatccgagctgtgatatgcactagaggagattgatggtcctttgaattagaagagtaactttttgagtmtttggccattggtgtgttgttctaggaaatcctctcttttttgtggtgttgaggtcccccatgtatagtttcagcagcgaggacactgtggttcttgagtgctgccgtggcttttcacggggg

SEQ ID NO: 825005 - DNA, 606 bp, Homo sapiens
tggtcatgacaatcaggtttgaaactcttggttaaagcgaaagtcttgcaagaaaacataaatgtrgctgcattacacttggggagactaaacttgagggagccaaagattggaattatgcagtttcaaaggccataccctgagcttcacaatcctgcctgagtcagcaattgcaacaataatgctgtataacaaatcatcccagctcagatgcttgaaagactaagtatttcttctcacgctcattggtttctaggtttactgtggttctgttgagctagacttgtctcagctgatcagctctgctgcagactgcatgtctcctgagcatggttttaagctatagattgggttctcatccactcaatgtgtatttgttctgggatcccagcttaaggggtgacagctacctcagacatgttatagcctaaatgcagagaagagcaagcacatctaaggtctctgattgcatcatgtccacaggcactccagtggttaggtgaagccacatggccaagcccaacctcaggaagtagggaaggaaattctgcacggtagtattggggaagaggggaatgagttttagctgacaaataatccaaacta

SEQ ID NO: 825006 - DNA, 656 bp, Homo sapiens
tgcctgaggaaagagaagctgtgaaataatcatgtctagatttgggaagaaaaatttacttagaaaatgtagaagaatcatctggttggattaaatgcrtttcagatgtgtggtcatttattgatgtgtccactcaacaccgttttgtaacattttccagccacaagcagcttctggggagcagatacaaagaaggtaagcagttgggcataactaggtattatggttaattttatgtgtccatttgtctgggccattcacccagatacttgatcaagcattactctaaatgtttgcagtgaaggaattttttagatgaggttaacatttaaattgatagactgagaaaagcagattgccctccataatgtgtgagtcgaccgcatcagttgaaggccttaatacgaaaagctgatctccccggcctgctggcctattctgcagattttggacttgccaacatccacaattctgtgagcgagttccttaaaataaatctgtatatatgtacatactattgtttctgtctctctggagacccctgactaatgaacaaggtttggaagagaggtagggttacaaaggaaatctgatgaatagagaaagggcaagagaaagcagtctgccttcaagggatccttaaggtcatggtgaga

SEQ ID NO: 825007 - DNA, 640 bp, Homo sapiens
taaacaatgtctgacctatagcctttgaggtaggtttctgatgggaattgcagatgatggagccaccttctgctttagggacctcccccattcccgggtggacaccgccccccccgcaacctgctctgcttcatgcatagagggaagaaataactattccctggagatgccgcatctgattcataaggaaaaaaaaagggatttgaggggaagataataggaaggattttgttttgtttcatttttttctcatttcacattttatttgtagaagtttaatgactagatatcaatgttctcttttatttatctactttcaaattttaatgaatacttctggctataattacctaatttttatacttaaaatgactagacacctgtagttcagagcacattgtattccagcatgatggcttatggtatcaagtgctgcatatatatggattaatcaataagcaaattcaattcttatgaggtgcagttcattctttaaattgaagaggcattgacaacaggagggagagggtttagtgctactctcttaggatgagaatctaccatgaatgtgttcacttctctgttgytcctttattatccagggaagtggcttaatattttctaagagtggccattgtaa

SEQ ID NO: 825008 - DNA, 630 bp, Homo sapiens
ccctacttaaagtcacagagctagaaagtgactggaaggtgcctacatttatgttgtctaaattcacaacccaagctgtttcaaatatttcaaagtgcttctaaaattagaaattccaggtgacttacaaattgtgagttggggtatttatatatgtggaggtgaaaacaaatccctgtcgatgtgacgtggaattgaaatcaaccataacttggctcagagatggggctctgtgcaggtggtaatccaagctgtcctcgaaggtgagagctgttactaccattcccgatgttaacagtggcctgagcttatacactagaagagtctccatcagaaagagaagaagatgttggaagcttcagcagatgggctgtttgcctctcactgaaaagaacagcatcgtatcagggtctgctggggttttacaaagcccagatagagacaagagttgccgcacaacccataggagaaaaattaagcaaactaaaacctttcttggagagcagagcttccatataaagattgccacttggttgcttgctggcatctctccgcgatggcagattttcacccgaaaccaccagagcccgccycaccccttatctctgcgctggccctggtggagactcc

SEQ ID NO: 825009 - DNA, 531 bp, Homo sapiens
agttccagctgtatatttcccccctgttggatttcctttgggtaaatacggagtcaaatcaaactttgaacttccaactccctgccagactgtttyttactacccctatcccttgctccccacctcacccagatctctcctccctgcctctgtcccgaggtggcggagaggctgggggaagccccagcgtgggaatcctcagagcggtaggagggagagaggctcagcgtcaagggctgaccccggggtctctgctggcctctgctgtggtgtggccagtgtcatgcgccctggggattccggtgcctggggagcaggggcttggggacatgtcccgccaaaggtgaggaccttggcagctgcattcagacagggctacccctgacacacaggtgagcatgcgcacatacacacatgcacacacatgcccccacgcacatgcccgcacacacgcctgcacacacatgcccacacacacacacacgcacacacatgcccgcacacacacacggacacacatgccccccccac

SEQ ID NO: 825010 - DNA, 531 bp, Homo sapiens
agttccagctgtatatttcccccctgttggatttcctttgggtaaatacggagtcaaatcaaactttgaacttccaactccctgccagactgttttttactacccctatcccttgctccccacctcacccagatctctcctccctgcctctgtcccgaggtggcggagaggctgggggaagccccagcgtgggaatcctcagagcggtaggagggagagaggctcagcgtcaagggctgaccccggggtctctgctggcctctgctgtggtgtggccagtgtcatgcgccctggggattccggtgcctggggagcaggggcttggggacatgtcccgccaaaggtgaggaccttggcagctgcattcagacagggctacccctgacacacaggtgagcatgcgcacatacacacatgcacacacatgcccccacrcacatgcccgcacacacgcctgcacacacatgcccacacacacacacacgcacacacatgcccgcacacacacacggacacacatgccccccccac

SEQ ID NO: 825011 - DNA, 571 bp, Homo sapiens
gccgggaatcaaggctgacagcttcaggcgccagcagaggktcggccggggacattgccttcagaggccactgctcagttggagctgacagggagcccagccatccctggcctggtggggacacggcggtggtgcccgtgtgggctgagagagcctgtctccctggcctgccctcggatggatcgggagcacccgaccagcggcaggctccaggccttgctttctcatccgagctgacctccgtgtcctgtcttcctgcctgtgaaatgggcatcattacagggctggcgtcccagggtcagtgggtcaaatgctgatacccccttcggcagaggctgggcccagggaaagcttcctgcacccaaggtcattgtcataattacgtgctcatggcaccccccgacactccactggcaacccctggggcctcctcccagggctcagtttccccagactcctcaccagggtcctaccccacccctcatctcccaccagcttcctctccttcccctggcaggggcctctgggccatgtagggcataccaagcacattctccctttggaaacttca

SEQ ID NO: 825012 - DNA, 548 bp, Homo sapiens
aaagggccactccagactcctgaaactctaygcctgttagagatcttaagataaagctgaccaaggaaattttccccagaagcagacggcattcaagatgtgaacagctttcccaagattgtatatcaaagctgctttgttgtcatgaaagccttaccttttttttatttacttttcctttattttttgttgtttgagtctgatataatttggcgctttgtccccacccaaatctcatcttgatagactgtggacttttaagttaatgttgaaatgagttaagactttgggggactgtttggaaggcatatttggttttgaaatgtgaggacatgagatttggcaggggctaggcgtgcaataatatggtttggttctgtgtccccaccctaatctcatcttgaattgtgctctcatgattcctatgtgttatgggagagacccagcaggagataattgaatcctggggctgatttccctcatactgctctcacgccagtgagtaaatctcatgagctctgacggttttatcaggagtttctgttttt

SEQ ID NO: 825013 - DNA, 597 bp, Homo sapiens
taaatatatactaatcaataaacactaattttaaaaaaacaaagaaaacacttgctatatcataggtggaccttgcaattattaacactgatccatattttcacagctagctgaatcagcacaacttaktaacctttatgtttgtaagagattaatttgatatagatatagcttaggtatccagaaatttccttttgaagattaaaccctagcctcatagtgagaattcctcttggggctaggactaatctattaaattattgcctattctaagccttttttcacttatttttataatgtttacattttaagaattgtgatagctggctttaatcagggagcattaatcgaggtaccaaatgagactactttatattcagatacaatgaatgttcctgaatgaacaagatgggggtagccttttctgtacctccccttcattatttttctagaaaaccttaaagctgttcagtaaatttaactgcagtcactgactgtgatagaaagtaatttgaattaaatgtatattcaaaactatttaacccagaaggtagcagacaagggtatttaaaataaagcttctggcagaacatgtga

SEQ ID NO: 825014 - DNA, 512 bp, Homo sapiens
ttaaccaggttagtctttcaaaacaaaacatcataaaagggatggcttaaaaacagcaaagttctggaggttggaagactaatatcagggagccaacatggctgagctctggggatggttctcttcctagtttgtaaatggccattttctcactatgtccttacatggtggagagaaagctctggtgcctcctctttttcttataagggaaccagtattattacatgtgggatctatcctaatgacctcatttaaccttaatcaattccttaaaggccgtgtctctaatacagaaacatgggattgagcttcaacacatgaattttgccagaacacaatttagtccatagtcttccctcagctggtgcttcagaatttaagttyttcttttaggcaaaaatatgttcattccatcccaacagccttgctctccaggtcagtagtaggagtggcagccttgatgatctatgaattgccaacaatccccatagccttagctcattctagcatta

SEQ ID NO: 825015 - DNA, 512 bp, Homo sapiens
ttaaccaggttagtctttcaaaacaaaacatcataaaagggatggcttaaaaacagcaaagttctggaggttggaagactaatatcagggagccaacatggctgagctctggggatggttctcttcctagtttgtaaatggccattttctcactatgtccttacatggtggagagaaagctctggtgcctcctctttttcttataagggaaccagtattattacatgtgggatctatcctaatgacctcatttaaccttaatcaattccttaaaggccgtgtctctaatacagaaacatgggattgagcttcaacacatgaattttgccagaacacaatttagtccatagtcttccctcagctggtgcttcagaatttaagttcttyttttaggcaaaaatatgttcattccatcccaacagccttgctctccaggtcagtagtaggagtggcagccttgatgatctatgaattgccaacaatccccatagccttagctcattctagcatta

SEQ ID NO: 825016 - DNA, 382 bp, Homo sapiens
tctttaaagtaatagaactttaaaaatgaactaactaacttctaaaatcttactctagagaaatgtaacagaataccttcatattggagagagattattttggttttagtttgatttctttctttttaaaagtwatttttgattagaaagtccattcatgtggttcaaagttcaaaagtccatactgaaaagtttccttcccaccccttccctgaactgcacaagtcccctccttgaagcagctacagctatcagtttgggaaggttttaaaacatcagcccatgaatgaattcttccctagtccagcccactcttctgaggattctataaattgaactcaaggtactttcaccccacaataatagaagcctaatatctaaa

SEQ ID NO: 825017 - DNA, 605 bp, Homo sapiens
aaagaactgagtttccttaaaatatataggttgagacgtaaactgtgtttaatctgtttataatacaatgtatagcagattgttcgcaatctttttttctamgtatgatatcttctaatgctaagtgtatacttcctttgatttcatattcaatatcgaaattttcccagtttcgttgtatttctacaggtctgtttggtacagaaaacagtgcttattttcatggtccacctccttgggcggtatttgaaatcaaaacagttattgtctcattgtcattttaagccaagacagtttcattatctgaaactctggacataagatggtctgtgtttttaatttacaagaggagttacgtaatctacagaaagaccctcaggatatagtctgatgcctgttttgacatattcatccatgaaaagttaaatatcacaatcagaacttggatatgtcctccacaagtcattgtatagtagtattgctttgagaattaaatgagataaagtgaataagatgcctagcacagagttggtacttagctgggccttaaaaggatttaagatattaggagttagataagcacagaagacaagggacaaaattcc

SEQ ID NO: 825018 - DNA, 587 bp, Homo sapiens
gtgcagaagctctttagtttaattagatcccatttttcaatttttgcctttgttgcaaaggcaaaatctttgcccatgcctatgtctcaaatgatattgcctgaattttcttctaggttttttatagcttggggttctacatttaagtctttaattgatcttaagttagtttttgtctaaggtgcactttcaccacttctattcaacacagtacttgaaattctagccagagtaattaagagaaaaaaaaaggcatccaaataggaaaggagaaagtcaaattttctgttaacagatgaaatgatcttatatgtagaaaacccaaagacactaccaaagtactgttagaaccaagaaacaaatttagtaaagttgcaggatacacaatcaatatgaacagtcaatagtgtttctacatgctaataataaactatttgaaaacaagtcaagaaaaaatatcatgtactgcaaaaaagataattaggaataaccttaacctaggaggtgaaaaaartctctacactgagaactataaaacgttgatgaaagaaattgaagaggatacaaataaattaaaagatatcctg

SEQ ID NO: 825019 - DNA, 519 bp, Homo sapiens
aaaactgtaatcatccatgtctatcatacayttgtgtctgacaggcaaacgggtgaaccacctctagagaatggattaattccatacctgggctgtgctctgcaatttggtgccaatcctcttgagttcctcagagcaaatcaaaggaaacatggtcatgtttttacctgcaaactaatgggaaaatatgtccatttcatcacaaatcccttgtcataccataaggtgttgtgccacggaaaatattttgattggaaaaaatttcactttgctacttctgcgaaggtaagcagttttacatttatataccattctgtttgtcttctacctttttatgtgcttgtctatttagaaattttgatgtacttagattttatgataaaggtgttgaagagagttatccttatgtggagattcttagaaacataaataaattatacgtagcttcttagtaataatcatttagaaagtcaaaataggtatagatttgtcatttgttgacgagctaatgagggtgaa

SEQ ID NO: 825020 - DNA, 651 bp, Homo sapiens
taggatcttagtttttaaaatgtatttttttaaaatttaggtaaaacttacagacgatgaaatggttaggtcttcaaygtaaaatgtgatgaactttgtttaccaccaccatgataaagatatagagtactgcattatcaccaaagtaagtgccctcatactccattgtagtcaatctccaactcacttaggtaaccagtgttccaatttctatcaccaattagttttgcctgctctgaatgtcatataaataaaactacagtacaggttgagtatcccttatccaaaatacttggcaccagcattttgtatcaatctgtttcaatttcagattttggaatatttgtatatacataatgaaataccttggggatgggaccgaagtctaaaatgaaatacatttatgtttcatgtacaccttatacacatagactaaaggtaattttatagaataatttacatagttttgttcatgaagcaaagttttggctataacctgtcacgttggttatgtatgaaaatttccacttccagtgtcatgttgatgttcaaaatgtttctgattttgaagcattttgatttttggattttcagattagggatgctcaacctgtatgtatgcttttgttgctggcatctcacttttctgtt

SEQ ID NO: 825021 - DNA, 616 bp, Homo sapiens
cgtatgtttcttgacatagttctgccgcgttgctgattggacatagagagtttcattgttttcctcccactaggtgtgtcaactgatggctcttttagaggcaatgtgaagatgagagaaatccaatatcaaattcattcattcatttattcattctgaataatgaatgagggcttactgggcatataccgcatacagtgatttgcaggtgtctccacttcaggcacatgcactagagaggcaagcttttcacttttttgtgtctgttccctcctccatcacacttctcttgtcctccctctctacatgcaattcttatctggcaaatattaagagctcacttctccattccagaccctgtttatgttcctgcaatacaagagtgaccagatcacagcccctgcattaaattctaagagctactgttacaaagtaccacaaacttggtggcttaaaacaacagaaatttattctctcatagttctggaggccagaagtccraaatcaaggtgtcagcagggccatgctcttgccaaaggctctgggtgaaaaaggtgaggatctttccttgcctctttctggcttctggtgtttgccagcaatctttgatgttcct

SEQ ID NO: 825022 - DNA, 635 bp, Homo sapiens
atagtttttttttttttctttgcctctgagaaagatgatagaaggaaagagtactgggccaatacctaaaagacttaggtgctaggccaggatttccagttgtcaggctgtgtgaccttggaaaattggctttactcctctgataaaatcattttcctcaagtggtaaactgagcactttaaattggtgttttccaaagtaatttgagaaattatctctgttacaggggaataaatttaattttgattagtattacaaaaaatctattccaacaaacttatgatttatatgcattattgcttgggataaggctaaagtgaaaaagcgagtcaatttaaagaaaagtctgatagtaaataatattatagatggatgtgactaaaactgtgacggtggaatttgaaagaagatcataagggaccttcagtcccttatcaaagggcagagtccaggacgagcacttagccatcgcttctgtttttctacttggcacccccccagtttgtcctcccatccttcgtcatrcctttctgtcagcgtttgtgagaaacctgcccaacaaacccatccaatgctctgcagtcctttggtataaaattataattggcacaagtgatcatgtcatcaattgcagt

SEQ ID NO: 825023 - DNA, 337 bp, Homo sapiens
ttctgtgttttgatgcaggacctccgggagccggcgggttgccaggacacaacggattggatggacagcctggtcctcagggcccaaaaggagaaaaaggagcaaatggaaaaagaggaaaaatgggtatttttggcaactcttctaattaatttccctgttatttatctccatgattgcatttgggtcgactaaaactgtgtgcagcaggggtaaggtgtttcatctctgcacagtttaaggccggtttaactcttacctagaagccrttgcgttccgggataccaagggtatacttcttggtcccaccttgacagatgtttatttcaaactggag

SEQ ID NO: 825024 - DNA, 602 bp, Homo sapiens
gctggggaacagagtgagactctgtctcaaaaaaaaaaaaaaagaatacctaacctcctgggaaggcagcccagcaggtgtctcggccttattttacccagcccctattcaagatggagtcactctggttagaacacctctgacaaaaggagccacttggtccagatccatttaacatcaaggatggtggtgctatggacagaagtgaggaaacatggaagcgggctactttagaagtgaggatgctgagtttgttttgggactgaatatgacattaaaagagagaaggaaaactgagataagaaagaatattcagggaaaggagaacatcctgcttccaaggagaactctgccttctccatgtaagaggactttccaaattaaaaagtaaaaggcagaccgcaaaatgatctaagcctttataatggtaaagagcgtgggcattggaatcatactgtgagttcacttgtggytccccatcagccgtgtgaccttcggcaggtcactcaaccccctgcatctcagttccctcagctttaaaaaggtggcgatagcagtatctaacctacaagttatcataagaactcagttcaataatctat

SEQ ID NO: 825025 - DNA, 614 bp, Homo sapiens
tgtttagaaatggtctgcactaagatttctctctttgttcaaaataccttatctaactgaattaatttgaaatagaaaacactgtatttttaaaattattatttatgtatctgtttattagtagagatagggtctcacaatgttgtgcaggctggtcttgaactcctggcctcaaacaatcctccctctttggcctcccagactgctgaaatcaaggaagtttctacaccaactattgaagtaaataaggactaaaaattgtggatctcttctggtgtccatttacccctttttgtgtagtagtctctgtgcttctttggggaccagatgacacagatcttcggtggtaaggcaagagtgggcttcaagatcaggaagaaagatgctcagagagtcacttaggtaaatacagtgcgggcaattggaacatgggcaactcttagggcagtgttattgtacatggactgtagttggaggtacccaggttcaagcctggctctgctacttrttagtcatgtgattatgactttatgtctctgtgcttcagtgtcttcatctgtaaaatggggatgataataagactgcctcaaaaagttgtcgtgaagaataaatga

SEQ ID NO: 825026 - DNA, 624 bp, Homo sapiens
aaaataacataatatgtaatttgtgtattagtgagaggtgaagccagctggacttcctgggtcgagtggggccttggagaacttttctgtcttacaagaggattgtaaaatgcacccatcagtgctctgtaaaacacaccaatcagcgctctgtagctagcaataggtttgtaaaatgcacccatcagcactctgtaaaacgcaccaatcagcactctgtaaaatgcaccaatcagcaggattctaaaagtagacaatcacagggaggattgaaaaaaagggcactctgatagggcaaaaacggaacatgggaggggacaaataagggaataaaatctggccaccccagccagcagcagcaacctgttcaggtcgcctgccgctgtggaagctttgtccttttgctcttcataataaaccttgctactgttcactctttgggtccgtgccatctttaagactataacactcaccgcaaaggtctgtggctccattcttgaagtcagcaagaccacagacccaccggcaggaacmaactctggacatattggctgtcactgtttcaaatggtctttgacacctgcattgctgtcctgaatgcccctacctggtatcccacctttt

SEQ ID NO: 825027 - DNA, 621 bp, Homo sapiens
atcctatgagggaggtcctattgtactaaatttatagaagggatgattaagggcctgaatcratgagccactttttcaagttcatcactagttcaaggtctaattagagctggatcttgcagtctgacttcagagctgatgctcttgactagcacgctaaactgcaagtagaaggcatggtagggcacagagcacatttgaggggatgaaacaaagtcatatatggctgtgacctcaacattggaagacatttggcactgattattctcattcaccatcagtattctgcatccacagatgcacttcactataacaaaatttgcatataaaacttgcatgtacaagatagatattttgagggattattaagaatgttattaaaaatcattgctatgggattcctttactttagagtgtgcaataaaaaagcacaataggggcttcagaggtggacagatctggtttcaaatccttactttaccacttaatgtctttggaaccttgggcagcttctgagactcagtgttcttatctgtgaaatggggataataatacctagttcacagagttccaaaatatccctgcaaatagaggatacttaataaaaactagctaccattt

SEQ ID NO: 825028 - DNA, 547 bp, Homo sapiens
tggtgcacaactgtagtcccagctacttgggagcctgaggtgggagaatcgcttgcatctgggaggcagaggttgcggtgagccgagatcstaccactgcacttcagcctggcagcctgggggacagggtgagactcagtctccagaaaaaaaaaaaaaagaaagtgaggggagaaattccagaaagaacagagtcagagaggaagagtccccaaatctgcttataaaccactcacatttctggctgactcttgaatcatcatgtgtggggcagactccaagcaacccaattaaggctaagcactgaaattatatttaagactttggttctgcttgctttaaaaacatcaatattctttgaatgaacatattaaattgatgcaaaagtaatttaaagtaatggcaaaactgcaattatgtttgcaccaacctaataacagaatagagaatatccttagtgtattgctcacaatgtcaaggatacaataaaaaattgctagacatacaaaaaaagaaaagaaaaatgtgactcatattcaagagaaaa

SEQ ID NO: 825029 - DNA, 545 bp, Homo sapiens
atcaggcaatcaattaaaaattggcagatttgagcagtcacttcacaaaaatagacawacgaatggcaaataagcacatgaaaagatactcagtatgactgatcgtcagggaaatgcaaattaaaaccacagtgagatacagctatatgcccactaaaatggcaaaaatgaagaagactgcaaatactatgtattggtaagaatatagagcaactaaaactctgacacattgctggtgggtacattttattatatgtagagtagaataaaagtaaacttaaaaatgtaagagttaaaccaatgaagtttcaaaacaatggctatgatttacaaggcagggataaaaaggtccaaagattacaaaggagtaatgggataatcgctagtatttatggaggcactatgctaaatccttgctatatagtctggcccaatcttaacaaagagcctagaaggtaagtatacttatcatctccgttttagagctgagcaaactgaagcttacagagattaagtggcgaagctggggcaggctgactgcagta

SEQ ID NO: 825030 - DNA, 585 bp, Homo sapiens
gtccctttaatgtggggtcctcctctgggctcttcctctctctgggaagtgactgtgcacagggaaagtgtaattggcaggctgtgacactgctgtctgcaagtgtctctctaagtggaacgcatttcagctttatctggtgatgtctgctacctgagaagggccctgggccatctcaaagggcttgtagcagctaattgtgcctgttaggaccagcaattagctggggatctctggacttcgaagctccaacacccaccagctttcccttcctttctctccctttcacttaactagcccagcctaatagaggcagtgaaggacaggcaggtgaggggcagacaggacaaggaaggtggaggctggcagggcctcatcctatgcccctctgagtcctgcactccacccctgctcaagagaacctgcgaaaagaaacaggcaccagctctgctctcatgctgtaaatacatcctctttattgcaggaccagggctagaagcttattaatcggtatmgggagtcatgctgcccgtttgtacagtttaagcgggagttggaagatgacaataaaaagctaattaggcg

SEQ ID NO: 825031 - DNA, 534 bp, Homo sapiens
ttttcctggtgcagaaagggagacactcttatatatggagatttcctgatagatgtaaatttctctaaccaaaggataacattttggaactactccttagtcagcaatttctcaaaataactagctcaaaataatccatatgccaaagagacttatttggggtggcatatcaaaactggctcaattgtcccatggaactaatgtttatgttttttttttaataaacatagaaattgactctccctggttttaaaacttgaaacttaaatttgtcttgctctatttccttcctcaggaaaccaaccctccagcaaaaactgcaactcctcaaatccagacaatgagaagccaggcccctcatccatcttgattgctttcttacttgtttctgattcctgttttctctgaacatagctatattccttccstaccatataaaccccaaatttagtcaagtgggagagacaaatttgaggtttggctctcacttcttcagctgaagtcccccaaataaaaagccttcttccctggcaa

SEQ ID NO: 825032 - DNA, 611 bp, Homo sapiens
ctttgtgtggtgaatgataagcagatgattaagtaaagtttttcttcactgaaacagcacttwaaaaggatgcttaacaaacaatatttaaaaggatttactgtatttcctttctaaatgtttgtataagagagggtggcatttactttccacattcaacaaacattctgtttctacaacagaatcacagatgtcaatcaacggagcaacaaatattctgccttcactttgtagggtaaggcacatgactagcgaaatgaaaatgaaagcatggcaaataaaggcaggtttcacctggagggtttactttgtgactatgaaactctgggcttctaagggataggacttgaaaattttctaatgccttccagtagtttccaagggacgtgaagaaccaattacctatctaggttcctctccttctctcatcttcctcctcataaatcacacaagtccaggagagtgtaaagacatttatatttctgtgcactgagcaaacctttctttccgtaaacaggagtttgttaaggaagtattctcctcttaagaaaattggaacaacacagttttttacatttttatagctttctaagatttttcacaaggtggat

SEQ ID NO: 825033 - DNA, 616 bp, Homo sapiens
aaggatgttcattctgtccattcttactcaacatagtactagaggtcctagtcattgcaataagttgagaaaaagaaataaaattctaaagattgaaaaagaataaaattatttctgtttgcagaggatatggttgtttatgtagaaatttcaagaaatgtaccaaaaagtacttctagaattaatgtgaattcagcaatgactccatacaagatcaacacacacaaataaatctcatttttatatactaacaataacatgtgaaactgaaatgaaaaaatacaataccattgcaattcctccaaaaattaaaatatttaaatatacatttgacaaaatattttataggatctatatcttgaaaattataaaatgcagattaaatcttttaaaaactaaataaatggagagacatatcacatagctagattagaagacccaacaaagatttcaattctttccaaattgatctataggtttaatgcaatttctttcactattaattaattaattaattaaatatacaaaccwattctatggtttatttggaatggcatgggcagagagatagacacatgtaacaatgaagcataatagagaacccagaaataaaccc

SEQ ID NO: 825034 - DNA, 596 bp, Homo sapiens
cccaagattgtcagttgttgaagaaatagggctatctcattgtttacctccctcttctcttctcagggagactgctgctttaaaagaaggaagagaaaaaatatagttytatttccctgaacctgttgcacctgacattttctcttagcagcatgaaacttattgatgctgacaatgaaaaatggatctgtctggctgctttccctctttccttgcactttaattatgttgctagagctaacagactaataaattccacctgctggctcttaagactcagtgaaagagctagcattggtaatgcaccatagaggtagagaatgtacactttctgcacggtaagtgccatctctgtatgtaactatatagtgaaatatcaactaagtaaaagaaaatataatatttgaagaccattcccaaaatattttcaatagttcatattagccaacagtgtagcactcaacccaaggagggttccttatggatgctttctttttcttttttaaagttgcttgtttgttctctttagtttcaaataagaggttgacgcatcttgatgcatgatgagaagcatgggctgtttggatcctaacaac

SEQ ID NO: 825035 - DNA, 546 bp, Homo sapiens
ttgctagtggcagaaactggcatatgtattttgatatatagttaagaaaattgtaaagcattactccataatttgtttgggaacataataaatgtcctctaattggagaaaaaaactaatcagaacaaaaggtagaaatattttaattatctcccattttccccactgctcaaataaatatatccaaataacagttgttttgaaatgtttgcttttctcttcttaagccaattatttcaagtcagaacagaaaattacacaattatgaaaccggattcaccccaagtaacccaaatgaaaaggcttttttttttggtttggagacagagtctcactctgttaccccaggctggagtacagtggtgcaatctcggctcagtgcaacctccacctcccaggttcaagtgattctcctgcctcagcctccygagtagccaggattacagccgtgggccaccacgcccagcagtttttatatttttagtagagacgggttttcactttgtcggcaaggctggtctcaaactcctgacctcaggtgattca

SEQ ID NO: 825036 - DNA, 644 bp, Homo sapiens
aggagttcaagattacagtgagctatgatcacaccactgcactctagcctggatcacagacagactctgtctaaaaaaaccccaaatgtatacactttcatcrgatggagtattctatatatgtctattaggtcaagttggttgatagtgttgttcaagctcttttatatccttttcattttttgtatagttatttcatcaattatttagagtggggtattaaagttaacaattattattgctgaaatgtctatttgtcctttcaattctgtcagtttttgcttcgtgtatttagggctctgttgttagatgcatatatttataattattatatattcctgaagaattgcctgtgttttcattataaaacaccgctctttgctgttaataagtttttttttttttttggtcttacagtctattttatcagtagagccactccagtctctcatgaattttttttacgtggaatatctttttccattcctttactttcaatttatttgtgtcttttaattgaaaatgtgtttcatatatggcatatggttagatatttcttttttatatggtttgacaatatttaccttttgatttgcattttccatgaattaatgcttaatggaatttgatatggttctatttat

SEQ ID NO: 825037 - DNA, 470 bp, Homo sapiens
tgcgccactgcactctagcctgtgcgacagagtgagactccatctcaaaaaaataaaaataaaaaataaaaaatgtgtattttcttcaaagaatcagaagtcctatgttcagatagyttttgtctttctaattggtctttcccagcctaagattttttcgtctttaaaataaagggatactacgaatatatttttcaccacagaaaacttctacagaaccaagatataatcctagaaatgcactggaggccacatcctgagagcaatttactacaggacccagttggatgcattaagagactgctggactcctgacaagactgcaagaggcagggccagtttcttggtgtacagcctgtgtcacacaccgcccatgcttagaaggtctcatgcttggttagatgccctgcatcttaattgaaattcttaataattcttaataagaattcttgaaattcttaataattttt

SEQ ID NO: 825038 - DNA, 602 bp, Homo sapiens
gcatattggattgataaagggmatcttacgaaatgttaattttactcaaagaacctttcggagaatttgatttataattataaaagcgaaattacaagatgactttcacttcatttttaactgtattggtgagccttaataatgctaaatatatgtgaaacactttaccaagattaagacaacttgaaagaggtgcttttttcccctctccgtccaagaagacatctttcctaatcaactagatacacagctcttattggtaactgacacagcaggaagttttgtggaagtggggactgagcaccgggcttcaatgcgtagggtaggtttcattcaggaaagtgactggtttctcttggcatctgagcaagtcatgctttctgagcctcagttatcctgatccattaaatgggaggagcaaaacctctgcattaactttctcattgggggtgttgccccccaaagcaaattgatatgtagtctaacttcagtgactttctgaactctccactctctgggggctccatcatgatttatctccaggcctgcaccagcagcatttcagccactctttcccccagagccagcccacagttgagggc

SEQ ID NO: 825039 - DNA, 595 bp, Homo sapiens
tcccaccccagctctcctcattccctgtctctttccacctgtcaaagctctgtccgtccttcaagcccacctccaatgccacttccttcccagccctgtgctcggttcccatgctctgccagcaacactctcccatcttccccatcctgcctttaccctctcatgtccctctccaaaagcaccaggcaagtgtaggtaatgcttgctgaaataaagtgtaccctgattgaattgatctgcaaacataggaatgtttcagcccttgagtaagccatctccctgttttgttatctttgaactccacaaggccgtgtttttgaaatttaaatgtctcaaacgttttcttacactctacccaaagacagaagcttcctgttgtccttgctcacttaattctttcaaagaccatcaacctcagtgttgctaatgttcacaactgggtaatgttcacagctcgttcacagtttataaaaccattctctctactttttgtatatccttgaaaaatgtcaataataataagaattttttaakgcacagtatttgagatatttgggaccctcttaggaagtccttgtttggttaggactatttc

SEQ ID NO: 825040 - DNA, 516 bp, Homo sapiens
tgcaagaagtttttaatttttctaattatttttaaacttttaagttyaggggtatgtgtgaaggttgttctgtaggtaaacatatatcacaggggttttttgtacagattattttgtcacccaagtactaagctgagtaccgaatagtttttttgttgttgtttgtttgtttgtttgtttgttttttgagatggagtctcgctgtgtctcccaggctggagtgcagtggcgcgatctcagctcactgcaagctccgcctcccgggttcatgccattctcctgcctcagcctcccaagcagctgggactacaggcgcctgccaccacgcccagctatttttttttgtatttttagtagagatggggtttcaccgtgttagccaggatggtctcgatctcctgacctcatgatccgcccacctcggcctcccaaagtgccgggattacaggctgagccaccgcgcccggcccccaatagttattttttctcatcgtctccccactcccacccttcacc

SEQ ID NO: 825041 - DNA, 516 bp, Homo sapiens
tgcaagaagtttttaatttttctaattatttttaaacttttaagtttaggggtatgtgtgaaggttgttctgtaggtaaacatatatcacaggggttttttgtacagattattttgtcacccaagtactaagctgagtaccgaatagtttttttgttgttgtttgtttgtttgtttgtttgttttttgagatggagtctcgctgtgtctcccaggctggagtgcagtggcgcgatctcagctcactgcaagctccgcctcccgggttcatgccattctcctgcctcagcctcccaagcagctgggactacaggcgcctgccaccacgcccagctatttttttttgtatttttagtagagatggggtttcaccgtgttagccaggatggtctcgatctcctgacctcatgatccgcccacctcggcctcccaaagtgcygggattacaggctgagccaccgcgcccggcccccaatagttattttttctcatcgtctccccactcccacccttcacc

SEQ ID NO: 825042 - DNA, 544 bp, Homo sapiens
tgctcatggggggctttcttcaaggattcatggacaagaattggtgataaatgtcccagataccttgccctttcactgagatgactctggggcatgttttacagtctctcargctggccagtgagattgtgcctcagtacagactgtgctaaccagttcctgaacacatctgtatgtgctttctttcctttcctgtcccacttccctacacaatactggtgcttcctggggtcatttccccaaaactgtgagtactcacatcctggtctccagttctgcttccaagacaaccctccttgccagctcctttcatctatggcacaagctgaaaacagtgcagaagaaagtttgccacaattttaaatgaagttattctgcttgaagccagaaagacagatggcacctccgattgtaactgactttcccaagaaaagcctaaaaagagaaaaactcttatgcgtagagaaggagaaaattcaaccacagagggaattgagttgcccttgggatttggctttcatatgtctataggcagagctgatgt

SEQ ID NO: 825043 - DNA, 443 bp, Homo sapiens
gttttctattgttgcacctgctcttcgttccrtttttcccctcttttctgccttttataggcttaactgagtagtttttataattccgtttcatcttttttattggctaattttctatattttttgttattttcatggttgctttagagtttatatcatttctctgtctatatatatatatatacacacacatacacatatatatattttacaatatacatatgtaatatttttcaaagcctgcattcaagtgatattatatcattccatatatcattaagaacactacaatagtattcttccaagtcttcttaaatggtcaattttcttttaaagaactctaagtaataagaaataaatactatatgtttcccatgtgccatttctgatgttcttcctttttatatagatccctatcgccatctgggatcaactttctgcta

SEQ ID NO: 825044 - DNA, 630 bp, Homo sapiens
gagattggagaaagctcctcccttaattccaggggccgagttccagcccatccaattctccgtctcacctgaggctgctgtggtcctggtgaccccagggagcaacctgccgcccatggctggggagggggtgaagctgtctctttaagagcaggaatggagcccctgggcctcagggcatctgacttgttttctacctgcccaggtttgcttagggcgtggcagcttcggataaacgcaggactccgcctggcagcccgatttctcccggaacctctgctcagcctggtgaaccacacaggtgagcagctggggccccttcctccaagccctccttgtctctgcccctaaattaggaagtatctacctgccccctgaccctgccccatagaagcttttatgttaaagcgcctaaaatcttgtgaaatgcttttctggagccaggagataaacggaagtcccttcccctaatgtccctttccccaccattctcctctcagggacttgttgaaccagctgaggtgagggcaggactgataagtgtggttggggtgtckgaaagactagtgtctgcatggattagggatatctgggttggggatagctgggtggaggagagggggtgcctgg

SEQ ID NO: 825045 - DNA, 545 bp, Homo sapiens
ccccccaactgaactagagcacgcacacacyttagaacagagcactctctccccaaacatccccccagaaacaccatcagccgctgacatgggagctgtcatttgctttgcgcctgtgcctctgagccccgtccgcagctgttttcactgggagccatggaggagttggaaagggcacattgactctaggcagtgccaggggatcttccactcctgagtgtgacacgctccactcgtccccaatgatcatatggggagggccatacagggaagggacagggagagtggttcccctgggtctcacgacagaaccgaaaacccatagcggcgcccacggcttctctcaatcacattggagtcagaagatgtgatggctaaaatggctttttccccctcatattcaggcaaagtgggcctttgatggttacaggacattcggggatgtgtgtcctgagcacgtgttttgtaaggggtctgtggccaactttgccaagtgctccctgagagaggggcacagtcaccctggttgagaatcatgggtctac

SEQ ID NO: 825046 - DNA, 619 bp, Homo sapiens
tatccaattttcccagcaccatttattgaagagactgtccaatcctcagtaaatgttcttggcacctttgttgaaattatgttgatggtaaatatgtggatttatttctgtgttgtctatttagttccattggtctatgtgtctgtttttatgccagtacaatactattttttaaaaaactatagctttatagtctattttgacttcaaaaagtgttatgcctccaacttttttcatttttctcagggttgctttggttatttggagtcttttgtggtttcataccaattttaggactgctttttctacctctgtgaagatgtcgttggtatttttatagagattgcattgactctgcagattgcttttggtaatacgctcatttttacaacattaattcttccaatcatgaacatgagacatcttttcacttttgatgtcttcttcactttctgtcatcaatgttttatagcttttttggtagagatctttcacctctttggttaaatttattcttttttttggtggctattttacatgtgattgacttctcratttcttcctttactaatttgttgctgatgtgtaggaatgctactgatttttgtatgtcgatttt

SEQ ID NO: 825047 - DNA, 582 bp, Homo sapiens
gacaggtacaggccaactatgaggaacaggtcaaaaggtaaaggtttttcatgacttagccaaatattccaacagattcccttaaatccaggggtgcctggcccrttctcttggctttcctccacaaagtgggatgccgtgttacaaactggataccaaaccctcatcatatgcctaataggactcttctgagctgttacctttattaaagtttaccttcagtggctaagtcatgctgtcccaggcacctttaacatcacaacccaggtggcaagtgttatccatccgattagtattgtaatgatgttgaggcaccacagggcaaactgtaatgtaaattttaaagcactgtattttcctgctgcctcggtatccccacaaacaggctgtgagccccccagccagctataccagtgtgattaggctggccctgccacaagttctgttgtgctgtttgtgtactccatcctggctgccaataaaggcacttccccataggtcttcattctcttggctccctaacagctcagttgagccagcctccttgatgctgtctgtgcccccttggttcccttggtgtgc

SEQ ID NO: 825048 - DNA, 609 bp, Homo sapiens
gagaaaaggacaacggttgccccaccccctcggaacagtagctggcaccacagggcctggggcatgaggaacaggggagatggggggcttctgtgttttccaggagagtcaggagttcctcttctggccccagagccaggcctggaggctctgctgagctctcgtgtgctctgtggtgcacacttctgcttccagattgctgctgcactttctcgtggggggcggtgggaacactctgcattcgtggctcttccctggtccacctgctgctgtcttcagtcttccggcagctgccaagcctcctgcccaggtttcagagctgtagtcagtggcaggggaaggggcgccagccgacctgcctcaccagccgcttgctttcttttgtgttcacgctggcctcatccctgcggtgtgggtggactgtatgggctcagccaatccagtcatgcaggtcactcaggtcccgtttctgacggccactggcagtgcagcattgagcaygcttgctcagccccagacgtgtgcacttgggtgtctccgtgacctgggccaggatttctggaggactgaggctgcagacatggaattgccaaggagagtgctgcccag

SEQ ID NO: 825049 - DNA, 625 bp, Homo sapiens
catgaatccagttgtgacctatcatggggtaatgtttacaggcttattctttttttttacttggaagarctcctatttatccttcaaaacccagtaaaaatgtcccctcctccaggcagctttcctgcatctccccccagacaacaccctggcacccctctctgtccccaacgttcccccctgttcctctctctggtccagccatgactccatggagctagagtgtctttatcttgctctgtctccaccagcctgagggcctcctagggatcagggcttagggctaggttcctgtgttgttgtttttttctgtgtcctggtgctggcctggcacagaggagggtgcaagggtctttgctggtgaacagctatctagtgatgaaagaccgcatgctcaaattcaagctcctgaccctggcctgggagcctcctctacttccccgctacccacattctagacctaaagacatccttgctctctctctcttgcctctccatacctttgctcatgctgttgtcttgccaagacccccttttccctaactccagctccattttccatttgtggtcaccacaaataccccctcctccacgaagctctcccccatgcccctagaaaatccct

SEQ ID NO: 825050 - DNA, 463 bp, Homo sapiens
atcacaaaacaattttacacctatgttatttgctaaaatgttctgatggttgtgcctttccttaacattgggttgatggtttgctgtcaagatggagaagggagaaaagggggtctttytagatggctttggggagcggtcccagcctgtgtccatgggatgaccatgggaaatatggatattaggtttaaaagttatcaactgagggactgaggagaggatgcaatgagagtcacaggaatcaatggacatgagaaggatcttgacagcaaggctgacaatgtcggaagagtcagaaccagaaaggggcagggacaatatcgtggccactgcatgaaggcagagccagtgtgtcgaaggatgggaaagtatttggggggctgacatcaagagacctgcatcaatttttgaagtcagcagagtggacttatccatgctagactctccttttcttcagttcagt

SEQ ID NO: 825051 - DNA, 545 bp, Homo sapiens
ttggctgtatacatgtggccttatttctgggttatattccattggtctatgtatctatttctataccaatatcatgctgttttggttattatagccttgtaatatactttgaagtcaggtaaagtgataccaccagcttgttcttttttctccggatagctttggctattcaggttctttttggatccatatgaattttataattgttttttacaattctgtgaagactgacattggtattttcatatggattacattaaatctttagattgctatagaccagtgtgggcttcttaactatcttaattcttccagtcatgagtatgggatgtttttccatttgtttgtgtcatcttcaatttctttcatcagtgttttttagtttttcctgtatagattttcacctggtaggtcattaagagcatattgtttaatttccatacatttgtcttgtttccagagttcctcttggtgctgacttgttgttttgttccattgtggtctgagtatacattgagtaaayattgattttttttttaatttat

SEQ ID NO: 825052 - DNA, 591 bp, Homo sapiens
ggtttgccagctgctataacaggatccagtaaatgggctggccctaaggggtgaaagtrcagattcctccctcaacccctgaggagtctgactggcacttctgatatttggggctcaggaagttaaaaaccatagaaaatattaattccccattcataatataattggcatgtactattcccatatgtgcaaattaactcttcgctgtgaacatatgcaacttggcattccacactcaaccggcataggggcagactaggagtcccatggagctgatgttcccaggagcacccctcagcctatgctggtggataatacctggtgtgggggtgagtgagaaagatcccagtagaatagcctttctcctccccactccttcctccacccatgaagactattctttattcaagagagacatgaaattggggcagaagtgtgctgagaaatatttaacaactggatttccaaaaaatacatattcataataaattttactgatataaagtatttgtagcacactgttgagcactcaatttgtcgctgttcggggtgccactatgtaactctcatggacctagggtaactgaacaa

SEQ ID NO: 825053 - DNA, 591 bp, Homo sapiens
ggtttgccagctgctataacaggatccagtaaatgggctggccctaaggggtgaaagtgcagattcctccctcaacccctgaggagtctgactggcactyctgatatttggggctcaggaagttaaaaaccatagaaaatattaattccccattcataatataattggcatgtactattcccatatgtgcaaattaactcttcgctgtgaacatatgcaacttggcattccacactcaaccggcataggggcagactaggagtcccatggagctgatgttcccaggagcacccctcagcctatgctggtggataatacctggtgtgggggtgagtgagaaagatcccagtagaatagcctttctcctccccactccttcctccacccatgaagactattctttattcaagagagacatgaaattggggcagaagtgtgctgagaaatatttaacaactggatttccaaaaaatacatattcataataaattttactgatataaagtatttgtagcacactgttgagcactcaatttgtcgctgttcggggtgccactatgtaactctcatggacctagggtaactgaacaa

SEQ ID NO: 825054 - DNA, 498 bp, Homo sapiens
tgtggatgtctctctgtaggtcagaggtgacactaggatataagagatgggggtgcaggtgggatgagcaggcaacctctccttcctccctcagcggccgtgaggtggagttcaacacagcagagctagacactgtccccaaagagtcactgtgtagtggggagacactgaggctcctgatatctgagctctccatggcaggagcttcagtgggggtaccaggcagggtgtggtcgctctctcctatgttggggaatcagtctcgggaggactgagcagagagacacggggtcgtggaggtgaggattccgtgtgttgatacacaccaaagacacagagaagagcccagttcacaggaggcctgagaagctaaggctgtgactgttgtacagtgaggtctggaagggaggaatgttggatgggaagggacagatttctaaaggggcaggcgtttctctctcggccakggctctctgggttcaggatgggatccttcac

SEQ ID NO: 825055 - DNA, 487 bp, Homo sapiens
gacactaggatataagagatgggggtgcaggtgggatgagcaggcaacctctccttcctccctcagcggccgtgaggtggagttcaacacagcagagctagacactgtccccaaagagtcactgtgtagtggggagacactgaggctcctgatatctgagctctccatggcaggagcttcagtgggggtaccaggcagggtgtggtcgctctctcctatgttggggaatcagtctcgggaggactgagcagagagacacggggtcgtggaggtgaggattccgtgtgttgatacacaccaaagacacagagaagagcccagttcacaggaggcctgagaagctaaggctgtgactgttgtacagtgaggtctggaagggaggaatgttggatgggaagggacagatttctaaaggggcaggcgtttctctctcggccatggctctctgggwtcaggatgggatccttcaccactgctctctcacaag

SEQ ID NO: 825056 - DNA, 634 bp, Homo sapiens
ttacatttatttttggatgtgaaaccccacttggtcatcatgtattacgtcaattttatttgttggattggatttacttatatttaaatgaagacttttctatgttcatgaggtgcagtgatctgcarttttcttttcttgtaacgtcctcatgaagctttggtatcaggtttgaattttgcctcatgaaatgagtgttttctccttctctatttactgagggagtctgggaaagtttgatattatttctcctttaaatgtttcgtagaattccacatacagtgccatcatgattaattaattacctatgattgagtggctattaagcaaatgccttgaaggatcgaatggcgatgctattcactgctgtgtgagcattaatgaccacaaagactgtgtggtaaactctctgctcctaactctgctggaaaacctgcaaagggcaagtgccaagctcaggtcttaccttgtaggtcaagttatggttgtaaactacagaaatgccttatgacttcaaacaatttcatgtcatttgactatggggacaatcttgcaaaaaaaaaaaaatcagaccccaaatttaattgtatttattgaagaattacgacataatttgaatttaaagatttgtctg

SEQ ID NO: 825057 - DNA, 607 bp, Homo sapiens
tcctgagggtctgaacaacaggaatcatgacttgaattattcttggtcagttctcactcaggctatggtagagtaactggcaccctcccagcataattagaaaactatacatagtatgtaaaatatgtgtttcacaaggaaaacaggcagacaggactgtgacatctgaaagaaaggaaaccaatgaggtgagtctcatgatcaaatgacaatttccaaactgcagtacgtggaggataaattcaagcagaacacaagagtcttatgaaactgtggaggcagcaactgcagttcaagtgggaatgatgtgggtggaatttgtagagcagagtacagagagaaaaaactacacagagaaagaactccaaaaaatatgcatagaggtccccttgaatctttggctgaatactaagctgtatgcacagagtgaaaggctgaaagcctgggtacgtgctgctggagaaggaacagctatgagaaagctggaatgaaggcaaatataaactcaccctrccaaagcttttgtaaaaatctttgaatggtcaagacaatccactaataaattaactgcattcgagaacaaagctcaacaatttttaaaggaaga

SEQ ID NO: 825058 - DNA, 544 bp, Homo sapiens
ccaccaccacacccagctaattttttttttttgtatttttagtagagacggggtttcacggtgctagccaggatggtcttgatctcctgacctcgtgatccacccgcctcggactcccaaagtgctgggattacaggcgtgagccactgtgcccagccgcatatggccagacatttctatgagacattgttcatcaggcctagaccctgagtccccattaaatggtgtttctatggcaaattagggacatatgtagaatagaactgcttatccctgctgatctgtggctgcagggagtcacaagtttgcagtcttgttacattcagatacttaagagttaaaaaataactggtggcttttgcctcctttatccctgatgtcaaataaaatggaattccaaccaatagcttttccacattgatcttttttcaatgagtttttctaatttgtttgaatttcctggtgtcaaataaggtaaaagccatggttgaaagcttgccaayactgactggattcatagtgttctccagtatgagtcctctta

SEQ ID NO: 825059 - DNA, 483 bp, Homo sapiens
cttattatgctgctcaggtagactggaaatctggtttgtttagggatcyacctgcttaaagtatcagtctgattatgtggcatttagcctaagtgactctgtcttggtttggtctggtctcatgaggcctagagcaggagctcagtccaaaaccatgtcctctcataattttgtgtaacttgcctaacacctgctccttctcaggaacgaggcccagcaaaaagcagagacggtacagggccagaaggatctgagagagtgtggccagcttgagccctcaggagtcggccagaaggatctgagagagtgtggccagcttgagcccctcgggagtcagctcctccgtccccactggtaacgtcttcaccccttcaacacggtgtgaagggccatgtcatggttgatcttcagtccctcagactacaccatcagccccatgggggtgagcaaataacaagtaactatactgttccctgctatgtg

SEQ ID NO: 825060 - DNA, 474 bp, Homo sapiens
ctagacaaagtggttgcggcctgtgttctccataaagctgcctcgcgtggcaggaaacaacaataattatmcttcctcaagctctgcaactttgaaattatacttttttttattttttgtcgttggtttgttcatggggatttgcattatttcagatttggtacacaaagtgagacttgataatcttaggttgcaggttttcagatgtgtgttgctccaaatttgcatgaaatgctaccacgttttattttgttcttgctgtggatgggggacaaggaatgagtcgtaagaaaggcttgagagaaagtgtattagttacctgttgctgtgtaactcaaaacttcgtgacctggaacaacaataaatatctcacgagttctgacaggagtaatggaatgtcctagctggtggttctggttcaggcccatgaagttacagtgaagatgtcagcatagctgttgtcacctgagacct

SEQ ID NO: 825061 - DNA, 633 bp, Homo sapiens
ctttctcctctatttatttctcacaaccctgtcacctttcttttctttttttttttttttgagacggagtctcaccctgtcscccaggctggagtgcagtggtgcgatctcagctcactgcaagctccgcctcccaggttcacgccattctcctgcctcagcctcccgagtagctgggattacaggtgccaccaccatgcccggctaattttttgtatttttagtagagacggggtttcactatgttggcaggctggtcttcaaactcttgacctcgtgatccgcctgcctcggcctcccaaagtgctgggattacaggcgtgagccaccgcgcctggccctgtcacctttcaacacactacatgttttactacacatcttgtttcttgtctgtctcctgtacttgattgtcagctctgccagcacaatagctgttgtcttttttttttttttttttttttttggagagatgggggtgggtctcactttgttgcccagggcagtctcgaactcctgggctcaagcgatcctcctgcctcagtctcccaaagtgctgggatgacaggtatgagccaccgtgcccagcctacaacgtttgtcttcatcactgctggagaacttaaaaaaggccct

SEQ ID NO: 825062 - DNA, 666 bp, Homo sapiens
cacaccaccacacctggctaatttttaaatttttttgtagtgacagtgtctcactatgttgctcaggctggtctcaaactactgggctcaaatgatccaccctcctcagcctcccaaagtcttgggattacaagcatgagccaccatgcccaatcaagggttttattattttattttattttgttttgttttttgagacggagtctcactctgttgcccaggctggagtgcagtggcatgatctcggcttattgcaatcatctctcccaggtttaagcgattctcgtgcctcagcctccagagtagctgggattacaggcgcccgccaccatgctcagctaatttttgtatttttagtagaaatggggttttgccatgttggctaggctggtctcaaactcttgacctcaagtgatccgctcgccttggcctcccgaagtgctgggattataggtatgagccaccgcacccggcctctacaaaaattttaaaaattagctgggcgtggtggtgtacgcttgtggtcccagctattcagaggcagaagtgagaggactggttgagctccagaggtggaggctgcagtgagccatgatcacaccactgcattccaacctgtctagaaaaaaaaaawtgtttttttcaataaagataggatccaacaga

SEQ ID NO: 825063 - DNA, 632 bp, Homo sapiens
agtggctcttcagggatccttgttggcttcctgatggaacggcagtgggcctcttcactctgcctaaaagatgggagcagaagcacacacacacacacacacacacacacatatatgcataatcacaatgcatgcacacagctggcacacatgcatgtgcacattcccacgtgcggccatgtatttttatgcatgtatgtgcacgtacacgtgtatgctcttgcatgcacatgtgtaccctgtgtacacacatcctccacgcctgcagacacatgcatgcatgcacctgtttgcacatgaacacacatgcatacaggtgagcatgcattcacatacatactgcatcacatgagtattctcgcatgtgcctgcatgtacgcatatgcaggcacacacgcactctcccatgcacccctccgtgcacactctccatgcttatatgcatctgtggacatgtgtgcatattctcttgtcagtacacacatgcatgcatagagatgagcagcatgcactcacatactgcattgtgcatgcctgcacacacacatgctctcatagayaacagctgggcatgcacaccctccatgcttatatatgtgcatgcattcattgagacatgcacatattcacat

SEQ ID NO: 825064 - DNA, 599 bp, Homo sapiens
ctttctcttgtctgattgctctagctaagacttccagtactatgttgaataacagtggtgaaagtgggcatccttgtcatgtcccagattttagaggaaaggctgtttccatttttccccattcagtgtgatactagctgcaagtctgaaatatatggcttttagttatgttgaggtatgttccttctatacccagttttttcaagggtttttatcatgaagggatgttgaattttatcataaaaggatgttgatttttatcaatcatctcaccaattgaaataattgtatcgtttttgtcctttattgtgttgatatagtgtgtcacattgattgatttgcatacatggaagcatctttgcatccctgggataaatttctcttcgtcatgatgaataatctttctaatgtatcattgacattggtttgctagatattgttgaggatttttgcatcaatatacatcagaaatattggcctgtagttttttgtttttaatatgtctttgtctgattttkctgtgagagtaatactggcctcatagaatgagtttagagatattccttcctcctatattttttggaatagtttgagtacag

SEQ ID NO: 825065 - DNA, 502 bp, Homo sapiens
taaaatggatcctatcagaagcccaacaacaaaaaaaaggattaaaatgtcctgagttgccatgttaggagtttttttggattttgttttgttttttattaaagagacttaaaacamagaatatacttttccattcatgtatttattgtcttggggatacacctaattaacagcagaagaaaaacaatgtaccctgaaactaactgtaaatttattgaagacaggctccacatctttgtctcccacatcttcttcccctattttgtgcagtggttcacatatagtaagtattcaattaagttgaaaagcaatgcaagtttcaattcacattaatttggaggggttgcactgatttaaggagcagctgagatgaaaaggctagcttcgatcttttctgatttctggctagtgaggcacaccatcttgaaaacttcctctgctgaaccttgcataactgctgtccactgcggcattcttaatgtcttgatttgtttccatttct

SEQ ID NO: 825066 - DNA, 488 bp, Homo sapiens
ccccagggtgactgggatcgccagctgagccgcagcccaggtccagcacagctgccgctccaaactggggagggggctacgcaagattggggcggggakctccaggcagcgggagggcgcaggagtaaggaggcgaacaggatgccactgcgcatgcggcaaagtaatgcggccggtccggggtacacggagaccgcgcgtgcgcggggcgatgcactcagtcgccactagagggcgatgtaatatgtcatcctgcccccggtggggtgggcggggagatgatcagggaccccaaaaccaccccagtctttcattgcgcgcctacatgtgcctacgacctcacttctgcttctctacgactcaccaccctcacagctggagcaaattcagaaacatccttggtacctgtgagtatggggtaactggactcttgggtccctggcggaaataggggaggggccaaagcagtagaagcggctgggaggggt

SEQ ID NO: 825067 - DNA, 614 bp, Homo sapiens
cttcctcttaggactttaggtctgcctacatgttgaagaagtttgagttttaggctttgggagcatttccttaaaaaccattgtcatgggggaggaaaaaaaaagggtagtgttaattctgtcwtcacacactcagagatcatttggttgggctacattttatgagctatattccataaagatgctgcaaagttcaggtatctggtttaggaaagaaaaaaaaatcccttctttaacccaagaaatgtaatgcaaacaacttgggcctgtgtcacttagtcttctaagaagacttcaaggctgttataaagacccagtggtgggagaaacctgatccggtatagcggggccagaagaagctgcgggaccatgccgcggggacaaggcaaggagtttcgccaggatgttgatctcctggttatctacacttccgcctcagtatgatctgaattattaatgagaaagattaagatacagattccttccttcaagtgccttagtagtcacagacaggaggttaattataagactaaaagcaatcttgggttgttagaagaacttaaaggaaaacacctttcaacttcttgttatcaatcaatcatttttgtctttag

SEQ ID NO: 825068 - DNA, 458 bp, Homo sapiens
tttgcttcattggaatcacctttttaagtgcaatcagagagtaagggtggggtatrgttgatggaggtacagtcttagaggtctgcccctaaagaagaaagtctaacacgtcagcaataaaaagcacggagatggaaaaagaaccagccagaattagctgggtgaaaccatggtcacgggcatttttcctgtaatccaatacttacctctattgctctgacctcatcttttttttttgttttgagagatagggtcttgctatgttgccctggctggtcttggactcctgacctcaagaaatcctcttcttctgcctcccaaagtgttaggattacaaccataagccacctcacctggccctcatccttcttaatacccatcagccaccaacttctggtcactatttggtcattcaaaccaactctgctacccagcctaggattactcataaaggatcc

SEQ ID NO: 825069 - DNA, 591 bp, Homo sapiens
gccttaaaaaaataaagctgagagtgatacatttaggatcaggatcacttaaggttatttttagcttataagcttgaggaggaagaactcacaatattktggccagatgaagaagagaaactgaaaggaccatcttatttttccccactgactgccatcttttgtcccctaattctgagaaggccatctcctcatacttaatacagaaaagaaagctcacggatggttttgctttcccttttagacaacagaggaaacttccaagccaaaagatgactaaagaaatacaagttaaggtatctggtaagttgggtgtttatttgtaaatgaagacaactgtatcttctgccaatttatgtgttatagatgagagaagtgaagtccacctcttgagtaattcatgctcactttacagtattggcatgaaatgcatactgcaagatctacagagtaattggtcattctctgaaagcactaaatgggatgagtttgctattgaaatgtttaaaaaccttaatcttataattaaaagcttttaaaaatattaggccaggcacttagaatgaccatctgaggctagttgaatctttg

SEQ ID NO: 825070 - DNA, 506 bp, Homo sapiens
ttacacattgggcaaaaaaagaaaataccaggctgtcagaacatcttggcccagaaacctcccttcagcaaaaagacaaaaatgtgagtgaagagaatatgcctttgagaattgagagggttgcattttgcctattatgtatagagatttgccaatttccctttcacaaactatgacagtgacactgattctggatgagcaacctgcataatgcttcaggggcacatctcttcttctaaggctgcaggcttgccgatgagacagaacacagcctcaattccatctgctgtcatttatctgccaatatagatagcagatctctgtgggtcttggactgctcaaacgacacagtatattttagcaactgaaggggaaccacttgagatcactaaaggtggaaaacacctgatgacaccttcaatcraaagaaatgagtatccaaaatctgaaacattaggccccacagtacaatggctctagtgacagataaaaaatactatttctaa

SEQ ID NO: 825071 - DNA, 529 bp, Homo sapiens
accaggttggctttagtgggtggaaaagtgaggcccatacatattcaaatttgtattttgaaaagattttttttttgtcctccaatgcttttgccagaatatagaaattcaaagtatgtgtatttatarcaaatacgtagatgtttttcaccttataggtgtgtttttatcacattatttttgcacatatgattcctgcatgacccgagtgaaggggtgggttgcccctccacacctgtgggtgtttctcattaggtggaacgagagacttggaaaagaaaaagacacagagacaaagtatagagaaagaaataaggggacccagggaaccagcgttcagcgtatggaggatcccgccagcctctgagttcccttagtatttattgatcattcgtgggtgtttctctgagagggggatgtgtcagggtcacaaggcaatagtggggagagggtcagcagacaaacacgtgaacaaaggtctttgcatcatagacaaggtaaagaatcaagtgctgtgcttttagatatg

SEQ ID NO: 825072 - DNA, 554 bp, Homo sapiens
gagccagaagataaccagataatttataatccaagcaataatattgcaaaagtaaaaggaggcactatttaatcatcattccagggcaatagctgtatactattcagacaaactgaagagtaaagtcccctagtttaaaaactcgacaaacgtaaaatatgcttgcacatctttttagtaataaatatttaccttgcatctactattttcagagacacatactaggcactgtagcaatatatatagaacagtgtacagggcactgtggtgaatttaaagacaagtcatatatcttcctatcttgtggttcagaattcactttaggacagagaacattaaaaatacaataaaaagcagtaaatgatggtgcaagctgaattaagcttgatgtgatgttagccagccacaaggtttccaacagaatyactgatatgatttggctgtgtacccacccatatctcatcttgaatcctagttcccattgaattatagttcatttctataattcctatagttccaattttatagttcagccaacaatccccatgtgttgt

SEQ ID NO: 825073 - DNA, 541 bp, Homo sapiens
agcattaaatgcctacatcaaaaagtctgaaagagtgcaaatagacaatctaaggtcatacctcaaaagaactagggaaacaaaaacaaatcaaactgaaatccagcagaagaaaataagaaagatcggagcagaactaaatgaaattgaaagaaacaaacaaaaaacaatagaaaagataaaccaaacagaaagctggttctttgaaaagacgaaattgatagatcattagtgagattaaccaagaaaagaagagggaagatccacgtaagctcaattagaaacaaaacaggagatattacaactcatatcacagaaatacaaaagattatttcaggctactatggacacctgcacacacataaactagaaaacctagaggagatggatacattcctggaaatatgcagtgcacctagattaaacctggaagaaatagaaactcagcagaccaatccaagtagcaaggttgaatcmatagtaaaaaaaaaaaaaaattgtcaacaaaaataatgtcaaggaccagacggattcaaagctg

SEQ ID NO: 825074 - DNA, 648 bp, Homo sapiens
cagaattaaaaataacagtcacataatcatctcaatagacacagaaaaagcatttgacaaaatccagcatccctttatgattaccaccctcagcaaaattgacatagaagggacatacattaaagtaacaaaaaccatctatgacaaacccacagccaacattatactgaacatggaaaagtggaaagtatttcccccaagaactgaaacaagactaggatgcccactctcaccaaggaggaccactctcaccacttttattcaacatagtactggaagtcctagccagagcaatcacacaagaaaagaaataaagggcatctgaattggtaaagtggaagtcaaactgtcactgttcgctgatgatatcattgtatgtctaggaaaccctaaagactcatccagaatctagatctaataaatgaatttggtaaagtttcaggatacaaaatcgatgtatgcaaatcagtagcactgctatacaccgatagtgaccaagctgagaataaaatcaagaactcaacctcttttacaatagctgcaaaaaattaaaatactaaggaatatactttaccaaggaggtgaaagacctctacaaggaaawctacaaaacactgctgaaagaaatcataaatgacacaaacaaat

SEQ ID NO: 825075 - DNA, 565 bp, Homo sapiens
aagctggatcctcacctctcaccttgtataaaaatcaactcaagatggatcaaagacttaaatctaagagctgaaaccataaaaattctagaagataacattggaaaaacttttctagacgctggcttaggcaaagactttgtgaccaagaacccaaaagcaaatgcaacaaaaacaaaaatagatgggacttaattaaactaaaaagcttccggacagcaaaagaaataatcagcagagtaaacagacaacccacagagtgggagaaaatcttcacaatctatacatctgacaaaggactaatatccagaatctacaaggaactcaaacaaatcagcaagaaaaaaacaaacaatcccatcaaaaagtgggctaaggacaggaatggataattctcaaaagaagatatacaaatggttaacaaacatatgaaaaaatgctcaacatcactaatgatcatggaaatgcaaatcaaaatygcaatgcaataccacctcactcttgaaagaatggtcataataagaaaataatagatgggcatggatgtggtgaaaagggaacactt

SEQ ID NO: 825076 - DNA, 633 bp, Homo sapiens
catgggctggtctgtggcctgttaggaactgggccacacagcaggaggtgagctgcaggcaagcaagcaaagcttcatctrtatttacaggggctctccatctcccacattactgcctgaactctgcctcctgtcagatcagtggtagcattagattcccgtaagagcatgaaccctattgtgaactgcacatgcaagggatctaggttgtgcactccttataagaatctactgcctgatgatctatcactgtctcccatcacccccagataggaccgtctagttgtaggaaaacaagctcaggtcttccactgattctatattacggtgagttgtataattatttcactatgtattgcaatgtaataataatagaattaaagtgcacaataaatgtaatgcacttgaatcatcccagaaccatcttccccaccccctgtctgtggaaaaaattatcttccaagaaactggtccctggtgccgaaaaggttggggaccgctggcctgtagtattcagtatagtaaaatgctgtacaggtttgaagcctaggagcaattgactattccatccagcatagctgtgtagtaagctatactatctggttgtgtacaagtacaccctatgatgttctt

SEQ ID NO: 825077 - DNA, 633 bp, Homo sapiens
catgggctggtctgtggcctgttaggaactgggccacacagcaggaggtgagctgcaggcaagcaagcaaagcttcatctatatttacaggggctctccatctcccacattactgcctgaactctgcctcctgtcagatcagtggtagcattagattcccgtaagagcatgaaccctattgtgaactgcacatgcaagggatctaggttgtgcactccttataagaatctactgcctgatgatctatcactgtctcccatcacccccagataggaccgtctagttgtaggaaaacaagctcaggtcttccactgattctatattacggtgagttgtataattatttcactatgtattgcaatgtaataataatagaattaaagtgcacaataaatgtaatgcacttgaatcatcccagaaccatcttccccaccccctgtctgtggaaaaaattatcttccaagaaactggtccctggtgccgaaaaggttggggaccgctggcctgtrgtattcagtatagtaaaatgctgtacaggtttgaagcctaggagcaattgactattccatccagcatagctgtgtagtaagctatactatctggttgtgtacaagtacaccctatgatgttctt

SEQ ID NO: 825078 - DNA, 655 bp, Homo sapiens
ctacttttagatttcttgatgtacgagaaaaattaattcctacttgtgaaaatcaaggttactaagttgttacttggtcttgaaaatattcttttttttttttttctgagatggagtctcactcttttgcccaggctggagtgcagtggctctacctcagttcactgcaacctccgcctcccgattcttctgctttagcctccctagtaactgggactatgggtgcacgtcaccacgcccagctaattttttgtatttttagtagagatggggtttcaccacattgcactggctgagaaaatattcttaactaatagagaattgtttctccttttaggaaaacagagagcaagatgtttttccctctgtgaaggacagtattttattatagctgctgctgttattgctactagaagtttaagtgtgaaaacttcccagtgtgttgcgaagctgggcagccaaggggaggattgtcctacttttgactcccaacactttgtgaacactattctatgcttggggaattccccatttacagtctctgcttcctgaactcagaagccaaaaccttcgtctctcagcattgggtataggccygagccctagactgttctaatgcactaacattacaatatgttatgcactacatatgcat

SEQ ID NO: 825079 - DNA, 552 bp, Homo sapiens
ccttatagacctctgctatagtsgaaatatgagtggctgatttaatttaactctattcaatatataaaaaaggagtaattttaagttttcaaaagattgcttaaacaggttcctcatttaaatgaccttaattatccacctgagacatctgcatagcatatagaaggattattcaacacacagctaatactagcaaatggaaaaattaattcaactttactagttagaggaaaatctttcatcagtaatttatttagcatattattgtcactctaaatataatagaggaattatcaatttgaaacctatttagttattatgtacaaaacaaattacccgccaataaatagtcttttgatatgaacatgttcacggtatggaaatttaactttcacgcccttcgaataaaggctcttcattttcacaaacattatgtgaagtaaacatcagtcatataatcagtatcagacaaaaagaaataggaggaagaaagagagaaatggaactagccaacatgttacattggtaagaactgtaactgtagcagtttca

SEQ ID NO: 825080 - DNA, 332 bp, Homo sapiens
gcaagaacctatctcaaaaaaaaaaaaaaaaaaaaaaaaaaaagagctttggaaatgtgaaacgttatcatcacagacctaagaaattttagtcatkgttccctaggatcataggcccttagaaactgaaactgtaatacacaggaacctttgggacttgataatactaaacctttggagtttccaattagaaatgtggatcttgagaaatctgacatagagtgaccaaaaccttcctgcttttaccaccgaaactctcagccttgggccaaccagtacagtgggtcaccctaccattttttttttttttttgagtcagggtctcactcttc

SEQ ID NO: 825081 - DNA, 338 bp, Homo sapiens
agggctcatgcctgtaatcccagcactttggaaggctgaggcgggcggatcacgaggtcaagagatagacaccatgctggccaacatggtgaaacccagtctctactaaaaatacaaaaaattagccgggcattgtggcaggcgcctgttatcccagctacttgggaggctgaggcaggagaattgcttgaacccgggaggcggaggttgcagtgagctgagatcgygccattgcgctccggctttggcaaaaagagcgaaactcagtctcaacaacaaacaaacaaaaaaaaaaaaaaaaaagaggaagaagaagaagcaatttagaacctacctat

SEQ ID NO: 825082 - DNA, 568 bp, Homo sapiens
aggggtctgggtgcaggaccccacttccaaaacacactctcaccattttactctgcacttccagttttgcatgcctcaaggactcttttttctctgtggcttttccacctacatgtgcctccctgccaatcagacaggaacccgtactctagttttccttacttccaaaatcaagtttgcaaatggtagcgaatagctgcccgttcctctcttaacctcagcacgacaaaaaaaagtcattccattaattccgtttgtaggactagaagtctctgccgcttcaatcgggacaggagtagcaggccttacaacatcactacctttctcagtctctccaatgacttctctgctagccttatcgatataactcaaacactctctgccctccaagcccaggtcgattccttgggtgcagttgtcctccacaatcgccgaggcctcaatctgcttactgytggaaaaggaggactctgcctattcttaaatgaagaatgctgcttttacttaaatcaatctggcctcgtatatgataacatcaaaaaatttaaagacaaagctcaaaaacttg

SEQ ID NO: 825083 - DNA, 568 bp, Homo sapiens
aggggtctgggtgcaggaccccacttccaaaacacactctcaccattttactctgcacttccagttttgcatgcctcaaggactcttttttctctgtggcttttccacctacatgtgcctccctgccaatcagacaggaacccgtactctagttttccttacttccaaaatcaagtttgcaaatggtagcgaatagctgcccgttcctctcttaacctcagcacgacaaaaaaaagtcattccattaattccgtttgtaggactagaagtctctgccgcttcaatcgggacaggagtagcaggccttacaacatcactacctttctcagtctctccaatgacttctctgctagccttatcgatataactcaaacactctctgccctccaagcccaggtcgattccttgggtgcagttgtcctccacaatcgccgaggcctcaatctgcttactgttgraaaaggaggactctgcctattcttaaatgaagaatgctgcttttacttaaatcaatctggcctcgtatatgataacatcaaaaaatttaaagacaaagctcaaaaacttg

SEQ ID NO: 825084 - DNA, 607 bp, Homo sapiens
cttctgagttgtaatttggtgttctgactaggtgattttttttccaggccctgagccaggactattctgggggcctgcgttcaggctgtgcagggacaaggcagatatgagaaggccaggctctgacaccaggcagcaccacatgagccagaaaaaaagggggggttcaagactgggtcagctcagaagagcaggggagtgcaatgtccctagaagacgggtccctccagcctggcaggcagcactgggaggctcggctgagcggccgatccatcttgggcacgtgtacatgttccatgtgtcttgagagagcaggcagaggaaccccaggagaggggaaacctgatagaaggcaaggccaatgtcttcagtcaagaaggatgtggctgttgcagggcccataggaatgagatcatgtagcatttgtccttctcgtttcttcttgcacttggcataacatcctccagggccatctacgttgttggatggaggattttcttcctttttaaagcaaagaggtagatctagagtgttctcaccacacacacacacacacacacacacacacacacasagagagagagagagagagagacaaaagtaactg

SEQ ID NO: 825085 - DNA, 542 bp, Homo sapiens
agggacacaggctttccagccctgctcagacacataagaatgggctatgggcctgagacacgtccttaccaaaaggcagcatcctcacaacctctcctggacccatcgcctagtatgggaacatctctccctgtttcagagtcattgtgtcctctgttctgcttcagtgtgtgcatcacatggcacctggccagccccactgctatgtctgtcccctgtggggagagggcaggtccttctgccgcagcataagagggaagaagggtgtgtgcctgccagtggccctgcattggctgctgggagggacccactcgtcgtggcagaccaatgcccaacatggaaatggatctttccctgcttcttttccacgtgaatacagccctgtttcatccagtgcttaactgcttgtgatccttggcgactgtgatgccagaatgcagtgggcagaagtgcttcttataatagatgacagaggccgcttgtattccccagaggtgcgtggtatgcartgcatacagcgggtgcatggggacctggtttca

SEQ ID NO: 825086 - DNA, 618 bp, Homo sapiens
tcattatactattcttcatacttctttcactcttcaaatatctcataatttaaaataagtatttggactgcctggggttatagtttattattagcagagccaggattagattagagagcatctggttgtcataatcagaagagaacaagctggagtcaagagtatacacacaactgcccatgcagaaaaagaaaaaatgtgtacttgccatttccacactgtgatcacagatgtcacccacaaaccatattaacagctaacatttttaagcactgattagatactttgctgagtgtttcatgtggattatggcattaggataagatggaaacatgagtcagatttaaacaagatctaaaatgcactatagtggagtgcccattactgaaagggaatgtgggttgcaaaaggcattcaaaaggtaaatgaataatgtgtttgggcttgaagtgatgtcagacatgatagaacccacatttctccatttgtagtcaaattattattctactttaaactgatttagacagtagcctatgaataaaatatcagaaattatgaaagtcatgttttgaattctgttgatcacagtaaagrtaagaaatagaattgaatgagaac

SEQ ID NO: 825087 - DNA, 618 bp, Homo sapiens
tttgaattatgaatacttagattgtgtgctgttgacctttagaatgttaggagacaagccagaaattaaacccaaagtaacaccaagcactggaaaagcatcaaagttaaaaaagtaataaaaatacggttattaaagggaataaaattatataaatggaaactgatttaaaaagaaaaggagagtttatctctcagggttctacagttctccagagaaacagaaccagaaggatgtgtgtgtgtgtgtgtgtgtgtgtgtgtgtgtgtgtgtgtgtttgtgtgtataatagatagatgggtaagtagatttattttgaggaattggctatgtgattttgagtgctggcaagtctaaaatggtgtagggcaaagaggctggaaattcagggtagaatttctgtggttagactcttgaggctcctcttctcagggaaatcagtttttgctcttaaggctttcaattcactggatgagacccaactctattatcaasggtcatcttttttacttaaagtcaactgattgtagatgttaatcacatcgacaaaatatgttcacagcaatatctatactagcatttgaccaagaagttgggcaccgtagcctagtcaaattg

SEQ ID NO: 825088 - DNA, 629 bp, Homo sapiens
tgcggttgaattcattttgcttcaggagtttgcatttgactttttttttaacttctgattccatatgattctatacatttctttctttttttttttttcttttttttttgagacagaatttygctcttgttgcccaggctggagtgcaatggcatgatatgggctcaccgcaacctccgcctccagggttcaagcgattctcccgcctcagcctcccgagtagccgggattacaggcatgagccaccacatcagctaattttgtatttttaatagagatggggtttctccatattggtcaggctggtcttgaactctcgacctcaggtgatccacctgcctcagccacccaaaatgttgggattacaggcgtgagccactgcgcccagctgattctgtacaatttttaaaatattttatgagacgtgtgtgtgtgtgtgtgtgtgtgtgtgtgtatgtgtctgtgtgtgcatgtatatttggcttggagtcagcatacctaaattctaggtctagtttagcttctaccacttaatgatggtatacaaatattgcaatctaagaattctgtgattctaatcatgttacataaccttgtctatttccttgtttatgtatgaagatacagtt

SEQ ID NO: 825089 - DNA, 605 bp, Homo sapiens
tagggagggaagtcgtatgaaagaagaaaagagggagtgatactgtttttttgtgtaactttatgtgatttaagtggtcaaaatgagtatgtatattatttttccattaaaatattattagaaaatgttgaggtctttgttttccagtctgatgtatgaaagccagatttaataataaatcaaggatcaaggctaaaaatcccaggaaagtacagatggagccataacaatccaggtaagacaaatagaaccatctactaattcaaacatgaggggcagtctttgaccaaaaactgataggccagacccctgaaataagtcaacatattgggggaaatcaaaaactattcctctacaattttttatttttcgaggaaccgccatactgttttcaatgatgtctgtactaatttagattctcaccaacactatacaaggtttccctttgctccatatccttgccaaaacttatcttttgtctttttgataatagcmatcccaacaggtgtgaggcaatgtatcattgtggttttaattttattttcctggtgattaattaagttgagcatttcttcatataacttttggccatttgtatgtcttct

SEQ ID NO: 825090 - DNA, 601 bp, Homo sapiens
acagagatattacatgttgcacttgcaggcaagctatggtcaaagtgtgaaatgacaacatcaggcataggtgaaaggacaaggtatgactaaagcttcaaagttatcatcttaccaggctggcagggtctacttgactgatggtgatctatacaaaaataatgttcatgggaacaaatatccatgcatagccaaatgatgaaattagaaatatagacatctaatagacatgtattcatcttctcctgataaactcaaacagcagcaaatggacaagtcaataacttgggcaaaaatattacctttggatattttcttgatatcctagaaatttataagagaggggaatgagaaagcaaattcttcatcttaaatttccaggatcagagacattagtcaaaaggaaacaaacagaagagctccttcatattttgatgcattgataagcctcaattatgttaatatcattcagattaaaatttccagtttcctgcytcaagaaggcaaatgttttcattatggccctgacaataactctctctaataatggaaaagataaaggcataccacgttttattgcacttcattttattgtgcttca

SEQ ID NO: 825091 - DNA, 639 bp, Homo sapiens
agacttatgtgagaagaaaattaaattgctcacttttaagtgaaaaagtattgtgcttcttattttagcactttaatcaattttccttagttaatgatgaaaaggcaataagaataacatgctaatgatagagacaggagacagacaagggtcccctgcgaaaccccactttcaagcctaaaatagcctgaagtctgaaaaaccggactgctggccctggatgaagcctgccctttccccgactagttctctctgaataatgcccacctgcacgctgggagaatggggtggaaccaggggaagtttgccccatttgcagagaggagaagcctggcttcttcagttcctgtgtggtgtcctgggcttcaatctgtaagacgggagcctgttagcaagactctctctccctttgctgagagttcctctttcctttttcccttttcacccaataaaccctgccctaatcaccctacaatatgtctgtgtgcctaaattttccttgtcatgtgacaagaacccacttttttctacaacactaacatgtgaaagtctctcttctagaaatatccaagaatakctagtcctttggagcttattatttagtccttaccctgtcattaggaaaaaaaaaaaaaaaac

SEQ ID NO: 825092 - DNA, 629 bp, Homo sapiens
ggttaggaccttggttttctattgwgttccatgggttgatgtctctgtttttatgcaggcaacatgatgttttgattacaatgactttataatatgttttgaaatcaggagtgtgatactaccagctttattctttttttttttttttttttttttttttttgacagagttttacttgtcacccaggctggagtgcaattgcatgatcttggttcactacaacctctgcctcctgggttgaagcaattctcctgcctcagcctcctgagtagctgggataacaggcacctgccacctggcccagctgatttttgtatttttagtagagacagggttttactatgttggctaggttagtctcaaattcctgacctcaggtgattcacccaccttggcctcccaaagtgctgagattacaggcatgagccactgtacctggcccagctttgttctttttgcttaagattggtttggctatatgggtttttttgtggttccatgcaaatttaaggacatttctccatttctatgaaaaatcacatggaaactttgatgagaatttctttgcatctgtagattgctttggtggtatgactattttcacaaaattaattcttctagttcatgaa

SEQ ID NO: 825093 - DNA, 662 bp, Homo sapiens
ctcaggaacccgtgtgtgtgtgtgtgtctgtgtgcacgccaagtggagagggcagcctacagtgggctttgcaagtttggaatttatcctgaggacaataggaagccatggaagggtattaagctacagaacaaagtgatcagaattatgctgagtctaggaagtgctgttgcttggctggttaatttgatcatatcaacaagagaatcagtacggggtcaaattggttgcattcctatttgttactgagacaaaaaaatacagattttgaggaatgtgatagtggctagtcccctaagtccaatgactaggttggcgtctgtcatcctcccttaaacaaaaattcttcacttaactctaagcaggaaatgaaaacgtatgttcttggggtgacttcatcttttggaattttctcatatatttttccaaaattccaaagcaattgttacaaaaaggacacaaatattaatggcttaaaaatttgtctgtaaatttgcttatttttctgaaaaaaaaaaaaaaaaaaacaacaacaaaaacaaaacaaggaaattaaactagaaatgaatgaaattggttatttatagggrtcagtgagaaccaaatgcaagtcatagggaagaagatggaatttctctggggatcccttttgatttggtttt

SEQ ID NO: 825094 - DNA, 654 bp, Homo sapiens
aacatttctataacttgggctgcccaggggcttgcttggcataaacccacctggaagctcacgggtagaggggttcacagtaagaaaatgtaactgctgggtacccagagccctttcatgtstgagaaagttctgcttgcagggtggcaaggatcaggatcagcatgtgctttctatccactggtaaaacgtggattggagaaatactgccttttccttcagaatgctttggtgtctggacacatgacaagcctcagaagctttgatcttactttaaactggtctcccatcttatttttatttgaacagagtttgtggcagtcagaggatacataagggtggcgtcctttgacctccctgatgtttgggaggtaaaccacctccatccctcagaccaggaatgtagtcatgtgaattgatatctgcagagtgcctgacacagctggagggctaggccaagccagctacaaaagaacttgaggtgtgggaaagtttcttagggcatagtaatagctgtatggcaaagccgaggataaagttgctactgtctgcttgttcattcacaagtacttattgagcttctgctatatattgggtgataggctgggcctgcaaatagcataaaactattaactatagagtaaaacagccttc

SEQ ID NO: 825095 - DNA, 406 bp, Homo sapiens
ctggtgccaggctgtgcccagaggaggggcagggcaggactgggtagaatggggaatgggctggaagggaccaactggaggctgggaagagggcctgagcagggggcrcagaggtgggacaggaagggtgggctgggggtctagccagtgactggcgggatgacaggtcatccttagatgcggagcccagaagagaagatgtcaggggagacgctgtgcttggcctacagtgagagtgagggccccagccgggaggctgagcctggagcttcttggttgatctgatcatggacagtagagagctcctgtggaaaccacagaagcagagcagccctgtgtcttggaagaaagagggccccatactccgcatcccgcaccttgctccccgcaccccttatcccgcagt

SEQ ID NO: 825096 - DNA, 406 bp, Homo sapiens
ctggtgccaggctgtgcccagaggaggggcagggcaggactgggtagaatggggaatgggctggaagggaccaactggaggctgggaagagggcctgagcagggggcacagaggtgggacaggaagggtgggctgggggtctagccagtgactggcgggatgacaggtcatccttagatgcggagcccagaagagaagatgtcaggggagacgctgtgcttggcctacagtgagagtgagggccccagccgggaggctgagcctggagcttcttggttgatctgatcatggacagtagagagctcctgtggaaaccacagaagcagagcagccctgtgtcttggaagaaagagggccccatactccgcatcccgcrccttgctccccgcaccccttatcccgcagt

SEQ ID NO: 825097 - DNA, 631 bp, Homo sapiens
tgggaactgaaccttcaaccggtgggatctgacattatctccaggtagacagcgttggaactgaattacaggacacccagctagtgtyggctgcttggtgtgggggggaaacctcacatgtttgttcgtagaaggcttcatctgtgttgatgatttttgtggtgtgagagtagaggaaaaatgccatcagggagagttttctctacaccctatagctcctagatgctttttatttaagacattcaaaccttgtgaaaaacaaacaaacacaaaaatctttttatttaagacggtcaaaccttgttcaaaacagcacagacattaactcggaatttaggatttattattgattaattgacattatcttcagtctgttcatattattaagtgatataagtcaggtacacacacacatgtatggggagtgtgtgggagtgtctgcatgaagtatactgtcagaaaatatactcatttcaaagaaacactgatttaggccctggcaaataaggaaacatttctatttcttctagaaataacacattcatttgccaacatctgatctatccatatgacctcttaatacacacatgaaataataaagtgtatttttcattcatttaataagcatgtg

SEQ ID NO: 825098 - DNA, 617 bp, Homo sapiens
aagtgcttctctagggactaccatacgagaatttaaattgtatgatgtctgttttacattgactgaggttgggagtgttacagcttgagagtttactattttcaaatgaatcaagatgttgctcttaaaaacctacgttttggtctttaagggcagaataatttattttcttacgcttttgaaggtcagaaggggtcaaaaagccattagatgatctgcttcacaactgctctaatgctactgtgtcatcttggacagatcacctcctaatttttttttttaagatggctatgcattttctcttcactttcaagtgttccaacttgtcactttttgcttcggtttaggaatcttttggtctaaaacttctctgtatcagccctaaaaccactgagattacatttgtataaaaaatatattaaaaataaaataaaaagtgaattcaaaaataaaatatggtgataatataagacatgatattccattgtttggcaatattacatcaaagggaaagctagttggtacaagttgyatacttcaattcaaaaataagtgcctaagagtggtgtatttgcaaatggactgacatattgttttttaaaaggctgatgatcaca

SEQ ID NO: 825099 - DNA, 626 bp, Homo sapiens
caggcaatagaaacagaccatgaaatgaccacaatgttggaattagcgacaatatgtgaaatcttttatcataatgatgttcaaatatatttttaatatgaacataatgagaaaacataaaggaaataccaccagagtaatggtaactataaataagaacaaaattgaaactctatgatagaatagtttaatatttaaaaatttgaaaggtactagatgggattaaaaatggactgtagagttctagttctgggcaggtagcatgaagagctctgtagatgcacttcccagagaaataagcataactggtgaaaaactagaaaaactaaactatttgagatcttggaaatttgtcctaaaggcatacagcaaatgaaaaaaaaattcaagaaaatctacaaaaactctacagaccactgagagtatgtaacatttgaaccataacccacaccttcactcactccttccagctaagaatgattgaaactccactaggtgggtgtagacaagaacacagggtttcttcttttcccaggtctcagttgaggactacagtatcttcccaggaggggcaggccaccagccttyatcatcatcttcagatgtatgcagcagagtctgaatat

SEQ ID NO: 825100 - DNA, 595 bp, Homo sapiens
agattatatcctgcacatggctgggagggatctacgcccacggggtctcactgattgctagcacagcagtctgagatcaaactgcaaggtggcagtgagcctgggggaggggcgcccgccattgcccaggcttgcttaggtaaacaaagcagccgggaagctccaactgggtggagcccaccacagctcaaggaggcctgcctgcctctgtaggctccacctcttggggcagggcacagaaaaacaaaaagacagcagtaacctctgcagacttaaatgtccctgtctgacagctttgaagagagcagtggttctcccagcacgcagctggagatctgagaacgggcggactgcctcctcaagtgggtccctgacctctgacccttgagcagcctaactgagaggcaccccccagtaggggcagactgacacctcacacggccgggtactcctctgagacaaaacttccagaggaacgatcagacagcagcattcgcggttcacaaaaaaccactgttctacagacactgctgctgatacccaggcaaatagggtctggagtgkacctctagcaaacttcaacagacctgcagct

SEQ ID NO: 825101 - DNA, 456 bp, Homo sapiens
acacatatgtccattgcctctgtgacttcatctcatatttattcttggmagaactcactcttcactggccatgcttatcttccttgctgtcactcaatatgtcagtgacaataatgcccatggtctttgcatctgctccactttatgcctagaaggctcctcatcagatacccacatacctggattctttattaccttcccagtaagactttccttgctcgttaaaatcgaaacacagtattcagtcattctcatccaactttctcacttgattttctccatagcaattatctccttctgatatattatgtaatttactttttattttagtttctgtttctgtctacaatacaaggtatgtacccccaaggacaagattttgcttttatttttgttttgattttactgctcttagttctaaaaaatgactgacatattatagataattgataagta

SEQ ID NO: 825102 - DNA, 456 bp, Homo sapiens
acacatatgtccattgcctctgtgacttcatctcatatttattcttggaagaactcactcttcactggccatgcttatcttccttgctgtcactcaatatgtcagtgacaataatgcccatggtctttgcatctgctccactttatgcctagaaggctcctcatcagatacccacatacctggattctttattaccttcccagtaagactttccttgctcgttaaaatcgaaacacagtattcagtcattctcatccaactttctcacttgattttctccatagcaattatctccttctgatatattatgtaatttactttttattttagtttctgtttctgtctacaatacaaggtatstacccccaaggacaagattttgcttttatttttgttttgattttactgctcttagttctaaaaaatgactgacatattatagataattgataagta

SEQ ID NO: 825103 - DNA, 630 bp, Homo sapiens
tttggtagttatataatggggttagacaaatttaagtaggcattattaagtattgaggaaaaagttaattatcrtagcacgctaaagaccaaaaaggaactacagagatggttgttatttctattaaaagaatgaaactaatgcataaaacaaattcttagttacactggcttgagttttaagctgaggctgtttttcaaagtatatgtcaatactaagtggttagaaagcatagcggagggtattgatatctgatttcataaaaacagtggagcgaataaactcatgttgctagtatttagatagcacaataacacatgtactattctaaatgttttccagtaattgctgtaaaatgtattttcaaaattagttttattacgtacctctagtacattctcaatgtcttaatagttcctcccacccccaacttttatcagacacagacctcaagtgtgtcctttgactgacccattctattcgttttcaagtatgtaaagtctgcaatactttcaggaggcaggttcctgggactggagctttaaacagctggaacaaaccgcttaactgtattccaagcgtgtctatttaagcttggaggatagaagccttcagcttttgtacgtaaat

SEQ ID NO: 825104 - DNA, 493 bp, Homo sapiens
aaagctataaagaaagaaaatattattgtacacctgtgcatgtgtttcatattttaatgtgttattacaaaagagtcacatgtttaaaaaattaaaagtttataaagaaaaaagtaataaggtgaagttaatttaataaactgaagttaatttttttctttattcaatagaataaagaaaaaaatactttttgtaagtttgctataccctcagtgtacaacggttgtaaagtccacaatagtgaacagtaatctcctagatctcacgttcaattataactcactcaccgactcctacagagctacttccaggttgcaaactccatttatgacaagtactctatacaggtgtagcatttttcatcttttataccataattttagtgaccttttctatttwtaaaaatgctctaatacacaaatacttgatattgtattatagttgtccatattatttagtgcagtaacatgctgtacagatttgaagcttaggg

SEQ ID NO: 825105 - DNA, 459 bp, Homo sapiens
gttctgaacttctatatgattattttcttaaatctcctatttatatttcagcgtaatggtttcatggtttgtatttgacctttgttttatgtatgacacattactttttattttacttaagaaaasttagtgacttgtccagtggtatttcctttgctagtttattcgtttaacactgaacacataacatgtggtagggatttgttatatttttagaataaaaagggcagaaaaggtgtggtccctgccttcaagaagctcagtggttccaaactgtagaataaagtagttccaaaaccagcataagtctatgattgttttcaatatgtttaaaaatcttaaggctaatcaataaccaaaggctgcattggtgaagtgaaacatgccattgcacttgtttcccttttatctagatatatcaacataatgtataatatttgcttttgcaaggagaggaga

SEQ ID NO: 825106 - DNA, 625 bp, Homo sapiens
tggtggttgtctagagtgtggctgtctgggtgcttcacatgcaattgagttatcacttcctagagacttttgaaagttaggtaattaaacgtttttgctgggttcattttaaaattagagattgtgggtctgtaaatgacaccgaaaatccgggtttccgtcatctcactgtctgtttcatgggaggactcagataattctttgagtatttagtttgtgtgagaaagaaaagcccttggtaattaaaaaatcgtctagcaaaggctcaggtttactgctctgaggtccacaagccatcgcatttgagtcaccatgaatggttacgttcacaataatttagcatatctgtgctgcatcccacaatgagcttccactttcgagttttccatgttccaggaccacatttcatctcaacgtgttcaccctgaatcatcctgtattcattaatggaatatgacagggtctggaatttgaacaaattataatataatgctttatgaggtctgttctgtcatctgcatgcaaaktattttattttaaaataatttatgtgtttaaagatggttcacaagcactaggtaatttaatgtatgtagcacttcctcagttttggctcagcgtcttc

SEQ ID NO: 825107 - DNA, 504 bp, Homo sapiens
gaacatcacacaccggggcctgtcattgggtgggggaagtggggagggatagcattaggagatatacctaatgtaaatgatgagttattgggtacagcatgccaacatggcacatttacacatacttaasaaacctgcacgttgtgcgcatgtaccctagaacttaaagtataataaaaaaataaaaatgcttcgagattttggctggaataattttgcatagatgcatttgggaaaactgtagtctaggcacatatgtatgtcttcatttatggagatctgtcatgcccttctgtggaattttataagtatttaagatgattttcgtaaaatccatgaggaaatgtctttatatggtttctcttgataattatacattttttgttacatgagcacaagtatttttaaatttctctgaatgattagtctcagcatttataaaagttacttatcttctacatttgtatgtacctatcccagttaaggaggtatctttgttgcttg

SEQ ID NO: 825108 - DNA, 577 bp, Homo sapiens
tatgtacagagacactttgactgagttaagataagaagatagtctaaaaaagaaaatatttcttagctcttgtcttcttggaaaaatgtactatggatacaactaaataatacctttcaggaaatactgctttataatgttatctaaagtacaaatcctcccaactttttatatctaaaaatgatttggatttcgacaaagcgatgcagtgggttaataacagtttggacataccatgttaatgaacactgaaaagcccttagcttattgaaggccataatttgcagatgtacactgtcgagtcccaaatggatgcaaggtgaaaagaaacaaaacttttaaatgccaattaaaacaagtagagttgactatcatggtgatagaaaatagacatttattttcaaatgtagagacttgtgaagaaaatcacatttgcctttacgaaacataatccctttctttttattctggtacctgtgcactatcattctcattaaaacatcatcctgaccaatcccgcacayagctcactggggctctgcctccctcaccgctggctgctggtctacctgcctga

SEQ ID NO: 825109 - DNA, 577 bp, Homo sapiens
tatgtacagagacactttgactgagttaagataagaagatagtctaaaaaagaaaatatttcttagctcttgtcttcttggaaaaatgtactatggatacaactaaataatacctttcaggaaatactgctttataatgttatctaaagtacaaatcctcccaactttttatatctaaaaatgatttggatttcgacaaagcgatgcagtgggttaataacagtttggacataccatgttaatgaacactgaaaagcccttagcttattgaaggccataatttgcagatgtacactgtcgagtcccaaatggatgcaaggtgaaaagaaacaaaacttttaaatgccaattaaaacaagtagagttgactatcatggtgatagaaaatagacatttattttcaaatgtagagacttgtgaagaaaatcacatttgcctttacgaaacataatccctttctttttattctggtacctgtgcactatcattctcattaaaacatcatcctgaccaatcccgcacatagctcactgrggctctgcctccctcaccgctggctgctggtctacctgcctga

SEQ ID NO: 825110 - DNA, 577 bp, Homo sapiens
tatgtacagagacactttgactgagttaagataagaagatagtctaaaaaagaaaatatttcttagctcttgtcttcttggaaaaatgtactatggatacaactaaataatacctttcaggaaatactgctttataatgttatctaaagtacaaatcctcccaactttttatatctaaaaatgatttggatttcgacaaagcgatgcagtgggttaataacagtttggacataccatgttaatgaacactgaaaagcccttagcttattgaaggccataatttgcagatgtacactgtcgagtcccaaatggatgcaaggtgaaaagaaacaaaacttttaaatgccaattaaaacaagtagagttgactatcatggtgatagaaaatagacatttattttcaaatgtagagacttgtgaagaaaatcacatttgcctttacgaaacataatccctttctttttattctggtacctgtgcactatcattctcattaaaacatcatcctgaccaatcccgcacatagctcactggggctctgcctccctcaccrctggctgctggtctacctgcctga

SEQ ID NO: 825111 - DNA, 486 bp, Homo sapiens
  misc_feature 1, 2, 3, 4, 5, 6, 7, 8, 9, 10, 11, 12, 13, 14, 15, 16, 17,18, 19, 20, 21, 22, 23, 24, 25, 26, 27, 28, 29, 30, 31,32, 33, 34, 35, 36, 37, 38, 39: n = A,T,C or G
nnnnnnnnnnnnnnnnnnnnnnnnnnnnnnnnnnnnnnncagttcaactttaatgtctgagactactaaattagaaaaacatactttcttatgggtgttttatgttttttactccttggaagttaatgaagaaattctacaagatttcagtgaacaagaaccctagcttcatacactaattagtataattatcattaaaccatgacctgagaaaagcattatgtaaaataatatctgacaaggtccagagactggtcattttcaaaattgagaataatattgttagagttgctcctatgaaaatggctaatttttgctaccacgaaccaaagatattattttgtgtgaattgtaaatcattgaggtagctactctaaatatagacaggtaattcatacaccattatcacaaagaaaaacctatgctaaataaatrtaattcctcacttatggagagcattttgggacagtgccgcagacccaggat

SEQ ID NO: 825112 - DNA, 654 bp, Homo sapiens
gcacaacaattataaatatacgagatattttggttctcttttgctaggtggtgacatcttaccttttacatttatttcagttccattattttataggggarattgagtttaaaacaccagctactatacttacatcatttgagacttatttggtcttaatcagtatcctgagtcttaatatattaaaagttgtaattgagttttccatgttaattttggttgcttttccactgggaatctagatagatagatagatagatagatagatagatagatagatagatagatagatagattgatagataggtagataggtagatagatagatagatagatagatagatagatagatagatagatagatagatggatgcatggtactattttgctattttatttactaccaggtttattcacaatattaagacaaaaagataaaacaagttacatgctcagtagttaaatataattctgccctaattcattacttcagaataaacagtgcatcatttaattgagcaaaaacacctaattattttaataaaggtagtctatatgcttctgaattataatgatttcatttgggagtgttaaagataaatggtttataataagaggtaaccattgcagctatgttaacataaggaatttcaa

SEQ ID NO: 825113 - DNA, 614 bp, Homo sapiens
aacctgcttttgatttgcccatatgagaaaccatgagatggcttcgagtagcatttaactttccgagctgtaactgaaagttaaagagaaattccactactgtttggaagcgagaatcagtcctttcccactcagcctccacacaagatgcccacctcaacctgcttttgtcttggttagaggccaccttcctcatgggatccgtctttggaatcagcagtttttgctcccacctcataagcttaccggccattcagggactggagcaagctgcatgtgacacattcccccacctgtgcaagtacttttcatatttttccgtattggagtatcttggtcatttataatttatgatttcaacttgaaacaacttgccttggaaaggagcaaatattcattcagatatatgacgtcataactttccatttaactatttgttcttttgttcattaattattaaatacatgtttattgaatattttgaggagtgtgaggaataaaactgaataaaaatcaacccatccctgcactccaggagaaaggtgggaatrcacactttgcatgagtatcatttggaaactgaagactagcactgtttcaaagctccaatgggt

SEQ ID NO: 825114 - DNA, 492 bp, Homo sapiens
aaaattattaaaataatgagcaacagttatagacattgttgggttaaccttgggagtccaaagctsatcctaagaggaattaataatatatcttttttttttttgggccaggcgtggtggctcatgcctgtaatcccagcactttgggagtccgaggcaggtggatcacctgaggtcaggagttcgagaccagcctgaccaacatggtgaaaccctgtttctactaaaaatacaaaaattagctgggcgtggtggcatgcgcctataatcccagctactcagggggctgaggcaggaaaatcgcttgaacctgggaggtggaggtttcagtgaaccgaaattgtgcccctgcactccagcctgggtgacaaagcaaaactccctttcaaaaaaaaaaaaaaaaaaaaaaaaaaaaagtatatatatgcgcccggccaagtatatctttttttaatatattgcctccccctgcattaatttttttcttgcttt

SEQ ID NO: 825115 - DNA, 547 bp, Homo sapiens
aaatttgccatggacagctgcccaaccttgacctgctcaatctcttccagaccttctgccagaaagtgggcctgctgtgcacgcttcagggtaagctgcagccccaggactggacattgttggacgaactgctgcagggcctgcaaacactgctgctcatgattttgtggcaggcttcccgtggcctcttcctgcactaccatgtggaggccctaaccctgcgtcgcatcagtagcttccgccagtacaagtatgacctggtggcagcgggcaaggctttggagggcatgttctgcaagctcaaccacctcctggaacacccgcaccagctgttcttcctctacctgctccccactctgtcccgcttcgtctccatcggcctctacatgcccgccaccagcttcttgctcctggtccttggtttcaaggctctgcaactgtggatgcagctgcatgaggccggagtgggccttgaggagctcaggggggtccctgaccctagtgtccccsctcccccagcacaggatggtaagcacacaggtcccag

SEQ ID NO: 825116 - DNA, 522 bp, Homo sapiens
gatctccaccaactgacaagacttgccatgctttttgaccaggagatgatgtgtacacaaaggtttttaaaagaaggcaagcactgtcacctcactgggagggtccatgtgaagtactgctgactacttacactaccatcaaagtaaaataaaacaactcctcgttcatgcaagtcacaccaagccagatcctgctaagcactctcaagagaattggaaaatcacccctacaggtgacctttagatggtatttcttcaaagtagacacttttcccaagatcacagatcaagaaagtttacttccacctatgttgtccctgttttaggactctgtattactctacctttaaaaacttttttttttttttcttaaaaaacctcttctttttttggttgacaattttttttcctgtctgttgatggcctgttaaaaagctgactagggactttctcagtctattctattctctctytaaccctccactataaatgctttttttcaaattgtatcttgctctaatt

SEQ ID NO: 825117 - DNA, 636 bp, Homo sapiens
tagacaactgaatttaagatgttaatcagtgtggagtgcattaaaatcacaaggctgtcctctacgagactaactgtattaaagagaattcaactggccaagtagaatggctgatactttaaacctgtattgactcatatttgaaatagtaagacacttgaaattgaattctttattttggtttacatagtccttgatggcttgaatgtgtcatagatttctcaaataactaataaaagttggaattactttccataagaattaaaagtggtattttggtgcccatactgtgaatcagtgtaattcttcagagaaagaacttcaaaaaaagcaaataaacatgaatgtgaatcactggtatgggccaagtgattggactaaatctactctcatgtcccttaaaactgtaaagtataaactgtcatgcagtgtaatgtaaagcacatgagttctgaattagactgtatttgaatcttgcatctggcagtttttagttacatgactgcaatgtattcaatttctctgagtctcagtttcctaataaaaatgatkggattaaaaataaaatacttctcttgaaaagctactgaatacagtcaccagaaatgatacaaaagcgtttgggagggctcccag

SEQ ID NO: 825118 - DNA, 635 bp, Homo sapiens; identical to SEQ ID NO: 822417

SEQ ID NO: 825119 - DNA, 679 bp, Homo sapiens
ggttgagcagtgattgtgccaaggcagtgcaacctgggtgacagagtgagactctgtctcaaaaaaaaaaaacaaacaaaaaaaaaaccraaaaagaataaatgattcaagaagagaattttcatggcagtgcatctttgtgggcccaatttcttatccataaaatcacacacactattccttccccaaaaacccaccctccgaaccccacccagcattcttgggaatgttcaagtactagataggtgatttcaccatgaaattatgaagtagaaatatgactttctgccatttgatgaaattaggttttagctattatggaaatgtgtttcaaagtgaaattagacttgataggttacattttatttctgtattttaatcatatttctaattcataatttcacggtgaaatcatccatcttgtacttaaacattctgaagaatggtgggtgagggttggagggtgggtctttggggaagaattgtgtgtatgatgttatgggtaagaatgggttaaaaaggatgcaaagccagaaaaaggatttcttgagaaacttatgaaagaatgttgttacatacaaaattaagcatgcagtggagtggcacagacagttgagtgacatatgtatgtgtttcactcacccttcacgcctcagcttagaaatcccttcctccagga

SEQ ID NO: 825120 - DNA, 625 bp, Homo sapiens
tttctgcctcagcctcctgagtagctgggattacaggcatgtaccaccacgcctggctaatttttgtatttttattagagacagggtttcaccatgttggtcaggctggtcttgaactcctgacctcgtgatctgcccacctgggcctcccaaagtgctgggattacaggcatgagccactgcgcctggcctaattagagctcttttgacacacatcacacagtacacacacaggcagaagaaaacccagttgctgggtggggccctttaagagacagggctgggaaaacatgcaggtatcaaaccagaaagaagcttattccgtaagtcaggactgctaagcaaagcgttgccaaggggttacagccatacccgcaagatgtaaaacaagatggaggcttgcagcactaaccatacagacatgcaaagcacaccagattggccacagcccaagactagcctcacaaaccctttttcacaattaaagctttaaagaaattatcaacagtgatagytggggagcctggcctagtaaaatgtcttcttaaaaaaaaaaaaaaaaaacttgcttaaaacttaactgctgatggggtagagaagaggaaaaaaaaaaaaagtttaaaaa

SEQ ID NO: 825121 - DNA, 277 bp, Homo sapiens
ggtaaccattttactctctataggtttcttatagtgccatgtcaccttaaatatacacaataatatttatttccaaaaaatgcaattgcaatagcagtaatagtgatacttttaatataggtaattgaccttctgaaaagtatgaatagtaacatctttaggacactttaytatgtttattaagtcccaacttaaagtctaggaaaaaagtgtgcttgatgtataaacatagattcaaaatagttctttagacataccccgtcctctcccatgactg

SEQ ID NO: 825122 - DNA, 600 bp, Homo sapiens
aaatgactactccttccctaattcaatcacaactggaaaaggtatacagttagttcttctgagttttaagtgacktagaaataattaatttcttttctcaagagtggactatctatggattcaggtgtccaatgacctaatgtgattccaatcattttactgttataaatcttctattataaaaatcaagaatacagtgtcaaaaaataaaaactccccaatatactttaatacaacaatagtaactctaatttagatcaattaaaaagcttaataattgtgcagtgcatataaaaaaatctaaaaggctttgtgtttatttgttctagattattactgccataattttcaactaataaatcactagggtctaaacttaattacatatattgttcaagactgaaaaattctaaattttcgcatgatctagtctgtattcaacgtatttattctcaaaaggaaaatttttttattcatttcgtattcacaagcatacctagaccaggcaggtaaacttgtaacaaatgatgtagaaaatacatttgaccaagttgaatgtcaccgcttaagggatttatactgaactataaacttaggaat

SEQ ID NO: 825123 - DNA, 600 bp, Homo sapiens
aaatgactactccttccctaattcaatcacaactggaaaaggtatacagttagttcttctgagttttaagtgacgtagaaataattaatttcttttctcaagagtggactatctatggattcaggtgtccaatgacctaatgtgattccaatcattttactgttataaatcttctattataaaaatcaagaatacagtgtcaaaaaataaaaactccccaatatactttaatacaacaatagtaactctaatttagatcaattaaaaagcttaataattgtgcagtgcatataaaaaaatctaaaaggctttgtgtttatttgttctagattattactgccataattttcaactaataaatcactagggtctaaacttaattacatatattgttcaagactgaaaaattctaaattttcgcatgatctagtctgtattcaacgtatttattctcaaaaggaaaatttttttattcatttcgtattcacaagcatacctagaccaggcaggtaaacttgtaacaaatgatgtagaaaatayatttgaccaagttgaatgtcaccgcttaagggatttatactgaactataaacttaggaat

SEQ ID NO: 825124 - DNA, 378 bp, Homo sapiens
agtagttttagtacttcttatccaatgggctactcacctgaaatagtcctcgtgtcccacctctaatcacacacacacacacacacacacacacacacacacacacacaccacaaccctccctttggtataactcatggagactgaagtcagccctaatagtaaaacattctgtaaaaggttgtgcctatgtaagtttattcatggtgggcaccaaaaccctatattaaaggtcaggtagatacaaacttcaaacaaacattgttctataacttgtgtggtaggtacaataatattccccyatacacacatgccatgatgcctatgtcttaatcccgaaaacgcatgaatatgtcaccttaccttgcaaaagggactt

SEQ ID NO: 825125 - DNA, 565 bp, Homo sapiens
tacattcctttgtgtttatgcccagtaataggattgctcggtcaagtggaatttctttcttcctttttaaatttatttttaatttttagtttactttaagttctgggatacacgtgcagaatgtgcaggtttgttacattggtatacatgtggtatggtggtttgctgcacctgtcaagttgtcatctaggttttaagccccacgtgcattaggtgtttgtcctaatgctctcccttccctgattttaggtatttgaggaatcaccacactgttttccatgacagttgaattaatttacactcctcccaacagtgtgtaagcattactttgactccacaaccttaccagcatgtgttatgtttttagtaatagccaataattttaatttttaaaaaagtaataagtcgctagtcaaggaaatgcacatggagattgtgatgagatacagttccatactattacactggcaacaattaagaattctgtctgaaccgagtgttggaaggcatgtggataaatwggatcgtttatacactattaatgttagggaagggttgtaaaatg

SEQ ID NO: 825126 - DNA, 593 bp, Homo sapiens
gttgtacactttatgagttatgtacaattattatgtatccacctttgtagtatcgtacagagtagtttcactgctttaaaacttctctgtgttctgcctattcctccctctcttactggcccccaacctctggcaaccactcatctttttactggctccacagttttgccttttccagaatgccacatggtcaaaatactactgtattagtctgttctcacattgctatagagaactacctgggactgggtaatttataaagaaaagaggtttaattgactcagagttctgcaggctgtacaggaagcatggctgtggaggccttgagaaacttacagtcatggaagaacatgaaggaaaagcaggcgcggagaaggaggaagagagaaggggtttgtgctacatgcttttaaacaaccagatctcatgagacctcactcactatcacgaaaacagcaaggggaaacttcaccccatgatccattcacctccaaccaggcmccttctccaacattggggattacaattcaacatgagatttgggcggagacccaaatccaaaccataccaactgccatatgtagccttttcag

SEQ ID NO: 825127 - DNA, 548 bp, Homo sapiens
gccagactgaggactacccggtggatttgtattacctcatggacctctccgcctccatggatgacgacctcaacacaataaaggagctgggctcccggctttccaaagagatgtctaaattaaccagcaactttagactgggcttcggatcttttgtggaaaaacctgtatccccttttgtgaaaacaacaccagaagaaattgccaacccttgcaggtaagtaaatgattctcttggcatctttgtgcgctgattttctgtggagatactcccgctctgagctgcacttgccaggagcttgctaactccctggcatttctgccttgtctggttggatctcagcagttctctcagaggcctaggttgcttagagtggaggtgaggtcatctgaactacatggttctagccgtgggtccttgaggcctctgcatttgcctcccagtatagggcaggatgtggcaaaccagaatgcgtgttatgcaggygagggaaccaagactttcaccataggctccactggatggtgcccagccccagcctctcaga

SEQ ID NO: 825128 - DNA, 618 bp, Homo sapiens
aaaatgatgacggcaaccagcatgcgattttctttgactattagaaagtgaagcctatatccacactgtgtgcattttatgctgttgaaatcccatcagctcatgagaaagtacttatctccattaaygttacctccatttgtctaggtgctgtgtcagaaatgtgatagtgatgactgacacctcctctgtcccacagaatgcttgtcccaatcaacccatcattaaggttttcagaatatccttataaaatatatcttgaatcttctttactcttttgccaccactctagtccaagctccctctcttgcttgtctctctgaactccctgcccctgctataattccatctcctcaagaaccagaatgagtgagtttttagaatctaaatatcatgccattcccctcattgaatgagtctgcccattctcactgcccacagctttctcttgtactttgagggacaccacagttctttacagatctacaggaagctgtgtgatgtgctcaccgcttactcctctgggtctcctcactctgcttttcccctgctcttgactggctacagccatactgtcctttaccagttcctagctaaataactaggcctttgtatatt

SEQ ID NO: 825129 - DNA, 498 bp, Homo sapiens
accctgaaccttagttagggccagatgattaasaattctcagggtaaactcttctctccaaatttcatataaaaactttctctttcctgagtagcagatattttaaaggtttctttctttctttccagtctacccctttcttgaggttattccagttgagaatccaggccttatgggagcaatacatctcacttctcaacatgaataagactaaagatttgtcttctttcccttaatgattgttaaaaccaaagctccttttgatttagattggcaaataatcaactgaagtataattatcagtttaccatgcttatcttcggcttcctatgcatttttctcatctggatatacggattactttcttctgacttttaatatgcctttaatacatgaatggtgtattgcatctacaattttccaggcttcataatgagattttaaaacggtatcaatgatcaatgtagtcagttttgtacgatagccttggtatcacct

SEQ ID NO: 825130 - DNA, 614 bp, Homo sapiens
gaagtaaaattattccaagaaaaaaaagaagttggcctaagtactgtaaaccaaaaataaaattctaagcccccccaaccaactgaatagaccccctcttggccaagcagatcccctcaaaacctgaaaaactrgttcaggcatggagggaagggaggggcttggacgtatctcactacaccctcctccctttggagtttagacacaactggtcagcattaacattaaaacagagatctgaagattaagaaacagactctttgtagcaataagatgataaatttcaatctgactctggtataatatcacatgacagatagcagaccctgaaggaagttgatgtattttaccccaaattatatttctttgacgtattttgaaacggcccctgcaaagctgtctcttgtgatggaaatttacattctgtagagaatcttcttcccttactaggtctttttgggagattttgacaccttttaaggtccagtaagagacattcatatctattctctctgaagcctgctacctggaggcttcatctatatgacaagatccttggtttccacaatcccctccaccttatcttgactcaagctgacttcaactcttcagga

SEQ ID NO: 825131 - DNA, 618 bp, Homo sapiens
cagtttgtgaaaatgatattgagtgtgcaatatggagataaaaagagagaaagtctttacagatgtaayaatcaaaattagagaagttaattgtagatttcctacttaaacagtatggatcagtgaatactctctgtgctacccagattcttcttaaaactaaaggatatatccctctagctgctggctaatagatcatataaatcagtcctctctgctaatttccctctgctgaaaagagtcaccttcttcaaagaaacatgctcatcctagaggcaggctgcattcatgcaagaagactggttgatttagccttcttcttgctctatcaggtcaactctagaggctaattcagtttcaaggttcccatgggttagctaaggctttgtttttactgcacttccacccaatttctaatctgcccattcttgctctattccatttatcgtaggtattgattccaagaactcacatcaataaatctcctgcatgctaatgtatgtcttgaagtctgttttcctagaaccccaagctacattggttggtaataaataatgtggttaaagaaggcagattctaagatagaattttggacctggatcacctgtagcctgccta

SEQ ID NO: 825132 - DNA, 604 bp, Homo sapiens
ctgattccaggatgagaaactcagattgttggaatatacagagcatattccttgtgaaaattatcaaaatcaaaatagagtcatttgttttaaaaccctgacaaatggagccagggaagaccatgaagagagggttctcacgcatgaatacctgataacaaaaactatcgaccgggcctggtggctcatatctgtaatcctagcactttgccaggcacagtggctcacacctgtaatcccagcactttgggaggccaaggcgggtggatcacctaaggtcaggagttcgagaccagcctggccaatatgatgaaaccccgtctctactaaaaatacaaaaattagctgggcatggtggcacacgcctgtagtcccagctgctcaggaggctgaggcaggaggctgaggcacttaaacccgggaggtggaggttgcaataagcccagatcaagccactgcactccagtccagcctgggtgacagagcaagactccgtctaaaaaaataaataaaataaaaattcctacttgagccaggcacagtggctcatgcctgkaatcccagaactttgggaggccaaggcaggtggatcacctgaggtcag

SEQ ID NO: 825133 - DNA, 596 bp, Homo sapiens
atcaagtagactgtgtagtgaaagatagtcttgttcagttacaaygacattggtataacaatgggtggtctgtaccatttaacatggaactttccctccctcccttctgccctccttccctatctctctctctctctctttcccttccctctatctctttctctctcttttcctttccctccctccctccatttatttctttctttctttttctttctttctttctttctttctttctttctttctttctttctttctttctttctttctttccttctctttctttctttttgtccttccttccttcctttgtcccttcctccttcctttcctctctctctctctttctttccttctttctttttcttcctttctttctatcctatctttctgtgtttctttatttctttcttgaattttaggctttattactgataatttggtagccactccatgaaatagttccatcaagggtcacttattgacttggaagtaaatgtacaaatcagaaaaattctgagtattgttgtattagtccattctcatgctgctaataaagacataccggacacagggtaatttataaaggaaatagg

SEQ ID NO: 825134 - DNA, 578 bp, Homo sapiens
gttgtactagtttacattcccacctgtcrtgtaaaagtgttccctttttaccacattcctatttttgattttttgattatggccattcttgcaggagtaaggtggtatcacattgtggttttgatttgcatttctctgatcattagtgatgttgagcatttttgcatacatttgttggccagttgaatatcttcttttgagaattgactattcatgtccttagcccatttctcaatgggattgtttgttttttacttgctaatttgtttgagttccctgtagattctggatattagttctttatcagatatataaattgtgaagattttctcccattctgtgggttgtctgtttactctgccgattgtttcttttgctgtgcagaaactttttagtttaagtcccacctattaatgtttttgttgcatttgcttttgggttcttggtcatgaagtctttgcctaagctaatatctagaaacatttttctgatgttaccttctaggatttttatggtttcaggtcttagatttaagcccttgatccatcttgagtttatttttgaataaggtgagagat

SEQ ID NO: 825135 - DNA, 621 bp, Homo sapiens
cttacttagaaaacagatgcttacaaaagccatgccacactagacagcatgggagaggagagagatcagtggagcccaaggcaatcggaacaactgcagtttttttaaaaatcaatggttaatgaaacaagggyaaaaagccagtgttccccagcaacatcttcttcccgttaccggagagcacctccacctaaaagaacaaggtaatgttgaatcctcatctaaggtcactgctgtccttgaggaagaattcaaacagcacattcaccttttactccaactttgaggagggcaatgcaaagatcttttcctttaggccataactggacatttatagaattacagcaaagagcataaaatggtgttttgtgccatactttctttggagtcttaactctttggattatctctctctcaatgtattcatctagggatgttcagataagccagaggctgcacctgctgggttgatgttttctacaatcagtagcatgcttctgttggctctagcctaggttgtagggggaaaatattctctctttagtatcatttatttaggcttgaatttatttccctgtggcaagacaaaacaggctgtggatctagggaaaatggacaagg

SEQ ID NO: 825136 - DNA, 572 bp, Homo sapiens
caagaatggatggtctactcctagtacccagattgtgggatccaaataacatcttccaataaaaagaaccagaattacttggaggaacaatgagttccagtcttagaaaaaaattacaatatgtgcttgcygtatcagaaagtaaagaagcttagaaaactaagtcatgtcaagaggacaggcatcaacatgaaaaggttctgaaagtcaataatggagcattctgagtattaatcagattaacaatcacaatggatttgaacaggtcaaatatgttttgatccaggagcacataatgatactaaaaacaaaacaataaaaactccctgtcacctttggaggatgcttgggaaccaacacattatcttgaaacctagtcaatatgaggaaaaatcaagcattttttcctgtgtttcctatatgaactatttttcagtgcagtcaaatagttgtttaggggagattttctttattataaatgagaaggaaattttaaaccttaatgatttaatgaatctaggcaatgttaattagtagctattaacattgtaagaagagaaacaatcatacat

SEQ ID NO: 825137 - DNA, 572 bp, Homo sapiens
taaattttcatggtgaaaccccgtctctactaaaaatacaaaaaaaaattagccaggcatggtggcgggcgcctgtagtcccagctactcgggaggctgaggcaggagaatggcgtgaacctgggaggcagagcttgcaatgagccaagatcgcgccactgcactccagcctgggcgaccgagcgagactctgtctcaaaaaaaaaaaaccaaacaaacaaaaaaaacactagaaattttatgtgtttgagtaacatattattttctaaataaggtttctaaataagtgtttactgaaacaaaatatctgcaggttcttgcatacttatgactaccttggcttggattaatattttgaatattaagcgggtactcaaatacaactgtggacatggctgagccttttgtcttatgatgcatcataacaggaaatgtgcccccagcatgatctcccacgatgcactgcamcacactatcattggccatggttacattacactgaatgttatttatcatcacggagatttccaagatctcaaagccaaagttggatccagtgatctcaatttcag

SEQ ID NO: 825138 - DNA, 644 bp, Homo sapiens
agtcaataaatagtttgcttagaaatcttacatagaatatttttaaagctatgatcaattttaattggaatattcatttggaaatccatgactgataataaactacaacaatctgggagtttctgtactagagcaaaaccaaatggtaattcctgaagttggaaattgcaaagtatggccttctagactcaagtctaccactaatttgctctatatgtgaccctctatgtcaagcagttactgctgacaaattataaaagaaataacaatacttagtctctcaataatttgaaatataaaataaataaaaatcaaattaatttcaggtttcagtgcttccattatttcatagtatataaatggctgatacctgaatctttcccattgttggtaatcctgaatatattcccagttgaatgaagaatacattttatgacattttctgatgatgatgtaacattgcaagggatggaccctagaaagaataaatactgcatatttttaaaaagcaaacattttgtcaaatttttttttgtraattatagagatgaagcataattcatcaacagccaagaccctaaaaaaaactctgccttatatagcaggatcttcagaacttcttttctgatagtaatcatgtgtga

SEQ ID NO: 825139 - DNA, 488 bp, Homo sapiens
ttaaaatgtagtctttagtatactaccattcctcaggaaatcaaacaattacttaaattaaagttggygacatcagatttattccaccctggaaaaggtaacaattcatgctgagtagtactgacatgtattcctggtgtgagttttcctttcttatagggcttcagttagcaccaccatactaggactcacaaagtgatctaatggcacgggctcctgcataacatcaccctggactaaagaactcacgttcgacaaaataggtacaggggtgagcataagacaatggaatcaccatggaagaattgctccaatcatacaatatagcatctggagaatgtcaccccaaaagactggtggaatagattcttgaaggcacagctgacgtgtcaactttggaaatgacaacctgcaaaaaatgtgttattaacctaaaacaaagggcattatatggtggtaaatatcaaaaatatagaatacatgggtgc

SEQ ID NO: 825140 - DNA, 549 bp, Homo sapiens
aaaggtagttacttcgatttaaaataggaaaagggagaatcacaccaaggagtagaagtagagataaaggggaaaatatgaacaagaaaacatgtttgaagtacraaagtttaatttaatagtaaaattaaaggaggggaaacaaatcagaaataacagacattaaattactatggaagataatttaaattgagggaaattatcctttgttacatgctaatgtatttttaaatgtggaaatagtctataaaactaaaaaggaaaaattcagttctgcaggaaagaaagcaagatcaactatacataaactgaagagaagattcctacatacgttgaaggtacattcccagctgttgatgtgacctttgcaggtgttattttccgtaacaggaaccccgtccacactgactctaacagtgtaggaatcttccggcattgctctataaagaaaatgaagaatatatgagacatgcaattcctctcttatttagtgtatagtattaatgaaaaatactgccccagactgcaggctatttttgacagaaagtg

SEQ ID NO: 825141 - DNA, 586 bp, Homo sapiens
ggacccaagcgtgttgccactgctggctccggcagccttcttttattctcttatgtggccccacccacatcctgctgattggtagagcckagtggcctattttgtcagggcgctgattggtgcgtttacaatccctgagctagatacaaaagttctccacctccccatccgattagttagatacagagtttggacacacaggttctccaaggacacacaggttctccaaggccccaccagagcagctagatacagagtgtcgattggtgcactcacaaagcttgagctaaacacagggtgctgactggtgtgtttacaaaccttgagctagatacagattgccgattggtgtatttacaatccctgaggtagacataaaggttctccacgtccccaccagagcagctagatacagggtgtcggttggtgcattcacaaaccttgagctaaacacagggtgctgattggtgtgtttacaatccctgagctagatataaagactctccacgtccctaccagactcaggaggccagctggcttcacccagtggatcccgcacaggggctgcaggtggagctgcctgcca

SEQ ID NO: 825142 - DNA, 514 bp, Homo sapiens
ggcgtaaccgcgttgttttgacctgttgtcacattgacattccttcttctgttgttrgctttgagtaacctcgcaaccaagtccctgctgccttaaaaattaattatgataaggatttcttttcagttcagactgttcaagaatgcctcacgtgcaggctgcaaattatgaagtgtaaattagggcatcactgagcagggaaggtcccaagaaaccaatttaagaattctctccggctttactggggacctggaaatagtcccttctgaaggaagaacttgaaattagaatcgacttgtcattcaatttcactgcatattgggatcaacctttgggaaagaatgtactaaatatatctggacaaaaattttaaaaacttttttttactgcttattgtacagttttcacagctttacttaaaaataatcactaccagttttcagacacccttgtaagcatgccacatgtatattaactcacttttagcaattgtatgaaataggttttattattg

SEQ ID NO: 825143 - DNA, 514 bp, Homo sapiens
tcccaaatcaccgtctctccagaacttgccctggtgtgtggcagtccactacaaaaacaccaccacracaatcaatgggtgccaagaaagggcttctcccatatccttcatttggaacaagattaatatttgggattacacaggaaactcaatatatactgtaaaatatttttttcctcaaaatgctttttaatgtcaactccccatggctggtgaaaagttagttttgcaaaagaataaatcttatcacttgttttgactctcagctaacagagagctgtgtgacacggtccgaatgttctcttactcttgtgggaggctcgggccatcaaaatttcattagcctcacagcagttctagcaccttcttaacttgaactgttggcctctttatcaataaataaatggaatctaatcccttttagtgactaaattcttctttgaaattgtagctagaacatcaggcactctgcttgcataattttacaatgttgaataacattttttttttttct

SEQ ID NO: 825144 - DNA, 612 bp, Homo sapiens
tatcactatactcttttaaatgtgttgttagagaaaatatgcaaatcctgaattatatcttcaataagtatatatgaaaatatcacaagccatgatatcaattcatcattcagcacatagcacatgtctctctcagttcatgccccaaacctcccctgaccacagcactgcagcaactcacagcaacatcccaaacagaaatcctccagcatcacaccctcacctccagcacaaacatagcactaacgtctcttcgaccagctccctcatatcccagtgccctgccccacttcagcagcttgaagagaaaatacaatgaaggttggggaagagaaggagacctaagccactgacaacagtgggaattacagaaacaccattatggctcaggaggttgcaaaaccaaaactttccaaagtgaatcgtaattttcacgtcctggaaaatgtgaccccaatggctactaaaaactgactttgctgacttaggtcaccagtttcactcaaatcacctagatctctaatataactcttgaatattcaccattaattattttattttttatttgcattaawacaaggggtaaaagtatagttttatttcatggatata

SEQ ID NO: 825145 - DNA, 516 bp, Homo sapiens
gagctgaatagtccctgcaaagactgggccaaccaccagcaccagaaaaaatattatagaaaccaaaaaggcaagytaggtaaggagaaaagcagacaagaagctcggaacagctgaaaaggacctggggatcggaggcaaaacgtaggctcaggtgctcagaaagtgagtgacccctacctggctggcatgaggttcccaaggacaggggagtgggagcctgtctgcaggtggagtgaggggtagactgcattctgcagcgaaggccatgaccccaagcgggctgatcattcagtgttggtgctgcgaggtaaggtagggccgtgtggacctaagaggagcttaactgggcttttcttttcctactgtaataaagtacttgtatgtataacataatatttaccattttaaccactcttacctttaaaattcagtggcattagttacatttggaatatttggcaaccatctccactatgtgtttctaaaacttttttatcatctcaaacaaactct

SEQ ID NO: 825146 - DNA, 626 bp, Homo sapiens
aaagagcaaaattacacttgcaacacagggttaatggcatggaaagaaaattttaaaaattgtactgattttctccaaaattgatacaatagataagatcaaaaattaatctagagcacaaagataattttgatcattttcaaagatgaaaaaatagcataaactatgtaatcatatttactaaactcctatttaatgactatttcataagttattaaatataattcaatttaatgccattatttagtctaaataatttataaatgtcctgaagaaatgctgtaaaatatattcacataattcattagaaccatgagaatattttacatagtatgaatttccaaatgagattaaatatctttgtgaaaactacataacgtactatctctattgctaaggaaggcaaaagttccctctgtatccagcacgcctatgatagagtcaagccatatgactttctgttttctgagtatgtcttgcagtttctgctgcaagtgtgcctttgctcatgcgattccatctgcccagaakgccatccttttcttctctgacttctgaatcatgccatcttaagaaattttccaatgccagttacttcattttgacatcattgctgctccctctgc

SEQ ID NO: 825147 - DNA, 528 bp, Homo sapiens
tattactgttattgttatcaaaacttctttgcaacttcagtacaagttggtgagtataatgacagtactggtgctgatggctggtttaggggaaagaacaraaccaaaaggatccttagtcctctgggttactgaagataaatgtactacttgacagttttgacttaggtcacgcctgctcgatatccttttttagggagtgcgtaagtgagggaaggggcattgcagggatggcaaacagcaaaaacacagtgggaagtgagaaggtccctgaagcaggaagttggagaaataagactgagcctcagcctctgcaactaacctggtggatgaccatggccaatgtccccaggttttgataatgaagaaggaccctctggcgcttatcatcctggatttcttgatggtcagtgacttctgcattactctatggcagagaacgggagaaagagtccaaagcagggtggggccaggacctaaaataaaacctgctcaggtaaaggacctctaaaacagtgctactcagtg

SEQ ID NO: 825148 - DNA, 623 bp, Homo sapiens
attaagtggaagtggatcatcataaaggtcttcatcctggtgtcttcacattgagtaggctaagggggaggagaatgaggaggggctggtcttgctgtcttataggtgacagagatggagaggtggaagaagtggaaaagaaggcaggagaggcaggcacatttagtgcaactttatgaaaatacattgtaatttctgtataactttttgctttttcatttctctaaaaatgtttctgtaagtaccaatccttctttcaccatttgctttgttttcatgggcctcctgtctcatagaggggcctatgtcgtaaaagaagtcaaaaggaatctcggataattggaacccttctgccaaactgatgactgtctggcacggattcagaagcagtcgtctccatcaagtcatcttctgttaatttctctactctggcggtccattagctcttgaatttttccaagatccatttcagaaacccttcatcctgactttttttccccaatatccacaatmttttaaataatttccttgatagattctgtcataattcctgtgaagttatgcacaacatctggacacagtttcctccggcaggaatttatggtttctggatcgatggcttt

SEQ ID NO: 825149 - DNA, 615 bp, Homo sapiens
aaataatcgtttgtactgtaatttggttgtttggtacatgaactttaaaactttagtaaaattgttaaataacattttttcttaatcttataaaaataggkgaccagtatagatatgtgggagagtagtaatatcacattctagaaagaacatttaacacatcaatgtattttctttttttctaaatgtattcaggcattgaaaaacgatagggattttactgtacatacagatttttaaggttccaaaattgtttagtttgctttccatttatactcagatgttatgattataaatttactaagtttactgctgtaattcctcagtgttaaaagtgcaaagttaaatgtgaaaacagtgattactgttaagttaaatgtaatttttaacaaaccaaagctattgcactttatacctcattaaggttttgcttttagttttcgtgttctttctctgtcttggttttttaaaaaagatttatagactttctaattacgttggattttgtactaaaaatagaagtaataaaacattttcattgtcttatgaactttgtaaagaacatttgaaataattttgatgtgtacaaatacaagattagaatagaatatggaa

SEQ ID NO: 825150 - DNA, 560 bp, Homo sapiens
tcatacaaataatgtgcatcaacacagatttgaaatgacttaaaaagaaaaaacatattctgagatttatattttctgatatatagattaagtattgttggtttctaagaattctcagctcagatttaaagtcacatcctagcaagtgtctcacatgtaataaatgagttaaataaaaatatgtgttgcatatctgagctgtggcaggagcccactcataagcttctgattctttacagctccagtcagtctcagtcatcctacatcatcaggaatccacagcagaggcgcatcagccagtcacagcccgttcggggcagagatgaagaacaggatgatattgtttcagcagatgtggaagaggtgattttaattgtggtagatttaaaaagcttttattttatgagaaaagaagagtagtcagtagaaattacattaatagtagcttgagactactatatgcgtttgcatccagtttgtagatgtttrttatatattctcatttgtggttatacatagtaaaattattttaataatttgtgacttactggatattagga

SEQ ID NO: 825151 - DNA, 620 bp, Homo sapiens
ccactcatttcatagataagaaacaagcttaatataaagtgtttctccaaggatgaatgtggttaaccagggtagatgacctcactgctggatctctaagaagttggaagagaaatacttttactagtgaattataacactccaagagggaaataaactgtagtttacccaataactctggaaaccctataagttgcaggactaattaattcatgggagaactgtttcagaaaccccattcttatgtcctctagatgcatcaggatgaaaccaaacaatatgtgaaggatgacttcccaaaaagaggagaagggtaagggggaggaagatcccatgataaactgcttacaccctaaacatagattttcaataagagtttaaggttcacaaactaaagctgttgacaggaaattttgaggtctttatagaaggagattttcttttttctaagattgagtcactagcaaatttttctttcagtagaaggcagaaactcatgagatttaagttggctgactggactgaggaaatactggtttaaaaacggcagaattgggaggccaagrcaggcggatcatgaggtcaggaaatcgagatcatccaggctaacatggtgaaac

SEQ ID NO: 825152 - DNA, 614 bp, Homo sapiens
agaagcactatgtctaatagctgaaawctacccaagtacctatcaagagtagaatgaataaattctcatatagtcacaggataaaatactgtatagcaacttaacattgttaaattgttaacagtgttgttaacagtgttgcaacaatgataaatgctctaacactgatgcaacagtaaacatgtatctcaaaaatatgatgttgagcagaagctagacacataataacacatatagcatatttccaattacataaactacacaaagaaccaacattaagaaatgccctttaggatcaagatagtggatatccttaagcagaaagtggggaagcatttctaataatgaaagaaaacatgtaaggaacttattgggtgcttttgatctcaactattccttaatctgggagatagtacacggatgaactacatttgtggaaattcattgtgttgtatgtacactgtctaaatgtacattatgcttcaattaaaaatgttaaaaattagattttgttacttcaggaacaagtagaaaatgtactttaatactataatatttattagatgcattttaaaaagtaaattacctgtgaataaatctaacaaaacatgttt

SEQ ID NO: 825153 - DNA, 632 bp, Homo sapiens
ggactaacaaatttttagtcagtgggagccagtatccatggatagcactatggatggtgcatcatcatgattaatgatgtaaccaataataaccaaatggaattagggaactgtagtggcatgaggagctatattgtttccaatgcagacaacttccaaagagccatgggattggaataatggcatgatactttttcttgcagtaggaaatacgaaattagccagaaatggtgcattgtttaaaagagaagaagggagaaggagaagggagaggtggaagaggaggagataatgaaataaatgggcacaatgaagaatcttcatgagcagtgattggacaacaaacaaatatgtaaatacattgtctctctgcccattattcttaaccttaatcagtaaattactaaattgcacatgggtccatgaattttgttcttaataaattatttatacagacagagaccacacaaatatatttgtctggggccccacacaccctatgggtaatcttgaattctgtcaacatagtcagtgaataccaacctcgaaaataatttgtagaytgttggtagttgggtggaggtgcacaaaagattttaatacagaaggtcttctatttagatagaaaggtc

SEQ ID NO: 825154 - DNA, 584 bp, Homo sapiens
tttgggtccacgctgcctttatgagctgtaacactcaccgcaaaggtctgcagcttcactcctgagccagtgagaccacgaacccaccagaaggaagaaactccgaacacatacgaacatcagaaggcacaaactccagacacgccgcttttaagaactgtaacactcaccgcgaggtgccgcagcttcattcttgaagtcggtgagaccaagaacccaccaattccggacacattactttctatttttattatttgtctatgtctcttgctgttttcttgctccttggcacatagtaggtactcctttcaattattaagtaagtgaatagacaaattaaatgcatgagtgatttagtaacccaattgatctccgaaggtatgtctttgggaagaagaaattaaacagccaaatgctatactagcattcatttcagacaacaaactaaatgaaatggcaaaaatatattcagaattatcccaatgtagttttactscaaactctaagtttgctcacacttccttcttttggtttctttaacccaaacaactaatcgttattctcagagttggggtaaaatgaga

SEQ ID NO: 825155 - DNA, 527 bp, Homo sapiens
tcagccaccctccctgctatagtagatacacaacccatttctggttcatgaaatgtgaatagatgtttatgaggaaggaggttcttggtaaagcttttgttttcttaattaataagacagctattgatggtggcaaccatttctctcttcctttttgtttatgtctcaatggttataatgcctggaattgcagcagtaatcctgtgagcatgagggaaaaaaagttaagagaattagagagatggagctaatattttggagatgctgaatcaaagctagctgcatctatttctagccttctcataatataaggaggtgaaatctttctttttattgccacatttatttggatttttctgttacttgctgctggaaatagccataatcaatacaactattaaacgcaagaaaagcttatagtaatcagckgttaaacatcaaatataaccttagattgtattgctggaagtataatatatggatccttgaaattaatgctataatattctccacctcttaacatatgc

SEQ ID NO: 825156 - DNA, 535 bp, Homo sapiens
tgaacgtcccagcccaaggagagagagaatgtgtcctttctttacctcttttttctattccatccctcagtggcttggatgattccagccacattggcaaaggtagatcatctttactcagtctaccgattcaaatactattctcttctggaaacaccttcacaggcacatccaaaaataatttgtttaccagctatctgggcatcccttagctcactcaagttgaaacacagagttagctatcacaaagaccaatatacctttcggcatgggtcagtcaatgttatgagtgtttataaccggacctgtcactatctcttgattcaggaattaatccgctatcctctctttcgttctattctttcccaagtaaagataccatcctaattagccaacatcacactttctccactggtgaaataatcctgtctactatatagtaacagatatatatgggcaaaaaaggtyaatttttcagctaggttctgggtttctataaaaatgacatgattctaggtttctataaaaatgacat

SEQ ID NO: 825157 - DNA, 600 bp, Homo sapiens
cattgaacatgagttaatattagtgctctgtttcaaagaattgaagacttaatcygtactactagaacattaaagcatttaaacattcactgatgatattgtattattaatccattcatccaagatattaatgaatgccttctaaggtccatagactatactaggtaataaagatagagtggaacatgtagtctagggaaagagtcaattatagaacagtatcacaagatatatccttatgtatatatgtaatattgcatgtgtgtaggtttgtatgtgtgcttttatatacaactatgtgtttttacatgtaattcattataaatatatgtatgcatatatatttcatatatatgcatttttcctcctccatctcatacaaaacctatttctaaaaggtggagattaagaaatatagaatacaataaaaatgaatctgagcacaggttgttaagtgaaggtatttcacacaatgagcaaaacatacacaaaggagtaaatgttgagaggttgtcacatgttcaggaaactgcaagcaatttgttatcatggtaaaaattaaggcttaggagatgaagttgggacgttgggaagatctca

SEQ ID NO: 825158 - DNA, 595 bp, Homo sapiens
agaaagaacactatgagcttttgggtgtttgagaagagattttctgttgccctcatgcataagatgaagaaggtattcttgggtaacaatcttttccctcaaaattctatatatactatttcctatgttccagtaattcatgtgataaaaaagcagtatgctgaaacatctatttttccctccctagataatctcttttgtttgtttttggttttgcttgaatgcaggaagaagactgcattaggctgtatctcagtgtgagagtctaaatactaaattttacttgaaacctagtaggtagctgaagactcaagtatttctttaagtttaggacctttttttattttttgttatcttttctctacctgctctctccttttgatatttttattataccaatattggatctgttggatttttcctctgtaccttttctttacactcatatggttatgcttgcatattttcctctgtgttctgggagaatttytcaacctaatcatctaatttaccaattcaatttattgcaaaattcaattttctctctgctgcctttaaaacttttaatttaagggttatacttctgttcttatgg

SEQ ID NO: 825159 - DNA, 621 bp, Homo sapiens
tccttgtctgccttatttcaacatctgaatttaggtccattttattttctacggaaaatatattctattgtgttagttctttacatgccagataattttggattgtatsttagacattgtggtggttaaattgggaggatttacttttgttcttttcatcttatgcctgttgattatttggttttatgaatgataatcttaactgaacttgaactgaaaaaccttaggtggcggctctagtctcaatttagatattccagctttaattgaactgccttgagttttttcacccatgcatttttccatgatcagtcactgacaacttttggagagtttgggaactctgtctgtatcttttatgtacaggatttcaccactctctctagaactcatgcattccccaatatccattttcaggtttttctaggcagaaaggcctcagtaagttttctgttagttgtcttgccaactcatacatgtcaactgcccttagcacagggttaaatgcccttaaagaggaccttggtaccctcctcttctaagtgtgcactccccatcgaagtttataattttatcattctcctatgcccttaggtagctacctataattccttaagattt

SEQ ID NO: 825160 - DNA, 636 bp, Homo sapiens
gacgaaggaaccctgtggtacattcatckttgctgcagtgacacttaacaccccggccctttagagcttttgaaccactttcattgaaattgcaaacaaactcaattatcttgtgattttaattagtacaaaaataacctattttgttaacaagaaagaaactgattttacaacaaaattggtcaggtatatttgaaaaactagcacaatgaggtaactgcagagagaaatactaccctgcatggcaccaggcccaagagggggcttaataaatattatttcatgctgatgctgataagggtaacacttcataaggcaaaggaaacaatcttgggccactgctatcattagattttctgatggatgcctactctcttcctgtttttcaagaaacttagaattgagctgaggcattttggatacaaatgacaataacacagctcaaaggctgtgcctgttgtgttgcattcatttttgcagaacatggtgaaaaggagatcgtaaatctggatttcatcactgaactcatgtttagaatcccatgcaactcctgagaattctgctacaaaacacttctgccagagatatttgctgaggagagaatcatgcccacatggaattccttgcaactggcct

SEQ ID NO: 825161 - DNA, 556 bp, Homo sapiens
cagggtcttactatgttgcccaggtggatcctgaactcctggcctcaagtaatccacctgcctgggcctcccaaagtgctgagattataggcgtgagccaccatgcccggccttaagtattttttacaagtacaatgacaataatgaaattttacctgggatttcacctgagaattctccaaaagtgtactgcctcttttcccttatttcttagagtggggatgacaccctcacgttatgttatacagcggtgagtaagatgtgcttcattgttaggatggagtggtattcagtacatatcatttattttcttatttttgttttttgagacagggtctcgctctgttgcccaggctggagtgtagtggcaccatcacacctcaatgaagcctcaacctcctgggctcaagctatccttcctcctcagcctcctgagtagctgagactacggacgagtgccaccacrcccagctaatttttgtattttttgtaaaggtgaagtgtgttttttttttttttttttttgacagagtgttgcttgtcaccaaggctggag

SEQ ID NO: 825162 - DNA, 525 bp, Homo sapiens
atggtttttaagaaaattggtttaatgcaattatcagtgtgatgtctgggaatctgagattgccatggacacacacagacacatgctcatatgcacactcatacacacagatatgtgaaaacacacrccacactcacacacactcatgtacgttgctggaatgggcatctgctttatttgcattgaggaactctcttacactgaaaaaggctgaagaaaagaaattacaacaaaacatatatattcctagattttactgtagctttgtacatagtagagttgttaccactggaaatgtcccagctacatagcatttgcactttacattggacacacagatctttctctgcaaaagaatgatgacttaattaacaagggtgataaatttaccaaagtttgtatttgtgtcacctcaaaatctaggtcttgatggatccctttgaagttgtctgctcaattaataagcaaaactaggcacacaagattcagaatgccattgtgaagccatgtgccctacaaaagttc

SEQ ID NO: 825163 - DNA, 607 bp, Homo sapiens
taatcaacttactcaacacacatccacatagcatcaccatgggccaccctgtgcagatgggacgaaccccmaaaaattgaacagtagaaacactgaaattgcaacagaaaaaaggaatgattacttcaattgtatcgttgtgaaaaaaacttctgtaacagcaaacgtaaaagtttcctaggccaagataatctgccggaaactaagcagatggtaccgagctgaattaccttgtagttacttcttctgaggcaggttggagctcatcacagttaactgaaagctccccacataaagtcaaaacataaaaatgagatgcacattgtcgatcagttgtagcggccttgcagcctctgccaacctttgattaagatgctttgaggttaagaacttcctatttcatgaacaatggcatcccgtggctgttacatgatgcagataaaatgtgcagaaagaccatgaggacaatatacaccattaatttgtgtgatgagaacaggaataagaagttcctataatactagaatgtttctgtaaaacacacggtttatgttctgaaaattctgcctttaatctcagtttagtatggtcttctaggaaataggga

SEQ ID NO: 825164 - DNA, 496 bp, Homo sapiens
tggccaagcgtacaaatggagaccaggacaccttctttattaccgaagaaggaaaagctggaggtcttacttagtgtgggagcaacacagggctgcagaccgaaccccagaatgagacagatgtagccagttaggcacagatggcaccgtactgggtgtgatcctcacccggaggaacagcagagaacagcagggacagcagccagatcgctcccaggagtaaggagtggggagtgagcccgggatgccttgtttattcttcccacatttaccaccaggtaagccgtttctcctccccgatgtggagtgagttaaaagcgatggagagaaaccaggagagtttttggaacatcctcaccactmgtttccatgagaaaggatgtttttagtagagacggggtttcaccatgttggccaggctggtctccaactgctgacctcaagagatcttcccatcttggcttcccaaagtgctgggattacaggcgtgagccac

SEQ ID NO: 825165 - DNA, 623 bp, Homo sapiens
gcgcaacagatatagatagatacttacagatgtacttctatatctatagccatatatatatctctrcaagattctaaagaaacctggaggctgggggttgaacagaagaaaggaataatacatatacattattctgtaagaaatatcagaaaacggatggggcatggtggcccatgtctgtaatcccagcactttgggttgccgaggtgggcggatcacttgaggtcaggagtttgagatcagcctggccaatatagtgaaactccgtctctactagaaatacaaaaattatctgggcacggttgtgcatgcctgtattcccaactactgggaagctgaggcaggagaatcgcttgagcccaggaggcagaggttgcagtgagctgagattgcaccactgcactccagcctgggtgacaaagaaagattttatctcaaaaaaaaaaaaaaagttttacatatacatatatatatgtatatatatgaaaactattgaaaagaattgaatgtgtggtattaagaaaagaagaaaattggtatctcatctagtatcatagttggtttcatgctgctttcttatggatccattgctttgggagaaaataactttttcccctaagtga

SEQ ID NO: 825166 - DNA, 608 bp, Homo sapiens
tgaaaggggacaaaaatggagtggaaatgaaggaaagctcttagattcccaaaatgctagatccaggaacaggtttataaaactattcaactgctatcccattaaaaaaaaaaaagaaaataccagaaagaaagaaagaaagaattattcaatggcagttggtgccagaggacagagctgtaggtgaagaggaagagaccaagaccatgtgcagagatggcagcagtacagacccagaggatggatcttcaggctagaggattattccagttcccaaaacctaattgagctcacctctctgaatatgtatttttaaattatttgtgaatagtcatttcttctacatagatttttccttttagaatgggaatgcctataattattatatggtgtccatcccacaaatgtatttcagaaataaataaattatttagttttgcagttcttcaagtggaaaggagaggatttttgttccatattggataatactcaatattttactcakacctgattcaaataaactagatgatgaaatccgagattatagcctgattattttgaaatgaggttttggaatttagttgatgatgaaatgggttgaggcttac

SEQ ID NO: 825167 - DNA, 436 bp, Homo sapiens
tgccttcccccttctgtccactytacacctctgcccgcctgctcctataccaatgtggccttctctggcctttcctggattcccttggccaattagtgcctcctgcctctgtgcccaaaacacactagtattcgccccgtgtccctggggcccagcacagagctggcacaaaagagatgtcactaagtggctgttggatgcacaacctctgcaggtcagcctcctaagatctcccaaaagaatatgacctctcccaggcctctaccccagccccctcacctgcacactcaaagagcagctccccatcgctgagccgccatacgaaggctttgtcatcttcacccccggtcactgccaaggtattggtcttggggtccaggctcacacaaaacacagatgctgtcccaagagatattccatgggtaaggggacagag

SEQ ID NO: 825168 - DNA, 436 bp, Homo sapiens
tgccttcccccttctgtccactctacacctctgcccgcctgctcctataccaatgtggccttctctggcctttcctggattcccttggccaattagtgcctcctgcctctgtgcccaaaacacactagtattcgccccgtgtccctggggcccagcacagagctggcacaaaagagatgtcactaagtggctgttggatgcacaacctctgcaggtcagcctcctaagatctcccaaaagaatatgacctctcccaggcctctaccccagccccctcacctgcacactcaaagagcagctccccatcgctgagccgccatacgaaggctttgtcmtcttcacccccggtcactgccaaggtattggtcttggggtccaggctcacacaaaacacagatgctgtcccaagagatattccatgggtaaggggacagag

SEQ ID NO: 825169 - DNA, 593 bp, Homo sapiens
aggacagaaacaggacacagttttgtaggtgcggatgaggagaaggggatcaggtctctagggaacatccctagtgtrccggggtccgggcctgataagaaaggggagtcggggggccagggaagggccctccatgccctcaccttggtctgaaagcagaagatggtgactgaaatggataccaccgcagtgatgatcattgcaatgatgacggctttggtttggtacatactggggagaagcaggagttacagacaagaggcattaagccacgtatgaatgacttcaaaatcaccacttccagaggggacctgcccagaatccacccacgcagctggctgccggcccaggaacaccccactccccacaatacacatttcccaagagtggtgctttatccctgaatgtacctggaaatggtgcccgtcatgaagcccatggcaaaagtctaagggaaggagagagacaagaatgaaacacttaaaaaggaaggaaggcagggtgctgggggagtggccatggtggcctctgccagagctggggaacgccaccaagttggaaagaggcagccacagaggagatcagaacaggcg

SEQ ID NO: 825170 - DNA, 593 bp, Homo sapiens
aggacagaaacaggacacagttttgtaggtgcggatgaggagaaggggatcaggtctctagggaacatccctagtgtgccggggtccgggcctgataagaaaggggagtcggggggccagggaagggccctccatgccctcaccttggtctgaaagcagaagatggtgactgaaatggataccaccgcagtgatgatcattgcaatgatgacggctttggtttggtacatactggggagaagcaggagttacagacaagaggcattaagccacgtatgaatgacttcaaaatcaccacttccagaggggacctgcccagaatccacccacgcagctggctgccggcccaggaacaccccactccccacaatacacatttcccaagagtggtgctttatccctgaatgtacctggaaatggtgcccgtcatgaagcccatggcaaaagtctaagggaaggagagagacaagaatgaaacacttaaaaaggaaggaaggcagggtgctgggggagtggccatggtggcctctgccagagctggggaacrccaccaagttggaaagaggcagccacagaggagatcagaacaggcg

SEQ ID NO: 825171 - DNA, 523 bp, Homo sapiens
aaggcataatctgacagttcactttgggccatcacactgctcatcctccataccatgtgtcctcaagacccccccgacaaaggsttacatacgcaagtggttcatttcaatgatgagcctctgctttctctgtaaacacaagaagttttgcacatttatctggataagataaaaaatacattcctcactactcttctgagatctctttcctctgaccatcaattttctgccttccatcaataaacagtacgatggggatttagaaagtcaggtgtgaatctgccattatttctgagacaaactagaaaaaaaactaaattttcttcaataatttttgaaggaaagcaaagtgatatgaaaaaaaaattgccacagtggcatgaaccatcacacacacacacacacacacacacacagggtgagagagagtgagagataaacaactttcttgttttttgatgtattttatttttattgatacataccaagatgtacctattttcaggatatatgtggtaattta

SEQ ID NO: 825172 - DNA, 598 bp, Homo sapiens
aacttaacatggggaaaatggacactaaaatgagcaatccattattttaaaaaatcaaaaaaaaaaaagaaaataacaaacaaatgaacaaacaaacaaacaaaaacaggtgctggcaagattgtggagaaaagaaaacacttatacactgctggtgggaatgtaaactagtttagccactgtggaaagcagtgtaaagatttctttaaaaagttagaactctcatttgaccgagcaatcccactactggaaatatatccaaaggaaaataaattgttctaccaaaaagacacatgtagttgtatgttcactgcagcactatttacaatagcaaatatatcagaatcaaaaaagatgttcatcaatgctggataaagaaaatgtcttttacagcaacatggatgcagctggaggccattatcctaagtgaactaacgcagaacagaaaaccaaatactgcatgttctcacttatatatgggtgccaaactttgaatacacatggacacaaagatgggaaraacagacactagggactgcttgaggcaggggggtggaggaggtgtgcattggaagattacctatccagtactatgctc

SEQ ID NO: 825173 - DNA, 672 bp, Homo sapiens
agggagcacacaccaaggcctagtagtggaaagaacatagtattcttaggaggcagagagtttttgttgctgttgagaaccttgacrgcatattataataaccaggggaactataaaaagtatggatgctgaatgccatccccagaccttctgcctttattgaaggtaggtggaaattcaaattgctttacacttttcaacagttagtattgagtatatcaattccttataaaatggggaagaacaagtaccccaaaaagtcccatacatgaagaaaaccttggaggccttcttatccactcctgtgatttttacaaagaagatgagaactaaagataatttatttactcataaacatattgaaaatttcaattaaggctgacatagccttaatttttatactctcttcttacaggactgactggacaaaacatttttatactctcttcttacaggactgactggacaaagttgagcccctttaatatgtgctgattggcaatatttattttaaggcatgagcatatgtaatctgataaccacccattcttagccagtgtctatgttaactaaggttgatttggtcaactcaaccacgtttcccttggaagctgttttgaatgtgtgttagtcagctctggctgccataacaaaataccatagactgggtag

SEQ ID NO: 825174 - DNA, 595 bp, Homo sapiens
gttgtcccaactaaacagattatttcatctactaccgtgagttagctaccattattatcacaaaactatcattatcaccatctgaggttatcctggcccagaggtatcaggtcrcctgtccacacccatatagctattaggtggcagaacctggaacaaagtgagtcttcatgtagctcatgctccttgccattctgctcctacaagtgtgcataggaacctggtgaaaagaaaccatgactagggagatgtttacttctaaaatgtattttaaacttttatgtgaaatatccaaacacattgttgtgatagttgttatggcataacaattattcaactgcctaagaactgtcatggtttagcccaaatcctagcaagtggttagggagatcagcatgcaaagcatgaatgggtgatgtaagacttgaagttgagaattgattcagagggttgctgactgtataacctttgaaataatgtattcctatattttataatgcctgtcaatgttaagaatattgtcttacaagctagcatatttgttttgttaataagtttttttcttgtctatgctcgtggattcattttgtgtcag

SEQ ID NO: 825175 - DNA, 619 bp, Homo sapiens
gaatgggtctagtttcagtcttctgcatatggctagccagttatcccagtaccgtttattgaatagggagtcctttccccattgcttgtttttgttgattttgatgtagattagatggctttagttgtgkggcattatttctgggccctcagtactgttccattgatctatgtgtctgtttttgtaccaataccatgctgttgtggttactgtaggcttgtagtacagtttgagtccaggtgacatgagaaagagaatatgtgcctggaggtataggcttataaacagcccccccaagtgcgcctgtctcttatggtcgagactgcagaggtgaaatagactctagtctcctatagcgctcctgggcttattaggaagaggaaattcccgcctaataaattttggtcagaccggttgacctcaaaaccctgtctcctgataagatgttatcaatgacaatggtgccgaaacttcattagcaattttaattttgccttggtctgtggtcctgtgatctcgccctgcctccacttgccttgtgatatctgtgacccacacctattcacacactccctccccttttgaaactccctaataaaaacttgttgttttttgcggc

SEQ ID NO: 825176 - DNA, 601 bp, Homo sapiens
ctaaatctgtcttccaaaagtgacgtactgtcatgaaggcacactgtaggatgctgctgtagaaatgtcaagtgttggaaattaatgtgaatgtgactaagaagacattggctttgatcccaattcctattagcattttttattggttacctcttctctggaactgagcacaagagtaactgaggctttattgtacaaatggaaagaaagtatgccatagaacatgattggcagagtaccaaaaagggggatatgactacattgtttgccttatgcgattagctgaatttttctcttttgattcatagacttacatttttatatgtatttaaatgggtatatacacacacacatatatctgtatatacctatgtagtgagatatatatatatatatgtgtgtgtttgtgagtgtgtgtgtgaatatatacatatacacagagagacaagagataaggaaattcaggaacaaaggggtaaattacttttccaaaccactgctaacaaatagcagtgttttgaytttcctgttctttctacctcttcaaaagttaaggacagttagctcttactgaaatcaaagacatagcttttaagaaata

SEQ ID NO: 825177 - DNA, 612 bp, Homo sapiens
tattatctcccattctgtaggttgcccgtttgcactgttaatagtttctctgactgtgcagaagctctttaatcaggtcccatttgccaattttgggttttgtggcaattgcttttgagaacttagtcataaattctttgcctaaggcttaatgaacaagatattttctaggttttaagtttttatagtttgacatcttacatttaaatctttaatccaccttaatttttatatatggtgaaaggtaggggttcagtttcatccttctgcatgtggctagccagttatcccagcaccatttattgaatagggagtcctttgctcattgcttatttttgttgactttgtcgaagatcagatagtcataagtatgcagctttatttttgggctctgtattcttttgcattggtctatgtgtctgtttttgcaccagtatcatcctgatttggttattgtagccttataatatagtttgaagtcaggtaatgtgatgcctccagctttgtcctttttgcttaggatatcttcggcattarggctcttttatggttccatgtgatttttagaatagttttttctaattctgtgaaaaatggcattggtaatttgat

SEQ ID NO: 825178 - DNA, 588 bp, Homo sapiens
tgttatccctaccatttagccaagacacatgaaaatatatgtccgatcatagacctgtacacaaatgctcacagtatttttgtttataatagctaaaaacaggaaacaagtcaaatgtcartggggagcagatataccagctatgtaatggagtgctactcagcaataaaaatgaacaagcagctgatacacacaacagcatggatgactctcaaaaccatttatgctaaggggaaaaaagctggatgaaaagctacatactataggatttcacttttttttaaatgagtaacgattttatttttttaaattttttagttttgttctttaaacttttatgttcagaggcacgtgcagttttgttatataggtgaactcatgtcacggggcttgtggtacagattattagtacttaggtacaaagcctagtacccaacagttgttttttctgatcctctccctcctcccaccttccaccctcaagtaggctccagtgtctgttgttcccctctttgtgtccctgtgtgacattcagataaaggcaaagccacagagagagaaatcagaccactggttgccgagggctgg

SEQ ID NO: 825179 - DNA, 588 bp, Homo sapiens
tgttatccctaccatttagccaagacacatgaaaatatatgtccgatcatagacctgtacacaaatgctcacagtatttttgtttataatagctaaaaacaggaaacaagtcaaatgtcaatggggagcagatataccagctatgtaatggagtgctactcagcaataaaaatgaacaagcagctgatacacacaacagcatggatgactctcaaaaccatttatgctaaggggaaaaaagctggatgaaaagctacatactataggatttcacttttttttaaatgagtaacgattttatttttttaaattttttagttttgttctttaaacttttatgttcagaggcacgtgcagttttgttatataggtgaactcatgtcacggggcttgtggtacagattattagtacttaggtacaaagcctagtacccaacagttgttttttctgatcctctccctcctccyaccttccaccctcaagtaggctccagtgtctgttgttcccctctttgtgtccctgtgtgacattcagataaaggcaaagccacagagagagaaatcagaccactggttgccgagggctgg

SEQ ID NO: 825180 - DNA, 479 bp, Homo sapiens
ttctctcacccagcagtaaactagaggtttccccccagaaaaggtaaagcagacgactggactggcaggtgccaggaactttgcgaatgggaagatggtacctaaaacaaggttaagaaaaaaataatgtgtctaccaagttctctcttcttcaagttatgtgcccaggacagttcatcacattctgattaggcatacttttaaaatccaaccaaacttaaaaaaaaaaaattggtagaatccaataaccggagagaaacaactttaaaactttacaggtcatcctaaaaagaaactagatccatagaaataattagtaagttttgttacacattaagctcagtctcatgctatataaataaactattccaaactgttggatttttttaagcatgcagctttttragtttatcttaccatgctggtgtaaactaaataacaacacctataaaatacaaaataaaaataaagctacagtt

SEQ ID NO: 825181 - DNA, 622 bp, Homo sapiens
tatggctgtaattacatttgccattttatactttattatgtcttttttgttgttccaggcttctcctttactaccttattttgtattaaaagttagtttctacattaccaattcctgacttattttatagatatttatagatacataaaataagtatatttttgagtcattttcttagtggttgctataggaattatactacataccttaatttatcacaatttaccttcaattaatattcacacaatacaggcaaaatatatattttttaaaaacttgctccaaaatagctctaatacttctttttctttgtgccattcccatcatatattttatgtctatatattataaaccctaaacccaacatttacagtgttataattattactttatacaatcttaaatcttttacaaagataagaaaaggagaaaaaatatagtgcctttatattaaacattaaccattataatttctgatttctttcttcctatgaatttggtttactgcctagtgtcatttcctttyatccttaaagacttcctttagcattcttgtaagaaagggattcttgcaatgaattttctcaggttttatcttggaatgtcctattccaccttcatt

SEQ ID NO: 825182 - DNA, 622 bp, Homo sapiens
tatggctgtaattacatttgccattttatactttattatgtcttttttgttgttccaggcttctcctttactaccttattttgtattaaaagttagtttctacattaccaattcctgacttattttatagatatttatagatacataaaataagtatatttttgagtcattttcttagtggttgctataggaattatactacataccttaatttatcacaatttaccttcaattaatattcacacaatacaggcaaaatatatattttttaaaaacttgctccaaaatagctctaatacttctttttctttgtgccattcccatcatatattttatgtctatatattataaaccctaaacccaacatttacagtgttataattattactttatacaatcttaaatcttttacaaagataagaaaaggagaaaaaatatagtgcctttatattaaacattaaccattataatttctgatttctttcttcctatgaatttggtttactgcctagtgtcatttccttttatccttaaagacttccttyagcattcttgtaagaaagggattcttgcaatgaattttctcaggttttatcttggaatgtcctattccaccttcatt

SEQ ID NO: 825183 - DNA, 582 bp, Homo sapiens
acagagtaggtaacgtgacttcattttacagatgaagaaacacacttacagaagcaaaataacttgccaaaaatcattcagttattaaacaaaccatgttagatattgatatggtttggctgtgtcccaacccaaatctcatcttgaattgcaatccgaattgtaatccccatgtgttgaaggagggacaatgtgggaggtgactagatgatgggggcggctcccccatgctcttcttgtgatggtgagttctcaggagatctcatggttttataagaggcttttctccccttcacttggcacttctctctcccgacatcatgtgaagaagcttgggtttgctttcccttccaccaaattctaagtttcctgaggccttcccagccatgcagaactatgagtcaattaaactgcttttctttataaattacccagtcttaggtatttcttcacagcagtatgaggatggacattagtcacaggtaagtcttctctttctacttttaccagcctattgagggcagtaagcttactggagrtaaatgaggaaacagatgcttatgtaataaattgcatatttta

SEQ ID NO: 825184 - DNA, 500 bp, Homo sapiens
gtcagaaacttctttctgatgtgtgcattcaattcacagatttgtacctttctattgatagagcagttgtgaaacattatttttagaatctgcaagtggacatttggagacccttcaggccgactktgcaaaaggaaatattttcacataaaaactagacagaagcattctcagaaacttctttttgatgtttgcattcaattcacagagttgaacatagcttttcatagagcagttttgaaaaactcttttcatagaatctgcaagtggatatttggactgctttgagaccttcgtttgaaactggaatacctacacataaacactagacagaagacttctcagaatcttctttgtgatgtgtgcattcaactcacagagttgaacctttcttttgatagagcagttttgaaacacacttttgtagaatcttcaagtggacctttggtcagctttgaggcctatggtggaaaaggaaatatctacacataaaaactaga

SEQ ID NO: 825185 - DNA, 635 bp, Homo sapiens
ttttgtagtatctgcaagtggatatttggagcactttgagtcctatggtggaaaaggaaatatcttcacataagaastagatggaaacactctgaaaaacttttttgtgatgtgtatattcatctcacagagtggaacctttcttatgattcagcagttttcaaacacactcttggtagaaactgcaggaggatatttggaacacttgcagcctatactggaaaagaaaatatcttcacataaaaactagacagaagcattctgagaaacttctttgtgttgtgtgtatttatctcaaagagttgaaggtttcttttgattgagcagttctgaaacactctttttgtggaatccgcaagtggatatttggagtgctttgaggtctatggtagaaaaggaaatatcttcacataaaactagacagaagcattctgagaaacttctttgtgatgtgtgcattcatctcacagagatgaacatttcttttgattgagcagttttgaaacactctttttgtaaaatctccaagtggaaatttggagcactttgcggtcaatagtggaaaaggaaatatattcatgtaaaatctaggcagaagaaatctgagaaacttctttctgatgtgtgcattcttc

SEQ ID NO: 825186 - DNA, 519 bp, Homo sapiens
agaggcagggaggtagaaatttacataaagcaggaaagtggagatggtggttggtcaatgtgattagtcgtttcttagggaagttaggtccctgtcctcccacagagactgggagacgcggccctgtcttccggtattggctggaatgaacagcaagttttttgggcggccttggggtttcccaggcaggaatttaagagggaactgaagctgttgtcctagagacatggccttgagctattagacattatgctagtgttttcaagtctcttaatgtgttggtaggtgagaggagtggacaaaaacatttgtattgacagtctgtagttcttataggctaagtttgaggctggttgagaagagggctcagaggaggctgtctttggtcaaaacttaccctgttctagtgccacakaattgaagaaaaggtaaattgtcatagtaaatatagattttgtactgcaaattagacataaagttaaatcagaaagtgaattctgagaaaaataaataagattg

SEQ ID NO: 825187 - DNA, 589 bp, Homo sapiens
ctaggagttacctggacaaaagtcagctttttaaagccagaaataaaattaattttgggaagccacctgagatcattgagcttctctattattgcacagaaactaacacatactttcaaggaagagagactgaaaaataaatgaactgcatttgacacagtcaacctagaccaggctattgacagcccatgtgtgatgctattgaagaccaaataatccagacttagggaaattttgcagtaattgggactgagggtaaccatgcaggtgggccatgcaaatctccgtcagggtctcacatctcccctactgcagtgagcagagcagactgaggatctccgtcactgcccccggaaagccgaccccatgctttgtgtagactgctcctggccactgagcaagcatggcagaggcaggatctctctaacaggcaaattgtttgggacccctacactggcttggttgagattttctaagkaatccactgtgcttggaggctcttcctacaaaatccttccttctctctgtcccctcctggatcccagacccacgtccaggtctgaagctgtcctagcctgcccctttcccc

SEQ ID NO: 825188 - DNA, 590 bp, Homo sapiens
cttggatactttggaatggccttagccctggatttcttcctccaaaatgttgcttctttaaggtttgcttattagtttctctgcacactatgcaactatctgtaacttgcttagcaggggtctagatccccatatacccataaaccctaaggactgtgtcacacagagcgtggggaccccagtgggttccttggtgaagttgtgacagcatttccctcatgagaggtttatacaacatttcccttccatctggtaatacccactttccctctgggctttcctcagctcctaatttttttggtttttcttggtctgcaggggaaaagatggggattgcagctggagggggaagacgggaggttagatggaaaatgggtgccttctgggaagaagcagcttgcttagctatttaatctgcaaggttattcccccggctttcaaaagatagattcctttgatgtcctgggacatgaacracagctatctcttctggcagctgtagattatccaatacttgtattattaactctttgtggaccaggttttggcccttactgttaataacaccccgttcagtccagatttttcta

SEQ ID NO: 825189 - DNA, 565 bp, Homo sapiens
tagaacctgctagcaaagcaggatttcgttaaaaaaaaaaaaaaacatacaaagggtgcattggcttcattctgtcagagttgacattctayctgcacataattgggtttgtgaatgacaggtttctgaggaataaggcatgatttagagagaggagattctgcattctcctctaccccaaaacaacctctgcaaatcctctaccccaaagttgcagcattaaatcatggcttccgtatctcagcagccataattagccctttcatggcatacacagtattgtcaggcggagaccctctctttaactatctccaagtagcttggtcatctgcaccagtggccgttatcatttggaaaatgactaacaatctataccaattaacttgcctgccattacttgaaaggattcatcatgagtagactggggacagggttggtggcaggaatacttatccttgagattttgacaggttatttacaacaccgaaccctgaaccacaaggtcttgttttatgtgagaagtgataggatgaaggcaaaaaagggatcttcctttagaacatga

SEQ ID NO: 825190 - DNA, 606 bp, Homo sapiens
tttgtttacattatactgtagtctattaagtgtgygatactattctgtctaaaaagtgtacattaatttaaaaatactttattactagaaagtgctgttgatcctctgagccttcagtgaataatgtttttgctggtggagagtgttgcctccatattgttggctgctgactgatcagagtagtggttgctgaaggttggcttggctgtggcaatttccaaagataagacaacaatgaagtttgacacattgattgactcttcctttcacaaaagatttctctgtagtatgtgatgctgtttgatagcattttacccacagtagaacttattacaaaattggactcaatcctcttcaaccctgccactgctttatccactaggtttatgtaatattctacatcttttgttgtcatttcaacaatgttcgtagcatcttcaccaggagtagaatctatttcaagaaaccactttcttctctcatccataaaaagcaacaattcatccattcaagttcgatcatgagatggccccatcttcaggctccactcttaattctagttttcttgctatttccactatacctgcaatctagaacccctcaaag

SEQ ID NO: 825191 - DNA, 475 bp, Homo sapiens
tttttaagaatttttgcatcaatgttcatcaaggatrttggcctgactttttgttgttgttgttgtatctctaccaggttttggtatcaggatgatgctggcctcatagaataagttagggaggagtcactcctcctcagtgttttggaatagtttcagtaggaatgataccagctcttctttggacacctgacagaattcagctgtgaatccatctgatcctgggctttttttggttggtaggctatttattactgcctcaatttcagagctcattattggtctgttcagggattcaatttcttcctggttcattcttggaagggtgtatgtgtccagacatttatccatttctcctagattttctagtttatgtacatagaggtgttcataatattctctgatggttgtttatatttctgtagggtaagtgataatatccttcatgtcatttctgcatgtgtttattttaatc

SEQ ID NO: 825192 - DNA, 475 bp, Homo sapiens
tttttaagaatttttgcatcaatgttcatcaaggatgttggcctgactttttgttgttgttgttgtatctctaccaggttttggtatcaggatgatgctggcctcatagaataasttagggaggagtcactcctcctcagtgttttggaatagtttcagtaggaatgataccagctcttctttggacacctgacagaattcagctgtgaatccatctgatcctgggctttttttggttggtaggctatttattactgcctcaatttcagagctcattattggtctgttcagggattcaatttcttcctggttcattcttggaagggtgtatgtgtccagacatttatccatttctcctagattttctagtttatgtacatagaggtgttcataatattctctgatggttgtttatatttctgtagggtaagtgataatatccttcatgtcatttctgcatgtgtttattttaatc

SEQ ID NO: 825193 - DNA, 579 bp, Homo sapiens
gaagactgcctggaggagggagtgtctgagcgggttggaaggaggaattggaatcttccaggtggggagcttgctggggtgaggtgggttggagtgggtggttgtagagccagaagacaggcttgaaagagttggagctcaggagcagctgggagcagagtgagcctccaacacctttattcctgagaatctgagcaatcttgtttttatgtgtttgcaagtgcaaagtggcctgtggtgtttgcctctgggaatttgtgcatggtgaggataatggcagggttctccaggccctgccataccgcgggtgttcatggcacactctaatctggcccacatggccccaggtgcattgtaggcagatgctggggctttgtttccaggagaagcatcaggagacacccttgtttccactctgctcatttgagacttgccttaaggttctgtccttattttctaagaaactcacagttctttctagtaaccaagayttctgagaacagagccccagctgtcatttaaaattttcataaaacgaataaaagggaagacagatgaatcaccgcaaacaccctgtca

SEQ ID NO: 825194 - DNA, 646 bp, Homo sapiens
ttgtaaatgcctctcttccatcactactgcctcacttggggcacctgggagtatccaggttraagatgcgggctcaacccaggagtcaagcaaacaatttctagtttttgggatgccttaaacaaaaccgtgaatctctaagctcctcaggctggaaatggctcactgctggtggaatcattaagagtgccagccagatctgattgctgcattcagaggtttattaatatcacctcgaatttatcttccccgatgaggaaattttgccagcatctgacaaaaatgaaatgtacagcggccttgtgccaacaagcatcctctccctgccatcggctgttagcagaaagccagtgcagtgggctgctatggggctaataaaaatataagatgaaaatgggcttcgcatcttcaattaggaatttgggcttccaaccctcctcctgaggctcccttccccacaaccaggctatgataataaatttcagaacctcatctccctctgcgagtgtggattctctccccaactaatcctccaatactcatctgagcataacactcccgatgaaaccacacttgtcccttctaaacacttcaatgaattcccttatcttccagtctggaatgtaaccacaaaagaatatcaatg

SEQ ID NO: 825195 - DNA, 585 bp, Homo sapiens
cctccttcagtgggctgtcatcgatcattccccgttccatggccwcaggactgactgctgatgaaatctaaaagaccagcttgcagaaggcatggaaatcctggggttaggggcccctctgctatggaggtatgactcacagtgggtcagggaacctgagtgggatcatccctggaactcagaatctctaagacacacttattggctctctataagcaataacagatggcaagataatattattcttctaatcttttgctaaaaacattcagtcatttctcaggggcctccctagtagaggaagacacctgcagggtatctcattctttcttgttctcattttcccttctaccattttccccttagtatatttctggccctatgtgcaggaaatcaggtagctgaggtgtggtttaagggacccattgtggttcttatggcccatcaacacaattccttcgtgttggcctgcagtatccatgtttgttacccttttgggtcaaggcatgaaaacatctgtccacaatgccagtcttacctctgatatcaaagatagtatctgagacgggtgataaacaaatttaa

SEQ ID NO: 825196 - DNA, 637 bp, Homo sapiens
taaccggaccccagaagcctaagccctcrcccctgtgccccggctggtcattcgttcctccagatctttgcagcactaagaagatgctgcctggtgacatttcctgaattgtttcccacgggtcttgtctttcaggctaggacaagttgtttaacctttcacgtgcgtctgtctctcttgcttccctcaattggactgttagctcctgagggggatgagggggtcctgctttataattccttgtgtgtcccacggagccaagcctggtgatgtcttcagtacttgacacttcagatctcagaaaatacctgctcatcgattattggattgaataggttaaggaggagaaccgtctcatgggcagacctggcctgcagccaagacagaagctggatgcgcctccctccggactcttgaccccaccaaatacgacgcccatatatgtcaactgtggcattggtgtttgtcccccacacccctaaaccacaagccaataaattgcagggcactcagacatcaggatgtgtccttcacttgccaccagacctgagctggctacaggccaatgacagcatagggctggccctgcccgcctcccatctggcagcaaggatccagttccagattgtgacctgtg

SEQ ID NO: 825197 - DNA, 537 bp, Homo sapiens
aagcagggcactgaaagacatttatagcatcaaatgcttatattagaaaggaatgtttcaaatcaatggtctaagctcccacactaagaaacttgaaaacaagaacaaattaaatccaaaagtaaaagtaagaaagaaataataaagataatggtagaaactgataaaatggaaaacagagaaacaaaaagaaaccacaataaaacaaacgaaaattagtttttgaagccactggcgaaattgataaatttctcagcagactgatcaagatagtaagagagaagacacaactttcaggcatgaaagagaggtcatcactaaagatcctacagacaagggaattttatgagcaactttatatcaagttgataacttagataaaataagcaaattatttgaaagatgcaaaatatacaacagttcactaaagaagaaacwtacaccttgaatagctctatgtccactatagaacttgaatttatatgttaaaatctgcccacaatgaaagacattactggtaaattccatcaaacattt

SEQ ID NO: 825198 - DNA, 548 bp, Homo sapiens
ttaattaccttccaatttcaaattctcaactgtgaaataaagggccattttatttggctgctgccagttcaatatgactgtttttattaaaacatctctaacttgagaaatatttggtgttttctaaaaaactgcaaattgcagcaaatggccaggtaatttggaataaacaccctacagaaaaaatatatattcaagttgcataagtcactttgagcaatcctttgaggatatttcatttatatctaaatgaacctcaggttatagactggcttttccggaaaaccagaagcaaatagatgtatgattataatgaaaaccatctcagagcaattgtggaaatgaagtgaccacatgtcttatgctgtcccttccagtacacttgcacaagaacagcctataacaaagttgctttacttctgagatttaccaggaataattccatgagatttaaatgagatgactactaataagccatctacctttgactctattcctattaaaaatgggttaggaaagtgctttsaaaatcatagtgctgtctcatg

SEQ ID NO: 825199 - DNA, 582 bp, Homo sapiens
gtctcttgtgttccttctcagtgaatagcgccactgcccacgcagccagaatatgatgtctctttattcctcrttctcccatgcaattagtcacttgtcagttccagctcctaaatatatcttgattctgtccacctctttctatttcctcatcatttcttttctaaccattttttattccaatcttgctccctcccaccttcccttcccactccagccttagggatctttctaaagtacagatataacaatgtcaccattctgcctaaaacctgcccagggcctaaagaatacttggtatagaagactgctaaaaatgatgatgttggccctgcacacaccactaccccttcttctgcataggccttgccctactgatcataggcatgggcatgtgacccagacctagtccaattacgatatctcatctccctcatcacgctggttgtgtcagagtttgtttggctctctcaagccactccatgttgctgtaagaatgggtccaggagtgaatatgtgaccagagctgacccaattaggatccttttcttttcttttttctttttttttttgagatggagt

SEQ ID NO: 825200 - DNA, 576 bp, Homo sapiens
actactagaaagaattttatggagaagggaatgtgggcagaggatagagggtcaaatctgcattcataagggctagacttttctatatatrtttattttatacatatatatatttttctctgtctctctctctctatatatatgaagttggagccaaaatgtaataattattagtaacaggtctaatagggtgttgattactagggttaatgttaggcgaattactgtttttcggatgctatcgaaactttggaaatcatggtactatttatactaaaagagtaagatcctcatcaataaatagaaacatacaagaatagtcatactacatctacaaagtgtcgatatcaggcagcggcttcaaaggcaaagtgatgactagatgtaaagtggtattttaattggcggagaaggcagactgaggaatgttgatccaataatgacgtgaagtctgtgaaagcctgtagctataaaaaatattgagccataaataccatcagaaatagcaaagggagctttgaagtattctgagacttgtaggagggtgaagtaaatacctaatataattgtaataag

SEQ ID NO: 825201 - DNA, 601 bp, Homo sapiens
acagcaacggagacactgcactggagtgagccctgaagccccgctctgcgccygagagcccccatagctggagcagatgctgcctagctctcagggaggccacttcagggcagggctgtggctcccctgtgggagaaagagcctgggctttggggcctgccacaggggaggtggactcatgggtagccatctctggcctgggcacggctcttaagctccctgagcctcagccactgcctctaaattgggcagagtgaggctgtctaggggtaggaccactgtgaggggcacacagaaggacagacatgaagcacctgggacagagcccgtgtgaggggcaggctgctcggaacagcagcccatcctctccagtgcggctgccacccctcacccgcctgtgccttgccagccctgacagggaggcttctgccttcacagctttccactgacctcatgacaagtgttctttaaattatgtatttaatttacataattactttctgatatttactcgggtttaatttgtttcctcgggaacctgtctttgaagggacagtggcaaccagagccagaagtgaagccacagcaaggggcccacaga

SEQ ID NO: 825202 - DNA, 550 bp, Homo sapiens
tggtgcttcctccccacaaccctgggaggtggtactatgattatctcgattttatggatraggaaactgcaggcttacacaagttatgtgacttgtcaaacataacaggacagaaccaaatttgaagctacccctatctgagcccagagctctatgctagcagggcctgcaggacccctgggggagaaaaagggcccccaggacctgccggcatggcaaaggggtgagattcaaagctggccacagactatccattgcatagtgaggatcggatgtgaaaagcacttagcacagagcctggcactgggcaacatgctcagtagctgtcattactcagaagactgcaagcaccacagggacagagacctcatctgctttgctcacctggagagcacccacatgtactgggaaggaggtgctccactaaccgctaggacccatattcctgccccaagccaggggcgtgtcctcttccaacctcttggttaggtcagtgagaaactcgagtggatcaggtaagaaggagcaaggccaaaaggacaaggaaaag

SEQ ID NO: 825203 - DNA, 617 bp, Homo sapiens
taacatggagacattcattatggagaacccttgtgaaagcaggaggagcaaagccctcctaagtcattgtagcaggggctgagtggcttccacctctcctcccttcatttattttacaaaagctttcatcatgcctttccctatggaatcaagcccagactcttcagcacagctttcaaggccatgacctggccccctacctacttttccaatgttctttcccctaacctcctttcactgaccctttctgccagctaactggattcactgctccccatacctcctctatagtttcccctgtcagtgcataacatatccatgtattttctctcccccattttcccttcctccttctttccttttatagctcattctccagcctcgattactcttccttctgctcacatccaaatccttctcaacccttacagacaggctgaaaatacctgcttttctaagaagcgctccctgattctaccaaccatggggatcacccttcctctgaacctygcctggagccaggggcattttccctttgggacttgttccttgtctaattcctgtactgactgagaatgcaatagggagggggcagagcctacatctggctcatctat

SEQ ID NO: 825204 - DNA, 585 bp, Homo sapiens
aaatgcattctgattctcaatactattttagcattaagtgtatcatttaattttatctcagatttataagctgtatattatatgataacccttttaattggaatattaattcaaatatcttaattcctttttatggaattgttggagtttatcaaaccttggaaacgttaaataacataaaaagcactcaaaaagaaacactaattcaatattttatttttacttagtgtttgagattttgaattttagaaagttttaaattaatattcagctgttattcacatataaaaggtaagtaggttttagtttaaagaatgttgagcaataaaatataagattgagatggattaaatggtatctgacatatttccttactctgaatcgatttaacctttacaagtattctatgatatagttactattatcagttcccttttacatgaggaaactaaggctgcagaggttaagtagcttgtcaagggttgcatagttcmtaagtggcagagctgggattcaaacccaggcagtctggattttagagtccatgctcttaaccacataattatattgtcaaatggaggagga

SEQ ID NO: 825205 - DNA, 624 bp, Homo sapiens
aaagcattctgatgggcaaagaaccagggaaaggaaagtcaaaggcagtactgtccaatatgacatgtaattttaaactttctagttgccacattaaaaragtaaaaataatcgtgtgaaatcagttttgttttttcaattgagacaaggtctcaccacgttgcccaggctggtctcaagctacttgggctcaagcaatcctcccacagtgctgggattacaggtgtgagccaccgtgcctggccaaaatcagttttaatatatttctttaatctaatatatccctaacagtatcaccatgttggtcaagctggtctcgaactcttgacctggtgatccgcccgccttggcctcgcaaagtactgggattacaggcgtgagacaccatgcccggctctcatttcgaatcttacacttaggtctttgatttcttttgagttgatttttgtatagggtgagtgttgggcgtctgcttttattcttctgcatatggatatccatttttcccagcaccatttattgaagagactgtctttttcccaatgagtgtttttggcacttttgtgagaaatccgctggctgtagataggtagattaatttctgggttctctgttttgttccat

SEQ ID NO: 825206 - DNA, 624 bp, Homo sapiens
aaagcattctgatgggcaaagaaccagggaaaggaaagtcaaaggcagtactgtccaatatgacatgtaattttaaactttctagttgccacattaaaaaagtaaaaakaatcgtgtgaaatcagttttgttttttcaattgagacaaggtctcaccacgttgcccaggctggtctcaagctacttgggctcaagcaatcctcccacagtgctgggattacaggtgtgagccaccgtgcctggccaaaatcagttttaatatatttctttaatctaatatatccctaacagtatcaccatgttggtcaagctggtctcgaactcttgacctggtgatccgcccgccttggcctcgcaaagtactgggattacaggcgtgagacaccatgcccggctctcatttcgaatcttacacttaggtctttgatttcttttgagttgatttttgtatagggtgagtgttgggcgtctgcttttattcttctgcatatggatatccatttttcccagcaccatttattgaagagactgtctttttcccaatgagtgtttttggcacttttgtgagaaatccgctggctgtagataggtagattaatttctgggttctctgttttgttccat

SEQ ID NO: 825207 - DNA, 345 bp, Homo sapiens
atttatttatttatttatttatttttagtattttgagagtaggtgctgtattttcttttctttccttgtttyttcttttttgttttttgagacagaatctctctctgttgcccaggctggagtacagtggcatgatctcagttcactgcaacttccccctcctaggctctagcagtgcttccacctcagcctcccaagtagctgggaccagctcacgctaccactccagctaatttttgtattttttgtagagacagggttttgccatgtcaccgagactgagttactgtattttcttagcagaatattgtcccagtgagctttttccaaaagagaaaaggtaca

SEQ ID NO: 825208 - DNA, 545 bp, Homo sapiens
gtcggcctcccaaagtcctgggattacaggcatgagccactgtacctgaccagcccttatgttttctgaggttcatgttgtcccagattttgatagcgggagtctcttcattccggctctcgtgtcctttggatatggccttgtcattttttcttccctttaaaaaaaaataaagagcacttctttatgccatagtgatgttccaggcttctataggaccttctttgccccatccccagaatcagtcatgtctctaaggagccctggtttctgttagtgggattcaatatatagaaaccaagatctgggtcttaggtgttctcattgatactggggtgtcattggttctagccactttcaacaaatgtatctaggaaatagactattattttttaacatactatctttaaaatcatttttagtttatactaatacttctaattctaaaccaacccctcaggatttttttggcctttccccrgtccatttcattctaatttcatttccagtttatttttaatttaaaaaaattgaagtataattta

SEQ ID NO: 825209 - DNA, 578 bp, Homo sapiens
taatgaagtttccatcttgattgcaaacctctttctgcttttcaatatacaactgatgccaggtgcagtggcttgtgcctataatcccagcgattcaggaggctgaggtggaaggattaaaaaaaatatgcgtacgattcatggactctgtgtcataaagcagctcactttaagacagtgaaattttctcctaaaaataatatataaatggaaattcatttctctctaaggattctcacctgtaaatcatacttaaatcaaacttatatttgttcttacaacaatgtaaacatacttttaagacacagataagttggtacatcataagcactatgataataaaagattaaatgatattaatttggatagtaagagtctctaaaaatgtctctcttctttttgctgatctatgaactcaagcccaggttctctacccccaacaatataatcaagtgcaatcagaattgggaaaaaaaaaaaaaaaragagatatgaagagcctgggtgatacagcataaagtggttacacatcctggtcaaagatacggcttaattacttgtggcaatctatcatacaa

SEQ ID NO: 825210 - DNA, 550 bp, Homo sapiens
tactttttgttctacagaagtttcaaatatcagccagatttaatagtcattttctttatgactcctaggtaggagtaacttttaaatggaagttttaatagatgctacctactaccatttaataaaaaagaaccttgggcctgattgaagcctctgctatgtccacagagtagcatctatcttcgtaacgtagatgctctaagacaatgagcaaggaatcagaatatctttcttcacagcctgagactggtccagacatcccaacggaaggggacacagcccagtgaccatattccttatagaatcagtcatgcttctccttcgctaaagtagcagatggtcaatttaattaaatacaatataattcatcctatttggaggttgttttggtagagttttttccccttttttgtattcgagaagagtaggagacttttttwaaaaagtcagactggttattaatatcttatgtttaattttgttttttacaggcagcttcaaaagatggtccatgatattaaaaacaatgaaggtggaataatgaataaaa

SEQ ID NO: 825211 - DNA, 630 bp, Homo sapiens
atatgctaattaaataattgcaacaagtgtagatacaaggatctttttcctttacttactcaagagaaactgctatcccctcctctctttcaagttcctccatctcatttctacttgtcctttcatctcctcaaggacccacagcctccactgccctccaaacagtgggagacgagaaagctccaggggaggtctatggaaggcttggtgctgcatgagctccactgaggagtgaacagtgacaggctattttggatcaatgtgcaggattaaaaatttgagtcaagatggcaaacaaacaaacaaacaaaaaatacctggaagtaaatgtttggagagcccaacttcaatcatgtaggaacaccagggacagcttggacaattcaagattaaagtgacactttttctttctctcttctcctcccattttctttttctttgttttcttgcactccactttgtcagaatatatagcatttacatactgttcttcctcacccttgttttagtcctagctctacaagtaaatatattagtgtgttccstcagtcctttggtggacttccaccattgtctctttcctttgatgaagtgtacctgtagtagattctgaggaaaaatcgtgtttac

SEQ ID NO: 825212 - DNA, 625 bp, Homo sapiens
tgttttcgtatatgtcctttttcatgttgaagaactttatttttaatttgagtgtcttaatcaaaacaggtattgaatgttatcaaatactttatcaatggagatcatgtagttgtcttaattctactaatgaagtgtataatactgattttttaatgttgaatcatttttaaattatggaaataaatctcattctttggggatataaaaatcttttaataaactgtggaattcagtttgcagtattttgttgaggatttttgcactaatattgataagggattttggtgtatagttttcttacagtgtctttgtctggcttttgtatcagtgcagtgctggcctttatagatttcgtttagaagtgttccatcacctacagatttttggaagagtttgcaaaggatttttccttacatatttggcagaatttaccaatgaagccatctggtcctggacttttctttgttgagaggtttttataactaattcaatctccttactattataggtctgttcggattttctatttcttcacaattttttaaatttttttatttttcatcaacttttattttaagttccggggtacacrtgcaggatgtgcaggtttgttacataggta

SEQ ID NO: 825213 - DNA, 655 bp, Homo sapiens
acagtaaaaaaaaaatctaataagaaattgggcaatagacatgaagagacatttcatggccgagtcaaatcagcatgtggaaatatayttaacatcattagcctttggggaaatgcaaattgagatcatgagaaatcactgcacacttatttgagcagttgaaataaaaatataatgataaaaccaaatgctagcaaggatgcagagaaaccaaatttctcatcccttgcttgtgggaatataacatgatacacacagccactcccaaaaatagattgacagtttctcaaaaaacatgcacttaccatattactcaacaatcacattcctgggcttttatcagagaaattataatttaagtttgcacaaaaagctacacacaaatgctcataactgctctattcgtcatgtttttattggcaggtaatttacatacaaagaaattcaaaaatcttaaatttcacaattcaatgtgttttgtcaaatgcctgcactcctgtccctcccccactgtaagatttacaacactctagcacccccaaaaagttatttcatgcccccttcagctaacctctaccatgccactccatccataaaccccaaagcaactatttaaaaaaaaaaaaaaaaaaggcaaaaaccgcaattacttttg

SEQ ID NO: 825214 - DNA, 612 bp, Homo sapiens
agacaggactgtgagctccctgtggggaactgtggctgcttcatttctgtccctccccagcccagcatggggcccaggggaaactggagctcagtaaagacagatgaaggaatgtggaaggcaccagacatatgccaagatccatactggtttcccaaggcacagacagctgggggttacagcaccatcctccatttgggccagcagggcctcatgggtgaccctctcttcctccctccacacagaggccacctcctggcccttgtccatctgaggcttccagaagtccagcttgttgaggcagccctggtttcaggggttctggggtcacttctctctaggagccagggcaggcctcaaccccatgtccagggcatctcaggccagctgtgaccagccgtggcaggaggtcctacagaagcccaggcctcctagactctgtgaacgtgtggacagcttcccttggctcatgtgatgacctgggaactgatgrgaaacttcccacaggtgggatcacacggcagtcacatgctgaagtcccttggaggttgggcctgtgtctgagccccagggctgggcgggcagggagcacttaagggagcacttattctc

SEQ ID NO: 825215 - DNA, 599 bp, Homo sapiens
taataaacttctgtccttgatataaaacttcacacttaagaaacaagagaattttccatggagcaattatatcccttagtttcacatcccttccttgttcagaaggtgtttgttacattaaattttaaaaaaagtctgaaagtgttcatcacacacttcataatgattacctgagtactttcaatgtttaaaatatttgtccaaaggaagaattattatcctctctgaatgatttctggtgtatatagaagaattaactattaatttctacaataagaactttgagtcaacccaattttcactgacttcatactcaaaagtcataaataagtccacctcagagaagagttttgtatcctgaattctgattctttttctatagttggagagatttgcctgaaatattaatactgaaatccaagactatttatcctttaataggtggtgatggttgcaagtcacaatattaataataaagtcactttcactgactctgacttccagtcctctagaaagtcattttcctgtcctagccaaacaaatctgggatcstcagagaggtgaatagcatgtgctcacaacaagccagtttcctgctg

SEQ ID NO: 825216 - DNA, 659 bp, Homo sapiens
tctggagctgaagaacacaatgaataaaagaaaaagtgcaaaagagagcttcaactacagaatgatcaagcagaagaamgtatcagcaaattcaaagacagggcatttaatgttacctagccagagcagaaaaacagtaaaactaataaaaactaatgaagaaagtttacaggcctaacggaacaccatcaaggtacctactgacacactgaggaagtttcagaataaaaagagaaagggagcaggtcagaaaaattatttaaaggaataatgacagaaaattactcaaatctgaggaaataaacagatattcatattaagaagcccagtggaaacaaacaggttgaacaaaaaaaaggtccacactaaaatgcattatcattatcattaagttttaaaaattgaaagacaaagagaattttgaaagcccaagagaaaattacatgtcacctataatatccataaaactggaattctatgaaagcatgaatctcactggtaaagataactatataagcaaatacacaataatgtaacactaatggtggtgcataaattacttttataatgctactataaaagttgaaagataagtttgttactggtaacacaatataaaaagaagtcaactctgactacaagaacatacaatttacatg

SEQ ID NO: 825217 - DNA, 539 bp, Homo sapiens
aatgtgttcaatcttctaatttggtgatggattcatttctttagatctccttcatgctggccagaacttttgctcactgcctttgtaccaggcatgagcacytactcacatatgtccttctatcactttctgtttctctcatgtccaattcctccacaacttcccattaatgcctgctttttctatggttccatgttatgatttcccattgctttattatttaatatttaaagtgagcatataatttatcatccaaactagaaaacttgagaataaggaacaggcataagccatgcctgtcactgggcaaacctaaatatgtgatcagtctttccataaagtatatttcctgtgggcatatatgtggcaacttattactacaatcttttgatttttctttaaccttttcaaataaatttgacttgtgccttaatctaaaatgtcatctcccatagaacagagactctgtattatttcttcttttgttccaatcattgcatgacactttgctagcaggtgcatagcaggtacacagtgaa

SEQ ID NO: 825218 - DNA, 553 bp, Homo sapiens
ctcacgccggtaatcccagcactttgggaggctgcgtgggcrgatcacctgcggtcaggagtttgggaccagcctggccaacatggcaaagccctgtctctactaaaaatacaaaaattagccgggcatggtggtgggtgcctgtaatcccagctactcgggaggctgaagcatgagaattgcttgaacccaggagacagaagttgcagtgagctgagattgcacccctgcactccagcctgggcgacagagcaaaactctggaaaagaaaaaaaaaaagaagagaaaattctgacctgtggtcagacataaatgcaaaattgctctgaaaacataatcattaaactcctatatctctagtaaatcatcctttgccccgccccattgtaggagtatgactttcctttagacgttaaaacagggcagtgtctaaagatggctattttatttgactgctaattatgagactttaaagcaagcaacagaggttaaagtccttccaagattttccattgattactggtaaatctccacaactttgatgttcagcttt

SEQ ID NO: 825219 - DNA, 660 bp, Homo sapiens
tgcaccacatcctttgtatgctctaggatccactcaaaataggtagtcttttgtrtcatttggtaagtaagttgaagtgattgcattcagtgtgaaatatactgcctctagaacccaaagagggctatcaggttgtgcttctttctcagcggtgtgagatgcaagaagcaataatttatactttattttggagctgatattctgtcatactcagaacattggactcctgaaatttccagttttgtgtctggttcctaaactcttgtagggtttccctcccaacctggagggcatgtgtctaaccaagtcttccaatctagtttctacttattgattatctggtgtgattaacataatgttattaatatagtggaacaacatgatgttaggcataatctctcagtagtaggcatcacgtgagactttattgtaccagatgacaagagaataaacatagccctggaggataaatatatatgtatactgttatttatcctgcataaatgcaatgtatttctggtactcatcattggtggggatggagaagagtacattttccagatcaataacctcctactatgtatctgaggcttttctcaatctattttaggaaagatacctcatctgcacagtatcagcaattggatctgttacatgttg

SEQ ID NO: 825220 - DNA, 612 bp, Homo sapiens
aacatgaggacctcaagaaaagtctaaccctatttaaaggcattgaaaggctatgaaattttgcmgtcagaaacagagaactctcaattgagaagctgccccaaatagagaccccttaataaatcaaataacacaagggcatcactcaaatctctatcaacaaaagatgaatgatctagggtccctgatcccaagtggcctacccctggctttgtggtcagggagacttgggtttagaatgctcagcacaggaggcaaaggctctgtgaataaatgaggtcccaaatcgcatagggcaggcagctgcaggctttcatgagcattaattttgcttaatattacaaattttaaatgctacaaatacaagcatgacaaatagaaatgcacaaagtgatcattaggatcttaatgtgtgtgcgaatttgcagtcagaataggcacactgcaaacaaagcactatataaatgctaaatacttcaccatttgctactacaataatgtgtcatatggctgaagtttttaagtactttatgttctctgctggtatgaagtcattaatcccatttatacaattaataaggaaaccatggatccaaattagggatcagagaa

SEQ ID NO: 825221 - DNA, 244 bp, Homo sapiens
agtgtggcagaccaagtacaggctctgcttcaggtttagctttgtatcaagcccagttctgccaatgaggtgatcttgaacaagttgcttgccttctcagagcctcagcttctccatctgtaaaatggtaaaaatgacacccaacctccaagggctggaatgagaattcagtgaatgatggatagaaactgayatcatgctaaaaaatctctctccttttttcttgtagacatcagaggatggt

SEQ ID NO: 825222 - DNA, 244 bp, Homo sapiens
agtgtggcagaccaagtacaggctctgcttcaggtttagctttgtatcaagcccagttctgccaatgaggtgatcttgaacaagttgcttgccttctcagagcctcagcttctccatctgtaaaatggtaaaaatgacacccaacctccaagggctggaatgagaattcagtgaatgatggatagaaactgatatcatgctaaaaaatctctctccytttttcttgtagacatcagaggatggt

SEQ ID NO: 825223 - DNA, 433 bp, Homo sapiens
ggaaggaggctataggcccaataagcagttggcatttcctgacaattgtttcaaacacaaagccagcaggagctgctcccagcgagccccgcttctccccatmatctagccttgggtaacaggcttctcccaggagatcactgttctcagtccctggcaagagctggccccatggggagtgctttgttgatagtgcccagtgcccagcaaccaggctgggtttgggaaggaggctggagtcttcaggaggaaggtcctgcccaagatggtgcagagggtgagtgaatgggggagcccaggtgggccttcctttagccccagccctttaggctgctccagaggagccttcgcccctttccccagagcacaggctgatctgtcagccaaggagtggaaaggagaacatggaggttcttcctgccacttggatcct

SEQ ID NO: 825224 - DNA, 579 bp, Homo sapiens
aatatctacccttgtagggtttatattgttgcttacattctagtgatagccattattgktattattattattattatacattttcactgctccttgtggagcagggctaccctataagcagtgagcccagagtaaccaagccattattttaaaatgaattcttattatgtaaataatgttagttcatattttaaaattattattaatttttttatttattcttttttttagaaacagggtctcactctgttacccaggctgtagtgcagtggcgcagtcatagctcactgcaaccttgaacttctgggctcacatgatcctcctgcctcaacctcccaagtagctggaactacaggcatgtgacaccatgcctagctagtttattttatttatttatttttttgtagagatgggatcttgccatgttgcccaggctggtaaaattgttatttttaagtgatttgttattatttaataattttttcttggccttaagagggcacaaaacaggaagatatttcaccctctgggttggcacaagaatatttcctatggttttaaattcccactgggtttggg

SEQ ID NO: 825225 - DNA, 632 bp, Homo sapiens
tatggctagccagttctcccagcaccatttattaaacagggaatcctttctccattgcttgtttttgtcaggtttgtcaaagatcagatgattgtaggtgtgcaatcttgtttctggttctctattctgttccattggtctatgtgtgtgtccttgtaccagtaccatgctgtttgggttactgtagttttgtagtgtagtttgaagttgggtagcatgatgcctccagctttgttctttttgcttaggattgccttggctattcaggctcttttttggtttcatgtgagttttaaaatgtttttttttctgattctgtgaagaatgtcaatggtggtttaatgggaatagcattgaatctataaaatgctttgggcagtatggccattttcatgatattgattctcccatccatgagcatggactgtttttccatttgtttgtgtcatctctgatttctctgagcagtggtttgtagttctccttgaagaggtccttcacttccattgttagctgtatttttaggtattttattctttttgtggcaattgggaawgggagttcattcatgatttggctctcagcttgcctgtacagcaacagtttttatttcattttattactacttttaa

SEQ ID NO: 825226 - DNA, 596 bp, Homo sapiens
aacactctaatggtaccaattttatctttagtattaaagttaatagacaaaactattacaaacagctaaaactataayatttgttaagcaattaaattataaaaagatattaaggtgtggtatcaaaaattaaacatgtaaggagggggaataaaagtgtagtgtctcagttcattttctgctgctatcacagagtatctaagattaggtaatatataaatataaaacattatttcccaaagagtgcagtggcacattcatattttactgcagtctctaactctgggtctcaagtgatcctcctgcctcagtctcctgagtacctaggactatgggtatgcaccaccatgcctagctaaatttttttgatagatggtgtctctctaagttgcccagggtggttgcaaactcctgacctcaagcaatgctcccaacccagcctcccaaagtgctgggattataggcaggagccactatgaccaccttgtttttgctttctaaaataaaatgatatttatttaggaataggacattgtgatagcaatatgtgtgccatagtaaaagatgtattaaggaaggtaaaggaagacaagggt

SEQ ID NO: 825227 - DNA, 519 bp, Homo sapiens
accgatttcctggggtccttcttgagttgtcctaagaactaatggggattattataaaggttctacaaacttgacattgatgctggtttatagagaagcatcagaagacaactcccsattggccaaagagaaaactgctgaaggaacctccttgccaatttgtttcagggtctgctttccgggatccccagggcggggaaaaactggttgacatcatctctctgttctaggcattgcccctgttcctccacctagggacctaagctgggaagcaggacatggaggaaatgtggctttgccacttaaggagacatccgtggaaaactttctgggagctaccacacctgccctggctaagctgcaggtgccgcgggagcaactctctgaagttctggagcagatttgcagtggtagctgtgggcccatctttcgagccaatatgaacactggggacccttctaagcccaagagtgttattctcaaggctttaaaaggtaaaacaagaagtgtttgactccc

SEQ ID NO: 825228 - DNA, 465 bp, Homo sapiens
gggcagaggtattaggaggttaaggcttgaccttgttgactagctttttacatgtcagttagtgtgacaaatgacaaaatgcagagacactataayagcatgacagaataagggagtatgaccatataatagaactttttgtaattatagaaatattctataactgctccatccagtatgataagccactaatcacagatggcttctagacacttgaagtgtggctgatgtgatggagaaactaaattttaaattttatttaattttaagtaatataagtttaaatagccacaggtggctaatgagcagagagtggacagtacaagtttagagcatggactttaggcttcacctcctactagttatgtgactgtgagcaagtcacctttctgatcctgagttttctgaatctgtaaaatgggagtaataattattacaaaaaatacaagaaattatgtatgtgaa

SEQ ID NO: 825229 - DNA, 610 bp, Homo sapiens
ctgcctatctgaaaatctcccacagcctcactttgaacactagtccttatatwtttcaaagctttgataactgcatttcagagtatctctgcccaactttatttcttttccaaatctgtgagtgctattttgatataatggctttttttccctgtctctttaggatgtgatgactatggatggtcttctctatgatctcacagaaaaacaagtatatcacatcggaaagcaggtccttttggcgctggtaagatgaggcaacatgacaactgatggtgtgacgtttccttgttagccttgtttttgatgccatatttctcatattaatattctcaagtggtgtgtatgttttaaagaaaattagatagaagttagggggcagaaactcaagcatggataaattgtttttagtcccttccttagggatttatctagataatttaccacactattggtaatttcagggagaaagtagtcaacttagggtttatacaaggaacaggaaggatttttcagatttttcagggccaagaggtatacacccatttacttgataattttacatccccatttgtactaataatagaattaaaagagacagatagggaag

SEQ ID NO: 825230 - DNA, 332 bp, Homo sapiens
aaaagagcagattttgacaaataagactttaaaatttgacgttctcaaaaatagctttcagcagaaaaaggaactggattcacgccttatacaaaagaacagatgtcatagagaaaatgagatcrtttttaaagttttgcaaaatacaggtacaaaggaaatcttgaatgaaagattgcatgattttgcattatttcttcccctccataatccttgaagcctaataaacaggcttatgatagtattagcgacctctgaggtctactgggcaacttttaatctgtgcctcttagatgtagtgtgggtatcttggaggttttgcttgtttcaaa

SEQ ID NO: 825231 - DNA, 587 bp, Homo sapiens
gtatggatgtatcacagtttgattacatttacctattgaggaatattttgttgttttcagggttttttgttttgttttgtttttttgctattgcaaataaagctgctatgaacaggaatagacatttttgtgtgaacataacatgtttaatttatctgagataaatgcccaagaatgcaattactgagtcctatggtagttcgtgtttagatttataaaacacttccaaactgttttccaaagaggctgtaacattttgtatacccatgagtgattcattttctttgcatactggccatcatttggtgttgtcgttatttttaaattttatccctcctgatatgtatatagtgatgtcattagaatttttttttaaatagattacaattttgagcagttttagttttacagaaaaattgagtggaaagtacagagagtttccatatactcactcascctcctcccagtttctcctattaatatctagcattagtgtggtgtatttgttataattgatgagctaatattgatatgttattactaagtaaagttcatggtttatattagtttcactctttgtattttac

SEQ ID NO: 825232 - DNA, 559 bp, Homo sapiens
aagaaattcctcaaaaataaaatttttacccttcagaggacagaatgtttaatgggagtgtatttttgcygaccttagcgtgtgtttgtcttctccaccacttgatttacttgacttgattaatagtaaattcaaagccaaatgtaaagttaagttaatgctgtttcacaaatttaggcatataagcttgagatgataaaaaattggattcctgttgaaatgtacagctggaaattgacaagttcatgtctgagttcagtagtaggcatgaattatttggtactgtctctttttgagtaatcttcattcagtgaggtgacgtgatgacctttagattaacgaaggagttaatagttctaacatccttcaacttccagcctgaggtttttaccagtaactgctgtgttgtaggtatacaagggagctctttacaactacatttctccccctcccagccatggtgcccctaagttgagaaaaactatcgcagctgtcagtgccgtatagttacttttcagaactgctgcagcagtacatatccagtgtaggtttgtgctaa

SEQ ID NO: 825233 - DNA, 535 bp, Homo sapiens
cagatgaaagggtgctgggaaggtgcacctagagggaagaaataggtgaggtgggcagaacctaccacagtctctgccacagttccaaagcatgaactgtttggaggtggatttaggtttcaaccatggtctttctgattacaatatccatgcttttctcttcatgctacattgtcagtgcaaggcaaaaggaagaacccacgaaaagactaactgcctcttcatgctgcacttcgtaggggcacagcttgatgaaaatgagatctgtctttagctttgcccgttcataaactttactaatttttagttccccaaggattgtttaatactatgtttgcaaaaatcatttataagaaatgacattttaataactttaaaaaacttcttgggtttattgaatttttctccttcctattctagaacaacttaagatgctttactctatayagtatacgatatactatatatactttatacatagtatactgaaatttattacagtatatatggtaaatatatttactgtatttacata

SEQ ID NO: 825234 - DNA, 607 bp, Homo sapiens
ttttgtccatccaattcttggttcaaaacgccaagaacctggacaccctccaccggtaacaattatgctacctttaatggcgacagtgacattgtagacgtgaatggagcttcacagaagaagattatcctgtgggcccaatctactcatcatgtgagtccttaaaggtggagaaactttccgatctgtggtcagagagagcaggacacacagcaatgacagaagggtcacagaaacacacacctgatgtgagaggactcaaccagccactgttggctctgaagacggggggatcaaaaaggctatcaaccaaagaatatgggagacctttataagctgggaaaggcaagaaaacaaattcttcccaggaacctctagaaaagaatacaggcctgctaataccttgattttaatccacatagaattttgttgacttctgacttacagaactgtaaaataaaacatttatgttgtttagrccactaagtgtgtggtaatgtgttatgttagcaatggaaaactaatatataaggtaaaaagaaacaacatatacatggaagcttaccaatgatcaatattctctagggtataccaaccagggttaaac

SEQ ID NO: 825235 - DNA, 540 bp, Homo sapiens
ggcaggagaggactccccaacccccaaccaggaatgtcaggcaaccatcaggtgatggtcaggcggttgttaactgtctttccaaaataataattggtcaggtgcagctagtgccagggaaaggcagtcycccgataagatagaaaatgcctgaaactggtaatcagcagcttcccaataagacctcaggagttgggcaagtgagctcaagcatgagcattaagaagcaaaatggtagagtttaaatggtatatgaccttctagggacattcgactggtaaggggagaacgcctcaagagagcatgcgtacaactccactaaacacaccactcatgttcccctcccaaacgctagcaggccactgcctatgtggacagcccaccccacgggaagaatcagggaagtaatgcaagaccctggaagtcagaggtcaaagcatgcatttgatctctcaagtcgcctgtttggccctcttcctttcattcctgccctaaagctttttaaattattaataactttgattcctgctctaaaacttg

SEQ ID NO: 825236 - DNA, 525 bp, Homo sapiens
catttgcatctgcactcagactagccccatttttcctggttacatacagacttcagctctgctttctgctcaagatttgtttccctttatttggcaggaaaagggtattttgaagatktctctaataatttctgtatgaggatttcagtttctccacatatgcaccaacagttgatattgtgtgtctttttaattttaaacattttgctagttgtattatggtatttaattatggctttaatttgcatatttccaatgacaaaggtgagcatctttttcttgttgttagtcatttagatacttttttgtgaagtgcttgtgcaaatcttttgctacatatttttcattgttaatgactgtgcagtagtccatcaagtggctgtatcataagttatcatttcttattgaaatatcaggtaagttgagaaaaaataaccaaaaaaaaacttctttatgatctgtgtggtggtgaactttgaattgtgtggaaatggatgaaatacattcttttaaatgtctgatggc

SEQ ID NO: 825237 - DNA, 684 bp, Homo sapiens
gggactgagagagcagagagggctccttggtgcccttgaatgtggcttccagcactgaggcctcacacacacacacacacacacacacacacacacacacwctcccttgtattcctcaccttctctttcagcagctcaggatgaggaggcagggggaacccagagctgggaccagcaaccctaagggagatggaagcaggccccgaaaacctctttttccaagaagagttaaattagatgtattttttccactttcaaatcctgcaaatttttcatctcaactcccccaggcttataaagtggctcatctcagctgctcaagctgacaaaggtgcagaaactgttgaaaggttcaaaatgtcccctgggtttccaggcatgaaggaatttacatgtaggttttctttactaaagaaaaaagtccccacttggagagggcggaggaatgaagaagcagccaggaaggagaggacagcaagcgtctgacaagaggagagcctaaggcagtgctggtgggatcaccagccataacttgcagagagacaccaaatgggaagacaggcacatcgagagctgttctgttcttctgttagagttgtaaaggccctgccaatgtccagagttagaatggtcataggtgatctgagagccttctggaaaacctacacagattcccagttaaag

SEQ ID NO: 825238 - DNA, 551 bp, Homo sapiens
ctgaaatttcatgtttcttctttttctaatactcattgcctgggtactgcacagatatttcagtctggagtttgatgtctttttatctgataaaatttwttctagtgctttttggataacttctatccattttaccagttatctttctcaaacttttgttagtaagatatgagacttctcagatggattcttttatttttttttttaaatctcttttttctatctctgattttttttttctttttttaggtcatttctcctacttcatcataaaactattttattgatttgtttttatattagcttttatttttatttcctaagacatttattttcatagcatcctgttttactttcatgagtgcaatattgttccatctctctgaggatatttattctagttttagacattttcttcaattatctgctttgcttctttttcttctgaatcctctgtttgtaggttttgttacctcagactgagggcttaaaaaattgtatctgagcacccaggccatctcttcatattttagtgtgaggcactgaaaggt

SEQ ID NO: 825239 - DNA, 429 bp, Homo sapiens
agactccgtttcaaaaaaaaaaaaaaaaaaaaaaaaaaaaaaatatatatatatatatatatrtgtgtgtgtgtgtgtgtgtgtatatatgtgtgtatatatatatatgtgtgtatatatatgtgtatatatatgtgtgtgtatatatatgtgtgtgtatatatatgtgtgtgtgtgtgtatatatatatatatatatatatatataaagttggtgtgttggttaatataatgtgtcaccttgggagtccatggtatccagatatttgttcaaacattatgttagatgtttagattttagatgtttctaggaaggtattttttagataagattaacatttaaaaaaaagtctcaacacgtagaaatgataaatactcaaggtgatggatacccccaaatatcctgacttgatcatcacacactctatgc

SEQ ID NO: 825240 - DNA, 607 bp, Homo sapiens
gggtgtgctgcacccattaacttgtcatttaacattaggtatatctcctaatgctatccctccccactccccccacaccacaacaggccctggtgtgtgatgttccccttcctgtgtccatgtgttctcattgttcaattcccacctatgagtgagaacatgcggtgtttggttttttgtccttgcgatagtttgctgcgaatgatggtttccagcttcatccatgtccctacaaaggacatgaactcatcattttttatggctgcatagtattccatggtgtgtatgtgccatattttcttaacccagtctatcattgttggacatttgggttggttccaagtctttgctattgtgaatagtgctgcaataaacatacatgtatttagcacagtttctttgtccactcgttgatgggcatttgggctggttccatatctttgcaattgtgaattgtgctgctttaaacatgcatgtgtgagaatctttttcatataatgacttcttttccttggggtagayatccagtagtgggattgctggatcaaatggtagttctacttttagttatttaaggaatctccacactatttttcatagtggctgt

SEQ ID NO: 825241 - DNA, 634 bp, Homo sapiens; identical to SEQ ID NO: 820043

SEQ ID NO: 825242 - DNA, 473 bp, Homo sapiens
gcaaactatgggtgaataaaatagaaacgaaatagaaaataccgaagtgttctgtgaggtttaattctctccatttcagcagaccctcaaaaaagtaggtttcaacctcctgtcaagattaaagcagtccattaatcaaataactctaagaaagcaatgatcaaggtaaatagaataatgatatattaatatcttaagacaatgatactgaagagtttaagaactccttttagttttttaaaacaggccattaagtaacacactaaaaagcaatcagaagttatcaataggccacttataaaatgctgttttgttgatttggtttcagcaaataattttctggggcctatatatattgtccactaagggaaaattattttctgtgtttttttataattttaggcaaagaataaggtgttggttctttacagttccttyattctgcttttagaaatatgaattactacaacctt

SEQ ID NO: 825243 - DNA, 598 bp, Homo sapiens
atctaggaggaaacttatccctttgtgtttagaacaaggcaaaagaaatttctgattggatattgttatgggcccatgacttctgttgcagagaaggtaatagaaaaaggtaaaatacttctacrctctataattcaccttgctggaaaaaaaacaactggattggcttgacaggggcttagacgggtgaccaggttactgtttggttggttgagagacggaagcagtacagaatgacaaaagtgtgtggtgggccaccggccactggttcatcatagcaggacctcaaaccaatgtctagtccatgaatgtttatatatgggttggtatatgaaggtggatatttgcaaacaaatgcttagttttagtgtcaggattttcttcctaattaatgaaaagagactgtatgttttcaagttctgtaggcctaactagaaaggaaagagttcaggatttcagattgtgctactttcacaagatgtaggtatatctttaccaaaacacacatggctatgcacatgttcaagtatcttgttataagaagggtgtggtgtaagtggaaaaattgcttctgttattcttgtgaggcagtgtaact

SEQ ID NO: 825244 - DNA, 480 bp, Homo sapiens
cacacaaacatagaggccattagaacatacaacaggcagttttgggagaagggagtggccccacttactatgctcctcttcttttaagagcattaattattttatatttttctttsagagaaataatacttgccgtgtcatcattcccaggaaaaatatttgggtctatagctgtatattttaaacagcatgtgaataagaggagcaacagtatcaaaatagaaaacacacatagagtcaagggcagtgggcggagaatcaatgatctctctttttgtacactgtctcctctaatcttttaagcacagaaagttcaggtggaattctaatgccttcctttcccatgcattccatatgtatgtatcttgtatgtatacatgtaacagcaggggataaatctcttgaagagtcatcttctacttccgcttccttgggtatggactctgacgtaggaggggaaaagctttagatacttttgaa

SEQ ID NO: 825245 - DNA, 506 bp, Homo sapiens
ctgacaaaggtctaatatccagcatctacaaggaacttaaacagatttataaaagaaaagcaaacaaccctattaaaaagtgggcaaaggaaatgaacagacatttctcaaaagaagacatacatgcggccaataagcatatgacaaaaagcttcaatatcactgatcattagagaaatgcaaatcaaaaccacaatgagataccatctcacaccagttagaatagctattgttaaacagtcaaaaaatatggatgctggtgaggttgcagagaaaagggaacacttatacactgttggtgggagtgtaaattagttcaaccattgtggaaagcagtatgatgattcctcagagaactaaaaacagaactaccatttgacccagcaatcccattactgggtctatacccagaggaatataaatcattcsatcataaagaaacatgcacctgaatgttcattgcagcactactcacaataacaaagtcatggaatcaacctaaatgc

SEQ ID NO: 825246 - DNA, 553 bp, Homo sapiens
ggttctgattcctaaaagggacaaacttctaccaagagacacagccagagtctcagtgaactacaagttaaggcacattgtacccaagggcaagcatgaaaaaacagaaatcaccatactgtcagggataatgtaccccaatcagtggtgggtagggactcttttacaaaatagaaacaaagagaaatatttgtgcaacccagatgatcctcatgggagcaccctagtactcccttgttccactgtaattgtaaatggacatgtgccacaaccccaaacagaacagtgtgcctatcaaaggttctgtcccttcaggtatgaaggtgtgggtcgtaaaccacaaagaccagcagacatgatagctgaagatgtgaggaattcagaatggatagtaaaaagaaagatgaggggaacagctgcaaaaaaataaataaataaataaataaaagggttgtcgttcattccattaaattccgttcctcttagaaagaaaagggagcaatggaaagaggctcccaaatctgtgggggggrgaattgagaaagaatagaag

SEQ ID NO: 825247 - DNA, 554 bp, Homo sapiens
ttactttgtcttccaacttacgggcacttagaatcagaataatgttttggcaaagaagccccatatctaaaatattttctaaactcctaataactacaatgtcagcaacaacaaaaacaaaatggtcttggtttttacattttgaaaaagtttatggaataggaaagtaagtcaggttcaagcaataggaaagtaaatgtaattaatgtgttcaggttttgacagaagatattactgacttaagtttccttcttaattttactttgacatgttattccataagcacattgatggggggcattaatgaaataaactacctactccatcagtattcagcacaagaaccgagttcagggagttgagaaatcctgatcattggtaagaagcttggtatagtggcaggagcatagactaaggatttagaaaatttgggttcaggtccagaactttcttctctccagctcaaagtccttgggctggktatctcattgttttgggccagtatattctcatttatcaaatggtggggcagtaatagatactctcctaagttc

SEQ ID NO: 825248 - DNA, 618 bp, Homo sapiens
acctttgcattaagatataatttacagcttaaagtattatcctttccccaaattcttgcaatttcacagagaaggaaggaagctgcagagattgcactcataayggtattctaggcttcagccattaggaggtcctgtaggatatcagggtttctgcgtataatgtcaagtaaggcctgtgccttcttttgctatgagcaaggcttgtactgaggcttcatgtgaatagcaacagggcagtctgaatttccaggataaaggtgggtggaaagcgagaggagagatgcaccgccttcccttcaagtgcttcatcctgctgaaagcaagtgaatatgaatggaatacagaattcctgcatccattatttttaactgtattgtggttattattgtgaaagacaggactttaaagaagctggcaggtgctaacttgaaagcacccacataaaacactgtccagacagttcaactctgttgggcaaatctgtgcaaggccatcaggcatccaaagctgaaaagaaattttacattagcctcttgttgaaaacctttctatttaagaatgcaatttttatattttctccataacaaagcatgatttatgaaccttgctctgttt

SEQ ID NO: 825249 - DNA, 499 bp, Homo sapiens
taggctactttccagagactctgtaatatccttaacttttgaattgagatttttggaagtccaggatatgcttcactcccagccccagtttttatacctgtagacatttttttctcttttcagcaaatggagaggaatgttcctgaagattgtgagtggctatgctggtgcagattattatgatacctaagtgaggtactagtagtccataggacaaaattttttttaataagtcaaatctaattctactgctaaggtgttaaagacatataaaatgttaaaatcatttacttattttaatatattatgttacttaatattctcctaggtttcacatgctaaatttcagtctacaataaattttatagcgaaatttaaaactctcaaaatagaattttaatagaaatgctaagatattctcagtgkagctgcataaaatttgcagagttttttaaagaaccatttccgtcatggtttaaaacatatggcaggtcttttt

SEQ ID NO: 825250 - DNA, 641 bp, Homo sapiens
tctgggcttgttagtgtctgtccttcttgggaaggatttctaggtattcaaaggaacttgggttccaagaccaacaatgcattgttttttttgcagactcatggaggtaccaccttcgtggtcttgaataagacctggaagaattatctagattacaaagtagatactcattattttactgtctcccaaacacatctttgtgctgagccacctggaactgggggtgtgataaagcaagcacccatgtggccatcaccactgggactgtgctggttcagatctgaagccagcacagcactgggtcttgcccaaggctcttttcctttcagggtagtgagttaacccaggccccaagtgtgtccagagatactaactgggagccagggatttgaattaaaaaccttagtaatttacctgatttctattttactgtgcctaagctggcactcaaaccacaatacaaagttcgtcctgctcttcctcccactaccacaggcagagagacctctccttgtggccaccacaatcactattccactgctggagatcactagggttctgctaatccactgccaatgttcacttaaagcccaaaakctcctcagtcagtttttggtgaatgctgccaggactgagattta

SEQ ID NO: 825251 - DNA, 582 bp, Homo sapiens
taagtgttgggcactgagctatgctctggagatcaatactttgaacagaacagtgtcaatggttgcaatatggtctgttcttatttgactccatttcctttcagcctccagctccctgacagactwactgaccacacctgtgggcttgtgcccctctcagcaaaagaaacataagatgctccctgatggtgctgggaggtgcctcaacatacaggtgttctggttgtgatgcctcatatctgtagtcaggacagcttgctgggtcctgtcttgcccaaatccctggtttccagctccttgcctaagatccagctccctgcgtggctagacttgcctgaccactctcttctcacctaacttttgacccttgctatggcttgaccatcagctcttagatatcccctcaaacctggctccatcaggccaagctgctgatgcccactataaatcccgtcttaccatcttggacctgggtttccagtctttatgacacacatgttctcaggcaagaagaaaggaaggacaaaatgatacataggtatgcccatataagtgtacttgtcagttggaaacctgagaatt

SEQ ID NO: 825252 - DNA, 536 bp, Homo sapiens
agaccaactctgccacaaaatggaacagactgcatgagagtatgactgccacaaaatggaacaaactgcatgagagtatgactaccaggaggtggggatttcagaggaccgtcttgaagagactaccacaccctattagaatcaagcatttcttgtcttgactggtcatttcctttttctgagcatggggtagcagagagatcacttatggccacagcccccagagtctgggaacctgaccaattctactatttaatcctatctgggggatccaaatttcccccttttcctttggccaacggagatactgcactatggctaggaaaatagtggcactttgttaatcccttcttggccgaactacctagattcaagtcttgactccttcacttattagctttgtgatactgggcaaggttttcagcttctctgtgcctcagttttatgtaaaatggggctgaaacatgatacatttcatargattattttatggctttaagaggtaaatatatataaaataagtagcgcaatgcaag

SEQ ID NO: 825253 - DNA, 612 bp, Homo sapiens
gtcctttttatcacctgatttctctggctagaacttccaatactgtattaaatagaagtggtgaaaggrggcatcttttccttgttcctgatcttagaaggaaatatttaagtcttttaccattaaggatgatgtttactgttggtttttcatatatggtttttattatgttgaggtagttttcttctattcctagtttgttgagtgttttaaccatggaaaaagtgttgaattttgtcaaatgttttttttctgtaccagttgagattatcatgtgttttactcccttaattgtgttaatgtgatgtattacattaattgattttcatatattgaaccatccttgcatttcagaaataaatctcacttggtcattgacataatccttttgataggctgctgaattttgttgaggatttttgtgtcaacgcttataaggtatattcatctgtagtttttccccttatagtatctttttctggctttggtgtcaaagtcatgctggcctcatagaataagttaggaaatcctccttcttcaatttcctgcaaaaatttgagaaggattagtgttagcttttttaaatgtttggtagaattcaccagcaaagcc

SEQ ID NO: 825254 - DNA, 590 bp, Homo sapiens
atttacagaacatttcatccaattgctacagaatatgcattcttttcataagcacatggaacattctccagaatagaccatatcttaaactctgaactaattcaaaaraagtagaaatcataccaactatcttttctgaccacaagggaataaaactagaaatcaataaaagagaaaccttggaaacttcacaaacacttggaaattaaacaacattctcctgaatgaccaatgggtcaatgaagaaattaagaaggaaatttaaaaatttattaaaatgaatgaaaattggaataaaacacactaaaatctatgggatacagcaaaaggaaagtttatagcaataaacatgagtatcaaaaagcagaaagacttaaaataaacaacctaatgatgcacctcaagaaactagaaaagcaaaaataaaccaaacccaaaactagtagaatgaaagaaataataaaagtcagagcaaaaagaaatataattgaagctaaaagaataacagaagatcaaggaaatgaagaggtggttttttgaaaagataaaattgactaacctttggttagactaactaagaaaaaaagaga

SEQ ID NO: 825255 - DNA, 625 bp, Homo sapiens
gcatggatttatttctgagctctgttctgtcccgttgrtctatatgtctgtctttatgccaatatcataccattttaattactgtagctttgtgatatattttgaaatcagaaagtatgatatctccagctttgttgttcttaagattgttttggctattcatagtctcttgtggtcccatatgaattttagaatttttttttctatttctgtaaaagatgtcattgggattttgatggagattacattaaatttgtagattgctttgggtggtatgaacattttaacaatattaagttttccaatccataaaaatggaatgtctttgtatcttgtttaatttctttcattagtattttgttgtcagtacaaatctttacctccttagctttttcatatttttattcttcttggtactattataaaggggattgctttcttgatttccttttcatagttcattgttagtgtatacaaatgtaatcaacttatgtatgtggatttttgtgtcctgaaactgtactgaattcatttattctaacagtttttttaatggaatctttagcattttctatatgtaaaatcatgttacctgtaaacaggaagaagtaaaattgttctgaat

SEQ ID NO: 825256 - DNA, 625 bp, Homo sapiens
gcatggatttatttctgagctctgttctgtcccgttggtctatatgtctgtctttatgccaatatcataccattttaattactgtagctttgtgatatattttgaaatcagaaagtatgatatctccagctttgttgttcttaagattgttttggctattcatagtctcttgtggtcccatatgaattttagaatttttttttctatttctgtaaaagatgtcattgggattttgatggagattacattaaatttgtagattgctttgggtggtatgaacattttaacaatattaagttttccaatccataaaaatggaatgtctttgtatcttgtttaatttctttcattagtattttgttgtcagtacaaatctttacctccttagctttttcatatttttattcttcttggtactattataaaggggattgctttcttgatttccttttcatagttcattgttagtgtatacaaatgtaatcaacttatgtatgtkgatttttgtgtcctgaaactgtactgaattcatttattctaacagtttttttaatggaatctttagcattttctatatgtaaaatcatgttacctgtaaacaggaagaagtaaaattgttctgaat

SEQ ID NO: 825257 - DNA, 625 bp, Homo sapiens
gtcagtctccttttctgagagtccatctatgctgatttctcttcctgatcaaagttcctaccaacctgtcacaaagggcaccctattacatcaggtggtgtctcacctatgtgaaactagaaagrgtgctaaacataccaaggcagtattttaagccaactgtaacctcttgaaacacacatgaggcaaatctagaaccagagacttaaaaagtgagtcagagtctatactgggaactttatatgcaaacaaatttcatgtacatgggcatacaattcagatgtacttacattcattatattattccaatcacagaaccgaaggagaccatgtactctttcaaacacacaaatcccacccttcttatctgcatgccttagcttatttcctatctacagcctgaaatgccctttctctgaatctgtaaatacacaaatacaattattatgggttgaattatatgcaccaaaaaatgctcaagtcctaacccccaggacctgtcactatgaccttatttggaaattgagtctttgcaaatgctcacatttagatgaagtcattagggtgggccctaacacaatatgactggtgtcctcacgaaaaagggaaatttagagataaagac

SEQ ID NO: 825258 - DNA, 604 bp, Homo sapiens
tcacctgcttccttctttccgctggcttggtctgggatttggggcaaggagcatcagtaagtaaacagtaggctggcatggtcggatcttatcttattatcttattctccttattccctccttccccgtccacaccttggcgtgcctcctcttgagaaggcagaagggctgtgtttctgttcctgtgtctgtgacagctccctctgtgcctctccttttgtcgggggctatttcttctctcgggggtgactgcgtttgcgtgtgtggggaagggggtcctgtggtctgttctctggggagaggtctgtttacctgttcctttcggggagtttgtacatctgtctcctggtggggaggagggtctgtgtatctggaggagatgtctgcaagtctgtcttctggggcttggggtggggggaggaagggctttcctccctcggacagtcgtcctccgttcagccgggctccgcctgyctgctccagccccgagcaggctccggcgccctggagacgagcgcccctggcggcggctacgcgctctgcggctctcccggctgtgtccgtgggctttagctacacagctcccgcagatgttgaacccttc

SEQ ID NO: 825259 - DNA, 647 bp, Homo sapiens
tgagtgctgcaagagcaacctggagcctctgtttgagggctacaactctgcgacgggaggccgagtgcatggaagccracagtgggaggctggcctcagagctcaaccacgtgcaggaggtgctggagggttacaagaagaagtaagtgcagtgggaggagggtttggagaaattaaatgggattaagtcaaagtatgatagatttgggttcgaccataagaggaacttcccaacaggaagaaaatagtacaataatcctgtggggtggggggaatttcttttctagactgggagtttaaacattggagattctgaactgctccagctacttcatcattatgtttatttcattaattcatcaaacattttattgagcatctactcaatgttgtaggtgctatgttgggctctgagtgggaaaggagtaaggaagtaagaaggaggagaaaggagaggtaccagaactgggcagggttcctgccccaaaggagttacagcccagaaacagagaggaggtcttcgaaaatgtgcagggcccccaccctgacccacatcaggaatgaaagtccctgaaatagaaagagctttgagtaacatgggttggtttgaatgcccagaagaaagggatggacaagttcccttcagt

SEQ ID NO: 825260 - DNA, 569 bp, Homo sapiens
tttcttcttactgtttgttttcctttcctaagatagttcctttactgtaagtaaacctctcatccracctcaacgaataaagatttgttattatttattttaccatcttggccatagtaattgtatttttcttacctttaattaggaagatgatatacaacacccaggcatactcagcattcaaatctgcatttgtgagatgaagaaatgccctagctttctaactagatgccttctcattacctaacttataatgaagactgagccacttgtcataaaagaaattacgcttaacttacaaattgaatgtggttattttcagtctttaaaaaaagaaaacaaaatgtgagaaatctgaaaatgaagcgttatattggtcttgctagatattatattcacagtgtggaaaagctgtttatttaaaatattttatgctgacagagcttgattaggggaaaaggacttctgaaaatcagctttagaacacacgcacacaaaccttccctgacctttcacactgcacttacaaaggcattacatgactttaccattcagtctctcttaggaag

SEQ ID NO: 825261 - DNA, 569 bp, Homo sapiens
tttcttcttactgtttgttttcctttcctaagatagttcctttactgtaagtaaacctctcatccaacctcaacgaataaagatttgttattatttattttaccatcttggccatagtaattgtatttttcttacctttaattaggaagatgatatacaacacccaggcatactcagcattcaaatctgcatttgtgagatgaagaaatgccctagctttctaactagatgccttctcattacctaacttataatgaagactgagccacttgtcataaaagaaattacgcttaacttacaaattgaatgtggttattttcagtctttaaaaaaagaaaacaaaatgtgagaaatctgaaaatgaagcgttatattggtcttgctagatattatattcacagtgtggaaaagctgtttatttaaaatattttatgctgacagagcttgattagggsaaaaggacttctgaaaatcagctttagaacacacgcacacaaaccttccctgacctttcacactgcacttacaaaggcattacatgactttaccattcagtctctcttaggaag

SEQ ID NO: 825262 - DNA, 532 bp, Homo sapiens
acttaacatggaaatgcagacatatggggtcaaaggagcgccttgggctatgtattgtgtctttggtaccagagactagtggcagagagtaaaaagaagaataaaaaatatatttcagtcagggaggaagtggttctcattcatttttctacaaacatttgttaattcaacaaatatccactgtactgaccactaggaacgctaacggtgaaaaagagaaagaaaacccctcagtttatggggcttacattgcactagtgaaaacagatactaaacaggtaaagaaataaattaacaccagtgcattaacttcctattgctgctgtcacagatgacaacaagctgagtgacttaaaataccttaagaatattttcttacagttctggaggtcagaagtctaaaagagcatcttatgggttaagtcaaggtgtcaatggcacagtgttctgtctgagaatccatttccttgcctcttccattttccagaagccacgtgccttcatgggatcckggctcccttcctgccatggc

SEQ ID NO: 825263 - DNA, 538 bp, Homo sapiens
aaagggttgtatctgttacagacttaatatttttagaaatttaataggctcatttagaggtaaatattttaaacaggccamccatgcgttacattaactgcaccttgctgtgacattgtcacaaaggcttcaaacctcagggactgagaaaccttttaacactctgtttagtaaacgttaaaccctcggttgatgatctgagttcactctcccttagtatagatcaggctggtgaggcgggtgatatttcagtcatttgaatgtcagtctaaaagcatgcacatcactgctgcacatcatcagagcctcgggtcatttacacttgtggttgttttacttcacagcccagagccttccccgagctgctgtcattctgaccctgaggccgcccttcacagcctcctgactccactcccaacatcccctttcaagctgacacagagcaaaggctgaccttgtcccatcaaccacttacccacacagacctaattaatctttggttgccagtaaatccagcacacttccctccttgcatact

SEQ ID NO: 825264 - DNA, 587 bp, Homo sapiens
aaataatgaatgtaaaagatggttgttatatctgtagagagcctcattgtattttgtattaaacctttcaataaaagtgaatagttttacttccattagttggaaaggacaacytataacttatcagaagtctcctgacagcataataccaagttctagaatgaaaataaaatgcctacaaatatttggtttggttaagattaaagatgcctggttcaagcatgctactttgttgtggcagtaaaatgtatgcacaatgccatttaaacaacagaaaaaaaaggatgaaagaaaaaaaaagtttctcaggtaacagaggaaatctgaaaagatatcatatacctgtagaaaaaagaaaaaaacccactttatggaattagctccaatcttcaatttgggatgcctaatctagtcttcgcttttgctgtaggagaatctacatatacttgtggaaaacttatacttcaggcactggcaaggtcctagggatgaaataaaaaataagatttcgcttctgtgttcttcatttataagaccatagtgccttcatttataaaattaaaggatccggtgaactctaaactctt

SEQ ID NO: 825265 - DNA, 602 bp, Homo sapiens
actcccttccatctggtaagtcacaccgtgaagttcttaccactttgtaatgttacatttcatagggctgccagatttataaaatataggatgctcaattaaatttgaatttcaagtagacacaatgtttttagtataagtatgtcccatgcaatatttggaacatatttatataaaaagtattcattgctcatctaaagttcaatgttttagaaaaatgatttagtgtaataatagtataaaaagttttcagtattcaaatagtataatagtaaaataattcagcgtatagtgtataatatttataatgtaacataagactattatatagtttataatacagtgtaatatatagtatacagtattatagtgtaatagtgtaataattttgtataataatttttggtataaatctgtttcatgcaatatttgggacatgcttacacaaaatttttttggtgtttatctgaaatttaagtttaaatgggagcmctgtgttttatctgtgaaccctgcatattttggcaagtgtatttcaaggttacagaagccaagagaataaagaaatggagcatcactgacactttatctgccttgacccg

SEQ ID NO: 825266 - DNA, 570 bp, Homo sapiens
gcattatgtgttctttatagcccaacagtattaatagacacttttatcagttaatccccatcatarttccatgaagtaagttaacattttttaaacgtgctttccatttattttcacaaatatttattaagcataggctagatgttaggtacagtcccagtacctggggtaatacaatgaaacaacacctggtaatggagagtgctcttttttcttccaggtacaatgggtgaaggggaggatccttgtctggcgaagggcaacactttcatgaagtttctagatacgcccacccttctactctctcaggaatgttattctataaattatccacttgtcctcctgtagttttaatctattttctgcttgatctttcctatcaatattcaacattcaaaaatgccaagaacagtatctgtcctgtagaaagtggtcaataatgatttgttgaataatttacatgaatactcagcagtttcctaccctagcttcacactggaatcaggtgggaaatagacacacacacacacacagacaaccatagcatctcctatcttaaagcaaacaaac

SEQ ID NO: 825267 - DNA, 602 bp, Homo sapiens
atttttacaatgcgcataccagaggtatgtgggagaagaggttatacttttctgagccactgttccctttagtgaaaagtgaggttattttaacacttcccaaacagtctcacagcagggttatgwtaaagacaaaaatttaaatgatatatttatattaaaatgactttatgaaacataagataattagtaatataaaccaatagccttaagttgggtatacctttaagaatcccactttgatacctcccaaggaaataactgcacatatgagaaaagatatatacaaaagaatgctgatttcagtgctgttcataagcgggaagaatgagatttctaaattacctagcactgatgtcttaaatatctatcagtatgggaatagttaggtaaaatgtagtaaacccaaatgttagaattgtatgtagccttggaaattgatgctgaggatctgtgtaaaatttcttgaacatttaaaatatagtaatgcctcatacttttgaaaatgcagcttataaaacagcacatatcatgtgattctactttagaaaaattatgtgtatgtatatatgtttatatgtgtatatgtatatataaacata

SEQ ID NO: 825268 - DNA, 546 bp, Homo sapiens
aattgccctgaaaatagaatccatgttttcgtttgatgagcacctttatgatctggcccctctcctactcacctctcctctccatctcttgacctcccataacactctatattccaggcccactgaatcaatctcagttccctaaactagtcgctattcctctagccactaatttggaactagtatactgtgtccgacatgccagaatcttaagtagctaactcctatttgttatatgtgtctcaaattcaatccttttttcatctataagttctctctatctcgtttcttcccaaggcatttacttccttatcactgcctcatcaatataaggtgaggcaaatctcatttgtatgtgttcgcattatagtcctaacttctgctagagcataatacattgcacctgtcagtcacgcccaagctcattcacagtaggaactatttaatgttacsgtggaatcgtttcctagcaaggtgcctgaattttaggagtcctttgataatatgcttggaagtgaacattcttttgcacctacaataccagca

SEQ ID NO: 825269 - DNA, 594 bp, Homo sapiens
ataaaagtaacagtattacaagtaatacaaacactaaaactacagaaaaggtgaagttactaggcaactttcttacatttctgtcagaaccaaagcaatagtgaagagtgttgtataaaaacaaaagcttatgagaacatatggttgcatccttttaactttaatttaaacatttgtatgcatacacacagcacatgcatgtgtgtgtttgtgttatgtgtgcataaagactgaagctctcaagggaagatgagggaatgaagagagggaaaagcatagggaactgagatggtgtctaatactaccaaacaaaaataagcagtagcattcttattagcattaatattgaacaaacatttgctaaacacatcaacaagatttgtcattagagttctctgtcacataacagtgatagaaaagcaataaataatgaagccctcatgatgtaaaaactgaaacttgtccatttttcatgagacttttatgagagttaagtaaaattaggttaaaatacaataaggaaatttgttataaaaaataacttatttcatasgctattatctccacaaaaatcagaactccttttcctaacca

SEQ ID NO: 825270 - DNA, 600 bp, Homo sapiens
ttcagtgtgtccttatcctttggccaaagctaattggctaaaaaatggacttcaccctaacctaggtcaatataagtttcttytttgggaatgggaatttgacaccaagagaataatttttttctcattttgaattgttagccctataatgtagacatgggagctatcatgcacatggattttgcacattacctagagaaaatgagaaagctaatcttaagcagcagagagaagaaaaaaaaatggcaggttattgggccctggttaaagatggtggattgacatattaaccccactctttcctgataccctcaaaaaacactgtaaaggagttaaaagaaggcatacatacatagagaaaaagaaaatgaaacttctacttccagaacaagatgaaggaggtgcattttttctcattcctcccactaagtacagctaagtgcctgggacattagatataaaacaaattgagaagactttgaaaggtggagtcaagatagactggctaggaatttcagaactctagacaagacacagtggtcaatttcctgggttttctttttgcctaatatatgcttatatttctgtgtggtgaaaaag

SEQ ID NO: 825271 - DNA, 533 bp, Homo sapiens
ctccagctggtccctccgtttggggtccctractttctgcaatatcttctcccatctgcacagtgctcctgctccaataaccaaaaagcactagaacaggatctatgccttctcactcagatttgattatcaccttgcttcttcacatttatcataatccaaattaatcccattcatgtatctacacccatccttaaccagtgactagactgccaaggcaaaaggatttggaggtggtctggacacagcatttgccatatttgccaattagcctgaagaattttagtagctgtaggcttattcagctaacatacatggattatactcaccccaatagaataaataagtaaataaaattttatgagtgcatgaactatcaccttactttattattctgaaaattctaattatctaaatcacatctgaatattttatcatccaaaaataacttctctaaagccctagaaaaacgataggctcaatgcaaatgctgtatacatatttgatgccttgaataatatcaaacagatcaa

SEQ ID NO: 825272 - DNA, 565 bp, Homo sapiens
tagaaaggtcagagaaaattgtcacwgagaaaattagacttaagctggatcttcaggagcagaacttgttggtaagagggaggaattcgagattggataacaaatgcacacaggtttagatcaaaggtcagcatcttgttgaggcatacaaacctcccccagcctctgcttctcctaagcaacaccttcactgtgcacacacataagctcccatgctcatcctccctctctgctgaaacacagctgaaatgacctactattcatcccctaaattacttgatatcttgggcaccgggaaatgaaggtctgattctcattccagctacaaagacgatgtacatcttgctgatggttgaacatccctcaggatacagaattcctaatttcaccagttcttcttccttggcaaagaaattcctccttaaatgcaacagaagtctactttattggtgtagctattccttgatcctaattattttatgtttctttaatcctaattttaatctcagcagtatgttggccaacaatttctgggtacgaatcattatcacaccctcagaggcat

SEQ ID NO: 825273 - DNA, 558 bp, Homo sapiens
tgctagttcgtgctcctgtaacaaatcatgaaggcttacaattacaacaaatgtttatttcttattcgcatgacttgttcttcaccagttgcctttgaaactgctggaccctctgggaagcagactctgtctgcaacttcgcctatcatcagggtagaagagaaagacaactatgataaaccacatgctgccttctgcctggtaatgacaggtctcacttccactcacctttcattggccagagcaagctacataaccatgctgtatacccatggggcaggataatataattctccttctatgaagcccagtgaatatctgtgaacaatacttcaatctaccttgcttgattggagctacccttgtagaacgggccactttaagtaatgaaacacagagctgaaatattcgagaccaaccaaaatgaccagttgagaggaagaagtcctcagatgacacaaacaaaacccaaggccaaatcaaaattatcacaactaggcaatgtraaaaaaagcagattaacagaaatgccatagtctccataggagctggaaaagg

SEQ ID NO: 825274 - DNA, 569 bp, Homo sapiens
gatgagagtggtccctgactggctcttggagaatggaatctgcccttctcggtggagcaggtaggcctttgagtgcstaacaaaacgaaagaaatcggcagcagaagtttctatcagggtccaagcctctgcatgtgctggcttgtttggctttattttagaaaccaaccaacatgtttcattagcactgacacagcaggggccccctgctgccacctgacaatccagcgtcacttacactgcacccacgcaggccacaccttcaatggccacggcacgctagcccagagttagccacacagaaacacacttctcaccgcacaaaactcccttttgaaaaaaccaagcaatcgtcaggtcggaggagaatcactagccccccacagcgagaggggacaaagcttggtggccgaggcccaggtccttgtggcccctcccggtggggtgaaggtgcccgggactcctcggggttgcatggctacagccggggcgctgccagggcctcctctgcggctgagagatggaagggatccttcccgacgcccgcaggtgggggcgagccaccggga

SEQ ID NO: 825275 - DNA, 522 bp, Homo sapiens
aaggaaacaacctgaaagaaaaaaaaatccaaagatattttcataataatgtaattggtcatcatgataaattcttagtatcccaaatacttccaatggagaactataatgtgatctgtattaaacatcctaaaggtattaaaaatgtaaaggatgtatacaatggtatttcatggaaatatctatatttaaaacagaacataagatggaattcacacatggattacaattacatgaaacatctgtaggtatgttaagaataattggaagagaatttagaatattgtcaatgggcttagagtttattagcttttttcccctaaaaattctttttttttttttgagacagagtctccctctgtcacccagtctggagtgcagcagcacgatctcrgctcactgcaacctccacctcctgcattcaagcgagtctcatgcctcagcctcctaagtagctaggattacaggtgcacaccaccacacctggctaatttttctattttaggtagagatgagatttca

SEQ ID NO: 825276 - DNA, 597 bp, Homo sapiens
attttttttttttttttgagacagagtctgactctgtcgcccaggctggagtgcagtgctgtgatctcagctcactgcatcctctgcctcctgagttcaagtgattctcccacctcagcctccgagtagctgggattacgggcacccgccaccatgcctggctaagtttttgtgtgtttttggtaaagatggggtttcagcatattggccaggctggtctggaactcttgacctcaggtgatccacccacctcagactcccgaagtgttgggattacaggcatgagccactgagcccggcctaaaattttattcagcttttaacatctgcttcctgcttcacctcctccaactttactgcagttgggaattttctctccttttctgaactcctcagtcatggtctgatcacaccttgccttaaattgaagttatttgtgaatatgtctttctccccgacctacctgagagcttttccatgcaaagactttgtctttttcttctttgtatcttccagagcttctaatgttgaggctcagcatgtgcttsagtaaatgagtgaatgaatgggcccccacagaaatactccctcattgca

SEQ ID NO: 825277 - DNA, 624 bp, Homo sapiens
catgtgcagattcgttacatgggtaaattgtgtgttgctgaggttcagtgtacgaatgatcccatcactcaggtastgaacataaaatctaagagatagcttttcaactcttgctcccttacttcccttctaatagtccccagtgtgtcttgttttcagttttctgcccatgtagaattttcattgtacaaatctttcacctcccttgttaaattcattcctagatattgtatccttttgaatgctattataaatggaatttttaaaattttccttttggattgttgattgctagtatataggaacttaacagaatttttgtttgttgatcatgttccctgcaactttgctgaattcatttattagctgtagtagattttttgtagacttttgtagattttctatatatagaattatgtcatctgtaaagaggtagttttgttttttttccccactctgcaatttgtaagccatttatttatttggcctaattgctctagccaggacttccagtacaatgttgaatagcagtggtgaaagtggtcatcctcttgttactcatcttgggggaaagctttcagtctttcaccattgaatgtgatgttagctttttttccttcaaat

SEQ ID NO: 825278 - DNA, 612 bp, Homo sapiens
tgacccaatgatttgagataccagttttatcatatactagatgtttatatgtaattggatctaattctagaaattatattttattccattgatttgatagcttattcttgtgccagtaccatactgtttaatgaaagaggtttgtagcatgtttttataccttggagtagttctaccctgcctcctttcccacctttcacagatctttatattcattaatttcctagctattcttgtgtttatttttattattttttgagacggagtctcactctgtcgcccagattgaagtgcagtggtatggtctcggtgcactgcagcctctgcctcccgggttcaagtgattttcctgccccagcctcctaagtagctgagattacagacgcccaccaccatgcccagctaattttttgtatttttagtagagacaggatttcaccatgttgatcagtctggtctcagactcctgacctcaagtgatctgcccacctcggcctcccaargtgctgggattacagtcatgagcaactgcacccggctgtgtttattttttattttcagtttgaaataaaactaaatttgttccaagcatgcaatacatggttattaatc

SEQ ID NO: 825279 - DNA, 637 bp, Homo sapiens
tagaatatatgtggcattgtkactccaggcaccttcaggtgtcagtaaaggaatgatgattaatcagccattttcttgtgtttctgggagcctgaagttttcaggtacatgaggattaattctatatttgataaaagagccagttgatcagttcgaataggtaattaactgctaagcttgtaagaaacatttcaacttgtgatgagaggatgatccttaggcaatctcagtgtggcagaagctataatcaatgtatgcatctcagataaaattatagtctcatctaccctttgctcaacatttttacactgacccagtacctctaaaaagagaatgtagtagaaatcaggaatcctctgttctagtgtgactctgcccctaattttctggtcacataaattggaaggtcacataaccttttaaggcctgagctttcttgtctgcaaaatgagggtgatagaacctattaaacagttattgtgggaattattttagttaacatatgtgaaagaatttgaattcttaaataacttctgctttgccagacaatttaggtatcttatttgctagtacaagtttttgtaacctggatttggtgtgtaaccttagatagactgtagcattttgggtatgatca

SEQ ID NO: 825280 - DNA, 562 bp, Homo sapiens
atctatggactttttccttcatatttctctgctgcttatatttagaaagattttttttccacttctgattaatgaaaatatccacctgtattttctcccagctgtctttggtattaatagctttttatatttatttttaatatatcttgatatttggtttcatatgttttttccaaattttccaattaatgccaatcctaccctctactgatttgaagtggcacttatatcttacacaaaattatttcatcttttttcaggcctttcatacttttccattgatcttagaagtatattgttatatatttttaccctattaaagaccttaaaattgttatacctacttgtgatattctccttcatttttattattaaatatatttctaagtgcttaatgaatttattgtacttttggataaaaaatttcattttgttccatttccttttcaacctttaaactatttcttcaataaaatgtgaatcttcatggaccatgaatatttttagtttttctaagayttattattttctatatcaaattgaattacttgaaaatatgaat

SEQ ID NO: 825281 - DNA, 613 bp, Homo sapiens
attgcttgaaccttggaggcagaggttgctgtgagctgagatcatgccactgcactccagcctggcatggagtgcaggcactctattaaatattttacttgkattatcttaagaaatcttataacaaccctgtaagaaagaaaatctgacagagcaagattctgtctcaaagcaaacaaacaaacaaacaaacaaacaaacaaaaaggccgggcaccgtggctcacgcctgtaatcccagcactttgggaggccaaggcgggcagatcacggggtcaggagttcaggaccagcctgaccaacatggtgaaaccctgtctctactaacaatacaaaaaaattaaccaggagtggtggcacacgcctgtaatcccagctactcaggaggctgaggcaggagaatcgcttgaacccaggaggcggaggttgcactgagctgagatcatgccactgcactccagcctgggcgacagagtgagactttgtctccaaaaaaaaaaaaaaaaaaagactaaagggagggaagacctacagaaacaagaatgtgcacatagggacctggctaccaagcctggtttataaagatagacaccatagtcagaagggaggatcct

SEQ ID NO: 825282 - DNA, 618 bp, Homo sapiens
gagtaaattcttactctggtgggactggattagttcttgcaggaatggattagttcctgtgagagtaagttgttataaagccaggatgccccttgggttttctctctttgcatgtgtctacttccgctttgaccttttctgccagattatgacccagcgcagaagtccttgccagaagccagggccacgcctttgaactaccaagcctgcagaattgtgagctaaataaatttttttttaaaataaattacctagtcttaggtattctttcatagcaacacaagatggactaagacacttggtaagtccaaaatctgcagtgtaggccagcaggctggagattcaggaaagagttgtagtttcagtccaaacacaatcagtttggcagaattccttcttgcttggaagaggtcagtctttgttctcctaaggcctttaactgattggataaggcctacccacattatggagggtaatctgctttactcaaagtctrctgatgtaaaggttaatctcatccaaaaacactttcacagaaacatccagaataatgtttgaccaactatcaggacactgaggcccagccaagttgatacgttaaccctcacaagtccatca

SEQ ID NO: 825283 - DNA, 629 bp, Homo sapiens
ctacagccaaagaaagtaaaggatcctcttattaagaaaaacaacacttacgctccaacagcaaccagctacacccctaatttggccaggggcgacccgggcttagccaccattgctaaaagtgcaaccatagaacctaaagaggtcaagcccgaaacaaaaccaccagaacccaagaaaacctttaacagtgtcagcaaaattgaccgactgtcaagaatagccttcccgctgctatttggaatctttaacttagtctactgggctacgtatttaaacagagagcctcagctaaaagcccccacaccacatcaatagatcttttactcacattctgttgttcagtcctctgcactgggaatttatttatgttctcaacgcagtaattcccatctgctttattgcctctgtcttaaagaatttgaaagtttccttattttcataattcatttaagaacaagagacccctgtctggcagtctggagcaaagcagactatgcagmttggagacaggattctgacagagcaagcgaaagagcaaagtcatgtcagaaggagacagaatgagagagaaaagagggggaagatggttcaaagatacaagaaaaagtagaaaaaaaaataacact

SEQ ID NO: 825284 - DNA, 566 bp, Homo sapiens
ggactagtttccgatgatctttaactaacacatacacacaaaagcacactcatacaaacacgaacacactcacaytcacacgcaagcctgcacctacatatgatgaattgctcgcacaggagaagatatttcttaaatgtgcaataaatattttgaatgaaactgttcatttacataaaatgtagtataagtattttgtgccctttataaaaaatatccactcatatgtttaaaaagccggaaaaagaaacaagtaaaatggaaagttacagaaaatgtgacaaaaatttactgtaaatctcatcaaccgtcactcaacaaacagcctaaaaaataggttagacaatgaaatagtatcatgtaaagtattgtgaacttaagcttaattttacttgactttgatgcaaaaggaaactgagctgagacctaagaattactgaagcttgtgtgtgcgtgtgcacgtgcacgtgcgtgttgcatacacatatatgtatgcaagatgtagcttttaaagccagcattttattgggaataataacatttgggttgtttttattttaacaagc

SEQ ID NO: 825285 - DNA, 566 bp, Homo sapiens
ggactagtttccgatgatctttaactaacacatacacacaaaagcacactcatacaaacacgaacacactcacactcacacgcaagcctgcacctacatatgatgaattgctcgcacaggagaagatatttcttaaatgtgcaataaatattttgaatgaaactgttcatttacataaaatgtagtataagtattttgtgccctttataaaaaatatccactcatatgtttaaaaagccggaaaaagaaacaagtaaaatggaaagttacagaaaatgtgacaaaaatttactgtaaatctcatcaaccgtcactcaacaaacagcctaaaaaataggttagacaatgaaatagtatcatgtaaagtattgtgaacttaagcttaattttacttgactttgatgcaaaaggaaactgagctgagacctaagaattactgaagcttgtgtgtgcrtgtgcacgtgcacgtgcgtgttgcatacacatatatgtatgcaagatgtagcttttaaagccagcattttattgggaataataacatttgggttgtttttattttaacaagc

SEQ ID NO: 825286 - DNA, 619 bp, Homo sapiens
atggacgtcgatgtcagggtaacagcctctttcctccttactctgatactctccctaaccctctgcaaagcgtggcatcatctttaactgactgtctttctagaaaccctaggctgtcttctagatgctatttctctagaagattttaatagagagacctacattaaaggtcacaggagtgggaggatggaaaggactgcaagggtaaaatcgggaaaggaaggaagctcctgcctctaggcccagcatgtaggagcacagttaagagatgacaagttgtgctgcaggcaaatctgcttcctacactcacttcccaaatacctctggaggcatccaatacttcattcaaacgcactcaaggcgaagcgctcaaaccgtcactgaacatttctctggcaggttgccagtacttcattcttcttgttaatggtgacagagaaaattacacaaagcatccaggatgctgatatgccacttgcttcacagtttacttcaaagtcccctcagagttttccgaattttactttytggaacaaagaatattattggcataagcatcaagtatgcagttaatagtgagcaatttctgaatttttgagtcagaagcaatctgtcagca

SEQ ID NO: 825287 - DNA, 640 bp, Homo sapiens
cactgtggtatgaatttactgtattatttcatactcatgctgctatagggacatatctgagactgggtaatttagaagggaaagaggtttaattgactcacagttctgcatggctagggaggcctcaggaaacttaccatcatggcagaaggggaagcaaacacctccttcttcacatggtggcaggaaggagaagtgccgagtaaagtgagaaaaaccccttataaaactatcagatctcatgaaacctaactcactatcaagagaactgcatgggggactgccctgatgattcaattacctcccactgggtccctcccatggcatgtggagattatgggaaactacaattcaagaacagatttgggttgggacacagccaaaccatatcattgagtgagggacacagagaaggcctcttttaaaatgtgcaagagatgaaggataagaacttatcatgttatatggctcaggatctcatgttcaacttttaggagttaagacaggcatttactatcattctcccaggagctgctktaggttctaaacttgtaggttttctagaatccccaggaggcagggtgagtgaggagcactgggagaaatacacagcatgttactgtgcatcatggcttcacta

SEQ ID NO: 825288 - DNA, 640 bp, Homo sapiens
cactgtggtatgaatttactgtattatttcatactcatgctgctatagggacatatctgagactgggtaatttagaagggaaagaggtttaattgactcacagttctgcatggctagggaggcctcaggaaacttaccatcatggcagaaggggaagcaaacacctccttcttcacatggtggcaggaaggagaagtgccgagtaaagtgagaaaaaccccttataaaactatcagatctcatgaaacctaactcactatcaagagaactgcatgggggactgccctgatgattcaattacctcccactgggtccctcccatggcatgtggagattatgggaaactacaattcaagaacagatttgggttgggacacagccaaaccatatcattgagtgagggacacagagaaggcctcttttaaaatgtgcaagagatgaaggataagaacttatcatgttatatggctcaggatctcatgttcaacttttaggagttaagacaggcatttactatcattctcccaggagctgctttaggttctaaacttgtasgttttctagaatccccaggaggcagggtgagtgaggagcactgggagaaatacacagcatgttactgtgcatcatggcttcacta

SEQ ID NO: 825289 - DNA, 497 bp, Homo sapiens
cttggagatgccagcaaccgcagagccccaagggatgttacagctttttattcatttaacatagcaccacatcagtgcatgtagatacatctcattttttttggtcattttgttctattccttggtatggatgttacatgaattattgatccattttcctattgatggtatttgcattgtctcccattttttgcacttataacagtgttacaatatacacatacagacacacacacacacacacacactcacacatgtccctttcccagtagacccagtacttttctaaaataaattctgtaagtggtacttctgggttgtagaatgtctttattttaaatttgaaaaattctgccaaacggtctttcaaaaatgtcatacgaatttacacatkacagaaattacacattaacagaatttgaaggggtttacctccttatccgcttaaaaacactatatgtcatcaaaattttataaattttgccaatttaataaaa

SEQ ID NO: 825290 - DNA, 497 bp, Homo sapiens
cttggagatgccagcaaccgcagagccccaagggatgttacagctttttattcatttaacatagcaccacatcagtgcatgtagatacatctcattttttttggtcattttgttctattccttggtatggatgttacatgaattattgatccattttcctattgatggtatttgcattgtctcccattttttgcacttataacagtgttacaatatacacatacagacacacacacacacacacacactcacacatgtccctttcccagtagacccagtacttttctaaaataaattctgtaagtggtacttctgggttgtagaatgtctttattttaaatttgaaaaattctgccaaacggtctttcaaaaatgtcatacgaatttacacatgacagaaattacacattaacagaatttgaaggggtttacctccttatccgcttaaaaacaytatatgtcatcaaaattttataaattttgccaatttaataaaa

SEQ ID NO: 825291 - DNA, 642 bp, Homo sapiens
atatctatatattttgtcaatttatcatacatgttgctccctaaaatttcactagcaaataaatgaatattttttccagagtatatgaccatgtattatattttctatatttaaatggaacctataattagctctttaattttttttatatctttatccctttccattaccaaattagaaatataattgcttaccaaaatgcacagtgaattgttttcgagggttaatattgtgcatgttcccagaagccagttatgtttggaggatttgggggttgtgatgaactgtacctagattgatgtatgcaattaaaatctttctaacctatgtatcaagagaattgtttaagcattgaagagttaatacggggaaatgagtttcatttaatgcacataattccagtgctgtgaaaacatagggggaaaaatcaattgaggttcatatacaaaacaaacaaacaaacaaacagaaaaccacacacacacattcagagaagttatttatttattttgtatgtgtgtgtgaaagacagagagacagagagaaatagacagagaragaaagagagagaattagaaatgattgaattaaagtgatttaaaaatcctgaatccagcgtatggtgtgttgtgatgatagatg

SEQ ID NO: 825292 - DNA, 669 bp, Homo sapiens
ggtaccaaaatctggattcctgtctattgctgctgtaacaaattatcacaaacttagtggcttaaaacaacgttactttcttatagtaaaagtctgtagattagaagtccaaaatgggtttcactgggctaaaatcaagatgtcagcagggctgacagggagaatctgtttccttgctgttttccacccttctagaggccatctattttccttggctctgattcccttctttcatcttcaaagcctgcaagatgacatcattttttcccttcttccatagtcacatctgcttttgactctgaccatggccaataaggttctctatttttaaggatgtgtgtaattaaattaggcctacccatgtaatttaggataagccccatatctcaaggttcttaattttaatcatatctgcaaagacctttatttcatataaagtaacatactcacatgttctcgtgattaggacaagggggagcccattattctgcttaccacaatactatttaatttatatttcataggtgttggtacaacgtatgaagaatacatcctaataaaagttattctttaatgaagatgacaaaaaaatggtcaaattaacaattattttgatgtattgctttttagctsatactctgtgaatacctgttagtctgttagattcta

SEQ ID NO: 825293 - DNA, 598 bp, Homo sapiens
tgatcaagcaaaagaaaggatatcagtgattgaaaatcaaattaatgaaataaagcaagaagacaagattagagacaacacagtgaaaacaaataacaaagcctccaggaaatatgggactatgtgaaaagaccaaatctatgtttgattggtgtacctaaaagtgacggggagaatggacccaacttagaaaacgctcttcaggatattatccaagagaacttccccaacctagcaagacaggcccaacatccaaattcaggaaacacagagaacaccacaaagataattctcaagaagagaaaccccaagacacataattgtcagattcaccaaggttgaaatgaaggaaaaaatgttaagggcagccagagagaaaggctgggttacccacaaaggaaagcccatcagactaacagctgatctctctgcggaaaccctacaagccagaagagattgggggcaaatattcaacaatctcatagaaaagaattttcaacccagaatttcatatccagccaaaataagcttcataagtgaagaagaaataaaatccyttacagacaagaaaatgctgagagattttgtcaccaccagg

SEQ ID NO: 825294 - DNA, 612 bp, Homo sapiens
accccaaaagggcaattgtagtagctttcattgaggctaaaaaataaataaatawtcgtgctttaaaaattttacctagcctgtgtttgccagttttatgtaatataaaccaagtgctcattcctttttctaagacttaatgtttccattacaacatacagaatatgtggctgggaagaaatgttgtacagcagatcattagggtttgcttattagatatgctatgcccaagactttgactttccatttacccagaaaatgtctgttcaagtaattatttgatagaaagcactgcagattggggaattctacttaggccataaagagaaaaaatcagtttctttttttttttaaccctctttccattcattaatccatcctacaacaagacaataagatgatagtcagcaacctatttgtatgaaacagcagcgaagaagcagtacttattaactttttacaaatgcaagtttaaaactaaaagaaaaaacctatttaaatcactgtaatttgactaaaacaaaaagctcaaacaagcatacacacacaagtacaatagtgtgccctaaaatacgtcccaaggcaaaaacttataattatttttataagtgg

SEQ ID NO: 825295 - DNA, 540 bp, Homo sapiens
ctaacagcaaagcacattggcttggagatgccactgctggcatcagyggatgccgacccaaagcaaggaaaaggtcacagtgatccagaagatggcgagaacccagggatcaaagttaccaggggggaaaaaggcattttttggatttacttttggggcaacgaaagaaaatgcagagaaaatgcaggggtggggctgagtcccaccaggtggcaggaaaaggcaggtgcaggtgggcgtggtgagaaggcccaccttgtagtcttccctggcatgcgcgccccgtgactccttccgtgcctctgctccgtagatggtctgcagcgcacacagcatcaggttctgcagctccagggtctccaccaggtccgtgttccagaccattcctggggacacaaaaagttccatcaggggcaggcgggacccagtcacatgggccctccgagctgtcagcctgggcctgctagtccatggagtcactggttgtggctttatagctgtgggccaggacccatccagacagcaagcacggaactaagt

SEQ ID NO: 825296 - DNA, 677 bp, Homo sapiens
cacccatggacagcaggcatgcggtggaaggcggagggcttctgtggcagcttcgcaggtctctcatctgctgcrgaccccctgacaggctgagggtcttgctgtcgggtagcgggaccagatgagcctgaatgtggctctgcggctcacaggacaagtgtaccttgagagctgctgccgccgcctggatgtttgctgggtgagctccagattcacgggagccctttgtgccagcatggccgccccaaccccatggggaaagcagatctccctcacctgggaatctggcagagacctcaggcagtgccccatctttcatgacctgcctggtccaggtagaggagtcaagtcctgctccaggagcaggtgcagggcctggcctgggtgccgagagtggggtgaggagggaggagtaacgaagaaaggcagatgggcagaaagtgccacattggggcactcaagtggctctgtttaatattccagcagggacactgagaccgagcccatccctgctgggagagcttctcgaagctggttggtggctgacaggcagggagtggggtgctggggcctcctcgggaggtaggggtgctggggccctgctcttgacagcactgtgccatagctccgaggtggctgctccccatgggccagggctggtggtgccagaaaatggg

SEQ ID NO: 825297 - DNA, 551 bp, Homo sapiens
agaacaaggcggtgagctggtcaggcagcctggtggtggcggcaggccaggcgatgtgagctccccttggctactttagggtcagccaaggaaaggtctttccttatgtaaggagcattttgcctgtcagaaaaccagcctgaggcctgaggcttgggggttttgttctgaccacagggaagaaactgctgggtggaatggtgttggcatgaggggtctggggacgtggactctccagggcgtgccatgctccatctaagtctctcaggttcttagggctccctcaaaacccaaacctccactgctgctgccatccaggaggggcccgggcatctccccagaaccggggatggacgcaggcccagctaagccacagccctcacgacacctggcaaaagaagaggtctctctggaaggtgatggggatgcggctcccgtctgatcagcctctcctgagtcgcctccctgctgtcctcaaggggatgacatctgtacctgcccggttgtgtctggggcagatgcyggcaccccttcctcacctctgaatgtaa

SEQ ID NO: 825298 - DNA, 653 bp, Homo sapiens
aggtggcactttccagagagcatcagctgtggtagtatggagaggagccagaggtggatgaggccctagaactcccaagattatatgccctttgtcttcagctaccagggtgggtagggaaggaccatcagggagggggagggctaggtgtgtctgagctcagactctccttgggtgggtcttgctgtggctgctgtaggggatgtgggtgaggttcccaggttactggagttgtgtacctaggaggattatggctgcctctgctgagtcatgcaaattgtctgggaagtaggggaaagctggcagtcataggcctcacccagctcccatgcaaaccaaagggccggtctcactcccaccatgcccccactaacagccctgagtctgtttccaggcagtgggcaagctgggcttgagaccttgccccaggctaccacctctcagctgcaaaagaaaagggcttgggtcttcccctgcctgtgagtctgcacactggattcacaccctcccccaagttctggccaggaggcttcttgccyggttcaaactgttataaagttcagctggatacttctttctccttgtggagttccccaccccctgctcctctggctgccttcctgatggatccctgtgatgccaggcaagaatgg

SEQ ID NO: 825299 - DNA, 626 bp, Homo sapiens
taactattataaataaagctgctataaacatccatgtgcaggtttttgtgtgaacatcagtattcagcttccttgggtaaataytgaggagcacaattgctggatcatatgctaagaatatgtttcgttttgtaagaaactgtcaaactgtcttccacagtggctgtaccattttgcattcccaccagtgagaaatgagagttcctgttgctccacatccatggcccatttgatgttgtcagtgttctggattatggccattctaagtgtgtagtggcattttatttttatttttatttggatttccctgatgcaatgtatgcatatattatcatgtggaacatcttttcatatacttatttgacatctgtatatcttctttggtgaggtgtctattaaagtgtttggtccattttttaaatgagttgtttgttttctttgtatatttggacaacagctttttatctaatatgtcttgtgcaaatcagacagtctgtgcttgtcttttcattctcttgacagtgtctttctcagagaagaaatgtttcattttaatgaagtccagcttatcaattctttttcatgggtaatgcctttggtgttgcattaaaaaatcattaccatac

SEQ ID NO: 825300 - DNA, 626 bp, Homo sapiens
taactattataaataaagctgctataaacatccatgtgcaggtttttgtgtgaacatcagtattcagcttccttgggtaaatacygaggagcacaattgctggatcatatgctaagaatatgtttcgttttgtaagaaactgtcaaactgtcttccacagtggctgtaccattttgcattcccaccagtgagaaatgagagttcctgttgctccacatccatggcccatttgatgttgtcagtgttctggattatggccattctaagtgtgtagtggcattttatttttatttttatttggatttccctgatgcaatgtatgcatatattatcatgtggaacatcttttcatatacttatttgacatctgtatatcttctttggtgaggtgtctattaaagtgtttggtccattttttaaatgagttgtttgttttctttgtatatttggacaacagctttttatctaatatgtcttgtgcaaatcagacagtctgtgcttgtcttttcattctcttgacagtgtctttctcagagaagaaatgtttcattttaatgaagtccagcttatcaattctttttcatgggtaatgcctttggtgttgcattaaaaaatcattaccatac

SEQ ID NO: 825301 - DNA, 584 bp, Homo sapiens
tcttacccgaggcagggtcttcttgcccagcccctggctgggactagacacagccacatgccccctcagcttctcagcaccccgttgcctctstgctcctccaaggaccgtttttagctgtgctgatgtttctgaggcaggtagccattcccacccgcccaggagacatttggttttttcccccactgtgtgttgatgtgatttatttcacccagtgctgagggactccggagccagcctatcagagcaagtactagctctgccgcacacccgctgtatgactttagggctagctgtgcagcctctctgttcctcatttcctcacctctagagtggggactataataatagtacctgtccctttggactgctgttttgaggattaaatgaatttatgtaaagtgattagagcagttcttggctcactagaagctctagatagatgttaccgattatgactgaatagtagctattattgatggttaactttttctcagaaaggaaccttattcttcatattagccacatgagcgttgtctctttcaatgcatcttggagactctttaaattttatttttggggac

SEQ ID NO: 825302 - DNA, 593 bp, Homo sapiens
cgctatgcacactgggtagtcagccagccaccagacacgtacctgaagtcattaatgacagagttgctaaaaggcatcctggatagcaacaagagagtaccagaagctgcctgcagtgcctttgctaccctagaagaggaggcttgtacagaacttgttgcttaccttgcttatatacttgataccctggtctttgcatttagtaaataccagcataagaacctgctcattctttacaatgccagagggacattagcagattcagtaggacatcatttaaacaaaccagaatatattcaaatgctaatgcctctactgatccagaaacggaacatgttaaaggatgaagataaagatcttttccctttacctgagtgtccattttcagttgccacggtgctgcagtctggcttccttccatactgtgaacctatgtatcagcattgggtaaacctagtacagaagactcttgcacaagccatactaagcaatgctcaaccagatcaatatgragctccagataaagattttatgatagtggctcttgatttactgagtggcctggctgaaggacttggaggcaatattgaaca

SEQ ID NO: 825303 - DNA, 432 bp, Homo sapiens
agatagataattaacagtgcaggcataggatgcaggagacctatcattttgacagctaatgtaaaaayagatctgggtatgtcagttgagagcaagttcaaagtgggcagatctcatcagccacccagcaaatcctcaatgctgcaaattctgctgcctctctgtgcagtgaatgttgttgcttgtgacactggtgatccgtgactatatttaaaaccttttatttggccagccttagggatgactgatagctgcatttttgtatttcctggtttctaaatgggatgccgtttcctgacattttcattactctcacttttgtgtgtgctggtgaatggcagcacaggaaaccctgcattatgaagtctgtcagtgctggcgctatttattatagaaatagtgacacatttggaatttgggcatgtactaaga

SEQ ID NO: 825304 - DNA, 601 bp, Homo sapiens
aagaaacagctgggttgctcagaaggaccaggactgatagtctggctggggacgcatggagtggtgcgggaggctggctgagccccgcagcaggaaataatggaaatcttagcttcttgggacccctgttgattggatgggtcggagaaagagtcagtgggtgcagaacaatcccttgtcaaccctgtgtggcagctggcctggtgaagtttgcctgccctggagattgggtctgttcctcttgctctgcgcctgggaacatgtgggaatcagcaccggacacctgctgaatccacgcctgccattagcaagtcctagctctggataagtctcctttgtgtgagggaaagcaaacagaaaatgtaccaaggagtctgtggaaaaaatactaccccattaaggaaagggaatggtttcctgaagagtcagaggagacgtattctgctgaaagtgaacgtgagtacaaaccagaaaaaaacgtttgtgttcaagcatgtgttatcctcagcagagaatcctcctttttcatataaaaatgtactatkagctatgattgtttgacattatggtgctggagaagttgggtcgactgaggatccag

SEQ ID NO: 825305 - DNA, 464 bp, Homo sapiens
gatataaacagttcttagtgctatttagttaaatgataatkataaaacccattgaactgaatgagaatttggattgtcagacaaatgtttgtaaggggttaattaattcatatgaactacacagctcagctgaaaatgggctcattattctaaaccaccaactttgtctgcttcttgtattgtcctcctttctccatcagatttatcctgttgcacccccacccacagtaacgaatgttaggagatagaaatatttaaaaggatatgtgagctataggcattttgcaagagtacatcaggggtacaaagatgtctgctggaacactgaaatgggaagatcatttattagtgcaccatggttcataacatcccaaagggttcaatattttcattacgcacataaacataacccctcctccttttcaaatgcctcattacagctaagcctggagcttttttcttaa

SEQ ID NO: 825306 - DNA, 613 bp, Homo sapiens
  misc_feature 1, 2, 3, 4, 5, 6, 7, 8, 9, 10, 11, 12, 13, 14, 15, 16, 17,18, 19, 20, 21, 22, 23, 24, 25, 26, 27, 28, 29, 30, 31,32, 33, 34, 35, 36, 37, 38, 39, 40, 41, 42, 43, 44, 45: n = A,T,C or G
nnnnnnnnnnnnnnnnnnnnnnnnnnnnnnnnnnnnnnnnnnnnntacttagggaagataactttcgggatcatttggttcaatcacttcayttggtaggcttgatacaggactgaaaataaagaaataatttgctaacagttatatagctacttactcgttgtttcctaaagccattttaagtaattttggggtcagggtagaaatagttcagaaaaattatattttaaaaaggcattaagttataattaataatttaatagttaaatcttccagaaaaatggaatacaggaattacaagcattagaattgttctttttaaaaaaattttcagaaatgaatgactttggcataagctaggggtttatatattataataaatagtagaaaacaagttatatattatggatttaactatatactaaatgaacagaggctaaattcaactgaaacaattgtcttttattaggccaaagattacttatatttatcccttatgaaagaatataattcagcatctaatggacctaggtgaaaattttgtctctgttctttgtcactacatgtggtagggctagttaccagtaacttttctcagttttagttttcctgt

SEQ ID NO: 825307 - DNA, 560 bp, Homo sapiens
ccagagtgggcacagaggagggcaaaggctacagtggggcaccaactgttcccaggccctaggctgtgagcatgctgcatggggttcagccacccaaaaaagctgctgtgctcagcagtgcggcaaataggctggagggggatgggcatccaggccagctgccggctggtggcagacacacagctgggtgtgcataaggcgtggctgcaaggctctcaggctcttgatccctggagcctctggcccagcgtctcagggtgtctctgtctccattttgttagtttaaggcattgaggaagccagggcaggggagggaaagagctgaaaggagaagaaaaagccgcggtttccaagactggcttgatcactcattttgctgtgtgaccctggacaagtcattagcccactccaggcctcagtttccccatgtataaagagggcagtgttgagctgggtaatctgtgtgaccttagataagccacctaacctggctgtgcctcagttcttccctgtgagaggaggacacccccactygcctcacaggatcctggaaaggatta

SEQ ID NO: 825308 - DNA, 613 bp, Homo sapiens
aacccactcagggcaccccacccaagaaataaaatcttccccagtacaaaaggctcctaagccacrgtaagtggcacctaggagagggacagagggaggaagggtatggagtggacaagggggcctgatcccctccctggccagaagcaaggtccaggcatgggcaagggtgtcatctgggttcccttggctcctctcagatctcagtcagggcgtcgactggcaccaggccccgcttcttgccactgctgacgcggatgaagccgtcagcatccttgcttctgcccacgcccacgcagatctgagccagagagacatggagctgaggcctggcatggcctgcagccctggccctgagtcctgcccatggcccccaggggacccaccctgggggatgatgggaccagtgtcagatgtggatggagccctttgctggagtgatgggaccagatcccaggagtgtagaggcctcagcagcaagaccagcacgtcagcagacacccagcagcacttcagggctgaccttggagattagccgctgtactgccctgcctcacccccatcacagaggaggtggagggaaaaggacttgcctcaaattacacaaaaagcc

SEQ ID NO: 825309 - DNA, 615 bp, Homo sapiens
tttatattaaacagtaaacgctttcttaaaagacaaatggtatcaggtcatatcttaactgtttttttccattctccctcccttaaagttttattaygaaaatcttcaaatatacagaaaagtatatttgatgatttccaaatgcacaaagtggaagacaagtcatttttaagagacaagtgccctcttaaaaattcttgcataagcccgggcttggtggctcacgcctgtaatcttcagcactttgggaggctgagtcaggcagatcacttgaggtcaagagtcaagaccgcctggccaatatggtgaaatcccatctctactaaaaatacaaaaaaaccatagccaggccgggcacggcggctcacgcctgtaatcccagcactttgggaggccgaggtgggcggatcacgaggtcagcagatcaagaccatcctggctaacacggtgaaaccctgtctctactaaaagtacaaaaatgagctggtcgtggtggtgggcacctgtaatccctgctacttgggaagctgaggcaggagaatggcttgaacccgggaggcagaggttgcagtgagccaagatcacgccactgcactccagcctggtgacagagca

SEQ ID NO: 825310 - DNA, 618 bp, Homo sapiens
agggtttcaccatattggccaggccggtctcgatctcctcaggtgatccacccgcctcagcctcccaaagtgctgggattacaggcgtgagccaccgcacccagctttccgccccgcccccccgccgagatagagtcttgctctgttacccaggctggagtgcagtggcgtgatctcagctcactgcaacctccacctcctgggttcaagcgattctcctggctcactcagcctcctgagtagctgggactacaggcgcataccaccacaccctgctaattttgtattattggtagagatggggtttcactatgttggccaggctgatctcgaactcctgatctcaggtgacccgtctgcctcagcctttcaaagtgctggggttacaggcatgagccactgtgcctggcctataaggccatgtacattcttatttcagggagtttcacaaaattcctgaagctctaccctagactccacattaggaaacaaacaaacaaacaaaaagcctttatacatgctgttaactatgagctattaaaccatatttytagcaggggaagctacctcagccctagatttgagacttggttctgccacatacctgttatatgaact

SEQ ID NO: 825311 - DNA, 569 bp, Homo sapiens
tacctgcacaaggctctgggggatttatttctaatgatgaaccagtccccgggacccatgaaggagacttgcmtttagtgcttagaactaaaaatcagatgtttgccagtgagtgtagacaggcagtactgaatccttccctgaaatgcctccctgctcattgcagattaggttgagccaccctcatattaagttatcacttggattcattcactcattcgatgcttattgagggtctacctgtataaagacagcagtgaacaaaatagccactggccctgcctggagtagcttatattatagtgcagtgagacagataataaacaaatggataaatataatatcatgtagtgataagtgctgaggaagaaaataacagagaagccgaagacaggtgcagtgcctcaggcctatagtcctagctgaggcaggaagatcccttgagcccaagagctcaaggctgcaggtgagctaggattgcaccactgcactccagcctgggcaacagagtgagaccctgtctctaaaaataaagagagaaagtaaagaaaataatagagtaggatcaa

SEQ ID NO: 825312 - DNA, 616 bp, Homo sapiens
ctatgcagatgtggtaggatgcccatgagaccaagtttgagcagggaaaattagtctccaccagcttctgatttcccatctatctttgggtgagggggatgttttcaaactctctaatggccagaagaccaaggcagaggggagaacacctgagattagcaggctgagtgcttttgtaaatatttaccttcttggtgccccagggatgtaaccatacaaaatgtaaccctcccagcacccccggcttccaattcagacagggtagagatgccatgcctcagtgtacctccagggttggaagtgaacacctgccactgtcccacccgcatttctttctctagagattgccaggttttgaaacataaaagcttctatgcaatccccttccagccatagagtggcgccatttgctcttcagcctcccttccaagtaaaactcttgagagattccagtgtgcattgctttctccattctaggggtacctatcatcagtgggtccaaagtgagttctctggctkctttcttactaaagcagggattaaaaaaaaaaaaatcttaatatcaggatccattccacctctgactatatacatgcatgtacatacagcctgacag

SEQ ID NO: 825313 - DNA, 562 bp, Homo sapiens
ctttgaattctatttcatctaaaaattttatcttaatgtaacaytcttatgcttgaaattcctttatcatacttccctgaaacaaaaaaaaggacgtaaattgaaaatttaaaaacattaaaacattgctgtagagctgatggtggtggctcatgtctgtaatcccagcaactcaggaggttgaggagggatactagaggccaagagtttgagaccagcctgggcaacatcacatgaccgagattccaaaaaaaatttttttaattagctgggcatggtggtgcatacctgttgccctagctattcaggaggctgaggcaagaggattgcttcaatccaggagtctgaggctataattagctatgatcacaccactgcactccagcctaggtgacaaagcaagacccaatcttggaaaaaaacaaaaacaaaaacaaaaaaaaccccaaaaccaaaaaacaaaacattgctcaaaattatttcatctgatggagttaacaatacaattactgtatgcaattaaccaaagcaatggaaataacaatttgtacaaatatactac

SEQ ID NO: 825314 - DNA, 607 bp, Homo sapiens
cactaaatggtatctttattgatgggttgtcgataaacctcctgctttatcctgtatccaattaaaatgatccctcgtcagtttttcctctgattcaaacattttaccccacattgtttctgcaattagacagaaaaataagcatctgtgaagtcaacctttttgctttttttactctgaagtgctgcttttttttttcagtaagttgtggttttaaaaaaatccagttatttgaatgacatttattatttttgcagttaataaatgtattttaagtttttaaatccacagtgtagataaggccctagaagcaagtgtagacttcgtccacagctgtactccatcggccactgacagtcttattgcattatttcaacggcacaagcaatcatttacacttgttattacccaggggcatttcaaactgttactgaaatgcatccatccctggagtaaccatctgtgaatggtaatgccataaggtagagagactaaatctaattgatatgcaaaaaggagaatttcagctgtccagctatggagattcaaattsaacctttaataggctgaggatttcagctaaatttttaaaatcatgatatctagt

SEQ ID NO: 825315 - DNA, 553 bp, Homo sapiens
tatgcaaaaatcaactttatttctgttcgaaaacaaattatttctatgttgkagccacaatgagaacttgaaacagaaagagccgtaacatttacaatatcatccaaaatttgaaatacctatttataaatttgtctgaagatgtgtatggcctaaacacagaaagtgacaaaacatgactgaaaaaaattttaaaaagatataaagaaatggggagatatagcttgtttttgtattagaaaaccaattttagaaattttagataaagtgttaattcttcccacataaatctacatattcaatgtaatagaaaataaaaaataaacctacacatataggaaaacctaattatgaagaaatgtctacagacagttcagttgagaactcataatcttagtaaatgatcttggtaaaagtggatatgcatgtgccaataaataaataaatacataaacaaacttcaattcacacattatacctaaggaaaatagtgtataatgtattgcattagtcattattgtgtaatgagttatgttccaaatacataacaaag

SEQ ID NO: 825316 - DNA, 658 bp, Homo sapiens
ttgattaaaatggagagaacaatactaaagacatttagtcagaattcattttgcaattgtctaagtgagatgtataaatgaaatatatataaagttcatccaataggaaaagcatgagagtagtacaaaaataataactaatgtttactgagtacttcactatgtattatgatctgtcctgtgtttgagatgcatttgctcagttaacctgcacaataacctttttaatggaagtactgtgtaataattatatagcaaataactttctgtatattgtgctagtcaatgtccaaaacctggctaggcacagtagctcatgcctgtggtcccagcactttgggtggccaaggcaggcggatcacccgaggtcaggagttcaagaccagcctggctaacatggtgaaaccctgtctctactaaaaatacaaaaattagccaggcgtggtggcaggcgcctgtagtcctagttactcgggaggcagaggcaagagaatcgcttgaacccaggaggtggcggttgcagtgagccgagatagcctattgcactccagcctgggggacaaggcgagacttcgtctcaaaaaaaaaaaaaaaaaaaawgtccaaaacctaaaaataaaataaaataaaatagaacagagactaattcccaagtaat

SEQ ID NO: 825317 - DNA, 500 bp, Homo sapiens
atataatttctgtaaaagatagcctgtaatttggttttagtttttattctgcaatggacttcttaatatgaaaacctrttaaaataacttctttacctatgataaattttactaaataagtgaaaataaaaatcatcaaatacattaataataattttaaaataaaataattacataaaagagcaatttgtaagttttatagtctatagtaataaaatgcttaaacacctatagaatgaacagattactatcacacaattttaaattttctgtgggaaaaaaacctaagtaaaattccagtctctgactttgcaagacagaaagaatcaaaatatcttgatttttgctcatgcagttacttctttataattcgctcttctttctctattctttcctaaaaagatgtggacttcaatgagtatcttctttctctaattctaccacataaagccaaactaattcatgtcccttcatagtattttatacatatatagattatg

SEQ ID NO: 825318 - DNA, 405 bp, Homo sapiens
tgaagaatagcaaatatatcacaataacataatagccaaataaatacacacatattattcacttggatttagcaattgtgaacctcttgtcacatttcacttttttttttcctgaatcatttaaaagcaagagattttaaagaagatattcacatttcactattgaataatttcatatacatctcctaaaaataagggtattctcctataaaaaccacaaggcttttatgacatctaagaatatacaaaattgtactatatctaatttctagtctatrttcaaattatcaaatcacccaaaaatatcttccataaattaatttttcagctaaggtccaattaatgttgacaaattgcatttgatgaattctaccccacctttttattcaagacatggacattttg

SEQ ID NO: 825319 - DNA, 638 bp, Homo sapiens
tgttttttttttttgtaaattttctgaatttattctgatgcaataatcagtgcacaaagatggacgtacaagaatgtttgttatagcrgtatttacaattggatacaaactaaatgtttaacatctgtgactatttaaattgtggtagagtcataaaatggaatttttttatagccattaggaacaatgatatacttgtacatatcttgacaaggaaagatgttcatgccatattataaaattagaaaatagattatagaatatgtgtactattattccacttttgccagaatgtttattcacatgcatgcatttgtacagatagaaaatgtctgaaagtacaaatatcaaagtgctgatggtagtatctgccgggttgtggaattatggtaacttttttcttttcttgttttattattgttatttcaataatttcaggggaacacgtagtgtttggttacatggataagttctgtagtggtgatttccgagattttggtgctcccataacccaagcactgtccactgtacccagtgtgtagtcttttatccctcacccctcgtctcagccttccccctagtccccagacaccattatatcattattatgtttttgtgtcctcatagcttatctccca

SEQ ID NO: 825320 - DNA, 605 bp, Homo sapiens
ttcactgagacaggaaaaaaccaaactgttttcattgctctcgtgctcaacacaggatactttacttctggtcaagaaaatgtgtgstttccctacactgaccagttccttgcagacttccacctgggaatcctaaaatttaactcaattcttacactatctacaaggagatagtgtcagatcccatgggtgaaaagctcagtcccacaagactacccttcaccttagaagctgtacacaagtagtagttttcacctctacttctgactgaccagataaacaccacggttcccaaatcctctcctgcattcaactaattttctagaactgctattccatctgtctatctgcaacctttgtaatatcctttaaaacaaatgagtaaacccaactaaaacgtttctgagttctgtgagctactctggcaaattaataaatactgaagactgggtcatgggaatcctcaatttatatccagtagcttagaagttcaggttccaatctgggacttgtaaccgacatctgaagtggagaagtcttgtggactgagcctttaatctgtgggatccgatgcttacaccaggtacagctgtcagaagtgaggt

SEQ ID NO: 825321 - DNA, 605 bp, Homo sapiens
aaaggaccagcagcctccaagcgattttaacctccgaatttcttggcgacgtattaatatacctaggatggagggaacggcgggaggattttaagatccgtaagaacccctccgccaacaccaggtayagaagcgctggaagcatctaatctagacaaagggaaactcacccgctgctccaagaccggctccccacgcgatcggcttccgggtcttcaggaaactgcgcttggacgttcacgccccatgattcacttccgggtttccaggaaaccgcacgcagctgaggccagggatgggcgagacccgagagaagagagggtggggcggtgaggggcggcggggtctgcgctgccttcggctgtctctgggcgcgtctgttctccaggtttttgaggaaagaccctatcggtgaccagcagccaagcagtctgggacctgggatcaaagtaggggacagtgattggacctaagatagttcctgcaattaaagttaattttagtattttaatttaaaagccctggaattgtctgggagaggaagcgaactagaatatgaaatgcaaagccctgcctgggcggaacatgcaatttgatgctgtcgt

SEQ ID NO: 825322 - DNA, 560 bp, Homo sapiens
gaagtagctgcaatgctaaccacaaagagaaaatctatccgacacacacaagagatgggattcaagtatgttactatgatgaaacaagcaaaatactacaaaaggcagtaagaaagacatgtaggggaaaaaaaatctacaagatttaaaaaatctacagataataatctaatatgtattcttttgtttttaatagttactatgtttgatattctccttttcatgtaatgttggcctgatttaactttgcaatcagaagaaaacaagatttactaaatcccatctgcaagaaactccctttaattctaaggacacacacaggctgaaatggaaaggatggaaaaatattttccatgcaaacaggaaccagcagaaagtacaggtagcagtgttaatatgagagaatagacttttattcaaaaaccataagagacaaagattattataaaatgatgaaagactcaattcaccaagaagatacaacaattataaatatataaacaccaagtgtcagagctcctaagtacagaatgaggytggatgcagtggctcatgcctgt

SEQ ID NO: 825323 - DNA, 536 bp, Homo sapiens
tttacttcaacaaatgctggagacacacttgatttcaagcacctgaagagagcaaacacccacattaagagattttagttgaccgtcttatatcaacttggtacctccaytgaattaaagatttaaaggaacacttctttttcataattatagagaacctagttcatatcagttattgtgttatgtgcattttcatgtcacaaaattttgtctcaaaagaaaactttcatttatatattccctgtgtttttcagaggagtaacacaggtaagaaatggaaattatacatataataaggattacaatgtatggaaggaaaaatataagaaaaattcttgttttcagaggatcattaggaagccaagaaaacccacaggacctctgaaggaagctgattgctcttgctcccgcaggacccaggagacaccccaaatactgtgagtgcccaaactgtgtaagtgggaaaggaagattgtctgccaagaacacaaaccgtcactggcaaacctgaaggtctagatcatgggagaagattc

SEQ ID NO: 825324 - DNA, 503 bp, Homo sapiens
aattgaaattttcagctcatcaaaagaaattgttaagaaattaaaaggtaactcccactcccaaaaaagagtatttgcaatatatatttgatgaagggtttatacccaggttataaaagaattcctacaacgcagtaggaagtttcttataaaattaaatattcacctgactataacaattccacttatcagcgttttccacttctacagataactcatagtaatgttgctcataaaatccaaaaatttgaaacaaccaaaatgccactgatagcagaataaatttttaatgtatgtattcatatgatagaatttcttcaaacaagttaaaaagaaaatactgatatatgcaacaaggttgaatctcaaaaacattgtcagttgaaagaaagcagacataaaaattatgcttatgattctatttaaatgaagttcaaaaagtagacataactaatctaaaactataraaatgaaaacaatgattttctacaaatttaatgttg

SEQ ID NO: 825325 - DNA, 530 bp, Homo sapiens
aagtaaattgtgccatgttaagatggacttataaactaaatcaactggaaaacagctgatttgttggtatggttcagcacaaccttaataagtattgtcatttccccagatttttatagaattatttcatgtgatagaacttcactaacgcaaatctatgaacattttactaagattcagattttacattatttatgaagacgggatatgccgagcaaattgacagatgaagatcctaggaatgttttatctatttgcagctgttttcaaatactgtagtagtaaccatgtgtgctaaagcaattaatgtgctaattacagatgtgcctttattctagtccttggagcagagtcagcaaggcctccgttcggcagggcttttcactttagtttgaataactgaatgtacttagaaataaaattgcctttaaaagaaasaaagaaagaaagaaaaactccaacttcatatggctcatgattccccagatttggatatcccactcattgaattcaccctgtaaaacacaaca

SEQ ID NO: 825326 - DNA, 635 bp, Homo sapiens
tttattgttcctttaaatcatggccagtgcgaagggtgaaattgttatttcattttgcttttattaaaatttttctaactaattttgagggtgagcatctctcatatatttgtgccattgcatttccctatctgtgaattgctaatttgtagcctctattttcccaataaattgtaggatattttcttatcttacatataaaatcctgttggaatattagtaatattacatacatgagatgtaatttttccctagtttattactagtcttttggcttttttatggtagctttttcatacctaaactgactgtccttatctcctctgacaagtttatctttcttttaatatagcttctggatttccagttttgctagggaatgttacctttaaccaaatttatacaaatgttttcttaaacttgattataattttattgtaaaataaataagttgtatttattatacaacaaattatacatatttattaaattgtctttattatataataaattatgtttattaacttgtatttattaaataataaattcactgcctttattaarttaattgtataataatataatttttatttgaatccttcacccatctggaatatttgtttgaatacagtgtg

SEQ ID NO: 825327 - DNA, 622 bp, Homo sapiens
taacaggccccaaatcctttctctaacaacttaagaattaaatgcttttcttattgsaattgtttttcagtttgctcaaatcatactattatctaaatattgaaaagttattctttgttaaaataattattactaatatatgtagaagaaatgatagaattacaaatattttgcaatttcccatttaatcattggggctggcaccaataattaaaaacaggagacaatcatgggaaatgctgataagaaaaagaataagaggatggggctgtcacaccctgaactcacaggtaaatcatagcatcaccaagagatagttacatattttgtgtctcttgatatggtgaatataaaatatttagcaccatctgtaaaatattcttaccaaatggttgaacctgattctagtagaatgtaagtcatgagagctcatttccagttttcaggaaataataaggttagaaaaaacaaagacatatcttcaatatggaacgtccttcaaattggctgacctattttgttttctttttgcgtaaatcaatagcatgaaaaaaaggaaatgtactagtccagcattaaagaggctcagattcataacaaccatatgtaatgatagacgtgg

SEQ ID NO: 825328 - DNA, 599 bp, Homo sapiens
accatatttctgaaacaaagcaattaatcttgtttgacaggatagttttataagtgaatatattaatgtaagaaacttaaaaaatacacaaattatatcatattcagttataaatattatttcattgaacatttagtaaatatataactattagtcaataaaaatttttaaattcttgaaatcaggtctattaaaaaattgtgagatgtataattacattaaaattatagctaacttttttgtactgaaagcaagaacacaagtttctttggtataacttgcatatttgaatatacatgcataccaccatctctgtacccatgatcgtaatgtttgtgttgaaaattattttttaagttaagatttaaaaatacttcaggttaaaaaatgcagtttgtgtctatacaagtcaattctaatctacaacttagtggttcttcgttaagatatgaaaaacccactgaagatgtaatacctctagggatagtgttgtaatccacagtcaagtatgatcrctttactccacaacaatagcattatcaagacctaaacaagaagctttattaatagtataatgagagttagaaatatcttttcat

SEQ ID NO: 825329 - DNA, 592 bp, Homo sapiens
ggtgagggggaggcttttcacacccaggagtgagactgtggatgccaatgtgtccataccraatgtgaacttgccccatggagagaagcagatgcccaggtctcccaccatgcttggccacggcaccatggacattttggactggaaaatcattgtggggatgtcctgtgcattgcaggatgctgagcagtatccttcgtgtctacgctttagatgccagtagtaccccctttcccagtcgagacaaccaaatgtctctaggcatgtccagacgtcccgaggggctcagtagcattggttgcaaaccactgaatcagggaaagggcagaactagggggaacaggatgttctcccaggtccgggcttctcaaagtgtagttctggagggcagcagctctggcagaagtgtgatttctcaggttctgtcctcgacctgggtcagaatccctgggggtggggccttggggggtctgttgccaacacaagcccaagtgtggccggcaagcactgtccttgaccacgcaagaaaattgctgggatctcggaggactaggcacgagagatgttactaacgtgaaacctgaagagggat

SEQ ID NO: 825330 - DNA, 569 bp, Homo sapiens
ctggccctgcctctcccactcttactgcacctcggagctccttaactgctcctaccctgcgtcctgtttccttttctcagctggagcctcctccctaccacctgaggcccgcagttcctgctaagagcaagactaagcttccctcctgccttcactcactcattcctaattccctccgcctcatcttcagtgccacctccactggaccttccatgaccattcccccaccacaggacagtcattctctttatgaatgcacagttcatagcatgtgattcatagcacaatttacatgaaataataaccaactgtccattggttgctttatgtctctctacgtgctccgtgtgtacaactctgcccccagccctgagcactgggcctggatgtagcagggaccaccatgttattggtgaatgagtgacagaaacaaacgatggcagtgaaygaagccgaaagtagttctctaatttgcacagtaatctcagccaccttgaaaggtcgtttttagtgtcacttcattgtgaatttgtcagacgtggagcacatccatccaaacggaaagacga

SEQ ID NO: 825331 - DNA, 547 bp, Homo sapiens
ttggcaagaacggatctttggcaagatcacttaaggtgagctactctagcagcatcctgtttgacatttgtatccataacttgaataaaaatatagaaggcaaagaagagtgctgggcaagatgtgttgggtgttagatctgcaatactcttcatagtgtaatggctaaatgtaaagtcttacgtctcggttcaagaaagcacgttgctatatgaaatttcagaaaaaagttttgttgcggggggtgggatattgatcatttgaacatatgccagttgtttctcctgccctaggggaggttggcacggcaaccttcccactccgtaggtgggtagccttgctgatggggcacgtcgtcaccaagggacctgattgttgtcatggttttgtcttgtcctcctccctggtgaaagtctactgcagttttattctcagctctggarggagagggaacgagcctctgcctgtgtgtcctgacccctcttgccttgtttttgatctgctcaggccgggtgcagtggctcacgcctgtaatcccagcactttg

SEQ ID NO: 825332 - DNA, 413 bp, Homo sapiens
aaggcccactgtaaccactacctggctactgcctatgttctctcaatgccatagagatctacaatcagtaggttgtgattgttttttaaaagccatttatattttcttttatatggaatgatgattcaagtcctgtgttagtacgtataatggtctttttcttactgactgtaaaataatatttttatatattttttaaatatccctttcctctatgtactacaaatattctcctctgtttgtagtttgtattttagtacttttgtgttttcttttttgttcatktaagtctttcttccttgtagaactagtttggacatttttttccgcaggttactatttgtacccatcccatttattaaacaatacaacttttcttatttgaatacaacctgaaccattaactatacttt

SEQ ID NO: 825333 - DNA, 532 bp, Homo sapiens
ctagcagcagatagtgatgggaagttattccaagaggtggctctagtgctcatgcagttcattcccctaaaacttctatgggaaaaaaatgcaggccccctcaaatgtaaaataagactcatgtagcctctaacataagactgaagacatctggggcatagtcacaatgttatttattctcataattggtaaaagtgtcatttgcattttagcaattatgttatagattgatgattaatcagctagaatgacaggtgaaaaattatgtagttcatattttactagtgatcagcattatttaaattttaggaaaaagatgttatacaatgtggagaataactcagtgcaggggtggagaataatgagaactactgtctgcttattgaataatactgttaaacaagtgatacgaaagatgatttttgtaattttttaaaactaaaatwattagcaagctggagagttagctcagtgtctaattcatagtaagtgtctaaaatttttgttattaatgagaaataaaacaacaaaa

SEQ ID NO: 825334 - DNA, 626 bp, Homo sapiens
ggtttttttttatgttatttttcctataaagttgattttatctcaatatttagcaatgacaaattctatgaatctcataaaaacatttataaggagaacatttgagwgaccttacacaattttacctaaatatacagatatggtacgcaaggttttgcacacacacatttagactcttctctgtattcaccatgagttatttaaggtatctcttgagagactattttgacaacaaggttttaagctagcagataagcttccacattagtcctgtccagacacaaagcccccgttaaaagagcaagagaaatagcagtacttacagcacttccaggtcccggagagccctgaatgccccatcttcaatacagctgatctggttgtaatccagttgcctgttaaaaagattagaagaatatatgtagaagggatggacagtagctggggtaggtgatgagaagtttcctgaagggtctatgataccctggacacactcactgaagtgccctcacaaacacactcatctgcttacgaatgtcataagccattctcgcctctatgccgccactgaaatctttttgttctgaactgtctgtgcaaatagcagcccttggaaagctccagta

SEQ ID NO: 825335 - DNA, 581 bp, Homo sapiens
gcataactctattttgtacaagaatatattagaggctaccttcattcatctttctagccaaccatacgattaagtacagaaactaatttatctctcaaaattcagtaagcacttcatactaataacaatgrtatttatttgatgcttatttattgggtattatttattcccaatttgttttctaagtacttagtttttaacgtatttaattcttatagcaactaaataaagtagtttgagagcctccattttcaatctctgtaaactatcaatagattcaaggagtctgtcttacctaatttactacttcattgacttacgggcagaaggattcagtggttatcaagtattaaagtagaaaggatagctttttctgaacaatgcaagaaaagctgaaaaggcagaatatgatggtatttacacttaacagccttaacataggaccttgcacatactaagtgctaaggtgtttgttggagcacttacagattctatgcccatgcatggtttgcctttactgactttatttataagaagaggacctttaatgttagtgttctaacaattcagggaaaaaacta

SEQ ID NO: 825336 - DNA, 636 bp, Homo sapiens
attccagagcctcagtttactgatgaagaactgaggctgagaacaataaaatagttctgcaaccagtcaactctcgtatattgcatacaacygtagaaggccatcctagacaataatacaactaaccaaatgtcattttccccaataagaacagttacttcctgaggtctctttatgctgattcactcttcactccagagtattatcaactctgatgatccagctttttactgttccacctagaaggtgacccataacatttatcatccaaatcagggtagttatgtgagtgcccaggcacactattgacaattacgttgggacaacgggtataaaccaggacggttgtacaagcaagaatgaatgggcacattaccactccatgaaatttttcagaagaaacacattcacagatattcagtaagtagcattttatctccccttcaagagtgagtctgaaaaatcattcccatttagaagagtgggtatcacttttggcatgctctttcacaagttgtaatagtgttactgtagaacttggtcatttcttgtcctgttgtgtcccatatataaccgacagacaaaatcaggaagaggtgatctaagaaacagataaaactctatacctgtaatccc

SEQ ID NO: 825337 - DNA, 646 bp, Homo sapiens
taaagcaaatatattaaactaattttcattttggtaaagaaataatattttgagaaatatkaatgtaacttgggtttgaaaaatgctgtatcaaatgtgagatttttttaatctcatggacagtaaaatgctattctctgaaacagatgaaaatatgcttttttattaaataatatatttcaaacgtaacatatttattatgaaattgtgctatgatcttaaatatattctaaatttaggtaaattaaaaattattctagtaattggacaaactatttctgtcgaattgtgatttgtgtgcatgcaaatggagataaatttgactaaactccataatgtaacattgtcaattttttctaaaacgtgtaacctcttcaggttctgagtctaggaactaggcaattgcctctttgcttacaaataaaatatttgggatatgtaaacagtggttaactgtcacttgtgaattattattgttcaaatggtaggctcttaggagtaaattcaaaattattttaacaatatatttttcatcaaaaatatgtctttaatgttgatgtttcattctttattactacagaaatggtaccttagtttattaaagtttttctaccacatgaagcatacacagtatttagtatatggt

SEQ ID NO: 825338 - DNA, 576 bp, Homo sapiens
ttgaacttggccctgcgtagggcgtcaatcacatgctccttgttctgcagcttggtgaggatcgacatgataacttggccaatacaaaycccggccacagtgccctggggctttccaaaggcacctcgcatgcctatttgagcctgtcagccccagcacaggacaacgtcttgttgatgcggatgacgtggaaggagtggagccacacccggatatggaagccatctttgccacagctttttaccatgtacttattggcacaaattcgggcagcctccagggcttcagaggacagctgctcaaattcatctgacaccatgtggccataaagcggaaactcatccacttttaccttcttccgccccaggtcaaagatgcgaatcttgacatcaaggacaccttggcagaagcgagactttgggtacggcttgttcttacaataccggtaacaacccgcggggcggcggccatggcgacaccaggatcttcagtagtgctctcaagggaaagagagcatgaattcttattaatataataatttatgtactttacctcaatttatttttattttttatg

SEQ ID NO: 825339 - DNA, 662 bp, Homo sapiens
tagatttttctttgagatgaaccttttttttgtaatttwttttttattttttattttttttcagtagagatgggattttgctctgttggccaggctggtctcaaactcctgacctcaagtgatccacccgcctcagcctcccaaagtgccgggattacaggcgtgagccacctagcttggccaaggtgaacctttttgataaatgaggctcactaatatttctaggatttacttttcactaacttgaactaaagaaagtataagacctgcataaagttgagcatacctctataatgtcccattttaaaaagcaatttgtttttaatgacttttatttgttaaaagcagttatttcaaaaaattatttttattatttatcatgtcatttggactgaaaatactataccatatttcagtgttagggcacacctatccctctttatcccagacgtcaattctaccatataacaagtatgtaaaaaagaaaacataaaagtgatgacagactccctaatcaacctatttattggttctaagcccaagcctgcagttcatttaaatagtgaaaatagattacttaattgtcttagaaaatatgtcttccatgacaagaattttaggaatgagaaaataactatttttggatgttttaacacaaattc

SEQ ID NO: 825340 - DNA, 621 bp, Homo sapiens
tgtatcacctcttacattcatgttaactctacattctgccaaagtgatttggctgaatttacccaaagagcaaagtggacatttcaaatcctgattcctagaaaattatagactacatcctgtaaccacctttgaagaaccagcatgtactttaccccaacgtgacaaaattgttttaaataaaaagaggtaatttgactaagattggtatgatctgagacccatggtttctacatcttattcaaaaagcagatccagcatgtggtcatcagtaggtattgagtcataaagctcctggaagaaaatcttaagtttcatcaagaatgccaagaagtcctgggtgtctccaagaatgatagctgttactataataacataattactactggaaaattagcaaagcccaataaaatatggcatgcaaaaaaatatttaccctggaaatagaagtgacctaaatcagtcgtttattccagccacctgcttttagatagtacttaaaaaaaaaactytcaggatggtcatattgtttaaagttctctaggtggaagagtactttacagtaataaattaataaataagacaagttaatgcttttaaactactattatttgttgagca

SEQ ID NO: 825341 - DNA, 579 bp, Homo sapiens
accaacagcaaccaagctgagaatcacatcaagaactcaatcccttttacaatacctgtaaaaataaaataaaatacttaggaatatacctaaccaaggatgtgaaagacctctacaaggaaaactacaaaacactgcagaaagaaatcatagatggcacaaacaaatggaaaacacatcccatgctcataattgggtagaaccaatattgtgagaaataaccatactgccaaaagcaatctacagattcaatgcaattcccataaaaataacaccatcattcttcacagaattagaaaaaaaaatcctaaaattcatatggaacccaaaaaagagcctgcatagccaaagcaagactaagaaaaaagaacaaatctggagggatcacattacctgacttcaaactatactctatggccatagtcaccaaaacagcatggcactgaaaaataggcacatagaccaatggaacagaatacaaarcccagaaataaagccaaatacttacagtcaactgattttcagcaaaggaaacaaaaacataaaatggggaaaggacacccttttcaacagatggtc

SEQ ID NO: 825342 - DNA, 600 bp, Homo sapiens
agtgaaataactcatgaatggaaaactaaacatcgtatgttctcacttataagtgagagctaagctatgaagacacaaaggcataaaaatgwtacaatggactttggggactcagagggaagggtggaagagggggtgaaggataaaagaatacacgttgggtacagtgtacactgcttgggtgatgggtgcaccaaaatctcagaaatcaccactaaagaacttatccgtgtaaccaaaccccacctgttacccaaatacctattaaaatattttttaattagaagaggagagaacacttttcaattcattctaaaatgctaacattatcctaaggccaaaacaagataaagacattacaagaaaataaaactaccgacaagtatccttaataaacatagatgcaaaagtgctttacaaaattttggcaaattgaattcaacaatatataaaaaggataatatgaataacagctgggagatatcctaggaatgcagcattcatttgacattcaaagatcaatgaatttcaatatattaacaaactaaaaaagaaaaataatatgaccgtatcaattcaggcagaaaacacatttgacaa

SEQ ID NO: 825343 - DNA, 605 bp, Homo sapiens
gaaactccatctctactaaaaatacaaaaaattagccaggcatggtggtgggtgcctataatcccagctacttgggaggctaaggcaggagaatcccttgaaactgggaggtggaggttgccrtgagccgagatggtgccactgcactcagccctggcaacagtgcgagactccgaattgaaaaaaaaaaaaaagctattgtttaatttctagttctttccatcactcactattttctgctttattggatagtagggtgtttctggctttgtagaccttaattttttccattgcccctactcaactaaatttattcaatcaaaataatttatcttaaatctcacccactccttggatttaaaaggcccctaaactaatccattcacatgggtacactagcagtatttctacctccaaccataaggctgaatcatggtggttttctattacgctgttgagctgtgtctatgatgtgtttagagaattatgagaaaattcttttttcaagttctccaagttattaatgagaaaaaaagatgagctatttcttaaattaaatatttaattgttgcacaattctagcaaatgaattagtcatactcatg

SEQ ID NO: 825344 - DNA, 598 bp, Homo sapiens
tacctatccactggctagatggctaccacagcccagggaaccctgcctgcttgccatttggaagagccatcaktaaacaagccatgtcatactgtcagtaggcacgtctcagtcttgggccccaggtatccataggaggatccaaaacatcccctacatgttgtttagtcccttctggcaagttagccacttgctcatggagcctactggtctcttggctgctaagcccaatcttttgaatgtatcctatcatttgatcattgagctgtattgagcctgtccaatttcattggcaaggtttgtgagtgcccaggtgagaatggacagttcaagttgcagtgtcttttgtggcagttcagtcacaagatgctcagtctcctttagtgtccaatggcaagcaaggagttgtcattcaaaagaggtgtatctgcaggcggcctcaggcaacttacatgtccaaactccaagaggcttgcacaccccattggcaattttctgttgccacagactccaatccacatgcagagtggttatgcacacatgtcatttcatcagggtagcaggctttaaagcttttaaagtcagtgcctgggccaca

SEQ ID NO: 825345 - DNA, 602 bp, Homo sapiens
ttccagatagctgaacatgtagagatttggggagggtggctccacgtcatttctcacatctcttgccctatgcatctcttcatctgtatcgtttgtaatatcatttatagtaagccagtaaatgtaagtaaagtgtttccctgagttctgtgagctgcttcagcaaattaatccaacccataaaaggggttgtgggaaccccagtttatagccagtggatcagaacatagacataataacctgagctgtgcaattagcattggaaacggggctctgtgagactgaactttcaaccagggggatataatgctgtcttcaggtacatagtgtcagaattgaattgaattagaggacacccaactggtgtccactgcagaattaattgcttgcttgccggtagagagaaaaccccagacatctggtcagacatgtgttttgagtgtatagtagaagaaactgaatgttttttcctactcagccccaaagttcatgtgttggaaacttaatccccagtgcaacagtgttaggaagtggggcctaatacaaagtaattgggtcatgagggmcctgctttcaagaatggatgaatgtcattattatgg

SEQ ID NO: 825346 - DNA, 459 bp, Homo sapiens
gaccaataagaagttctgaaataatagtaataaatagcctagcaaccaaaaaaagcccaggaccagacagacatatagctgacttctaccgcaggtacaaagaggagctggtaccatttcttcagaaactattccaaacaattgagaagtagggacatctccctaactcattgtatgaggccagcatcatcctgataccaaaacctggcagagatacaacaaaaaaagaaaacttcttcttcttttttttttttttttttttttttgtggccaacatccctgatgaacactgatgcaaaaatcctcaataaaatactggcaaacagaattcagtagatgctggagaggatgtggagaaataggaatgcttctacactgttggtgggagtgtaaatttgttcaaccattgtagaagacagtgtggygattcctctagaatctagaggaatctaaagtttc

SEQ ID NO: 825347 - DNA, 566 bp, Homo sapiens
ggctcaaagatggaaacgacatagcagcaagtagttttgtttcactattaaaacaaaaaycatgaggagaggcgaagtgaatagtatattttctattaacatagtatgaagtaacttaaatagcttaaaaaacaatgacatgaggtattagaatggagactgggtctgaaaggacatggggaaattataaaactgccaggctggaaaaacaatgatatataaaaagtgcttagtattgctttatttcctaaatatacttgtgttttaatggacaataaaggcatttcttacagtaatcaatgtatttaacggaatgctttttttacttgaaaatgcagatgttgtacttctgaccactcagcttcaattggcctcatggtaggttgtaatatcattaaaaaaggaactggttgtaaaactaagtcctcatctcagtggaggaatttatggctccaataaaagaaagaaccccaaggttcactgactggactctactgaagaaagggaaagtaatgcttaggggtttttctgtactatatgactaggtcatggtaacaaaggtgggt

SEQ ID NO: 825348 - DNA, 566 bp, Homo sapiens
ggctcaaagatggaaacgacatagcagcaagtagttttgtttcactattaaaacaaaaatcatgaggagaggcgaagtkaatagtatattttctattaacatagtatgaagtaacttaaatagcttaaaaaacaatgacatgaggtattagaatggagactgggtctgaaaggacatggggaaattataaaactgccaggctggaaaaacaatgatatataaaaagtgcttagtattgctttatttcctaaatatacttgtgttttaatggacaataaaggcatttcttacagtaatcaatgtatttaacggaatgctttttttacttgaaaatgcagatgttgtacttctgaccactcagcttcaattggcctcatggtaggttgtaatatcattaaaaaaggaactggttgtaaaactaagtcctcatctcagtggaggaatttatggctccaataaaagaaagaaccccaaggttcactgactggactctactgaagaaagggaaagtaatgcttaggggtttttctgtactatatgactaggtcatggtaacaaaggtgggt

SEQ ID NO: 825349 - DNA, 566 bp, Homo sapiens
ggctcaaagatggaaacgacatagcagcaagtagttttgtttcactattaaaacaaaaatcatgaggagaggcgaagtgaatagtatattttctattaacatrgtatgaagtaacttaaatagcttaaaaaacaatgacatgaggtattagaatggagactgggtctgaaaggacatggggaaattataaaactgccaggctggaaaaacaatgatatataaaaagtgcttagtattgctttatttcctaaatatacttgtgttttaatggacaataaaggcatttcttacagtaatcaatgtatttaacggaatgctttttttacttgaaaatgcagatgttgtacttctgaccactcagcttcaattggcctcatggtaggttgtaatatcattaaaaaaggaactggttgtaaaactaagtcctcatctcagtggaggaatttatggctccaataaaagaaagaaccccaaggttcactgactggactctactgaagaaagggaaagtaatgcttaggggtttttctgtactatatgactaggtcatggtaacaaaggtgggt

SEQ ID NO: 825350 - DNA, 631 bp, Homo sapiens
gattatacaggatcagagtcagctaagaaagctagaccaaaggcagaataaaaaatgtgagataatagacacattatctgacttaaaacaacaacaaattttttttttggtcttattcaaaaggcccatgaacagcagggaaaagtagaataacagaaaaaaatgttttgttttctgtaaaattgagaaacaacttgaacatgattttgtctgagaagctatgttaatataataatgtaaaagtactcagtcttcaatttcaccaaagccagttaaagagatagtgtatttatcccaatcagaattcatagcagtatggagccataaaaaatattctggaagatgagtcctgggaagctgtttactgttgtctttctgaattgtcactataacaaacaatctctgtgtttagactctatctcaaactttctcagtcttacattgttttgtgtgtttgaattgcttaatttttaattatacaataaatattccaaagcatgtttgttgagacagaaatccaaggaatagaaaaatccttaaaacattcctctctacccactccctagtcctccaatcctaacaytctccccaaaggtaaacacattgatgagcctagagtgttttctttcag

SEQ ID NO: 825351 - DNA, 529 bp, Homo sapiens
aaaaaggacagggtaaactgagcaatggtagtttgtaacccatattctgaaaggttctataggctgctcagtgggatttgacttcatattgcgggatctggccagcagcccrcaatgcaatggggctttttctttgttcccaggcagattggcaggtcaagaaataatagacacacacaagatagtgaaggctgggtccaggggggtcaccgccttctggttccgtgatgccgccaatgcactggatataccagcatttattattaagtttagggagggcaggggtaggttagtgaaggatttagggtcgtttgattatgaggtgagatggtcacatggggatgaagtaattctttaacataacatctgtatgcagaagtacagtatacagagataagaatttacagtatagtgtgtgcatcagtaatttctaacagagccttaaaacagaaacacagtctttccataacctatgattagccagatattaatcagcagttaacagttgcagcaaaagctggttacaaac

SEQ ID NO: 825352 - DNA, 356 bp, Homo sapiens
tccacatcataaataacatatataaataacctaaggagtatgggtaataggaacaggtagtaaaataattagaaattgatgagtttttgagtatttattaacttagttgttaacatgttttatttacttggaaacgtatataattaatttaatttatttaattgctgtgcttaaaaagtgatgcataaaattcctgaaaacttaagaatctgttttcttgagctgataataggtgtgggttcctgcacatcgttgccacagctgtatctctttcttgaaaccctctctactctctgcatctcctactttaatctggtttcttcttccttctttgratttcctttatttattctcag

SEQ ID NO: 825353 - DNA, 543 bp, Homo sapiens
taaattttaattaattgaaattaaattacactaaaagtttaattctttagtctcactagccagatttcaagtgctcaataaccacatgtggccaccagttacagtattgaacagttcattttcttcattgygaagagttttactggaaagcactggtttagaatatagaaatctatcaagtcacagcaatatacaactgagttgagtcttcgtgagtggaaaagacagaattttgatgtattcagaagttcagttcatgctattcaaaaggaggtagcataaacaaaattgaaaaaaaatccagaaggagtgaagtatatagaggaaagaggaactgcatttactcatctataatttattcatttatttacttttactgatgagacaataaagggtaaaagtgggggaaagttacatatgtaagttaaaattgcatcattaataaatctgaatgacaaaacaattgcatagcagcatcacaattataactgtttcgcaggcaagcatgtcttgaaatatggtatgcaatatgattttaagtca

SEQ ID NO: 825354 - DNA, 504 bp, Homo sapiens
gtggtcccttaaatttaaccatcccttactctgtcacctatgttggagtgcagtggctcaatcatagctcactgcagcctactgggtagctgggactataggcacgcattaccacactctgctaattttttcactttttgaagagacacggtctccctatattgcccagcctggtctccaactcccggactcaagcgatcctcccgcctcagcctctcaaagtgctgggattacaggggtgatctaccacccagccccaccttcttgaggagttaggtttcaccttggagatcagtgcttcttatctataaaatttccctggagagctatgatgaggtttggaaacctggacttaaaacaatttttttcccccagatattcttaggatagctcgattcactgtcataacaatgtttggagactatacatatatataggtacgtatacattstcttctcaaaagaagcttcatgacttccatcaatttctgggtaacctctgacc

SEQ ID NO: 825355 - DNA, 565 bp, Homo sapiens
tgggaacagccagcactttcagaatagtttctctaattatctctatcactgttgaaatgctatttaatttttttttttaccgttacatatctctttaccagattggaagataagtcttaataattggtccattaaaattaggtggaagtactttaaaaaaaatcatggtaatagtagcctaatctgtcaacaacaataatagtatttaagttaaaaaggaaatttagatagttgaaaactataaaatataaattcacatttatgcttaaatgtaatgctgtagcttgtattctggcttgaaagaaaataatggttaatcaactcattattttgttttcaatttaacaccatttatttggcacctagtatataatttgatcagagtagaagtagtttcataatagttggcattaaaagtgagacttccacagacattgtatatatgcaaggacagacctgctttttttcctttttcttttttgttccccctctgttcctcacaataagtttctaatattttctgatgtgcgaatggcygtttgcccagggtatgcttagtgttctc

SEQ ID NO: 825356 - DNA, 629 bp, Homo sapiens
tatttcacaaatgctgtttttctcaaacttaagcccctgacacccagagatagtgtcacagagaggagggctggaagagcagtaggagaagccctgccagaacccaagcattaaagttctagataaagacaccctctttagaaagaaacatgtcagacctgtgggcacagtttcccctggtaaatatgtgaatcaaaaatcaatatacagtgtgttgtgtttgaccatgcatggaaaatgaatcctgactttagggggaaacccactgaatcaaaagtttgacccttagagaatctgttgagtcattgtatggaaaaatactattaagtttgcttctttggttccaaagcattctgaaatttttgagcaacatgaatatgtaaaatatcactattttcaatattcctgtctttttttttgttttactatttcttatgtgatgatcaaatttagccattgtactaatagtaaaccatgtgccaggcactggattaacatcagtaaataaggagaaataaggatgaaaaatgtgtacggagttcaggtwtaatcctgtgtttataaaagtgtgatctatggaccatgtgcatccaaatcacctgaaaaaatattaaaatgtagattcctgg

SEQ ID NO: 825357 - DNA, 365 bp, Homo sapiens
tgttcaaagagatgtcttctttacctgccatcctctgctcagcccgttgtttccaccacacccgtgaggttatacctgccaaggtccctgttaaaatccggtggtcatctctttgtttccatcttaccagacctcagtggtattccattctcttgaccacttcttcctattagaaacactttcctgattttcctcctacctctctgcctattctttctcattctcctttgcctactttcctctgtttgactggcctctgartgttggaggtctctatctcttctctttatctgttcagtctccctaggtgagttcatttagtcctttgaatttaaatgtcatctatacattaatgactcccaaat

SEQ ID NO: 825358 - DNA, 629 bp, Homo sapiens
ctttcttcaaatagtagatttttatagaattttgaagtagacaaaataagtcaatttatgtttagatttaaaaaaaatgtgaaagcttttctatattctcctccccgtgccagataggtgcttggcacagagtacttaataactatttaataaatgacagaatttcttttcctaaaatttttaggacatatgcaaggaaatttctcttgcatctaggtttactgatgtatatgaggaagagttacatctgcttcagtgaaatacaaaattaaaccaggtgatctttctgaaaaattattcttatggtgacatatcagaaatcttatcaacagctatagtttattctgttggaattttcaaaatacactgtgccttaacttagaaacactccaatgaacttgtattcattagtgttttgttgagttaaagaaaaaatatctgtacaaagtggacacattgtttaattttgttttgcattttactagattgcagtgcaaggccaataaattaaacytaggcagttctcttgctaattacacacaacttatcttgagtatcagatattcaaatccattttatgaatatggtagagagaataacaactgtaaaacaaagcagtgtgcatgtaa

SEQ ID NO: 825359 - DNA, 646 bp, Homo sapiens
ataaagaagagaaaactcagccataatgtgcccatggactattgttccactgagtttagaatgggtaaaataacttttgaccatgttcacagcctacttgaaaagaaactttgtgaaacaataaatcttgtatttctggttttcaaaatttaataacatgatttcaaaaatcatacttctgttaaaactttttacatttaaaaacacaggaaaaagaagaatatgattatgctttccaacatataaatgtagttatataaaaacaatcattacatctcatcagaaataatttcgctcccatttgttcaatagtattaagagctacataaattcctatcaagaaatggagaactgctatattgtaacttgtattttaagtaatgtttttaaaataatgaaaatactaccatgcaaatactggatttacttcttgactcacctcgcccccattaacatattccatcacaaaacacaaacggtcttttgtctggaaggaatatttcaaggacttgaaataaaaaaaagaaaaaatrttacattataatcctgtattcttataattataatagtactaaaaatagaacacatagaaatagtaagcatgaaagatgaaaagaattgttattgtttaagagtttatttacta

SEQ ID NO: 825360 - DNA, 595 bp, Homo sapiens
atttagagatcctgtggggagtttccctaaaaaccaaggtggaatgaccgtggtttgatcatggtctatgtattgcaaggcccatctttccttctaaaggcatggacaactgtatagcctctgcaaaaaacgygtcctgaaacattacaatgcagaaaaacctgacgattgccctcctctttctactcttccctttatgaaaagtacttctgtactctttacatactgataactaattaaatattgagtgtagaaagtctaggtgtatgtgatacgaccagtaaccattagacataaaaccaaatgaacgataattctttaggccttaggatagcatgcacttaatccacaggcatcttcatagtcactctggaaacaggcactgcactggtttagctatcacaggagttgtctcattttttttctcctttcttcacatcctgaagactctcccctgtatatgaaggtggaagcttgtgaaaaggtctgacatgggaagtgtatacaaggtctcattacaggctttgcaatggttttccctaacaggatattaaagccttcattattttaggacctctacaaagcaagttatgat

SEQ ID NO: 825361 - DNA, 618 bp, Homo sapiens
taagctatactcttgtttgatgttaacattaactcttctttgatcttcggtttctttgtcagacacctttgattgcaacccaacaaccatccccagtcctttatcsctatctttttatactttaaaggctaattttcccaaactcttttgcatgtatatgtggccaggagatccaggtctgcctaatgaaagtgaaagtattcttttcattgattaagcaaacaaccacagctttttgcccctgttcctttcttcatgtttaaaacgatggtttgatgcttggaattacagcagctatattgtgaccatgagccaacatacccaaggttgctagatttagcaaataaatatatgtaatggccaactaaagtttcagttttagataaaatatgaataaatttatagtatatgtcccaaatattttataacatatactaaaaagagtataattgtatagataatacacacaaatatatattatatatataaactaaagagcttaagttagagtcaacttaaacaccaagttccacaaactttcaaagccctgagttttgttgttgctttattaagttgtgaatggataaaaagaatgtaaaatatgtatatggcataaag

SEQ ID NO: 825362 - DNA, 503 bp, Homo sapiens
tgtcttgttatagcagcccaagccaactaagacagaagcacagtgcattgcaggactcggaagctaacctggtgggggccctcagtccaggttcttgccaggaccctctatttcctccaggcctggcttctcaccagccaagttggcagcaactacagcaacaaatagcctgtggctaaaggagcactgagctgggaagggccggctgtgtgaggaagaaccaaagaccaagagggacagaagaatgtgtgcagtgtctacttttagggtgatgaaggtatagttacaaattgtgcaagtcctgaggttagacttctttctccagggtccagtccttccctctgagaagaggcctgtttgcaaaaggccattggccaytggacattatatctgtgaagtcagaaagtaaaacagcatttgctactaaagagaggtactttgtgacctaagtgaactcaaggcaatcagtttttctcataaagcccaactcctgtgctttccag

SEQ ID NO: 825363 - DNA, 550 bp, Homo sapiens
gccatttcaaaaccatgaaagaaggaagtaaagacaccacagaaaagtctgggggtcttggcccatgccctaatgggtggtcggggatgggagccagtctaggggctttccagcaacacagagsagtggcctcggccagatgccttgaattgccccaggaccttatcccggtcccacgagactgctagacctccgtgaagggaaacaaagctaatattcctttctcccgaaagaaagagaagtggcagagtcacatcttgtcctctgtagctgtcccatttgcctttaactggccactcagggaggttcggtgcatcacctgtcttcaaggaaagtctgaggacaagaagtcttgggaaaaaagtgaagagacagatctgcatttactcacccttctgatgaatcccaggcaagcccccagatgatgcaggagtttttcttgactccttcgtcggacttgtgatgggggtgctccgtttactggcccccccttgtgctcaacctcttgcaggagggagtgcttgagccagcgagtgtgggatcccgctgg

SEQ ID NO: 825364 - DNA, 618 bp, Homo sapiens
taaataaataaataaataaataaaattcaagacttgggtgttaggcgtgctcactgctattggggtgttgctgctctcaggcacttttagtggatagtttctcttgatttaatgtatgtgcatgtatataagtacatacatatttacattggttatatccacctgtatctattgaaaaccaggatttcacgccaatacctccaattccaatccaacaccatagggcttacttattcattcctttacatatttgtacctctcttccgcacgagaaacctggcttccattatcttcactttagccctttgattaacccctctgcatataaccagtctgccatgccttcccttgcgtaggtgtcccccttgctccgagggtactgacaccccttgctgggcccctccacaaagacctccttcttacccttgccccagcgtcccatctggcactttccggcagggatatcctctgcctcctgctggggctttgacgcacctcactggcctgcccccgcstgtgaacgctgttcttgttgggctctgcaccctgctctgggctatcagggctctttcgtctcctggtgaagatgcctatcttgttctgtgtagctttaggact

SEQ ID NO: 825365 - DNA, 654 bp, Homo sapiens
tctgtaagccaggtggctcaattctgagaagttcctgcactgtgtatcttgtgtccagactgtcagagttctaatccatcttgcaccaaaaaagtaacaattggtggatgtattattataaccgattgctctaaagaaaacaaaatgtgttagtgcacactatgaaattctcaaaatggcagaccctgcactccagatggaaaacagagttcttagagtgacttacatttaaagccaggtattctatattaccaggatggtgccaagaagactgacttccctagattcccaatgggaggacatccctgctcctgacctgcatgttctattttggcagcagcctcactagttggcccatgagcctcccctgcttggaaggtgcttttaaatcaccacatatgtgcacccttcaattagtccccagaccccaggatttcagagttgaaagggccttacttcaatacaagcccctcttttgtagatgagaaaactgaggcttagagaaaaaaaaatcactcgagcctagactaaaacccagatcccctcacttcctgcttgatacattcgtctctcacccactcagaagctcagrgccccacggatgacctgaggtccaaaaggccttccagaagcttctgttctagcatgcaagag

SEQ ID NO: 825366 - DNA, 545 bp, Homo sapiens
tgccatgggcacatacttttctttcaatggtcctgggaagtggtttgttaaactattgttctcgattaaaaactcgtgtgtttgttcagtccaatatgggtcaccgctwtgagtgaaagatcccttgacatggcaaaacctcgacttgtgacaagccagtgccaagtatgtcttaaccagatgcaggccagggtttgattagcagccactgaattccatgtaaaatcagataatgatggtttttcgcctttctgttgagcaaatatcctcagcttttaatcaagtctatacatgaaaactcctctataaataactttatgcagtacaatggttttaaaactatggttcatctcaactttcctgacctttgactgcttaatctgagaagaacctgtgcaataccaactaaaaataaaggaactacactatttattttggcagattccataaagatataatagagggacatgtggtgagtggaaattctctaccacacacagagagaaaagaaaggaaaggctctggagcccatttttgttctccca

SEQ ID NO: 825367 - DNA, 610 bp, Homo sapiens
caacagaatattccaatccctgtaagttatagttcttggtttccagctttaagaagcagagtgtcgggcccggagcgctgactcacgcctgtaatcccggcactttgggaggccgaggcgggcggatcacgaggtcagcagatcgcgaccatcctggctaacacggtgaaaccccgtctttactaaaaaattttttaaaaattagccgggtgtggtggcgggcacctgtagtcccagctactcgggaggctggggcaggagaatggcgtgaacccgtgaggcagagattgcagtgagcagagagagcgccactgcacttcagcctgggtgacagagcgagactccgtctcaaaacaaacaaaacaaaacaaaacaaaacaaaaaccaaccaaacaaaaaagaaccagagtgtcagaataaacacagaatctctactttcaaaaattacatagttattaataaatgcggtatcacttaccagtcagtttacatcttagcatccatctccaagcaaaatggacactgaaaaaataaaaatataaaaactgagtatttcatagtaaacttagacatcrtattatatttttatagctacgttaactcagctatg

SEQ ID NO: 825368 - DNA, 606 bp, Homo sapiens
atagaactttctgtggaagatgggctgctttataaactggactcctaatatggtagccactatscacatgtagctaatgggacacttaaaaatgtaactagtataattgaggagttgtatttttaatataatttcaattaacttaaatttaaattaaaaaaaaattccatggggctatggactactgtactagacagtacagatttcttttttttttttttttgagatggagtttcgctcttgttgcccaggctggagtgcagtagtgcgatctcggctcactgcaacttccacctcccaggtccaagcaattctcctacctcagcctcccaagtagctggggttacaggtatgtgccaccacgcctggctaattttttgtatttttagtaacgatgagggttcttcatgttggtcaggctgttctcgaactcctgacctcaggtgatccgcccgcctcggcctcccgaagtagtgggattacaggcgtgagccactgtgcccggccgacagtacagatttaaaggaaaaaaggaaatacttttcacataaaaagtagtaagtaaattttatttaagtattgaaatgcagagctcttgcagaaaag

SEQ ID NO: 825369 - DNA, 593 bp, Homo sapiens
cagtgtatatgttatattgaatttaccattttaataaccattctcttgataaaawattaggctcgtaatagtcaaaatcttgtatatttagggactattctatagagttttggtttaactacttatatcaattactacctttaagtcatgaaaaattaaacttaagtaatgtattaactaaaatactctgcaaacctaattttttatgttggtttcttaactaaattaaatcatcccaattgattcacagatttaattagcatcaggaaattaatatgaactcttttaatataatgtataaatttctatatttataaaccagatttttaaagagtcttgaattaatatctaaaactctaagtgtctagtttttttattcagtagttaagaacaaaggtcattacctaaactcgtagttaaatattttcttctgcattaccattttctgataaaaaaaaattaacatcctaaaaggttaattatctccctcttcagagaaagagaagacttatatgtagaaaaacatatcttatcccatataatcaaaagagactttttatagctggtcttaataataatttgggctcttgact

SEQ ID NO: 825370 - DNA, 530 bp, Homo sapiens
ccagcttctaagctataaaaagcttagacgakgtaggaaggtcccctggaagagaattaaagtgctctagttaatggtgccacctaccaagcagcaccaactgccagccacataagcgagccatcttggaagacccagccctgggagccttccagacaactgcagccctagccaacaccacattaaacagaacttccagctgagctcagtcaaccccagtcatgagaaataataaatggctattattgtttaagctactgagtttttgggtagtatattgaagttatataaagacataaatatatagccacaatacttgttaaataaattccaagggtagggaaaactacttttgaaatacccttatgttgtttcctaatatccattctccctatatgcatcctatgaagctctcttttgtagactattttctgaaaattcacatatttcaaagtagtacgccttggttaagtagaaattcatctcaaataaaaaatgtccaagcttgaaacttggccaaaccatttatt

SEQ ID NO: 825371 - DNA, 528 bp, Homo sapiens
atttacttcttttcccacttattctccacagttgtttgtttgccagccctacttgctctcacctctcacccatcctctttcctctggtctcactgctcctgccctcatcagctctctgcctcttggcctgattctcagcctagtttccagcctccttaatgtcctccctcactcaagctgatccacttccaaccctcagagcagaccactttcagacttcttctatagcatcctcttgctggaaaacatcacctgttctccagagcgaatataactaaatcaaggctgtaaatttagaatccttcatctgccccaaactaccacactaacagtacttcctcctgcctccttttaacctttctcatctctggcagttctggatcattcagtgtttcttatgtccrtcttgtgcttttcttctttattacgtgtacttacacaatcactctgacttctgtctttaaccgctatagatgtttcaatttcttatggcactcgattctcctttgtactacacaagtttgacta

SEQ ID NO: 825372 - DNA, 614 bp, Homo sapiens
attagttattaggaaaacaaaaattacactcacgttgaactaccactagacattgattagcaggactaaaatttaaaagactaaccayaccaactattggccaaaatgtggattaattggaactcctacactgatgataggaatgtgaagttttacaaccactttggaaaacagtttagcagttgttaaacataagcctgtcataaaatctagctgttacagaagccaggcgtggtggcacaggcctatggtcccagctactcaggaaactgaggcaggaggatcacttgagcccagcagctcaagaccagcctgggcagcatagcaagaccctgtctcaaaacaaaacttatggagaaaaatctagccattatagatatttacccaagagaaatgaaagcatatgttcctataaaaacttgaacatggatgtacataatagctttattcacaaaaactccactgaaattaacccagatgttcatcagaaatgaatgaatgaacaaaatataccaatacaaaggaataccactcagtagtaaaagcaaaggaacaaactactgacacaacaacgtggattaatctcaaaatcagtatgctgaatgaaggaagcc

SEQ ID NO: 825373 - DNA, 481 bp, Homo sapiens
cataattacaatacaactatcaagatcaggaaaattaacattgatacattactgtaatctaatccttggaccccattcaaatttggtcagttgttctgataatgtcctttctagtaaaacaatccaattcaaaatctcatgtttttctggtcaatgtgtctgttttatgccagcaccatactgttatgatagctttgtattttgaaatcagacagtgtgatagttttagctttgttcttttttcttcagattgctttgactctttaggatcttgctgtcttgtctcttcaattctttcagtctggaatagtttctcagttttccttgactttcatgaccttgatactgggagacaacaaagcagttatwttgtagaatatctttcaatttggtttgtttgatatttcctcatgattagatttgaggtagacatctttgtcagcaatatcacaggggttatttcatgttctccttccatctt

SEQ ID NO: 825374 - DNA, 552 bp, Homo sapiens
cttgctgaatggctttgaccaaaatgctgataatgatatggacaatgaaatcaaggctgaggcgatctcagatggagatgaggaacttgttgggaactggagcaaaggtgactctcattatgttttagcaaagagactggtggcattttgcccctgccctagaaatctgtggaactttgaacttgaaagagatgatttaggatattgggtggataaaatttctaagcagcaaagcattcaagaggtgacttgtgtgctattaaaggcattcagtttcaaaagggaaagagcacaaaagcttggaaaatttgcagcctgaccatgtaatagaaaagaaaatcccattttctgaggagaaattcaagatggctgcagaaatttgcataagtgatgaggagctgaatgttaatcaccaagacaatgaggaaaatgtcatcagggcatgtcagagacctttgctacagcctctcgcatcacagtcccagaggcctaggaggaaaaagtggttttgtggsctgggcccaggatccctgtgctgtgtgcagcctaagg

SEQ ID NO: 825375 - DNA, 583 bp, Homo sapiens
cctaagtattaaaatgcctggctttttccaaaagcagagtctgaattaaaggcttgtgttcagctagcttatttacaaatacgctcccaggcagtaggtttgaggaacaggtggagtaaacggggaaaaaggaaaactcacataaagatgtataattaagttatccactctaaaggcagctagcatttgctcctgtagggccttctaaggagccttgtgaaatatttctgtgagaattggaaaaaactactttaaagttcatatggcaccaaaaaagagcccgcatcaccaagtcaatcctaagccaaaagaacaacgctggaggcatcatgctacctgacttcaaactatactacaaggctacagtaaccaaaacagcatggtactggtaccaaaacagagatatagatcaatggaacagaacagagccctcagaaataacaccgcgtatctacaactatctgatctttcacaaacctgacaaaaacaagcagtggggaaaggattccctatttaataaatsgtgctgggaaaacaggctagccagatgtagaaagctgaaactggatcccttccttacacc

SEQ ID NO: 825376 - DNA, 549 bp, Homo sapiens
gtgttacaaagaaaaaaaccacgtttttcgtttttgtttttgtagtgagcacacccttatctctgtgacactattacctgttataatgacctttcawttctcttatttttaaacataaaaatgcacatataaaaagatcaaatgtcagttcatattagtgcaaacacacatatatatatataaatacatatgcagatacatgactgtgttagtcaaagttctctagagggacagaactaactagtatatataaatatatataaaggggagtttattaagtattaacttacacaataacatggacccacaataggctgtctgcaagctgcggagtaaggagagccagttccagtcccagaactgaagaacctggagtccattgttcgaggacaggaatcatccagcatgggaaaaagatgtaggccagggggctaggccagtctctcttttcacatttttctgcctgcttatattctagccacactggcagctgattagattgtgcccacccagattatgagtgggtctgagacaaagatctggacaaac

SEQ ID NO: 825377 - DNA, 495 bp, Homo sapiens
gaaaagaattaatacatctaaaaacataaacgtgagaactatcatctgcctgaaytgtaactcattcacttatcatctttttgatatattaacattttaaggaaaatatgcatagacaagaaaataaaactgacgaaaagtataatgtatacagctgaaacagaatagtgagttttaagcaaacattaaattcagttatcttaggggcatacaatggcttgtagctatatgggaaggtgcatctcccaagatgagacgggctccttgaaagagattaaatcattctggatctatagcacagtttactccccatcagaaccaagtagaaatactttctgattgaaggcacacataatttatatcttcagaattcccacagattatgtttaacaaaatatgaactatcaataaaaattatgaacacgtgatgtaacaaggcaccctaagagtgtgagcaaaacaacaaagatgacattgggatccacaaacagaaaa

SEQ ID NO: 825378 - DNA, 492 bp, Homo sapiens
acaggcaaccaaggcatggcccccaccccccgggctcaggtcatttcagcaggaaaagtcgccttttccatcaccgacaggagcccccaasaagagcccccaagaaaagccccctggccccacaacatagccgagacggggtgcccaaggaaaacgctcccccgcggctgacacaggcgcccatggcggtgtccccagagctaagccacttccccaagggagccctcccacacaccggacagagaacaccacagaaaagactctttctgaggaaaaaggacactttccagggcgaaattaaagcatccagggaaaaactgcccactcacagtcctgaagtcctgaccttgctggaggagagacggcggcacctcacaaaatggcagtgaagttgtggcgcctccccactggtggcactttctagaaacctgccctctgggagttgtgggaaatgtgccccctagggcacctgggagtgatgtgcatggggag

SEQ ID NO: 825379 - DNA, 484 bp, Homo sapiens
agccaccataatcatgatgcaccattactgcttagaagatagaggggtgcacccaagtaggtatggaggggtctcaggtagcttagagtggcctcagccaagaccgcaagtatacggctacctcagttccacaactttaagaagttagacctgcccgtaacccaaatgtgcttgaaaacaggttctctctgagtccttagttagtcagcagcctggttgataccctaactttgattttgtgagatcctaagcagagaaaccaatccaggctgcatggatttctgatctacagaactgcttatatatttgtgttattttaagctgctgaatcggggacaatttcttttgcattagtaacaaacctaatagatgtggtgcctgcatattctgaagtaacaaatgaaaatcaggcatgawgttttttattttctagtcaactggtctcagggaactccacatgagatcacaggtgcaggattaggga

SEQ ID NO: 825380 - DNA, 484 bp, Homo sapiens
agccaccataatcatgatgcaccattactgcttagaagatagaggggtgcacccaagtaggtatggaggggtctcaggtagcttagagtggcctcagccaagaccgcaagtatacggctacctcagttccacaactttaagaagttagacctgcccgtaacccaaatgtgcttgaaaacaggttctctctgagtccttagttagtcagcagcctggttgataccctaactttgattttgtgagatcctaagcagagaaaccaatccaggctgcatggatttctgatctacagaactgcttatatatttgtgttattttaagctgctgaatcggggacaatttcttttgcattagtaacaaacctaatagatgtggtgcctgcatattctgaagtaacaaatgaaaatcaggcatgaagttttttattttctagtcaactggtctcagggaactccacatgagaycacaggtgcaggattaggga

SEQ ID NO: 825381 - DNA, 498 bp, Homo sapiens
gagacgcctccccatgcacatcactcccaggtgccctagggggcacatttcccacaactcccagagggcaggtttctagaaagtgccaccagtggggaggcgccacaacttcactgccattttgtgaggtgccgccgtctctcctccagcaaggtcaggacttcaggactgtgagtgggcagtttttccctggatgctttaatttcgccctggaaagtgtcctttttcctcagaaagagtcttttctgtggtgttctctgtccggtgtgtgggagggctcccttggggaagtggcttagctctggggacaccgccatgggcgcctgtgtcagccgcgggggagcgttttccttgggcaccccgtctcggctatgttgtggggccagggggcttttcttgggggctcttsttgggggctcctgtcggtgatggaaaaggcgacttttcctgctgaaatgacctgagcccggggggtgggggccatgccttggttgcctg

SEQ ID NO: 825382 - DNA, 481 bp, Homo sapiens
caccataatcatgatgcaccattactgcttagaagatagaggggtgcacccaagtaggtatggaggggtctcaggtagcttagagtggcctcagccaagaccgcaagtatacggctacctcagttccacaactttaagaagttagacctgcccgtaacccaaatgtgcttgaaaacaggttctctctgagtccttagttagtcagcagcctggttgataccctaactttgattttgtgagatcctaagcagagaaaccaatccagcctgcatggatttctgatctacagaactgcttatatatttgtgttattttaagctgctgaatcggggacaatttcttttgcattagtaacaaacctaayagatgtggtgcctgcatattctgaagtaacaaatgaaaatcaggcatgatgttttttattttctagtcaactggtctcagggaactccacatgagaccacaggtgcaggattaggga

SEQ ID NO: 825383 - DNA, 346 bp, Homo sapiens
tggaatggaacaacccgaatggaatggaatgtaatggagagcaaaggagttgaatagaatcattccgaatgtaatggaatggaatggaacggaatggaattgaatggaatggaatggaatgsaatggaatggaatcaacccgagtgcaatggaatggagaggaatggaatggaaactaccagaatggaatggaatgtaaaggagtgtaagggaattgaatagaatcaatccgaatgtaatggaatggaatggaacggaatggaatggaatggaatggaatggaatggaatcaccccgagtgcaatcgaatggaatcgaatggaatgcaatgcaatggaatggattc

SEQ ID NO: 825384 - DNA, 507 bp, Homo sapiens
ttgattccattccattccattccattccattccggatgattccattccattgcattccgttccattacattcccctgcactcgcgttgattccattgcattccattccattccattcaattccattccattacaattagttccattccattctattccgtactattccattccattccacaccattccattccattccattccattccattccattccgttccgttccattccgttccattccattccattccattctattcgggttaattccattccattccattccattccattctattccattccattgcaatcgagttgaatccattgcatttcattccattccattccattccattccggaagattccattccattgcattccattccattccattcccctacactcgcgttgattccatgccattccgttccattccattccattccgttccgttccgttcckttccattccattccattccattctattccattcctttc

SEQ ID NO: 825385 - DNA, 558 bp, Homo sapiens
gtgttatggctcattttgcccacctattgcgggtacattgaatttcctggaacaaactctcccctcccccgcattctaccccacagctcattaagcagcagtttaraatcttctcttggtctgctgtcctgaggatcaccttggctggtttgtggactaccctcttggcttgagtttcaccctggactgccatcttcccacttccactggacacacttaaagaactatccagtaatcatgaaagaataatgctttgaaagggttttaagtggaatgcatataatcataagcaagtaatgcaggataaaaaactatatatatagcataattttcattataagaatgcattaaaatattggaaggaaatatgctaaagccttaaagtgggtagtggagttacagatggcctatatttcatttttatttaacttcttttattttccgtgagctggaaggtattattttatacttacaaaggggagtattaaaaatgtgttccttttctctctccagagtctaacaaatgaaaaaggcaggcagtgcacaaatctattaaat

SEQ ID NO: 825386 - DNA, 515 bp, Homo sapiens
tctaaaaaccccatgtggcataggtcaacccatatccaagtgtgtattagacctactgccctgaggccgggygcggtggctcacacctgtaatcccagcactttgggaggctgaggcaagtggattgcctgaattcaggagttagagaccagcctaggcaacacagtgaaaccctgtctctacctctactaaaatacaaaaaaattagccgagtgtggcagtgtgcacctgtagtcccagctacttgggaggctgaggcaggagaattgcttgaacccgggaggtggaggttgcagtgactggagatcacgccactgtactccagcctgggtgacagagtgagactccaggaaaaaaaaaaaaagaagaagaagaagaaaagaaaaaagaaaaagatctactgccctgaattaggtgctgtgggaactttaaagatgatgtaagacaaaatttctgctttcgaaggtttggcaatctatgttggagagaccaagtgactgcaattcactaagagg

SEQ ID NO: 825387 - DNA, 579 bp, Homo sapiens
aagatagactaagaggataagkgctctgagcaccaatctataaggacaacaacgtccccagtggaaatcggtggtaccatttaacttagactctcatgtgactatttacataaccattgagatctaaactggttccactccagccaagtacccagtagaatgaaaaaaatgatcttggtaccagctcgggtccccaactaaacaactgttgcatcaatgttgaaagactatcatctgaagctcaccaaatgattagttgccttgagctccaatatgtccagacccgtttgtgccatgggttcctgcctggacggcagaccccacttctggtctccgagttccggattctcaaacactacacctagtcttccatttcaactacacggtccacttgctctctcacgtgtgatccaatgcatgaagtccagtgcttgcctctgtacttggactttctctctgattcactatggaatttggggagaagatcttgattgacctgctggccctcaagcctgtcctgagtttgactttatatactagattttgattttggctcggggcaaactactctgcttgtta

SEQ ID NO: 825388 - DNA, 520 bp, Homo sapiens
ctcttcatattgtataacttttttacttaattttcaaagatttaaattgcgtttataaattagattttattattaaattatttttttaagtactcaaaatgttacctaattgttaatcaatatttcccatttgtagggtctcctagatttgttagcttagactttaaatttagacattacattctttcaacatttttaaacatatggcattaaatattataatttataaattttgttttgtatttttatttcaacaccttcctaatgtcatactttgaatgcagatttaaataaagtatttaaatatttaaatcaatatatcgaatttgagtagaacagttaactaacaaaaaattgccaagttatgtgttggatgatagtttctttttaaaatatgatgttgtgcatacatttttataaatgcagcaattcagttgaaaarttttaacatttgtatatgctagctgatacagataattaaacaacagaatctgttgctaattttattttcattagattt

SEQ ID NO: 825389 - DNA, 583 bp, Homo sapiens
atgtacctccatgcaccttcagtgggtcaaggaaatagcctacaggtacaccatccctgggattgaagacaggttcatcctgcccagcaacacctcagtcagtgcctgagcaagttgcttggtgacctgaggatcaacctaccctacctgccatttttggtatgcatgcgtaccaccaggaggcctaacaacagacccagcaagcctgctaccagtgcctgagtgctttctgtaggcctgaggatcaacctctttgactgccaccaccaacacctgtgcacttctcccaagggcctgaggatgggcccatcagcctgccactaccaccaccatcaatacccgcccccatgtgaaacctgagggcctgggaactggcctacccaacccaccaacaccattgcttgttctcctacatgctgcctgggggcctgacagttggctcaccactgctactgccattgctgataccacgcacaccacctagggcctcaaggactatctcaccttcctgagtgctgctgccactttcascatccaagtaagctttttggaggcccaaagataggcctgcttcaacctgcta

SEQ ID NO: 825390 - DNA, 594 bp, Homo sapiens
aacgttggggatcgctgctctagaggtagcaggagtttgtcaaggtttcctgactgagtttctaggaataagatawgaagtgtgaggaagatttcagctgctagtagaagttacaagtactagacttggggaccaccaaaggaagcttttctccacttacaattctggtattaggaaaaaaaagtggcaacaccaataacccagttattggctgtcactctgtgatgccacagaaagttaatattcgaggggtagctttgtgcccagaacttgaaaatgtaaggtgactaaagtaacagcatcactgaaagaaagaaaaactgactagaagcagcaagctttatatcagctacctaagaaggaagggactcgaggaagagttccaaaattactctgatgaggctcaggtccataaagtcagttttatggttggtgttctgactgctattctttgaattgacccctttggttatagaaagcacctgatacttaaacatacaaaaattctaagttgacgtacaactttctttataggatgtttaatatgattgagatgaaagagcattccagtgtatttttcccactttcaagaat

SEQ ID NO: 825391 - DNA, 624 bp, Homo sapiens
acattgcacagcagggtgactatagtcaaaaataatgtattatatattccaaaataacttagagagtagattttaaatttctcaccttaaaaaatgataggtaagtgggctgggygtgcttacacctgtaatcccagcactttgggaggctgaggcgggtggatcatgaggttatgagttcaagaccagcctggccaagatggtgaaaccctgtctctactaaaaaagttacaaaaattatccgggcacggcacggtggcaggcgcctgtaatcccagctactcaggaggctgaggcaggagaatcgcttgaatcagggggcggaggttgcagtgacccgaggtcacgccactgcactccagcctcggtgacaagagtgagactccgtctcaaaaaacaaacaaacaaacaaacaaacaaaaagtgataggtaagtgatgtgatggatatgatagtttaatttcatcatgccacattgaatacatatatcaaaacatcaccttgtaccccataaatatatataattatgatttgtcaatcaaaaaatattaataataaataaaaataaagtaaaataaataaatctactcgaagcaatgaaataataaatatgaagcataatgg

SEQ ID NO: 825392 - DNA, 607 bp, Homo sapiens
taaccacatttatttaagaatgtattccaaaatcaaatggcaaatttcaacaattacttttgcactcacttagtaactttataacttttttttttttttttttttgagatggagtcctgctytggcgcccaggttggagtgcagtattgtgatctcggctcacggcaacctctgcctcccgggttcaagtgattcttctgcctcagcctcctgagtagctgggattacaggcgcatgccaccaggcctggctaatttttgtatttttagtagagacggggtttcaccatattggtcgggctggtctcaaactcctgacctcaggtgatccacccgccttggcctcccaaagtgctgaaattacatgcatgagccacctcacccagccaaacttttaaattttttaaacttactcttttgtcaataagctcattaataaatgttattacacttagcttaaagtacacattgtacagctgtacaaaaatatttcctttctttatatccttattccagaagctttttctattttattttatttattttttgatacggagttttgctcttgttgcccaggctggagtgcaaatggcatgatcacggctcac

SEQ ID NO: 825393 - DNA, 595 bp, Homo sapiens
attaacatattccgcatcactttcttaaatctagaaaatcaacaaaacaataaatagagccctgtttggtagcagttgctggtttcagtgatgtaaatacaactgccatggctgacttcgagctatcaccatgacatcaaacatggagttgggaagagctgtgcagtaacatactcttatacaatatttctggccaggcgtcgtggctcacgcctgtaatcccagcactttgggaggctgaggtgggcaaatcacctgatgtcaggcattcgagaccagcctggccaacatggcaaaaccccatctctactataaacacaaaaattagctgggtgtggtggcgggtgcctgtaatcccagctacttgggaggctgagacaggagaatcacttgaatccgggaggcagaggttgcagtgagctgagatcacgccgttgcactccagcctgatgacagagccagactccgtctgagaaaaaaaaaaaaaaaaattccagcctggkcaacagagcgagactccgtctcaaaaataaataaataaataaaatatataaagtacttagaataggcaaacaaggcacactatagatatatt

SEQ ID NO: 825394 - DNA, 555 bp, Homo sapiens
agcaaaatatgtcctagctctcagggccatacacatttgcccaagggcactctggaccagtgctccctgtgctaatctttcctaaaaatctttcccacctactaaaaatccttcccacctactaaactataattgggtactttccagaagtcaaccactggctaagtaattgtgctaagtataccatcttgggagaccgtcaaagtgatctgatcacagttttggaatttgcagttgaggaattgatgattataaagagaagcaactttggcaaggtgcagtggttcacgcctgtaattccatcactctgggaggccagggcaggctaatcacttgaagccaggagttcgaaaccagcctggccaacatggtgaaatcccatttctactaaaaatacaaaaattagctgggcttggtggcacacacctgtagtctcagctactcgggaagctgaagcacgaaaatttcttgaacctgggagttggaggctgmagttgctccactgcactccagcctagacggcagagaaagactgtttctcaagaaaaaaaaaaa

SEQ ID NO: 825395 - DNA, 633 bp, Homo sapiens
gggaatgctgtcatcctcaggacccgctagtcaccagcattgaccgtggccatgtgcatagtgtgaccacctgggaatgctgtcatcctcaggactcgctagtcaccagcattgactgtggccgtgtgcatagcgtgaccacttaggaatgctgtcatcctcaggtctcgctagtcaccagcattgaccttggccatgtgcatagtgtggccacctgggaatgttgtcatcctcaggaccctctagtcactagcattgaccgtggccatgtgcatagtgtggccacctgggaatgttgtcactctcaggactcgctagtcaccagcattgacagtagccatgtgcatagtgtggcacctaggaatgctgtcatcctcaggactcgctagtcaccagcattgaccgtggccacgtgcatagtgtggcacctgggaacgttgtcatcctcaggactcgctagtcaccagcattgaccgtggccgtgtgcatagtgtggccacctgggaatgctgtcatcctcaggactcgytagtcaccagcattgaccttggccatgtgcatagtgtggtacctgggaatgttgtcaccctcaggactcactagtcaccagcattgaccgtggccatgtgcata

SEQ ID NO: 825396 - DNA, 580 bp, Homo sapiens
ctggggcctgggattgggtacgggaagtgactgcagatgcctgccagctgtctttctagggtgataaggatgtcctcaaattcaattgcgatagtggttgcacagctctgtggacttactaaaaatcattgaattgtacaactaaaatgagcacatctgatggtctataaattacatctcgacacagtgagtgggtgactctagtggcaggggcgggcagcttcacaccctgcacagggaggggtatgggtggggggctccactgcagccttggggcccattgtctgcgcccccctcccctgcttgcctccttcccaggttcagagaagaaccttggtgcacacatctcttcagatctctccagaatgcggagtcatctcccaactcagtcttgctagacagtggccaaggagcactgagctctcagggccctcggattggacctgatcctcgtctgcagatcttgctttaagatgtcttttgttaatacagtatgtacatgtaattaaagggtggtgatttctagcaatttgtagtgtcatwaacttttcatcaaaatgcagcatagttgttggacagt

SEQ ID NO: 825397 - DNA, 413 bp, Homo sapiens
gggcgcccacctgggctctgcagtcccagtcctgctctgagctctggaagtgtctcctggaagaggggagccrctgccccagccgggcgcccgcctgggctctgcagtcccagggaaatggctgcctcctcacgcttgcggctcagcctccagtgcttggggccaaggttcagatgaagttagaaaatgatcaaaagccatttgctaattttatgccatacacgtagtatacgcagagaaaagacacatgtttagtgtccgaaggtgccccatgaagcaggtacggcgtatgtgagccctctgaggcaaggctccccacaagaaatgctgactgctccataggagacccggctgtcccatgcctgtggtctgtggttctggaaacttctaccatggctggctcctgggtggcc

SEQ ID NO: 825398 - DNA, 535 bp, Homo sapiens
ctaccatgaacattttcaatgcaattagaaaaaaaactctaaaattcctatgaaaccaaaaatagcccaaaagtcaaaacaggtctaagaacaaaaacaaagagaggcatcaaaatacacaacttcacactataatacaaggctacaataactgaaacagcatggtaatggtacaaaaacagacacatagacccatggaaccagttaaagaagcggaaataaagctttacacctacagtcatctgatttaagcaaagtcaataagaacaaacattggggaaacaactcactattcaataaatggtactaaataactggctagccatatgcagaagactgaaactagatatcttctttttaccatatgcaaaaaccaactgaagatgggttaaagatgtaactgtttaactaatatkgtttggctgtgtcctcacccaaatctcatcttgaattgtagctcccataatttccacatgttgtgggaaggatccagcaggaggtaatttaatcataggggtgggtctttcccatgttg

SEQ ID NO: 825399 - DNA, 316 bp, Homo sapiens
aactacctttatctctagtatagttgcatctcatgaataatttttcattaattttctgggatgtctgtctactaattcaaatgttccacctacccttttctcctaacagctaygtatttcaaatgcaactgaaaaataacaacccttcttttattaccagcaactgcattttttatggaaataaatccccagtcttcattatgaagtggtaacacattttgtgatggagcgtggcctgtccttcctctattcaagcatcaccaccaccttattccctactgccctggacaccgtgccctatcacactcagtgactc

SEQ ID NO: 825400 - DNA, 519 bp, Homo sapiens
gcatcttgatggtgaatctttcagcctcaagaactgtgacaaataaatgtttgttgtctgtaagctagccaatgtatggtatttttctatatagcaccctgagcatgctaagacatgcagtctcagcataggtttcatctcacccactggaaattctgaagctaagttagcccttcagagttggtccaagttgaaatgaggagaatgggcctttagagtcctacatgtgaccaggcattggatattggctgtcttggaaaagtcactacatactagatagctttcagcagagatgtactgagagagagagcttataggtgaggtatgtcagttgttcatcacttcatcagctggaaagtaatttctatattcccaaaagggaaatctgggtgacacataatgcctgcactcaaggacattgaaaatattgaacaatattgccactctscaggcaatatttgctcagaaactgtgttcaaatatctttttaagaaagatttacctcatttcagattaaca

SEQ ID NO: 825401 - DNA, 588 bp, Homo sapiens
acacaaagctaaatatagtgtaataatgtttacactaataagcaaatatgttaatcttctcatttttttactgtcatataatcttagtgatatgcctattaatagttttaaataaataaattggctcatctggctttttgaaaattttgaaattcttacagatgttgattaggtatatctacaaattaatttcaattttaaaatgatgatataaaaataaatataagtatttttcttgtgtatgtatacaataaatataaataaaattgtttactgttttgaaagtttcttaagtttttacactgatatgttttttgacttttacaatattattataatctaggaaaagctgattatatctgttttaagcctcatcttttctctgtaattaaacacagtaatttattaacatgctgtgacaggtgggaagccatttctggagttgagcctgctgacactctggagctttttaggttggacgttcattgtatgtgggactctctgcctctcgatagctgttgctcataagactctccttcatcaatctggcattgaattttgmgatcagttgcaatcagaatccaattg

SEQ ID NO: 825402 - DNA, 702 bp, Homo sapiens
attacacatttttctacaactatctatataactgcagaaakttttccttctaaatctcagttgtcttatttagaaattaaaagatgttcccatgttaccaggaggttgtcttcacagtagagagagataatgtctatatctcagatgcaaaaatcaataagggtaatttgaagtttcaaatgtttctatactccttcactaaataattggaaatcttttatttaaagtccaatcatcttgttgaagtgtgaaggttgttatatctatatagtttatttgaaactatgtctctttatttaaaaatacgagactgattatggtcgagtacagatctctatttcaataatttctcaaaaatttctagctataatttacaaatatttttacttaatattattaagatcttagcttggatccaaatgagtagttggtacaatgatttcagccatactcacaaaatagtccacagttaacttgaagaaccaaagataaaaggattagcttaatgagttgtgtaaactagactatttgttagaaaattgtttctatggttactgtagaattaattgattatggagctcaaagatttgtttaaatatctagaggctactattgaagctttaaagagaaaataaattgatgtttaattctctatgacttattttaataattgtgagtatactgacatgacattagagatgt

SEQ ID NO: 825403 - DNA, 677 bp, Homo sapiens
agaattaattgattatggagctcaaagatttgtttaaatatctagaggctactattgaagctttaaagagaaaataaattgatgtttaattctctatgacttattttaataattgtgagtatactgacatgacattagagatgtagcttaacctcataattctcccactactttgcctttcttataaataaacaagggcaaaatatagaatacataaaaaataaattattcctatatatgaatatatgtacatatttttcaaagcacacaaactttaccaacatttttgcctgcattattctaacccctttcagaaaattacataaagtaattatcttatgtcatccacttcttcttttctttattcctatcaggaagacccactacattatctgagacaatgaggaaagctgacatatggcttatgcgaaactcctggaattttaaatttcctcatccattcttaccaaatgttgattttgttggaggactccactgcaaacctgccaaacccctacctaaggtaaacatactttcgttggttttattttgttggcttcaaatttcagtagaaatgactstatagtcttcattcagagtgtttgactaacactgaaaaagatgggaagtaggtggggtaaagcagataccaattagaaactcatgtacatgttaat

SEQ ID NO: 825404 - DNA, 560 bp, Homo sapiens
tacatacaccaatactatatagaatagagatccacaaaataaatttatgcatttactgctgccatagtatggatatttgagccctccacacttcatgttaaaatttgatccccaatattgggggtagaatctaacagaatgtgcctttgtcatggaagcagatccctcatgaatagattaatcccctgcctgggaggcgaatttttactctattagttcccagaagagctagttgttttacaaaacctggcactccctcacatcccctctttatggtttcctctcttgtcatgagacctttgcatataccagctcatgtttgccttctaccacaagtggaagcatcttgagaaccttaccagaggccaagcagaagtcagtgctgtgcttcttgtacagtatgcagaactatcattcaaataattctatttgatatataaatttgctagtctcatgtrttcctctataacaacacaaatggaggaatatagcagctaactgacttttgacaaaggtgccaagaacacataatagaaaaaaggcaacctcttcactaaatg

SEQ ID NO: 825405 - DNA, 589 bp, Homo sapiens
cctctcactatgagctcttctagaatgaccttgacattaagccaatggctcatgtcacagggccacaccaggactttcccacagaatccacagccaacacagaagagctgcaggagcagaaataccaaagctgacttgtcagacctcatgatggcagttccctcacacactgatctgcaatggttttgtagttactaagcaaggagttgaaatgacaatataagcacagaagttaaaaattaatattttaagagtaaagttcactggtggttgccagtttaacatgtactgaaggtatcaaaaaaatgcaatgtatcagggaaaagttgttccaaccctctagaacttagaaataaaatacataaatatacttttattacctggattgatgataaagaaaaaaatttttcaagtctttagatttaataattcatgtgcagaaacatgcacacaatcacacttacattcattccacactaagtccaagscatcagatggtttaggacagcacatgtttcacatcccttgctcacaaggacaatacaaaggtttactgagaatatacttagagagtttgggtaactatttt

SEQ ID NO: 825406 - DNA, 513 bp, Homo sapiens
tggaagagatccttcctgtatcaagtctgcagctctttctcttttaaaggaatattttaatggagtttacaatacttaaatgatgagttttgacagcacacttcagcctgtgttatatatatccgaaaagccagtcaaacggaggtctcctggaatgcttctcaggtttcccttggtgctctgagggattcagttcacctggagttatgattgattctgagcctcaggcagtaaatgagcagctgtctacatagacatctcctttagtttttcagttattgccatgacagtctcatgtacttgcagtggaactgttatgggtataatagtcctgtcatacacaaattttaattcatttaatttttaaggaattcagttttctatcagcaagaaggatataattgagtttccatgaaggtgtaattaaacacagtgtatcttggccttgcggagatttaactcacttcacacagatttgtattccartgccttcaaataatttccatcaaaata

SEQ ID NO: 825407 - DNA, 589 bp, Homo sapiens
gagtgaatttagtgtttatttctgctgatgatgaaggagccattccaaattactctactggaattacattgaacatggacaaaaatcttcaatcaaacaaattcatacaaaaggaattcagggtatttaatcagaagagaaggagacagaggaggcaaagataccattttcaagtgtcgggaagtccataatgtcatttagaagagggcatggtcctgttcagtgttgcgtgtattattgctcctttccatgcctatctcaataaagaaaatagagcagattttagttcaatataatcagtaaacaacactcaggtataacacagaaacaacagttctctagaaatataaggctctccaaaattgtatcaattcaaatagaagctaagttcctatatgacttttcatgaatatagtaagaatgacttcttgcctatgtgaaaaatgggactcaactagatggcccgtaatttgcaactctaaatttctagtgtacatgactgaatgagtatctgtaatatrgtttgcattccctaacctcttagggagctcttaaaaagtataaaactggtcacaaatattaattgaga

SEQ ID NO: 825408 - DNA, 612 bp, Homo sapiens
cattctggaaacgacaaattagagagcaagctaaaaagataaaagaccttctgaagattatttacatttcaaatttttgacatggaccattytgttcattgatgagataaagaatctggccagcttggaagattaatttccttcaaagagttcacttacacttattttacaaaagtaaggcattgaaacttgtgctaaagaatgattttgtccatttaaatggatctgtgcagaaaatttaatacctttcatacacttggtaaatcttatctttaatagaaatttttattgcatatactaaaaatagttgaaacatggactcataaataaagtttaacatttctggtatgaaagagaatgagaaagttcacattagaagttgagcatgcaaataattcatgagttcattcaacaaattatgattaagcaatggctatatgctagggattatattgcaccataagtatacattggagaataaaatggggattaaaaaaacttatttttgcttgagtacagttggaaatataaataataaataaacatgtatataataatgactcttgaaaagtgtatgaaaaactactgacacaataccataaaggaagagca

SEQ ID NO: 825409 - DNA, 637 bp, Homo sapiens
ttgccatttttcaaaggcagaagagaagaaagttttggaaagcaaaaaacttacaacacataccattaaagaaaggcaagagagttgttagctaaactgatctgtctgcatgatagacagtttaaaaattcatcccagttccatatgctggtaacttacaggagatatacctgtattatagaaagacaatctgagatacagctgtaaccaaggtgatgacaattgtctctgctgtgtggttcaaagaacattcccttaggtgttgacatcagtgaactcagttcttggatgtaaacataaaggcttcatcctgacagtaagctatgaggattacatgctacattgcttcttaaagtttcatcaactgtattccatcattctgctttagctttcatctctaccaatagctacttgtggtacaataaattatttttaagaagtaaaactctggggctggacgctgtggctcacacctgtaatctcagcactttgggaggccgaggcggggagatcaccygaggtgaggagttcgagaccagcctggccaacatggtgaaaccatgtctctactaaaaatacaaaaaattagccaggcgtggtgacagtggcacctgtaatcccagctacttgggaggct

SEQ ID NO: 825410 - DNA, 590 bp, Homo sapiens
aataccagattgtaacttacrttgttttttttttttttttctaaattttaatgttttcagatcctacatttaggtcacccatttcaagttaatttttgtgtatagtgtaagataaagttcaaattttgctcttttgcatgtggatatccagttttcccaacatcttttattgaagagcctctcttttccttattatgtattcttggtgcccttgccaaaattagttgatgaaatatgcgctggttgattgctgggctccctattctgtcttattggtctacatgtatcatggtttttactgccagtaacatgctgttttaattactattattttgcagtataatttgaaataaagatgtgtgataacttcaattttgttgttttttcttcagaatgttttggctattcagaacctttgtggttcaagaaaagttttaggattttttaaatatctgtgagaaaatgctattgggattttgatagttattgtactggatcttacttcagtcttggtaggttgcatgtttctaggaatgtatccatttcttctgcattatccaatttgtttacatacagttgtttatgtcctt

SEQ ID NO: 825411 - DNA, 487 bp, Homo sapiens
atcagagtaatgctggcttcatagaatgagttagagaagagttcctgctccttgatgttttggaatagtttcagtaggattggtaccagctctttttcatatgtttggtagaattctgctgtgaatccatctggtcaggggctttttaagctttttattactgattccatttaggaattccttattggtcttttctgggtttcaatttctttctgattcagttttttaaaattttagttttctataggttattgaggtacaagtggtgtttggttacataagtaaatcctttagtggtgattttgtgagattttggtgcacccatcacccgagcagtatatactgcaccctatttgtagtcttttatccttcaccctycttccacccttccctccaagtttccaaagtccattgtatcattcttatgcttttgcatgctcataaattagctcccacatatcagtgagagcatatgatgtttggtttt

SEQ ID NO: 825412 - DNA, 592 bp, Homo sapiens
tgcggaattttattgctcacagttctgaaggccgagaagttcaacatcaaggtgccaccggattcggtgcctggtgagggccctctgcttcatacagggcaccttcttgctgcattytcacatggtggaaggaggaaaggggcaagcaaactccctcaggcctcttttatggcgggattattcccattcacgagggttctgccctcatgacccaacagccccacctcttaaaggcaaaacattggagattcgatttcaacagatgagggagtctctgagcctactctagctcagaaggttacctgccaaaaaaaaaaaaaaaaaacaaggaaagaaaaagaaaaaaaaaagaagatttcaacatgtgaattttggagggatgcaaacactcacaccatagcgctgtccttgaatatagtatgtgccttatgaatgctagtggcataaagctaacaaaaggctataacttatcccaggcatacctgcttggcttttgaacctcatttctgtcactgtacacttacagcctaccataaaaaatattaatgatcacataaaaggtggtttatattatccaggtcttatttagtat

SEQ ID NO: 825413 - DNA, 574 bp, Homo sapiens
gagaatggaacaaagttggaaaacactcttcaggatattatccaggagaacttccccaacctagcaagacaggccaacattcaaatttaggaaatacagagaacaccacaaagatactcttcaagaagagcaatcccaagatacataattgtcagattcaccaaggttgaaatgaaggaaaaaatgttaacagcagccagagagaaagcttgggttacccacaaagggaaacccatcagactaacagcagatctttctgcagaaaccctacaagccagaagggagtaggtgccaatattcaacattccttttttttttttctttttgagacggagtctcgctctgtcgcccacgctggagtgcagcggcatgatcttggcttactgcaagctccaccacccgggttcatgccactctcctgccttagcctcccgagtagctgggactacaggcgcccaccaccacgcccggctaattttttgtatttttttagtagagatcgggtttcaccaygttagccaggatggtcttgatatcctgacctcgggatccacctgccttggcctcctaaact

SEQ ID NO: 825414 - DNA, 644 bp, Homo sapiens
accagccactctaaaaacaggccaaattgtaaagaccatcgatgctatgaggaaactgcatcaattaacgggcaaaataataagcgaacatcataatgacaagaacaaattcacacataacaatattaactttaaatgtaaatgggctaaatgccccagttaaaagacacatactggcaaattggataaagagtcaagacccatcagtgagctgtattcaggagacccatctcatgtgcaaagacgcacataggctcaaaataaagggatggaggaagatctaccaagcaaatggaaagcaaaaaaaaaaaaagcaggagttgcaatcctagtctctgataaaacagactttaaaccaacaaaggtcaaaagagacaaagaaggtcattacataatggtaaagggatcaattcaacaagcagagctaactactctaaatatatatgcagccaacacaggagcacacagattcataaagcacatccttagagacctacaaagagacttagactcccacacaataatagtgggagwctttaacaccccactgtcaatatgagacagatcaatgagagagaaggttaacaaggatatccaggacctgaactcagctctgcaacaagtggacctaatagatatctaca

SEQ ID NO: 825415 - DNA, 566 bp, Homo sapiens
aaaacaaagtaaggctaagaaactgtttcaaattaaagaaggctaaaagagacatgaaaactaaatgcaatatgtgtgattggactgaattctatacagcagggtgaaaatgctgtaagtggacatcaatgagtcaattgacaaaagtagaatatggactgtagattaaagtgttttgtcaatattaaatttcctgaatgtgataaccacactgtggttatgtaagagtttcctgttcttaggcgagaacacactaaatagttaaggggtaatggggcatagtctcaagtagttcggaaagaaagatatatatatatatttttatatatatatatatgagacagagaatgaaaataacaaacatggcaaaatattaaatattgatgaggggtgaagctgagtaaagggcagttggaagttttctatattatccttgcaactttctcaaaagtttgcaattatgtcaaaattaaaagtttgaaatcaactgrtgcttatattcatcccaatttttaatgataaatagaatttctttttaaacttttctgcccatgaaaataagttat

SEQ ID NO: 825416 - DNA, 630 bp, Homo sapiens
cacttagtgtgcaaaacactgcaacccagtcttccattctccaggcaagagactggaaaagttttctctggagaaactgatgagcccaagaagaaaaacctgaatatagagacaccagggagctcccagcgaacagtccactcacacaccaagtaaaccaaccatagccacagactctgagttactctcagcactttcaaacatgaacagatgttgaagaaaaattttcaattacattgttaaagtatggtaaggaagaccttattcaggaccatcatgataggtataaggatcactacaacgggattttgcagtgtgggagagaagttgggctcactttcaaatacagcatgggaatttacagccagggagcccagtggaggccagtagatggaaaattactaagacagaatatcaggggtaagggagattctggctaaactgacctaatagtatccttgctgaagacaggccaaggtgatcagacatcacctgggagatggtggacaatgacgaacccggtyagatactgaggactatcaaatatcaaggctgggtgattcttgctaaactgacttagcagggttctttgctaaaactggattttacaaggaagtgcacagataggcc

SEQ ID NO: 825417 - DNA, 595 bp, Homo sapiens
tctgttctagtagtctggtcactaggcagaccagcttcatcagaagaggatgagcttatcgaagtggtttccaaccagggcagttctctcccatctggaagatatatggcaatatttgggacattttgttacaagtgggagggagaggttctactggcatttagtgggtagaggacaaggatggcactaaatatcctacaatgcacaggagagcctccaataaagaatgatctgatctaagacaccgataaatgataagccctggtttatcctgaagtaactcagaagagcatgatgccaaatatctttagaggacatattcacagctggcagattcttgcatggtcgaggtggataccatgtgtggccaaaagggtcatcttgtccctacaggatgcaaagctggattccctcctgcctttcctgcagaaatgacaacctggcctagaagaactgatgccaaccaggaaagggctcctgggcagggtcgagattggytcaaccttatggttcattggattggggtccttggtctttggaggtttgattcttggttcaggaaagccatgttcactccttgagactggatgttcaa

SEQ ID NO: 825418 - DNA, 561 bp, Homo sapiens
tcaaaccagcctcagccccactggtccagcccggttcctactggtctagccttggccccactgggttaggctcaaccccctgtgggtcctgccttggctccactggtccagcctcagtcctgactagaccagctgtggactttttgggttagccttgacccgcaagggcacagccttgactgcggtggtccagtctcagccccaatggtccagccttggtccttttgggttagaattgacccccaacccacaatgggtccagccttggctccactagtccagcctcagtcctgactggtctagccttggcccctttgggtcagccttgatcccatgggtccagccttgactatagtgtccagcctgggccccacgggtccagcctcagtcctgactggtccagcttagaatccaaacgtcataaaacagatactttaagtttgagcaaaccatgccccactcccgcccggctggtgcttccactctccaccctgcctgcttctccccacccytattcctggccctcttcatggctgtggttttactctagttcatgccatc

SEQ ID NO: 825419 - DNA, 531 bp, Homo sapiens
tgttgttccctcggcctcaaatgcaccaacagacatgtaataggcaccccttatatgccaagcatgatgtcaggagctgggaatacagggtgaatcagctaagccctgcttccaagagcggcatgctgttaaaggggaaagacgcttatgtggtaactatgcaactcaagtgtcactactagaggatatggaggtatatttgttagtaaaggcatggctacctatgtttggaaacagccaatatgctgaggtgacagaaacagaaagcagaagttgtgagagcctgtgcatgagttagtcacctatgaggaacactgatgtgctgaagaggaggctgcagaggcctcatgtacacgagcctgagcgtggtgagccaagaagggagctgcagactgactggatggggtacagcctgagattcctgtggtctctggttcagggccctgcttctcatgctggggacgtctctaccatgggtaataccccaggaatcytcaccacctaacctgatccacctggaggaaccccggc

SEQ ID NO: 825420 - DNA, 581 bp, Homo sapiens
tgggaagaccactagctagattaataaagaaaaaaagacaagatccaaataaacacaatcagaaatgacaaaggtgacatttccactgacccasagatatacaagaaaccctgagactattccacatgcgtctatgcacacaaactagaaaactagaagaaatagagaaattcctggaaacataaaacctctcaagattgaaccaggaagaaatggaaaccctgaacaaaccaacgatgagttccaaaattgagttagtcatacaaaacctaccaaccagcacaaaaaaccttagactagacggattcacagtcgaatcctaccagatgtgtaaagaaaagccggcaccaatcctactgaaattattccacacaattgaggaggagcaactgctctctaactcattctatgaggtcagagtcattctgataccgaaacctggcagagacacaacgaaaaaaggaaaataggtaaagtaatacatatgttaatgatcttgatttagccattctacggtatatacatatttcaaaacaatatgtacatgataaatatgtacaatttgtcaattaaaaatatat

SEQ ID NO: 825421 - DNA, 538 bp, Homo sapiens
agtggccttcaggatattcagagtgttatgcaaccatcgtcactatctaattccaggacgtttctgtcaccccaaaaagaaacccagtagttctgagccatcactctgattcttcccccagtccactggcagccactaaccgcctttctccctccgtggatttgccccttctgggtgttcacagaagtggagtcctgcgctgtgtggcctcttgtgtctggcatccctcacccagcggcgtgtgctcaaggtgcatccatgctgtggcgcgtcactgccgcactccttttatggctgcgtgatattctgctgtatgggaacaccccatgtggcttagccacttagcagctgatgggcgtttgggtagtttccgctttgggctgttatgagtaacgctgccatgaatatttgcttacaagttatttgatgggcagaggtttgctaaattctcacygcagccttaggatgtcagtactatccctatccccattttatacatgaggaacatggatcccagagatgtgaattattaggctct

SEQ ID NO: 825422 - DNA, 637 bp, Homo sapiens
aatgatttgttttagtttactttatcccgtaatattgagagctgcccatttgtaagcactgtgctaagtgctttgaaaacctaaataaygcaaaaggcatcgtctctacctgtaagaagcatattgtctcagagggaaaaaaaatgcacaaattgctgttcatcttcatttaacctggacaccttctgagctttcaatatggaaaataatagaatataggtcgtaataaaattgagagaatgttttcccagcgaaataccacagaatcacagtattcacaattgtgagaaaaattagcatttatctaagctatgctgcccatctgataggaagaaacagccttttctttaaggtacacgtgcaatttatatggaatccaagtaagtttaactaatttttgaaaacagtattaaggatttctcaattactagttttcctaaggaaggttactgtgactgtatgtaatgtttataccccaatacaaagaagcaatctcagtgtggagagagatgaacatcaccaagtggaattttcattctaattcctttgaaggtgattattctcagtgccataaccagaggctgacacccagggggtgctctgcaggaatttgggaatgagtaagtgaagctaaggc

SEQ ID NO: 825423 - DNA, 615 bp, Homo sapiens
ttgaattatgaatacttagattgtgtgctgttgacctttagaatgttaggagacaagccagaaattaaacccaaagtaacaccaagcactggaaaagcatcaaagttaaaaaagtaataaaaatacggttattaaagggaataaaattatataaatggaaactgatttaaaaagaaaaggagagtttatctctcagggttctacagttctccagagaaacagaaccagaaggatgtgtgtgtgtgtgtgtgtgtgtgtgtgtgtgtgtgtgtgtgtttgtgtgtataatagatagatgggtaagtagatttattttgaggaattggcttatgtgattttgagtgctggcaagtctaaaatgtgtagggcaaagaggctggaaattcagggaggatttctgtgttagactcttgaggctcctcttctcagggaaatcagtttttgctcttaaggctttcaattcactggatgagacccaactctattatcaasggtcatcttttttacttaaagtcaactgattgtagatgttaatcacattgacaaaatatgttcacagcaatatctatactagcatttgaccaagaagttgggcaccgtagcctagtcaaattg

SEQ ID NO: 825424 - DNA, 624 bp, Homo sapiens
attttaaagggccttgttttttttgttttgttttttttgtttgtttgttttttccaatcttccttctgagagacctacttcttaaaggaattattttaaagggaaaaacacatacataaaagagaccccttcattctttcttttgtgtctgtaaaacatagatccaggattagcatatgctgcattgagagtctgcctgtgaaagtgatttttgcttaatccagatctttcaatggttcactgtccagggcatggaatttctaagtttatttctgcagttgctctgtctccctttgacccatgctccattcactggcatctccacttgtatttgagtagaggtgaagttcagctttcttttgctttctgtgagcatcttgaaataaacctgagtaaaacatagtttatgtgttggtagactggctacccccactttaggcgacttaggaggaagaaatcctcttcaaaagtgtgtgtgctgtaagaatacctcaaattytacctttaagtattgattactcctaggatagacatttcctttctctattaaaattggaggagatagcttattaaaatattggatgtctttagttttttaatcagctgcatataacatcagcatgc

SEQ ID NO: 825425 - DNA, 641 bp, Homo sapiens
ggagtccattatacaattccctatgttttaggtttgaatttttctgtaagaagattttgcgggtaggggaggaggagtgagcttgaagggaatgtgggctggcctagaccaggttggagccagcagtctctaggaatggtcagctcacaaggaatccacatgggtgtaattaactgcagtgtctccagtgggcatttggcaaattgtatcaaaggccttaaaaatggtcattgcctttgagtcatcaattgtactcataggagagtaagctaaggaaataattaagagagtgtacaaaaatctaggaaaataatgttcattaggtcattgtttataaaattgaaaatgaggaaccacgtcagtgtccagccatagggggttgactgagcatggtaactgcccaagatgagcgaggtgtgtcaggaccttactggcagtcaggcagcaaagatttattgagcacctactatatgctgggcattgggctaggttctggggatagagagatgrataaaacaaactctgcagagcttatgttctgtgtcttagacctgaaaagttgatcatgatgttcagttcttagaaaaagatggctgggcgcggtggctaacgcctgtaatcccagcactttgggaggccga

SEQ ID NO: 825426 - DNA, 489 bp, Homo sapiens
tgatttctttgagtagcgttttataattcttgctgtagagatctgatatctccctggttagctgtattactaagtattttattcttgtggctattgcaaaagggattgtgttcttgatttggctctcagcttggatgttgctggtatatagagatgctactaatttttctacatatattttgtatcctgaaactttgctaaagctgtttatcagatttagaagcttttgggcaaaaattatgtgttttctaagtatagaattatataatctacaaagagagttattttgacttcctctcttcctattcggatgccttttatttctttctctcttgcctgattgctcttcttgggacttccagtactatgctgaatagaagtggtgaaagtgaccatccttctcttgttctggttttcaaagggaatgcttccagctgttccctgctcagcattatgctgwagctctgtcatagatgactcgtattattt

SEQ ID NO: 825427 - DNA, 446 bp, Homo sapiens
accaaccaacaccatgggtacatcctcaggaaaaagtcctccatcaygatagcaatttcaaaaaattgaagtgatttttaaaacagatgcgcagatatcaatataaaagacaaatgaaaaatggaaaagcaagaaagtaccacactgcaaaaaacccacaattaactctccagcaactgattccagtgaaaaagaaatgtatgaaatcccagataaagaattcaagatgatgagattgaaggatcttagtgagatataatagaatataaaaaatgctaagaaataaaatagaggatatgaatgagaaatttaaaagagatttttaaaaaaacaaattctggaaattaaacattcattgaatgaaatggaaaatgcattcaaaagcttcaacagtagattggaacaagcagaaaaatgaattccagatcctgaagaaattactttta

SEQ ID NO: 825428 - DNA, 446 bp, Homo sapiens
accaaccaacaccatgggtacatcctcaggaaaaagtcctccatcacgatagcaatttcaaaaaattgaagtgatttttaaaacagatgcgcagatatcaatataaaagacaaatgaaaaatggaaaagyaagaaagtaccacactgcaaaaaacccacaattaactctccagcaactgattccagtgaaaaagaaatgtatgaaatcccagataaagaattcaagatgatgagattgaaggatcttagtgagatataatagaatataaaaaatgctaagaaataaaatagaggatatgaatgagaaatttaaaagagatttttaaaaaaacaaattctggaaattaaacattcattgaatgaaatggaaaatgcattcaaaagcttcaacagtagattggaacaagcagaaaaatgaattccagatcctgaagaaattactttta

SEQ ID NO: 825429 - DNA, 510 bp, Homo sapiens
attggtaatcaaaaatttcccaacaaaaaaaaagcycagaaccagatagcttcactggtcaatttatcagcatttaaagaagaaataattccaatccttctccaagtctttcaaaaaacagaaatagaaggaatactaccgatgtcatttcatcaggcctgcattaccctgatactaaagtgagaaaaacgtacctcaagaaaacaaaacttcaggccaatatctctaatgaatatagatagggaaatcctcaacagaatattagcaaactgaattcaacagcactttaaaagaaccatacaccatgatcaagtgggaattctccctgggatgcaagtatggtttaactcgtgcaaatcaattaatgtgacgtaccacattaacagattgaaagaaaaaaaatcacatgatcatttcaactgatacagaaaaccatttgacaaaaatgaacacccttgtatgattaaaaagacactctgcaaactatttatagatggaatgtacctccac

SEQ ID NO: 825430 - DNA, 610 bp, Homo sapiens
cttgggaaaaacaagacaaacagacaagaaaagcaacctgacagtgggcttacaggatttctgaccttacagatgagtaaaaawggttgcttgctggcaggcccaggaaacttccagatactggaaatgttgagaagagaggaattcattgaaatctataggtattgtggatgacatctgatgacaagctcctctgcttaacttcctagcctcagaggcctttaaatacctaagctgaaattccttatgaaaagttttaccaaagcaaagtgaaaaaagagcctatgtggtcaattactaatcttgtcacttttaggtaagtaatcaggccaagtttaatgagactataagcaaattagtcttactctaattatatttgacataagctgggtgactgtggagagagaacaatgtttccacgaaaaattataggaaacatatatggataataaaatctagtcctgttcactgtaaagttttgttatctacctataaatgggactgaatctttaattcttaatagttttctccaatatctggttacaactccccaaataaatgttcttaaattttctcccttctgacttggaattattgagaatgaaaactg

SEQ ID NO: 825431 - DNA, 215 bp, Homo sapiens
cgctcctcaggccacgcccccttctgcgttcccagcgcgcggcccgaatggcggycgacaagggcccggcggctggacctcggtcgcgagctgccatggcccagtggaggaagaagaaagggctccggaagcgccgaggcgcggcctcccaggcccgcggcagcgactcggaggacggcgagtttgagatccaggcggaagatgacgcccgggcc

SEQ ID NO: 825432 - DNA, 588 bp, Homo sapiens
gtggccagcttgggcaacatagtgagacctcgtctccmcaaaaaaatagctgagcgtggtggcatacacctgtactcccagctactccggaggctgaggtaagaggatcacttaagcccgggaggtcgaggctgcagtgagccacaacggtgccactgcactccaggcaacagagcgagactctgtctcaaaaaaataaatattaaaaatttaaaaattagctgggcatggtggggcatatctatagtcccagctacttgggaggctgaggtgggaggattgcttgagcccagctggtcgaggctacaggtgtgttcacaccactgcacttcagcttgggtgacagagcaaggcacttgtctcaaactaaacaaaacaaaactataatgataacagttgtcattatggagcatttcctgtgtgccaacctcaatgccgaacgtttgtttatattttacttatttatttatatttagaaatggggtctcacgatgttgcctcggctggtctcaaagtcctgggctcaagtgatcctacccccttggcctgcggattagctaggattacaggcatgagccactgtgcctg

SEQ ID NO: 825433 - DNA, 537 bp, Homo sapiens
tcgtgccattgcactccagcctgggtgacaagagcaaaactctgtctcaaaaaaaaaaaaaaagtatacacacacacacacacacacaaatagaataaaatatacaaaaagagaattccgtagtgctctttggtacaccctttgtctagcagcaatgactatcaactcgtggctagttgtgtttcatctgaaccttcatccccctcctcctggggactattttgaaataaatctaagacatcagggccaggctcagtgatgcacacctgggaggccgaggcaggtggatcacctgaggtcgggagtttgagaccagcctgaccaacatggagaaaccttgtttctactaaaaatacaaaattagccaggcgtggtggcgcatgcctgtaatcccagctacttgggaggctgagacaggagaattgcttgagcctgggaggcggaggttgcggtgagccgagaccatgccattgcactccagcctgggcaacaagagcgaggctccrtttcaaaaaaaaaaaaaaaactaagacatca

SEQ ID NO: 825434 - DNA, 543 bp, Homo sapiens
caccgtgcacacgcttgccccgatgtgagatttcccctgggttcgcgctcgggtccgcttcttaaatacactgcctcagcggtgtggatggcacagagctgtggcagccctactgaaaccttaaacaggcttcctggggtcataaacatggataccgagacttagatcacctcccacaacttaaacgtaccccttcactccactgccttcgccccttcctgcagcattcgcatctagttgttcaaaagtgctttccgggtcctcagacatgcaccccaaggttttaaacctcagtgcaagtactagatgggcttccctgtgcaatagggatgtcaggcgcgcagttttgcacacgattgccaagatgtgagatttactttaggttgcaccttaaccgtcgtttttaaatatgatcgtcccatcttgatgtgctgctcctgctgtggaaggtatccctgggttttaggcaagcatatgtgttctttactatggctccaratcccagcatatttgaagtcctgagtcaacctgctctcctagaca

SEQ ID NO: 825435 - DNA, 562 bp, Homo sapiens
ttagaattggcaggtaaaaaggtgggcacagtctacacttgagaaatacggccgtcagtaaaacttattcacctattacatagtacttgggagcttctagatcgtcacaatttaattaaccttaggtattgtcrttctttttaatccttatacatctgataagccaaaaaaagtagttttttatttgtatttttaaaaaaattagtagcgatgttaaaactttattttcttttttattgtgaagttcttgcctgtatcctctgctgatttaaaaaattgggatattcagtctttttcttattgatttgtacatgctctttatatattaagtatcagaaagtttaaatgttcatgtttccaaatcttactttgtttttcatatttaaaatcttaattcttttggaaatcgttttagtttaaggtgtcaggtaggtgtttagtttttaaattttgttccaataatgttaactcttttctcttttttttcctgactgatttatatgtcaacttgtgttatatgcctgggtatacttatggactttaagttgttttcttctagttt

SEQ ID NO: 825436 - DNA, 603 bp, Homo sapiens
agcatattaataggaagctgatttagctagggagactgtatggttaatacttaactgcttttctcttttgcaagtgtatattttgtctcttgatctatattttaaatacctcaaggacagagaccaaagcctagcacaatttttaataagtaattgctcaatgaatgagcgtcttcatgcacttttctgtatcttccgtaacatccagcccagagttgggtatacagcaggtgtgttgttgattcagcacatgtttgttgacagaaagattgagccaggacgtgatagactgtgttaacaaacctgcgaatgtcacacttttaatacatgaaagcttttttgcctgcctcgtgtaaagtctgtcacgtaaaggtgactccgagcttcaggttgcttccatctctgggctgtgctctcatgacacaaggcgtgcgtgttccctgtgactggagaagaatgagggtgtggagaactcacatcygtcttctatgccttggcctgcaagtttcacacactcagccccttggccataactagtcacgtggctccaacctagctctgagggcggctgggggatgtagtctttctgtatactcaagagga

SEQ ID NO: 825437 - DNA, 605 bp, Homo sapiens
cgcagagtcgtattttatcctttaaggagcacagtcatattttctagcacgttcaaaggacacgctggtctcctcaattccaggactgactctacgaatacaattggttttccttatcactctggttcccggtgtgtcacacaaagcagagaggagatgcacgcctggtcccttgtgcctacactgtcagatctcaataatccagcatcttgggcacaggcagggtgggaatgggaagtacttttaggcaaaaataagagcctggccccctttggtaagatatctccgtatgtctgccagctcctacagtggggctgaattgctatttcatgagcaatagtgtcatcttcatcaatgccaaacaaacaaaatgctctcattcaatttagcaaccatgtagtaaacattttctacatgttcacttcaggtagctgtagtgatcttgatttctggaaaaacatgtaaaataacagtttctgaasccttattcatattcattaatttaacaaatatcatcagtcactatttgccatgtgagttagcactagtgatccaacaatgaatagaatagagtgcctcccttcaagggggttccagtgcggtgg

SEQ ID NO: 825438 - DNA, 459 bp, Homo sapiens
aaatttaagaacctcatttattaccaacttcttttaggattattaactsaaacatctcttggaggattagtacaaatattatgttctcccatcatctctataacaggctgtaattctgaggaccaagcttgtgccttattcatccttgtatctcgtccagcactgaatacagttcctggcataaactaatgatgcaataaattgtgtttgaattgaattttcaaagcattcaaggctggccacctctgcacttgtgggagtaatttgcatttgagctgcatgttttgagatatatcatgcatttaatattgttctttaggtccagcctgatgagtgaagaggctaagcgaggagcacccaacccttggctctttgaggagccagaggagaccagaggcttgggttttgatgaaatccggcaacagcagcagaaaattatccaaggtactaaatatcctg

SEQ ID NO: 825439 - DNA, 614 bp, Homo sapiens
atacatcatttttctaataatccttttatgtattataaaaccatgctcttcatataacatgttccctgtggtgaaagaaaacaaacacattcaattcccttatgtgttaatttagtatctaagcacatcttgacctaatttcacacaagattactttccttattctttcaatctctgaatgttaatttcaaatgtatatgttttaatattaagataagcaaaagtgtctgttttagaaataaacatattaagatggatttcataacacaaaacattttagaaaaattaaagtgttaagcataaaaatagtaagaagaactggaataaaatattggcgtggggaagccttttagaagcaaaaaaagaatataaaaagattgaatataatatgcgtattcacttataaattaaagccactaatcaaaattaaaacaaatgacaactgggaatatttgcagcatatatcagacacagggtaataattttagcatataaaaaaatcttttaatsagtaaaaaaaggaaaaatctactggaaaactggataaagaacataaaaagaaattgacaaaaatgtaaacagccaataaacaagaaaaaatccagacagttagt

SEQ ID NO: 825440 - DNA, 512 bp, Homo sapiens
ttatacaagcaaaactcctcaccgccttttggcaatggaacttgcttttccctctgcctgaaatagtcttcagtatgttgacatgactcatttcttcacttcrttccatttcctgaagagaggagcagtcttctgtgctcacattgcctaaaatagagcccactgtcactctctacttactctttttaatctttcttcatagcatacatatacatatatatacacacatatacatatatatacacacatatacatatatatatatatatgtatacacatatacaggcatacctctgagacactgaaggttcagttccagaccaccataataaagtgagtcacatgaactttttggtttcctggtacatatagaagtcaggtgtacactacactgtaatctattaagtatacaatagtgtatgcctaaaaactaatgtacatgccttaatttaaaaatatgttattgcagtgttcaagctgagagccaaatcaagaatgcaaactatttacaa

SEQ ID NO: 825441 - DNA, 562 bp, Homo sapiens
gggaaatcaggtcaggttacgacgtgatcccagtggaaaagctgaactgtggactgtgatttaaaatagggaagaggtactgaagtgttgtttttatttttgtttacaaatcagcctttctaactattatgtactcccatccttctatctttttctccaccagaacgtattaacaggcatgcatataattaatgcttttcttgagataatattaaaattaacttcatctgtcaggccgtctgggctaaaagtacacagtcagatctgggtaacatttgagttgatgtaaatatgcccacacatactgacaatgcttaccatttattgtgtgaatgaaaagcagtgtaaatattgtttgttctactagggaagctccacattttaatcaaactttgaccgtatttctaaaatgccagagcatctggaattgttaaaggaactgatagtttttgtgtttttaastgttaggatacttgaaatccaaagggtaaagaaactcagctgatttatacgtttcttcctctttattttaatgtgataaaatgtagtttttgtcatgggc

SEQ ID NO: 825442 - DNA, 490 bp, Homo sapiens
tatgttctcataagtgggaactaaataatgtgtacacatgaacaaagaatgtggaatctcactggagacctggaagggtrggagagtggaagaagagtgagggataagaatttacttaatgggtataatgtgcagtattttggtaatgattacactaaaagtccatacttcaccactatgcaacatatccatgtaacaaaactgcacttgtacaccttaaatttataccaaaaaaggactgtgtggtcatataaataaatgaagcagaactgagagttcacaaataagtttttacctttatggcaaattgatcatcaattttaatcaaatttactaatttaatcaaaattactaaggtaattcattgggggaaagagagtcttttgaacaaattgtgctgaaacaattgaatatccacatgcaaaaaaaagttaacttagacacctcacactaaacacaaaaattaacctttacacatctcaaaccaaac

SEQ ID NO: 825443 - DNA, 549 bp, Homo sapiens
gagtgtctcacctccatctactgtccacccgcaatcctaccatggttatagttgagttattccaacagtttcacaaccagactccttgcctctcatcttccttccttccattctctcctgccaaccaaygtcagattcattgtgtcaaaagcccattttcattatgccattcccaggctcaaagacctttagttactttgaactgtccatagaatagagtccaaaatacttaactctttaattatctgaatccaacagaccttctgaaacttatctcctgctatacatctgtacacaattgccttctctggctgtgctggccttctcattcttcccaggcacactctgaatttgcctaccacctctccatctcaacctctctattcctttttcctggagggttcttctccccattcgtcagcagcatatatcctgcccattataatctactgaaatttctccttcccctgaattgccatatctaccacacacccttcctgtctgcttgcctgcctttcacaagcgtgtattaaggacccactgcctgcc

SEQ ID NO: 825444 - DNA, 549 bp, Homo sapiens
gagtgtctcacctccatctactgtccacccgcaatcctaccatggttatagttgagttattccaacagtttcacaaccagactccttgcctctcatcttccttccttccattctctcctgccaaccaacgtcagattcattgtgtcaaaagcccattttcattatgccattcccaggctcaaagacctttagttactttgaactgtccatagaatagagtccaaaatacttaactctttaattatctgaatccaacagaccttctgaaacttatctcctgctatacatctgtacacaattgccttctctggctgtgctggccttctcattcttcccaggcacactctgaatttgcctaccacctctccatctcaacctctctattcctttttcctggagggttcttctccccattcgtcagcagcatawatcctgcccattataatctactgaaatttctccttcccctgaattgccatatctaccacacacccttcctgtctgcttgcctgcctttcacaagcgtgtattaaggacccactgcctgcc

SEQ ID NO: 825445 - DNA, 686 bp, Homo sapiens
cagattttttaaagtttttatctaactgtatatagatagataaatatatgtatataatgatatgtgtgtgtgtgtgtgtgtgtatgtgtgtgtgtgtgtgtgtgtgtrtatatatatatatatatatatatttccaggacccatccaggatcttgtattaagtttagtcatcatgtctccttaggctcctcttggctttgacagtttcccagatgtcccttgtttttgacagccttgacagtttggaggagccctggtcaggtattttgcacatacccctctactggaacttgtctgatgtttttctcatgattggattttggttatgggtttttggaaggaagatcacagaagtagagtgccattttcatcacatcagaccaggggtacatataataaatgtgattatcactgttgatacggaccttgatcagtggccaaaagtcatgcttgtcaggtttctccactgtaaagttactcctagccttggccattgggagtgttttcagctggctcttggatttctttgacatactacccataatgtagcagtagtgggttggttgtttttttgtttttgtttttgttttgcaattccttactttctggcactacaagatgctccaggttcatcttgtacattgccagccgtggtcctagactaagccatttctccaaggatcccc

SEQ ID NO: 825446 - DNA, 603 bp, Homo sapiens
ccacagattctggatcttacccttgaagggaaaggggttcttttaagttcttagtttcttgcttgtccactccgtggagatatatcatccactgatgtatgagagaagtgacattgtagtgcagtggagaaatgatgctctttacaataagtgatgctatgccaattgaaattgaaaatgatggcctatccagtaaatgatactggaccaataccgaaagcaatgaatattgattcctgcctcacagaatatactccaaactcaattccaagtagatggtagaactgaatgtgaaatgtaaaaataattcaccttgaagaaagcataggaaactattcttgacattggtgtatacaaagatcttttataaagatacaaaaagcactaactataaaggaaaagattggtaagttatactttattagaatgaaaattttcttgttcaaaagatcgttaagtagagggaaaaagaagtcacsatgagttattttacgaaaggcttgtattcagagcatgtaaagaatgattacaagtcaaaaattaaaagataatctaatagaagagcaggcaaaaggcttgagtaggctcctcaaaaaacacata

SEQ ID NO: 825447 - DNA, 534 bp, Homo sapiens
ttgtctagtgaatgtcatttcccctatcccaaattagtgttagaatctgtttcaagagccaactcaagtaggtatcttgtcttcattacatcacctctaagccaggattcttcttaatatgcacttcctgggctcataactctaaagtatgtaaaacattctctagcttaaatattgagatattatttgttttttaaaaaaatgctttgtgctggaagactggtgccagtgatccaaactgcatgagtttgttggttttttctccgtatagctccctgaagccatctttttcatgtcctagtttaatctagaattgagttttgtatcatgctttgactttggcacctgcatgtacttctgctatagattttttgcttgattccagcttccagtttacctggagcatttccatwttccacctcttctttcttgttctcttagtgtgatttgacttagctgcctattcctgtgctgcctgtagcactaacattgatgttggctcttatgtaagaacatttctaccatcaagctgga

SEQ ID NO: 825448 - DNA, 608 bp, Homo sapiens
tctcctgctgcttttaggatcctttttttaatccttgatcttygtgagtttgattattaaatgtcttgaggtagtcctctgtgggttaaattttcttggtgttctgtaaccttcttgaacttggatattgatgtctctcgctatgtttggagggttctctgttattatttcttttagtgaagttctgaaccctatttctttctctacctcctctttaatgccaactctcagatttgctcttttgaggctattttctaaaacctgtcatcttgcttgttttttattcttttaacttttgtctcctttgtgtattttcaaatagcctgtcttaaagctcactaattctttcttgtgcttgattcattctgcacaatgagtcattcttgattcaacagactctggtgcattattcagtacatcagttgcatttttcaactccagaattttggcttgattattttaaattatttcgatctctttgctaaatttacctgatagaattctggatttcttttctgtgttatcttgaatttctttgagtttactaaaaacagctattttgagttctctgtctgaaaggtcatatatctctgtttctctagatttgg

SEQ ID NO: 825449 - DNA, 622 bp, Homo sapiens
aaaacagtatgatcttatacacagaaaaagctggaaactacaggaaaaaaaaaaaagtcttagaacagataaatgcatttggcaaagttacaggatacaaaacgaacatacaacaatcagactgggcacagtggctcacatctgtaatcccagccatttgggaggacaagacaggcagacagcttgaggtcaggagatcgagaccagcctgaccaacatggtgaaaccccatctctactaaaaataccaaaaaaaaattagctgggtgtggtgatgtacacctataatccaagctactcgggaggctgaggcaggagaatcgcttgaactcagcaggcggaggttgcagtgtgccgagattgcgccactgcactccagcctgggtgacagagcaagactctatctcaaaaaaaaagaaaaaatcagtagcatttctatatgccactaatgaaccagctaaaacacatacagaaaaataaaacacctaggaataaatttaatcaaagagatgaaagacctctaygacaaaaatgacaaaacactgaagggagatttgaagaggacacaaagaaacggaaagaaatcccatgctcatggatccaaagaactaacagtgttaaaa

SEQ ID NO: 825450 - DNA, 594 bp, Homo sapiens
agatgaaggtttcaacataagaattttgggagaacataattcagtccacaacacctgggtatgggaagaaatcaggagaactaaggagtgacttagaggtgtgtaagttcttgtctagcatccttctgccccatgcactcagtgggactgtttatacccatcacaccaggaacgactttctcatccattctccaaatggtgtgttcagcccactagcaaccccaaagttgtacaaacccctcctgtctcctaatgaagattcttccatattattctagattcagaaatagaacaatgaaactctcggttattcccgaagtgtctcctgaagaagtgatacattaatgtaggatctgtgccatatatcacccccaagccaacttgcacagatgtgtctagtaaaggcaagttataactatagcagtactgaagctatagggatcaatatcttcaaatggttatttgaacactctgttcacaccttcttggcaacaatgggtccaccyccacagagaaaaactcctcagatccatatacaaagtctttttttcccctatgttttccaagaatattcctcttttccaagctccattc

SEQ ID NO: 825451 - DNA, 441 bp, Homo sapiens
gtgccaggcaggaggcctgagccacttactgattgtattacttttgacagcttttccctctttgaaccagcttcttctcttgcaaaacaggtttaataatacttgtcaactccttaaatgcctgggttttgtgctctgagttaattcactgacaggtgttaccagaacaacttatcaattgcttttaacttcttgacaatgatgtggtttttacagattctcagagattattcgaaccaaaggaaggaatgacccggtaatagggggatgaaaagtctttcaaccaaagaggtcatgctaatattggcttcagccaaaagtcaccaaatgtgttgctttttggcttttgcactgatcttttctycttttggctgcaagcttctgacaacagaagcctctataacaggagattgtactattaattattacccaattaaaatt

SEQ ID NO: 825452 - DNA, 614 bp, Homo sapiens
cactcctctgaaagacaaaatgttagcacagagcaaaacagagaaggcagaagaaatgaacccgtatcataatctggaaagtgggatggccaatcttctcaagccaatagatgacttctgcacaaagttctttgtgggaacagaggtaaattgggattatctgcttttaaaattaatacttatttatactaaaatatgttattacaatatctactgtacatttttgctgtgtaaagacataaaagttataccattttcatattttagtatgcttgtttgcattaaacatttttaactctgatacctcatagtttcacctttaaaatgttcctgaacgtatgtggacaaatctgtaaaattgcatactttttaactaataatatattgttcaatctacaaatattcatcaaatacctttatcatttggaagaaaccatactaagtgttagagatttactaagaaactatagtgttttgttgggctaacacaatctagtagaagagacagaaaaaactcactcatttcaaaagataaataacaattggatataataatgataatggctgccattttctaaggacatactrtaataataaccaaagcgagttcacat

SEQ ID NO: 825453 - DNA, 221 bp, Homo sapiens
tgccaagttattttccaaattatatcccatttaatcycagtaatcctgtaaggttggtattattattgccattttataaatgaagaaatgaggctcagaactttatctacagtcatacagaggcagagatgctcttttcactcatgactctcattccctgaaatacagagtatttttcccaggccaagtcaccatgagaagaggccatagctcagtctcac

SEQ ID NO: 825454 - DNA, 634 bp, Homo sapiens
ttttttatgcggcgcagtattccatggtgtatatgtgccacattttctttacccagtctatgggcatttgggttggttccaagtctgctattgtgaatagtgctgcaataaacatacatgtgcatgtgtctttatagtagaatgatttataatcctttgggtatatacccagtaatggaattgctgggtcaactggtatttctggttctagatccttgaggaattgctacactgtctttcacagtggttgaactaatttacattcccaccaacagtgtaaaagcgttcctatttctccacgtcctctccagcatctgttgtttcctcaccttttaatgatcgccattctaactggtgtgagatggtatctcattgtggttttgatttgcatttctctgacgaccagtgatgatgatgagctttttttcatgtttgttggctgcatagatgtcttcttttgaggagtgtctgttcatatcctttgcccacttttcgatggggttgttttttttcttgtaaaattgtttaaattccttgtggattctggatattagacctttgtcagatgagtatcttgctattacaaattagtctrctatgataacttctgtacaagttttccttacagacatat

SEQ ID NO: 825455 - DNA, 313 bp, Homo sapiens
tgccaccatgcccggctaatttttgtaatttttgtagagacggtttcgccatacagcccaggcttactcagtctttttagaaaggatggtaatagcatgggccttagagtcagaaagacttatagtgtgatagactatttaatattcacagaagtatgtaactttcggcaagtgatttaaattccctaacaggcagttcttcacttataagtggcacttataattttacctagtgytgggcatggtggctcacacctgtaatcacagtactttgagaggccaaggtgggcagatcactggaggtcaggagttt

SEQ ID NO: 825456 - DNA, 423 bp, Homo sapiens
ctgttcccagctgaaatcaatttgtaattattaagagtcgcagaagaggccaggtgcagtggctcacgcctgtaatcccaaaactttgggaggccgaggcgggcagatcatgaggtcaggagatcaagaccatcctggctaacacagtgaaacccccgtctctattaaaaatacaaaaaaattatccaggcgtggtggcaggcgcctgtagtctcagctactcgggaggctgagacaggagaatggtgtgaactcaggaggcagacggagcttgcagtgagccgaggtcatgccactgcactccagcctgggcaacagagcaagactccatctcaaaaaaaaaaaaaaaaaaaaaaaaaagagtagcagaagagataattcgtctaytcctaaaatcaatgttgtgcctaacccagtggcttg

SEQ ID NO: 825457 - DNA, 553 bp, Homo sapiens
cttgcttttttctctgctgtgaaagtggtatgtgtgaaataaggcctgcttcttcagcctggatcccggaataagaagacttgcagcagctcatccacaccacagtgcatagcatgagaagaaataaatgtttgttaccgtatgtcactgagatgtaggggtcatttgttactgcagcaaagctgactaatatatccctgtcacctttctgaccagctttgcctgtagtctttccctgactctgctccagccatcatgaccttcttgctgttttcttaaatatgccaggcatgatccttccccagaacctttaaacatactgttccctccacctgaaaatactcttcctctcccagatatctgtgtttcttgctttctcctttttcagatctttgttccaatgtccagttccttttcttaccttatttttctccttagtagttcttaaaatactarttatattttcctcctttatttgtttatttgttctgtcttcccctagaatgtgagcttgcacaaggggttttgcctattttgttcactgctgtatccc

SEQ ID NO: 825458 - DNA, 658 bp, Homo sapiens
ccatcaggggagctaacttttgcattataggagttaaataaaaaaagagaaacagaaagggggaagcaagctaagttaaaaaaaatagctaaaaattaccaaaatctgaggatagatatwaatatttagatacaggaaggtcaaaggtctctcatcagattcaatgcaaataggactacaacaaggcacatatcaaaccatcaaaaattaaagacaaaaataggctcctgaaacagcaagagaaaagaatatcacacatgacggaattttaatatcatctcatttatcagcagaaaccgcacaggccaggagagagtaggatggtatattcaaagtcctttaggaagaaacaaaaccagaaaactgttaaccaagaatgctttagctgaaatagctgtgtttcagaaatgaagagctaaagactttcccagaaaaacaaaaaccaaaggaattaggtaaagaacaaactaagctcaaagcccaggaccccacggcttctctgctgagttctactaaacatttaaaaaagaattaataccaattcttctcaaactgttacaggagggaatagtatagccattatgaaaaacagtttggaggctcccccaaaaatcaaaaatagacttaccatatgattcaccaagcccactactgagta

SEQ ID NO: 825459 - DNA, 671 bp, Homo sapiens
cagtcataggctccatctttttcttgattatttgagaaaagcaaacacataaacaaacatcttaagactttyaattgttacaaggttatgagttccaacgtttcttagaaaaccaagaaattttctaagaggcataggattctgatggttgtttaatggaggatgttaaatgtgatgatgagagggaatgtcctgagcagtgacaaaggcagaataaaatatgtgttagaagaatccagaaataaggaggtgaagatatctacttttataaaggcaatctagctcaacttctcctattaagaaacagatgagaaaaattaggcataaattcactgggtgcattacagacattgtcaggcccagttctgtggtctcctgacttccctctgtcatttgtgttctgctctgcacccttacttctgaagtgggtatctcttttgtataggacttttccaccaatctttactaactaattaattctatttggaggtcatattctacaaaagaaactgaacagatataaagtgatttggggtgtgagaggtcaaactgaggaggtcattttgctggaaaatgagagattttgttataccaataaagcataataattggtgactgagagccataatgccttatgctctggttaacctaatcaacagaatctgcaaaat

SEQ ID NO: 825460 - DNA, 633 bp, Homo sapiens
cacattatcattacatatacatagtgtatatgaaatatatatattacatatatctcacatttattaatcataccttactaaagctgcaaaaaagagtggctcaggcagcaaaaacattatctcawatagcaagaaatcagaaaataggtggttccaaggtttatttagatatttaattaaattatcaatgattaagggtctttccatctttctaatctaccatccaacatttactctgctatggttactactatggttggccaaagactgtgttgaccatttattaatttaaacaattcaagaaacaaaaaatcccagattccctttggattaaatgctaatttataaaattagaaaaagaatatagattaatacttttaagactttattttaggaaagaaaataactctttaaaaagtcaaaaattttaaaaatatttaaaaaatattaatttgactgtattaaaatattttacatatcaaattgttatgaagagagtgaagatttaagccacaaattaaaagatatttgtaacacaaacagccaacaaagaaataaattaaaaatatatatgttataacaatgagtcaataagaaaaatacaaacatttcaataaaaaattgacaaaaggt

SEQ ID NO: 825461 - DNA, 591 bp, Homo sapiens
tcattactagatatcactttcttcccttccagcaatttgttccaaactgcagcttaaaatgtcacattattgatgtggcattatcaagtttcatcatgattgacctgatgtcacactgttttgtaacacaactggttgctgtctatcaaaggcacttacagaaacctattataaacatggagaacaatttgtgccagcaaagaaccatctggtatactctttgctttaaagatgagccttgtggttatttaaaaattattaaagtttaaatgtgaattttgttactattaaagcctttgtttgatccttgaaattgtcaacattttgatacttctctgaggtaggtaaaaagttttaggacttttctttatgtatgagttttaattaatgttggtgacccacaagagcgatcaaaagtggaggttcacttataacccttcctcggaaaagaaaaggcatttttttatgaggatgctttgtgtgtgtgtgtgtgtgtgtgtgtgtgtgtgtgtgtgtgtgtttgagaaagagagasagagagacagggacacagaagggtattgtagggagagaaagaaagggagaagttga

SEQ ID NO: 825462 - DNA, 556 bp, Homo sapiens
attgtgctgtcatctgctaagtgtctggtgaaggctcagggaactttcaatcacagtggaaggtgaagttgggagcaagtgcatcacatggtgaaagcaagagcaggagacagagagaaagagagaaagagggtgggaggtggtggtgtgccacatatttttaaatgaccagatctcacgagaactcatcatcacaaagacagtaccaagccatgagggatccacccccatgattcaaacatctcccaccaggacccatctccagtattggggattacaattcaacatgagatttgagcagagacaaatatccaaactatatcacttggcttgtgtctgggaagtgtgaatccccaggctgaatgattaattagaatgacaatagaggcctgctcaaggtggatccccaggattcaagtacrgctgcatcacaggcatagggaggccttgtagacttgtccttgtggcatgggccatggagccaatgcaccatgtggattttattgaaaatatctgccctttactagagagactataaaccccatctgaaatatgc

SEQ ID NO: 825463 - DNA, 480 bp, Homo sapiens
tagctgtgaaacttgtattgaacaaatcaggtagttgcttttcataaaccattgcagttctaccatactctgaccatatgataagacccagtgaaaatttaaaaaagaaaaaaatgaggaaaactaagaaatawttagtagcttatatctaggctacacatttaatgtgagtataaaaatgtgtaatggcatccactaatatacatttggcatactgtgtattaatcaagtataaacttaattgaattttaatacatactaaatcaggttatatttaatgactcaagaaaaagtctactcaagttactacttaatatgtaattaacccttgacatctaattaagaatatttctttcttaaattgtgtatctcaaaacttagaaaaaatactgattgaacattgtaagatttattaataatgtttagaattaatattttaaggtatacgtgaatgttctctaaagaagacctactcactat

SEQ ID NO: 825464 - DNA, 576 bp, Homo sapiens
tacataaagaaaatttaagaaaatatttggtttgattcattaagattcacattataagattatacattatagcgagagggaaaaagactggtttaaacttaagacattaatcattcaacaaacacttattgaattcagtgtgagcaaagctctaataacgcaaaaatgaatagtttcttgactaaagtctagtaagggagaaaaattggaaaacaataaatatgaagtgtagaaagattgcacaaaaaatacaaaaggagaataaacaaataacagaaactcatagaaattaaccaattgcttgagtaaattgggatatatttttcaggaagtttgagatttgagctgtgcctagatgaatgaataaatttccaaggtagaggggaaatagcatttctgatatcagaagtagcactgtgcaaaatttcaaatgtatgaagttctgtaacagactcagggaaagaagaattgttctgtgataggaaaactttgtaataaacgtgaataaaacaaaggaagtyagaaaattatgtggatctttaaaagtacaaactgtaaagcacttattaatgatgt

SEQ ID NO: 825465 - DNA, 636 bp, Homo sapiens
ttggcaagagttcagtcaccagagttagctaaacccttgtgtcattttcagtctctttgttgtccttttcctgtatgtcccagtacatcacccctgatcgtgcttgctgaattggtarccctcttatcttgttcttttgtgctttgctgtggcttatggactcccattgcaggtatctcagtgtcctgctgttagcatcaggacttggccagctctagggtttctttactgtgtactgacactgatcattttcgtttttcttagcctctgtcctgccttctgtattgagtcttttctcttatttcttttgtcatcctatcccttttttccctcccttcttttctcattttgattttttttttcttccctgtccatcccattttagtatacatgatgcatgaccctgcctttttttttttttttttactgtggggggagggttggcttttttgatgtattttaaattatgcttttgctctggtcattttgggaaaacatttatttataagcaggaaaccttgtcactttgatgagatgtgaagatatttcctgatataaccattaaaataatatcaccctctggagataaactctccctctctagtacttccaactctctagtatagcagacattat

SEQ ID NO: 825466 - DNA, 477 bp, Homo sapiens
aaaaatatcattggctaagttaatcaaaggaacctgagagtaaagccaatattttaggtaaaaatgggatccttaattcctggaaaaccaagttccttctggcttatatgttaggcccaggaggcaatgaagctcacagaaaaggaaaaatcttactaaagataacttacagtggttcattccaaatgaacaacaacatgcagaaatgcatttaaaaatgagggttcccaaattagtctaatctaaggatgcctattaatatgcagaagcttctttaaaacattagagattacgggacctatctgggggcacatttgggcctcgccagtttgatattgggtgctaagctgagggctaatgtctatgttttgtcaacatgttttgctctggccagaatggaaacagataatttttctttgtgttgtggcttggtcccagggatgtrgtgcagccagccaggtcgctagggctgctcag

SEQ ID NO: 825467 - DNA, 457 bp, Homo sapiens
aaaaatactcaatggtatgctgcctataaragcctcatctcacctttaaaagcaaatataaatgaagagatagtaaaagatgcttcatgcaaatagaaatggaaaaaagccaaggtacctatatgtatatcagactaaatagattttaggtcaaaaactataaaaatgtaaaaagagacaaagaaggacattatatagtcataaaagggtaaatttatgaagtgaatataataattgtaaatatatgggtccacaaatggagcacctaaatatataaaataaatattaaagaatctgaaaagaatgatgcaatacaagaataggaactttagtgcctcacttttagcagtggacagattatctagaccgaaaattaataaagaaatattggatttgaaaaacaccttagatcacaaacaatttcattcaatggcaaatgaatacaaattattctcaa

SEQ ID NO: 825468 - DNA, 627 bp, Homo sapiens
ttaacataatgtcctcatctgtgttgctgcaaataacaggatttcattcagttttatggccgaatagtattccattatgtgtatatgtgtatatcacattttctttatccattcatttgtagatgacttttagatcgatttctatatcttggctattgtgaatactgctgtagtaaacatgggtgtgcatatatatatatatatatatatatatataatctttgacatactgattttatttcctttggatatacacccagtaatgagattgctagatcaaaccgtagttatatttttaattttttgaggaaccttcatactgttttctgtaatagctgaactaatttacattcctaccaacaatgtactgagtttgctttctctgcattcttcccagcatttattttttgtctttctgataatagccattctaactggggttaggtgatacctcattgtgattttgatttgcatttatctgttgattagtgatgttgattttttttggatgtctattaacyattttcatatcttcttttgagaaatgtctatttgggtcttttgcccgttttaaaatcagattatttgcttatttttgctattgaattgtttgagttccttataagt

SEQ ID NO: 825469 - DNA, 600 bp, Homo sapiens
ttgtcgatgatggtgaacttttccacatgcagcttagcttgttgatgatggtgaacttttccacatgccaatggtttcatgcraagagtacatatagcaccagtgctgatactgggatgaatagcctaccttatttgtcttctcgatgccttctaatcaatgtacgaacagtcctacatttctccaaatgaccataaatatctatcttcaaagctatgctgacagtaaacatgaaagtaacaatgctctactaatatgaaaaccattcagcagacaaactgaaattacttctgtagtagaactaactatttaacataagtcctgggtacacatattgaaaattaataagctacagcaaagaagaaatattttccctcataatccacaaagcaatttgctctaaagaataaaaagaaaaaggaaaggcaatggacagttgtgtaagcatcaaagatcttgagagaaactgccaaaaaaaagacaaaatctcttcggagttagacagcaccttctttgggccagagctaaaaaaaaaaacctcacatagccaccaaatcccagcccaccacatctcaattagctaaaatgataaataactgt

SEQ ID NO: 825470 - DNA, 611 bp, Homo sapiens
acgtttttatatggaagtgtaacttaactttagaaataaaatctaacaattccaaatattttttataaatgtatgtgtcttattttgtaattcaaagtatgtcgattttaggagaatggcattcttatttaagtcacagctgtttcaatatggcattgtttgttgctattgagattcaaatagaagataatatttttgtaattttttaagtgaattacccattgataaacaattgagaaattttcaaattgggaaatgaaatcaggtgagtgattattgttgctgttcagcatttaaatagggagagtaatgatacttctttcaattcacaatttaaattttaaagcaaattacctgaaatagtaacccaatagtgtcatcataagtacatgtgtgtatatatttgggaggctaacacacactgtttgctcttgatcataaaagttatgatatttgttacctgaaagtatctctaagtttttgaagactgtaaagtagttaactaatttaaactaaccrttttagttaagatcaacgtgtgggtcatttcactatttgattgcaaacttcacattttcactcaaattgccttttattattgctgcaactcc

SEQ ID NO: 825471 - DNA, 640 bp, Homo sapiens
cataatgtatcccaataaagctattattttaagaaatagtaaaatctgcctgataygaattatttttaatttagaatattttaagggtaaattttaaaatgcttaatgctgtgtaataacatttttgaaagctatttcaagatgctaatttcttagaaaccagaataaaaagcatgctatcattgctcacatttttcagacccagaggagcttccttatctttttatttattgaattgtccattttagaattagcactcattgaactgagaaaaagtgtgtacttttgcaaatgagtgaactgaagtgaactgaatgaaactgggacttttaaatgatgtccaaactttaaattataaaatgataatattacccatttttaaaaacaccatttcatttttctttcatgttattttactttcatagtactgataagcctaaaaagtaaatgctaacactataactttcatcagaaagaaaaaggatagaattttctgtgctgattttaaaactctaattgtaacacagttgccctttataatcacgcagacttttagttttgctcattgatgtttgacagatttctgctaattttgatttattaggttgttttagattatttgccattgctctttttttgc

SEQ ID NO: 825472 - DNA, 552 bp, Homo sapiens
aaagttatagtaatggagaaatccaaaacgaaatctatgttggaaaatagascattagctagcggataatgtgataaggagggaaaatagtaaattgagaaaagattagaattagaagagggaatattgccaacaaccacgaatcacactttaacagcatgaatcagcaaccttgctaaattctctaattaggtctaatagttgagaccaggcgcggtggctcacacctgtaaccccagcactttgggaggccgaggtgggcagatgacctgaggtcaggagtttgagaccagcctggccaacatggtgaaaccccgtttctacttaaaatacaaaaattagccaggtgtggtggcaggtgcctgtaatcccagctactcgggaggctgaggcaggagaattgtttgaacccgggaggggttggttgcagtgagccaagatcgcaccattgcactctagcctgggggacagagcgagactttgtctaaaaaaagaaaaaaaaagttgttggtggaattttttgtttgcactttcttggtagacaattgttaa

SEQ ID NO: 825473 - DNA, 552 bp, Homo sapiens
aaagttatagtaatggagaaatccaaaacgaaatctatgttggaaaatagagcattagctagcggataatgtgataaggagggaaaatagtaaattgagaaaagattagaattagaagagggaatattgccaacaaccacgaatcacactttaacagcatgaatcagcaaccttgctaaattctctaattaggtctaatagttgagaccaggcgcggtggctcacacctgtaaccccagcactttgggaggccgaggtgggcagatgacctgaggtcaggagtttgagaccagcctggccaacatggtgaaaccccgtttctacttaaaatacaaaaattagccaggtgtggtggcaggtgcctgtaatcccagctactcgggaggctgaggcaggagaattgtttgaacccgggaggggttggttgcagtgagccaagatcgcaccattgcactctagcctgggggacagagcgagactttgtctaaaaaaagaaaaaaaaakttgttggtggaattttttgtttgcactttcttggtagacaattgttaa

SEQ ID NO: 825474 - DNA, 590 bp, Homo sapiens
atgtatcaaagcaggttgggagcagtaataggcatgttttcaaatggcatctttaattcctgcatatgacttactttagccattggaggaattaccacagtactaagctgtaactcaatagatagttgcattggatgtcttaatccagtccttttttaaaaagaaataatgaataattatttccctttcccctgtgcatatagtaagtcactaactacatatggatgactggtcatggtgtgaaatagtcacatgatataagaagataaattttacagcattgcaaggcaaaaatagcttttaaaactgccttcttgttctacaataattaaaaaagaggccccatattgctctccagggtattaatgcatgacattcatctttaggtaattagcagcatatatcattagccattaagcaggcaataccagggtttttcacatgtcaggatgagatttgcagtttggtctttctcctctaacagastgggtccagcacaaacactaggcttttacaagtttaagcagaaaatggcttggctgtctttactcaaatcctttagtcaatagttcttttatggacattttgta

SEQ ID NO: 825475 - DNA, 607 bp, Homo sapiens
aaaactacctctcagatttcattctaacactaaattgaaaattaaaatgaagttttcaatttgctgagcagatattgaatggctagatggatggatggrtggaagggtggatggatgatgaatggaaactgaatgactgatttcattggtgtgtagtgccatatgtttgtgaaagattcaataaaaagtctgaaaaataagtggattcacgaagcagtgccatttaatttaaaatttaattttatttcatgtttctgtttgggatcctggacacaactcatttaagtgaaaaaagggaacacggcaactgatttctttctaactccggttttcttttctgagcgccttaaaaacttctactggtaccagttcttacctttgtttcctttcatgtatcttccaggttgcattttgccaatttgttttcagctgatctttatgtactaacaaattggcagaatgacaaagacaagcagggaaataagagaaaatgccaaatgttattttctccacccgcaagcagtaaaaagggagaacattccactttcatctttttaatatgagtacttcttttgctcctggaatgagaaagtacatcctgctttat

SEQ ID NO: 825476 - DNA, 587 bp, Homo sapiens
tgttagaaaaaatatattgaggaaaaactatggtccctttagctctgtgcacccatgacaatctactgcttttcccaaaaattatttacaaactttatgaagagtaatgttgtaattatttacataatttatataaattttaacttgcatattagtgtagagaaataaattctgaaatacaactgtcatattttatatttttcataccctttgagaactttgggactcactgaatcaacatgtaaagtatgtgcacgtattcagagtaagactgcttagctttgctattctaagtgattatggatgcttctggttgttataaatttgcatatgtaccagtctgttttcacactgctaataaagacatacgtgagactgggtaatttataaaggaaagaggtttaatggactcagaggcctcattatcatggcagaagagaaatgaggcccaaagtcacatcttacatggcagcaggcaagagagcttgggtaggggaactcccctttwtaaaactgtcagatctcctgagacttatccactatcatgagaacagcatggggaagacctgcccctatgattcaattac

SEQ ID NO: 825477 - DNA, 611 bp, Homo sapiens
ttttctttctgatgtgctatttttatctgtatagggtttaaaacacrtcctttaaaattgcagaggaagaaaaggcttggaggtgataaaggaataaataagttcattcccttgattatggtgatggtttcataggcatatgcatatgtccaaactcatcaacttgtatacatcaaatatgtgcaatttactgtatatccaccttatcttaataaagctgtttaaataataataaaataacattacgaagggaaaaatcaactttggtaactttttcaaatagacacatttatctttctctggcctggcagatacattacacatttagatgatctcctatttgtaaataaacatatatttgtatggagtgtatgtatgtttgtttgtgtgtgagtgtgtgtgtgtgtgttcccttttatgtccaattggtaatttagcctctttgggtcagtaattccattttatgatttaagaactaaaaatctcattagaataaaaaacttctcttctaaaagatataaacttccatatgtggggtaagtgttctgcaccaaaaagtaaattaagttaatctttttttttctctaatgtgggaaaagttgacaaacata

SEQ ID NO: 825478 - DNA, 578 bp, Homo sapiens
gaaggtagttcaccaacccaaagcaaattcctggcagctcctatcactggtttatgtaacatggtgaaaactgttaaatgtctttcagaggaagactcatgtaggtgattacaggcaggaacacaaaagacatgttgcatgttctttttcttttgaagcaggtaatgttgtgcaacaagcagcataatatcaaagttctgagcttctttttttgaactaccccctttgtcttttctcttagattataggccagagaaaccccaaaacgtgaaaatgtggccttcattcgagttcaactgtggcctctgctcatgcttggaacgtgaccaaagagatggttttctatttttagtttgagaagtcctttacattttctctttttagtatagacacagtcaaagatttcattcatcatttatattctaatgtttggcttgtgtcagccattctgtaaggtacaagttgaccaaccttctcttggtgaacaggtgaaatttgggtggtccacggtaggcccagtggatyggtccattgataaactcagtaagtggtctttggtctttacgtctctttgtgat

SEQ ID NO: 825479 - DNA, 612 bp, Homo sapiens
tttataaatttccctgtctcagatctttctttacagctattcaagaatgacctaacatcratctgtaagtgctcctcccaatccccctcctcacttcaagatacccctcctctttaggctgaacaaatgtataccttccatatgctgatttgtgattttatctatgattcctgtctccctaaaatatataaactcaaactgtaactgaattgccttggacacagtttctcataagaccgttccctgggccatggtcactaatactggctcagaataaacttctttaaatattttacagaattctttttgtcaaaaatcttatgcataatgtcttttagtaagtctgttttcctaggctgcaaacttcacgggtatttcttagctttttttctccttctaatgagtaaagaggactagagggagctggcgtaggataacatccttccatcaggtgggataaggctctggtaaagtatttcttgtggagaggaggcctttgttttggagaatgctctgtgcatgtttcaaaggctatgctttccctcatcctgccagggccaggaggggctgtttctcacatcttcatcatgagaacctgatggattttctaga

SEQ ID NO: 825480 - DNA, 612 bp, Homo sapiens
tttataaatttccctgtctcagatctttctttacagctattcaagaatgacctaacatcgatctgtaagtgctcctcccaatccccctcctcacttcmagatacccctcctctttaggctgaacaaatgtataccttccatatgctgatttgtgattttatctatgattcctgtctccctaaaatatataaactcaaactgtaactgaattgccttggacacagtttctcataagaccgttccctgggccatggtcactaatactggctcagaataaacttctttaaatattttacagaattctttttgtcaaaaatcttatgcataatgtcttttagtaagtctgttttcctaggctgcaaacttcacgggtatttcttagctttttttctccttctaatgagtaaagaggactagagggagctggcgtaggataacatccttccatcaggtgggataaggctctggtaaagtatttcttgtggagaggaggcctttgttttggagaatgctctgtgcatgtttcaaaggctatgctttccctcatcctgccagggccaggaggggctgtttctcacatcttcatcatgagaacctgatggattttctaga

SEQ ID NO: 825481 - DNA, 550 bp, Homo sapiens
taggaaagaaataactgaatctttgtttgcagtcacaatggtaatctacctagaagagccaacagaatcaacatagcaactattagaaattttaagagaatttcatgaatttccaggtataaaatttcaaaattaacagcttttttttttacaaagagcaatattaagataaaaataaaatggtattcacaatcattagcaagataaaaataaaatagtactcacaatcattagcaaactataagttatttatatatttacaatgaatatataagatttcattgaagaaaattttagacatctattaaaagaaaacaaagaagtctgtcatggagtgacattcccttgttttagactttctagtgtacagagggtaattctctctccaaatcatctttaaattcattaaaatgttaatcaaaatttcaactggatatttttaggaacttgataaatmatattttaatatttgcatgggaaagtggtagtccataaacagctgtcatttaaaaacaaagaaacaaaaacaataaaggatttttggcttact

SEQ ID NO: 825482 - DNA, 537 bp, Homo sapiens
aggagctagaaaatccagatcctgctgaggattaagaagtcaatcttgttgtatgacccaaaccacattcayaaagaaagtttcaatttttctgatgggagaaaagtatataaattgaatattctaaataccagaaaagaaaataatcagtcaagccaaaaagacaccaaattaatagtcagaagtcctaggtttgaatcctgtctctcaccatttctgagtcccttggccttatgacattgaaactatattagcctcatctctacaccttgcagatagttgcttctgtccttcatgggactcaaataagattatgtttaatgaaagagtgagacaaaactataagatataatcattgacaataatacatatcagatatttgtttagggccaggagatacaaaagagttaaaaatagtaagagtagtcatgatagcgctggattctcaaaggagaaggaggtgggtgttcccaagaggaagcataggcaccaatagcaggtggaacaatgacgtcaaaacaataggaatggaggaaa

SEQ ID NO: 825483 - DNA, 420 bp, Homo sapiens
tgctttctgacttaaagcctcaccttgccatctactgtgtcatgtgctcttatttccgtaagtgtaggcaaatagtacrtttgtatttcatacccttagttctatctaggtgttcacagggcagttctcagagaaacatgaggtctgtgtttgtcaataagccacaacaccttgtgatatgactgggaggggcctggtgaagattcttactgctttcagtatattcacctcagcttctacctaggaccaatactcagggcgagggtagaaaggaggtaatgcagcatcctgggcaccacagacagggctaggcgagaatactaacaactattcctgtttcacaaaaaacctgcaaagcacatttacacgttctttcattcagtttcccaaacaaccttgtgagataggcaaggaaggtat

SEQ ID NO: 825484 - DNA, 420 bp, Homo sapiens
tgctttctgacttaaagcctcaccttgccatctactgtgtcatgtgctcttatttccgtaagtgtaggcaaatagtacatttgtatttcatacccttagttctatctaggtgttcacagggcrgttctcagagaaacatgaggtctgtgtttgtcaataagccacaacaccttgtgatatgactgggaggggcctggtgaagattcttactgctttcagtatattcacctcagcttctacctaggaccaatactcagggcgagggtagaaaggaggtaatgcagcatcctgggcaccacagacagggctaggcgagaatactaacaactattcctgtttcacaaaaaacctgcaaagcacatttacacgttctttcattcagtttcccaaacaaccttgtgagataggcaaggaaggtat

SEQ ID NO: 825485 - DNA, 420 bp, Homo sapiens
gtaggcagctagtcttgtgaatatgtactcacccttcctctagggcattactgctccccagggcccctctctgcctcttcaaatccaggraaacttgctgtgattaatcctctgtgttgtacttcagaaatcaccttgtcagttgcctcgggtcctctcctacactccacattgatgcagcctgttcaggaagtgctcctaaggcctcccatcccacttcagcatctcctaggggttttgtgggctgtgtggtctcagccttccctctgacccatctgcttccttttcttagggatccctaaccatttctggatcaaagagagtttccttatttttttttcccaatacgatgatcaattaaaaacatctttccaattatttctatggttttggataaggagaacaaggtgtttgtttctg

SEQ ID NO: 825486 - DNA, 248 bp, Homo sapiens
gttgaagatgaatatctctaacacaggaaggagcaaatatctgccattttccaatacaggaaataaagtataagaaaaaaggtttcaatgatttggtgtcacttctcagtgagaagacaatgaaattctactgccctgtccctgagacttgtgtggcttccawcattcacagcaccaggctctgaggcctactcaaagcctcattaatttgcttaggtgagttggcaatatcaagtgcaaagattgaa

SEQ ID NO: 825487 - DNA, 490 bp, Homo sapiens
gaaaacgaaaagagaggaagatcagtgcacctgctagaagacaggtgttaggtaagcaaggaccaagtttcagatgccaggtgagttatttagagcccaatgaacaaaactggtctatagcccctgaagcacacatcctcagattttgataaagcacattaaacacaggttctacatatgcaagttatatgtataatccaggaatttgtaaagaaggagttcaaggatagaagtctgatgaaatgggataaggatgggatctgatcctgctcataggaccatgaaagtggtgtaggggaggtgggagctggtagagatgaggagaaacagcaaaaggagatgcagaacccgagtcttagtggaaaccaaacactgaaatccgaactcaggcttgcagacactgaaaactcaggcaaacagaagtagagcagcaacagatcctagwcagatctgactggaggccaggtaaaagaatgcagacaataaaagg

SEQ ID NO: 825488 - DNA, 601 bp, Homo sapiens
aaaataactgcttgtaggaagaacatttatcatatagacctaaataayagtctaaatctaagaagctacaactaagaatgccaataacttagatatttttatctacgttttagcagagtcctgtctaacttattttttatacagcttgacattggttaatgcacataaataaatgacacctagactgataatctcttcatgagttaccctaatttctaaactgaagccacagaatgcagtgcaatgcctatcagtttaattatacagcaagctaaaggaaatcatgaaaggcatagtgttgtatatgtctaagaaaaaccaaataatgttgggagaattcccagggcaagtacccagaatggatcttcaattactcgatcaaaccaccattccattccattccctttttaactctccaattacttcaactttctaattggttaatgtggctggctaccagaaaattaacataatttgcatatttagccacacactttaaatatatttctaagtggtttgagacagaagaaatagtttgtaagtgttccttgaatactgaaaagtacagaaaaacaagtaaatgctaagaattcggtcccat

SEQ ID NO: 825489 - DNA, 520 bp, Homo sapiens
gtggcaatcagtgggaagtcttaattgtacagatgagatgttttagctgagttctaaatgacaagtcatcttcaagttcagcttggaagtaaaaatatagttttctataattctgagttcttagggaaagtatgtgcaaagtatacagttatataaaaatacacagtcacatacctttaagtattatagcatcaatttgaatacacattttaattaaaatttgattattatatgcttctatatacttctataatctacatagaatgatgttaatattccaaattaacattattttcatttatttcaggcaatcaaaatctacatgtttattaaatcaaaatatatttaaaagttttaatacttaattgtgacccatgtaatctcttcctgayactgggactaaacaaggatctcctgcccattcaaaatgtacagagattctgggcaattatcataaggcaagagcaataaattcacagcataagtaatgaaagaaaggaagtgtcactttttaaagata

SEQ ID NO: 825490 - DNA, 539 bp, Homo sapiens
ttgcaaacattttctcccatcctgtaggttgtctgtttactctgttggtagtatcttttgctgtgcagaagctctttagtttaattaggtcctattagtcaagttttgcttttgttgcaactgtttttggcatcttcgtcataaaatctttgctcatttctatgaccgggatggtattgcctaggttgtcttccagagattttacagttttggaatttacatttaagtctttaatctattgtgagtttatttttgtatgtggtgtaaggaagaggtacagtttcaatcttctgcatatggctagccagttatcccaacaccatttattggatagggaatccttttccctattggttgttttttgtcagctttgttgaagatcagatggttgtaggtgtgtggccttagttgtgggttctctattctgtttcattggtatgktctacgtgtctggttttgtaccagtaccatcctgctttggttactgtggccctgtattatagtttgaagtcaggtaacatgatgcttacagctttgct

SEQ ID NO: 825491 - DNA, 613 bp, Homo sapiens
cacaacagtactgcataatgtctatgagctcagtaggggcagccatagtctcatgcctagcacagtaacagaaacaaaccaagtccacatagaagcctttggaattacaagaagatattcccaataaaaactttgtttgatggggatctcacaggtgtcgcactcctggcctcaagtgaatctctcatctaggcccccaaagtgttgggattataggcacaagccacagcaccctcccttcttctaatatttgtaattcatattggcatattaaggactctgggattttaaatgaaatagaaaacactttttcattcagtatctttgtgagtaaaaataaaattcttaccaatacaaatattgaatgaaaaagttctaggttctattgtcagttatatcacttattagctatgataatttaggcaacttatttatttatttagagacaagagtcttgctctgtcactcaggctggattgcagkggtgcaatcttggctcactgcaacctccgcctcccaggttcaagcaattctcctccttcagcctcctgagtagctgggattacaggtgcccagcaccacgcccagctaattttttgtatttttggtagag

SEQ ID NO: 825492 - DNA, 393 bp, Homo sapiens
tatatatatatatacccctttatttatagtgcatctctgcrccaactcaatgataatatcttgggattttaaagacataagaagcctgagatatcatcaggtctgacttttcttctgtgcaacagatgcagccacaccagagcatatggccatcccttcactgctatgttactgtgaatgttcaatatattccatttcaacttgactacaagtttcttaagggaagccctatgtctgtgtgttgtgttgctataaaagaatacctgagactggataatttataaagaaaatgcttttatttagctcacgattctacaagctatacaagcatggtaccagtatctgcctaacttctggtgaaggctgagaaagcttttacttatggtggaaggt

SEQ ID NO: 825493 - DNA, 653 bp, Homo sapiens
taaattatcaattgctgctgccaagacctcccttgtgcttctaatactcttgtggctcattaacggcaaattttcgtgatctcttggaacccttttcaatagaggtcccacttggtcaatatttcttggtcwttgatggaccctggggcaatagattctaggttattgattttagattggctgcctaagtttggacgagtgtatgacttgacatgtgctgcttttaaaaacaaagatttttagattctaactctagagatttttccattttatggagaggttccaatggtgacatttgtaaagtttctcaggtgattctgatatactagtatcagatctgaggaagtcagttgctcacaacaagatggtgtttgcccaaagaagcacttctatgaagaaaagtcggtgtgaggaagggagggctgaagccaggaatagaatggcccaaagttataatttaccacaaagatgaaaatgcttaataataatgttcatcaaaatgcagtgcacatattatttgtattactagaggtaattagggttaaattatagtaatttaggagtatagtagaaaatatacctctttaacattaattcaagtcttaagaagtttcctttctttgaattatttttcggttatgctgactgcatca

SEQ ID NO: 825494 - DNA, 624 bp, Homo sapiens
attatcaattgctgctgccaagacctcccttgtgcttctaatactcttgtggctcattaacggcaaattttcgtgatctcttggaacccttttcaatagaggtcccacttggtcaatatttcttggtctttgatggaccctggggcaatagattctaggttattgattttagattggctgcctaagtttggacgagtgtatgacttgacatgtgctgcttttaaaaacaaagatttttagattctaactctagagatttttccattttatggagaggttccaatggtgacatttgtaaagtttctcaggtgattctgatatactagtatcagatctgaggaagtcagttgctcacaacaagatggtgtttgcccaaagaagcacttctatgaagaaaagtcggtgtgaggaagggagggctgaagccaggaatagaatggcccaaagttataatttaccacaaagatgaaaatgcttaataataatgttcatcaaaatgcagtgcacatattatttgtattactagaggtaattagggttaaattatagtaatttaggagtatagtagaaartatacctctttaacattaattcaagtcttaagaagtttcctttctttgaatt

SEQ ID NO: 825495 - DNA, 565 bp, Homo sapiens
ttgaccactgtgtataaagcttcattgaacgcaggagtgtaaagaagacataataatggccaataggtacatggaaaggtgctcaacattatagtcatcaaggaaatgcaaattaaaacacaatgagatatcacctaacatgtagaacaactatgattaaaaggataagagagagcaagtgttggtcagggtgtggagaaattaggaagctttgtgcactgttggtgggaatgttaaatggtgccgccactatggaaaacaggatggaaattctttaaaaattaaaaatataattgccatatgatccagcaatcccaattctggtatgtgcccaaaagaattgaaatcaggatttcaaagagataagtctcctttttctgagcagcttttcattggatttgtatcttttctctttagagattcttaatgacataaggaacaaagaattattattttctagttctctctaatttcccctcttcataaaattttctgttctggaaaggataaaaagcaggaaattyggtgtgcagaaaaataaagaaattgggctatttcaggtaaa

SEQ ID NO: 825496 - DNA, 682 bp, Homo sapiens
ttaaaatctactttcttggaaatattgctgaaatttttaatgagcatatatttatattataaaagcaataactgaaatactattaaaacttaaaatgacagttcattagaaaaagcagacaaatttctttaaaaggaagttcaccaatgaagaaatgaaaatgtcaatagatatgaaaattatttaactttattaattaaagagatataaattaaagtaatgtaatatacttttcctataagatttataaagatgaaaaaactttggtattttaatggcaagttgggagaaaatgaatacattgattattatattagaaattatttttatgggaaactatgcatcaaattgttacaaattagcacagacacggtttcaactctataaatgtccctgagaaaataatgttacaggttcacaaatgtgcataaagattttctttcctatgttttataatataaaataattagaaatgaaagaataaatgtccatgaatataaaattagctaatatattagagccatcaagattactcttgagtgctaaaaatgcaccgatatagaaaatatmttaactatattattagaaaagagaccatgcagtacatgatctgtacttgaaagtaaaacaaacaaaaaatctatttacatagattaatacctgaacaaatatgcatgctgat

SEQ ID NO: 825497 - DNA, 563 bp, Homo sapiens
gtttttgctttattagctcctgcaagaactgattgctaaaagcagcctgatacctccctcccctctctctcttgcttccttcctattaccatgtgatgcctgctcccctccaccttccaccacaattggaagctycctgaggcccttatcataagcagatgctggcactatgcctcattttatgtacagcctacagaattgtgaaccaaataaatctcttttgttagtaaatgacccaacctcaggtattcctttatagcaacacaaaacagactaggacaaatagtatctaacatcgagtaggcttactataaatatttgtgaagttaatgagtccttagactctaaaccattttctatagattgtgtccaagagatgtttgattaatacaagtttttgtacattggaaaactacttacttataataaatgacttagttgacctgaagaaactaaatcctagacccagcagtggggaaaactgagaaccaaactaattatactacaaaaccccaagaaggctcagaaattgatggcagtgaatacctttggaagtgagggca

SEQ ID NO: 825498 - DNA, 445 bp, Homo sapiens
cacaattggaagctccctgaggcccttatcataagcagatgctggcactatgcctcattttatgtacagcctacagaattgtgaaccaaataaatctcttttgttagtaaatgacccaacctcaggtattcctttatagcaacacaaaacagactaggacaaatagtatctaacatcgagtaggcttactataaatatttgtgaagttaatgagtccttagactctaaaccattttctatagattgtgtccaagagatgtttgattaatacaagtttttgtacattggaaaactacttacttataataaatgacttagttgacctgaagaaactaaatcctagacccagcagtggggaaaactgagaaccaaactaattayactacaaaaccccaagaaggctcagaaattgatggcagtgaatacctttggaagtgagggcaaa

SEQ ID NO: 825499 - DNA, 600 bp, Homo sapiens
ccagtgaaactaagcttcataaatgaaggaaagatagtctttttcagacaaacacacactaagagaattcatcactaccaagccagcactacaagaactgctaaaaggagctctaaatcttgaaacaaatcctggaaacacaccaaaacagaacctctttaaagcatgggtctcacgggatctatacaacaaaaacacacacaaaaaaaccgaggtattcaagcaacaaatagcatgatgaattgaatagtacctcacatctcaatactaacattgaatgtaaatggtctaaatgctctgcttaaaaaatacagaattgcagaatggataagaattcaccaactaagtgtctgctacctttaagagactcacctaacacataaggactcacataaacttaaggtaaaggggtggaaaaagatattacatgtaaatggacaccaaaagtgagtaggaatagctattcttatatcagacaaaacaaacttkaaagcaacagcagttaaaaaagacaaagagggacattatataatgatgaaaggccttaacaggaaaatgtcacaatcatcctaaatatacatgcacctaatgctggagctc

SEQ ID NO: 825500 - DNA, 487 bp, Homo sapiens
ccacaaacctagtatttatggaaaaagacatggatagatcctagggcttctttcaccacactcagatgttacagtttccaagctctagccatgaagagaccaaagtaacctagttttcagatatctaaggtacacaacagttagtgatctggaagatatttctggggcaaacattcaaagtttagagtttgaaaggcaatgagtaaatataaaaagtattatagtccaaactacaaatacatttaaatatcagacttaggagtttggacttcactataaaagctaaaattagcaaaattttattgtgtaaaaactaagtaaagaacatgggctattgattaaaatttatagcatccraattgtaaataaaagacagtacatctctcttttccccatccacttttccctacaatgtatacatatatcagaacattgcattgtagcccacaaatatatgtaattatcatttatcaatcaaaataaaaat

SEQ ID NO: 825501 - DNA, 614 bp, Homo sapiens
aaattgcttattttaatcttttcatatattgttttaatctatgactaagtaaaagaaaaacaagttccagaccatttcaatgttttaaaattataactaccttttccttttctcaaggtgaagtcactagaattccaagctcagaatataacaaaaaagtagatgaaaatggcttaaaaataattagcactttatgattttacaaagctcttcctcgtacattctcacatgtgatttcagtaatcctttaagatagcaaaatggaggcttaaagggagtaaatgatttgctcagggccacagaaatagcagagtggcccagacaaaaatctagctcttcagatgctttttcaaatgtaccaagaggaagacagttgtccctggtttcaagctatcattcaaaactttgggattcaggactcctctgaatcaaaaatcatggaattctagatacagaggaatacagataggttatctaattcaaatcactcaatttacagatgaaaaacctgaatacctgaatgtattcactcaactaaatatgtttgacttgttagaaaaacccaaaaaaagttmtttaattacagtccatatgttagtttttcttctccaatg

SEQ ID NO: 825502 - DNA, 508 bp, Homo sapiens
ttgaggaaacttgatatgatgttaaatttctaaaagggcaaggaaagtagaattgatcaggtagcagaaattttacacagttttggacatcagaatgagcatcctaagaggagtacacaaactttgaccgttttcttctaccctcttcactgcatgggtctcaaatctggccatggactcctctagactttctccttgggaaataggccactggtgagttttgcagaatttcaacagcaactttacccaaatggccaaaaaaaaaaaaaaaaaaaaaaatctatgagtagtcttagatcttctttcctagcttgcagacctcctacttatttttcctctgactagtactgtaatagaatattttccttttttttacttaacatgctcttaagacartcctaaaaccaaccatcattttaaactctaaatctactttttatttattattctttttatgacacaacttttcctctcaaaatgtttataatttcaataggcagacaatagg

SEQ ID NO: 825503 - DNA, 672 bp, Homo sapiens
attacacttatatgtacatgttatatatatatacacacacaaacgtgtttatattttgcctagtcaattgaaaataagttataaataacttgacacttcacctctgaatatttcagtgcatatttcatatgaattaagacattctcccaaatatccataacacctaagaaaattgacaataactcaataatatctaataaatatttcatattgaattttgaaattttccccaacatgtcttttagagctgttgttttccccaatccaagaactaatcaatgctcacacatttgcatgtgttcgttacgtctctttaatacgttctcattcggaactttttaccatttgtttcttatgatgcttttgaagaagtgaggccctttgtcttgcagggtgtcccacattctgaatttgcctgattgttccttcatttttagattcaattaaacatttttggaaagaatactacataaatgataatgtgcttttttattgcatcacacttgaggacttaacgatatccagatatattactattgatgcttttaagttggtcacttggtaatcaagtgactgccaaatcttttcatgtatgggtacrttttgagcattgtaattagtaagtaatctatgatatgattctttaaaaaaccacatgaacatgatttttgc

SEQ ID NO: 825504 - DNA, 577 bp, Homo sapiens
ttttcccctgacagtgccaaggagactgagaggtttagactaggtggaattcaccacagtgcagctaagtggccatggccagactgcttctctagatgcctcctcacagggcagggcatctctgcaggaaatccagcagctccagttaggggcttacagacagaactctcatctccctaggaaagagtacgttgagggaaaggtggctgcagtctcaggtttagcagatttaaacttgtttacctgccggcactgaagagagcagctgatcctgacaagggggattctcccagcacagcgcactagctctgctcagggaaagactgcctcctcaagtgagtccctgaccccatgcctcataactcagagagacctcccaacaggggtcgacagacgcctcatacaggaaagctccagatggcatcagaccagtgcccctctgggatgaaccttccrgaggaaggagcaggcagcaatctttgttgttctgcagcctccactggtgatacttaggtgaacagggtctaatgtgaacccccagcaaactgcagcagacctgcagaagaggagcctgact

SEQ ID NO: 825505 - DNA, 559 bp, Homo sapiens
ccacaatgcatgatcaaagaaaaagcccatggcccaagctgtaaaaactaaggttcttcttggttactcatttattctttattaactttatgtatagaaagagagcgctttcttttcaggtttctctcrtcctatacccagcaactatgtagtgctatggtttgaatgtgttcctcaaagttcatgtgttggaaacttaatccctaatgcaacaatgttgagaagtgaggacctttaagcatgaatgagtaatgaaggctctactcttatgaatagatcaatgccatgatcaagggagtgggttagttcttgagggaatgggtttctgataaaaggatgaatttagctttctttatgctctcttgcattctcatatgctctcttgcattctcatgtgctctcttgctcttccacctctgccataggatgacacattatgaaggcccttgtaagacactgagactatgctcttagatttctcagcctctagaaccataagctgaataaatttatgtacattataaatgacccagtctgtggcatcctgtgtggttatagc

SEQ ID NO: 825506 - DNA, 645 bp, Homo sapiens
tcctagaacctgctgtctataaatatgactgcaggacaaataattgaaataaaaatagggcaacctcgaggctcaattaatgaatgtatgcaagagttcgatgaaaggtcttacttatctgatgagatttttctaccaaatcctgccttcccttcatattgccttacaattagggaagactcaggaatactaaactctggacacaatatctctaaagtgggtatggaataatattagtgaaagcaaacataaaaggagctctaaggagcatacactaaatctgagcaatatcagctttccaaaaacatggtttcaacaacatggcaattcctcaagcaacctgaaacctagttgtgtaaatcagtcttgtagaagacaaaagttcagattgagacactattaggttatctagtgaatacatgatagcactgttatttttacagtgcttttggaaagatacacttgtctgagaattgggctaatgaaatagatttgttaattcaagccataattaacatagaatttacaaaaaaaaaaaggcactcctttctctgaggaaaaaaattaagacaaaawgtcacccaacatacatatttggatttgctaattttcagtcaagaccactcctaatagagtttgtggggc

SEQ ID NO: 825507 - DNA, 532 bp, Homo sapiens
tataagaaaggcacacctatagactctattatgactcaagaaaaagcaaagtcattatatgactacttaaaaggaaggtgaaggatctagacctgaagaagttaatgccagcaaaggatggtttgatattttcagaaagtgattcagcttaaaacatatcaagaaaacaagagaagcagctttttctgaccaagaggcagcagataacttctcagatgccattaagaaaatcactggagagaaatacctaatgtagacgacgggttgatgagtgcagcaaaccaccatggcacgtgtatacctatgtaacaaacctgcacgttctgcacatgtatcccagaatttaaagtataataataataataataaaaagaaaatcattggagagaaaagtttacctgcctgarcaaacttttagtgcagctaaacataccctattctgggggtaggtggaaaatgccatttgttagtaaagaagagaagcaagcaccatgatttaaggcaggaagggataggctaactctactgtttt

SEQ ID NO: 825508 - DNA, 536 bp, Homo sapiens
aaattttttcacttcaacatgaaataagtttacaaattataaggttacaattataagactttttaaatatctctaaattcaaaacagtgatatatcgttccaattcagtacaaataaatattgaattatcaaaactattctcccaaattcctcaccaaatagaacagtagtagaattacaagacttacccaatgcccactatcatataacatattttacagaagggataaagtcgcctaaatatttaaataaatacggtagtacttgttaatcataaagttttcatatggcgaggtgtatataccgttcctcatgaagaatcatattgtaaattagcatgttaaagtctaagatggccacagtaggaagctgtttaattttgtttaatccaaaatttttcaaattaatttattgcagatatctttcctcaaggaatatattttaacatttcatagaccttgtgttgtgaagaacgtatttctaaaagtgytgacctaaatttcactaaaagctatgcaaccataaatatagaatgt

SEQ ID NO: 825509 - DNA, 595 bp, Homo sapiens
ctcctaaattggaaagcagggaataaacagatgttgcaaaatggaatgcgatgatacatatggcagaagatttgtttaatttgttgccttcattcatttgtgaagcagacaatatacctaaaggattgcagctgtagagaaagaggttgcaaagtagaatgttatttctgtgtattgattgataggactgcattggataaggcagtataaaaagagggaatctaagaaagaagaggttggtttaataaaataaataaagaagaataaagtacagaaatttagagatttgcctgactagaaggggtaaggattctttaaccccaaatgataaatgatgaaatggaaaagtttaaaagtcaaagccatttaaaattcagccttgtggcaaatatttaatcaatgctaaagttaatagacccatcgttaaaatatctaaatgaattaagatgtttcagagcagaaaccaaattcagaaacctagtaaatcctttcaatgaaagaggtaasgtagagaaagactcaatatgggactctcaaatccaaatcttaaaagtcaagccacctccaattaagttgtgataaaaggcatgaggga

SEQ ID NO: 825510 - DNA, 255 bp, Homo sapiens
taatggtggttggcagtaggggcagtaaacaaatgaacaaataaattccgtgacatggtggcatgagcgttctgaagacagttaaagcaagagttaggagggatgagaataagaccagtaccagtttctgtggctgccatgacaacatgccacaatgggggtcttaaacagcagacatgtattctcacagttccagaagccagargtcccagttcaaggtgtgggcagggccatgctgcctccgaaggctgcagg

SEQ ID NO: 825511 - DNA, 463 bp, Homo sapiens
ttggcaggatttgtaggaatgctacatgtgtcagcccaaactgtgtcctgagcacctactgcatgcaaagtactgggtggccagaatgtctgctgttgagttactcctcagacagtccccaggccccaccaggcagcaggcacggtgttagttatataagactgagggagacgcagccctgcccgcagcatgcacacagtctagctagagagaccaatgtgctggtggttacagcagagtgcagcaaggggttggatggcagggacaggcgtccagcacaggggacaccacatcagcccgaggctgggaggggtggggggcagagcagccaggcggcgggaacaaggtgttcagaggccactcacactgcagtggccaagcctggggaattcgttgaggaagagtcaggagatacgcctacrcctagaaaggtaggcaagttccaaaccatgaagtggctttt

SEQ ID NO: 825512 - DNA, 447 bp, Homo sapiens
tttttttctttcttttctttgagacagtcttgctctgtcggccaggctggagtgcagtggcatgatgtcggttcactgcaacctccacctcccgggcccaagcaattctcctgcctcagcctcccaagtagctgagattacaggcatgtaccaccacgcctggctaatttttatatttttagtagagaaggggttttgccatgttggccaggctggtcttcaactcctgacctcaggtgatctgccaaagtgctgggatcacaggcgtgagccatcatgcccagccactcatctctttttaatgtcagtttgttgatatggtttgacatttcattgaactagaaatagacaaaggtcaaaatrggtaaggaatgaattttctcatagttcttttttgctgtttactttagcagaggaaggtttggttaattggctcccaggaaagag

SEQ ID NO: 825513 - DNA, 596 bp, Homo sapiens
gaaacaggactcaaatactaactagaacagcaccatcatggagactgggaggagtttctgcccaattctgcaggtgcagtgagacaaagctgcggctggtcacatggaggctacacactgcaggggacagagatgtggagtataagcttcagggcacagggaccaggtcctgcaggggccacagagttgccactccccagctgtgtgtgctggagtcatgtcacatctctgggcaccagatgcctcatcagggggttgggcaacactgagctgaatgagctccaggcccttccggctacagctccagagcttgtcccctaaacacctcctggggtcctgatttccacctgcctggcacctctccctgactcaggggcaggcttctgctcttcacatgtgggcacccccattgaccatcagagcaggccagccgaaagtcaacgacatccctgggcagcatggcccaaggaggcccccatggctggggcaccagggcaggtccctagacgaggacctcttccctggagaagacrataacatttacaaagaacagaacacaatgcaaaatttcatgtatgggcacatcaggatttaaa

SEQ ID NO: 825514 - DNA, 609 bp, Homo sapiens
ctgggcagcactctccttggcaattccatgtctgcagcctcagtcctccagaaatcctggcccaggtcacggagacacccaagtgcacacgtctggggctgagcaagcrtgctcaatgctgcactgccagtggccgtcagaaacgggacctgagtgacctgcatgactggattggctgagcccatacagtccacccacaccgcagggatgaggccagcgtgaacacaaaagaaagcaagcggctggtgaggcaggtcggctggcgccccttcccctgccactgactacagctctgaaacctgggcaggaggcttggcagctgccggaagactgaagacagcagcaggtggaccagggaagagccacgaatgcagagtgttcccaccgccccccacgagaaagtgcagcagcaatctggaagcagaagtgtgcaccacagagcacacgagagctcagcagagcctccaggcctggctctggggccagaagaggaactcctgactctcctggaaaacacagaagccccccatctcccctgttcctcatgccccaggccctgtggtgccagctactgttccgagggggtggggcaaccgttgtccttttctc

SEQ ID NO: 825515 - DNA, 632 bp, Homo sapiens
gtggggcaaccgttgtccttttctctctctgtcctctctccatgtgggctgggaagtgggcccaatggcagacgtgtacaacagtaaaccgcaaggaatcagaaaagtaccaggtagacagcacagagccagaagctcaggaaagtcaccccatgaagtggtttatgtctccagaactctctagaatcgagcatctgtgaatcctgtgcatataccatagtttgacttacgaaagagtttgagaactgaactaaccactcgggtcccagaatgaccactgggcagtgcacgcccaggagatctgaccaggaaatggcacgggggctttaaaaactgacgtgatgctcatggcctacaggttggggattggaacttgtggcctgaaagtaagattggctgttggctaaaacaaaaatatcaatatttcccatatagcttaaataagacctagagtatcaccacataatgctcaaaaagtccaggatgcaatccaaaattactcagcatacaaacaaccacgaaaatgtcaacttscctggaaaacccaatcaaccactgtcaacacttcacagatgttgggattatctgatgaagactttaaacagctatttttaaaattgcaaatgcttgca

SEQ ID NO: 825516 - DNA, 643 bp, Homo sapiens
gtgggagaaatatttaaatatttttatcatttaatgtgatatttactataggttttgtattatttctttacaaaattaaaaaagattcattttattcttggtttgcaaggagtctgtatcatgaatggttgttaaattttatcatttttccatatacattaaaatgattatataatatttctcactttttcattaatgtggtggatacattataataattgcttctcaaatattacatcagcatcacatttctgacatacactccactcatcttctgtgtaggatatagatgtctctcactgcgcaagagagatcaattggtaatccccctctcttgtaatgcccttggttacttatctctcatgtcatgataaatacagcctcagagaaagatttgggagagagatatcagttgttacttgagttattatggccatactgctcacagcaacttatagattcaatgctatcctattaaactaccattgacattcttcacagaactagagaaaactattttaaaattcatattgaaccaaaaaaagagcccaaattgccaacacaatcctaagcamaaagtacaaagctggaggcatcatgccatcgacttcaaactatacgttggtgcacagttgcagttttt

SEQ ID NO: 825517 - DNA, 654 bp, Homo sapiens
ggatcctgttcatcccctccaccctgtgaggacttagcaagaagatgccattaattaaaaaagcatgaaatttgccatgccttgatcttgggtttctctgacttcagaactgtaagaaataaatttctgttgtttataagctaccagatctatggtgttttgttgtggcagcccacacagactaagataccgctgtaggttaaatttacttcatattgaatgaggaagggaataaaactaaggccagatgaaacaagcagggtgctttgtacgtctctggaatgataaggtcttgtaaagtgataaaatctctgtacctgaaaataattatttaaaaacataggaggaggagagagactaaaaaataaagaaagcaaattagaaaaaaagaatagactgaaggatgtggacagtggaaggtgggaaaaaatgaggaaaattattatctatttacaggagccgacaataatcattgcgaaattactatagtgatgttttttccttctctttccctcctagttgccctcccatccagtgatctaaatgttttaattaagcaagaaagtatttatgaactgtgtgggcatgaagartttggacagcgagcattcttctttactaaaacaaatgctaatgataactaagattcattag

SEQ ID NO: 825518 - DNA, 543 bp, Homo sapiens
tgtcagtgaaatcacgcacagtagatatttttgtttaktattgaagcaaatcaagggcaagactaaggtcacaatagaacctgaatagtcaaaaggaatgattccttgagagtgggcatgaccgaacattcctacgttgttaggtctaggagccctataaaagcaattactcacaagtctaccatggcaatttcataaccagcctggaaaggatcagacaacgacatcaattttcctctgatggatatgggaaaccctcagggaaaggtaggattttaagagttatttaacattatggcagaagtttggttgaatggtggaatgctctggaactgacataacttgggagatttattgtacagaaattggaggggactttgcaccgataacagagatgaggggaaagacacatcagcaagtaatgtgtttctactggtaggctggtaaatgtttaacaactggctctcaaaaaaaaaaaaaaaaaaaaccctgaatttacatagtgtttttttttaattttctgtgatataaatatcctaccat

SEQ ID NO: 825519 - DNA, 606 bp, Homo sapiens
caagtcccctctcctactctctttctagggtttcacccattgagaatttctcctgaaaaractcatcattcagctcagcctgcctaccacttattgagcacctagcaagtaccaagctctgctaagaattcaccggcttgatcttggcatcactgaaattatttttctttggaggaagacactgtaatagaatggcatgtttctaaaagtgccagatgttagtaggcatgctttaaaataataaattaactcactccaaagggaaaaaaaaaacaatacaagtaagcagaagaaacagccttccatctctgggcatctttgtccatgtgtgttcgcttgctgcagcctccatgctctgcaaggctgttttattcttctttgtaggcaggattttaaatatctacagagcctgctcagtaaagcaattagagagctccttgtatatttcaatctggttaatggcttcccaagccattccctcactaaagaagtgcataacagcaaaggcagccaacgagcacccctcggaatccacactctcttaatggaaagcaagcagcctaatttgtttgccaagactgtcggagccccccccgacgccaagtc

SEQ ID NO: 825520 - DNA, 603 bp, Homo sapiens
gctattgcactccagcctggtgacagagcgacactccgtctcaaaaaaaagaaaaaaaaaraaaaaaaaagttaggaagaagaggaaaggcatatacaggatactgacaaacagtagccaatgaagcaggggtgtgagctggaaaggctggtgacgctaaagcccagaagagaagagtatttcagagggcttagctcacttcgttaactatgcttagaggttgaatgagttgagaatggagcattaaccactggatttagcgccatggaggttgtcagtaactttgaccagagcagtttctgtggaatggaggggacacaagcctaaatgagcgtgaatttgagataacagttaatatggaagcaaatacaaacatgttgagtttttatgtgtaggaaagagaggatttagaaggaaggggtgaaggaaaattaatttaagaatcagagctattgggacttttttgctgctgagaataattctgcagagaatgagacactgataatgcaggagagaaaggagttggttgagaaactgcagttctcaaacatgcaagaagggatgggatacaaggtaaacatggagaagagaacctttagtagg

SEQ ID NO: 825521 - DNA, 603 bp, Homo sapiens
gctattgcactccagcctggtgacagagcgacactccgtctcaaaaaaaagaaaaaaaaagraaaaaaaagttaggaagaagaggaaaggcatatacaggatactgacaaacagtagccaatgaagcaggggtgtgagctggaaaggctggtgacgctaaagcccagaagagaagagtatttcagagggcttagctcacttcgttaactatgcttagaggttgaatgagttgagaatggagcattaaccactggatttagcgccatggaggttgtcagtaactttgaccagagcagtttctgtggaatggaggggacacaagcctaaatgagcgtgaatttgagataacagttaatatggaagcaaatacaaacatgttgagtttttatgtgtaggaaagagaggatttagaaggaaggggtgaaggaaaattaatttaagaatcagagctattgggacttttttgctgctgagaataattctgcagagaatgagacactgataatgcaggagagaaaggagttggttgagaaactgcagttctcaaacatgcaagaagggatgggatacaaggtaaacatggagaagagaacctttagtagg

SEQ ID NO: 825522 - DNA, 590 bp, Homo sapiens
ataaaaatccctgaaccagctggcagagaagaaaaagcatctggatgttgagaggagaagcagatggatgtcatagagaaggagcttgacttcagagaaatggcttgacagcaggacttcagagaagagtctggctggagatggtgggacttcagaggaagaatacgttcccactccatcccttttccacctccccttcccactgaaagccacttccactggcaataaaatatcctacatttactatcctttgatttgttcatgtgacctgattttttctggatgctgaataagagcttgagatacagaaggctgttcacactaaccatctgccctcatgaaaaggcagagaatccactaagctgttgagcacttaagccatttgtggatggcaaagctaaaagatcactgatggtaacattccttctggggcttcgggtgtcacaagtactccccgccaagacmctgccttgggacccgcaaggagttttgctcctactagtgcccaacagctcttgctgtggctcctgcactggctcacctccacttgccttcccatgaggggtggagcacagtagatctgagtgagt

SEQ ID NO: 825523 - DNA, 660 bp, Homo sapiens
attctttatgtttgaaaataaattatggggatcctatttagctcttagtaccactaatcaaaagttcggcatgtagctcatgatctatgctgtttctatgtcgtggaagcacyggatgggggtagtgagcaaatctgccctgctcagcagtcaccatagcagctgactgaaaatcagcactgcctgagtagttttgatcagtttaacttgaatcactaactgactgaaaattgaatgggcaaataagtgcttttgtctccagagtatgcgggagacccttccacctcaagatggatatttcttccccaaggatttcaagatgaattgaaatttttaatcaagatagtgtgctttattctgttgtattttttattattttaatatactgtaagccaaactgaaataacatttgctgttttataggtttgaagaacataggaaaaactaagaggttttgtttttatttttgctgatgaagagatatgtttaaatatgttgtattgttttgtttagttacaggacaataatgaaatggagtttatatttgttatttctattttgttatatttaataatagaattagattgaaataaaatataatgggaaataatctgcagaatgtgggttttcctggtgtttccctctgactctagtgcactg

SEQ ID NO: 825524 - DNA, 585 bp, Homo sapiens
  misc_feature 1, 2, 3, 4, 5, 6, 7, 8, 9, 10, 11, 12, 13, 14, 15, 16, 17,18, 19, 20, 21, 22, 23, 24, 25, 26, 27, 28, 29, 30, 31,32, 33, 34, 35, 36, 37, 38, 39: n = A,T,C or G
nnnnnnnnnnnnnnnnnnnnnnnnnnnnnnnnnnnnnnnactgctttctggacatctctgtctgaattttccacaggcattgcaatttcactgtgtctgaagggaacatatatcattgtcttctcttgccaactttcccctcctgctgctccaaccacctccaagttatccaagacagaaaaacctgggacctatttctgaactatttgctttattctttcctcccttcttctctccttcctttttgccctctttttacctccctcccttccttctcctcatagcccctgtgaatcctgcttccttcatgtctcccgtatttgttaccttctgtccactcccacagttggtgcttccttggattctgtcctttgtccccactgtttcattaaaagctctcattctttcatgctattacacactaccaaactccttaacatagtattcagagcctctggtatctccagcctcatttagtcccccwtacccccttccacaacacacacatacatacccctacactccatgctacctaattgctggaagttccttagatgtgctaggctttctctccctttctccttt

SEQ ID NO: 825525 - DNA, 598 bp, Homo sapiens
ttctgacttcatttgtttactgcacccaatatttattacagtaaatatcacgttcattaagtaaaattattgctatccayttgccagatattaccaaagagaggtggggggagagaatctagtacgtgtattattaaatcaatggttctatttaccccaaaggcagtagtgaagagatggaaaggtggctttatccaaaaccccaggaaatcaacctgaggcacccgtaaactagtaagaactcttcaaaggggctagcagctcactaccctgaaatggaggaagcctaaccaaagtggggtccagcagggcacactctatggtggaatgaagagcgcactgaggctgagggatggcaggaagagaaggcaagggaccaggtggtaagaagctcattcaggataaaaaaagaggaaacccacaagtgaacttgagtaattggtgacttttctgagcttcagtatcctcttctgtaaaaagagatgggtaaaccagaaggtctgaagcctccctttgatttcacaagtccatgtttttatgcttggggttgcatggaacacatgcagtagcaaagagcccaggggtcaggcccacctac

SEQ ID NO: 825526 - DNA, 598 bp, Homo sapiens
ttctgacttcatttgtttactgcacccaatatttattacagtaaatatcacgttcattaagtaaaattattgctatccacttrccagatattaccaaagagaggtggggggagagaatctagtacgtgtattattaaatcaatggttctatttaccccaaaggcagtagtgaagagatggaaaggtggctttatccaaaaccccaggaaatcaacctgaggcacccgtaaactagtaagaactcttcaaaggggctagcagctcactaccctgaaatggaggaagcctaaccaaagtggggtccagcagggcacactctatggtggaatgaagagcgcactgaggctgagggatggcaggaagagaaggcaagggaccaggtggtaagaagctcattcaggataaaaaaagaggaaacccacaagtgaacttgagtaattggtgacttttctgagcttcagtatcctcttctgtaaaaagagatgggtaaaccagaaggtctgaagcctccctttgatttcacaagtccatgtttttatgcttggggttgcatggaacacatgcagtagcaaagagcccaggggtcaggcccacctac

SEQ ID NO: 825527 - DNA, 664 bp, Homo sapiens
gcaagttctaaagacttgaaagctaacaccagtgtcttttctttctttctttcttttttgagacaaggtctcactctgttgctcaggctggagtgcagtggtgtgatcacggctcactgtagcctcaacttcctgggctcaaacaatcctcccgcctcagcctcccaagtagctgagtgaaaacacaccaccaaccctggctgattttttatgcttttctagagacggggttttgccatgttgcccaggctggcctcccatagtgctgggattgcaggtgtgagccaccacgcccttcttgccagtgttttctcaaattccttacatctgttttggcttcagagtcccttcagaccttctgccagggagtgtaaagtgccccctaaccctcctttgcactggccatgggtcctgctgtactttcagaatgctgcccaagcatagtgcctgcgcctcagggacctgcaggatgtgcatgtgtgagtgtgtacggcctgtgtgccagtgtgtttggtgtgtgtgtgtgatgtgtgagaggatgtgtggtgtgaagggtgtgatggtgtgagtgtgagagtgtgwgtgagtgtgtacatgaggctaacaatgactgcacacttcctctgtatctgacacatccctagggttttcgcacacatgactt

SEQ ID NO: 825528 - DNA, 664 bp, Homo sapiens
gcaagttctaaagacttgaaagctaacaccagtgtcttttctttctttctttcttttttgagacaaggtctcactctgttgctcaggctggagtgcagtggtgtgatcacggctcactgtagcctcaacttcctgggctcaaacaatcctcccgcctcagcctcccaagtagctgagtgaaaacacaccaccaaccctggctgattttttatgcttttctagagacggggttttgccatgttgcccaggctggcctcccatagtgctgggattgcaggtgtgagccaccacgcccttcttgccagtgttttctcaaattccttacatctgttttggcttcagagtcccttcagaccttctgccagggagtgtaaagtgccccctaaccctcctttgcactggccatgggtcctgctgtactttcagaatgctgcccaagcatagtgcctgcgcctcagggacctgcaggatgtgcatgtgtgagtgtgtacggcctgtgtgccagtgtgtttggtgtgtgtgtgtgatgtgtgagaggatgtgtggtgtgaagggtgtgatggtgtgagtgtgagagtgtgtgtgagtgtgtacatraggctaacaatgactgcacacttcctctgtatctgacacatccctagggttttcgcacacatgactt

SEQ ID NO: 825529 - DNA, 631 bp, Homo sapiens
cgctgcttcactgctgttatctgctgcttgtctgactcccccactactccgaggggtcactcaggaccagaatggtgtcttatttattttgaaacctcggctcataacagaaggccctggcacatagaaaatgttgtataaacttttgctgaactgaattcttattccaaccttctctcagatttattaaagacacaaaaggcacgtctgtagactgaagacgtttttggcttcgcacccagctcttggtctaactcagtgtgtgcggccaggatccgtaatgatgtgttatggagacgagtaacgttgttggatactgagcagtgcgttcaggccgcattcctgtgggcacgcgctcaagtccatcatccctcagcagaggccgcgtatcacactggaacacacacagcctctgcaaccagaccccgggccaacgtgtggcacccaagtgtgaacagtggggtccttcagtgaggtacttaaactctctgtgcctcagtttctcttctgtgaaatagaatggtaataatgcctggcatctggggtcattggggggattaaatgagctaatacatgcaaagaactgagaaagcattgacacrtgacaaatgccgtgtggatgtcagctatt

SEQ ID NO: 825530 - DNA, 626 bp, Homo sapiens
tgaagatatttcattttcccacataggcctcaaagcgctccaaatatccacttgcagattgtacaaaaacagtgtttccaaactgctctataaatacaaagattcaacactgtgagatgaatgcacacatcactaagaagtttctcagaatgcttctgtctagtttttatatgaagatatttccttttccaccattggccttaaaacgcttcaaatatgcacttgcagattctaaacaaacagtgtttcaaacctgttcaattaaaaaaaagattcaactctgtgagatgaatgcacacatcacaaagatgtttctcagaatgctgctctgtagtttttatgtgaagatatttcctttcccaccataggccgaaaactgctctaaatatccacttgcaagtttcttctaaaagagagtttgaaaactactcaatcaaaatatagttttaactctgtgagttgaaagtacacttgacaaaattttctaggaatgcttctgtgtagtttttatgtaaagatatttccttttccacaaaagtckgcaaagatctccaaatatcctcttgcagatactacaaaaagagagtttcaacactactcaatcaaaagaatagttcaactccgtg

SEQ ID NO: 825531 - DNA, 566 bp, Homo sapiens
ggagcccaccacagctcaaggggcctgcctgcctctgtaggctcaacctctgggggcagggcacagacaaacaaaaagacagcagtaacctctgcagacttaaatgtccatgtctgacagatttgaagacagctgtggttctcccagcatgcagttggagatctgagaaaggtcagtctgcctcttcaagtgggtctctggtccctgacccccaagcagcctaagtaggaggcatgtcccagtaggggtagactgacatctcacacggccgcgtactcttctgagacaaaacttccagatgaattttcagacagcagcattcacggttcatgaaaatccactgttctgcagccacctctgctgctacccaggcaaacaggatctggaggggacctctaggaaactccaacagacctgcagcttagggtcctgtctgttagaaggaaaactaacaaacaaaaaggacattcacaagaaaaacccatctgtacatcatcaccatcatcaaagaccgaaagtagatgaaaccaaaaaracgggaaaaaaacagagcagaaaaactggaa

SEQ ID NO: 825532 - DNA, 616 bp, Homo sapiens
gatgtgtgcattcaactcacggagttgaacctttcttttgattgagcagttttgaaacactctttttgttgaatctgcaagtggatatttggagcgctttgctgcttctagtggaaaaggaaatatcttcacataaaaagtagacagaagcattctgagaaacttctttgtgatgtgagcattcatctcaaagacttgaatctttcttttcattgagcagttttgaaacactctttttgtagaatttccaagtggatatttgcagtgctttgaggaatatggtggaaaaggaaatatcttcacataaaaactagacagaagcattctgtgaaacttctttttgatgtgtgcattcacctcacagttgaaactttgttttgattcagcagttttgaaacactcttttttataatctgcaagtggatatttggagggatttgaggcctatcgtggaaatggacatatcttcaaataaaaactacwcagaagcatcatgagaaacttcattattatgggtgcatttatatcacagtgttgaaactttctcttttattattattattatagttcaagttttatggtacatatgcataatgtgcaggttagttacatgtgt

SEQ ID NO: 825533 - DNA, 570 bp, Homo sapiens
cagctcagtctttcaaactgtgactatattcaagcatatataagcaataacactataaagaaatttgaccctagataatatcctattagatagataacaaaaaggagtgtgaaactgctttaggtaataagaaaaagaagcctccatggaaggagggaaattgtttaatcatctttaacattgcctgatccactgcgggtttcacaaacccagctatactctggtaattcatcctccatcagcaggaggttcagacacaaactttaattaacgttagcaacttcaaaaataattaaaggtgcgttgcagaattcaacacacaagaattactggaggaggctggcaagatagcgaaataggagcagctccagtctgcagctcccagagagaccaatgcagaaagcaggtgaattctgcatttccaactgaggtacatggttcatctcattgggactggttagacagtgggtgcagcccactgagggcagacagaagcagggggggtaatcacctcacctgggaagcgcaaggggtcwgggaactccctctcctagccaatggaagccctga

SEQ ID NO: 825534 - DNA, 607 bp, Homo sapiens
gtctatttagttttctatatgtcattaatcttcctcatgctgaygtctttgctacatgaatatatacatatatatggtacacatacatatatattttatgcacacacacatacatatttatgctcaaggacctcctgccctgctatcagcctagagcttttcatatacctctacatcctcatttcctgaatcccatgccttccattcttgttgctgttgtctgtttactttctttttgctggaactatattactcaatagcttcctgatataggaagttaaagttttgaatccttgcaaatccagaaaatgtttgtattctttctttacaggcaaccgataatataacttagcatagaattctggattagaaataactttactcataatttggaaggtaccattcttagctttttagtttactataatgttgcagaatactgcagtgatattctgtattttctatgtgacttattttattggtctctggaaatttttgtttcctttttatttttggaatttgaatgcttcatgagattgcaccttgatctgggtttttccaccagcatgtggtgagccttttttttaactttttaatattttatttt

SEQ ID NO: 825535 - DNA, 607 bp, Homo sapiens
gtctatttagttttctatatgtcattaatcttcctcatgctgacgtctttgctacatgaatatatacatatatatggtacacatacatatatattttatgcacacacacatacatatttatgctcaaggacctcctgccctgctatcagcctagagcttttcatatacctctacatcctcatttcctgaatcccatgccttccattcttgttgctgttgtctgtttactttctttttgctggaactatattactcaatagcttcctgatataggaagttaaagttttgaatccttgcaaatccagaaaatgtttgtattctttctttacaggcaaccgataatataacttagcatagaattctggattagaaataactttactcataatttggaaggtaccattcttagctttttagtttactataatgttgcagaatactgcagtgatattctgtattttctatgtgacttatttyattggtctctggaaatttttgtttcctttttatttttggaatttgaatgcttcatgagattgcaccttgatctgggtttttccaccagcatgtggtgagccttttttttaactttttaatattttatttt

SEQ ID NO: 825536 - DNA, 624 bp, Homo sapiens
tactttgagacaaatgaaaatgaaaatacaacataccaaaacttttgggtacaacaaagtcattactaaccaggaagttgtcttagtccattcaggctgctgtaacaacaatagcaaaaaactgtgttgcttataaacaaaaatttctcacagttctaaaggctggaaattccagcatccaggcactggcatattcagtgtctggcaagggccacttcctacatggctgtctttttgctgcagactcccatgttgggtgggaaggggatgagcactccaggttgtgtttcatatggacactaattccattaataaagtaccaccctcattacctaattacctctccaatgtcctatgtcctaataccatcactttggggcttaggatttcagcatgtaaattttggagggacccaaacattcagaccatagcagaactttatagcaaaaaacatctatgttgaaaaagaagaaatatattaaacagtctaatgttatacctgaaggaactacagaaaggaaaaaagttaagcccaamgttatcagaaggagggaaataaagataacagcagagataaatgaaatagaaaatataaaacaatagaaaataatcaacaaatttaag

SEQ ID NO: 825537 - DNA, 596 bp, Homo sapiens
cagaagagcattactgacagtatttggggggcaatctttattattttattatacataacaacttgtttgattatgatatggggcaatcaaraaaaagaaattgagcacagttcagatttttggtcaccttaagaactaaattgaattattagattgatcacttagtaacaactccacaggtaattagtttgtaagatagacaggagttaaatatataaggtagtgtaatcatcaccttccttcaaggtttagtaaaacattatgttgagaaaagctccaagtaatggctgctttactcttcaccttatccagaaatcttttcctgtgttaaattttccaaatttcaattcaaagtgggaaggagaagtagaatagataaaagaaaagaaagaacaaaaatgaaactgggtaaaatgatttgtaggctgtaaagttagaacagttgatcataatatccataagtatttttacatcacatattcacacaggcaatcttagacaatctaccttaactgattcttacatgttcaatattaatatgttgctcttttttactttaacctaagttgtatatgaagtaacaagtaaaatatctc

SEQ ID NO: 825538 - DNA, 615 bp, Homo sapiens
aacatatcagaatctgtgggacacagctaaagcagtgttgagagggaaatttatagcactaaatgcccacaggagaaagcaggaaagctctaaaatcaacaccctaatatcacaatcaaaagaactagaaaagcaagagcaaacaaattcaaaagctagcagaagacaagaaataactaagatcagggcagaactgaaggagatagagacatgaaaaacccttcaataaaccaatgaatccaggagctggttttttgaaaagattaacaaaatagatggaccgctagccagaataatcaagaagaaaagagagaggaatcaagtagacacaataaaaaatgataaaggggatatcaccactgatcccacagaaatacaaactgccatcagagaatactataaacacctctctgcaattaaactagaaaatctagaagaaagagataaattcctgaaccacatacaccctcccaagacccaaccaggaagaaatcgaaccctgaatagaccaatagccaggtatgaaattaaggcagtaattaatagcctrccaacaaaaaaaagcccaggacccaacagattcacagccatattctaccagaggtacaaagagga

SEQ ID NO: 825539 - DNA, 593 bp, Homo sapiens
taacttttaaataaacagcatgtatttaaatgtaaaatcttaaataaatacttaaactaaaataaagatttccataaaaatgaaattcagtttctgtgtgagttacaacggctatttctattrtgtcagtcttttttttttcatggaggactttctatgtgttagtcactttaccatatgcctatatactggaagtagaatgatgaatataaatatggtcaatgttcttaagaaatgcaatcttattggaagacataaatgatgcatcaattaaaatatagtgagttaagttaaaataggttattaggggctctgtttatgaagagatagggagaattcttttagctgtgggtttcaccccactttacaatgtgttttgaacaaagcctgctgcctttccacactgggagagctccaagttcggtgaaacagagatgaacacctttcatcagtttttcaagtatctcctgatgggttagaaaagacccagacaattctttgtgaattaggtatgctctgctccctttgggatcaaggatcatggtctcacacttggaatgcaggctattgtcttcaggagtcccgcacagttg

SEQ ID NO: 825540 - DNA, 623 bp, Homo sapiens
atattgaattgatacatcacagaggcaacttaaaagtatttatgaaatagaattttgtccaaaactacagaaaattatttagtaccmatcatagtatcctcataagttaccacaaataaaattactagaagaaacctataatcaaaataaatattcaaacatatggatacattattataataattatttgagacaggtgttattgtcttccttttcatcttccagagatagcttttgagcaaaactgaaccattaactattattatctcaattccatttaaatttgtcccaaatatttatatttccataacaaacaaagttaaaggcaactgaactggtcagacaaagctaggttgcaatacgatcttctatatctactattacatttacccctcttgcattttagtgtaacagaatttgtcaagtgtttttataaatactgacacaagagagaaccatctactttgacctcttgcctttgacaacctcagggttatctataagcaagtgctcagcagatgtgtgtaagccaggatctttggataagtgggtgcactttctgagttaggtaaattaaatagtgattcagtcaaagatgtaaatatttgcatattctaggagtg

SEQ ID NO: 825541 - DNA, 635 bp, Homo sapiens
ttatattctattatttgtaccattgtggaaaaagttgctgggtttagttgttcttcatttagaaagcaaaacatatttatttatttatttatttatttatttacttatttattttgagacagagtctcgctctgttgcccaagctggagtgcatggagtgcagtggtgcgatcttggctcactgcaacctccgcctcctcggttcaagcgattcttctgcctcagtctcccgagtagctaggattacaggcccgtgcaaccatgcctggctaatttttggtatttttagtagagacggggtttcaccatgttagccaggatggtctccatctcctgaccttgtgatccacccttcttggcctcccaaagtgctgggattacaggctgagccaccacgcccagccatctcatttattatttaaggatgattgactaatgaaaagccatgcccccaatcagtatcaatttattcacattttaaagcaatgtttgaaagtattaactcaattctacctgttttgaaatgagaaatttgctgaaatcgatttgataatccctacttactaaaacacakgttgagaaatgatttcccacatatctgtgtattacatagcttctaatttaatgttgatgac

SEQ ID NO: 825542 - DNA, 632 bp, Homo sapiens
gatgatatacaaatatattagactttttgctcttgtcccaaaatagatcagattttgattttacttttttcatttgcttattttatstcatatttatgcttaatattttgtaaattatgaatttattagcagtctttaattacctttgctttgtttttattgtcttgcactttccagaatcctggtcaattaatatgttaaagtagttgtaactttaaatgtcacttacttgtttgtgaacagccaaagaacaatgtgtatagtattttcccagtatatttaatcagcctcagtctgtagagattgagtggagtagaattttttattttaatacccatatatttcattcataaggatgtaagaaaatattttcttatcaattaatacattagtttcagtaaacaaatagaatttacattctattgggcaaataaacctaaattaacttgtcaacagcaagaatggttgttaacaaatatagcagtaattcaattgctgaatgagcagtgactctaaatattttttaatttactattattgttattatttttttaaagattggttcttgctatatttctcaggctggactccaattccggggcttaaataatcctcctgcctcagcttcccga

SEQ ID NO: 825543 - DNA, 523 bp, Homo sapiens
aggaaaggtttctgttttttctcaacacccccttcgctttctacttcaatactgctttactcttgtgaagaattcatacacttcagttatgcaacattccacaattcattgtattatcttcaatgagagtgatcactatttatgccaaagctgaagcttatagttctttacgttgaaaaatgtacttcaatatttcttctgactttgttttctttcatttatattattattctgtcatttttattcagctgaaaatagtgactaaagctgaaaactcctttatccagccctttcatcattcttatggcttacaaacacatttttgatattttagatacatttaaataactcagttttgaagataactcaatccttattaatacttattgaakaaaacttacttagaaaatgtttttgcttttttaaaatattcacaagacacacagttgtcaaacaaatttctttttgtagcatgataggctttatcaataacaagaaagagcaaatctaatttaacttgact

SEQ ID NO: 825544 - DNA, 661 bp, Homo sapiens
atagtataattcctggcatcaacaatatttaatttatggttctacgttattttttctaataactaaaaaatttwgggttaaatgtagagagattatttttccttttgtagcttcttctagtggttatcctttcatgtaatctctctacatttcattttcactactaattaaagaaaattcactagggtaataagagtaggtgagatagaatgtgaaacttttaaatttggctaataatgttcagtttttgtttttcttggaagtaaaaaatattgttcttagtgtgtttctgctaccttaaagtaacttagttcttgttttataatttacatatttgtttgaatgttcttattgaataaattgcatcaatttctttaaaaataatactcattaagatttataatactataaaaggatacataataattaatgtccatctgccattctatcaatatatatctagatatttgtctatttacaaatctacctatgtatagacattaattattaacattattaatgtttagaccctgccaaaataaatgcattttttctttacataagtatgtatttatatcaaagcttattatattcacatctgtagtttgcataatcaagcatatgcatgaatgcacatacatcactttaaaaatatgttctc

SEQ ID NO: 825545 - DNA, 661 bp, Homo sapiens
atagtataattcctggcatcaacaatatttaatttatggttctacgttattttttctaataactaaaaaattttgggttaaatgtagagagattatttttccttttgtagcttcttctagtggttatcctttcatgtaatctctctacatttcattttcactactaattaaagaaaattcactagggtaataagagtaggtgagatagaatgtgaaacttttaaatttggctaataatgttcagtttttgtttttcttggaagtaaaaaatattgttcttagtgtgtttctgctaccttaaagtaacttagttcttgttttataatttacatatttgtttgaatgttcttattgaataaattgcatcaatttctttaaaaataatactcattaagatttataatactataaaaggatacataataattaatgtccatctgccattctatcaatatatatctagatatttgtctatttacaaatctacctatgtatagacattaattattaacattattaatgtttagaccctgccaaaataaatgcattttttctttacataagtatgtatttatatcaaagcttattatattcayatctgtagtttgcataatcaagcatatgcatgaatgcacatacatcactttaaaaatatgttctc

SEQ ID NO: 825546 - DNA, 572 bp, Homo sapiens
agaagagcccgacccttggggttttcttattttctggcagtaaagtgagaatttagtcaacagccgctcccgggtggtgcctctgcccygggaggagggggacgcagaggatctgtcccatttttctcccctcccctgattgctgctgctgagacctgagaggcccgaaatggcctcactcctcccccaggcttttcccaatcagcctccaggtgcctggactgccctgtggtgtggaggacccctggcggggcgcagggagagggggaggggtcacaacccagaaaggcatcagggaagaagccgagtggaggaagtgtggccgccgcccagccccaatctgctcacagaaccatcctcgggcagcctttggggatggagcacccggaactgcctggaggagaaaagcgtgagctaaagccactcccaggaaggccgggcagaggctgtggagactcggatcctgaggcaaaaggaagccgagtcagggacgcgcttccttccccagggctcgtccccagcgccacccgcccttctctagagccccatccccagcgcgaacctccaggagg

SEQ ID NO: 825547 - DNA, 559 bp, Homo sapiens
agctgggagacttatggatacgaggagttcgtggcgtgtgttcaaacgagctgggagacttatggatacgaggagttcgtggcgtgtgttcaaacgagctgggagacttatggatacgaggagttcgtggcgtgtgttcaaacgagctgggatacttatggatacgaggagttcgtggcgtgtgttcaaacgagctgggatacttacggataccaggagttcgtggcgtgtgttcaaacgagctgggattccccacaggaatgtggggaaaatgcacatggtcagtttgtcttaattgtaataagacaagcttaatttccattttcatcgatgattttaaacctttttcttgctactcttctcactgccttcgctgatgctctgttgtgcacttgggagagaagcttctgctccaggtgcctcctcttttcccaatggygcggttaggtggagcgtccaccccgtttctccacgtcgaagctcttctggaggaagcttagggatgtcatcagagttttgtttcactaaaacaaagtcagctttagaaaggctgttattg

SEQ ID NO: 825548 - DNA, 559 bp, Homo sapiens
agctgggagacttatggatacgaggagttcgtggcgtgtgttcaaacgagctgggagacttatggatacgaggagttcgtggcgtgtgttcaaacgagctgggagacttatggatacgaggagttcgtggcgtgtgttcaaacgagctgggatacttatggatacgaggagttcgtggcgtgtgttcaaacgagctgggatacttacggataccaggagttcgtggcgtgtgttcaaacgagctgggattccccacaggaatgtggggaaaatgcacatggtcagtttgtcttaattgtaataagacaagcttaatttccattttcatcgatgattttaaacctttttcttgctactcttctcactgccttcgctgatgctctgttgtgcacttgggagagaagcttctgctccaggtgcctcctcttttcccaatggcgcggttaggtggagcgtccaccccgtttctccacgtcgaagctcttctggaggaagcttagggatgtcatcasagttttgtttcactaaaacaaagtcagctttagaaaggctgttattg

SEQ ID NO: 825549 - DNA, 600 bp, Homo sapiens
acatgatcatgaggttttgtaaaattttccctcaagtgattaagactcttttctctttctactcccatgttcycttcatcacacttctgtcaaatcaaatgatattgggataccaatgggtattttgaggaaattgagatggggagagacttagtttgggtttagtgggatgtatttatgcaattcacagtctacttctgtatatagttaaaatattgctggccctcctcatctaggaacagcttccagaaatatttctacctcccatgcctaactttgaatgcctactcattcaacatgcaacccgaaggtgcaggatcagggctcatatttccatatgaatgtgtccattgaagctggcactagaaatgtatgtggtagagggaaagtaaggcttgaaatgtatggaatcagatgttattatggtggtgcatcaggcagttaggaaaaatattaagttgcttttctggattttgtgatatttgtactatttatcacctttttaaaatctgaaatttgttacaatttattgtcgtatgaaaacaaatattaagaccgtactttcagggatcatttctatagttcatcaaaacaaatatt

SEQ ID NO: 825550 - DNA, 600 bp, Homo sapiens
acatgatcatgaggttttgtaaaattttccctcaagtgattaagactcttttctctttctactcccatgttccyttcatcacacttctgtcaaatcaaatgatattgggataccaatgggtattttgaggaaattgagatggggagagacttagtttgggtttagtgggatgtatttatgcaattcacagtctacttctgtatatagttaaaatattgctggccctcctcatctaggaacagcttccagaaatatttctacctcccatgcctaactttgaatgcctactcattcaacatgcaacccgaaggtgcaggatcagggctcatatttccatatgaatgtgtccattgaagctggcactagaaatgtatgtggtagagggaaagtaaggcttgaaatgtatggaatcagatgttattatggtggtgcatcaggcagttaggaaaaatattaagttgcttttctggattttgtgatatttgtactatttatcacctttttaaaatctgaaatttgttacaatttattgtcgtatgaaaacaaatattaagaccgtactttcagggatcatttctatagttcatcaaaacaaatatt

SEQ ID NO: 825551 - DNA, 600 bp, Homo sapiens
acatgatcatgaggttttgtaaaattttccctcaagtgattaagactcttttctctttctactcccatgttcccttcatcacacttctgtcaaatcaaatgatattgggataccaatgggtattttgaggaaattgagatggggagagacttagtttgggtttagtgggatgtatttatgcaattcacagtctacttctgtatatagttaaaatattgctggccctcctcatctaggaacagcttccagaaatatttctacctcccatgcctaactttgaatgcctactcattcaacatgcaacccgaaggtgcaggatcagggctcatatttccatatgaatgtgtccattgaagctggcactagaaatgtatgtggtagagggaaagtaaggcttgaaatgtatggaatcagatgttattatggtggtgcatcaggcagttaggaaaaatattaagttgcttttctggattttgtgatatttgtactatttrtcacctttttaaaatctgaaatttgttacaatttattgtcgtatgaaaacaaatattaagaccgtactttcagggatcatttctatagttcatcaaaacaaatatt

SEQ ID NO: 825552 - DNA, 580 bp, Homo sapiens
aaaaattaaagatagaactatcataggatccagcagtgccacttctggttacatacccaaaggaaataaaagtargatctcaaatagtgatttttatacccacgttaataacaacagtatacaatagccatgtggtggaaacgactcagacatctattctctttttaaaaaaattatttactttttactgacacctattagatgtacttattttcagggtacatgtgataatttgatacactcacataatcaaattggggtaatggggatatccattaccttaaatatttatcttttctttatgctaagaacaattgcattattctctcctagctatttcaaaacaaccgattaatgttaactataatcaccctactgatctatcaaacaccatgtctgatttcttctatgtgtaggtttatacccttaatcagcctttgtttttctccacccacctcccctacccttcccagcctccagtaaccaccaacccagtctctatcttcatgaggttctcttttttagcccctgtgtatgagtgagaacatgtgatatttgtctttctgtgcttggcttattt

SEQ ID NO: 825553 - DNA, 628 bp, Homo sapiens
cactcttctgggtatacttacaaaagaattaaaagtgggatgtcaaaktgatatttgcacatctgtgttcatagcagcactagtcacaacagccaaggggttgaagccactcaagtgtccatcgtcggatggacagataagaagccttggtctctaagcaccacgcaatatcttttggtcttaaaaaggaaggaaattctggcacctgctacaatgcagatgaaccttgaggacattacgctgagtgaagtgagccagacacagaaggacaactactgaatgattccatttatatgaggtccctagaatagtcaaattcatagagacagaaagcagaatgataagagccaatggccagggagtaagagagtcgagacgtgtttaatgggtgcagagttctagttttgcaagatgaaaaaattcaagtgatccattgcacaacaatgtgactatattttacatactaaactgtacacgtggtaaattttggttatgtgtttttttcacaattacattttaaaaatttttaataaatactgtttcttaaatataaccttcagatataatccaagctcaagataatacgacccctgatgcagacgtgcctgctcagataagcattacaatg

SEQ ID NO: 825554 - DNA, 628 bp, Homo sapiens
cactcttctgggtatacttacaaaagaattaaaagtgggatgtcaaatwgatatttgcacatctgtgttcatagcagcactagtcacaacagccaaggggttgaagccactcaagtgtccatcgtcggatggacagataagaagccttggtctctaagcaccacgcaatatcttttggtcttaaaaaggaaggaaattctggcacctgctacaatgcagatgaaccttgaggacattacgctgagtgaagtgagccagacacagaaggacaactactgaatgattccatttatatgaggtccctagaatagtcaaattcatagagacagaaagcagaatgataagagccaatggccagggagtaagagagtcgagacgtgtttaatgggtgcagagttctagttttgcaagatgaaaaaattcaagtgatccattgcacaacaatgtgactatattttacatactaaactgtacacgtggtaaattttggttatgtgtttttttcacaattacattttaaaaatttttaataaatactgtttcttaaatataaccttcagatataatccaagctcaagataatacgacccctgatgcagacgtgcctgctcagataagcattacaatg

SEQ ID NO: 825555 - DNA, 520 bp, Homo sapiens
gatactaaaatgttctattgtttataaagcaattaagctagctgggcatggtgcctcatggctgtaatcccaggactttgggaggctgargcaggtggatcacctgaggtcagaagttcaagactaccctggccaacatggtgaaaccctgcctctactaaaaatacaataattagctgggcgtggtggcaggcacctgtaatcccagctactcaggaggctgaggcatgagaattgcttgaacctgggaggcagaggttgcagtgacccgagatcctgccattgcactccagcgtgggtgacaagagtgaaactcagtctcaaaaaaacagacaaacaacaaataaacaaacaacaacaaaaacaattaagaaaaaaaatagatctttctaatgtcctcggcaataaaagagagagaagaggccagcttgttagtcagcaaattcatttgttcatttgttttgaatgtcccagtagacggtatccaagcctgggaatcactaacagaatctaactgctt

SEQ ID NO: 825556 - DNA, 545 bp, Homo sapiens
gaaataaatcaggcgctaattacgggctgttccagggagtggaggagcagaggcttcgtgggcagcagagccctgcccrgccaggcacctttgcatggactcttcaatcatacctcgggtctcacagtgctattatcttaattatgcactgaggacttggagtttccttgaaatataaatgagcgtgtcccatctaactattaaatgctagaatagttcaaccattttctcaaaactgttaatactcagaggaagaaagtgctgccatttcttattaattctgacttcattgcttacattgaagccaagtacctgggcaaggagagagggttgttaattccaaatagtctttgaaagtcaccgagaccacttccaaacatcccagatagaggctgaacgagaataaaatgaccctgactttcaaatgcggacttttccatttaattatcaatcctattgatatgaataataaagaatatgaagaataacagacagcatttgttaagtatttactatgtgcaaagctccatgccaagtgtcttaca

SEQ ID NO: 825557 - DNA, 591 bp, Homo sapiens
ttggataactgcaattagcctcccaactgwcctccttatttctgcccctatttccctgaagtattctggaaaacaaaagtaattctataaaaacataagccagagcacatctctctctgtgtattttgacaagtgcatcttggcaagtgaaataatttaaataaatttaggacacttagtgatttctattttgttcattcagaagaaattttcaagttcttgctagggatgccacgtgacctagaggtcaagagcatagctttgtagtcaggaacttgagttccaatctcagcttcaaagatgagatgagctaataaagtaagtgctcactaaatcatacttgttatagttgttgccacttttatgattacaactctaataaatagcattatctaaggtatttttaaaatttcactgtattgatgcattctcataatataaactccaaaatcctttccaaggcttataagtaggatgccacacaaattaccatgtaaactcagacatttatgtaaatgaaagagaataaacaaaaaattaaggtgattttctcaaggccagttcaatttaattccagttcaattacagttg

SEQ ID NO: 825558 - DNA, 483 bp, Homo sapiens
acacattctcacttataagtgggagctgaacaatgtgaacacatagacacagggaagggaacaacacacactggggcctactgtgggttggggagaaggagagcatcaggaaaaatagctaatgcatgctgggcttaatacctaggagatggattaataggtgcagcaaatcaccatggcacatgtttacctgtgtaacaaacctgagcattctgcacatgtatcccggaacttaaaagaaaaaaagaaggtcagtgggaagtcatagatacatcctgtggtttttgaagattagtttgtatcttatagacacacattcactttgaatagggcaacgacagatgatttttaatattctttgtactttgtaaattttctcagtgagtatgtattcttttaaccagcaaacataattaatgttgttataaktctgcttgcatcacatttcctattcctgcagttcttattgtggaaaaattctta

SEQ ID NO: 825559 - DNA, 642 bp, Homo sapiens
cccctaaaattcacatccatttrgaatctcaccatgtgacttgatttggaaatagagtctttgcagatgtaagtagttaagatgaggtcatactggattagggtgggccctaaatccagggactgatatctttatggggaaaaggagaaggagatgcagacacagacgcacacacagggaggagccatgtggagatggaggcggctactggagtgctgcagctgtgagccaagaactccaaggattgatggcaaccatcagaagctaggaagagtctacagctggaccacactgaacgtgcctgatctcagaagaagctaggaagaggcaagagaggattcttgcccagggccttcagagggagcacggcccagccagtaccttgatttcagacttccaggctccagaacacatttctgttgttttaagccccccagtttgtggtaatttgttactgcagccctgggaaactaatacaacagccatgagtacctatgacctggtacacaaggagagagggaaccagcccaggaaactgccagatgatgagaatcgatggtacctactctagcaaaacagaaatgaagcagttgtttgatgaatttgactacagataatttggggaaaggaacttgaattgca

SEQ ID NO: 825560 - DNA, 642 bp, Homo sapiens
cccctaaaattcacatccatttggaatctcaccatgtgacttgatttggaaatagagtctttgcagatgtaagtagttaagatgaggtcatactggattagggtgggccctaaatccagggactgatatctttatggggaaaaggagaaggagatgcagacacagacgcacacacagggaggagccatgtggagatggaggcggctactggagtgctgcagctgtgagccaagaactccaaggattgatggcaaccatcagaagctaggaagagtctacagctggaccacactgaacgtgcctgatctcagaagaagctaggaagaggcaagagaggattcttgcccagggccttcagagggagcacggcccagccagtaccttgatttcagacttccaggctccagaacacatttctgttgttttaagccccccagtttgtggtaatttgttactgcagccctgggaaactaatacaacagccatgagtacctatgacctggtacacaaggagagagggaaccagcccaggaaactgccagatgatgagaatcratggtacctactctagcaaaacagaaatgaagcagttgtttgatgaatttgactacagataatttggggaaaggaacttgaattgca

SEQ ID NO: 825561 - DNA, 608 bp, Homo sapiens
acactgagggctgtaattatgttcactatcaatcaagtgccaagcctggaagttaggacgagatgtgcccacttaattggcttggtgcccctaggatgacaccctggactccagcagctgatgggcagtrgggacaggaagcctggtgactgcaggagacagcactggggaagagcatgggtgaaggttcctcacccataccccattccttccggcagctgaagaagtgggccacctcaaacccctctttgctgaacccccactacatgccctttgctcaacacatcttcaccaagcacctactgtgtgcccattaaatattccttcataccatctgctctgtgaaagacccagagcacagatgagttagtcacaatcttgtccttgagggtctcatgacctttcaactgagcctacaagctgggagcagggagaaagacggatttaggggcctacactcaagcctttgcttttcttcaaaatctgcaaagcaacaaagccacagcagagtttagaaagatatctacccttatgagctgaaagttaacaactgctttgacttttaggaggaaggaaggaaatgctaggcctcaagatggcccctttcc

SEQ ID NO: 825562 - DNA, 434 bp, Homo sapiens
ttgagccaggagtttaagaccaccctgggcaacatagtgacaccctgtctctgcaaaaaaaaaaaaaaaaaaaaaaaattgaaaaattgaaaaattagctgagtgtggtggagcacacctgtagtcccagctatcagggggtgggagtgggggtgaggcaggaggattgctcttgccgtggaggtctaggctgcagtgcactatgatcacgccactgctttccagcctgggcaacagagcaagaccctgtctctaaaaataaaaaataaaataataaaatgtcatcatttcttcttgaataaaagatgcatattagaaagataattcaaaaggaagtgtagaaaatggcctggatagaggagctayggatggaggatgactactgggagacggataacaatagtccacgcaagatataggaagaaggttgatgt

SEQ ID NO: 825563 - DNA, 434 bp, Homo sapiens
ttgagccaggagtttaagaccaccctgggcaacatagtgacaccctgtctctgcaaaaaaaaaaaaaaaaaaaaaaaattgaaaaattgaaaaattagctgagtgtggtggagcacacctgtagtcccagctatcagggggtgggagtgggggtgaggcaggaggattgctcttgccgtggaggtctaggctgcagtgcactatgatcacgccactgctttccagcctgggcaacagagcaagaccctgtctctaaaaataaaaaataaaataataaaatgtcatcatttcttcttgaataaaagatgcatattagaaagataattcaaaaggaagtgtagaaaatggcctggatagaggagctatggatggaggatgactactgggagacggataacaatagtccasgcaagatataggaagaaggttgatgt

SEQ ID NO: 825564 - DNA, 601 bp, Homo sapiens
gctgttgatttttttgtgctccttaactgcccacaggaaacagggtctcccttagagcccccagctagctcctggagaccttcagagagcctctggatcagtccacaggcagcgaacaggctctgcatcgggctggggcttcccttgggaagagtctggctcaggggctagtcccctacacctctccttcccccttaacttgatccttgaagcccccagttctcttgtttctttttagatgtaatcatgtttttcctctccctgcccagtaaggccagcggccaggaccctggtgaggtccagaactggagcccaggaaggggccatcccgcccgcaaacgagaatcgggtactccagtggaaatcgcccgcggaagtttgaggttattgaacttttccacagaaaccctgacctaaattcttgacctcaggctgtttacaacacaaatccccgcctaaatgaagcctcgtggtgcccccctycccccgcccgccgcccccagccccgggtgtacgcgcgctcacgccggcgttcagctcccaccctcccgccgctcccttgccgcctcggcgtgccgcccgtgtctggacagcgatatct

SEQ ID NO: 825565 - DNA, 425 bp, Homo sapiens
atccacagcactaatagccagcatatgctgagcacttagtgtggccaggtgcaggctaagtgctttatgtgtattttctcatgagaattatagaaaaagaagctatcagattgagtgtcactcttagagccagtaccttatggctcacactgctcctgcacatgtcactatatgtgcctcagtttactcatctgtaaagtgggataatattagttccttccttaggaaattattgcaaggattaagtgaattaatgtgtgtaaagcacttagaacagtgcctagcaaggagtgagtgcaaagcaagtgtttgcttttgctmtatgggttccaaggaagaaaggaaatggagcacaggatgggtatgagaagaaaatttctgtcttttcggtagcagtggttcccctggcctcagcaggcctgtat

SEQ ID NO: 825566 - DNA, 625 bp, Homo sapiens
gcaagattctttgactggtctggcacactaaaaacaagccgattaaacagagaaacatgattccaaaatgtactacagtggagcccccaacagacttaatccaagtcgtggggtttagtccagaaagactttctgccacctgatctaacgcatcagctccaggcacaatgggtaaatgagcttgagaggcttcaaaaatttgtttctttaatttagttatgtccaaggataaattatcttccctacccagaaggtgtcctttgaccatttcccatgaatgatcagtcttgttgtaggaatatggtgtgacacagaaatcagaagtattccagtcacactgcatttgcatgtgatattcaagactcattcgccgatctccaagccaaataacagaatgtcttaaatcattaatttgattagctaatttttgatcactgccctgttgagaattccacatttgggtggaattggcttgccaatcattaacaaaatgagycatttgaatagattggtgtaatgccactccagcagtggtggccagtgcagtgactgtaattaggcccatggtcacagtcattaaagtgaaaacaaatctcttagatcttctgagaattcattgtaatat

SEQ ID NO: 825567 - DNA, 572 bp, Homo sapiens
aagtataatatataaaatactttatggagattatctttttttcacttgcttgaaagtcagcaaacctaatggagactatttaaaatgttagatatggtgacagccaaagtcctaagtggactggcatgacrgcagtgctgaggggcagcactgcttcaggatcccagagacctgggtattttagggttttctgtctcaaaaccattccaacagcatgtatttctttttctttttttttttcttttgagacagagacttgctctgttgcccaggctggagtgcactggcgctatctcggctcactgcaagctccctcttaagggttcatgccattctcctgcctcagcctcccgagtagctgggactacaggcgcctgccatcacacctggctaattttttgtatttttagtagagatggggtttcaccgtgttagccaggatgatctggatctcctgacctcgtgatctgcccgcctcggcctcccaaagtgctgggattacaggcatgagccaccacacccggcgttttctacatttttacataacatttctgccatcttcaaacatcagt

SEQ ID NO: 825568 - DNA, 572 bp, Homo sapiens
aagtataatatataaaatactttatggagattatctttttttcacttgcttgaaagtcagcaaacctaatggagactatttaaaatgttagatatggtgacagccaaagtcctaagtggactggcatgacagcagtgctgaggggcagcactgcttcaggatcccagagacctgggtattttagggttttctgtctcaaaaccattccaacagcatgtatttctttttctttttttttttcttttgagacagagmcttgctctgttgcccaggctggagtgcactggcgctatctcggctcactgcaagctccctcttaagggttcatgccattctcctgcctcagcctcccgagtagctgggactacaggcgcctgccatcacacctggctaattttttgtatttttagtagagatggggtttcaccgtgttagccaggatgatctggatctcctgacctcgtgatctgcccgcctcggcctcccaaagtgctgggattacaggcatgagccaccacacccggcgttttctacatttttacataacatttctgccatcttcaaacatcagt

SEQ ID NO: 825569 - DNA, 558 bp, Homo sapiens
cacgcgcaccatgggttcctctccatactaccacagctgatgctctctgaaaagcaccacctcccggcaggagacccaccagcacaaaaacagagcattaaaccaccaaagctaagaaccctcacaaagtccatttcacctccctgcaaccaccactggataggtgctggtatccacggctgacagacccatagatggttcacatcaaaggactccgcagacaacccccagtatcagctcagagcctggcagacttgcagagtggctagacccaaaagagagataacaatctctatgctcatctctcaggaagccacatcctacaggaaaaagggagagtactccatcaaggaaacacctgtgggacaaaagaatctgaacaacagccttcagccctagaccttccttctgacagaggctacacaaatgagaatgaaccagaaaaccaattctggtaatatgacaaaacaaggatctttarcacccccccccaaaatcacactagctcaccagcaagggatccaaaccaagatgaaattcttgatttacctgaaaaag

SEQ ID NO: 825570 - DNA, 620 bp, Homo sapiens
catactgttctcgtggtatggaataagtctcacaagatctgatggttttatcagggatctctgcttttgtatcttccacattttctcttgctgccaccatgtaggaagtgcctttcacctcccgccatgattctgaggcctctctagccatttggaactgtaggtccaattaaactgctttttcttcccaatctcaggtatgtctttatcagcagcatgaaaacaaactaatacagtaaattcataccagtagagtggggtgttgctaaaaagatacccgaaaatggagaagtgcctttggaactgggtaacaggcagatattggaacagtttgaagggctcagaagaagacagcaaaatgtgaaaaagtttggaacttcctagaaacttgatgaagggctttgcctaaaatgctgatagcaatatggacaataaaattcaggttgagatggtctcagatggagacgaggaacctgttgggaactggagcaaaggtgactcttgttatgtttaaacaaagagactggcagcatttagcmcctgccctagaggcttgtgaaactttgaacttgaaaaagatgatttaggctatctgttggaagaaatttctagggagcaaa

SEQ ID NO: 825571 - DNA, 574 bp, Homo sapiens
atttctttttttgttgttgtttstctgttttgagatggagtctagctctgttgcccaggctggagtgtagtggcgtgatctcggctcattaaaacctctgtctcctgagttcaagggattatcctgcctcagcctcctgagtagctgggattacagtcgcctaccaccacgcccagctaatttttgcatttttagtacagacagggtttcaccatgttggccaggctggtctcaaactcctgacctcaggcaatccacccacatcggcctcccaaagtgctgggaatacaagcattagccaccacaccaggctgtgaatttctttatatgctttttggccacatatatttgtattttgaaaagtgtctgtttatgtgtttatgtcctttgcccactttttaatggagttgtttgttttttgcttattaatttgtttcttatagattctggatgttagacctctgtcagatgcatagtttgcaaatatattctcttattctttgggttgtctatttactctgtcaatagtttgtttgttttttttttcctgtgcagaagctctttagtttaatta

SEQ ID NO: 825572 - DNA, 537 bp, Homo sapiens
gtaaaaacccaaagaagcagtgaggcctgagagcttatatgccattttaacaatgaacaacaaatttgtggagaagtgacaagacaaagaaaaagagctcgggtttctaggggtgataaatatatgcaggaaagtaagtggaagataacagctattttagtgaggtttgattatgcagattcaagctagtgccatctctagcgataagagtcatctctttctggtgtgggagaggggttgggggaaaccttcacaaagagaaaatttattccctgcttttagacagaaaagagaagggtagagagcttttcctgtatgtgctgtttctcaattgccttcagctcagaatcatcctcacaccaaagtggcatattttgagctagcatgttctgatccccttcagaaacaactcatcaactcaactcatgattctttttgttttttktttttttttttttttgagatggagtttcgctcttgttgcccatgctggagtgcaatggcgtgatctcagctcaccgaaacccctgcctcctg

SEQ ID NO: 825573 - DNA, 537 bp, Homo sapiens
gtaaaaacccaaagaagcagtgaggcctgagagcttatatgccattttaacaatgaacaacaaatttgtggagaagtgacaagacaaagaaaaagagctcgggtttctaggggtgataaatatatgcaggaaagtaagtggaagataacagctattttagtgaggtttgattatgcagattcaagctagtgccatctctagcgataagagtcatctctttctggtgtgggagaggggttgggggaaaccttcacaaagagaaaatttattccctgcttttagacagaaaagagaagggtagagagcttttcctgtatgtgctgtttctcaattgccttcagctcagaatcatcctcacaccaaagtggcatattttgagctagcatgttctgatccccttcagaaacaactcatcaactcaactcatgattctttttgttttttgttkttttttttttttgagatggagtttcgctcttgttgcccatgctggagtgcaatggcgtgatctcagctcaccgaaacccctgcctcctg

SEQ ID NO: 825574 - DNA, 622 bp, Homo sapiens
gatttggaagcttatagcttctagagtttgtttttagaacaagaggtatgtttgtgtgaaagtgagatgggaactcatgaaatgaatgcaaaattgtgtgcacatatgcatatggttgtgttctggagaaagccttggtagcttttaatcaattctcaagagggttcatgacacaaagaattcccaatttgcctgtctcgctttccttcccacacccaccctcccttatcagtagtaactagcttgctctctcttgccagctgcctatttatcccttcccagatgaattgtccttcttgttttctgaccaagcaaagctgagcaaggagaactcaggagctggtgcccaggtgggggcgtcaggtagatggcaagactgctgggagcgccgcagtgagtgccctctgggtgagctgttaggaaggcagacagcttcccctgcccaacactgaccaggaaacgtgggcagtccaagatgccactctgcagtcaaacttctattacattgaggataagttgaaagagagtgtcaaggggaaaatggaattgggtagtggctttccaccgttacctgtttktgtccagttatattttcttttttttttttttttagtatttattg

SEQ ID NO: 825575 - DNA, 580 bp, Homo sapiens
ctcagttcatgtggtggctactgtatttgggtgatcctaatagtcctaaatattaatctagaagaaggccagtagagcaattcttaacatccaatcttttacccatggttgagataagcctcactttggagaaaatgttatatatgtaagtttacaaaacaggtaagcttaaggggaaaagtgaatttattattctattacaaaataggggggatggtctctttcctaaaagattcatagttaaggtcatttaactagcaaacacctatagtggcattaacatagaatcaattttgcaaaaaaatcaatttacatttaattttccaaaagtgacagcccataaggccaatgcctagaaaggtgatgattatagagtgaacattttataagatgaggacatctttcaaaagttgacatatttggttggcattcactgttaaactgatagaatacctgatcattcccactaagccaaaggcatagggtaaaaatayggcaagagacccttctaaaatgtggcttctttttccacccacagaaacgctatattattataattcaaaacagaatatggtcaata

SEQ ID NO: 825576 - DNA, 516 bp, Homo sapiens
gcacatgtaccctagaagttaaagtataataaaaaaaattaaaaaagaagacttataatggcaaacaggcctatgaaaaggtgctcagcttcattgatcatcatagaaatgcaratcaaaactaaaatgagatatcattttaccccagcaaaaaatggcttatatccaaaagacaggcaataacaaatacttgcgagaatgtggagaaaagggaacccttgtaaactgttggtgggaatgtaaattagtacaattattatggagaacagtttggaactgcctcaaaaaactaaaaatggagctactatatgaaaactataaaattccactgctgggtgtatacccaaaagaaaagaaatcagtatatcaaagagatacctgcactcccatattttttatgtacagcagtgttcacaatagccaaggtttggaagcaaccttccaaagctgttgatgtgtccatcctcagatgaatggatacagaaaatgtggtacatacacacaatggaatactat

SEQ ID NO: 825577 - DNA, 492 bp, Homo sapiens
atcagtgtaagatggaaaacttttaatttgattacttatatatcaattgccaaaaggctgatttcagcaacaaaaagtacagcactaacctttttgtggaatccactctttgattatmctttcctaattacctatccttcgacacctaaagcttttaatttctgtttttttcttgatgggtgatctattatagtctttcaagccaggtggttctgctgatatgtttaataatttcagttactatgctttgtaacattttgatcatatataatactacgccttctaaatttgattcttcttcattcaggaagcaggaattctgaagagtaaattgattcatatttgacaacacagatttgtgatactctaaaaataccaggtttctcacattttccttctccttttattatatattatgagatatagatttccatgtatgtattataaatattctaagctaaatatatgtaggtagtaattcaaatcatttat

SEQ ID NO: 825578 - DNA, 618 bp, Homo sapiens
ttcatttggctttctggacaccgttctctcctgattgttctactatactggccacgccttttcagcctccttcactgattcttattcccacagttttaatgttgccccagggctcagcctttgttctttcttaatctttctagactcactcccttggtgaacaacactgtagtctcgaggctttaagtgcaggttatatgctgacatctcctatacttacatttccagttcagatctctctttcccttcttaacttcagattcacatatgaaattatctactcgacatttccactagattgtgtaaacgggtagtttcagcagggtgctgtggctcacgcctgtaatcccagcactttgggaggccaaggtgggtggggcacctgaggtaaggagtttgagaccagcctgaccaatatggtgaaaccccatctctactaaaaatacaaaaattagctgggcatggtggcacgtgcctgtagtcccagctactcgggaggctgagataggagaattgcttgaacccaggaggcagaggttgcagtgcrccgagatcacgccattgcactccagcctggataacggagtgagactccatctcaaaataaattaaaaagta

SEQ ID NO: 825579 - DNA, 654 bp, Homo sapiens
gcgaggggattattaatattttgagtggtttaaatataatagttgtcaaaaattctcagactaaattctatgcatttcattcataggaacttcatagttgtcaaaaaattcttggactaaattttatgcatttgattcacaggaacttctaaaattctttctcaacaactgcttttaattctaacaactgcacatgattctaacaaactgattatatggctttgaaatgcatagtggtttagatatagacagtcagagagtcttcctattgaaatgaggcattgaaaagaggaaagctgatcccaaaaatattaaaaccagatagaattactcaaaaagcagggtagtctgacttcagttactataaagggcaaatatctggacattctttggtattttccaagaccaacattgtgcaatatttataatgatggtcctgcctcattgggaaagaaattaaatgatgagtatatcttagcatattctggtgaagaaatttgggaacaattcacttaaatagagtcccatccaattgtttaaaagtagcaagagtgaatcacttcttgatgttttctgaatgtttcttaatgttyaaagtaaaaatctttaattaattctctcttcctctctgtctctctcttccccttctcttgt

SEQ ID NO: 825580 - DNA, 634 bp, Homo sapiens
ttattattttcatcagtttgagatactcctggttcttggcatgatgagttatttttagttgaaatctggacattttgttgctgttgttgtgttatgagactcgaatcttctttaaagcttctgttttatctggcttccactgctgttgctctaccagaggaaagggaagttcacctccacgtagaggtagagttctatgtctgccaatcagcctctgttgacacttgaggaggtacttctcttcactgagtgtcctggctctcttctaaccctccactggttgctttctgagggtgtaagcacataactactgctcctcacatggcctccattgagatcatggggaggaatggtctcctgaccactaggattggtgagactctgtctccacgagacacctgagaagagagattagggtcatcttgttgctaccacatgaaggaagaagttcaggctccctgaggggtctccactggcattgcagtggtagcccttgttacagtctarcaaggatcaaggtctcagatgtctattttacttttctgacacaatcccacaacaaggcaggggcaacatttggagtgtgtcattatagtttggtgaaggtgaaattctatacttcccatttgacctt

SEQ ID NO: 825581 - DNA, 638 bp, Homo sapiens
tatcccaggttggctctccgaaactttggtcaccctagttggtaaagaaataraaaccgggtttgaagaaggagaaggtgtatcagtcagctttcacaatattaacaaagaactgcaaacatatcagtggcttagaacaagtaagctttatctcatgcattcctcgttatgttttcgatgcatttctgttgttatttgtcttcagtctggaaatagagctgaaggaacagcccctacctaggcaaagctgatctgattgtggcaggaagacaaagctttccttagatgtggcatgcaccctttctactgacattttattgaccaagtgggtcacggtgcaatgcgttagggatatattatcctcctaaaggatgcaagagagagtgctcaagaaaaataatgtgatttcctaagctcctctcttggtcacaattatttgcttcccttcctttactcccataatacacttaacagtaatcctgcagtaatccaggaaataagttattgtattgtactaccaagttattagtaagagaggttgtgagatatagtcacatcctgtacatagaaatggatccaaggttacacttaatccctttcctaaggaaagatagtgtccaccaccaattggaggtagt

SEQ ID NO: 825582 - DNA, 648 bp, Homo sapiens
ttctttgcagacgagtgagctctgtgcttaatttctggtaatgttctctttactctcrgcaagcgtctggcctagataggataaaatgggtagtgagaaaaagtagctatgactattaacttagaccttgtgactggctcgggaaatgaggacctttacagctatggcttatgttcattaattatttatttcttccctttactcctactaatttatttaaaatacaatagtaggcttagttcaaatctgtatcactctgctgttgagaccttatataaaagacatttgtcacctggaaaagggagaaagacactaacgggcacacatcattatctgtgtaaataagttctgtctcttcgtattccattccatgtttttccttcccaacaattgccctgagaagctctctcacctgcaaagaaggctattaatacagactttgttccaagtagctatgtgcccagctcaaatgtgagggttgtttggcaaagaaaggaggaaaataaatatttttcctaaaataaatatattaattgaatgcaatttcattcatgcttccaatgagatatatcaatgaacatctcttctattttttgtttggctcactctgtgtagacactatcaggagattagaggaagggagaagac

SEQ ID NO: 825583 - DNA, 644 bp, Homo sapiens
gattatggctgcctctgctgagtcttgcagattgttcagggaagtgggggagaaccagcagttacaggcctcacccaattcccatgcaatccgaggggcctgtctcactcccaacatgccttygccaacagcaccaagtctgtttccaggtagtgggcaagcagggctgagaacttgccccaggctacctgtctcccagctgcaaaagcaaatatggctttccttctttgcctgcctgtggagtctgcccaccagattcacacccttccctgagttctgggaaggagacttctccatcagttcaaagtgttacaaagttcagctggcgatttccttttccctgtggcctttgcccggtgcctctggctgccctcccgaaggacccctgtgaggacaggcagaaatggtttgttagggaacccagcgagctgacagggctttccctgctgcttcctctacccctgtgttttgctcagctctctcaagtgactcagttccaggtaaggtcagaatcttctcccataacctagaccttcaggttccaagtgggggtgtgtgtttgaggggtctctctttcctacttccacagtttgggtactcacagtatttggggtgtctcccgggtcctgtaggagcaatccact

SEQ ID NO: 825584 - DNA, 601 bp, Homo sapiens
aacagaattaatctaataaataaattaataaatggrtgatgaaagaaatgagaagccaatcagagaagaagtgagacaagacagagatgattaaagtaggaatttaggatgactatccataggccagagggactgagagaagagttggaattaccaaagctctgagatagccaggtgggacgaagtccccagaaaacctccaagcagcctgctcattggggtggagccttgggaagtttgagccatttgcagcggagaggagcctggctactcctcttcccatggggaacctggggttcggggccgcgcgggaagcgctctagcagggaatctggcctagcagagtccctgtttctcccttttcttgcttttcacccaataaaaccctgtcttactcaccattcaaattgtctgcaagcttgaattttcctggccatgggacaaagaatcccgtctttagctgagctaaggaaaagtcctgcaacatttttggtgtgcaatgttgggactcgagaagcggtgagtaaaatggggactcaaaacctctcgctgttgctcttaagccttttcatcctcggacttctagggtgaggggaaccat

SEQ ID NO: 825585 - DNA, 370 bp, Homo sapiens
aattttttttttttttttggttaatgtccctgtttctgtgttttgatgcaggacctccgggagccggcgggttgccaggacacaacggattggatggacagcctggtcctcagggcccaaaaggagaaaaaggagcaaatggaaaaagaggaaaaatgggtatttttggcaactcttctaattaatttccctgttatttatctccatgattgcatttgggtcgactaaaactgtgtgcagcaggggtaaggtgtttcatctctgcacagtttaaggccggtttaactcttacctagaagccrttgcgttccgggataccaagggtatacttcttggtcccaccttgacagatgtttatttcaaactggag

SEQ ID NO: 825586 - DNA, 314 bp, Homo sapiens
aatctaaagccagaacagcccatctaagattcttccaatccccaacccacagaaactttgtgaggttgcaaagggaacaaaggagaaaggaagggacagagagaaagaaaaaaagaaagtagtaacacaaaagaaagaatacaaaaacactgtctgtccacatgtcgatctcattagatttatagattgcatctcattgatcataagacaggacactaaattagtgcttaataaytattattaaatacatttttaactctcctcttctgcctagatcttttccctcatatttattcctgcactgcatacctgtc

SEQ ID NO: 825587 - DNA, 601 bp, Homo sapiens
caccaagagattatatcccacacctggctcggagggtcctacgcccactgagtctcrctcattgctagcacagcaatccgagatcaaactgcaaggcagcagcgaggctgggggaggggtgcccgcaattgctgagttagttgtttgattaggtaaacaaagtggccggccgggaagctcaaactgggtgaagcccaccacagctcaaggaggcctgcctgcctctgtatgctccacctctgggggcagggcacagacaaacaaaaagacagcagtaacctctgcagacttaaatgtccctgtctgacagctttgaagagagcagtggttctcccagcacacagcttgagatctgagaacaggcagactgcctcctcaagtgggtccctgacccccgagtagcctaactgggaggcaccccccagtaggggcagactgacacctcacacggccgggtactcctctgagacaaaacttccaggggaaccatcaggcaacagcaactgcggttcaccaatatctgctgttctgcagccaccgctgctgatacccaggcaaacagggtctggagtggacctctagcaaactccaacagacctac

SEQ ID NO: 825588 - DNA, 668 bp, Homo sapiens
cctatttcttatggaacttcattggtgcctgcacatttgaaaaaggagacctcttacaggcttgcctgagcagggaactccctataccagattggtctcagcagggaaagagatctgggtgagccagctgttggagtccataggtgggctttattgctgaattccttgagtgggccagcctgttgcttgggtccactagggtaagactggaacttgagtctgcatgtgggcctgatggctgggttggtggggatgggcctgcagcatggttccatggaaacaggcccagagcttgtgtttgcaggggctaacctgaagtccaggtccctgggagccagcctggcactggaataggcttgtagcctaagtccatgggaacaggcttaaatcttgggtcttcagggtccagcctggagcctagaaccacataagccagtctggtgccagggttcactttaaagtctgtgttaaagtcaggtgcttcctttactctcctttccccaagaaggcatttctctccaggctgcactgcataggcctgatggaggagtcacacctgtaatataaaactatccatgctatcatcttyaatgactcagttcttatttctgcattccaggtactgtaatctcttatctggactccttagctcttgtaaagatattttc

SEQ ID NO: 825589 - DNA, 546 bp, Homo sapiens
ttcccagtggaacatgtagtcatttataacagtgactatacactggggaaaaggaactacacagatattttgggaattagcagacattgtctctgtattgactaactcctagagacctcaratgtgactgtgctcacaagtcaaagtgaaggcttatagcagtcaggtggcagattaagccttagcccaaatctgattcacagtgggaccaactggtctatgctccctttccctcaattgttttttcctcacctcttggatgtatatttggaattgatatacttgtcactctcagaatccccaagttctttctctgacccataggtaagggccattatggtaggagggactaagtagaagtccatagaaagttccctcttcaccaagatagtaaaccagaagcaatactgcatccctgggggtggaggggcagggaattgcagaaatcacagccactattaatggacaaaatgatacagagtttgtgatatccatcacattcccacttaactcacctgtttggcctgtacagaatatgggtaaatg

SEQ ID NO: 825590 - DNA, 411 bp, Homo sapiens
cccaacttgaatacaggtctgccaaatccaractgtcatctgctgcaccgcatagtctctcctcagtttttcctgcccttagaagccaccaggctgcatgagtaaacccagcctcaggtgaggcttccagtttgtgagttcaagttattgcctacagactggtgttgggggaaaccaacagcagctccaagtcatgagtgctgaagaacctcagggatcctgttcaatttttttcttgatggagagaggtagaactcattcttaaatgaagcacaaacagaaagacatatgatgaatgactgagaatttggtcagccctagcaaaaacactgcaagctgtctgggtaggaatgagttgtctcatctcagatctgagtcagaagcagctggataatggggccagacaccggc

SEQ ID NO: 825591 - DNA, 557 bp, Homo sapiens
atgttctttagattccatgttaggtcaggggggaattttgcctcttattttctgtgagaagaaagcatgcatgcatagacatgaaaactgaagttaagagatgtgcttatgcctgtaatcccagagtgttgagagaccaaggtgggaggatctattgaggccaggtgttggagattaccctggacaacacaggaagaccctgtctctacaaaacacacacacaaacacacacaaaattagctgggcatgatgtcacacacctatagtcccagctatgtgggagctcgaggtaggaggatcacttgagcccagtttgaggctgtagtgaactatgatcgtaacactgcactccagcttgggtgacataatgagacactgactctttaaaaaaaaattaaaagaaggtataccagcaaaggccctaacaggaaacagattacttactcacataggttagttttaggagagttcagtaactataaaactgtacaaagattatgtacaaagktatggccaggattaaccaagaaacgcaaaagcatcatcaaattcacagt

SEQ ID NO: 825592 - DNA, 466 bp, Homo sapiens
gtgctactgaggatccagtttgccaaaagccaatatctccatgcccatagacaacctttgctatacaacaattaactatgaatctcaatggcacacaacaatagcatttatctcttattcatttgcatgttggccgaggttcagctgtttaggctgactcagctttggtcttgtctcaaagataaaatttgagtttatgtttgctttctcatttttcttggaccagtgtttaaccaacgtacattcgtatcacaatgaaagacaaaacaacaaaaagaccaagctgaactttgcagacaaaatttattgcatgctcacagcatgactgcttacatattattgctcaaagaaagtagcagggctaaaaccaaagtgaagaggtaggaaaatataactctccctcctaaaggccatggcaakagtatgtatacataatattactagaggggaatgaagaattagaatt

SEQ ID NO: 825593 - DNA, 612 bp, Homo sapiens
tacaaacaaatgcctcctgggttagttgatttttgaagggattttcatgtcttttctccttcagttctgctctratcttggttatttcttgttttctgctagcttcggggcttgttttctcttggcactctagttcttttagttgtgatgttaggaagtctatctgagagctttctggctttttgaagtgagcatttagtgccataaatttacctcttaacactgctttagctgcatcccagagattctggtatgttgtctctttgttcttctcattggtttcaaagaacttcttgatttctgccttaatttcattatttacccaggagtcattcaggaacaggttattcaatgtccatggagttgtgtggttttgagtgagtttcttaattttgaattcttatttgattgtgctgtggcctgagagactgttataatttcagttattttgcatttgatgaggagtaatttacttccaattatgtgatcaattttggaggaactgccatgtggcaaagagaataatgtatattgtgttgttttgtggtggagagttctgtagatacctatcagttccacttgatccagagctgagttcaagtcctgaatatc

SEQ ID NO: 825594 - DNA, 551 bp, Homo sapiens
cttgcaaggtttctttaaataccagatgcttggttgcttactcatgtttattcaggaggcaatttaaagttgcttggaatctgtgtaggttggggcagcagggagcaggtgccagagtgtgtggagctttgcttcaggatactggtgcccacgtgaaagtgccttagctcttcccactttactcagtttctctgaggaatcctctgtttgtttttgactggagagtagccccctaggcattcttcatgttttggaggaaagaacgtattgaccactctgtgttatattttcagtttgtccccctgtgtccagccccacacatcaccctgaggtcttctgttagacctgacattgctaaggtctgagcatccctgggcttctccaaggcggaggctccttcccagctgccctctccgtgcactgcgtggcacagggcctacgctcttaagccacatcagtcacttttgctgttgagctgcatcagtcttccktcacttttgacatttctgaaatttaatttcttttctattgttctttttgtttttgtgagt

SEQ ID NO: 825595 - DNA, 622 bp, Homo sapiens
cataggctgatctttttctcacttttttcctcacataaaataagtttttttatgataaagtcyttggagttgctgtgcctatttttcatgtgtagtatcttatttttatttctcagtctagtcaactctgctgaatgtgtatataaggtgtcattcatagaatttccacaggcttaaggcctaaccattgatggccaggggctttctagaactgaaacaacttcacagatttttgggggtcatgattacccatttttaagatttggttatatatgtgaataatcagtacaaaaagtaactgattttaatacaaaccaatgatatattttaaatgttattgtacagaatgtcacttaacttttaaatttttttctgcttgctgccagtataacatgcatacaatattttctcagtagtcacgatcatctttgatataacaaaacttattttaattctagcatctacagttgtttagatgcacagttttatgatgatgaaactgtaacagtagttcttaaagacactgtaggacgtgaaggaagagatagactcttggtccagctgcctttgtctttagtatataacagtgaagattctgcagaatatcagttcactgggactt

SEQ ID NO: 825596 - DNA, 563 bp, Homo sapiens
tactttgtgaagccatttttgcaggaagcagtctgtctttgtggcagcagagaaagctagaccttatagrttataaagcctggagagctatcctggcctgttcccatttctccccagttgactggtccaggaaaattcaacctgataaatttcaaagagataaaagatttcattgtacaagataaaaccataaaaacatagcagaaaatgtgaaataatttctttctttttaaaaagaaaatatgaaaaaaggtatttctagctttaaaaagttattaacatcattaaaaaagacaatcaactggatgaaattttagcatagataaaagactaatctctcaagtggataaaaatcctctagaaattgataagaaaaagaacaaattcattagaatatataagtaaaattactgatcagaaaggatgtttccaaggggaaaaaacaggaatcttcatctgaagcagtcagggatccatgctttcttcaagaagaaggaaagtgttccccaaatcttcctcaggtcaagaggaaacagaaataaactttattcaatgactcatag

SEQ ID NO: 825597 - DNA, 570 bp, Homo sapiens
gtggtcctagctggcaaggtaaggaatgaaggaatatttggtgctggtttcaagtgtgataaagcaaataatgacactctaaggaactgtgaactattaaagaaaatttattgcyacatccacttaagcaatccacgtatttccatcttaaatatagtctttttaacagggtttggaagttagagtgttggcatctaccattcacagagagcacaagaggtgagggggtggcaaaattctgccagagtgaagactgaacatgcaggaaaaggagatacccttaaccaaggaatattaagatgtttctcccagctccctctaccttctaggggaaaatagggaattaattctcatacaacattaaattcttgttcagaatttacttgcaatagttggcatgtgattcagtcattgatttgtacataaagctgtgcaacattttgaaatttctagaggagtactactaagattgcaaaatccaggatgcagtgagcttgaatacatttcattgtaagattgaaaatattctgttatctggacaaacagactatatattatagagatatattt

SEQ ID NO: 825598 - DNA, 626 bp, Homo sapiens
aaaagagtgtgatactggtataaagctaaacataraccaatggaataaaattgagaatccagaaaatatcctcacatttatggtcaactgattttctacaaaatcagggatgtcaagacaattaaatgagaaagcacagtctttttaacaaataacactgggaaaactgcctatccacatgcaaaagaataaagttggacccctacctcacaacatataagaattcactcaaatggatcaaagaactaaatgtgacaacaaaaattataaaacacttagcaaaaaacataggggcaaatctttgtgactttacatgataccagaagtcttagatatggcatcaaaagcagagaaaattggtaaattgacctcaatcaaaatgtaaaaccactgtgattcaaataatagcatcaagaaagtgaaaagacaaaccacagaatggggaaaatatatgcacattctctgataaagaacttgaatgcataatataaaaagaacacttataatccaacaacaaaacaaataacccaattttaaaataagcaagggatttcaattgatatttcttcaaagggtatgtacaaatgactaacaagcacatgaaaggatgctcaacaccattagtc

SEQ ID NO: 825599 - DNA, 624 bp, Homo sapiens
tctgcttgttctaggtaccacaaccaaattttccractattacagactttggttgcttgaggatttcatgtctatttggataaaacagcacaacttttagaagcaattgctttatcatggatgttagtgaaagagagagagagtcctaaatttaaggcaaaataagttgttaggaaaatacagtgacttctcaggaaggttatacaactacatctcagactcaaggacaagaccccagtttatccgatttttaatcgctggtgctcactgcagtatctgtcttcacatgtgttcacagggagcagaaacctgcataaatgaatacatttaataaaatatatttactttcatctaaaaacggcagggttgtaccttacagtttttgcttttaaaaatatggttaacgccagggaaagcaaacaaacttattgcttcagaggggagaagtgacatcacagaggacaatttataaaaagaaataaaacatacactaaaatgagatggaagatgtatgtcatgataccctaaaccattaatttgtcccattctttaaaaatcacagagttggtgatctggtgaaatccatcgctgtttactctctaccctctctaaattgatggcgat

SEQ ID NO: 825600 - DNA, 593 bp, Homo sapiens
tgcatgaattttaaaagcacctttaggattaagagttttgttgtctatatttacataatttaaagctgactacttaagcaagttttggagcaattttaagaatagtaacgaggcaagaatcttaagataatatactcttgctgggcacggtggctcatgcctgcaatctcagaacttcgggaggccgagacgggtgttatcacttgaggtcaggagttcgagaccagcctggccaacatcgtgaagccccatctctaccaaaaatacagaaattagccaggcgtggtggcgggcacatgcagtcccagctactcaggaggctgaggcaggagaatcactggaacccaggaggcggaggttgcagtgagctgagatcacaaactgcactctagcctgggtgacagagtgagattccttctcaaaaaaacaaacaaacaaaaaaaaaatatatatatattctttagatccaagaatctaaggataacaccttctttagaaccaaatgtataaatagtcaaacgaaggatgtttttaacaacatggkcccaactgtggaggtatcatcatcttccaaagctatctacaaaaaggga

SEQ ID NO: 825601 - DNA, 570 bp, Homo sapiens
tgccagcaccaaccttcctgtacagcctgcagagccatgagccaattaaaccttttctttagaaattactcagtctaatatatagcaatgcaataacagcttaatatgctagtcaaggaaaaaaaacataaattctttttataaagcctgtataattttaaaatcaacaccttgtcaacttcccccacaaaaatctcattaatatcaaagcaaaaatcctgaacaaaatactaccaagtgaaatctagtgatgcattttaaatataattacaccatgagtaagcaagtatattccaagaatggaagaagtttcataatggaatatctttcaatataattcaccatattaattagttaaaagagaaagatgatgtaatttctcaataaaagcctactacatggcatttaatgaaatttaattctcactcctgaattaaaaaaaaactggaagaaacatttcatataatagatatttgtggggttcargatgcagctttctttctcctttcttttgtcagtagcaatccaaatttccttgaatcgtacctatcctctttcaggccacacact

SEQ ID NO: 825602 - DNA, 599 bp, Homo sapiens
ctcaggtgtagcaggaatctattattccttctggctgccatgcatctaaacctcacctccatttggcaatatctactttgtmggttttggtgggaggtacagacatctatcaacatagaagctaaaaatgctccaaactcactttcccaggcgccattgttggtcatgtgtgggtgtgtgaccttggctcctccagtcaaatgcatctttgaataggggaccaaagatgaaaggaagcaaggattgagaagaatctttcctggcagagagggccattgctatgatgagatcaagttcttggggcaacagaggagcagtgccagcatctgtgtccagtgtctgagatccattgtatcacagcttaagtgcaggcctagggcacagtgacagcagctctgcagccatccttcctggacccatcttgcagtgcaattttggtatattgttcctgactgcagcacctctgggcctggactttcaacttttgcaaagttcctatgggctcctcgttaagttttcttttttctgaaacaatccagagtcaatatctgttgcttgcctccccacaccctggctgatattgaagttctcattgtatg

SEQ ID NO: 825603 - DNA, 605 bp, Homo sapiens
caatatagaaataactttaacaattcccaataataattagctgacaaggctattaatcacagagcaaaaaccattctattaaccactcacaggagtattttacagattayataataggatcatttatttaactacatcaacaagtattgctaaataaaccaaaacagagaataaatttgtaaatatgtcttttttttttttttttgagatggagtctcactctgccgcccaggctggagtgcaatggaacaatctaggctcactacaacctttgcctcctgggttgaagcgattctcctgcctcagcaaccgaagtagctgggattacaggctcccgctaccacgcctggctaatttttgtattttcagtagagatggtggtttcgtcatgttggtcaggctggtctcgaactcccaacctcagatgaactatccacctcggcctctcaaagtgctgggattacaagtgtgagccaccgcacccaggtaatggcattttttaaacctttgcagttgagtagttgatagcttccaattaggtgggaatattcataagtatctagtaaaactaccaagatgaactttttaatctgtgagaatcctct

SEQ ID NO: 825604 - DNA, 605 bp, Homo sapiens
caatatagaaataactttaacaattcccaataataattagctgacaaggctattaatcacagagcaaaaaccattctattaaccactcacaggagtattttacagattatataataggatcatttatttaactacatcaacaagtattgctaaataaaccaaaacagagaataaatttgtaaatatgtcttttttttttttttttgagatggagtctcactctgccgcccaggctggagtgcaatggaacaatctaggctcactacaacctttgcctcctgggttgaagcgattctcctgcctcagcaaccgaagtagctgggattacaggctcccgctaccacgcctggctaatttttgtattttcagtagagatggtggtttcgtcatgttggtcaggctggtctcgaactcccaacctcagatgaactatccacctcggcctctcaaagtgctgggattacaagtgtgagccaccgcacccaggtaatggcattttttaaacctttgcagttgagtagttgatagcttccaattaggtgggaatattcrtaagtatctagtaaaactaccaagatgaactttttaatctgtgagaatcctct

SEQ ID NO: 825605 - DNA, 602 bp, Homo sapiens
cttatttgaggacttgctatggaaaaaagggtggcactaaacaaatgcrgtaatgttccttgagtaagtaattaagagttattcaatgcttgtctacctgaaataccattgaaagagggttggtattctttataatgagccaattttaactgttcatacattattcctgtagtctttttagtttccttatctttagagtgatttcaacttgatagcatatcattttaagtagcaaattaaattgttttttagatatttgctttcaggtagttctctctaagggcataaggaaatgagattgcactcagccttaaacagtaacaaaattcaacaggtctattatgctcttcaaaatgttcaaatagtacaaattatctttgtaaaaagtaaagctaacttattcatatgcactgagaaaacattcttttagttcctaatacataacatatgactaatataaacaatggtcaacattaggaagatttttttcaagcacattaaatgtgtttaatttctagtactttacttgggtgaagaatgtgtttgtatcatagaatatattattttgtgggaacctataatgataaaatgttagattgtat

SEQ ID NO: 825606 - DNA, 568 bp, Homo sapiens
aaaattatggacccctattyttaagaaggacctacatcagccagggcactcaagtttacagtgccttcaaagtgcctcccaaatggctagaaaactgtgagtttcccaattcagttttaatgattgaatctggtctttgtttgggaagggactctgtcttatttgtacatccaactagaaagttggcatttgtttacctcgtggaatgacagagtgacagctttcggaataaaggtagaaaaaatatctagaggtgtgaacaagtgttttactttggaaatgtagaagtttgagtcatttcctactgtttcccgtaagcttattagtaagaataaggacgattgtgttcaaatcagtcagagacatccagcaggtgatgagagacctatcaataagttaaatttacagtgtttgtaaaagtttaggaatcccacaccagagttttttcttcttaaaaaaaaggctccaggggtaattctgaaaaaacaaaaattattaacatttctcccttccccatactccctgaggtcttatggtaacctctatcccctcatgccagggttgttga

SEQ ID NO: 825607 - DNA, 624 bp, Homo sapiens
ccaccacacctgggtaatttttctgtatctttagtagagaggggtttttgctatgttggccwgtctggtgtcgtactcctgtaatcccagcactttgggaggcttgaggaaagtggatcacttgagtatttctttatagcagtgtgagtcatctcctattactgtttttttttttttttttttcaaaaagatgggatcttgctgtcacccaggttggagtgcagtggcttgatcatagctcactgcagtcttgaccttccaggctcaagcattctcccacctcaacctcccaagtatctgggacaacaagtgtgtgcaatcatacccgcctaattatttgtttattttttgtagagatgaagtcttgctatgttgcccaggctgttgtagaactcctggactcaagcaattctctcacctcagcctcccaaagtgctgggattataggcatgagccactgcgctggccacaatctcctattactctcatctatagaaggaaatgagactatccctctttgagggttgctgtgaggtttagggaaatgtgctcttggtacccagtagatgctcaataagcattacgctaggtatatagtaggtgctcaataagtgttgtgcttgg

SEQ ID NO: 825608 - DNA, 506 bp, Homo sapiens
gcagcaagtgcgtgtgtggagatcctgggctcctccctgmcccctcccctgtgcccctgggttggaagatgaaggaataatcagcagagacaaatgcttatgagtgaggttatgggttgaattatatctacccaaatttgtatgtggaaattctatcccccagtacctcagaatgtgaccttctttgaaaataggtttcttggggatataattagtgaagatgaggttgtactggagtaggctggggccctaattcaatatgattgttgtcttcattaaaagagggaatttggagacagacgcacacaaaagaactccacatggagattaaggcagaggtctagaagccaagaaatgccccaaattgccaacaaaccaccaaagctatgagagaggcacgggacggattctttctcacagcccacagaaggaaactatccggccgggcgctgtggctcgcgcctgtaatctcagcactttgcgaggccaaggcgggcggatcacct

SEQ ID NO: 825609 - DNA, 506 bp, Homo sapiens
gcagcaagtgcgtgtgtggagatcctgggctcctccctgccccctcccctgtgcccctgggttggaagatgaaggaataatcagcagagacaaatgcttatgagtgaggttatgggttgaattatatctacccaaatttgtatgtggaaattctatcccccagtacctcagaatgtgaccttctttgaaaataggtttcttggggatataattagtgaagatgaggttgtactggagtaggctggggccctaattcaatatgattgttgtcttcattaaaagagggaatttggagacagacgcacacaaaagaactccacatggagattaaggcagaggtctagaagccaagaaatgccccaaattgccaacaaaccaccaaagctatgagagaggcacgggacggattctttctcacagcccacagaaggaaactatccggccgggcgctgtggctcgcgcctgtaatctcagcactttgsgaggccaaggcgggcggatcacct

SEQ ID NO: 825610 - DNA, 648 bp, Homo sapiens
taggggcggattcttccattgttcacatacacaacactcactagatcacaagatttccctcataaaaaccgaaatagtgcagaggttgatrtctactgcccatagattctaaatcttcctaaccctaacttcagtgaagaagccagaccactgcccactctgttttgatggtcataggcactgttgtctgaaagaccagttgactgccacactaaataagtgaatatcaaagaaggatatgaaactcatccctcttggaggcaccagtggagcttactgtaatttttcctcctgtgctataaatttcagattctgcacatcacacatgtacgaagaaatatgaccggaaggatttttcactaaaatgctaacagtcatggaataatttgggggatttattttatttttttaaatttgttatattgttgaatttttagaacaatgaagatatgtaatttttataattagaagagtaataaacagctagcacttattaatcacttgctatccacaaacattttacacctgatccttcacaggacctctataaggtacatactgttgctatcctcatttaccaataaagaaactgagacagaaacagatcaagtaatttgcctgagtcacacagctgagaagtggcagagc

SEQ ID NO: 825611 - DNA, 591 bp, Homo sapiens
gccaatatttctgatataacaaactacatgtaatccatcactagccatgataactgcaattttaattgattattctgattccacttttattcatttgagttattttaattatcttttctattgtttattctttttaaagtatgttattgcataatttataaaagaataaaattgcacttttaaacctctcttctaccttaaaatgtaaaacaaaaatgtaatgatcataagtctaaataaatgaagtatttctcactcattgcaagtatatctttttggttatcactgatacccacatgtttacattgatcatgactaggtagaacaatacaaagtatttttttagtcatgtgtttcacatttggatattttgaacatcaacgttttagtattaccaaagtattaggtttccaaatcttcactagctcaatactgttgtccttttggtttcaggaaaggaaataaaatgctcagcaaaaaaagggggcataaagkggtccgaaacttgaaaaagtatttgcccctacataaaaacccactaatcatagttctaatctggacgcaaaattgcaagaaatagaatgtttgtat

SEQ ID NO: 825612 - DNA, 629 bp, Homo sapiens
acatatataatctaatcaaagggtgtgtgtatatgtgtgtgtgtatatatatatatatatatayacacacgtatatgccttttaaagatttcaaatttaaccatttaataaatacacactatttaataaatagtgtgtgtatatgtgtatatatatactccttggttattttatattgaaaagctagtattagactattcagtctaattaacgggtatatgattagattgaatggtctgatactagcttttcaaatgtttgccttcgaaaaacgtaggctgtcttttcaccttgtgatattaccatccatctggctaagccccatctctctatttttaaatttttgctagtcagaatcccatttaaaggtattcatttctgagttcattagggtgaacaaattgctataacaaatacatcccaaatgtatattcacttaaattgaatagaagtttatttcttgttcatataacattactggagccaggcgcagtggctcacgcctataatcccaacactttgggaggctgatgtgggtggatcacttgaggtcaggagtttgagaccagcctggccaacatggtgaaccacatctctactaaaaatacaaaaattagctgggcatggtg

SEQ ID NO: 825613 - DNA, 629 bp, Homo sapiens
acatatataatctaatcaaagggtgtgtgtatatgtgtgtgtgtatatatatatatatatatatacacaygtatatgccttttaaagatttcaaatttaaccatttaataaatacacactatttaataaatagtgtgtgtatatgtgtatatatatactccttggttattttatattgaaaagctagtattagactattcagtctaattaacgggtatatgattagattgaatggtctgatactagcttttcaaatgtttgccttcgaaaaacgtaggctgtcttttcaccttgtgatattaccatccatctggctaagccccatctctctatttttaaatttttgctagtcagaatcccatttaaaggtattcatttctgagttcattagggtgaacaaattgctataacaaatacatcccaaatgtatattcacttaaattgaatagaagtttatttcttgttcatataacattactggagccaggcgcagtggctcacgcctataatcccaacactttgggaggctgatgtgggtggatcacttgaggtcaggagtttgagaccagcctggccaacatggtgaaccacatctctactaaaaatacaaaaattagctgggcatggtg

SEQ ID NO: 825614 - DNA, 635 bp, Homo sapiens
tcatgttcatgaccctgcagtctagcttgggtgacaagttaacaataataataataataataatattagtggtctgkttacttcactggaaagggccacagaaaatttgagactttacttctcaattaaattgctatggctttcttatgattcaaaaagtgatgactcaattgtgtctacttctttccctctctttttttaagaaacagagaactttgcacaggcaactaaaaccttttcaattaaataaagatctaaaggtttccataagtccataagtgactctctaggtttgctctgtgacaagacagagacattccttactgtatttagaaagacagtctcatcccaggcatccagtaactcgctatttccttcagtccctgcctctagagatgcctctttctgatcgtggaaacattgcatatcatcttaacactcccccaatccatataaacatgtagaaagctgaaaactcatgcagggttagatgttcactgacagaacacacaaaaaacaacaagtaatattgtatttgtgaatgtggctacacattttaacttcgaggagctactcagatataatggatcccagagtttataacatgaatatatagagatcagtggccttctaaa

SEQ ID NO: 825615 - DNA, 526 bp, Homo sapiens
accataggcttagagcaggatccgaggctcactgattttcagttcactggactaagcctgcccaaataacacacactcaggcctgggttcgggagtcagagttccagccagggacgcattctctcctggccctattttcttgcctctaaaataagaatcctgacctacttcattggcctgtcctcggggaagagataaacatttttacattaagctggaaatgggtttgtaagtgtcctaatacaacataactaatactttgcctttaatgatttttttcatcttgagaatcgaaatgaaatccattcatgttctttcaacgaacataaatattttgcggagagtaaaagatacaaatgggctagccatttgttccagggaacacacgccggtcatttgccaacttgctctcagcctcatcctgttcctcccatagcagacatttcccatgctcccttgcgtacggccttcctgccaggtaaggccaatgggaggcaytaggggattcgagggggagagaaaggaa

SEQ ID NO: 825616 - DNA, 518 bp, Homo sapiens
aagaaaattcaaaggaaagaaaaaatatcgatgcttaaaatgtttatgaaactttgcccaaagcatcttagtttggaattgatgaatctggtatttcaatcctatcctaactraatataaacacagcttttacaaccattgttagttgtaggcagaatgtctttaaaaggactacaagttgttctcataactggaaatttgaaaacgatactaaacatatgctattagaaaacatttaagtatctactacctccgaagaaaaggtaaacaaaataatggctttttaaaagagaataatgttctatttgttggattatgtttccatataacaaatataaacatttatttatggttttcccatagcaaaataaaaatgaaaatctgtaatttccttatattgcttcttaaattcacagaagtatatgaaaaagtttgctgtacttccactatgaattatagagtttccacagatgcattttattatccccactttatgcatagggaaaatgaaatgcaga

SEQ ID NO: 825617 - DNA, 528 bp, Homo sapiens
tcctcaagagaaattgcagaatcttggtaagaactgtgagatttgtggtattttagcttaccctattttcattccacttactgtttctgtagtaggcttgaaaatcagcaatctgcaaacatggtgaaaatccttgtgctggcaaccatgggaggtgtcaaaacaaggttcaattacacacaataggactgctattatgttgcttgcctgttaggtccctggaagatctcatttgcaaaactgtcattatttggtttaatttggaagtaacccagtacaaaaagctgtttcttccaggggcatttgtaaaaaaaaagtttatatgtatgtgtgtgtgtgtgcacacacacatatatatgtatatatatatatatatagagagagagagagagagagaggcawttatttaactttgcagcttgctgacgatatcgataacagttggagcaaacagtagactaactaaaaggctaaaaagtaaaatctggaggatgagatgtctatataaactttgaaaaactctgatgt

SEQ ID NO: 825618 - DNA, 598 bp, Homo sapiens
aaaaacaggtgcactcaaaggcccagagaagaygggcaagagaacacagcaagatgaccaggtttcaaaggcccagtgtggtgggggaggggaatcatagcagcagaagcctagaggcctgagaaagggccctgcattctagcaaaggctgcctcccgcctttgcgggctgcagaggcgggatggtgtcaaaagttgcccagtttgcatagcaaatactgctgtcctcactgtatttgcttggtttaactgcttagtagatttggctacaattccatcacatggtatatcttggtgtccctttggtgaaaagtcttcactgaagaatccagaagagttaccataaatatgagtgaccaggggagagtggattatacttgatttcctatttacttctttctccaaggtcaacagaaaagaaaacagagtttgagaaaactctttgtttgcaaagctaagaaagacatacacacatacacacacacacacacaaacacacacacacacacacacacacacacacacgaaaggcacagtttgctgctaaacatagcagttaattgaaaaaaaatcatgtcacatttaaggcagaaagcctg

SEQ ID NO: 825619 - DNA, 306 bp, Homo sapiens
tgggatccctatactgtccttgtttatactatttttggaggtttctatggatatagtttctatatatattatagataatatagagagagataatacatttatatagayatatagagatatctatatatatatatatctctgtgggataatttcagagatgcaggagttcattgttcatctgtgcagcagcctctgattctgtgtagaaacagcagggacttcccaggagactgggaacaagaacatgccaaagacaggaagaaccagccaggtcatgcaaggaatttaggattatctgaacatttc

SEQ ID NO: 825620 - DNA, 601 bp, Homo sapiens
cgagatatgtactaatattctctccataatacagatgagaaagtgaggcagaaagagattaagtagtggccaagatgctgcaagaaatacacaccagggcctagagaaagacacagacaggctggctcttctcccagccgccaatggccaatcaggcactgcagctgaagaacttcatgcaaatgtgtcatcacggtgcaacttcatggtaacaaacatttccatttgttgggagtcaaggttcctgaggaaaagaagtcgaaggtaaagtgaaaaactagcttgtaggtcatatccttaacactcttcaatgccacatgattctgagccgattctccttttcctgaggtcagtttagtaaatcatgatcaagcttcaatgcagacatcagtcttcggagccactgtgcacaactgttaaagttgtttactgcacatgggcacctggcttcagggaccagtgggacsaaaatcaagcccatgcacctttgcaaactggaggtcttccacaggttgtatccatctggaggttgagcctttttatgatttgtgcaatgtactatcttaactagcagcagcctatcgttctttctgcaatgttg

SEQ ID NO: 825621 - DNA, 629 bp, Homo sapiens
tgtcatactcgtcattgataattgttgactgagtgaaaaggtaaagacatgtgaaggggaaatagtgcagtgaaaatgtgagtgtggaagagtggttcccaacacctgggttcaaatcatcacaggaaatcatggtcttctggaacctccctagtcccatcctgcagggataggtggctgggcttagatgacctttcaggttctgctgctgctgaaatatatctttggttctcctaaggaggctttttttccattcactgctttcatgataaagaatcccttttgctcttaagggatcccttttagatttgggaaaattatccataaaactttaaccacaggagtaattatgtcgcacaggtgagctagcatacctatacaagaccacttccctcacaccaatccctccctaccagggtcacaattgattagcagtattaccagaggaacagccaagaccaaaaacttctcgaagaccaagcccatattcattatttccatctctaagatttcattccgttcctggataataaacattgaaacatattataagaggccaggtgctacctgyatgttgcatatgtaagtaattcaggctcgggggcctggttcttttccttagcgcttag

SEQ ID NO: 825622 - DNA, 624 bp, Homo sapiens
cgagacagcgccactgcactccagcctgggygccagagcaagactctatctcaaaataaataaataaataaatgttcgggacattcatttgttatttggctgctgcacattttggaattcccgaattactcaagattgatagatacgatggactcacttaatgagtcaccttagccaacttcccagtgtttgcatctatgtgtggcttctttactgtctctcagtgaacgcagtcactttcagaaaggcctgccagcatcactccaaacgttcaattacttttattagcataacttaaggatgcagtgatacattccaaggctttttgggaatgtgaggaatcgtgaggctttaggatgtatcaccagcaaatgttgcaagaccactacctacaaatcattgcaaccagataagtactatttccattgtctatcactgaagtacttttattacataaatcatcatttaagaatgttttttggggccaggcgtggtggttcatgcctgtaatcccagcactttgggaggccgaggcgggcaaattacttgaagtcaggagtttgagaccagcctggctaacatggcgaaaccctgtctctactaaaaaatacaaaaaaattagcc

SEQ ID NO: 825623 - DNA, 657 bp, Homo sapiens
aatttaataagttgtataacactagtcaaaaaaggaattctatttagtaataaccacagtttcaactatttttctctagaaaattcgatcaccagtaaatgcctgtaatcatattataaaattatttccttggattatattttatttaaaaaaaattaaccattaagtctgtgacaaaaagagctaattttcaatcataaaatagtcaaaaattttttcttaattttccacttaactgttttgaggaattaaaaaatttaggggactcacagtcattatcattgaaaatatgatataactataaattataaatgatagatgctatatgtttagttgctataatttgccacccatttcttttttataatagtaataatgaaagaaaattttaaatatttttatttttataaaataaaaatcatattcttgttttaaatgacttaatttctgcatcagtttttacacagttaagtgggtcacaagtcaatttttaaatttctccaaggtttattcttgctgcaaggaaagtaatattgtatttccaaaatagcaatacatttacaaacaaatctgtctagaaaactttgtagctagagtttcttatatgtatttacaataatgtcatattttgaattttarttattgattcagtacctt

SEQ ID NO: 825624 - DNA, 612 bp, Homo sapiens
gtgcaaataatcagaagatcccggttgattctaaggacagggaaatatgtatgcagttggctctctgaatttgtgggttcagtatccacaaatccacaaccaaccctggatcaaaaatacatttaaaaaataaaaaaaggcaatataacgatttaaaaaaacacaaaaccaatacaactgtttttaagtattaacattgtattaggtattataagtaatctagagataatttaaagtatacaagagaatgtgcataggtaatatgcaaatagtacaccataagagacttgaacatatatggatttattatacaagtgggggaaggagtcctggaatcatccctgtggatactgaaggatgactatctatagaaggaagcatcatcatcaccaccatcatcatcaccaccatcaccattcccatcaagctgttttcttcattgtagcagctatgatttctataccacttatgatgtgtcatggactgttcttggtgtttcttgtacattractctttcgttttcacaacactccagataaacactgttatcatctacattgtataggtaaggaaacagaagacaaacaaaacaaagtaattttccttgccttc

SEQ ID NO: 825625 - DNA, 556 bp, Homo sapiens
ccatggaggagcatggccccccattcagcccacattaactctggagtgcagaaaagtgacgaggtcctttgtagtggaaacagtaactcctgtcacgaaggcttgaaaacaagtcacttgggtgttgatgatgactggaaaactgtattttgaaggatcccaaggtatctctttaacattcatgccttctcccacaatctgctagtctgccgacttcagctttcatctcctggaataccacccagttctcgctgttgcatcgtatctgtgaaatgtgcatcattcccctgcctttcatctgagagtttataccaagattcaagttttcatcggcagtgggttcatgtcagttagaattaatggcagtttcactcattggcttttattgttaatatttacataccttccagattgtggcttttgggtagggaggccaatggaatgcaaaatgagccaaagtcaagaagcacagagctttgctcctttccttgaaaaaaawgttgcattttatttgtttttaataaataaaatgagctttacagcttccagtaaaata

SEQ ID NO: 825626 - DNA, 496 bp, Homo sapiens
tagctcatctattccagtactgtcataagaaatgtttccttgcagatctttgtaaagaagatctttatgtgtggtgtracaagcaatatgcataataacatattcaaagcaaatgtgattctttgctttaaagaatcgtttggtaaaattttgcttatcattaggaataattaaaataagctgtgtttagggaatcatttcaggttatattattctcttggggtaactagaaacactgggatattattaaacaagggttcgctgttagactaggaactgagaaagagacttgatgacattcctttgtcctccacatgtggaaaggcagatggaatagtctgcatggagcgcagagggaaaggccactgaccaccttgtgcccttattgtccaacatgcatacatttagttgagagaattacctatagacagcagctgacttcaggaggtcattttcaggtgcactgtcctcatatagttcaattagcttgactttt

SEQ ID NO: 825627 - DNA, 589 bp, Homo sapiens; identical to SEQ ID NO: 821100

SEQ ID NO: 825628 - DNA, 675 bp, Homo sapiens
ccagcttggttgtggagaccctaacccagcagtgctagaggaattaaagacacacacacagaaatatagagtgtggagtgggaaatcaggagtctcacagccttcacagctgacagcctcaaacagagatttacccatatatttattgacagcaagccagtcataagatttgctaaaagtattccttacaggaaataaagggatgggctctggctagttatctgcagcaggagcatgtccttaaggcacagatagctcacactattgtttgtggtttaagaatgccttaagctgttttctgccctgggtgagccaggtgttccttgccctcatgtttgtaaggaagagttttaaattaagtttattattttaaaaattatatagatgtgcttacaaatacatacagactatatttatcaaaactactttacttcttcaaaatcattttagccatctaatttaaagcttaataatctaagtacatatcagctttcatgaataaaaacatcttatttttcatgtattttatcctagaagtagatatataaatcaatgttcatgtaaaagcaaatttggtaaaattctttctgggtgtgatttgtgatattgtgaggtaataagaagtacgtatttgatttctgcccctggatccsagcacagagctcctaaaactct

SEQ ID NO: 825629 - DNA, 656 bp, Homo sapiens
tttatacgaattattcattaaatgtccaaaataccgttatgtggtaggtaccacttatgttctaacagagagacgaagataatagacctctccacacaatgtagaaaagaaagctgtcttattactgaataaggacaaccactgtatagtattgtaggcaatctaaagaaaaatattattaaaaaattccgccctatgtgtacagtcaagcagttttaaactttttatacaattctacttttgaccactatgtacatcagttctcaagattaatgatttttcaataagaggacttggtctcatcatttactgcaaattcttttataaatttattctaaatttacttgagaatccagtgttagttaactaactttatcgaaagtaataaaacttctcttacctcatctgctagccgatttacagtttaaagagaggcaccttggttaaactcttgcagtgatagggacagtgggttgttattttctcagatgtttatattcaaaagggacaaatctcagaactttcacaaatacttctaggttgtaaacctggctagaggcttacatagcckctaatgaaatttacatgcgtatcaaaaggttagagaaaggattcagaagcactaggtttcttatggaaatgctctaagaaaaaga

SEQ ID NO: 825630 - DNA, 551 bp, Homo sapiens
tttgttccatcttgagcagagatgtgctgcatttcttaacgtttggtctctatacattataccatctgctgaagtttagctttgtgtgtgtgtatatgtacccatgtgtgcacttkaaatatcagtacaaactgataaacaatgtttctggttaatgttgcaaaaatggaacactgtattttacataattgattttctactcctgccctgtgaattaaggcagagttttactgtaatatttgcaagtatccaaaatggttactgatgacaaatactttttaataaatgtcaaaatcacaatacttggggtttttttattctccatatttctctaaaagtccatttgatctgactgatttctaaatgttgtagcctttgtccaatccacacctccttaagcagggtcaagtttgaaagattttaattttgtcaagttttccattcccatacttctcccactcacacacaaaaaaagggaaaatcttgaatttttctaagcatatttatcaatgtattgactagcaggatagggttgccatttacttgctagt

SEQ ID NO: 825631 - DNA, 542 bp, Homo sapiens
gttgagaacaatcttctgccaatagatagcagaccaatcaataaaaccacacttatagataaccatattttggaactattagggaattttacataactgattgatgtgctaaagactccagtgaaaagggcagataatatgcatgagcagatagggatttcagtaaaatttaatagtcaaatgggaaatgctaggaaaagaaaatttatgctactgcttttacttttatcagaatgcttttgaaggacttatgagtaggctcaacatagttgagaaaagtgtccgaacttgaatataggtcaatagaaatcatgcaaactaaaacacaaaaagaaaaagtgtgaagaaaacaatacaaataggacaacattgtaggatctaatatttgcatacttggaaacccagggtcsggggagagaatgggaagaaaagatatttaaagagataatggctgagaattttccaaaaataataagacttcacccagattcaagaacgtcagaataccaaagcagtatttttttaaaaaaagaacaaaacta

SEQ ID NO: 825632 - DNA, 485 bp, Homo sapiens
aacaacaaggatgaatctctttctgcaagaagttaggaaaaaaagtatatactgtacagtttccatttgttagaattgtagaaaatgcaaactatacagtgtcagaaagmagatcagtggttgcttggggattggggaggagcagaatggagattaaaagggagatatgaggtgactttgaagaatgatggatatttttgctatcttgattgtggtgatggtttcaaagatacacatattaaaactttaaaaatcgaacactttaaatatgtacagcttattgtatgttaattatacctcacaacttaaaagggggagggaaaaagagaagagaaatatgggtatacattgtcaaaaggctctccaacttagaattttcaagtgaatggctatcctaaaacctgcatttttaagattattatttctgagtcagggccccaggctggagagcagtgcaacatcacaactgcagcctcaacctcctg

SEQ ID NO: 825633 - DNA, 588 bp, Homo sapiens
atccaaatagttctgaactatctcattatcagawaatatatagtgaagtgtagtatccaaaaagagagtcctctcagtcccaaatcagatggaaaaattgaacataataacacttcttagattttcaaccagagtaccaaataaattagctgaccaaagaaaaattattcattgccaggccaagtgttccttgtcatgtctgtccctcaggaaatcacgtgagcttttgtagcagatgtttattgcatgcacctacactaaaacaaacttcactggataattccgggatttttatgcttttttaaacaaatgagacattttaattgccaggttgtctgttgcaagtagataaatgctctgttggatgagagtcattgtactgcatatcgtaaatccttgatgtggggttaccttgatgtggagttagaagcaacaactggatgttaaagttttggattacaaagttttactttatatgccttttgtggggataagtacatcttcaaataatgaaataatcaattctaaaaatgaatgcacagaaaggccaaaataggcccagcttgctacgggatttgtcacctcaca

SEQ ID NO: 825634 - DNA, 602 bp, Homo sapiens
acaataaacaatgcttttgaaagcattaagggagagccatatttgttatttgttttggaatyacatggaaggaggtgctctttaccatttttgctctgcaaacaattattccttgacttagtctaccgtcattaccattgccatcacatattgatctaacaaaaattggatatataattttcttacttgtgtttattgatctttcttaaatgaatgtataactcacattcatttcatgtttaatattagaatggctttgggtctttatttagaagttgatggtgttttgtgatccaaaatatggcatatgaacttaactcttgtttatatccattagcctatagtgaaactggtttcattgtgtgtcattttgcttaaagttcagtttccaggaacctattgttgaaagtaagaaagaagttactgtatactacttttaatgactcaaaatgtaggatcgttagattttttggaaacactgtttttgacataaatagtaaaacatttcctttaatgactgaaaaggatgccaggtatagagaatagttatgagctgactaaatcataattactctgaacttaaaatatcaaaacacttgatt

SEQ ID NO: 825635 - DNA, 653 bp, Homo sapiens
ttctttcttattttagattgaatttacttttcattttctagtttcttaaggtggaagttgaggtcattactatgagctctttcttcatttctaatgtaagcatttaggcaataattactaactcgtccacccsaagtacagttttagtggcatcaaacaaattccaacatattatctttttattttattaagttcaaaatgttttgtattttattttcatcttttctttcacctatgagttttttagtagtgtgttgtttagtttctgaatacttacagattctctagagaactttctgctatgcgttctttttgtaatttcattgtggctcatatttctatgtgacttaaattcttttaaatttattgatatttgttttttgatctagattatggtctgtcttagtaaatgttttgtgtacacttaggaacaatgtctcttctgcacttgtgtggagtattttgtgacatcactaatatcatttagataaaattagttgacaggcctgttcttactgattttctgtctagttttcttattaattattgagagtgaaatattaaaatttctgactacagttattgaaatttacatattcctccttatatttgaatcagtttttgcttaattaattttgaatatctaatattag

SEQ ID NO: 825636 - DNA, 598 bp, Homo sapiens
cgctctaggttccgcatcagctggtgtgctgcccctaccacttctcgaagcagctctccctgacaacttaagtgtccatggtgtggaagggtctcctgctattgtgattccagaagcccgtagtgagagcgggttgctaatttccggatcaactcatccgttctcccaggagtagtcgttggatgtcaggaaggagtccaggtgcacagtagggctctgcagggtacccagattcttccttgagctcagcttgtgtcttccctccgtccactgtcactgtcttccggagatctattaggagtgtgccagttgtccgggtccctcggtggcagctgcatctagtcagccatcttctgcatctagtccgctatcatctagtcttttttttttttttttttttttttgacggagtctcactgtgtcgcccaggctggagtacagtggtgtgatctcggcttactgaaacctccgtcccctgggttcaagcgattttcytgcctcagcttccggagtagctgggattacaggtgcctgccactgcgcccggcaaatttttgtattttttgtagagaccggggtttcaccatcttggccaggg

SEQ ID NO: 825637 - DNA, 598 bp, Homo sapiens
cgctctaggttccgcatcagctggtgtgctgcccctaccacttctcgaagcagctctccctgacaacttaagtgtccatggtgtggaagggtctcctgctattgtgattccagaagcccgtagtgagagcgggttgctaatttccggatcaactcatccgttctcccaggagtagtcgttggatgtcaggaaggagtccaggtgcacagtagggctctgcagggtacccagattcttccttgagctcagcttgtgtcttccctccgtccactgtcactgtcttccggagatctattaggagtgtgccagttgtccgggtccctcggtggcagctgcatctagtcagccatcttctgcatctagtccgctatcatctagtcttttttttttttttttttttttttgacggagtctcactgtgtcgcccaggctggagtacagtggtgtgatctcggcttactgaaacctccgtcccctgggttcaagcgattttcctgcytcagcttccggagtagctgggattacaggtgcctgccactgcgcccggcaaatttttgtattttttgtagagaccggggtttcaccatcttggccaggg

SEQ ID NO: 825638 - DNA, 613 bp, Homo sapiens
actaacattgtccccattattgaagtttacctcattctaggtcagagaaacctctcttttttgatggagaaatttgaagcaagtttgaaagtggaagaactagccttcaactttcctcaggaacactactatcatccctaagaaaatgtagactaggacaggagattaccctgtattaccaagttttaattttttctactagcagtattttggagaaggctcttgtttcccattgtatgtcaaaaacacaaaaggacaccaaaagagaaaaatgacattggctagcgtgaacttagattctaccgtaaaaaggtatttatttgagaatccttctgctaacatagattcccttaaaatctagccatttctttttaatcgaaagttgtaacagaaaatgatatctgatttacattttaaatttccacataactataaacttttatagtggtgaacagatgttgatgtgaattttacaaagctaagatatacttttcaaattcatgtcagaggaatgtcaaactgaaactaggaaaagaagttctaaaagatgagcaaaattgcagtgactactaggactgctttagtacratgatatctttttcaactaacatcc

SEQ ID NO: 825639 - DNA, 650 bp, Homo sapiens
tggtgcctgaaaatattgctccttgtactatgtactaagtactayaatttaatacatataggctttattctctaaaaaatcaagggttctctatcagtccctttaaagacaagactgaagttgaggagtcttgaggacccactctccaggtgaatgtgttgcttaaaaataaaaggttagtaactctagaaatagacccatccatatatagcccgttgatgtcttaccaagatgccaaggcagcccaacagggaaaggaaagtctttttaacaaattttgttgaaaaaattggatattcatatgggaaaaagtgatcttcaacttccacatcattccatgcataaaaattaatttgagctgaattatagatttaaatgtaagatccagaaccataagcttctggaaaaaatataggcctttatcttcatgatcctgtggtggacaatgatttcttgaacagaatcccaaaactgttaaccatcaagtaaaaaatagataacttagactttattaaaattaaggttttctgcttatcaaaagatactggtaagaaaatcaacagataagcctggacagattgggaaaaacatttgcggcatatatatttgacagaagactttactccagaatacataggacttttacaaat

SEQ ID NO: 825640 - DNA, 559 bp, Homo sapiens
gattagtggccttataaaacaggcccagtsagcttgttcactctttgcacctgacaagcatacatggaaggaactatctatgagaaatggggcctcatcagaccaaatctgctggtaccttcatcttggacttcccagcctctagaactgcgagcaagaaatttctgttgttaataaattatccagtctaaggcatgttgttatagcagcctgaatgccctaatataccaccacctttaatagccccatactaattctagtagatgtacattaatttacttaacctaaatattggagaaaacagtcatctcttttttgctttgttttgtttttttcaattataaataatggttacatcaacagtcaaccagagtttaatgaaaaactgatacccgataatactgggtaataatgggacatgctaccaacagagtcagtacacatcagcatagcaggacaacaaatggggatatacacaatctactggacactgatgggacaggaaataaagagctaataagtgtgagtaatttaggatgcaagtagttgacaacaaaat

SEQ ID NO: 825641 - DNA, 618 bp, Homo sapiens
caataacaaatgggaaaaaattggaaaaaaaaaaagccagctcacaatagcagcaaaactataaaggacctaaagaatatacattacgtaccatttttaagagctttatgggaaaaaattatagttttattaaaggatataaaagaagatctgaataatgggtaagaggtctcaaaagcataaacatgtcaattctgcccaaattatctataaatttaagtaaattccaaataaaatctcagcagaacttttctgttcatttgtaacgtgattctaaaattcatatggaaaagtgaattatcattgccaagataatttcgaaaaataagaacaatgggtgggcaggagcagttggcctgcggattctgaaacattctagacagtcacagaaattaaaatatagttgtctgagcagaggaagaggcagcggacagaatagagagcctggtgcaaatccatgttcatgcaggattcacatgtaggggctacgtgggatgtggaatatgatagcggtggcactagagatcagcagggaaagatgagcttktgccatcattgatgatggaagcattggcttttcatataaaagactcctacactaattatacaaaaattaat

SEQ ID NO: 825642 - DNA, 595 bp, Homo sapiens
acctttggcacaacaattacactgtcccaaaatatattctaaagaaataatcaggagtaactacagttatcartaataatatttttgtatactgcagtgctattaaaataggaaaacaaaggagtgggatagggaagcaacctaactatataagagatgattgattgaaaaaaaaaaaaaaagatagcacctttacattgtagaacactgcctaaccattaaaaatcatgtcttaaaagaatatccaggctgggtgcagtggctcaagtctgtaatcccagcactttgggaggctgaggcaggcagatcatgaggttgggagttcaagaccagcctggccaacatggcgaaatcccatctctactaaaaatacataaattagccaggcatggtggcaggtgcctgtaatcccagctacttgggaggctgaggcaggagaatcgcttgaacctaggaggcagaggttgcagtgagccgagattgtgccattgcactccagcctgggcgataagagcaagactctgtctcaaaaaaaaaaaaaagtatctaatgatatggtaaaaattaccccaatataattttaaatgagtatacc

SEQ ID NO: 825643 - DNA, 319 bp, Homo sapiens
cagaatcttgctctgttgcccaggctggaatgcagtggcatgatcactgctcactgcagccttgaactcctaggctcaagcaatcctyccaagtagctggagctacaaacacacaccaccatgcctggctacttttatttatttattttagtagagatgagcaggtttcactatgttgcccaggctggtctcaaactcctggccacaagtgatcccccacctcaacttcccaaagtgctgggattacaggcatgagccatcatgcccagcctgcttaattcttgacaataagagatccagaaaccaatagctcacttca

SEQ ID NO: 825644 - DNA, 633 bp, Homo sapiens
gtcagtataatgtcccttctatcattacagatcctcaaggcagacaagttcccaaggaagcgaagctgtccccatagatgagagatcaataacaatcatgacccaaggaactgatagcagataagttgtttttactcaagtgttttattctaacccttctctgtttggggggactccatgagttccatgtagaatgtaaggctccactgtcaactgagttggtgtaattttcctggagactaagctgaaaatacctattagattcttcaaaatatacacaccctctgttttggcaacatccttaccagaaacttaagatttggatatactttttaaaagtcaccaatattcatgtacaaggatgtccacagaaatattttgattaataataaaaagtagacacaaccaaaatatctatcaatggagggctggtaaataaaggtttgtacaacaatacaataaaatactatgcagaattttgaaagaataaaatagtgttcactaaaaagcatgagktatatgctggtatagaatggtatagaatgatctcaaatttttatcattaaatgaaaaggtgcagaagtgagtagtatgatcacttttgtgtacgtttaaaaaatacatagatggatg

SEQ ID NO: 825645 - DNA, 661 bp, Homo sapiens
aaactgttgcctattccaatgtcacraatattcatgcctatgttcttttctaaaagtcttacagttttagctcttatgtataggtctttgatcccttttgacttaactattttgtatgttgtgatttggaatccaacttcattctttcgcatgtggatatccaattgtccaaataccatttgttgaagacactcttcccattgcattgccttggcatcattgtcaaagatcaatagatggtaaatgtgatggtttatttctcaactctcaaattgtgtccattgttaggcaggtactacactgtcttacatattgcagctttatagtaagtgttgaaatcaggaggtgtgagtcctccaactttcttctttttccatattattttggctattcactatcctttgaatttctatatgaattttaggatcagctcaccaatttttacaaagaagtcagctgggattttgataggaattgtgttgagtctatgaatctagttgagaaatattgccatcttaacacgaacatccatgtttatggatgttcccatccatagacatgatatgcccatttatttaggtcatctttaatttctttcagcaatattttgaatttctgaggcacttgttctttactctgcctagtcattaagattacctgg

SEQ ID NO: 825646 - DNA, 532 bp, Homo sapiens
catcagaaagatttgaaaatctccaaatatttgaaaatgaaattgcacacttctgatgtgttgtgggtcaaaaaagaaataaaaagtgaaaccaggatgtattttgaactgattaaaaataacagcatcagatgcagtttaagaatacttagaaagaaacatctatattagaaagaaagacagttcttaaatcaatgggactacaacttcaatcttaagaaactggaaaaataagaacaaataaaacccaagtaagcagaaaaaaagaaataataaagttctgggcagaaatcaaagaaacagaaaagcaaatgggcaaaaggcaataaataaaatcgagctgctttttgagaaaaatgaataggtagattaaaactagccagataaatgaggacaaagagagaagacacaaattattaatatcagaaatgagagaggtaatatcactacagattatggagatattgagygatgataaagaaattattcaacaacacagataaaatggacaactccaatgaaaaacacacaa

SEQ ID NO: 825647 - DNA, 623 bp, Homo sapiens
tacatttgttgaggagagctttacttccaactatgtggtcaattttggaataagtgtggtgtggtgctgagaagaatgtatattctgttgatttggggtggggagttctgtggaagtctattaggtccacttggtgcagagctgacttcaattcctggatatcctttttaactttctgtctcgttgatctgtctaatgttgacagtggggtgttaaagtctcccattattattctgtgggagtctaagtctctttgtaggtcactcaggacttgctttatgaatctgggtgctcctgtgtggggtgcatatatatttaggatagttaactcttcttgttgaattgatccccttaccattatgtaacggccttctttgtctcttttgatctttgtttgtttaaagtctgttttatcagttactaagattgcaacctctgcctttttttgttttccatttgcttggtagatcttccttcatcacttttatttcttgcctatgtgtgtctctgcacgtgggatggttttcctgaatacagcacactgatggtcttgactctttatccaatttgccagtctgtgtcttttaattggarcatttagtccatttacatttaaagctaat

SEQ ID NO: 825648 - DNA, 609 bp, Homo sapiens
gtttgtttatttcttgtaaatttgtttaagttccttgtagattctggatattagacctttgtcagatggatagattgaaaaaattttctcccattctgtaggttgcctgttcactcagatgatagattcttttgctgtgcagaggctttttagtttaattagatcccatctgtcaattttggcttctgttgccattgcttttgatgttttattcatgaaatatagtcatttcccatacctatatcctgaatggtattgcctaggttttcttctagggtttttatggttttaggttttacatttcagtctttaatccatcttgagttagttttttttataaggtgtaagaaaggagtacagtttcagttttctgcatatggctaaccagttttcccagcaccatatattaaatagggaaacatttccccattgctagtttttgtcaggtttgtcgaagatcaggtggctgcagatgtgtggcgttatttctgaggactctgttctattccattgrcctatatatgtattttggtaacagtaccatgctgttttggttactgtaggcttgtagtatagcttcaagacaggtagtgtgatgcctccagcttt

SEQ ID NO: 825649 - DNA, 572 bp, Homo sapiens
cttatattatctaagatgtagaacatggcgagaatgtcttttttcactgcttattatttaacactgtgtggaagggcctcgctagtgcaataggcaaaaataattaaatttataaagtttaaaaaagaagaaagaaaatggtctttattttcagccaacatgattgtgttaacgttacagagaatctacaaaaatctcttggaactaataaatgaatttagcaaattcataggatacatagtccacatacaaaatcaactgcattcttacatatgagcaatgaaaaattgaaatctaaaattaaaaaaagtgtaacacctatttgcatataaatttaataaaatatgtgcaaggtctgtgtgcagaaaactataaaacactgacgaaataaattaaagatgatctaagcaaactcagagatataccacggtcattgattagaagattcagtattgttaagacaccgatttctccawtgaattttagatttaatgcaatcacaataaaaattccagcaagctttttgttttaatagatatcaacaagttgattctgaaattcacacaaaaagg

SEQ ID NO: 825650 - DNA, 503 bp, Homo sapiens
gcagggaaactgccctttataaaaccataagatcttgtgagacttattcactactatgagaacagcacrggaaaaacccacctgcatgattcaattacctctcactgggtccctcccacgacacatggggattatgggagctacaatggaagatgagatttaggtgagaacacagacaaaccatataacatacctactatgtacccacaaaaataaaaataagtaaaaattaaaattttaaaaattaaaaataaaataaatatctgaggtgatggacatactaattaccctgattttattactaaacattgtaaagaaatatggaaatatcacttcatatccaataaatataattattacatatcaactaaaaaataaatgaaaggtagttaacctctaattctattttatttaactatgtattcaattatttataaagatgaacttttcggtatatattttacaattacggttatatttcaaaactgtgttatttattttgt

SEQ ID NO: 825651 - DNA, 602 bp, Homo sapiens
agagggaagtaggaagcccaaaggagatggagcacagycagaatcacccacaacattgtaagtcacactaatttcaaaatcattaatgaaaggggtctgatgtctgataaagcaggatgttgagcagagggaaataatgaaaatatgcagcacctatgatgatattctccaaaaggcatcacttctcggggaaatgatgatgagtagcaaggaaaggtacttttgggtgacctcctgggaaaggaaagtacaggacctataagaggaaattaaagtcctgaggaaacaaagaaggatgacaaaatctaaaggtattctaattcatccttcctcacttaaatgttgtactatgctaaaaaaattataaagaagccacctatgaactaaaaatcttagaagacacccaaaaaccgtaactcttcctctatctatacagagccttacttcagcacttcaaaatgaacagaagacaaaaatcattgtaactccatagaaagctctggtaagaagaaaccaaaaaaggagaatcataacaattcaattcatgaccccctctgagagaaccaagagcaaagaacatttacaaaattgtgtaggttggg

SEQ ID NO: 825652 - DNA, 602 bp, Homo sapiens
agagggaagtaggaagcccaaaggagatggagcacagtcagaatcacccacaacattgtaagtcacactaatttcaaaatcattaatgaaaggggtctgatgtctgataaagcaggrtgttgagcagagggaaataatgaaaatatgcagcacctatgatgatattctccaaaaggcatcacttctcggggaaatgatgatgagtagcaaggaaaggtacttttgggtgacctcctgggaaaggaaagtacaggacctataagaggaaattaaagtcctgaggaaacaaagaaggatgacaaaatctaaaggtattctaattcatccttcctcacttaaatgttgtactatgctaaaaaaattataaagaagccacctatgaactaaaaatcttagaagacacccaaaaaccgtaactcttcctctatctatacagagccttacttcagcacttcaaaatgaacagaagacaaaaatcattgtaactccatagaaagctctggtaagaagaaaccaaaaaaggagaatcataacaattcaattcatgaccccctctgagagaaccaagagcaaagaacatttacaaaattgtgtaggttggg

SEQ ID NO: 825653 - DNA, 532 bp, Homo sapiens
gggataaagaaaaatctaccaagcaaatggaaaacagagaaaaatcagggtttctattctaatttcagataaaatagacattaaaacaacaatgatttaaaaagacaaagaagggcattagataatagtaaagagctcaattcaacaagaatattgaactcctaaatatatatgcacccacacaggagcacccagatttataaagaaagttaagagccttagactcccatacaataacagtgggagacttcaacactccactgacaatattagacaggtcatcgaggcataaaactaacaaagatatttaagacctgaatttaacacttgacaaaatggacctaataaatctacagaacacttcaccccagaacaacaaaatatacattcttctcattkgcacatggcacatactctaaaagaaaccacactatcagacataaaacaatcttcaggaaattttaaaaaccccaaatcttaccaactatgctctcagaccacagcacaacataaatagaaatccatattaaga

SEQ ID NO: 825654 - DNA, 501 bp, Homo sapiens
tcatcacactggttcctgtgtaccatgttcttgatactctccttgagagacagaactttmacagtttaagttttgtttgtttgttttaatacaaaatgatgaagtggggtcactggggccatggattttggcagtggactatctcagtgatttcctgtgtcatactacctagatgaaactggcaaaccctgcagatcacaaccacgacaaaccagagctacgtttgtatttggatccactcatttgagacaaaaattacagtcaaaactctaaattccaggaagggcgtttcactgcacgtgggaacagtttcaagaaatcaagatcttgagaacagaaatgaaacaaatgaaacagcatttttgtttgtttgtttgttttgttttgttttgttttgtttttcgaatttccagaactgtactgttgaaaagaaactgatgataacaatacccttaacaattaacaatttcacaagttatttttcacatactttgtctcatg

SEQ ID NO: 825655 - DNA, 616 bp, Homo sapiens
gattaccaatattagaaataaaaggsgatatattcttaaaaaatctgcagtcctacagatatccagaggacagtacagtaagaaaatgtaataaataacttcattacaacaaatatgacaacttagaagaaacagacaaagattttgaaagacacaaactactaaagcattccttacaaaagaaggaataggaaatatatgtatccctgcatatattacataaatcgaattaagattttcaaaattttatacacagaaaattctacgtccatatttcttcattggtaaattttaccaataatcaaataataattaataacaactctatacatactttctcaacacatactgtctcagaaaataggagaagaaaatatttccaaatttattttatcagatcaaaaatcacacaaagacattaccgataaaatgtcaataacttttataaacatagatccacaaataatatcactttgacatttttctgggtttgtttttgtaaatcaatcaaatgcagcaatatattaataatataatgtaatatgagcaaggatttattttaagaatgcactgttggtttaacatttgaaaatcaattagtaaaatatcccacgtt

SEQ ID NO: 825656 - DNA, 616 bp, Homo sapiens
gattaccaatattagaaataaaaggggatatattcttaaaaaatctgcagtcctacagatatccagaggacagtacagtaagaaaatgtaataaataacttyattacaacaaatatgacaacttagaagaaacagacaaagattttgaaagacacaaactactaaagcattccttacaaaagaaggaataggaaatatatgtatccctgcatatattacataaatcgaattaagattttcaaaattttatacacagaaaattctacgtccatatttcttcattggtaaattttaccaataatcaaataataattaataacaactctatacatactttctcaacacatactgtctcagaaaataggagaagaaaatatttccaaatttattttatcagatcaaaaatcacacaaagacattaccgataaaatgtcaataacttttataaacatagatccacaaataatatcactttgacatttttctgggtttgtttttgtaaatcaatcaaatgcagcaatatattaataatataatgtaatatgagcaaggatttattttaagaatgcactgttggtttaacatttgaaaatcaattagtaaaatatcccacgtt

SEQ ID NO: 825657 - DNA, 506 bp, Homo sapiens
aggacttgagaactatatgaagaggtgttttattttgaaactttctgtacaaatacctcttgtgtggggggcaaactgacttgctttatatagattgatgtgttagaagcattagcatgattagattwtatttcatttttcttgttagaggaaaatggcaaccagaaaaatagaaaactttggaaaaaaatctcaacattaaaaagatttctataggaagtcaaattgaccttaccacaggtactgaatgccatgtaaactgttacagcttgctcactttacaactatctataaaagctaaaataaaattaaacagggaattaggaaaatgccattagacataaaggaaggaacaactggaaggaattcataattgcccctaggcttatatctaatagacataaaatttaacttgaaagtgctctgatacacctgaggtatcttttgttgggtaattgaaatgaatctcagactggctggtgagacatttagcagctgtttctgtt

SEQ ID NO: 825658 - DNA, 558 bp, Homo sapiens
aattaaacagagacagaacattttaatctctaagtgacgttgggtaatttatttgatttttaaaactcaaaaacaataatctttaaaattttatatctcagtttcttcatctataaaatgaaatgagaatacccaccttttaaagttatgattttaaactagataatgcacacaaagcactcagctcagcatctggtgtgtacttctgtcagatgcgttttaaccagaacaactccatcttgaatagaggctgggtaaataaggctgagacctactgggctgcattcctaggaggttaaggcattcttagtcacaggatgatatgggaagtctgcacaagatataggtcataaagaccttgctgataaaacaagttgccgtaaggaagctggccaaaacccaccaaaaccaagatggcaacaaaaatgacttctgcgtgtcctcatcgctacactcccaccaatgccatgacagtttacaaatgccatggcaacrgtaggaagttaccctatatggtctaaaaaggggaggcgcgaataatctaccccttgtttagca

SEQ ID NO: 825659 - DNA, 631 bp, Homo sapiens
gcaattggtggtttattactacctaaatgcattttattctgcagataagcctttttacctagtttggttaataaatgtttattgatattggtttaggtatgtatttattatgcaggtttttattggggatttggagaatttcaaaacctatactctgccaccatcattttcccaaaatttctgttgaatataagcataaacacacaaagacacatatatataccttcatattaaatatatgtttctgcatccagctatgtttctcttaatgttatgtctttaggatattcattcatatatacatttatttattcctttcatctgcaatacagcattttattatattactctaacacatctttgtttctgttgtttatttctttcttttgtcccttggaagttgaaattgaactaacaccgtctttcttcttaccatgctctaatacattactttatcagaagctgtactttttaaaagaaaacagtactcagtgttttagaaaaaatatgtatwaaaatttgagacttcttcagggagccatatatagtctttaaatgtagatagaatatactgtttgcatccgtccaacttatattttgtaaagtattaatgtgataaaccttacttagg

SEQ ID NO: 825660 - DNA, 612 bp, Homo sapiens
ccgccaccccgtctgggaactgaggagtgtctctgcccgaccgccaccccttctgggaggtgaggagcgtctctgcccggccgccccatccragaagtgaggagcccctctgcccggcagccgccccatctgggaagtgaggagcccctctgcccggccgccaccccatctgggaggtgtacccaacagctcattgggaacgggccatgatgacgatgttggttttgtcgaatagaaaagggggaaatgtggggaaaagaaagagagatcagattgttactatgtctgtgtagaaagaagtagacatgggagactccattttgttctgtactaagaaaaattcttctgccttgggatgctgttaatctataaccttacccccaaccccatgctctctgaaacgtgctgtgtccactcagggttaaatggattaagggcggtgcaagatgtgctttgttaaacagatgcttgaaggcagcatactccttaagagtcatcaccactccctaatctcaagtacccagggacacaaacactgctgaaggcctcagggtcctctgcctaggaaaaccagagacccttgttcacgtgtgtttatctgctgaccttccc

SEQ ID NO: 825661 - DNA, 624 bp, Homo sapiens
ttatttgtcctttcaaagaaccaactttttgtttcattgatcttctgtattttttataaccattttatttagtctgactctcatcttagttatttctattcttctgctagctttgggtttaatttgtccttgtttttctagttcatttaagtggagcattaggctgttaatttgagatatttccattttttgatgtatgcatttagtgttataaaatttcctcttaatactgcttttgttatatcccagagattttggtatgttgcatttttatttgcatttgtttaaaaaattttttgatttctgccttacttttgttttcttttaaccaaaagttattaaggagcaagctgtttaatttccataaacttccatggttttgagaattcctcttagtattgattctaattttatttcactgttttccaagaagatgcttgatataatttccaggtttaaaaatttattgacacttgctttctgacaaagcagttsgtcaattgtagagaatattccatgtgcagatgagaaaatgtatattctgtggttctctcatggaatattttgtatgtatctattaagtctgtttggtaaagagtccagtttaagtccatgatttctttg

SEQ ID NO: 825662 - DNA, 522 bp, Homo sapiens
gggagaggaagaagcacttttcctttctcttccctccagaaatcagcaccaaaagaggaggtcaagrccattaacaggttcacactgtgtatggctacccagtgtaagtgccccgtaattccagggagtcctttgacaaagacctcattgtgcctggcccttgacattgggcagccctgacgtggagaggtgagttatatatggcagatgagcagcaactgttcctaaggtagggatggagttagtggcagagtaaagacatggccttgggttcagcaccaccaggctgcagtcatgatatcctaggacagccactcaaccttggtaagacttttagctgtgtgttcatgagaaagctactctctccagtcctggtttctgcaactattaaaaaaggacataggacttgatcattttttaggtcctataagctctaaaattatacacctttgtacttcgactttattcatctactcacttacttattgactcagaggcagatttactgcgaagctaatgaag

SEQ ID NO: 825663 - DNA, 522 bp, Homo sapiens
gggagaggaagaagcacttttcctttctcttccctccagaaatcagcaccaaaagaggaggtcaagaccattaacaggwtcacactgtgtatggctacccagtgtaagtgccccgtaattccagggagtcctttgacaaagacctcattgtgcctggcccttgacattgggcagccctgacgtggagaggtgagttatatatggcagatgagcagcaactgttcctaaggtagggatggagttagtggcagagtaaagacatggccttgggttcagcaccaccaggctgcagtcatgatatcctaggacagccactcaaccttggtaagacttttagctgtgtgttcatgagaaagctactctctccagtcctggtttctgcaactattaaaaaaggacataggacttgatcattttttaggtcctataagctctaaaattatacacctttgtacttcgactttattcatctactcacttacttattgactcagaggcagatttactgcgaagctaatgaag

SEQ ID NO: 825664 - DNA, 522 bp, Homo sapiens
gggagaggaagaagcacttttcctttctcttccctccagaaatcagcaccaaaagaggaggtcaagaccattaacaggttcacrctgtgtatggctacccagtgtaagtgccccgtaattccagggagtcctttgacaaagacctcattgtgcctggcccttgacattgggcagccctgacgtggagaggtgagttatatatggcagatgagcagcaactgttcctaaggtagggatggagttagtggcagagtaaagacatggccttgggttcagcaccaccaggctgcagtcatgatatcctaggacagccactcaaccttggtaagacttttagctgtgtgttcatgagaaagctactctctccagtcctggtttctgcaactattaaaaaaggacataggacttgatcattttttaggtcctataagctctaaaattatacacctttgtacttcgactttattcatctactcacttacttattgactcagaggcagatttactgcgaagctaatgaag

SEQ ID NO: 825665 - DNA, 579 bp, Homo sapiens
ttccaaataaagccagtatgaaaggaagaatctaggaaagctatgataagccaggtacttaatcagcaactttatatatactttaaaaaatctcatctaatcttcacaccctccctaagaagttaataataggatctcatattatgcatgagaaaacaggctcggggtggaagtcatggaagtcacctgccgcatgagaagactgaggctcagggggtgtaagtcacttgctgcaacatcacaaggtagatggaaaaaaaatccatgtgcatcttactccatcacactgagaccagagcaatctgtgttctcaggatatttaaatgagtaatattttattcctgtgagacctctaaaccaaaaggtttggggatacaataaatctgttatcttggaaacaaagctggcagctgctcttggctgggctctatgtggtagctgtgcttcatggcagtgyttttgctctcactatccaatatccatccaccctcttctcagcgggcccaaacacaactattaatagaagtatggatactcggtttggatatctctttcaaaacaaagaagagtctcttaaaa

SEQ ID NO: 825666 - DNA, 607 bp, Homo sapiens
cagaaggtaattctttgaaaagatcaataaaatgaacaaatatttaaatacagtaggaaaaaagaagattcactgaaatcacaggtgaatgtggcaacactactaccaattccacagaaataaaaagagttataaaagggaactgtgatcaattgtacgcaaacaaattggataatcaagatgaaatggacaaattcctagaaagacaaaacccaccaataccaaatcacaaggaaatggaaaacctgaatagacctgtaactagtaaggatattgaattggtaaccaaatatctcaagacaaataaaggccccaggccttatggcttcatgggtaaattctaccaaatatttatagaagaactaatatcaacaattcactaacttttcccaaattttaagaggaaagaacacttcctcattgtataaggccagcattactcagataccaaagccggaaaaagatgaaaaagacaccatgagaaaagaaaactacagacmaatatatcttatcaacaagatactagcaaactgaattcagcagcatattaaaagaattatacactatgaccaagtgggacttatttctgaaatacaaagatggttca

SEQ ID NO: 825667 - DNA, 607 bp, Homo sapiens
cagaaggtaattctttgaaaagatcaataaaatgaacaaatatttaaatacagtaggaaaaaagaagattcactgaaatcacaggtgaatgtggcaacactactaccaattccacagaaataaaaagagttataaaagggaactgtgatcaattgtacgcaaacaaattggataatcaagatgaaatggacaaattcctagaaagacaaaacccaccaataccaaatcacaaggaaatggaaaacctgaatagacctgtaactagtaaggatattgaattggtaaccaaatatctcaagacaaataaaggccccaggccttatggcttcatgggtaaattctaccaaatatttatagaagaactaatatcaacaattcactaacttttcccaaattttaagaggaaagaacacttcctcattgtataaggccagcattactcagataccaaagccggaaaaagatgaaaaagacaccatgagaaaagaaaactacagacaaatatatcttatcaacaagatactagcaaactgaattcagcagcatattaaaagaattatacactatgaccaagtgggacttawttctgaaatacaaagatggttca

SEQ ID NO: 825668 - DNA, 522 bp, Homo sapiens
caatagaaaagaaataacaaagatcaaagcagaactaaatgaaattgacataaatacaaaatataaataaaattaaaagttggttctttgaaaatataagtaaaattgatagaccattagccgtattaacaaagaagagagaagatctgattaagctcagttagaaacagaacaggagatattacaaccaataccacagaaatacaatcattcaaggctcctatgaactcccttacatgcacaaactataaaatctagaagagatggataaattcgtggatatatacaaccctcctagattaaatcagaaataaatagaaactaaacaggccaattgcaagtagcaagcttgaaatagtaattaaataaaaaatgccaacaacaataaaaaagagtccaggaccagrtggtttcagattcacagcttaattctatcaggcattccaagaagatttggtaccaatcttactgaatctattccaaaagacagaaaaagagagaatgtcccctaaattattctat

SEQ ID NO: 825669 - DNA, 605 bp, Homo sapiens
tcggttactgaggcttctgcattcttaacgtagttctccagccttggctttcagctccatcagctcctttaagcamttctctatattggttatcctagttatacattcttctaaatttttttcaaagttttcaacttctttgtctttggtttgaatttcctcctgtagctcagagtagtttgatcatctgaagccttattctctcaagcctttttctcaatacttactttatttctaacagttctaacagttttttggtgaagtctttgcacttttctacttataagatcaagtcatcaataaataaggataatcgtatttgttcctttctgatttgaatacattttgtttgtctgattgctcttaataatacttccagtactatgttgaatagaagtggcaagagtgggtgtccttgccctataccagaccttagagaatcagccttcagcttctctccattggacggtgatgctagttctgggtttttcataagcagccacaaccactattgtgttgagcaacttgcattctatactgttgagagtttttctcaagaaaggatgttgatctttgttgaatgctttttctgcattaagtgcgat

SEQ ID NO: 825670 - DNA, 579 bp, Homo sapiens
ggttaataaattctgtccctagagctgtgctgtatctttcagataccaggcaccatgatacctagatattcatggattcctatgagtgtgtcccatggtgggatggaagtcctccctkatatattccacattgcagttctcacttactctgggaacacagacctaagatcatagaacctcaaaagcatacatccctctattacttccaaattacttcatccctatgaaggacatttgttgctttatacaagctcccatttctccctcctcctttccaaggttacccatatgttagtttctccacacagactctgagtttcagaggtagctaaaccaaccccaatgccagagatggctggttgcaatccttggtttaagggttaaacatatgacctaagcatcttgaatcagtgtgggcttcaaattcttgccaaaaatactaggccagaatctcctgctggatgtggaggaaagcacaggcctgaatgcagccaggagtcagccatgcaacaactatggtgagaggtggcctcaggatgaagaggacactgcagatggcagagctgaaaggcagaaagg

SEQ ID NO: 825671 - DNA, 584 bp, Homo sapiens
agattaaataatatgaaagcaaactacacattttcaagttcaacacaaatgtgaggtcaaactaatatcttcactcaaatgctacaaattcatattcaaatttgaatataaaatataccccagtatatatcatataatgaatattcatctagacccataataagcagccaaccaatactttttgagcactgtgcacatgatcagatttgcattttcaaaatgtcactcttacccagtgtgaatatattagaaagagacatgactggagagagagggggagtgagagagagagagagaaagaaagcaagagacagcgcaagtgcatgcgacagagagccagtgagagaatgcaagcaagcaactactatcctgagagtcattacataactatggcttatcttgagatacacagattcaagaactacttatgaagcaagatccataaaacccagatatatgttacctgtgacggaaaaaggacatgaaagaggtctttattacttgtgttttcaaattttagaatttcaccaytttctttctttttcctatttcccattaagtatttcagtgatgctggcttttta

SEQ ID NO: 825672 - DNA, 617 bp, Homo sapiens
gttgttgtggttgctgttgacataacacttttttcctcctgcattgttacaygtttggagcagaatggtgggctttctaggttggtttggcttgcctctttgatcagaactcctgatgatacaggctgggcatggtggctcacgcctgtaataccagcacttagggaggctgaggcaggtggatcacttgagtccaagagttcaagaccagcttggccaacatggcgaaatcctgtctctactaaaaatacaaaaattaacggcatggtggtgcatgcctgtaattccagctactcaggaggttaaggcacaagaattgcttgaacctgggaggtggaggttgcagtgagctgagattgtgccactgcactccagcctgggcagcagagtaaaactgcctcaaaaaaaaaaaaaactcctgatgctcaatctttacagtacttaagctagctttgtacccaaatacctctcatcctctcattgaaatgaatattaaaaataaataaaatgcttaaataatgaccatactggtagcagtctctgccccacatccattttagctttgcttcaagcaaagcgaccctaaggtgataagacaaattaattgcaaaactaca

SEQ ID NO: 825673 - DNA, 565 bp, Homo sapiens
tctgctgtcaggatccagtttccagrggcactgatgtcactggcagtagcagccctaaccaggtttgggcttgtgcaggatcttggatatgggttccctgggtcatttctattttctgacccttattatgcaggctttgcttagattcactgagctagctgatatctttccttttctgcttaagttaactagtcagtttctatcgtttggaataagaaccctggctgatataacggtactcaaaatccatgtcaaagtgactatagtagagctatattgtgaggtccttactcagctaagttacctacttccctgccttgggctcccgtgcagttcttggctccattcctttttgaagtttgctaaggctgttcagagtaatacagtgtgcccacctcaaaattttcctttctaatcatgacctgcaatccaaaaggcattatataaaaacttataaatttgacattggaaaaaaactgaatggcaaaaaccaccaaaagcaaactcaaaagacacgtggaaacttgaggaaaaaatatttgcgcctcataggaccaaaaaagag

SEQ ID NO: 825674 - DNA, 517 bp, Homo sapiens
tgctctgtagcccaagctggacctttgcctctgggtctcaagccattctcgtgcctcagcttcccccgtcgctgggattacaggcgtgggccaccatgcccggctaatttttttttctttgagacggagkcttgctctgtcgcccaggctggagtgcagtggcacaatctgggctcaccgcaacctccgcctcccaggtcaagcagttctctgcctcagcctcctgagtagctgggattacaggggcccactgctacgcccagctaattttcgtatttttagtagagacgggggtttcaccatcttggccaggctggtcttaaactcctgatctcgtgatccacctgccttggcctcccaaagtgctgggattacaggcgtgagccaccgcgcctggccccggctaatttttttgtattttagtagagatggggtttcaccatgctgctcagggtggtctggaactcctgagctcaggtgatccacccgcctcagcctcccaaaagtgtagggatta

SEQ ID NO: 825675 - DNA, 579 bp, Homo sapiens
ctttaaaaaagagagaaatattaataggatttgaacaactgaagaagcagaacatgttttacatttctacattccatctgtcaatggctaaagaaaacgtgtaaatacacaggagaatactattcagctattaacaagaatgatgtcattcatttgcagcaacatggatgaaactggaggtcattatcctaagtgaaataaatcatgcacaaaaacacaaatattgtatgttctgaattatatgtgggagttagaaatgtgatcacatagaggtagagagtgcaaagacagataccagagactgggaagggtgagtggtgagggacgatgaagagaagtgggttaaagggtacacacatacagtaagatggaatacattcaatgttggatagcagaatagggtgattctacttaacaaaaatgtattgtactcgggtgatgaacactctgactcaatcactacacattatatacatgtaacgaaatttcagatataccccataaatttgtacaaataaaaawatctaattttaataaaaggtgttgtttctatcagaatagaaataatgaaatatgaag

SEQ ID NO: 825676 - DNA, 671 bp, Homo sapiens
aagtagacattccgcacaatttatgacagaattgttaaacattaggctatttgccagcggtttaatccagtgtaaaaatacattattggtgagattctttyattagcttcaaatgttgtcgtttcaataagaaaatatttcttcttattacaaaaaaccaaaactttcactggatttaaatttctgcttgtggaggttgaaaaaagggaaacggagctatagactgtttgccagcagtttaatccagtgaaaaatacattattggtgagattattagcttcaaatattgttggttcgataagaaaatgtttgttcttattacaaaacacaaaactttcactggatctaaattccgtagtggaggttgaaagaagggaaacgaagcaagtaacaaaaagaagttgtggagtttattttcttggaactttccacgattgtctatctaaaataatgatctacttaatttgttgtaaattacctggagaaaggtcctaattttttaaaaatgttaataacgctccctgctggtttgcttcagaagggagcaaactacatcttcactgaaatttgtttaaggaagacaacaaaggaaaatagaaggaatttgttaaaatcactttttaaaatacttggtgcattttgatatagtatagcggaggcatcagcagaag

SEQ ID NO: 825677 - DNA, 671 bp, Homo sapiens
aagtagacattccgcacaatttatgacagaattgttaaacattaggctatttgccagcggtttaatccagtgtaaaaatacattattggtgagattctttcattagcttcaaatgtygtcgtttcaataagaaaatatttcttcttattacaaaaaaccaaaactttcactggatttaaatttctgcttgtggaggttgaaaaaagggaaacggagctatagactgtttgccagcagtttaatccagtgaaaaatacattattggtgagattattagcttcaaatattgttggttcgataagaaaatgtttgttcttattacaaaacacaaaactttcactggatctaaattccgtagtggaggttgaaagaagggaaacgaagcaagtaacaaaaagaagttgtggagtttattttcttggaactttccacgattgtctatctaaaataatgatctacttaatttgttgtaaattacctggagaaaggtcctaattttttaaaaatgttaataacgctccctgctggtttgcttcagaagggagcaaactacatcttcactgaaatttgtttaaggaagacaacaaaggaaaatagaaggaatttgttaaaatcactttttaaaatacttggtgcattttgatatagtatagcggaggcatcagcagaag

SEQ ID NO: 825678 - DNA, 601 bp, Homo sapiens
tttctaatttcccttttgatttttttctttgatccactgcatatttatgcatgttattttttacatatttttgaatttttcagatctctttctgctattgatttctagtttcattctatcacagtcaaaaaaatacttattttaatctttttaaatttgttaaggcttttgcgactttatatgtgatttatcctggaggctatttcatttgcaattcagaagaatgtttcttctgttgctgttgagtgaaatgttcagtatatgtctattaggtccagttgggttatagtgctgttcaagttctctgtttccctattaatcttctgtctggatgttctctccattattgaaagtagaatattaaatttctctactattattgtgttgctgtctatttctctctcagttctgtcaatgtgcgctttattcatttaggtgttctgatgtttggtacatatatacttataattgttatgtttcctggtgaactgactcttttgtcattgtattatatccatgttttctctygtgacactttttgactcaaaatccattttgcctaaaaaattatggccaccattgctcgattttgcttaccatt

SEQ ID NO: 825679 - DNA, 581 bp, Homo sapiens
ccttttaactttggagaagttgaggaccttgtcgctcatttggcagaaggtgggacccggatctcagtcctggcaggaagggatggctcagaacctaggcggagtcaggtccgctgtggtcacgtctccggtgacccacttccagctctggtctttaccttgtaccgcccacctcagggcctggatgtaaaggcaccggttctcatttcctgctggttttgtttcattcattaatttagagacgaggtctccctgcagcctcgaacccctgggctcaagtgatcctccgccccagcctctccgtcccgagtagctgggacagcaggcacgtgccaccacacctggctgattttcagatttttttagatcaggtgtagctgtgttgtccaggctggtctcaaactccagccacaagcgatccttccacctcagcttcgaaaagtattgggattacagtagttagccatcgtgcctgrccttttaaattttggaactttaggtttacctgaaagttgcagagctagatccccctagtgttaacataaactcagtacatttgtcaaaactaggaaattaacatt

SEQ ID NO: 825680 - DNA, 603 bp, Homo sapiens
tttagagaactcttttgaggaagtagggaattggggggaagctgaaggaggacctgaagcccagggaggtttttctcaagacattttggaagcacgtttacatggtgataagaatgagccagtaataatgaaagaattgatgatgcaggagagagggaggggacaattgcaagaaaaagtctctgaaaaagctcaagaggggtgagattggggtataaaatagccttaaaagagagaaggaagattcaattcagtttaataggaggaagacaaaggatacagatatggataggtaggctggtaaatttgatggaaaatgacatggttctcatttaatcaattctcttttctcagtgaaataagagacacactagctaagagtggggagcacgcagatggtgcttaagttataagaggaaaggaaaagatgtaaaaccatcattgtatatccaactttacatttttaatgtagtaggttttctcttcaagtttcttttttttgagacagagtctcactctgttgcccaggctggagtgcagtgccacgatcttggctcactgcaacctcygtctcccaggttcaagtgattctcctggctcagc

SEQ ID NO: 825681 - DNA, 632 bp, Homo sapiens
gagtggctactgccaagacactggctgcagcagggaggtgggctcgggcctctaattccacagagcargcaggagctctgtccccccatcccctacagggcttccagctccacggagcaggcagtagctctgcccttccaggcacaggtgcagcagcccaaaccgcactgcagacctaggcctcccactccatggagcaggcaggagccccatcctcccagatggggcttcagctgtctaagtcatggctgctgctgcccaagtcgtggctgctgatcaagcctccctgtggtcttgcaggtctggaagcaggcaggaggcctgctctcctgggtgcagctgtagccgctcaaaccctggctgcagactcaggcattcttgcactcttgggggcccaggaaggcccccctgccctcacaggctcagaaatgcctgctcccactgcctggtctcttcctgctcccagcaccagctctgatcttagagcaaagtcagggccaagcctaggtgccatgaatggtagcaagaggcagatagattcctgggtggaagggggcaggttcctagggagggcctgaagggtggaggctgagctgccagtcccaccaaccggagtgggaaactggtgcctt

SEQ ID NO: 825682 - DNA, 450 bp, Homo sapiens
tgccttgtgggagctgctgaatgtaagtctccatcctcacctcttgccaccaagctctggctctctctggctctctctggcctccagcgcctctggccaggaagccgcctgaggccacctcctacagaaacgacttcccacctcccacacccaccccatctgctctttccatcttccacagagcagccagtgtggtcttcctaaaactccattcggtccccagcgctcccagaaccctctgtgatgcccactgtcctcaggacgaggcccactccttgactgcctccaggcccacacaggctgggcataggcatctcccacggggccatctgaaagcccacaatcctgggcctcagggcaggacagccgctcctgggctcctggacgtggaggggaaggcctgtagagatctcaggctccaaccasccctgaggtgttgaggaggggcac

SEQ ID NO: 825683 - DNA, 459 bp, Homo sapiens
taccagaatccctgcttctcctgcaggggcctgcatggctctgagtaatatgcagaagaattgcccaggcctctgagaaccggtgccccgggcagtccttcagagagtscagggaagtcaaagtatgtggcttaagcagaagactttataaagtggaaagggccaagggcaggtatgtcccagagccttccgcacccacaggcatcttcctggggcttagtggcagcctagaggacagttggcatccaaagaatccttactgtttccttctgaaagccaccgaaaagatctcccatgtcagaaccttctagagtcatcttgtcttctgcaggttccattttgataaacctgctcctgaagcagcctttgatcccagggtcatccctaagcctttgccacctcctgagtagtagttctgagtctcctgctggcacccccctgcagccaccagggtttggc

SEQ ID NO: 825684 - DNA, 390 bp, Homo sapiens
ctccctctgatgccgagccgaagctggactgtactgctgccatctcggctcactgcaacccccctgcctgattctcctgcctcagcctgccgagtgcctgcgattgcaggcgcgcgccgccacgcctgactggttttcgtatttttttggtggagccggggtttcgctgtgttggccgggctggtctccagctcctaaccgcgagtgatccgccagcctcggcctcccgaggtgccgggattgcagacggagtctcgttcactcagtgctcaatggtgcccaggctggrgtgcagtggcgagatctcggctcgctacaacctccacctcccagccgcctgccttggcctcccaaagtgccgagattgcagcctctgcccggccgccaccc

SEQ ID NO: 825685 - DNA, 535 bp, Homo sapiens
taaagccacacacctacaataatctgatctttgagaagactgactaaaacaagcaatggggaaagtactccctacttgataaatggtgccaggataactggctagccatakgtagaagaataaaactggacacctacctttcaccatacccaaaaagttactcaaaattgattaaagatttagatgtaagactcaaactataaaaatcctaggaaaaagcctaagaaatacccttcttgacattggtcttggaaaagaatttatggctaactcccaaaaagcaattgcaacaaaaacaaaaataggcaagtggaacttaattaaactgaagagcttctacacagcaaaagaaactatcaacagagtaaaaaaacaacccacagaatgtgagaaaatattcgcaaactatgccatctgacaaaggtctaatatgcagaacctataaggaacttaaacaaatcaacaggaaaaaacaaatagccccattaataaatgggcaaaagacatgaacagaaacttctcaaaagatatacac

SEQ ID NO: 825686 - DNA, 557 bp, Homo sapiens
agttcagagcccccgcatcaaggatgggcacacagatatttaaatagccracaaattgaggatctttgcttctctaaattccttaactcaaatgggtttaacaaaatgctatgttttatatagttaattgctacaaatctctttctaagacccggattaaattctgtaactttactttttggcttttggttttggctcttctgttgcttaaaaggccttcagggttagtgagtacctgctcacctccattcccacctgtcctagaatgtttaattgactctaagtattttggctctaaatcccttggccatagggtccccccccaagaaacaggatggatccagggtaggtagccacaccatcctgtcaatatgggacaaaatataagtttagacattgatgctgcctctctcagatcttggccaaaaagcagggaagataaactaaaaataaaaccttaaacctccctaccaactgaacagacccccttgtggccaataggaccctaacctcccaaacaaacccttaaaacacagttcctggccatgataggatgg

SEQ ID NO: 825687 - DNA, 612 bp, Homo sapiens
tatcagttatcagttgtaagtaccaagacatcagtgtgtaaatacaaccatgtatagatcataatatgcacacgtgggactggcagagaagaaaagcaccacaagcctgaggtggatgggatcgaaagggctcatcagaaccaacatggccaccgcagtgtgtgtcccactctgctgaacaaggtgagcagtttgggaaggagctaaaaaaaaatgtatgctcctctctgctaggctgaattttatgtgtgtatataatttttgaaagaataataatcctatgtctgtttaatgcttgacagtgtaaaagagctttcatctatgtgatcttatttaattcttacagctactcttaaatagggtttattactctccttttatagatgacgaaaactggggctttgtctcattccaaagagcagaggagggtgggggtttctgctctacagctgggggaatttggaggagcaccgcctaagccgccactggcctaaacacaacacgtggtaacttctactcttctacactctggccatgccaaggcttgcggttgaactctggtctcgttctctcagagccgcaaacctcgraccatttgaagctggcggtcct

SEQ ID NO: 825688 - DNA, 604 bp, Homo sapiens
cagcatttggggtgagggtcgggcgaattcgcagccctgggccccagcacccactctctggcccttgctttccttgtaggaccttcgcctctgcatttgtccagtaactctggctgtgccggatactgcttgggtaaaacgggcaccccaggaacatggcagacgaagatctcatcttccgcctggaaggcgttgatggcggccagtccccccgagctggccatgatggtgattctgatggggacagcgacgatgaggaaggttacttcatctgccccatcacggatgacccaagctcgaaccagaatgtcaattccaaggttaataagtactacagcaacctaacaaaaagtgagcggtatagctccagcgggtccccggcaaactccttccacttcaaggtgagtgagccacctattccaccttccccacctggcttagctgctgtaagggatggagggttggagtcgctggttggggacttcttcgtatttccaaaccctggacagtgctctaaactctgarctgaggatatacttgttaagcagggagggtattattgatttaaaataaatttcattaccttggaactgggtgtttttca

SEQ ID NO: 825689 - DNA, 614 bp, Homo sapiens
cttcatctcaaaaaaaaaaaaaaaaagaagattccaggcactgtggagaaaaggaaaaagcgaggtagggtgagggaattgggcttgtcaggtagtcacggggggrctcatttagaaagggacatttgagcatccacttgacagaggtgacaaagtctgaaaggctcttcctccaaataccttccagacagtgggaacagctcatccaaagccctgagatgggaacctgcagcagtgtccaggaagagcaaaggggcggtgcagctgtggtggagcgagtgagggggtttggtaggagatgaagtcacagaggagctggggccagatcaggaagggtttgacagccattgtcaggacttcagcttccagcctagcaggatgggagcccctggaaggttctgagccgtggaacaacatggttgtacttagaatttttaaaggtcctcctggctgggcatgggagcacatgcctataatctcagcattttgggaggctgagatgggaagatcccttgagcccaggatttcaaggcagcagtgagctatgattgcaccactgcactccagcctgggtgacacagggagactctatctctaaaaataaaaggatccct

SEQ ID NO: 825690 - DNA, 606 bp, Homo sapiens
cctcccagtatttatcttcagcccatggctttctcccagctaagctggactgtgacgcatcaatgcctccggaaagggctgtttcaatagaaagcaatagacctcttagagttcacagcctaccctgagtggatggaggaagtgacaggatgccccagcttaggataaagggagagaaaggaagatgggaggagaagagtggaggctggacaggaagacactgcactcggagaaactgtgtatccagaggtggaattggcatcctgaaaggcatggccccttctcagtctgctccattcattaccaacaccaggaagcccgtgggaacccacaggtgtaactccaaactccctgatctccacttgagtgggcccccttggaggtcctccctgatatctgaacagcacatgctgtaggcagcagccagaatgctgctgactgactaggaagagaaagggaaaagcctccctccatgttccatgtctactcattccacacccaactcacccaaggtggagccccaccatcactgtgatatcacacgcaygcgggactctgaaggggaagtgggacacaggaggctatggaaacaaaagttccccacac

SEQ ID NO: 825691 - DNA, 662 bp, Homo sapiens
aataaacaacaaaaaacccataattattttaaaaagtttatattccacttttacagacatttgtaaatattctatgttattttargtagtggtaatttttatggagaaaactacaatgcctcccagcttgtgtgggacagtttggatttgtgcctgttttcctgctgtgatgattaagattgcctctttttactctcaaaaatgtcctagttttggtgaccctctctgtaaaagaaatttcaaaacaatgataatatgaaaatatgtatgggaggggttcttttggactggatgatcaggaaatgtctcactaggtgatatctgagctgagaattaaagtaatcacacagctcttaagggtgaatttgaatttgagaggggaaaactgtgtagtcaaacaaagacgtagtttagattctgacaaacctgattttatacctcagccccagcacaccctaggtttggtactttgggcttggctccctgtgagatactcaatagtataccttaagtctaataatgtgattcagaaatgaacacattaaattacatgggcaaagaaacttatatttatttatgatatcctctcacaataccataaagaaataatctatattttaaagcaactactgtgcagtacacactgtgtttgggtacagctg

SEQ ID NO: 825692 - DNA, 553 bp, Homo sapiens
ccattgcgagtggaagtgtggaatacactttagattgcatcctcttgactaaatgcccttgcaccaggtacacgattaaggcagttaagtaacaattgcaaaagtaaatggtcagcaagtggcaaggaactaattatatgatactctgagggctgtgtggtttggggaagtgtgtatgctagagaaatttattacatttcattctgtatacttaactgtaaattgactgcttcttgtgtgaatgagcagaaagtattagtttatccacatttgattgagcaaatacttctgattttcattataaagctatctattctttgttgtaacatttttccaagcactactatcctaggatataaataggttaatggcaaataagagatttgtttgttgaaattaactcgagtactttctagtattaatagaaacttatttgagtttcctaaatgaggacttcttcaayctattcaggtgtgacatgtcatctaagttaataagtggagcaaaaaataaaaataacagcatcaagcacaaaaattcagtctctggagac

SEQ ID NO: 825693 - DNA, 582 bp, Homo sapiens
agatagggaatggacaaccttaagcacagcacttttattcatagatgtagcaattctatactgaacacctattatgttccagacatggttctatgtgctgggaaaacagtggtaactgagaaaggcaaagcctctgttctcatgcagcttacacctaaacaaagaaaacatcaggttatcaaataataaataagaacatatcccatatgagtaagtgctgttgaaccaggagagaacattaaaaccagctggcagaatagaaagtgagtaggttgagaggtcaggaaagaggtctctaagaaaagaagttaagtaggagtttaaattacaagaaggaactgaccgtgagatgtttagggtaaagggcaccttgggtggaggaaacagcttatgcaaatacgccaagctgcgaatgagcttggcatccttaaggaacagagagaagggtgtggytgctgaaacatgctgagccaggagagacttctgggagacattttcatggataaagtccggggctacagtatgtgaagccttatagctggggtaagggatttagatttcagtctctttgccagaaagcca

SEQ ID NO: 825694 - DNA, 626 bp, Homo sapiens
catattttatttacttgttggagagtaaaataagatagggaatggacaaccttaagcacagcacttttattcatagatgtagcaattctatactgaacacctattatgttccagacatggttctatgtgctgggaaaacagtggtaactgagaaaggcaaagcctctgttctcatgcagcttacacctaaacaaagaaaacatcaggttatcaaataataaataagaacatatcccatatgagtaagtgctgttgaaccaggagagaacattaaaaccagctggcagaatagaaagtgagtaggttgagaggtcaggaaagaggtctctaagaaaagaagttaagtaggagtttaaattacaagaaggaactgaccgtgagatgtttagggtaaagggcaccttgggtggaggaaacagcttatgcaaatacgccaagctgcgaatgagcttggcatccttaaggaacagagagaagggtgtggctgctgaaacatgctgagccaggagagacttctgggagacattttcatggataaagtccggggctacagtatgtgaagccttatagctggggtaagggattyagatttcagtctctttgccagaaagccactctagggaata

SEQ ID NO: 825695 - DNA, 506 bp, Homo sapiens
attttggatattaccccttatcagatgtatggtttgcaaatattttctcccaattgtgggttatcttttcactgtgtttttgttgtttttttttgtttgttttttgctgtgcagaagctttttagtttgctgcamtttcatttctctatttttgttttattgtctgtgcttttggggtcctatatgataaatcattgtccataccaatgtcctgaagcttttctcctatatttcagtagtatcacagttccaggttttacatttaagtatttaatctattttgagttaatatttttgtatatgatgtgagataaaggtccagtttcattcttctacatatggttatccagttttcccaacactttttattgaagacactgtcctctccccatggtgtgttctgggcacctttgtcaaaactacttctggggatatatataaaaaattaaattagtatgtcaaaaagatatctgcatttccatgttcatttcatcatgattcacaat

SEQ ID NO: 825696 - DNA, 602 bp, Homo sapiens
tcatttgcagtaatgattttgagccttcaataaaggagtatgtgtgctctccttaagaagaaaaaaatactrtatttagaaatagtttcaactcatctggttaatatagcagttgcaacacctgaagtgatgagctcaaattttctgcaaaacacagttatgtgaaacactatgttacctaaatatttattagccaatttgtatttatgcttattatgttgaattgtatatggttgctagttttacaaatattataaaatttggtaaacattttatgaatattaacaattatgtattcaaccaaaataatactgaaaggttttttttgttttttgtttttttttcaagttccaggatacatgtgcaggacgtggaattttgttacttaggtaaataaatgtatgccaggccataccaccctgaacatgccggatcttgtctgaaacttctctaaatgcaagacaatacaaactagcaatgccttcttcaaaagccaaacacacttaaagttttatgaaaataattttcattttgctaatgtttcatcaatgcttccttcttgcgtggatagcttcatgattccagaaactcaagaacattaa

SEQ ID NO: 825697 - DNA, 618 bp, Homo sapiens
  misc_feature 615, 616, 617, 618: n = A,T,C or G
ctgagtttagctaatgaaagtttgtctttcggagtctgttctactctaggtgaactaatataactgaaattacagatagacttaaattataggaaacaaaataccctaatctaattaggatgttgaaagtggtgtgaatttatcttactttgtgccaatccattgtgggagattaaaatatgtcacctcaaagtgtgtttctttggtatattttgagatggctatcgggaggggttgtagacacaggaatagctctgagaaactgtccttttgtgggagagatttgcatgcacaaaggaatgcattttcattagtaaatagccaatgtaaacaggttttctctaaggctcccttattcgcattatctggatttagaaaagatcgtgttaacacccttgttcagagattgccacaggatgtcacatattcttctgagagctattacctgagagtcttattatctgcttaataagaggacaatgtttatttgtagtaaatttcctctccttaccctccaatggtttgtcaccatcatcttccatgaactcctagcccctatacttttctgtatggtacagaaatttctgtcatctstcccatttacaagtctcatannnn

SEQ ID NO: 825698 - DNA, 524 bp, Homo sapiens
acactgggcagtggatttcactttcaaaacatatataactaaatccataaattatttaaaatactgatgagaaaacaaaacaacataatttcttaagtcatatttttatattcgttttcaagtagaaaattattgaaataataaagcctgtgctaaagggatatgtctagacaatgtgtattaatcctcatacttagttaaatgttagtaaatcttattattataattatcttttttttgaaagcaacagtgaaaactaaattggttatagatttttctattttgattttcacactaaacacatgtacaccttaaattacattgattaatagatactattacctatttacccattgtaacagcaacatatttcctggtagctagagaagagttggcagtagtacttattactttgtagtttctttgaagcaycaccttaagttctactctactattgtcatgcattttacttggtctttagtatcaatttctcctatttctgtgtaaaaaaataaatatggggg

SEQ ID NO: 825699 - DNA, 700 bp, Homo sapiens
cttgtatgtttttatatttgagattaccatgaggcttacaaataatatmtataacccattattttaaaccgatgaaaacttaacattgattgcataaacaaagaaactaacaagcaagcaaaaggaaaactaataaaaactctctccttcaactttgtcttaccaccttttaactctttgtcttttctatttatatcttactgtactaggtcttaaaaagttatagttattattgtgatcagttcttctttttgtctttctacttaagatatgagtagtttatatactacaattacagtgttttagtagtctgtgtttttctctatacttactattaccagtgagttttgtatcttcagatgatttcttactggtcattaatgtccttttctttcagattgaagtacttgctttagcatttcttgtaggacaggtctggtgttgataaaatctctcagcttttgtttgggaaaggctttatttctctttcttgtttgaaggatgtttttgctggctattcttttgtaggataaaagttttttcctccttcagtactttcaatatgtcctgccactctctcctggcctgtaagtgttctactgaaaagtctgctgccagatgtattggagctccattgcatgctatatatttcctttctgttgatgcttttaggatcctttctttgtccgtgacttttggg

SEQ ID NO: 825700 - DNA, 617 bp, Homo sapiens
tttgaaacctgtatatttgttgatatgaagaagcttacattttgacttaagtttaatttggctaaaataatttattttatgattattcacaaaaatactataataaatattttatttattcagaattagcaattttctgataggcaatttgagttcaacagtgaaaattaaagtcaacctcaattatatctgtcactactaaaggtcaactattaatccgagaagttgtttttattttaacaatgtaaatatgcatagacatggaaatctgaataatacccaaaaatgtttcaattatagaataagttattagccatgagaagtaatatttgttgcatgtaatagcatattttcattacaattataatctaagtaaagttgtattataataaaaagtatagcaatataaaataaatacaacgttaattattgattacatttaaatagttaatctcttcagttacatattttatgcttattattaactacaaactactttaaattgcatgtaattaatatgcattgaaggtctacttaattacttttcatttttcttatataccacaattgtatattttaggyccttatttatcttttgatgttttattttcaatttt

SEQ ID NO: 825701 - DNA, 600 bp, Homo sapiens
ccaaagaagcatgagttaatttaagccacttcagtttgggtccattcctgtctttctctggttccctgttgtgggagcattctgtccctacagagcacagasctgggggttcattctttcacccgcagtgcctgctgtgatgcagcaggtcccatgtggggtctcacagcgggagcaactgccactctctcctctctcttcatcctctcattcattcattcatcaaacattcacacatcaactccgttgtgccagctcctccaccctgaccccctgggacgtaaaggaaggcacgcatctgcagatggatggcgtgccttgctggggagcccctcgcccaggcactgtgcccctgtgtctcactcagatctcacaatgagcctgcaagcagacgttgtttttcccggttcaccaacaaggctcagaggggaattaaagaacccagggaggccaggtatggtggctcacacctgtaatcccagcattttagaaggccaaggctggtggatcactttgagctcaggagttcgagaccagcctgagcaacatgaagaaacaccatctctaaaaaaaatacaaaaattaaccaggagtggtggc

SEQ ID NO: 825702 - DNA, 503 bp, Homo sapiens
ggtctcatcttaaatattttctcatcagagagtcttttcctaacatcttaagttgtagttctcccatcaattttcattctattttcccttttcattttcatcacagcccttatctctayctaatattttcaagtttttgatttatttgtttatagcctatcaccacctgttagaatttaagctctacgagcaaaaggaggcttgtcctatatgtgttagacatttaataaatgtggaaaaaataaaaacaaagatgtgagaattcactggaaggatgctgaagtagttcacagaaggaaaataaataaattaacaaagtaaggagtacagtagctctggagtgctcaatgactggccccaggaacttgactccttcaaactttgctgactttgtcttatcactgcttatctctctgggcttcattctctgctaccacagattgactttctccaaaacggtagaaaacatagttgccaggactccaagattcacattctttcag

SEQ ID NO: 825703 - DNA, 506 bp, Homo sapiens
tgctgactttgtcttatcactgcttatctctctgggcttcattctctgctaccacagattgactttctccaaaacggtagaaaacatagttgccaggactccaagattcacattctttcagttccaagacctgaaaactagtggaatgtctcccctagcttcaatttttttaatcctgagaaagtttctgaatgttgcagtttggtctgagcactcacctttcggtccagttactcctgcaggagaaataaagtattgcatttggcccaagattggttatgcactcacctctgcatccctaacaaatttgtatctactggagccattccattcatgaacatgatacatctctatttttttgagctttctgtttattatgtctcaacaaagtttttagttttctatatattacrttttcttgttaacattactcttaggtctatttgtattattattgtatatttcatttttctttttctcagtaattattgcaaataataaggaac

SEQ ID NO: 825704 - DNA, 595 bp, Homo sapiens
cattatttgaatagatgtatttctataattagaagctttgctctctgagcttcttgtrtctactggttgtcttaatctggataacagctcagctcatttaacacatatttttaaaatcctaaaattcacccaaatattcaattttatcctttttattttactattatatcatctcttgacttatttttatctcactgtctttggctcctctctaggtagtgataatcatattagaagaattttaattccaaccaattccagattaatatattattctacaacaaataaattgttccattcagaaacagaactagctactcaatttttccctattattttttcaaaataatttgtatatatatgtaatagttgtacatattgatggggtacatatgacattttgatgcaagcatgtagtatgtaatgatcaaatctggataatggggatatccatcacttcaaacatttgtcatttctttgtgctgtgaacattccaaatctactctttcagttattataaaatatatttttaaataaaataggaatatattacagaataatttaatatctattatcacacagcaatattacctga

SEQ ID NO: 825705 - DNA, 283 bp, Homo sapiens
aaagttaggtctcaagcttcattgcttttataaattaagtttccactttcagaatttattatagttactttcttttaaaagtattttcagctgtgaggaaatgcaacattgcttttcatgggcagaattaagtgactgtacataggttaaggaatgtyttttaaataggtcgggtaaggaatcaagttccatgagtttcatttcagggttcatttgttttttgaggttttcacttggcttttaaagttggattcaaagacttttgggaaaaaaaaaaaaaaaa

SEQ ID NO: 825706 - DNA, 283 bp, Homo sapiens
aaagttaggtctcaagcttcattgcttttataaattaagtttccactttcagaatttattatagttactttcttttaaaagtattttcagctgtgaggaaatgcaacattgcttttcatgggcagaattaagtgactgtacataggttaaggaatgttttytaaataggtcgggtaaggaatcaagttccatgagtttcatttcagggttcatttgttttttgaggttttcacttggcttttaaagttggattcaaagacttttgggaaaaaaaaaaaaaaaa

SEQ ID NO: 825707 - DNA, 628 bp, Homo sapiens
ccatcttgacttaatttctgtatacggtgacagttaygggtccagtttcattcttctgcatacggttagccagttttgccagcaccatttgttgaatagggtgtcccttccccattgttaatttttgttaattttgttgaagatcagttggttgtgtgtatgctgctttatttctaggttctttatgctgttccattagtctatatgttaattttttgtaacagtacaatgctgttttggctactgtagccttgtagtataatttgaactcaggtaatgtaggagtgcctgtggttttgttcttttagcctgggattgctttggctatctgggctattttttagttacacattaattttacaatagtttttctaattctgtgaagcatgacattagttatttgatagaaattgtattgaatctatagatagtcttgggaagtataaacattttaacaatattgattcttcataaacatgagcatgaaatgtctttctaggttcagtgctttttaaatggtgaatactcttggtgggcttcaacatgtgatacaacatgggtccacccctgtagatctatctacattcttctttacaagtttccttgcctttgctattccagtttttct

SEQ ID NO: 825708 - DNA, 397 bp, Homo sapiens
cactgcaacctccgcctcccaggttaaagctattctcctgcctcagcctcccgagtaggtgggattacaggcatgcgtcactatgcccagctaatttttgtatttttagtagagatggggtttctccaggttggccaggctgttctcaaactcctgatctcagattatctggccaccttggcctcccaaagtgctgggattacaggcatgagccactgcgcctggccgacctaattaatttttataacgtgaacacccttgtaaccacctcccaggtcaagaaatagaactttgtcrcaccacagaagcctctccaatagaccttatttgttttagtctaaaagaccagagactgggtagtagagatgcctattgccactggacgagggtgatgtta

SEQ ID NO: 825709 - DNA, 524 bp, Homo sapiens
ctttgcctcttagactgttggctcccgtcctgcccctgttctttgaggctaatgcatcccctcagatcccttgcttgtcttctccccacccctctggccttgctattttccagcccatcactctycctggactagcctgatccaaagatcctttggccacagggcagctctgcctcccacctcccgctctgagcagtgctacctcccagcactcaggccacccacctgttggcccccattggcctccactcagaccaccctcctgttggctcctgagtgggccttgatctactccttaacccactgcctggccatctcctgccaaaccatcctcttttcttcacgggcacctgctctgcacagttgcccctgaacgatttgtttattgtaagggcccaataaatagtgtattgaataggtaaatcactaagtgatagaaagataatggacaactggcagaagccatgggcacatcagacacccaagatcacagccccgtaagtgtagaacctgtcagtcagtca

SEQ ID NO: 825710 - DNA, 614 bp, Homo sapiens
  misc_feature 1, 2, 3, 4, 5, 6, 7, 8, 9, 10, 11, 12, 13, 14, 15, 16, 17,18, 19, 20, 21, 22, 23, 24, 25, 26, 27: n = A,T,C or G
nnnnnnnnnnnnnnnnnnnnnnnnnnnaggcacccggcaccatatccagctaatttttatatttttagtagagatggggtttcgccatgttggccaggctggtcttgaactcctgacctcaagcgatccacccacttcgtcctcccaaagtgctgggattacaggcgtgacccaccacgcccggccctaagccttagtttttctgtctgtaaattgggaatgataaaagtatcacctcataaggttgataagccacagtaaatgagttaataaactggaacacatagtgggttgaagagtgttccccccaaaatccattccactcaaaacgtgtgaatgtgactttttttggcaataaggtcttaacaggtataatccacttaagatgaggtcatactggattagggcatgctaaagactggtgtctttataagaagtgggaaactttgacatagatacagaaacacacacacacagggagaataccatgtgatgagacaggaaggattggatggagcttccgcaatccatggaatgccagggactgctggcaaccacgagaagctaggaataggygcggaatacagtctgcctcagggcctccaagaacaaac

SEQ ID NO: 825711 - DNA, 592 bp, Homo sapiens
aagaaatatttgttgaataaatgaatgaatggtgcatatacgattttatactctgttcttttttttcttgctaaatgtgatgctgaaccacttccactctttcaaatatcttttccaagggctggattgtagtctatgctaaggtctggatgtgggtatcccctaaaattcttatgttgaactcctaacccccaaagtgatggaattaggcgatggggactttgggaggtgatcaggtcatgagggtgaagcccttatgattgagattagtgcccttataaatgggactcctgagagctctcttgcccccattctaccatgtaaggacacagcaagaagccagcattctgcaacccagaagaagaccctcaccagtacctggccgtgttgacatcctgacctcagacttccagcctccagaattacaagaaataaatttctgttgtttgtcagccatccaatatatggtattttgttatagytgtccaaacagactaagatggtctatgtagttgagacgctaaaatctatttaacccttttcctattgtggacatttaacttaattaagactttttcctctgaaagataac

SEQ ID NO: 825712 - DNA, 503 bp, Homo sapiens
cgaacccagtgccatggccctgtgccagycccaccctgcacagtcggtgctcagctgcatttctgtgtttgttaccatgtcacacaaaaatagcaggctggctgagctccagagtcggagggtgtgttagaggtaggctgatgtagaatactggcaatggagctcacacaagttcatatcaagcgcacctcaaagacataggccagcatcctcccggaagctgaagctgggacctgaccagagaccaccctctggagagatgaaccttgagtacaccaaggatgccatggacagagatgacaaacagggctgaagtcaagtcagaagtcttgaggacacttccagtggcagcattcacgtgagcccaggtgcttccctctcaggccactctgtgcttctgcctgatgaggtggggccgtaggctgtgtttcagtgaaaagctgtgcattcatgaaacagtaaagctggaaggagctcagaggtcatctcgtcctacccatttc

SEQ ID NO: 825713 - DNA, 550 bp, Homo sapiens
attatgggaacgacagacaccagggccttcttgagagtggagggtgggaagaggtgaaagtcaaaaaactacctatccagtagtacgctcactaccagggtttgtacaccaaaccccagaaacacacaattttctcctgtaatgaatctgtacatgcacctcctgaacctaaaataaaagatgaaaaaagagaacttgttgaaacaataatagaatttactagttcttgtaactaacaaaataagctttagattaggcttgatccagcagccccaaataatgctaccaagaacttcatttttctttctctttctactctgtctttttgggcatctgcatatattgttttgaggcccatccaaaagctaaaaagagtttattgccaccccaagacatatggctaatagtgggagaatggtaacctctcaaaggggaatcargatactattgagggaatcgcttctggaaaagcaaccaacaaatgtccatgcaccaccttcataaggtagttgcttcattcaatgcctttctccttaaaatctcctttatt

SEQ ID NO: 825714 - DNA, 538 bp, Homo sapiens
gcaaggatcactggttatacttctcagatacatacccctccacacttttctgattacatgaggtgttatagctaaaatgtgtttttgttgcttggttttgccaaatgattctctgtttgatgttttgcaaatttcttaaactgtttgggcctaaattccttccagcaaaaatgatattgataatagtgaacttttacaattatcaaaaactcaaagtaaatatttgtagtttctgacacatactgcaggttgaattaagtaagtaagtttttaagactacattcatcaatgcctaaatgaaagtaataatactttaattaataatcatgttataacttgggaaggaaaatctagaatcttggcttattgttgcttcatagcctcagacaaaatatattcctcattggtgccttggctgtctgctatggagaggtcctattcagtgagtgtacttttgcccctacttccagctgagtctccgctggcttcacatttcagtgcctttcatttagataactaygtgctgcctgaattcttt

SEQ ID NO: 825715 - DNA, 550 bp, Homo sapiens
gttaatgctgaaatgagttaagactttgggggactgttgggaaggaatgattggttttgaaatgtaagaccatgagatttgggaggggccggggtggaatgatatggtttggctgtgtcctgacccatatcccatcttaaattatcttgaattgtagctctcacaattcccacatgcaatgggagggacccagtgggagatagtggaatcatggcagtaatttcaaccttactgttctcagggtagtgaataaatctcatgagatctgatggttctgtaaggaatttccccttttacttagctctcattttctcttgtctgccaccatgtaagatgtgcctttcaccttctggcatgattgtgagcctccccgcctagtggaactgtgagtccaataaacctctttttctttataaattacccagtttcatgtrtgtctttatcagcaatgtaaatttgcaaaaggaacctcatagatttgatcttctcagtagaggtccatgggctttataattaaagacttagagaaatacttgcaaaacatatactt

SEQ ID NO: 825716 - DNA, 632 bp, Homo sapiens
tacaagtattataaatacttaaattgaaacaagcaatgaaatttctgtaaaaaacaaaacctgcttttaattagaacattttattagtgcaaaattaatcagaactaagaaaatttttgagattaaaacatatttaattctatttgacaaacataccattcaggaataattatttttctgcagatattcatttatttgttcatttgggaatgatttaggacatacttatataaaaaggtctacctgatctaatccacgttagtcagttatgtaattagtcttccattgcaaaatagattttgatgtacataccagggttttgtctataatttgtattacattctttagctccaattgaaaatagtaatgcatatcataaaaagatgtataggctataaatgcatttttattgttctcactccaaaaattttctactacaaatcatcaaaatattattgtgttctacttccttgtatatatatattattttttggtaaacattgacaattcaaaggaaaactccctaacatagtactgtgttatatattttagaaatgatcatttmaatttatgggttaaaaatggtgctctgtatgagtagacagacaatttagccagatatattatatgtc

SEQ ID NO: 825717 - DNA, 606 bp, Homo sapiens
tagatctcatgagaactctattatgaarcagcactaggggattggcactaaaccattagaaaccacccccaagattcaatcacctcccaccaggcctctcttccaacactcaggatcacaattcaacatgagatttgtgtggggacacagagacaaaccatatcaccctccttggtcaacccaaaaaatattttatttctgatttttatgagttggattgtatcccccaaattcacaggttgatgttctaatctctagtactttgcagagtgaatttatttgtaaataagttcattgcagatgtaatgatttgagatgagttcataccagagtaggttgggtgcctagtccagcatgactggtgttcttatagaaagagaaaatttgaacccaaatacccatggatggaggaggatgtgaagaggcaaggaagaagatggatatcagtaagcccaggagatagacctgacactgagctttctttgacccccttaaaaggaaccaacccttttgacaatgccttgatcttggacattgagcctccagaactgtgaaatgctaagtttctattgtttaagcaattcagtttgtcatacttctttacaa

SEQ ID NO: 825718 - DNA, 586 bp, Homo sapiens
tccaaaaattggaaaaaattaccaccaccaattaagattctagggtcacatcaagacacacatatgaaattacattctttagcacattagggtaaatagaggaggctgtctggaaatagccagaaaaggaatcccactgccttagacccagaccattccctcccagatgcaaagacaatctcttactgagtgtttaccaaatttttcttccgtcctcattcccttcctccatccttctctctctttttctatcttctctcttgtcttttccgttcctttcctcacagttgtttaagagtagtaatcttaaggaaaaagcaccctcattgcatgaaagccaagggcagtcaaggagagctagaagccagccaattataacattaatactagtagaagccagatatacctaactggtagtttgacatgcgaattacaactcttcttatatattccttaaaagtccaacagacttttatactaggcaacattagagaatggtatagtgttgcaattacttgcctacttttctaataaataacagtctctwcgttaaaccatctgtttctcaaatgtatcctaattaggc

SEQ ID NO: 825719 - DNA, 534 bp, Homo sapiens
acacttgtgagcattctctcaaggcatacaccagatgcaaatgtgcacagcctcccagatctgccctacccacgtcagaagcacactggcttaacggtgcttgaaagaggaatggtgcacccarctgatcaaagaacacttcaagagatcttcagtctattaactcaaatattcatttggcaaaagaaacacaaatatgaattacagaataagtcctgaagtttctttgtctgtatgtcaaggaaaataataaacaaaagtatctaaattgtgttttttggagtatggtggcttgaacaacgaaaggcacacagaaatggtgattagattttacaacctaaaaattggcacctgctcactcatatttaaaactcttttaacatctctgcttcttagtttatggcattctttaaaataattcacaaatcatttcattcatgattaatgttaaaagtatttctggaaaaatctacagttgatgaaaattctatatcctcacagaaacctgacaattttttaaagattatctttata

SEQ ID NO: 825720 - DNA, 634 bp, Homo sapiens
ttctgaataaattgtgtttggaatttaggtttgtttttttggtttcagaagtggttaataaaaaaaaaaaaagaacggcaagttaaataaacttttattttaaaatttaaaatggtgagggttatcacaatacagtcagaagtaactgaccaaaaatttaagtaacattgatagaggactgtttccttctatttctcagatctgccttcttttcttggtgggagttttaaagcaattgggggccatattgaaaaccccctcctccttgtggtggctccttagaaagtcctggcattcgctctgattagaccaacgtggatcatgtgtctatttatgagccagtcactgtgaaaattgttcagattgacttgggcttagatggcatacatttatctgaagttctgatggagcatggattaaagtcatggagagatgctttaccaagaaaattaaggggttgtaatcagaataaagggaaaatgattgttgttattaaatatgaaagaattctgctyacatcatcttaaaataggttaatatgaactctgtagaaggtactgtgcaaggtactgagcattcagagttgaattagacatggtcctacttttgagaggtttatagtctactgagaaga

SEQ ID NO: 825721 - DNA, 494 bp, Homo sapiens
attatcacccgacccagaaatcccattattgggtatatactcaaaggaatataaatcctttcactataaagacatgtgcatgcatgtgttcatcacagcattattcacagtagcaaagacatggaatcaacctaagtgcccatcaatggcagactggagaaaggaaatgtggtacatatataccatggaatactatgcagccataaaagagaatgaaattatgccttttacagcaacatggatggagctggaggccattatcctaagcaaactaacacaggaacagaaaaccaaatactgcatgttctgttttacaagtaggagctaacagttgcgtacacatggacacaaagaagggaacttttggcatcagggtctacttgaaggtcatgagaggagtgtgrggactgaaaaactacctatcagatactatgcttattaccaatgtgacaaaataatctgtacaccaaatcccctgacacacaatttaccta

SEQ ID NO: 825722 - DNA, 494 bp, Homo sapiens
attatcacccgacccagaaatcccattattgggtatatactcaaaggaatataaatcctttcactataaagacatgtgcatgcatgtgttcatcacagcattattcacagtagcaaagacatggaatcaacctaagtgcccatcaatggcagactggagaaaggaaatgtggtacatatataccatggaatactatgcagccataaaagagaatgaaattatgccttttacagcaacatggatggagctggaggccattatcctaagcaaactaacacaggaacagaaaaccaaatactgcatgttctgttttacaagtaggagctaacagttgcgtacacatggacacaaagaagggaacttttggcatcagggtctacttgaaggtcatgagaggagtgtgaggactgaaaaastacctatcagatactatgcttattaccaatgtgacaaaataatctgtacaccaaatcccctgacacacaatttaccta

SEQ ID NO: 825723 - DNA, 631 bp, Homo sapiens
tatgcatagtgttaggatttctgggtcagagggtatacaaattttataatttaacagataatgtcaaaaatgttcaaaaaaacatgctccaggtccttgttaccaatggttatttttttcagtagtggtattttttgagattttaatttgcttttccctgattactaatttgattaaacatcttttcatataattatttcacttttctttttaaaaaaattcatttatacattttggaaattcccccctccctccatcagtttgggttattttttttaactgcatgaaaatatccttttcatattttgggcaacagggtttttgttagctttttaaatgttgagtattttctcccatgttgcgactggtatttgtattttcttcacggtatcttttgataaatacagtttatatattttattatatatattatttattatgttaataaatacaatattaacttttttgtattttaactcattagtcttttaatctattctcatagctttttttattgtttcmtaacatgcattgaagtaggttcttgtaaatatttcactctattatattctacataataatattctgtccatagttttagcttttctttatttggaattgatattttaat

SEQ ID NO: 825724 - DNA, 513 bp, Homo sapiens
aaatagttcataggaatgtgtgatatcatgtasaattaagtcaggccttatatgctcatcttgtagtctattcaataaggctttcttccttgttttcatcttaataaagcaaactggatataatatggaaatcattttaattaaaagaaaggcatatggcattttgtaattagaaaccatgaggatcagttatttagatagtggtgttctgcagtgggagttaaaagacatggaaagacagaagacattcacattcattagttgtttttcagttatgtgatacaagtatattcaaagaatgtacgtattattgcacatattgtagctttgaaagcatatatattaaccattttattgctgttcttgtctgtttatgttcttgctaatttgacaatactgtaatttaaaccaaggacattatacagtgatgtaattgtatccacagagaaatggacatggtgaaatttatattcatgtgaaatgaacataaattaggcaaaattcagataattt

SEQ ID NO: 825725 - DNA, 596 bp, Homo sapiens
tactattaattttgatgtactatattcatatgaaggaaagtggtagggcctctatccacttcaatttcaatgaaatatttgtaattgttttctttgttgaagacagtactcagtcagaaaagttctttggtttttgtttctgtgccttgttctctatctaattgtgaatacttttttggattttgttacttggagttactgacaacagggttctgatattggttttgactttctatgttctttcataccttttctcatttctttacttacttgaatatttgactttccaaaacctttgggtgactttttttttttttttttttttttttactttctaaggggtttttcatctcttcttcaatttccggggctttagggtcttggctctgctttatgccaaaatatatgctgttaacccatcttacctgtgcctaagcttcctcccatctcacaaatacaaataccactgaaatgcaattccaaagcacaraagtagaatgtcttatctttatttgtttctaaaagatttattgaaaagccactctatttctttgctactcattttagcctctctttcaatttctgaatgtcaagct

SEQ ID NO: 825726 - DNA, 648 bp, Homo sapiens
gcatattgaaagtgcttatcttttcctgacatggtatggtggttctaatttgggtataaaccaactggattgtgtgctattggggtgtagaagcagggaagttgcattttgttgactctactggcaaccataaaaaagtattggaatttcagcttggtccttctcatattatatgagctgaaatgagtctaaaaatgaaaatatcccacggcaatctaatatacatgtctttctcattttatatagttcattaaagcctctatatttcttatataattatattattaaagtatatttctaaaattcagtaaaattaaaaaatacagccattaggtggtaaaatagtttataggcattatcctggattaaataaacaataatgtgttacaatattcgataaaatatatctaaatagttatgaaacatgtcctgaaagaggtaatagtaaggtgattaaccatcatttgagagacattggagacaacagagtcacaaaagagaggaagaaaaaagaggggaaagtgctaaaacacaaaaaygtaaattaacattgcaataccaaggacagtgacagcacatgagtttgggttggaatggcatattcatttattcatttactaaacaaaaatgcagaatgcctgttatatt

SEQ ID NO: 825727 - DNA, 600 bp, Homo sapiens
ataaacttttctttccagaacagcttgtaaaattaataagagtttgggatttgaaattttaaacaagtattgtataagtaaatttaataggatttaatattgctagagaactttataccagaaatatatttattaggaaaataaaataaaaataaatatgaacaagcaaaaataataatttgtatttattttgttttacatagttaaatgataacttttgttaatatgacgtgtttttcattttaaaatagcatatttaaatgtaaaatgtgcatgcctttgaacctactaattcaacttttaggaatgtttctcatagatatgtgtgaatgttttttatacacatgtgtgaaattatatgtataatatttgttgtagcatttttcaccaataaggaaataattggagcagtatgagagtttcacagaatggaattagtatgtggcttgaatttaggactaataaatgattcaataaggttgcaagatagaaaaataacataaaataatgagttgtatttctacacactaacaatgacctgaaaaggaaattaggataacaayttaatttacaatcaaatgagctaaaatacctcaaaat

SEQ ID NO: 825728 - DNA, 566 bp, Homo sapiens
actctagcctaggcaataagagcgaaactccatctcaaaaaaaaaaaaaaaaaaaagaaagtagaaaagaatttaaaatccacaagaactgtaaaaaatacaaatagccaatcaatmtggagaaagaacaaagctgaaattatcacacttcctgatttcacagtatattcaaaagctgaagtacggtggctcacacctgtaatcccagcactttgggaagccgaagcgggcagatcacgagatcaggagattgagaccttcttggctaacatggcaaaaccctgtctctactaaaaatacaaaaacaaaattagccaggcgtggtggcgggcgcctgtattcccagctactcgggaggctgatgcaggagaatggcgtgaacccaggaggcggagcttgcagtgagccaagatcgcgccactgcactccagcctgggcgacagagcgagactccgtctaaaaaaaagaaaaaaaaaaaactaaagtaatcaaaacagtaacgtattagcataaaatcagacccatagaccaatgtaataaaatagagagcactgaaataaatctat

SEQ ID NO: 825729 - DNA, 554 bp, Homo sapiens
tatggcaggagaagaataatgggccgggtatggaaactttcatgaacaccagtgttcaaataactgttggaggaagaagtagaaaaaggcaagcagcaaatggtcagagaaactggaagaggatcagcaagaaacggtgttttaaacagcccaagtaggaaagagtttcagaaggagagagaaagtgatcagcactccttgaagagatatgaggaggagagacaaaagaggtacacaattctaaagcatacttcttctgtcatccctatgaggacctgaatagaaaaatgatttaaatgcttaatttgactgtaaaacaaaacacaatcaaaatacaacaatgacaacaacaaaaactcttgggaaactcattattttttaactagtaagtgttccaattataataaacaagcatctaagttgtcagaagagcatcaagtgtaccatttgccaacattgtatgagaataaaaggatatgrcccaggagacctgatcaagtgtttgcagagaatgaggaagttaatgaagcaaaggcagtgggagtcttttacct

SEQ ID NO: 825730 - DNA, 552 bp, Homo sapiens
catgcattgcagggcagtaggaagccaatgcaggtttgttgattaattttggatgcaaaggaaggaagtgattggtccaagtgtatatttcgagatattggagcatcgggaccagaatccagttctgtaaactttgaagccaacactttctccacattgctccctttttacctcttggttctgattccatttccttccgtacttttgtccctgaaaatatacatgcacttggaagcttcttgactttctctcagcccagatgcaagagaaaaccttcacccatggacagatggacacacacacacatacacacacacacacacacagagctctgattcacctaaggacccagctttgcttctttacccaataacagcacccacaaatctttatctaccctagcccacactttgcctccactacggaagctcttttcttaacccagtggcatccccctacccctgcatgaagtcacagatctagtgcccttttgcagtctcttcytccttttatcagatatttctaatagcaaaaatctggaagacctaaatg

SEQ ID NO: 825731 - DNA, 598 bp, Homo sapiens
gtttgttgattaattttggatgcaaaggaaggaagtgattggtccaagtgtatatttcgagatattggagcatcgggaccagaatccagttctgtaaactttgaagccaacactttctccacattgccccctttttacctcttggttctgattccatttccttccgtacttttgtccctgaaaatatacatgcacttggaagcttcttgactttctctcagcccagatgcaagagaaaaccttcacccatggacagatggacacacacacacatacacacacacacacacacagagctctgattcacctaaggacccagctttgcttctttacccaataacagcacccacaaatctttatctaccctagcccacactttgcctccactacggaagctcttttcttaacccagtggcatccccctacccctgcatgaagtcacagatctagtgcccttttgcagtctcttcytccttttatcagatatttctaatagcaaaaatctggaagacctaaatgccaagcaaaagagttgttaaataaatcacaggacagccaaatagtaggatatagtgtagccatttaaaatgacaacatg

SEQ ID NO: 825732 - DNA, 627 bp, Homo sapiens
cattgcagggcagtaggaagccaatgcaggtttgttgattaattttggatgcaaaggaaggaagtgattggtccaagtgtatatttcgagatattggagcatcgggaccagaatccagttctgtaaactttgaagccaacactttctccacattgccccctttttacctcttggttctgattccatttccttccgtacttttgtccctgaaaatatacatgcacttggaagcttcttgactttctctcagcccagatgcaagagaaaaccttcacccatggacagatggacacacacacacatacacacacacacacacacagagctctgattcacctaaggacccagctttgcttctttacccaataacagcacccacaaatctttatctaccctagcccacactttgcctccactacggaagctcttttcttaacccagtggcatccccctacccctgcatgaagtcacagatctagtgcccttttgcagtctcttcctcctttyatcagatatttctaatagcaaaaatctggaagacctaaatgccaagcaaaagagttgttaaataaatcacaggacagccaaatagtaggatatagtgtagccatttaaaatgacaacatg

SEQ ID NO: 825733 - DNA, 591 bp, Homo sapiens
tggatgatagctaatactcattgagcatgcactatgtacttactgagcaatcacatatactrgggcatgtgattttcacgtacagctcattggattgtcatggcaaatgaggtagatattacagtatcattttccccacttaaagataaaaagctggttcaggccaggcgcgttggctcatgcctgtaatcccagcactttgggaggccaaagcaggtggatcacctgaggtcaggagttcaagactagcttggccaacatggtaaaaccctgtctctactaaaaatacaaaattagcagggtggggtggcacatgcctgtaatcccagctacttgggagactgaggcaggagaactgcttgaagctgggtggcagaggttgcagtgagccaagatcgtgccaccgcactccagcctgggtgacagagagaaactccgtctttaaaaaaaaaaaagcaaagctagaacagagaaagatgaaataacttgcccaaggacatagagctaataagtattaaagttgggatctgaactgcacttatatggctccaaagtccctgctcttagtcaatgtgttatatggtctccccc

SEQ ID NO: 825734 - DNA, 565 bp, Homo sapiens
tctgttggtgttctcctgtttactgtattgaactctaagttgtttgaaggcctatctaaaccagtcagtgcmtagtcactgaaagccagagctatgatgggtacagcaggaattactgacaaatattaaagtgccatgtctgctcttaagaagctgatagttttctgaattaaaaactaattatacacccgggcatggtggctcatgcctgtagtcccagcactttgggaggctgaggtgggcgggtcacttgaggtcaggagttcaaaaccagcctggccaacatggcgaaactttgtgtctactaaaattacaaaaattagccaggtgtggtggtgtgccgctgtaatcccagctacttgggaggctgaggcatgagaattgctcaacccgggaagtggaggttgcagtgagctgagatcacgccactgcactccagcctgggcaacagcatgagaccctgcctcaaaataaacaaacaaaaaaactaactatacttgttttatttgagatgccagaacttttaagatatactgttaggttataacagcttccatgtaagaaa

SEQ ID NO: 825735 - DNA, 565 bp, Homo sapiens
tctgttggtgttctcctgtttactgtattgaactctaagttgtttgaaggcctatctaaaccagtcagtgcatagtcactgaaagccagagctatgatgggtacagcaggaattactgacaaatattaaagtgccatgtctgctcttaagaagctgatagttttctgaattaaaaactaattatacacccgggcatggtggctcatgcctgtagtcccagcactttgggaggctgaggtgggcgggtcacttgaggtcaggagttcaaaaccagcctggccaacatggcgaaactttgtgtctactaaaattacaaaaattagccaggtgtggtggtgtgccgctgtaatcccagctacttgggaggctgaggcatgagaattgctcaacccgggaagtggaggttgcagtgagctgagatcacgccactgcactccagcctgggcaacagcatgagaccctgcctcaaaayaaacaaacaaaaaaactaactatacttgttttatttgagatgccagaacttttaagatatactgttaggttataacagcttccatgtaagaaa

SEQ ID NO: 825736 - DNA, 462 bp, Homo sapiens
tcattcattgtaaggtaattctggcaattaatattaagatgtgaagaaagaractccagttccttactaaattatttaataggcctctggtcaactcacatgaagtgtgaggatgagagcaatcagcagggtgaggcacttgttcagtgttgtttcaccagtactcattacagcatatactacgcacggcaggctactgtcttaaaagaaaattgcctaaattccttaatttcctcaccagtatctaaataatgaagcctgaaaaatatacgattatagagttttctctaaagaaaacccccaagataaagatgcgcctttggcatgtccacttcaaactttgcattttctaaggagaaggttaaacggctactcatatgtatccctattttcccattgcaggactttggctaagtgatagtaagttgtattggataagtgcagtaactcgaagaacaaaga

SEQ ID NO: 825737 - DNA, 607 bp, Homo sapiens
tccctttagatgttgactctgcagtgttacgtctcaaactcttgaggyttgcagagctagcacctctaccctagtaagatgtagcatttccacacttctggaagacactacagaggcctctctcctagaatgctgcaggtggcccctcagaagctgcctctaccttctttgttagctgtcagaccaataacaataattaaataccaggagaaggctgggcgcagtggctcaggcctgtaatcccagcactttgggaggccgaggagggcgggtcacgaggtcaggagattgagaccatcctgactaacacggtgaaaccccacctctactaatagaaaaaattaaccgtgtgtggtggcaggcgcctgtagtcctagctactcaggaggctgaggcaggagaacggcgtgaacccgggaggcggagcttgcaatgcgccgagatcgtgccactgcactccagcctgagcaacagagcaagactccacctaaacaaaacaaaacaaaacaaaacaaaacaaaacaaaaaaacagcagaaagtggctggaggtattctgggactgataagaagggaaatagcctatataccaacaataattgtaagaat

SEQ ID NO: 825738 - DNA, 607 bp, Homo sapiens
tccctttagatgttgactctgcagtgttacgtctcaaactcttgaggtttgcagagctagcacctctaccctagtaagaygtagcatttccacacttctggaagacactacagaggcctctctcctagaatgctgcaggtggcccctcagaagctgcctctaccttctttgttagctgtcagaccaataacaataattaaataccaggagaaggctgggcgcagtggctcaggcctgtaatcccagcactttgggaggccgaggagggcgggtcacgaggtcaggagattgagaccatcctgactaacacggtgaaaccccacctctactaatagaaaaaattaaccgtgtgtggtggcaggcgcctgtagtcctagctactcaggaggctgaggcaggagaacggcgtgaacccgggaggcggagcttgcaatgcgccgagatcgtgccactgcactccagcctgagcaacagagcaagactccacctaaacaaaacaaaacaaaacaaaacaaaacaaaacaaaaaaacagcagaaagtggctggaggtattctgggactgataagaagggaaatagcctatataccaacaataattgtaagaat

SEQ ID NO: 825739 - DNA, 531 bp, Homo sapiens
ggataaagaaaaatctaccaagcaaatggaaaacagagaaaaatcagggtttctattctaatttcagataaaatagacattaaaacaacaatgatttaaaaagacaaagaagggcattagataatagtaaagagctcaattcaacaagaatattgaactcctaaatatatatgcacccacacaggagcacccagatttataaagaaagttaagagccttagactcccatacaataacagtgggagacttcaacactccactgacaatattagacaggtcatcgaggcataaaactaacaaagatatttaagacctgaatttaacacttgacaaaatggacctaataaatctacagaacacttcaccccagaacaacaaaatatacattcttctcattkgcacatggcacatactctaaaagaaaccacactatcagacataaaacaatcttcaggaaattttaaaaaccccaaatcttaccaactatgctctcagaccacagcacaacataaatagaaatccatattaaga

SEQ ID NO: 825740 - DNA, 642 bp, Homo sapiens
tcatctgtgcctcagtttgagcatctttaaaatgtgaagctaatagaacctacctgttttaggcataatgatctagaagaagagctaagaaaragcttcttatggaggtaaattgttgaagggctgtgctgaggaaaacagggagaagtgaggaacaggatggacccgggggaaagcagagcatgcacatgacctcccctcgtgtctcatcatcaattgcttcagactgacccaaaaattcatggagtaaaacaacaatccttacattgtctcatgattcttgtggttcaggagttcgggcagggtacagtgaagtttgtctctgctccaccgtgtgagataaagtggctcaaacagctggaggtggctgagagagcatgactggaggcttaagttccatgtggcatttactggggatgcaatggcctagatggtttcttcactcacgtgtctgacacttgggccgggagggctggaacacctgagggccagctcttctctgtctgtctacacatctctctctgtgactggcttgagctcttcatagcatggcccccaaagaatgggcaggctttgttacatcctgccttgccttcctcagaacaaatattgcaagagacatttgcaggtgcttcaaagcct

SEQ ID NO: 825741 - DNA, 622 bp, Homo sapiens
aaacaaagggtctcaggaggaagttgaaacagggctggactatgaaacactgtgcagatcatgttaaaagttcaaatattaagcattgcttgtttggaggataatgacaaaatcctacayctgaccctttttgcacaactctctcaaaactatacatataatcagcagcaaatgcaaagaaaatcacacataacccatgccttccacatcattagaatatgagaaatttcacagatttcaaggtactgttaagcagggaaatgaactccaaatcctgacagagctaatgctggtgcatgaaccatggctgcaagctcgtgtgtgtgtggagagtgggcaaaggaggatttaagagactaagaaaagagaagagtagagtagaaaccttagatgtagcactaaaaagaaaccctctgaaaaaaagtccaacactaagtactaaaatactgaacatagatctcagactgagttgttcacagcacaaaccatagaataagacttcaaagaaaatatgaaaaaaaaaaaagccgaagacttggagctgcaattctctgggggagaatgagataaatatagcagaaatgatgtttcttgaagatgtgaaggtgaagggaaaaaaaga

SEQ ID NO: 825742 - DNA, 587 bp, Homo sapiens
tccccttttaaagtcctggataaacacctgctggttttgcagctcaggggacatcacaracctaccgatatgtgatgtcacccctggaggcccagctggaaaattcctctctttgtactctttctctttatttctcagactggctgacacttagggaaagtagaaaggacctacattgaaatattgggggcttgttcccctgatatttcttttctttcgcgttttcctttctttccttctttcttttcttttcttttttttatttatttttttttttttgtgtgtgtgtgtgagagagagagagagagagagacagggtcttgctctgtccaccaggctggagtgcagtgacaccatctcaccttacttcagcctctgccccctgggctcaagtgattctcatgcctcagccttggagtagctgggatgacaggagtgcaccaccatgcccaggtaatttttgtattttttgtggagatggggtttcaccatattgtccaggctggcctcaaatttctgggctcaagcaatacacccacctcagcctcccaaagtgttgggattacagtcatgaaccactgcttcca

SEQ ID NO: 825743 - DNA, 509 bp, Homo sapiens
catccacgtttgttgtgcactttgcatacttgtgagaaccgagccacatttttggggctctgaacattctgacattcaaagcaaagaaaaaaattatctaagagaaggaagatgatcgctttaaagtgacagagtattcctaagattaaaacaaaataaaaccctcaaagatagaaaacatcaacaaaaagcagttgatgagaagtacagttttctgagacctaaaagaggacaccgagtgttctgggaagataacatcttcaacaccaagcttcaacatcaaaacatatgcttaatacaggggtgattattgttctattgtcccactgttccattgtttcttcaacggttctgtctgtcccctcaaagcaaactttggcgtaatgccaaagcraaatttaataaaagcattttaggatgcaaatcaacgcaactcaagcatacagttttctaattgtttagtttgaatgaaggacagatttagactatccagagaaatggatagaata

SEQ ID NO: 825744 - DNA, 457 bp, Homo sapiens
ttttggagctttaagatttgactgccctgctgcattttggacttgcatagggactgtagcccctttgytttggccaatttctcccatttggaatggttatattcacccaatgcctgtacccccattgtatctaggaagtaactagcttgcttttgattttacaggctcataggtggaagggacttgccttgtctcagatgagactttggactgtggacttttgagttaatgctaaaatgagttaagactctggggacagttgggaaggcatgattggttttgaaatgtgaagacatgagatttgggaggggccaggggcagaatgatatagtttggctctgtgtctcaactcaaatctcatcttttagctcccataattcccacatgttatgggaggaacccagttggagataattgaaacatgggggcaggtctttcccatgctgttcttgtgaca

SEQ ID NO: 825745 - DNA, 649 bp, Homo sapiens
tcctagtctaactatattggattccaacagcatagaaatacagtcaaattatcaaagaaagactggccattcctataaaagagttgctggaagtgtgaaatgaggaaatgggaaaataatgagttatttgcaaaataagtagtagagtggaaagactgaagacctggcagatacgctgggtattatacaaaggatattgaaagatgaaaatgtataccttggtttgaatactaattgctaaaaacattatgagacaattagggaaatttgaagcttggtagatatgttttaaatgacattaagaagttatttgtattttctttagatgtgataatgatgtttgacagtggaatagtataatgtctgggatttgctttaaaatagttcagaggagagagcttggtgatagctgcatatacatatgggaacataatattctttctctgtttttatgtgtttgataattctaataaaaatgttaagaaaagataaaaatgacaaagccaaagatagtaacttatttagaattgaggttgtgtgatggagtttttactttaatgggaagaacttaaataaactgaaggtctgtcctaaattctttgggtgaagcttcagtctayacctgactactttttagttgtagcattgt

SEQ ID NO: 825746 - DNA, 469 bp, Homo sapiens
catgtgtttcttccttctggatatgggacaggaccctctctggaaagggggtcagataattttttattgccagtttttgtacaaaaaggcagaagaaaagctggagtcaaatttttaggtttatggctggctttgaggaaaagaggttctgatttttatcgtggcttgtggaagagggattcaagtttgtatggccagccttggaggagaatggggctgaacgacaggaggcaggagggtaggagaaggtcagagaaaacatttttttttttttttcctgaggctgtttctgaggccattgttgaatgttgttttctgttttccaaacttctctggcctaaaacttccccaataaatttcacaggccagtaattgggttggtggattgttgtataagccatttaattgaagcagtctmttagtcttgagaacagggcagtcaagttaaacagttaatagttgcatctta

SEQ ID NO: 825747 - DNA, 586 bp, Homo sapiens
acacaaactctcctagatactaaagaaataattcccaamtcattgtatgaaactggcataaccttgacacaaaaatctgataaggacattacaagaaaggtattcaaagaccactgtcatatcgtgaatatagatgagaaaaaagatccttaaaaaaaaattagtgaatcaaagccagttatataaaataaattaaaatctttttttaaattattcagcttttattttaatatagagggcacatgtgtaggattgttacatggctatactggacccagtagtaagcacagtgcccaatagatagatttttaacccaagctccccttcctccctctccctttagtagttcacagtgtctattgttgtcatatttgtgtccatgtgtgttcaatatttaattcccatttactagtgataacatgtgatatttggttttctattcctatattaatttgcttaggattatgtcctccagctccatactttgttgctgcaaagaacattatttcattttctttaatggctgtgtagtatttcatggtgtaaatataccacatttttcttatccagtctaccattgatgggc

SEQ ID NO: 825748 - DNA, 586 bp, Homo sapiens
acacaaactctcctagatactaaagaaataattcccaactcattgtatgaaactggcataaccttgacmcaaaaatctgataaggacattacaagaaaggtattcaaagaccactgtcatatcgtgaatatagatgagaaaaaagatccttaaaaaaaaattagtgaatcaaagccagttatataaaataaattaaaatctttttttaaattattcagcttttattttaatatagagggcacatgtgtaggattgttacatggctatactggacccagtagtaagcacagtgcccaatagatagatttttaacccaagctccccttcctccctctccctttagtagttcacagtgtctattgttgtcatatttgtgtccatgtgtgttcaatatttaattcccatttactagtgataacatgtgatatttggttttctattcctatattaatttgcttaggattatgtcctccagctccatactttgttgctgcaaagaacattatttcattttctttaatggctgtgtagtatttcatggtgtaaatataccacatttttcttatccagtctaccattgatgggc

SEQ ID NO: 825749 - DNA, 622 bp, Homo sapiens
tcctccagctccatactttgttgctgcaaagaacattatttcattttctttaatggctgtgtagtatttcatggtgtaaatataccacatttttcttatccagtctaccattgatgggcacctgagttgattctgtgtttttgctattgtgagtagcactgtgatgaacatatgtgtgcatgtgtctttttggtataataatttatattcctttggctatatacccagtaataggattgctggatcaaatggtagctctgttttaagttctttgggaaatttccaaaccactttccacagaggctgaactaattaatatttcccgcaatggtgtataagcattcctctttctctgcagcctcaccagcatctgtttttttcttgactctttaataatagcctttttgactgatgtaagatggcatctcattgcggtttttatttcaattgttctgatggttagtgatgatgaccacttttttatgtgtttgttggctacctgtatgtcttcttttgagaaatgtctgctcatgtactttgyccactttttaatgaagttatttgtattttgcttgtttgtttgtattttgtttgatttgttaaagttctttatagattctga

SEQ ID NO: 825750 - DNA, 600 bp, Homo sapiens
accacccaacttctttcttttgtaaatttcccagtctcaratatgtctttatcagcagcaggaaaacagactaacacaggtatcaaaattgaagagttcagcgcatcgctagagcaaaccaaggtttccaagagagaagccaaatctgtctcggcccgtggaggccttcctgatcacacattgaataggatgtgtgaggaaaaagaaaaaagagaggattcactaacttagttcaatcccagctctggttttgatgtactttaaagtagcaggagacatcatttatccactgaatttttcagtaaaaatgctaccgagtcaaatagtttatcaacatttaattcattagattacaataaattgcatatttttcatagagtgagtcaagaacaatttcaaatcatagttctcataaagatgtaaaatagcacaacttgccctaaggaaacaggaacattttgaaatttataacacctaacaatttttgaccaaacagggaagaaaatatgaataacgattatggccatcaagatagaggttaagaaaaggaaatttaagtcaatcccctaactttgtataacatgggcatgaaaagaggag

SEQ ID NO: 825751 - DNA, 600 bp, Homo sapiens
accacccaacttctttcttttgtaaatttcccagtctcagatatgtctttatcagcagcaggaaaacagactaacacaggtatcaaaattgaagagttcagcgcatcgctagagcaaaccaaggtttccaasagagaagccaaatctgtctcggcccgtggaggccttcctgatcacacattgaataggatgtgtgaggaaaaagaaaaaagagaggattcactaacttagttcaatcccagctctggttttgatgtactttaaagtagcaggagacatcatttatccactgaatttttcagtaaaaatgctaccgagtcaaatagtttatcaacatttaattcattagattacaataaattgcatatttttcatagagtgagtcaagaacaatttcaaatcatagttctcataaagatgtaaaatagcacaacttgccctaaggaaacaggaacattttgaaatttataacacctaacaatttttgaccaaacagggaagaaaatatgaataacgattatggccatcaagatagaggttaagaaaaggaaatttaagtcaatcccctaactttgtataacatgggcatgaaaagaggag

SEQ ID NO: 825752 - DNA, 588 bp, Homo sapiens
aagggagattttattattattttttattattatactttaagttctgtgatacaaatgcagaatgtgcaggttgttgttacacaggtacacatgtgccatgggggtttgctgcacctattaacctgccatcgaggtgggaagttttaaaattctgtcttcctttaaggcatttggcattttccatgtttgttttgttacattttgaaattattataaggccctggaatctcctaatgtaatactttccttggtacaaatgattatatgtggaaaggctattccatagagaatcagcccttaccttggtttgtgctctaattgcagtgcccttatttgggtcaacacagtatgcttcatgctgaagttaaatgatgcatcctggaaattctaacaaaggaaggtctcttcttctgttcaaatatagattgactgatgtcagccttcctcaagtgtgttacttaaaaagcaaagwgcaaagagaacagctgtcagggtgagaagtctaaacacatttttgaaagtagcctggtgctgacaaaatgcatttaatcgtgctcaaggcttcatgaaattgagttcattaaatta

SEQ ID NO: 825753 - DNA, 549 bp, Homo sapiens
gttcgagtttgaatcaagtttcctgactgttacatactytactaatccaggcaacttacttaacttctctgtgctttagttgtctcacttgtaggtcttcctatccctacttttttactatataggatctgtggaagattacataagataatagacataaagtgcttagaatggtacataacacatagtaagcactcaaaaatattagttagtaatacagaatgtattacttctctgtattatgatcatttaggtctcagtctatgacagcagaatctttgttggattaccctttgattatagcctatcacaagtcttaaacttttcacatatattcattggaaatattcatttgtcattataacaatctcaccagacttcattattttcttttaaaaaagtaaaaaggctcaggtgagtggacataattagcgcaaagccacaaaattgatgaacagagagaagatctaaaattttccatagttggtgataattaatccagtatttctttcagtccatcaggctgccttctgatgtcaggaaataatg

SEQ ID NO: 825754 - DNA, 675 bp, Homo sapiens
gtctttgtgactggcttatttcactttgcataatgtcctcaatgttcattcacgttgttgcatgygtcagaatatttttccttctgaaagctgagtcatatgcccttgtatgtatatgctacatttgttgatgcactcatctgttgatggacactagggtttcttccatcccttggctattgtgaataatcctgctatgaacacgggtgtacaaatagctctttgagacctattttcaattctgtcagatatatgtgtagaagtggaattgctggatcatatggtagttctattattagttttttgagaaccactatgttttctatagcagtggcactattttacattcccaccaatggtgcacaagagttccactttctccatatcagtgccagcacttgttcttttcttttctttcctttttttgatagtagccatccaaatgggtgtgcggtgatatctcattgtgtcttttttctttgcatttctctaatgattatttcatacacttagccaaataacacatttttaacttaatctttagttgtgtcagtgtctgccatctttagagggactaaaatgttttaaaaattaatttttcaaatatctcaaaactaagtacagataaatttaaatagtcttcttcgttttgtaagtttgtaagctcattttgta

SEQ ID NO: 825755 - DNA, 560 bp, Homo sapiens
ttttctagaaggagaagaatcaatacagagggtaaactgctcttgagtcatttgccatttgagggatggcaaatggagcaagtgagcgtactttgatttgtagattagagtttgacacataacactttgcttttgaatgacatttgcttgttactgtggagtcagtgttcatatcctttattttcaggagttgctgctgatacaatggggttagaatgagctaaatacagcatttgctttcttggtttgaattctgggttttaagtaaaaatctacttgcctattccattgatttttttaattgcattcagcaaatccataaactgcggagagagctggttgcatcacaagaaaaagttgctaccctcacatctcagctttcagcaaatgtaagtcacttcatttttaaaatatattacaacaaattkttatagaggaaaatgaaatcattttagtaacaaacttacaaattttcagtgcctgatacagacttagattaccaactagcaggactcataaaaagttaacattttttgcctactcagtaataaaatgtaaat

SEQ ID NO: 825756 - DNA, 629 bp, Homo sapiens
aattcttgtcctgagaaccaaaatatatatttgatgaaatagttctcttcttttactcattctgaagtcattggaattgaatttggcatatgatataaatcctaattttatattttatgatattcaaaatttctaacaaatatttacttaataatctaatccaggtttctattgtttcttctgtttcctttataatgctttttctgaagttatttttcctagacttaaatattagtataatattatcatagaggaaaaaatatctgttagctatgaataaaaggctttcatcttattgttgcattaatatatttaaatgtagagagcatacagattagcaaagaaaaagtataattgcctttttttatagttgacatgaacatgtataaagaaaagccaaaaaaatcaataaaacaactagaacttattagtgaatttagcaagatcatagcatacaaagccaagattcaaaattccattttatttatctactaacaaaaamtatttgaaatttgaaaatttaaatatgccatttacaataacatcaaaatattgaacaataaagtatttaggaatttataaaatgaaatctcctataccaggaattacagaccattgctgaaataaat

SEQ ID NO: 825757 - DNA, 617 bp, Homo sapiens
acagaacaccagaagatgttctgtcgaagctgacaagctatttctataattcaaatggaaatgcaaaaggcagtcactgccaacaccagcatggactgtctgggttccagtaggttacttcactactgcctcttctgtcagccacatcacgacagctgcccagaagccagagaaactcctcacacctggcccactgctgcagctaccagcatccaggcaagccaccatcagcccactggtaactgccaacagaggtaccactgtacactaccctggggaacaaagataggcatgtagtcagcccacctctgccaccactagggcctgaagcctggcccacctgacactgcagtcctcagcacagcttcatcacagcttctgttaataaccacaccctaacctaccaaggaaatcacaaatgtcactgacactgtttgtagccaaagaaatcatagagagactacattactgcacacacccataatcaaagccacagtaccctatccaracaacatcacaggtatatctaaaggaaaaaattttcccatatgaaagcgaattcaaatataggaagaagcgactgttacaacagatatgcagataaagcttcaacaata

SEQ ID NO: 825758 - DNA, 600 bp, Homo sapiens
actctggaacttttgcgtgttaaaatttaatataacactccagaagtctttttttttattaattctatgtctctacatctctatgtctctatctatctacctacctacctatctctctattcatccatctgtcatttctcatttcttttactaggattttcagagcttgttccattgatagttctctttcctaataggcatggcatccatacccagccaaatccttatatataaatggacaggatgtatgtatattcaacgatcacctcctctcccttttaatcagttttgcaaaaaagttcttagttaagttttagtcaaacaaggatgcagtactcattaataggaacccaaaaggaaaaaaatggaattatcacaaatgtgaataagatatattttacatgataaatacagagaattaagatatttgtataagcttcatttaaatattcttaatcatttaaaaaatttgatcatttagtacacacaaaactggaactccaacttagaagacaaataaatcrcttttaattttaggaaacatatttctttgataaaggggctagcctgaacaagttctaccattctatattatatcta

SEQ ID NO: 825759 - DNA, 730 bp, Homo sapiens
atggaggatccaacactgtgaatcaagcaggggacacatgccctggttagagcccacggggcagaccctgccaggctggagcagaggagagccctagccaaggcactccacatagagggytgtgaccccacaggcaagcctgctacccgggcacatttgtcccctgaagggtcctctcagttggtcttgctaatgctgtcaacaccctgagcccagggaaatccattaaagtaaagctctggccccagtgtccttgcagatctttcttggctatcttcacaaaaaagagtaaagtaagcaaattacaaatcaaagaaactctgaacccgtggtctttatctgagtgagactctggcggtcagaaggaaagtctcaagcattcagactgtggcaggaacccagctgtggaatcaacagctaaacccaagagcgagaggcttgaccagtgtttgcagaacacttgggtaggtaggaaacaacgtaagagcttccaaaatcaaaatcagaaacccgattccaggacttgatgactgcagtacttcctgcctatcactgtctggggcagctcagatgtacggtccagcgtgaacacacctggaggatgaggtggcgagcccctgctgctgctgccactgctggcaccatcagggcagaccaggtttgctgtccaggccaggtgtgaactggccgtggctacctttccctaaatggacctgtggtgtgtgtcctt

SEQ ID NO: 825760 - DNA, 605 bp, Homo sapiens
attgtatgaaataaaccatgcatccatgttgatctaagtaaatgaataaattgaagattttatgaggaacagagatatttacatagtcttaaattacctccccacaatatatgaattaattacaagatgaaaaagtaacactgcagaaaagaaatccagcagataccatcattaactgtcaatgctaatatcaccagtaataagacaaatcaaaattataggttatatggtaggatgcaatgagaagatcccaggatcacctctgagatactcttgctgaaaataacacaatctaaatctaatcataatgaaacatcaggaaaaaacaactgagagacattctatactctgaactttactcttcaaaagattcaaagccatgaagtcaaggaaacctgaggaactgctccagactgaaggagtgtaagagacacaacatctacatgcaacccatggctctgaatgggatcygtctgctataaaggacatgacagacaattaataaaagctcaaaagaagctgaagattgaatgacatgatgtattaaagttaacttactgattatcaaggttgttatgtagagtgtcctgacttgtgggaatacc

SEQ ID NO: 825761 - DNA, 592 bp, Homo sapiens
actacttgtttaaggttagctatataatctttttttctttagctttcagatttctgatgtaattcttgcagtttatttagtgaaatatattgagttgcttaattgcctcacaatagttaagtaaaggtcataattatctgtgttaataaagggaggaaataattttacagtttaagtccctggagctctcattttcaggagcgacccaattgctaattctattcaataactgtaagtaaaaggatgcatttaaatcctttaaaagctgtatttgttaggttttagaaattgaatgttattgcctaataactagaggtaaacttagagatgctttggcttactttctagttgatgttaatatggctgttgttcacaacacttgtaaagctttccactcctaatcttatgtaaatgattggtaccttaacatttaatcacaaatggttgtttattatttaaaggagtctaagataaacaatttttatgaattaaatacacctgtgacactataaaagattaatttataagttaaaagttttgtcattttcttacataagagtacatygttaattgctgttgtacttgcaacatt

SEQ ID NO: 825762 - DNA, 654 bp, Homo sapiens
ctcattcaccctgcctcgggcaattgtataagtttaaggctttactaygtaaaattaaagtctcccatttcatcagtttgaaaaattcaaaatcataaataacagatggatttaaaaaaagaacatcccactgcatcatctgtcccattctggatcaagtggaatcacctctatgagccatccagaccagcacaggctgaatttgttgctccttcatctgcgttccaggaagtcatttactaatatttcttttacattgtttattaatatatgtgaagctattgcctgcgattctttgagggctggggcagtatctcatttattggcatcccaggatgtatcccaatgtctctttcatgggttagcttaaggtcctatatattatagcagctactacgtatggattcatcaatggggtatttagatctctggaaacttaactagattaaacaaaaatagtacctactgaacctttctcaaggatggtattgaatgtggatggaagaaaatatcatgagtctatttccttcgggtcagaaactggcaaaaggcggacccagagggctcttttgctactctttttcgatacagtgcttcactactccacttaaaaacacggcgaacaaatatttagtgaataccagtgtgaagtgg

SEQ ID NO: 825763 - DNA, 605 bp, Homo sapiens
atcgtgtggtagtaatatttttaattttttgaggaaccttcatagtgttttgcatagtagccacacccttgtacattctaatcaacagtgtacaagggttccaatttctacaatcattatcaacaccattattttttaaagtttctttttttttttttgatggggtcttactctgtcacccaggctggagtgcagtggcatgatctgggctcaccacagccttgatctccccagactcaggtgatcctccaacctcatcctcctgagcaggtgggactataggtgcaaaccaccacacccagttaatttttgtatttttagtagagatagggttttgccatgttatgcaggctggtcttgaactcctgggctcaagagatctgtccacctcggcctctccaggagctaggattacaggcatgagccactgtgcctggccttttttttttaaatagtagccatcctaacaggtgtgcrgtgatgtgtcactgtggttttgatttgcatttctctgattattagtgatattgagtgccttttcaatatattttccaaatattttatttctgggttctctattctgttttattgggctctctattctg

SEQ ID NO: 825764 - DNA, 597 bp, Homo sapiens
ccagttttatccatgttgttgcaaataacagaatcacattcttttatggtttaacagtactccattgtgtgtatgtaccacattttctttatccatttstctgttgatggacactgaggtagcttccaaatcttggctattgtaaatagtgctgcaataaataagagaatgcagctctcacctcaatatacttattttctttcttttgggtatatactcagcagtgggattgctggatcatatggtagctctatttttagttttttgaggaacctccaaactgttctttgtagcagttgtactaatttatactctgaccaactccacattctcaccagcattcattattgcttgtcatttggataaaagcgattttaacttgggtgacattatctctcattgtagttttgatttatatttctctgatgattagtggtgttgagcaccttttcatatgcctgtttgtcatttgtatatcttattttgagaaaggtctatttagatcttttgcccattttgaaatcagattattggattttttccagcagagttgtttgagctccttatatattctgcttattaatcccttgtcagatg

SEQ ID NO: 825765 - DNA, 514 bp, Homo sapiens
taaatgctgcacttagtcttttacttaaaaatctagaggttggaggatccagtgatactcaactattcaataatattgtggtcctggtgtcacatatctgaggttctcttggccttctccttatggtgatggctccaaccatcaagtcctaagacatttgaaagcaataagaaagaggtgaagtagaacataattttttcacttgagtaactctttcaaacagaaaagaaaaaatatcttcccagaggcatcctcctgtggtggatggtaaaaatggccacagttcactgcagttccttctatcaagagatggaccctatttccccgatccaaaaatttgtgctatctgtggtttgctttggtcaatgtaatgcacatatgtgatgctgttagagtttcaaggctggayctcaagaaacttgcacatttcaactcctggtttattaaatattacaattgtcatgtgaaaatgcctgccctagtctgctggatggtgagagacatggggcctaat

SEQ ID NO: 825766 - DNA, 318 bp, Homo sapiens
ttgatctttatacaaagatatattaatcaggatgttataggtctagctgtactaacaaagaagccaaaaaggtctgtaattaatgcacacattttrttatacttctcactcatccagagcccactataggtcaggagactcttgtaggcagctgtcctccatgtgatgactcagggattcaggccagtttgatcttgtggttccattaccaacacatgccttcatgctcctgggcaacagagacaaagaaagcctagaggcttacagggcccttgctgtgccttagtctggatacgacacacagcacttccaatctca

SEQ ID NO: 825767 - DNA, 318 bp, Homo sapiens
ttgatctttatacaaagatatattaatcaggatgttataggtctagctgtactaacaaagaagccaaaaaggtctgtaattaatgcacacattttattatacttctcactcatccagagcccactataggtcaggagactcttgtaggcagctgtcctccatgtgatgactcagggattcaggccagtttgatcttgtggttccattaccaacacatgccttcatgctcctgggcaacagagacaaagaaagcctagaggcttacagggcccttgctgtgccttagtctggataygacacacagcacttccaatctca

SEQ ID NO: 825768 - DNA, 601 bp, Homo sapiens
accatgtggatgacacaggctgtgtgcccagcccagactctgcgagcgacagaagaggagggagttgcttagtgacatgacacaaagggcgtctttgattcatcacccggccccagccccaagcccctggccagcagcgaggaacggctgcaaatgagcaataggactcctttacaaatgtcactttgctgtaaaatgtaaatgtttaacatttagacacgaacgctgactcccaaaatgcctagtgctgggtggcttttattcattctcttagggattctttgtcctcccatggtgagagatttcactgcatgatttacacccctgtgcttgttaaattgctggcatgtcttgccccagatagggcagcaaaagagcagagatttgcaggggactttatacctttcctgttaatgcagagtattaaatatacagtgcaattccatcggcagccactgctcagaggtgctatgaactctgaacagaggagatttcattttatttccaattatcctggacttcaaaatatargattgtgtcattgaaggtcgagaaagaccaaaaacagcaataaaatatattccctgggagttctgtcttc

SEQ ID NO: 825769 - DNA, 550 bp, Homo sapiens
gactatcctgattactgtagctttgtcttgaaaatagtttactgcatagattactgtaacttgcaccccagaaacagttaggtaagtcctctccgattaagagatggagtctatccctctatctcttgaatacatgtgggcctgtaattgctttgactaatataatatggtagatatgtttctatgtgactttttaaactaggtcagaagaagccttgcagcttctgccatggtttctttgaatgctcactctagaataagccaggcaacacgtaagcactctgcttatcctgacaccaccatgatgtgaggaagtgatgcatgaccagccacaggtattctagccattcctgcccagattccagacatgtgatcaaagtagtcttcagatgactctagccccacatgactttaactttgtcaaagaccctgaagaagaacgacscagctgagcccatgtgacccatagagttatgaaagataatgattgtttgtaagcaactaagttttgctataatttataatatagaaatagataactagaacagta

SEQ ID NO: 825770 - DNA, 540 bp, Homo sapiens
aattttttcagccatttctctttttttgccaaaccaaggtatgtaaygtttgtttagttccttaaaagtggtttgtaattatgattttaatgaacatattttcatgtatgaaatatttcaaacagattgtaaaatacagagtgtagtatgacaaacactaatgagtatctcaggtagatttaatagatgtatacatttttgttttcacttccaatctctttattaaaacaattatttctatgaatttttaaataccttttcacaaatataattatgtggcataatatataattatataactatctatatagttgcaactgttagattttttacatatttgacttaagaggtatttcaaagttgcccattatctctatgtatatttttaaaaatttattaggtgacataggcttaaatatatatacatgtgtgcatgtgtgcatatacatgtatatatagtattaaacatatttatgtaaatgtatatgtatacatgggattaaatatatgtacttgtgtgtatacacacatgcacatata

SEQ ID NO: 825771 - DNA, 630 bp, Homo sapiens
gaagatagggcaaaattccctgatgaaatggcagtgtctacatgattcaacagtatctcattgatttactgatttgaatgggaaaaaataaaaaagcttctactgtgtcatgaaggctatatgattaacagggtaattaatatccatattaatatgtattacaagcaccttgtatactttagagtacaggaaaagtaactaatttttatgttaaaaaatagaggttttcatcttcatgcatatgcaacggggtgtgaaaaataattagtgaatacagtttcgggtgaagagcagatgaaatcagctgtgaatggaaaataaatcttggggcccccaaatcactaagcaaaagggaaaattcatgctgggaactgcttaggggaaaccttcctcccattctgttcaaagtcatccctctgctcactgagctaaatgcaaatttgattgcctccgttggaaaggctagtcagaaactcaaaatgctagccagaaactcaaaaggctagccagaatgcaamcctttttctctcacctacccgtgacctggaagccccctccctttttcgagttgactcacctttctggactgaaccaatgtacattttacatatattgattgatatttcatgt

SEQ ID NO: 825772 - DNA, 631 bp, Homo sapiens
tctatacctagaaaactctaaagactccactaaaaggcttcaagagctaataaactatttcagtaaagtttcagcatacaaaatcartgtacaaaaatcagtagcacttcagtacagaaataatgtttaagctgagagccaagtcaagaatacaatcccatttataagggccacaaaaataagacatatagaaatatatttataaaggaggtgaaagatctctacaaggataatgacaaaacactgttgaaataaatcaaaaataacacaaacaaataaaaaaatccgagctcatggattagaaaaaccaatgtcattaaaatgaccatatgcctaaagcaatctactgattcaatgatatttctataaaaataccaatgtcatttttcacagaattagaaaaaaactattctaaaattcgtatggatccaaaaaaaacgcctgaatcactaaatctaaccaaaaagaacaaagccagaggcatcacttcaaactacactgcagggctacagtaaacaaaacagcttggtactagtacaaaaacagacacgtagacaaatggaacagaatagaaaagtcagaaataaagccgcacacctatagccatctgatcttcaacatagtcaataaa

SEQ ID NO: 825773 - DNA, 638 bp, Homo sapiens
tcatctgggcactggggatgcagcagtgtcacacccagatcttggtttctgccttcagggagcttacagtccggtggaggggcatggacaagcaatgtaaaattaaatgatgggccattttaatcacaattatggcacaggccacagtggaccatagtgggtgttctgggggctcattacagggatcccgacctgttttggaaggcagcagcatttaccccggaattggagttcatcaggtggaagcacattccagggaaaggggccggcgtgtgcacagtccagaggcaggaaggagctgcagagctgggctgtggtttctgccctgcctgttaccacccagcaggcatacatgtatggattgttctccttccctttccttccaaataggcatttgcagattggacatttgcaggtggagaaaactcaccattatttacgatgttgaggctatagaaaaatgaatttagggtgtcaaaaaattgacttataactgatttttttttccatctggctattgttcttactcaagtgcrtgcgtatggtagctgcccgaaaaactagagtgctaatcacattggccgttaaattgtcagagttttccaccttgacatatattaatttcaggctcatcaatc

SEQ ID NO: 825774 - DNA, 616 bp, Homo sapiens
agggttatggggaagctcaagtgagatgacacaaatgtaaagttccacaggacctgataacaaagtagctattatgacagtgctattctaattttgatgatgatgatgatgatcttttctcctccatcgttccccaaagcaatcaaatgcatgggtaagtgaaaaagaaattcaaggaaacaattgttaagggccaagtgagtgtttcagccaaaaaagtgctgtatgttataattcagagctcaccttcgtatcttccacttggtcacagaatgagaattaactcatgggggtcttgcagaccttccagggcctcagggactaggagaccagttgcaaatgttacttccggcaccaggtactacaggcaccaaaaccacttctatttgatttatatttgcctaacagggaaaggggaatagagggggtcctaagaagaagcctaatagatgcctttgcttaaggtgacaatcataaattctttctgattgaagaattttcaaaataagcaccatcattactattcccgttattcataccaataataatgataataataaatatatgtacttacaatttatcagttagccakgcatcagttgagtgccatatagac

SEQ ID NO: 825775 - DNA, 616 bp, Homo sapiens
agggttatggggaagctcaagtgagatgacacaaatgtaaagttccacaggacctgataacaaagtagctattatgacagtgctattctaattttgatgatgatgatgatgatcttttctcctccatcgttccccaaagcaatcaaatgcatgggtaagtgaaaaagaaattcaaggaaacaattgttaagggccaagtgagtgtttcagccaaaaaagtgctgtatgttataattcagagctcaccttcgtatcttccacttggtcacagaatgagaattaactcatgggggtcttgcagaccttccagggcctcagggactaggagaccagttgcaaatgttacttccggcaccaggtactacaggcaccaaaaccacttctatttgatttatatttgcctaacagggaaaggggaatagagggggtcctaagaagaagcctaatagatgcctttgcttaaggtgacaatcataaattctttctgattgaagaattttcaaaataagcaccatcattactattcccgttattcataccaataataatgataataataaatatatgtacttacaatttatcagttagccagscatcagttgagtgccatatagac

SEQ ID NO: 825776 - DNA, 600 bp, Homo sapiens
ctgccctgctgaaaaacttggcccagaatagggaagaactcaacattcaattttatagtgagtcagtggaaatgaaaaccagtgcagtctgtgagcctcatgtcctaacagcctcccctgggaaggtccaggcctactgcgtgagacataaggggttggtcaggccctccccaggcactctgtctctccaccagcctgcaagatcttgcccatgatgtaatgaccaaggcagaagtctgcggcgctgggggctgtggagtctagctcactctgaccatggcctccctgggctgtgagtcacagccgaggcgatgctcaggaggcatctggccagccctgcagcgggaagtctgtgcgagagaaggttcgcggcccaggtgctctgagaagctctcaggacacccaggaggaccatgggctttgggcgaccaactatgggtcctcacccacaaggaatggagtgagggaccaggcagtttttgcaccctaagaaatccaggactaaggagcasagagcagggttccccatcttacagttactgtgaactagtttaaacaatgagaagaatttcacctccagccaccaggcctttcactgtg

SEQ ID NO: 825777 - DNA, 593 bp, Homo sapiens
ggggttcttagacagttggcccaaacacctcgctgacaatgctcacggagcctgtgtgcctgagccctgcccagcgtttgcctatagtgcacatgggccattgtggtgaactttacttgcttctagaatttcacgtggacagacatgtgtagcttgcattaaaagaaaacaaaacaaaacacgtagaggtacagcttcttaatcaatgaatgacacatttagaaaacatttaaataaacatacagtgtgatggcctgggagaagctttgttagtaagtgttgtgtaaataccttgagaacacaagacagtgtgtgtgctggcggtcttcagcgggttacacttcggatggtaacacatcggttgttcatttaacaatagttttaaaaatagtcatgctgttcttttcctctttcttcaccttcttttcaaaaatggcaaacattgtttttcaggtttctrtatgaacaaaatctgctgaggggcttgcagcaggccagtgatctttggtgtctttccaaagggcctttagggatgattccaaagacagtttctagtcacatagtggacacaccattaatgaatgttggatgct

SEQ ID NO: 825778 - DNA, 609 bp, Homo sapiens
ccagtctcttccaataatttagttgagctctgggctcagaatttttatatggcctgctcaaaaagcccagtgcttccagcaaaatctctcacttgcacctgtccctgtggtatggagagagaaacacataaaytctggggccatagaaacttgagttaaaatcttagttctactgcttatagctgtgtgaccttggccaaatctcttacctctttgagcttccgtttcttcagcagttacctggagatgataacattcacattgggttgtcgtgcgggtgacatgagaaagcacaggcagcaggctcagcaagtgatggttccctttccttcccctctttccttgaccccttcctttgacttatccaccctcctggctgccagttatcgtctggatgcctctagctgtcattccctaggttttcggctccatgctggaagagttgatactcagactatatttagatgccttagcgctttcatttttttataccactgtgttgctatggtgatggtggggaggggaggggaaggacagcttgaaaggaaagatggagctcagcggtgaggatcggtggccttggctgtggactgttcctggctggtactc

SEQ ID NO: 825779 - DNA, 466 bp, Homo sapiens
ccaggctggtcttgaactcctgacctcaggtgaaccacccacctcggcctcctaaagtgctgggattacaggcgtgagccactgcgcccggcctgcttgagtggattttgacagctgtgtgttatgttttcccattcacatgcaatggagacatttgctcgtttacttttctacaaagtacctccaagagcattttgtgaagagttttggtttcatctttttgtctcctttgattttttttctctctgaagcctgtttctgttgtgttctagtactttcaatctcattaaagaaagagtaagaaataaacaattatttttacaagcatacaaagaaatwtattgctcttttatatgaaagagagtttgacaatttgtgtaatgtttcaattgctacttataaaactatctgaaagatgtttatccaaaaaaaaaaaaaaaaaaaaaaaaagatgtcctccaatgag

SEQ ID NO: 825780 - DNA, 602 bp, Homo sapiens
tcttgaattcactgcattggattcatttttttgttgttgttcatttgccgatttgtatccgcattcttccctgggctttcttcccacattcttaaaccaaaatgttgtttacttttgtcttttaaataaccaaaaccaagcaaaacaaaatctattcctatcatcgtcacaaatcttcagtaggaaaccttgaaactgattctggagtcagactgatttaggtcccagtctggtatctctaatttattagctgtgtggtcttaagctatgtaatctctttgtgtcttagttgtctgttccacaaaatggtcagattcatgagaccttctaagtctttttaagtactaaatgagagagtgcttattaaatattagcatgacacataggggttccataaacggtggccgtcatcattattctgtaattatcagtgtttcacatctcactggcatcaaatctcctgtttctcatctcattgctttttttttttccatttacaatctaatgttatcttctrttttcctcctggtaaagtaattgtccatttttcttagtcttttcttgacaacctggcctctcctttcataaaaggctctaataag

SEQ ID NO: 825781 - DNA, 633 bp, Homo sapiens
gatatcggaactccttcccagctctcccttccaggaatctgtgyttctgcagccaagactccaggtgtcatgcgctccacacccttgggaatgaacccaccatgcagggctttgtgtgcccctgctccctgctctgacttcctcaggtcctgcttggagatcatgctgctgtccctgctaaaactctttagtgtcttcttgttggccctggggtgaaatcccaacgcctcccgatggcctccgaggtgcttgcaacctcatgctgcccaccctgccaccacactgtgctcactttttcctctagctcatgctactctagccaacactggcctctggttggttctagaacattccagatcctctccctctgagggccattgcacctgctgtgcccatgtctggaacattctttacatggcttttcatgtagccagcaccttttcatccttctgctcttggttttagtgttgtctccccagagggtcctttcctgatctcttatctaaagcagccccatcaccactattagcccccattgcagtcctcctttggttttctgcctggtattcctattttgtttatgcgtctccttacttatttatctctaccttcaagaatgtgagccacaggagg

SEQ ID NO: 825782 - DNA, 591 bp, Homo sapiens
cagagggtcctttcctgatctcttatctaaagcagccccatcaccactattagcccccatygcagtcctcctttggttttctgcctggtattcctattttgtttatgcgtctccttacttatttatctctaccttcaagaatgtgagccacaggagggctcctatgtcatcgctgtattccctcacttccagccctgcagagagcctgcacctcctcctggctgtaagcattaatagctgctaaacacaccctggtccaggtactgtgctgagcccctgatatctcatttaatccatatattatctggcccatggatattatttttttaatccctatttaaaagaggaaaccaagacacagcagggtcaaatgacctgcccaaggtcatgccatccatgacagtgtccgggtggttttgctttagaatttgtgctcttaaccactgcgtggcgctaccagaccttacaggatggtcaagcaatattgacggagtgtctgctgcaggtgctgtgctaagtgctgaatacattacatgttgagcagatgaatacgtgaaagaataagtgaatttgaggagcatgcggcaggca

SEQ ID NO: 825783 - DNA, 561 bp, Homo sapiens
tagtttgtttactctgttgatagtttctcctactgtgcagaagctctttaggttaattaggtcctatttgtcaatttctgtttttgtcacaattgcttttgagaacttgaccatgaattatttgccaggtcccatgttgagaagagtatttcctaggttttcttctaggatttttacagtttgaggtcttacatttaagtcttcaatccatctcgagttgatttttgtatatggtgataggtaggagtccagttccattctcctgtgtatggctagccagtaatgccagtaccatttattgaaaagggattctttcccccttttctgattttcactgactttgtcaaagatcagatagttgtaggtgtgcagctttatttattggttctgtattctgtttcattggtctatgtgtcactttttgtatcagtaccatgctgttttggttactrtagccttgtagtgtagtttcaagttgggtaatgtgatgcctttggctttgttccttttgcttaagattgctttggctatttgggctcttttttggttccatatgaattt

SEQ ID NO: 825784 - DNA, 561 bp, Homo sapiens
atattttcagagtagagatagaaacatgtggatgaacattgggtgtgatggagagcgactaaggatgcctagggtttgatctgagctactagggcagatgatcagacaacctccttataactttagtggttcctgatggaccatgggataaaatccaacctccttagtatgcaagagctcatggtcttgtgctgcttcatctctcaaagctcttctccactttgtactcctgaccttcttgcagtttcttgaagactatgctgttaaatgtctctgtgctgttgcatatacctttttgtctgcttgaagttccctttttcatttgtctacttgtagattcagttcaagagtcatctttgtattgtcttccctgacttttctcccaggtgtggctgagcacatgctgctttgtgccacagtgtctggtagaatgcagcatttcttgctgttttgcrgttttttttccttatccgtctcccttccaggctttggcttgattgaggatgccataggctagttcctttatatatggcactagaaatggacacagggagtcatacc

SEQ ID NO: 825785 - DNA, 516 bp, Homo sapiens
ggggagctttttcatcaaagaagtggtttggagagttcaaactagttgggtagaatttcctgatttggaaacagattatccagagatatacacatttgtgagatatcatcatttcatattgttttagatgagcaaaatgccctgtctctccctccaaggcaatatttggtggaccacccgtaagtttttgtttggtttggtttggttttagcctcatcatttaggggagaagaattttgtccctatttgccccgaagtttcattagtggatggccgtatttataccctgtgtgtggtaatgatgaactcctatgcattttatctagcttttcaactattaagtgaagcttggtttaagcaaatctttagatggtagcattgtgccagtactgttcccrttttatcacatgctatacgttagtctagttcagcagagcattatgctacattcccttctcagtgagttatagatcttgaagttttcacacactatgttctggaaagaaagtataactg

SEQ ID NO: 825786 - DNA, 594 bp, Homo sapiens
tacgaggataagtgattctaggaaatgtgatacagaaaaggggtttgtgttcctgagacttctcccttgtctggggagcaccatttctccttccatgttgaatatcctcaccsaaaaagtgagacaaagtttgctctagtccagcaatagacaggatggtaccaggagctgaaattatttttataggaatagaaagaaatttctgcaataagacttaaaaatatcaattaaaacaaagacaaatatacacgatgaaacacaacagcatccaatcaatgggataggagattaaaatcatttcattaaaggttacaaattatgctggatagaaagaataacttctagtgttccatagaactataggatgattaacaataatatattatagtttcaaatagctaaaataaggatgttgagtgttaccaacccaaagaaatgatatttgagatgatggacgtgctacttactctgatctgatcactatacatgatatatattgaaataccactgtatactccccaaatatgtacaattattgtgtcaactaaaatatgaaataataaaataaaacaattttaaaattaaaaaaagaaa

SEQ ID NO: 825787 - DNA, 506 bp, Homo sapiens
attttatgtgtggctagtgtaaataggattactttttaatttcttttttatattgttgcctgttctcatagaaatgctactggtattttatgttgaaattgtatcctgcaacgttgctaaatttgtttattagttctaacagttttcctgaggaatttttagggttttccaaatcatatcatatcatctgcaaacaggtataatttgacttcttcatttctaatttggatgccatgtatatctttccttgtctaatttctctagctaggacttccagtactatgtggaataacactggtgagccaggttatattccagatcttagaggaaaggctttcatcttttccccagtcagtatgatactagctgtgggtctattgtataaggcttttattatgttgaggtatgttccttstagactcagtttttttaggtatttttttatcatgaaggaatgtcaaattttttaaaatgattttttagtataaattgatataataatattg

SEQ ID NO: 825788 - DNA, 626 bp, Homo sapiens
taatttaaataaaataaaaatatatataaaataaacattaaaatcaatataaaaggcaactaggaaagtttaacaatttctaacatttcaaagacttcttttttcccttattgttttttccttattgtttgtcaatttctaatttaaatacattaagaattagggccaggcatgctgactcatgcctgtaatcccagcactttgggaggccgtcacggccagatcacgaggtctagagatcgagaccaccccggacaacatggttaaaccccgtctctactgaaaatataaaaaattagctgggcgtgatggcacacacctgtagtcccagctactcgagaggctgaggcaggaaaatcacttgaacctgggaggtggaggttgcaatgagctgagattgtgtcactgcactccagcctgggccacaagagagagactctgtctcaaaaaaaaaaaaaaaaaaaaaattagaaaatcacacatatctcaaattytacattacagatcaaactgtctttcaataattctttggtttatctttatcttagccaataattcctcttttatctattgttattaaattccatttgattttcttatcttttgtatccaatagaattagtttc

SEQ ID NO: 825789 - DNA, 574 bp, Homo sapiens
atatctcaaattctacattacagatcaaactgtctttcaataattctttggtttatctttatcttagccaataattcctcttttatctattgttattaaattccatttgattttcttatcttttgtatccaatagaattagtttctactgtatataatatactaacaaaaagtagcacagcttaaacaaaatagaagtctatttccctgcaatgtgaaaaaatccgcatatagctagtcgttattttcttagagagggtacaaaaaattatcatagttcctgatgacttctgtctcacagctctgtcaattttatatttgtttttcaagatagcttccaggactctgacatatgtgaatattctgttgactgtatagctacaaaatagaaagtttcctaagagttttaaaaatatagtaatctgtacgttcctggtgctgtatgccctaaagtcaaaaagacctttctttttatttacttatttttwtttttttatttttgcgggtacataatatgtgtatatatttatggggcacatgatatattttggtacaggcatgaaaaacagctttct

SEQ ID NO: 825790 - DNA, 549 bp, Homo sapiens
aatcacctgctgccttttctgttgctgtacatcctccctctttcaatcgcatctctgcatttcaaagcaggctctgctccrttttatctccctgtttcacactctgctcctctggctttggcatctatcttatatctctcagcccagacgttgacctgattgtatcacttcttgcttagtctgcttttctggccccagtgcctcttgtctctgataagaagcgctcctttgttcctagtctgtgccctgtaggaccccctcctccccatcccaatggtcagctgggccttctgagccaatttgttagcatccccatttccatgatggcaggaaaggctcagatgctacaagtgacactgaggatgttacctaattttaataaatatcattttctcattttaaaaatgagacggatatacctcacagggctatcgtgaaatgagagaacacatgactggcacagaggaggtactcacaacctaagtgttcttcccaaagatctagctatagttgcataatactaaactcagtactccacatctgaccatt

SEQ ID NO: 825791 - DNA, 527 bp, Homo sapiens
ttactatggatgtgttttatatttttaactgggagaaagctttragcagggggaataaaaaagaaaaaaaaaaggaaagaatatgaaaaagcacaagagcttttgagaaagaggacacccagagagaacatcacataatttacaattggcctcagaccaatccagggtgcaaggaagccattcttctgtatcctcggcaaccaatctgaaaatttccccataaaccggcttcctgcccatgtgtaattcgtgcttatcaattaaaatcccattaccttatgcaacatgtgtatgtcatgtcctctggcagctggatgtgctgaatgtaaagccaggcctgacctaaataacctgaaactctttgcaaacacatttttatgtggattagaaaaatacttcagaagatttataggtcactgatagaaatatgtttttatggaggctcccactttaatctaggcctggtttagacacatgtttcttctgaaaaatttaatttgcacatccctgtctactggaatgtcaca

SEQ ID NO: 825792 - DNA, 563 bp, Homo sapiens
gttccatttcgtgtgcttgcctagactttgcagtatgctgcaatatgacaaaacctttgtcctcaggatggtatattttatcttgagaagcatgaatcagactgaaattaaatatctcctacactgcagtattccaaaaaagtcctttccaaaataaaaaaagtttttatttcagtagataagaattcggatattgaatcataaaattttaagaactggaaacgcacttcaggggttttcttattaaatgagtcaatttgttttattattagatggctctgcttttcagaaagaaaatatcttcagaggggaaggctggttaaggttactacttctaggacaatttggaggaaaacttaagagaaaccaagcatttaggaaacatgcatatcaccatcatatgatctgataaaagacaatcagtgaagggacactctgactgaggcaatggtattggcagtacttaattacatcatggatcatacacattagctctttgaaactaatacggtagctgagagaaaatgtattttcttggrtcgaagtcagggctaggatctcag

SEQ ID NO: 825793 - DNA, 488 bp, Homo sapiens
gtgaagttgttgttggttttttgtttgtttgtttgttttgagagggagtctcactctgtcgcccaggctggagtgcagtggcgtgatctcggctcattgcaagctccgcctccccgggttcaggccattctcctgcctcagcctcctgagtagctgggactacaggcgccagccaacacgcccagctaatttttgtatttttagtagagatggggtttcaccgtgttagccaggatggtctctatctcctgacctcgtgatccgcccgtctcggcctcccaaagtgctgggattacaggcctcagccaccgcgcccggcctgttgttggtttttttttttttttttttttttttkggcaaataaaaaaaaaaaatgccctgaactaaatatcctttaaattgactataaaaatccctaacagcctaagggaaggaagacaaaagatttttgcctgcagtctattcatggattaaagctttggctcatg

SEQ ID NO: 825794 - DNA, 488 bp, Homo sapiens
gtgaagttgttgttggttttttgtttgtttgtttgttttgagagggagtctcactctgtcgcccaggctggagtgcagtggcgtgatctcggctcattgcaagctccgcctccccgggttcaggccattctcctgcctcagcctcctgagtagctgggactacaggcgccagccaacacgcccagctaatttttgtatttttagtagagatggggtttcaccgtgttagccaggatggtctctatctcctgacctcgtgatccgcccgtctcggcctcccaaagtgctgggattacaggcctcagccaccgcgcccggcctgttgttggtttttttttttttttttttttttttgggcaaataaaaaaaaaaaatgccctgaactaaatatcctttaaattgactataaaaatccctaacagcctaarggaaggaagacaaaagatttttgcctgcagtctattcatggattaaagctttggctcatg

SEQ ID NO: 825795 - DNA, 600 bp, Homo sapiens
gtgaaattagtgggcaaaaaactgattcactcacctgagaacaagccattctgtaaaataggctgagaaaccatttctcaccaacatttttcagggatgaaacttgaagtaatatgatccaaggagccagatttcaatatacgtttaatgttttttgataactcgttgtaggtagccactatttatcttatttgagttacaaagatacataaacacaaaatttaaacagtaatttgagtcacagactcccagagttgcaatactatcccctgtaatactcagttctatagatattttttcttttaaaagatccaaactaacccacatttacgccagctcttccaattatgactaaccgatgcatattatttctccaaatcttgacggtctaagctaatgcctctcacagttgactcacagatggaagtcacaattatttgggagtggctggctttttgttttgagttccayttcctggctcctacgctcaacttttgaattcagaatccttagagtgagaaatcatggcagagtccggaatctccattttaacaaacaccctaggtgatgctcggtcctttagaaatctgttattttaga

SEQ ID NO: 825796 - DNA, 614 bp, Homo sapiens
gggaacaaggagggactgaagtggctgttttgagaatgaagcaaacgatcctgcttcaaaagcrtatctttggcctctgatttgacagttctttttctttctctgaaagctatgaaaaagtcagtgagcaaagtcataagaaataagtgttggtgaggggcagcaaaatgttataagagagacaagttcaaagatgacatttacaagcctctcatgaatggcacactccccaaagggcacctgaatgccatttttaagaagtcatcaaacatacaaaataaaatgttccattttacataaagatgccaatatactgcccttaaaacacagattggtccattcacaaattaacatgtaaagaaatggcaaagaaccttctcccatctgccatcaattcattcactgcttttagatttaactccctacactcacacgcttgtaaacagaattgtaatggacaaaggatgaaggggaagctgggaaaacctagcttggacatgatactgaaacatctggaaaaaagtggcgacaagacttggccttggggatgggaaacgggaaaaggtgggatttcggcacatcctgtctctctattctgttaactggaacaatgc

SEQ ID NO: 825797 - DNA, 580 bp, Homo sapiens
ttttgggagagatggatcctcctgacccacatgtaaaaaattaaagctgtctgtattctgtgtttattgaatgtatttattttaccaaggtggatctgaataaacagtttctaggtttataatmttattgggattttttaaaactaaaaaattcgtttagttgaattatgcaatataaatccttagcaatatccccaaaaagtttttccaaagaagtaatattggttcttgatgtttcctcatggttcttttttttttaaccaatataaaagcaaattttaaaaaaaggtgttatttcccttggaaggaagctgtgattcccatggttggttattagtccaaagccgtggaacttctttccttataaacctctcattctggcaagacaggacacttggacaatgattttcctaataagtataaccaaaagactttccctaattttaatgtttcccaaaataagtcctcatcagatttgccccccgaaaggtaagtgaggaaagttcaagacaagtttgatagacatatttgttgaagacatttcttaatttcagattttttgatatgtgaatatgccagt

SEQ ID NO: 825798 - DNA, 575 bp, Homo sapiens
cttgggcaacaataaataaaaataaataaaatttaaaaaatatagtatgtacatttgcatatcctattcccattgaatattatctaaacttgcctatatttcttaactcagaagttacatgcatcctccttaacaagtgggtgagctagataaatctcaggggattaaaaaagattcaattacttatcttttggggtgaattgatgagtaagaaactgtaatagcaaccctctggacctactaggcatctgtaattggtaggcttttccgacattttttccttcacagacttagcaaccgaagcacaaggtggattaaataaatgactaaataaaagagaaacagaaatatcatatcctggctccagatccatgattgtcagtagtgtgttacagtgtttttaccagtaacagttagcattgccttgattataagcaaacaaaagtagattytatttagcttaagcaaaaaaaaaaaaaaaaaaaaaaaaaaaattattggcaggctttgagtagttcactatatagactaaaggatataggagaatgagacttgagaattgacagaaagcagag

SEQ ID NO: 825799 - DNA, 469 bp, Homo sapiens
atttttattttgaagaattccaacttggcatttactgaattcttcccctttggaaggtgataatgtgtgtataagaaagatgggcttggatgtcagaaacctagtttacattcaacctccagtgactgtttccaaggataaagtgttcaaacattacacaagtaccttacacagctactaacaaacagtgactagattcctagtaaatgttggtttctttctttcccatacttctgtttagcaaatttgcactgtcactcgctaagatttattgagtgactgcttggacaagcacagtgcattcagtgctcaagaaacacaacctaccatgtgcaggagcttgaaacagatttttctccacatgttatttattcatttgttawaatttctatttccagctattgtccaaaagggtgaggtggctcttagcttcatgcatccatgtgtaaaaatacatgtacacatgttg

SEQ ID NO: 825800 - DNA, 488 bp, Homo sapiens
acatttctgggcagagtgtgtgcatgtgcatgtgttttaaaaaaaagagataatgttaagaaaataattatccacaatcatagagcacaaaattcaaaatgcagtakacaggggtcaaaatgtgaaacgcttctatgtaaataccagcagaatctagatcatcaagctgttcccaagaaaacgtgtcagaacaaaaccacacaagtctcttaagagaattattgtaactggggaaacagacttgacttttggttttaaaagtcacatcatctctgtttttctggaacttggctgcatacgaccctggcaaagactactaattcataaaaattagagaaaacagaaggaaaatgatctgttcctgctatgaccatctattccttttccattaactacctgaagctggtgatttgctgcgtcgagagggcccagggcttttggatccagaatacttaacagctgaggatcgagaataagatgacttcagg

SEQ ID NO: 825801 - DNA, 578 bp, Homo sapiens
gaaactaatacagtatggaagggaggccctttttgaaaaaagaatgtgaaattgggctgggcrtggtgactcacacctgtaatcccagcactttaggaggccgaggcaggcagatcacgaggtcaggagatcaagaccatcctggccaacatggtgaaaccctgtctttactaaaaatataaaaaattagctgggtgtggtggcatgcacctgtagtcccagctacttgggaggctgagacaggagaatcatttgaacttgggagatggagattgcagtgagccgaaatcgcaccactgcactccagcctggtgacagagcaagattgcgtctcaaaaaaaaaaaaaaaaacaagtgaaattgagaccacatatttagatatagggcattagaagatccctgaagcttaagcctcattagcttcatggcaaatcttcccttgatcttgataatgctggtggtagggatgatgggggtgactattaacacattgagcactcatgtgcagacattgttccaagcagtttttatatattaatcctcgaaacaacccaaggcacggtagcagaggtacagag

SEQ ID NO: 825802 - DNA, 569 bp, Homo sapiens
tttcattctctaattattctaatttaattgtccattctaacaccaatactcttttggattgcttccctttagaggctcttataaatagtacttctgtgaacattcatgtagatgtcttgtgctaagcttgtgaatgtatttctgtactgtgtatatctaaaagagaaattgttagaatatcacatacatatgacttaaataggtaatgttaaacagttttctaaagtggctatactagtttacacctccacctgtagtgtatgagaatttgagttggtattgtcagaaattttaattttagttattctggcaggtgtgaagtagtgtcacattatggttttaatcttcatttctctgatgtcttgtgaagtcaaacaccttttccaatgtttccaacccttggattttttcttaatgacatatctatgcaagtattttgcayctttttatttcggttgcctggctttatttttatattaatattaaagggtcctttatattgtctgtggcttgtttcactctctttacaatatttttggatgaacaaaacttcttaattttaatatagt

SEQ ID NO: 825803 - DNA, 637 bp, Homo sapiens
tcaataaaataaacctcaaactaaggctcaccccttatacaaaaattcaccaaaaatggactatggaactaaatataaaatataaaactagaaaacttttagaaaaaacaatggaaaaaatcttctggatctaaggtagacaaagatttcctagacttggcaccaaaagcatgatctataaatggaaacataaatttggcttcatcaaacttaaaatcttttgccctgtgaagacaagagcctgttaagaggataaaaatgcaagctatagactggcagaaaatatctgcaaaccacatatctgacaaaggattattatctagaatatataaacaaaactttccaaattcaacaataggaaaaaaaaaacaatccaattagaaagtgagttaatgacataaagggacatttcaccaaagaaaataaacaactgtcaacacatgttcaacatcattaacttctggaggaatgcaaattaaaatcacaatgaagtaacattgcatgcctatcagaatggctacaagaaaaaacagtgacaatascaaatgctggtgaggatgctctcacactgctggtcagaatttaaaatgatacacccaatctggaaaacggtttgggatttttctgcaaaattcat

SEQ ID NO: 825804 - DNA, 530 bp, Homo sapiens
atattgccatcatttttcattaagatctttgccaatttgtaagcagcagcccagaggatgagaaggtttacagaaagtagcaattgaaaygatgagaagctaaagggactctttgagaaactaaaaggataatttgcacaccgtcaccttccctcatctcttggttaaatgaagtcagaaggccagctcagattcaatggaagagagatacatatttactcatatttaaacatgatataagctttgaaaatacacaccgacacagtcaaatatatatgtataacaataaaatgactggaaatgtataaaaaagtaatataactgccaaatacaaattcttgagaagacatactggccaactggaatggagctgccttggtgtaggaagtaggcaagatagggacagagaaggcagaaatcaacatgctcagttcacagctgactagtcaaatggggtcatacctattttggttggggaaaagagtttgtaccatttttatacaataatgaagaaatagttgttaggttat

SEQ ID NO: 825805 - DNA, 432 bp, Homo sapiens
tcattccaatttttatgtctttatttttcgtgccttattgaactgaccaaacttcttacttataaagttagaaatacaagtggaacagtgaacatcatgatctatttcttcaccattaagaataaaatttgctrtaatatttttttaagttactctctaccaaattaaagaagttcctggattttctaagtttggtatgaacttttgtcatgacttgatgttagaagttatcaaaaagtttttttctgcgtctggtggaataatcatatgattgtttttagtctatgaatgtggtaaaacgccttaggtaatttctcaatactgaatccaccttgcatttctgagataagtccaagttgtttgtggtttattgtaattttaaatcatgctggattaagtttattaatattttgtttaggatttaaaaaaaaa

SEQ ID NO: 825806 - DNA, 633 bp, Homo sapiens
aaatataatttaactatgcagaaaataaagtttatgatcaagtgtgtttatcataggaatgtgaagtgtttaaaataaaaaaaatatcagtgtaatttgctacatttaaaaactaaaacraaacaaaataaaagcccaatagatagtgacaattcattccataaaatcaaacagtcattccaggggaaaaccctcagcaaactaagtgtagaagataaattcctcaacctgttaaggaatatttacaaaaatcttacaatgaacgtcacacataatagtgaaaaacggaatgcttactctcaaaatcagaaagaaagatgaggagttccacactcaacactttggctcaatattgtactagaagtaatggccaatgcaattagttaaaaaaagagaaagagagataaaaggcatctagtctgaacaagaatctaacaaaagtctttatttacaaacgacataattgaagcaggatatttccctgacctttcgtgggacttgtgacaggggtgacttgtttacccagcctgcagttttcaattccttgtgggagggagtacacaagtgaacggggcaggagctggagtgtgggaattttggaagcagccagccactatggcaggggcaaactcc

SEQ ID NO: 825807 - DNA, 632 bp, Homo sapiens
tgttactgatccttttgaattttgtttattgtaatattttaaaatattccattaaaatattattttgtctgattactgagttttttgtctctcccttacattttacaccagaggtaagtgtcytgctcctttcatactaatccttgccctatttcctatattattacaattactggctttcttgatgttcctggtcaaatttgaaaacaaaaaagtgttttttttttgttctgatcatttcaactgtaaaatagatagggcatgtagaaaatagattttaataaaggtatacatcttgaagttttaatacaaagcaagtaaatgcacgtgtaaccaccacctagatcaagaaagaaacattgccagcatctcatgcaccctcccaataaagatccatttctccttctgaaaggttgacttgtatcctaacatttctggtaattgttcccacgacttatttgattgctgtctatctaagtatgtgttctcaaatattatcttacctggtctatttaaaaaaatgatacaaatagagagatgcacatacaatatgtattcttttatgtctctttattttatttaaaattaggttgtgagatttacataagttgttatagctgtagttcatttaa

SEQ ID NO: 825808 - DNA, 533 bp, Homo sapiens
ttattcttctaataaagtctaggtttaaaaaaatacaaggtgactttactcagaaaagttcacaaataggactaacagattaaatcatgtaataataaggcaaaataatatgtaaataaatatgatttttcagtagtgactttggataatggcgaattatgaaaataacaaaacattccaaatccgggttagattgtttctaaatatgttataaatttcctgtcagtttatgtgtcttatctttgcattctttaaagtccccagtagtatgcctgcattgcaattgataatgttaaatatcaatttaacattttgattgagagagtggaggaaagaagacttttagtctataaaatcaatacaccaaaaaattgcatttgtttaaatcagcaataaacataaaatgtaatttttwaaaagacaatgttgacaatagcctcaaaaactataagaaatctgttacattattgtatttaacaaaatatggaagagcttgttaaataaacttataaaactatttaaaaatctgaaga

SEQ ID NO: 825809 - DNA, 629 bp, Homo sapiens
gggaatgtaaggtagtgcaccaaatctggaaaagtatggtagtttaataaaagtatgcaattataatatgaccaggtattgggctcttgtgctcttcttcttggtaataaaaacttatawttataagaaaatccggtatgctaatattcctagaagcttcattcaaaataggcaaaaactggaaacagatctcagtgggtgaatggttacacatatatactaagcaataatgttgaatgaactcttgatacacacaactttgatgaatctccaggaaatcatgccaagtaaaaaaattcaattcccaaagttagcacgctgtatgattccatctatgtaacatttttgagatgacattttagaaatgaagaaccatttactagctaccaggggttagggatagttataaaagaacaatacacggaaaccttgtgatggaactattctgtgtcttaactctggtggtggatgcatgaatctgtacatcacaaaattgtatagaactgaatacacacacacacacaaccacaaatgagtgtaacaagtaaaacttccaattctggacaagattgatgaattataccaatgtcaatatcctggtgtgctgttgtactatagttttgcaagat

SEQ ID NO: 825810 - DNA, 493 bp, Homo sapiens
accactttttcaaaaacacttaatctaatccatgtctgatgtgtgccaggctctgctgatagcagagaaagcatgttgacactggcctggcagactctatttttagaagcccccactatgattttccatgatgggtagcggccagctgacggatgcacggcacctcagaggcaaagaacggtgtggcgggcagtcactaggtggcagtgccacaccagtttatccccacagctgctctgcagagttcagccagatcagtgctagaggagggctgtgaggtgatgttgtgggaataccctgcagggaaagcccccattctgggttaagggctcttctaagggaagagtgcgcgcacgcgagcgcgcgcgtgtgtgtgtgtgtgtgtgtgtgtgtgtgtatgtttggatgcttactctattctaaatccaatctaaggtagcagatctgaggagscagcatctgtacatttcacccctctgagattctcaagatc

SEQ ID NO: 825811 - DNA, 660 bp, Homo sapiens
ttttaattttcaaaatacagcaaatgaaaattcctacgtagaacaaacaatgacaagaagtcttagcctccagcacttcacagtttcaagctatgtttctagggaagcagaacattcctgaatgtcattgcattattcctcggggagagataagaagcagagtcagaaaactgagccaccaaacccagcgagctgagagagttctcagatgaagatgattccagacaggctgaggagaatgagcacagattttctgggaaggtcattttcaaggtttaccagttaaattttcccacttcaattctaaaaattagtcttagaatgcctcctaattgcaccttgcttgattcagcatgggcagctaaaatatagacttcaatgccaaaatgtcaggaactgaattaaaacacaggtctaggttcatgcaggaggagcacagtgtagtgaacgaagctgtctcaaactcaaaccatcaccgctaagacccaccagtcccctactccataaaggcttcagaacacccttgtagagrtctggaactgacacaatatgttgtgttaaagccggaaaaatatttttatacaggcagaaaataagaaatgaagggaagaaaagaagagttgggtaacaagaaaggatgagataggggagctgaaagtg

SEQ ID NO: 825812 - DNA, 541 bp, Homo sapiens
aagtcttaagagcagcataacatggatttattatacgtaaccttaactatcactgcatcctggtggataattctaggatttttgacctgtagataaagctcttgcctaagtcaggagaagacaatttcagaaactcattattttaggaaatgacgagaatacttctttcaaaaataggtatagctggagtttctagagcttttcccaatactgacattgctctagatctgtctttccttaccaatttcccttcctcctcttccatggctaattttcccatctttatatcgcaagttattatttaattcatctacttgtccctctctgaaggtccatggaatgctaatacttattcatttggtcacttttactagggacagcagagtgggtgttaatgcatactaatcatgtaaggttgatattatttttatttttttttgtagctgaagaaactgaagtttasatagattaaatatattgccccaaaccactcagctagtaagtggtcaagccagaaattaaatccaagcttttccggctc

SEQ ID NO: 825813 - DNA, 534 bp, Homo sapiens
tatatattgcagatatattgattttttctcacataataccaatactaagcatgtgatgtgggtaagattgattagacacactgcataaatgagtaaactgaaagtcgctgaagggtaatattaaagaaaacattagcagataaaatacatgtttcaattgtgcttgttctacacctgtataaaatatgcctttctgatttcattaaaagcagtttcattgcatcagccttgctcagggtattttcacaaaaaaaaaatatgaaacaaaatcaaatttcattcatctgaaatgaggtggggtcctatttattaaaagtacatctctgactcccagggtgcacccaaagctatgtagttcaaagttaaatttcacacaacttgataattctgttagcattgtgactttgaaaacagacctgttttgatgatgactaaggtcgacttcctgaaattgacttataatctctttgggaggatgtgcactatagcagaagtactgraaatctataaacatgttatatatttcatttctac

SEQ ID NO: 825814 - DNA, 577 bp, Homo sapiens
acattaaaggtgatactgatgagggttctgaaagaaaagaggaagacagtagtgcaagctattattgttttagagaacatatatatcgttaccataatgttagtagaaatatgaacactaaaggtgctytggtagggtctcagctgaaaatgaggaacatgttatcagagactgaaagaaaaactgttcatgctatgaagtggcaaatacttggctgaattgtgttctagtgatctgtggaaggtagagcttaaaaataataaacttagatatttagctgaaaagatttctaagctaagtgttgaaggtgcagcttgggttttcccttactgcttaagataaaatgagaaaggagagaaataaagagaagaagaaattattaacagaaaaaaaccagaacttaaagatttagagaattatcagtttatacatactgcaaaaaaatgagaaagtatgttctggaagggacaacaaagatatggctgaacaagtactccataaagagattgcccatggatttaatcagctatgtctccagtggccagcacaggaaaatagagctattcatatgtgatca

SEQ ID NO: 825815 - DNA, 645 bp, Homo sapiens
cattgctattgtgtttttgaaatgcagctagtttaacctatatgtattggggccaacaggcatatgaaaaaatactcaacatcgctaatcattacagaaatgcaaatcaaaaccacagtgagataccatctcacaccagtcagaatagctattattaaaaagtcaaaacattaacagatgccagcaaggctgtaaaaagaggggaacacttatacactggtgattggggtgtaaattagttcagcaattgtgaaaaacggtgtagcgattcctcaaagaacttagaattaccattcgacccagcaatctcattattaggtatatacccacaggaatataaatcattctaccataaagacgtatacatgagtatgttcaccacagaactattcacaattgcaaagacaaggaatcaacctgaatgttcatcaacagtagactggatcaacaaaatgtggtgcatatacaccatggaatactatgcagccattaaaaaaagaatgagctcatgtctttgcaacagcaacaaggaggccattatctaactaagcaaactaatkcaggaacagaaaaccaaataccacatgttctcacttataaatgggagctaaatgataagaacacatagacagaaagaggggaaca

SEQ ID NO: 825816 - DNA, 606 bp, Homo sapiens
gctagacactaattaactctcctaatgaaattaatgcattttatatgtattaatgtttatatcacaagagacacactgtcaatctagatttcacaaaggaatgttacataccttccaactattgagtattggaaaaaatttctaggatctctatctcatcctaaactattctccatctggctggctgtggtttggcacattggcttcctaatctccaaatctcttcaagactacgaaggtcatatgaaagcctttgtactttctgccccattggacctggaatgttatttgtttgtttcttccataacttgcatctccacattcttcatgtattaacctttgttttacctgctgagagaaactgtctttgaccagcccatccactgcaggcctctgaccactcatttctcatctatgggccactgctgtcatgctctttgtagccattggggttcatataataatctgaagttatattgcttatttatttatcyattcatataacacttcttttttccactaggaaatttgcttcactaaaataaggaaattgcctggccttttttcttttttttaacagctgtatgcttaacacaaaatatgtac

SEQ ID NO: 825817 - DNA, 593 bp, Homo sapiens
cgtgtgtgcatgtggatagataaatagacagacagatagacagattgatacatagcaataatccagatagagactctggtagcttggatctagattgtagtggtacaggtagtggtagagagagataaagagagacagaaagagagagatttcttttaagaaaccaggttataaaattgtgggagtgggcaagttcaaatctgaagggaaggctagcagggtggaaattcaagtatggattgatgattcagttttgagactgaattttgcagggcagcaggctgaaaattcaggcacagtttctatgttgcagtcttgagaattccttctttgagcaaccttggtccttgtcctaaggccttcgactgatgggatgcgactcactgatgttatgcagaataatctgctttactcaaagtccattgattttaaaaattaatcacattgaaaaaatattttctcagccacatctagactttttygaaaaagcaacaaacatttttggtgtttaacagaactaatgggtaccagggaccagtaagatgccatttaaaattacccatcacatcttgatatattatagattattctaa

SEQ ID NO: 825818 - DNA, 477 bp, Homo sapiens
aacaattataacttactataaaacaccgaacaaagaaaactctgtaagtcctggaagacatttcaaaaagaaagcatgagagagagatatccaatgagcacctttagtgagctgagccagatacatacccctggacttttgaatcatgtgagctgttattttccgttttccctttgagaaggtttgaatttactctctttaaatgcaacttagagtttagaccgatatgatattttgttttgataaatacagaattgtatctacatacatctcatcatgctctcatgtagaaaaatgattaacttttttttctcataatgaactgaatatttgaatgaggaatttcaaagtcttatgcgcatatatrtacagagatatctatcaaacagttctggaagattatattttacacctaacttttcacaaaatagagatttttcacaagtgtcatgtaatgtcctgcaatttcaactgctg

SEQ ID NO: 825819 - DNA, 628 bp, Homo sapiens
aaaccaaggaagaagagcctgtggcctgtgctagtacatccgagaagatccaaacttaacctgaagggcccccatcagccacacagcactgcaggcctctctaatcctgactgtctagatgtcaataatgtgaggcctaaaaacgaacttctcagtagggtcttagaccacatgaaaaacagcatgccatctatattccctccttaattcccctatctcatgacatcctatacttgtctgtacctggatatgcaaaagcaggcaggcaacatgtttacacacaggtgtgcacgcactctttcgctcacgctcacacacacacacacgtgcatgcgcgcctggtgccataaagaatcagacatccaaatgatgccccaatgagatgacagcatacacaggaactcctcacagatgcccctctacccaggccgtgttcaaagagtctctgtttttccaactgcaaatgcattagcatgtccccttgattactaacagrtgtgcgcacaccatggaaacctgcaatctcaggaggccgccacagaggtgggccagggtctgcagctacactcagtgactgcaggtgggagggtggccaactctcaaatgccgtgtcaaggaacatctcact

SEQ ID NO: 825820 - DNA, 535 bp, Homo sapiens
tgagaccctggcaaagaggctggtcagttcctgttttgagaagctgagtgtacaactccaaccacttcccttattgggctgtcacattctgggccactacatctgccgtaatcactctagggccaggaaccagaaaaaaccaaccaaccaaccaaccaaaccagaaacagccactacgccgtggagcccactgaacttgttcacatcagccaatctaaaacttgttcaccatggcgtcacctgttcctttctgtaaaaaccacaataaaatgtgtgctcacagttgcccccttcaccttctacctcgtgactgaccccagtgcttctcgagtggtcctgtgtggtgtgctgtgtttgtccagggaactgtgagcataacaaactgtaaaactctttccattttctctctcttgatctgcatctggcctcaccawctcatacaaagtaatatagttaaaatataatggtacacaacatattgattttagtcaagaaataatattaagatcaactactgtttcttaattattatgta

SEQ ID NO: 825821 - DNA, 535 bp, Homo sapiens
tgagaccctggcaaagaggctggtcagttcctgttttgagaagctgagtgtacaactccaaccacttcccttattgggctgtcacattctgggccactacatctgccgtaatcactctagggccaggaaccagaaaaaaccaaccaaccaaccaaccaaaccagaaacagccactacgccgtggagcccactgaacttgttcacatcagccaatctaaaacttgttcaccatggcgtcacctgttcctttctgtaaaaaccacaataaaatgtgtgctcacagttgcccccttcaccttctacctcgtgactgaccccagtgcttctcgagtggtcctgtgtggtgtgctgtgtttgtccagggaactgtgagcataacaaactgtaaaactctttccattttctctctcttgatctgcatctggcctcaccaactcayacaaagtaatatagttaaaatataatggtacacaacatattgattttagtcaagaaataatattaagatcaactactgtttcttaattattatgta

SEQ ID NO: 825822 - DNA, 622 bp, Homo sapiens
gctgataaagttacgccacaggcaaccctccgtgctctacagggactttggaagccacatgctgaagacatgagagccacaggcgaaagaaatctgggtcctcacatattacttgggtgaggcatccactcatcagcaatgcccgttgtgaactttatgtgaggaaaaacaaacttctatcacatctgagccattacacattctttagtttgtttgttacaagttctaggattaccttaacaaatacatctgtctcaatcatcatgaacctatcattcccatagcagtgcctggtacacaataagaatttatgtctgtggaaactctagattttactagaaatcagagcctggtgttttcacagactaagagtaatcattgacatgcaggagacagactctggaactctgcagaagagtttagttgtctacatttctgaaacatgaggatgccaccaggagaggaaatataagatattttttcccaatttcagttctcctcagatttcatcagtctgatcatccasactcagaattatctgaagttatttcattcagagacaatagaaaccagggcatttaagtatgcagagagcaattacattctgagaagaaacctctga

SEQ ID NO: 825823 - DNA, 624 bp, Homo sapiens
agtgagctatgattgcaccactgtactccagactgagtgacagagatagaccttgaaaaaacaaaaaagaaaagaaaagaaggaacgatgaaagaaagaaagtaagttagttccaagatggccaaataggaacagctccggtctgcagctcccagcatgatctatgcagaagatgggtgatttctgcatttccaactgaggtacctggttcatctcactgggactggttggagagtgggtgcagcccacgaaggatgagccaaagaagggcagggcgtcacctcacccaggaggtaaaaggggttgggggatttccctttcctagccaagggaagccgtgacagactacctggaaaaatgggacactcctgctcaaatactgtgtgtttcccaaggtcttagcaaccagcagacaaggtgattctctcccatgcctggctcggtggctgccaagcccatggagccttgctcactgctagcacagcagtctgagatcgatctgtgagatgacagccyggctgggggaggagcatccgccattgctgaggcttgagtaggtaaacaaagtggccgggaagctcaaactaggcagtgccaaccgcagctcaacaaggcctactgcct

SEQ ID NO: 825824 - DNA, 624 bp, Homo sapiens
agtgagctatgattgcaccactgtactccagactgagtgacagagatagaccttgaaaaaacaaaaaagaaaagaaaagaaggaacgatgaaagaaagaaagtaagttagttccaagatggccaaataggaacagctccggtctgcagctcccagcatgatctatgcagaagatgggtgatttctgcatttccaactgaggtacctggttcatctcactgggactggttggagagtgggtgcagcccacgaaggatgagccaaagaagggcagggcgtcacctcacccaggaggtaaaaggggttgggggatttccctttcctagccaagggaagccgtgacagactacctggaaaaatgggacactcctgctcaaatactgtgtgtttcccaaggtcttagcaaccagcagacaaggtgattctctcccatgcctggctcggtggctgccaagcccatggagccttgctcactgctagcacagcagtctgagatcgatctgtgagatgacagcctggctgggggaggrgcatccgccattgctgaggcttgagtaggtaaacaaagtggccgggaagctcaaactaggcagtgccaaccgcagctcaacaaggcctactgcct

SEQ ID NO: 825825 - DNA, 524 bp, Homo sapiens
taaaacattttgaaactggactcaaattgtgttcagtgtgctaaaccagggatgctgtgaaatgaatgtaaattttaacaagcctgttctgagctttagacttctcattagtgcccctttcccaagtgtaatgtgcagaatgagccactagagggcaatcattttctttaggaaaaagatgctgtttgaaagcactgtacattcatttaaccacaatgacaccatgtctcacacccaggagaatggatataatcaaaggaaaaggcaatatcaagtgttggaggggacaaggagcaactggaaatctcatatgttgctgatggaaacatatggtactgccacttggataacagtttgcagtttcttaaaaagttaaaatcatgttacaataaaacccagcaattccacgtatatgaaactacccaagataaatgaaagcatatggtcaattaaratatgttcatgaacattcatggcatcacacataatagacaaaaattggaaacaatccaaacaaccattag

SEQ ID NO: 825826 - DNA, 624 bp, Homo sapiens
ctcctttttactattctcagcatccctacttyagtcaaggacctagtcgtttttcctttctattttattgacctatttacttcactgccttcattcttgttcacaacacatttgtgtaagtgatatcttggtaaataaaaagcagatgattcaaaagagattcatttcagtcctttcagtactctctcaagccttcacaatgaaacctaacttgttagcaaacatacaatatcatttatgtcccagcatacgactctttgtctgtcaggatgtctccattcaccactcacactgactcaaacttcttgaactatttagagtcttcttgatgtactctaatttctctggcctttgctccactttttctcctgcatagacagctaccacctcccaccgtcattatcctgggtgacttctacacatctttcaagactaatttccctccaaagccttctctgactgccaggggtgaatcaggtaaccttcatttgtattatagacatcagcttttgccttcacttatactgggttatgatttttgttgttatttgtttttttactgttcattctcctcaatgaatacattgtcttccataactgcatcctatccctgtattacaaata

SEQ ID NO: 825827 - DNA, 591 bp, Homo sapiens
attcagcatgactcacagagcagtgctgcagaaatagaggtggatggacacattctattttttcattggtacagggactaggtaaggctaattactgaagacacagaaatataaatactaaattttatgataagaaaataaaacatactagaaacaacatacattttatttataaaaatccaaaacattgttaaatgaaacaatacatgaaagataaaaataaaaaatcttggccgggtgtggtggctcaagcctgtaatcccagcactttgggaggccgaggtgggcagatcacgaggtcaggagatcgagaccatcctggctaatactgtgaaaccccgtctctactaaaaatacaaaataattagctgggcgtggtggcaggcgcctgtagtcctagctactcgggaggccaaggcaggagaatggtgtgaacccaggaggtggaacttgcagtgagccaagatcacaccactgcactccagcctgggcaacagagcaagactcygtctcaaaaaaaaaaaaaaaaaaaaaaaaaaaaaatcttagtggggagatggtagatgaaatgaaatggtgaaatgactggtt

SEQ ID NO: 825828 - DNA, 665 bp, Homo sapiens
aatatccccatgtaaaagaataaggttggacccttatcttaacccacatacaaaagttaaytcaagtggatcaaagacctaaatgtaagatttaatactacaaaactcttagaagaaagcataggggaaattcttcatgatcttggattaagcaatagattcttagttatgacatcaaaagcatgagcaaaaaaaaagaaaaaagaaagataaattccaccatattagagttaaaaacttttttgcttcaaaggaaactataaagaaagggaagaaacaacctacagaatggaaggaaatatttgcacatagtatatctgatcaaggatgttatccagaatcatttaaacaatctaaattcaatacaaatcccccaattaaaaatgggaagagaatttgaatatgtatttctctaaattagacatacaaatgattaataaatatataaaagatccttgatgtcatctgtcattagaaaaatataattcaaacccagaataatatattgcttcacactccctataaccatgtgaacaacgtagcctcaaaattccttcaccagcatacatcatctaatcttccacaattcacttcagaacttccctaccagggccatgatctgtcagcagtaatagcactttccaccactgtgaggttcataaatt

SEQ ID NO: 825829 - DNA, 618 bp, Homo sapiens
caacctttgaaaagtgcgtttattctatcttaagctattcttcctagcaaacttttattttcatttaaaaatttcataagcaaaagaatattttccacacctttctccaaacttctttttaaaatcttagcagattcttcacaaaaagaatagtactttatctctatcttagcctcacatctaactttataatacttaggactctatactgaaacatttgtttacgctattctacaaagccagtttcttatttttttctctagatctcacttaatccccatatcttaggttttgaccatcccctttccagagttttccagcatgatctccctattgggcaattctcttctgcctttccatgtgcatgggtatccttagtatttctctttctcgccaatttgcctttgaaatacatgatgtgactgccattttcatttctttactatccaatcttcctgtctctttccgtttaacattgatcaattactaaagagagaaaccaagttttgtcgttctgttttatcaaattcttgaatactgttctcaacttttattcagatggtacatatgatgragattgtgagtataggaggaaagccttcatgtggatgaaaccct

SEQ ID NO: 825830 - DNA, 540 bp, Homo sapiens
agaaaggatcccaaaaagcagtggtttgtgtgggaaagagagtttctggggtgccagttgagttggtctcccctgtgtgagacacccatggggagccatgggcggcctctgaggagaaaagtctcctttttgctttcatgtctttatgccccgagagcataaccgctcagcggcattccgcaggtagctcagggagataacactcccttgaagcagtggagtataatcaaacatcttggctcctcctgaaacctgctcccacccgttttaagtagtttagacacatggctttgctcaaggaaattcacagaaaccgccactgctatacatcttatccaatgactcacgagttctcctccactgattaatcattttcctcatcctttcctccccgtcccatgtgccctaagaacaaagagcttgtaaaccaataaattgggcggagcctgagakctctgggccctgagcaagcctccgacactccggtcccctggacccgcgttttaaacgtttattctgtctccttctaactcctttgtc

SEQ ID NO: 825831 - DNA, 580 bp, Homo sapiens
agttctcctccactgattaatcattttcctcatcctttcctccccgtcccatgtgccctaagaacaaagagcttgtaaaccaataaattgggcggagcctgagagctctgggccctgagcaagcctccgacactccggtcccctggacccgcgttttaaacgtttattctgtctccttctaactcctttgtctccgccggactcggggtacccgctgggtggtgtggggctggtttccccaacaggtttgtgcaaagcaggaggtacactgaaagacatacaaagagcatcacatagcctgaagcataatgtgcatgtggtggcgtggcttggcacagattctaagatgtgaaagaaagacctcagagacgtagtagcagcgtctttttaaaaatatggaattaaacttaaccaccagggtaatcattacagatggtaattccttcttagaaagtctactcaaatttttgtatttaatattattttcaaaaaaktgatgcaattaattgcagtattttgcaaataaaaactgatcatcttgctttatacacaggataaatggactttgaaggagacattg

SEQ ID NO: 825832 - DNA, 589 bp, Homo sapiens
agttctcctccactgattaatcattttcctcatcctttcctccccgtcccatgtgccctaagaacaaagagcttgtaaaccaataaattgggcggagcctgagagctctgggccctgagcaagcctccgacactccggtcccctggacccgcgttttaaacgtttattctgtctccttctaactcctttgtctccgccggactcggggtacccgctgggtggtgtggggctggtttccccaacaggtttgtgcaaagcaggaggtacactgaaagacatacaaagagcatcacatagcctgaagcataatgtgcatgtggtggcgtggcttggcacagattctaagatgtgaaagaaagacctcagagacgtagtagcagcgtctttttaaaaatatggaattaaacttaaccaccagggtaatcattacagatggtaattccttcttagaaagtctactcaaatttttgtatttaatattattttcaaaaaagtgatgcaattaattgcagtattttgcaaataaaaactgatcatcttgctttatacacaggataaatggaytttgaaggagacattgttaggaaaa

SEQ ID NO: 825833 - DNA, 539 bp, Homo sapiens
gacaaagtgccacctaaacattattgcacaaagaactacaatacaaaggttatgaaaaacaatatgcactaccartggtaataagtataatagtcacaagccttatttttaggaagctcatagtctttaaatcagtattctgcttttagccaataatacaatggaggtacaaagactttttgctctattattcacaaaagcaaaaagttaaaatctaaatgtttgcttaacattaatccttctagactttctattcatgcttctctctatgaagtgaatactcctgtactttcaaacagcataatggacctgcttaaatttacattttaaatattttatgttttcttgaagattttaactgttttcaccaaaatgcccaatttcattcaccatttctggtgttcttccattacttctcttgccacattttattgcaaatttttattttcagttacgttctcccattggaagaatgtggagaaaaagtgactttatttctaatttactagattcctaccacttattactacgttgggctt

SEQ ID NO: 825834 - DNA, 641 bp, Homo sapiens
tggcgtccaggctgtctgcaccaggaagcacctgcaggcccataccaagccaccctcagcatccccagcccatctcccatgctcgttggtgctcaaagtccagaggcagccaaggcagcagtgggctggtgtgtcagcacttccctgagtgcacacacacccggccaggttgtgacagtcacaactttgctctgccctgaagtgggtgccaggagcaggaagagtcagggagcaagagcaagcactttcaaggttgcaggggcagggggtttcctgggtccccaagagctcagggatgctggggtggctgtggctgtgccagggagcacagactcctgccccgccaactcaggaggcagggctctcgcctgttcccagctcccactggttccacagagtacacagccccacttgtgcctcccccactgcagccagtatcctcacagtggccgctccatatgggccattgtcaccatcactattgttgaagttcataaatatacaattcttgaaaaaagcaattgtagttttgatattttcattaacttctttgtactagataaaatgtgaattaagaaggtgctatgatttgaatgtcccmtccaaatttcagctcatgttgaaatgtaattgacattgta

SEQ ID NO: 825835 - DNA, 614 bp, Homo sapiens
gggtttatttctgggttctctattatgcttcattgttacatgtgtctatctctctgcccatgccattccaaataaaccatagaatwggtttgtatatttaattaattaattaattaatagtgaaagaaattgcattaaacctatagatcaatttggaaagaattgaaatctttgttgggtcttctaatctagctatgtgatatgtctctccatttatttagtttttaaaagatttaatctgcattttataattttcaagatatagatcctataaaatattttgtcaaatgtatatttaaatattttaatttttggaggaattgcaatggtattgtattttttcatttcagtttcacatgttattgttagtatataaaaatgagatttatttgtgtgtgttgatcttgtatggagtcattgctgaattcacattaattctagaagtactttttggtacatttcttgaaatttctacataaacaaccatatcctctgcaaacagaaataattttattctttttcaatctttagaattttatttctttttctcaacttattgcaatgactaggacctctagtactatgttgagtaagaatggacagaatgaacatcc

SEQ ID NO: 825836 - DNA, 646 bp, Homo sapiens
aaaagcaaattatgctagaatttttatagacccttcccaaaatcacaagttagggaaagacagaaaagtaagggtgaaaggaacagagcctgagaaatcgctgttagaatgattagtgcatatattgcccaaacctttaatggtttttatggctgtccttcagaacgccccaccttaaaaaagtctttattaaacttagagcatttaagtgtattttattcttttcagaattggataattttcttctcttattctttttttttttttactgtatttttttggctgggaggaggttgatgccaggagttgtatttgaattgaatctttggtaataaggtttaatatgattacttgcttgacaatttctgttcaaaggagggggctcttctcaaaacactcagttctttctctattataaacatattttgagacattaaatgaactgggaaagtttccaggacaaggtctggagtttaagcacatatgttcaaattctagatccactatctttaaagtaaagcttaayatgggcacaatttcgaagttctggctcagtttccctttttgtaagatgaagataataataatattgacactatcaggctctggtaaggaccaatggactcaatatatgtaaaatgtttaa

SEQ ID NO: 825837 - DNA, 587 bp, Homo sapiens
ttgggaggccatggcaggcagatcacctgaggtcaggagttcaagaccagcgtggccaacatggtgaaatcctgtctctrctaaaaatacaaaaattagccaggtgtggtggtgcacacctgtaatcccagctacttgggtggctgaagcaggagaatcacttgaacctcggaggcagaggttgcagtgagctgagatcatgccattgcactccagcctgacaataagagcaaaactccatctcaaaaaaaaattgtttttaattaaaaaatcagccaggatggtggtgcacacctgtagtcccagctactcgagaggctgaggtgggaggattgcttgagcctggaaggttgaggctgcagtgagccatgattgtgccactgcactccagcctgggtgacagagggagacctggtctcaaaaaaaaaaaaataaaaataaaaatagaatcatcttcttgccgacaaaatagcaacagtgagcactagaagacaacagagcaatgagaaatttttagtagaaattattttcaaactataattccatgttcagctaacccttcatgtgtaaagatggaatgaatgaac

SEQ ID NO: 825838 - DNA, 625 bp, Homo sapiens
aaactcattttaattagtctttctagaaaaggtgccaatytgaagaatttcttaaatgagtaaccacagcataggttataatgcataaaatattgaaataatccatgagtccacaaatacatttaaaaacatttaaaaattaggaacatcagaagatgacgttcttttatacaaatgagtgccaacaaataaatatagaaagaatgctagaaactgaaaagtcatcatcttgaaacatcataaaagtaattatttcagacaggattcattgatttatgctaataacattgtgtgaaagatcgggaacaaaatactctaacctaaaataactgcctctacagattacttgttagttacaaaaagaaaaaggtacatttacaaagtagaaattttgcagacatctccttaatcaagagatcaaaattactgtcaccaaatataggagaacctgagatcacatgcttcctgatatgtacacgcactgtgaaggatacaatatcacctatgcattattcctattgtaggtatttgacctgaacttaatcatgaagaagaacccaactcttaactgagaggcattttgcaaagcctctgagatggatactttgaaaatagcaatgtaatg

SEQ ID NO: 825839 - DNA, 494 bp, Homo sapiens
aaaacccttaggtctcatgagaactcacttactatcatgagaacagtgtgaggtaatctgtccccatgatttaattatcttcacctgatcctacccttgacatgcggggattattacaattcaaggtgagattttggtagtgacacagagccaaactatatcaccatctcatctcattgtttcctgcccttggactgggatttagataaactcccctcagtctcagttcttcagatttggattgaattataccaccagctttcttgggactctggcttgccggcagacagcagattgtgggacttttcagcttccataattacctgagccagtttctcataataatacatatttttggaaaactctaatatagattttggtactgagactgcctctaaaggaacatattaaggatgagttttctgaattcattccaaggtttatggaactggctctstaatctgattagatttaaagatactggactctatttc

SEQ ID NO: 825840 - DNA, 584 bp, Homo sapiens
ctagatgcccatcaatgatgcactggataaagaaaatgcagtggatatacaccatggaacactatgcagccattaaaaaaagaatgaaatcatgtctttgcagcaacatggagttggagggcatttattctaaggaattaacacaggaacagataatcaaacactgcatgttctcacttataagtgggagctaaacattgagtacacagaaacaaacaaaaaaacgagagacgctggggcctacttgagggtggggcatcagaggagactgaagataaaaaaactacctatcaggtactatgcttaccacataggtaacaaaataatttgtataccaaactccaatgacacacaattcacccacgtaataaacctgcaaatgtacccccaaacttaaattaaaaactgaaagggaaaaaaatacaaggaggtggtaagtcgtagttccatatgggcacagggcaaaatcagaggttattcatgcagatgcaggamccacagatttatcaatcaatgaaacttatgcctaacaaaaggagtacaaagttttgatttcacaaatcttgtcaacaaaaatggaattt

SEQ ID NO: 825841 - DNA, 669 bp, Homo sapiens
ctctctctcatgttgattgtttcctttggtgtacagaagctttttagtttgatatagtgccatttgtctttttttgtttctgttgcttgtgcttttgaaatcttagycataagttttttgcctagaccaatgtcctcaagtgtttcccctatgttttcttctagtgattttatagtttcaggtcttatatttaagtcttcaattcattttgagtttatttttgtatatggtgacagacagggatcatttcattcttctacatatggatatccagtttttctaccatctctttttgaagaggttgtgctttcctcaatatgtattcttggtgcctttgtcaaaaattagttggctgtaaacatatggatttaatgctaggttctctgttactttccactggtctgtgtgtctgtttttataccaatactatgctgttttgtttgctgtagctttgtagtacattttgaagtcaggtggtgtggtactttcagctttgttctttttgctcagcatagctttggctactcaaggtcttttatggtttcatacaaattttggaacagtttttaaaagttcctgtaaagaaggtcattgatattttgataggaattgcattgaatctgtagattgttttgggtgtataatcattttaacaatgttaattttttt

SEQ ID NO: 825842 - DNA, 643 bp, Homo sapiens
gatttcttttttttttcacttaaagtctgttttttctgatataagtacagctgtttctacatgcttttgatttccatttgtgtggaatacctttttatatcccttaactctaagtctatgtgtgtatttatggrcgaagtaccttctcacaggcaacatatggttgagttttttaaaacatctattcagccagtctgtatcttttaaccgggaattcaaactttacaatcaaggtttttattgatggaagagaacttactcttgtcattttgttcatcgttatctaattattttatatatcctatgttccttcatttatgtcttgtgatttatctttgtgatatggtggttttctgtagtaatgacattctccaggtgtcaagatgatgttttactttgggacctcaattttctgatggatccaagaaaagccattgattttcaatttgatcagctttttattgttgttttaaggatggaaatgattggaatgtgactaccactttacatatcagaactgaaatgggaagcttatacattaaagttttagaggactcactttttattctttttggaatcttttttgtgtttttttgatactaatttacaaaattcgtgttttttagtacggattagtgacact

SEQ ID NO: 825843 - DNA, 530 bp, Homo sapiens
taattttgtcattttcagaatattctataaatggaatcatatagtaactaaccttttgtgattgacttttatcatcatgcataatttggtatctaggtaatactagcttcataaaatgaattgggatatattctctactcttctattttctggaagagattttgtatagactcagtgtaaattcttctttaaacatatggtagaattctccaatgtaatgatctaggcctggagatttctttttcttggagttttaaaattacaattcaattttcataatagctttatggctattcaaatgatctacttcatattggatattgggtgagttgtgggagtttatgttttttttaagaacgtgtccattttatataaattgtcaaatttatgtgtgtagagttgttcatagagttttcttattatgcttttgatgtctgcaggatctgtagtgatatcccctattttgttcttgataytggtaattggtgtcttctctctctctctctctctgtctctgtctctttttggtc

SEQ ID NO: 825844 - DNA, 646 bp, Homo sapiens
agcataactaagcctactgagttactaagtcataaagaaagtagaaatatagatgtttgggaaagtaagggatagcaggagtgtgkggcatcttaaaaatgccctagtatcaaattattgatgcaaagcagttggctactgtcttaaaaggaagggacatcaaccatctagacaagatcaaatatcaaagtcgatgggttttgcaaactgatcatcttgttttcctcttaccaaggtaaagcaaggtgcttcgacacacctgatagattacagactgtatcaatatcactatatgagtaatgttgatctccataggatgtgtcaaccttcaaaaacattttaacaggtttatgtaattgtttgctatctcgttgttgggcagtatggataagaaaaagtgaatatttagctctaaatcctttgagcctcacttccttcaaaatacctgtcagatcatctgcaaaaattcactctaattgatcttaagacttaatggcaacatgttgagaaggagaattgaactgggttcccatgctaaatgtgtttaaagtcacttctctgatttattttctttctttcatggacagcaaattcaaacttaactatttgtacgtatcagtgaataccttttgttatgggtgtaaga

SEQ ID NO: 825845 - DNA, 588 bp, Homo sapiens
ctttcaatttcagactgtgactcgtattttaggaagagctgatctggcccaaatgcttccctttacttatgggttactggggctcagagaagacaagtatgttaaaaaaaaatcaackggctttgttgattatctaaatctttaatctagttctgatgccagtgcagggtactgtgcaccatagccggttattagtaaagcaataatgcagcaccatcatgccactaaacacgtttctgttctaggagcataaactttcccaggcgttggcatcccatgacttgttcagttacttggaagcagagaaggaagaagggagctaacagtcaccaagaaactggaaagctctggaccctgtcctagatgcattgtgttatcttaataattaaccatcacacaaaatcaccaagatgtggatattattatctttttgaatacatgaaaaaaagtgaggctcaaagatttaagccactttttctaggccacacagatattaagtaacagaccctggtttgtgtgactctcaatcctgggttctttccataactccattaacttcatactgcctgtcatttccaagctcccaat

SEQ ID NO: 825846 - DNA, 598 bp, Homo sapiens
ctgaatagattaataaaacataaatcatacattcaacagggacaaaaatgcaaaagaagactattacaagcaaatgcagtcagttctagcaacatcaatagtgttaacacatattgaaccttattatatgacatgcacattgtataaataatcaaagtcaaatttcacaatatcattgccattgtagggatttattactctcttattacagtcgatgagaatgacattcaggtaactgagtcacataattggctaggagtcacataattaataggttacctagtcaatttgtttctactacttgccccatttcttgaaaaagaaaggagaactcaagaagaataaagttaaaaagagaagaagaaacaatatgcacaaattaataaagatatgaaagtaattggtataatctgggaaaattgagtacttctatgtgactggggagtggtggtgaaaagtaatgtgaaaaagaaaagacctacaaagatagaaacattgaaaaacgattacttaaacacaaattctgacatatgaaaaaaagatattctgaaggctccttgagttgtgactctacctgaytaaatataatccactaatt

SEQ ID NO: 825847 - DNA, 599 bp, Homo sapiens
tgcataagtaacaaaataaaaaagagatatattggtcttcatcagaattaaaatcttctgtgattcaaagtgcatcatcaaaaagtaaaaagamaaaccaaagaagggagaaaatttttgctagccacataaggatctaatattcagtatatataaaacatgttttaactcaataataaaaaggcaaatatctaagtaaaatggccaattacttaaatgtacatttctccaaaaatgctataattataaccaagaaagacatgaaggtttgctcaactcctttgttattagggtaatgaatatttaaacaatgatggagttacatttcaccaatctaaaatgtgtattgttaagtgaaaaaagcaagtggaaaaggcaaaatactgtataattccatttacagaacactctggaaaagacaaatgtacaaaggtagtaaaaagattggtggttacaagaggcttgggagagagaaaacatgaatatgaattacagcagttttcttttcttttcttttctttttttttttttttttttgagacggagtcttgctctgtcgcccaggctggagtgcagtggtgtgatctcggctcactgca

SEQ ID NO: 825848 - DNA, 599 bp, Homo sapiens
tgcataagtaacaaaataaaaaagagatatattggtcttcatcagaattaaaatcttctgtgattcaaagtgcatcatcaaaaagtaaaaagaaaaaccaaagaagggagaaaatttttgctagccacataaggatctaatattcagtatatataaaacatgttttaactcaataataaaaaggcaaatatctaagtaaaatggccaattacttaaatgtacatttctccaaaaatgctataattataaccaagaaagacatgaaggtttgctcaactcctttgttattagggtaatgaatatttaaacaatgatggagttacatttcaccaatctaaaatgtgtattgttaagtgaaaaaagcaagtggaaaaggcaaaatactgtataattccatttacagaacactctggaaaagacaaatgtacaaaggtagtaaaaagattggtggttacaagaggcttgggagagagraaacatgaatatgaattacagcagttttcttttcttttcttttctttttttttttttttttttgagacggagtcttgctctgtcgcccaggctggagtgcagtggtgtgatctcggctcactgca

SEQ ID NO: 825849 - DNA, 532 bp, Homo sapiens
tgagtgaaattctctgaagacagaaaaatctgtatcttggaaatgtatgccttaatcataaygtaatattctcaatcagctgcactgcaaatctaattcttcaatccagaatgattatatatttatattttccatttgtgttagtctgttctcacattgctataaaaaacaaacaaacaaacaaaactggccgggtgtggtggctcacgcctgtaattgcagcactttgggaggccaaggtggacggatcatgaggttaggagtttgagaccagcctgaccaacatggtgaaaccccatctctactaaaaatacaaaaattagccgggcatagtggcgtgcgcctgtaatcccagctactcgagaggctgaggcaggagaatggcgtgaacctgggaggtggaggttgcggtgagccgagattgcgccactgcactccagcctgggcgacagggctagactccgtcaaaaaaagagaaaaaaaaaaaaaactgagatcatgcaatttataaaggaaagaggtttaattggct

SEQ ID NO: 825850 - DNA, 620 bp, Homo sapiens
tgccctccttaacattctgctgattgagatctcccttttctactaaacttcagcaatggcccagataggggctgtagtgccrcagctgtacagttttgagtgatgcctgcatattgtgcagaactgtcagtaagtgaggctctagccttctcttcttcaactggttgtagttgaggccatgatacatgcttctagagagaaggcggtgtaatgggagtggagaccatgggtatttggacactttatgtatcttatttgtgcctcctcagcctttttgggaccagttttgtatatactagtctcatgtgatgatggtgctgtgcacatccaactttatgtcttggtatgacagacaatgcccagttcataatgggcagctgaggctgcctggtaacttaatggcccacagtcatgcatttcatttttgttaagacccagtgacaagccaagagctgcttatgaaaataatagtagttatctgtggatgatggcagggccttgctgcaaaatctgaagggcctcctctgaattcacctgtaggtatcactggtaaactgggctctttcctcacttttgattagttgtacagaaagaacatttaattgaaaaagacacttagg

SEQ ID NO: 825851 - DNA, 594 bp, Homo sapiens
tcttataaattggctttgatggagcatttttaataaggtatctaagatgtgacttttcaaaaagcctctcaaactcaaccaagtatttgctgtgcctgcaaataactacatgaattgggagaattcttctcatcttgagatcacaagattacttggagttcctaggcctctcaaagtaacttttcctgccacaggtcagaaaacctgcaaagtaactgcatagagaaggtacaaagcccgtctttccaggaggattttattgctctataattcaacctaaattcctcaaagcaatctgcttatagatgaaaatacgctattccaggcaaagccttggcaagataaccagcatctccaattgtgtcccattaaaaaaaagattattatcgattatatgcaaataacttatattgctgtatattaagaatattcagaaatagctttcattttttggagaagtacaggtaragggaaatatgcttcaaatttttctcaagagtattctgtactcaattgttaaaaactgtaaataacttttagaaagtttactctgaaaaacaaaacgaaaagagtcatcaatgtttcaaacaaaaa

SEQ ID NO: 825852 - DNA, 570 bp, Homo sapiens
ggctgatatttaaaaagactatatttagttatgtatgsctgatattactattgtcaaaaaagagtaacatttaccttgttttatcaaggcaaatggtggcaggcctgaattcaacaatagagttgtctctaaaagaaagacaaggggcttgcctcgaaaaaattttgtttaaaatgctctttctctgtttgttgctaacatctcataaatcttgtacaaatgtctctcatttccccagaataatttaaagaccattatactaaggatttcattacttgagtagcagactatataattaatacatttaagtagagctttctatttataagagcagaacacaattatcaacaaaagaaggagaaaccagtaaggcgtatctcctctatttatttccccggaaaaactccagtttcatttaaattgggaaatcatcttcctttgcctttcactacacaaatgccacagtccacgtagttagcatggaatatagagttgctctttatactaagttatatcaaggtaaacggtggcaggcctgaattcaacaatagagtgaaaatcttttaggat

SEQ ID NO: 825853 - DNA, 667 bp, Homo sapiens
ctttatgcaaaataatggaattgcccaatcgacctcagagagaaggcagggggcaactggtcttgctcctgcagatcccacaacaggctctgagctcagatgcacaggctgtggccccatccttggcagatgtggtccagagaaggagcaggcccaaccatcggagcatctgtgcttccaagggagacacgcagaggtgtctgtgtatgttccttccctgctggctgctgctctcagagtagaaagttcctaaggctccagaaagcagggaagggaaatgaggaggcgagagattgaatgaaattcagcgagaatgtactaaaaaaaaacaaagttggaagtggcatgggaggactgcctaagattcacaagggtgttaaagacataagcaacagttagtagtgttgtaaaattctaaaatatccttatttgcggtacaactgggaatatcagtgtaggtacagggcatggaggttttactcttctttttctttatgacaccataacacagtgtttaagaaaatgggctttgagggaaaaattcttctgttaaatgaactttcttaakaacaagacagtgtggtatgtgcacagagatagaaaaataaatcaatgaaaaaaataagagagttaaaacacacacacacacacacacacacacacacac

SEQ ID NO: 825854 - DNA, 640 bp, Homo sapiens
tattttcctactttctctaataaatctaacctatctctagctacggctgtcttggtaaaaattcttttaccccatgcactgctgtccattgttcctctacattttagtggcccataaggggactctattgtacaggaactctctctcctcacaaggaactccctcccttctctctctttccctttccctattttggaccctcattgaagagtgtctaagcacagagacaattgcaggtttctggccacgactatactctgggactgaatggtgggactgaagggtccccatgtggaagcaactgattgctgctgcctggttcgggtgagtgacctgaatccttttctcttttcagtctttcagtggccatttactagtatctctttgacaattgagggtaactggccagggtcactctccggagttgtctgaaggccaaaaagtgaacaaggatagccgctctgcccagaacgagggaaggctctctcctctcttttctggttatagtccctyatccctacatgggagacaactgacagtggaagcttgtttcaggtaactcatacactctctttctcattccaaattctcttgtggacagtcagccagccatcctgttctggacttgccaaatcagatg

SEQ ID NO: 825855 - DNA, 450 bp, Homo sapiens
gggccaaataagggcataaaagctggccacccgagccagaagcggcaactgctggagtccctttccaggtgtgaagctttgttctttcgctcttgctgctgctccctgtttaagtccagactacctttgtgagcttgtaacacagtgagggtctgtggctttattcgtgaagtcagctagaccacgaacccaccaagaaacaattctggacgtgccacctttaagagctgtaatacttgctgcaaaggtttgtggcttcactcttgaaatcagcaagaccacaaacccacggaatggagaaactccagacacaccatctttaagagctgtaacactcaggrtaagggtcagtggtttcattcttgaagtcagtgagaccaagaacccactggaaggaataaattctggacccatgagggacggtcgttctccatgatattttttttccta

SEQ ID NO: 825856 - DNA, 450 bp, Homo sapiens
gggccaaataagggcataaaagctggccacccgagccagaagcggcaactgctggagtccctttccaggtgtgaagctttgttctttcgctcttgctgctgctccctgtttaagtccagactacctttgtgagcttgtaacacagtgagggtctgtggctttattcgtgaagtcagctagaccacgaacccaccaagaaacaattctggacgtgccacctttaagagctgtaatacttgctgcaaaggtttgtggcttcactcttgaaatcagcaagaccacaaacccacggaatggagaaactccagacacaccatctttaagagctgtaacactcaggataagggtcagtggtttcattcttgaagtcagtgagaccaagaacccactggaaggaataaattctggacmcatgagggacggtcgttctccatgatattttttttccta

SEQ ID NO: 825857 - DNA, 456 bp, Homo sapiens
aagatctcccccataacatttatagtttatttgacaataaaactggttaagactttgatctgaacacacaacamacaataatacaaaaaagttttaaaaacttaaaaactatgtgtttggagccattttccttctcttcagccttgctctccaatcctcaggaagggcttcaaaattagcatttctctctgccatgccactgtgaaaacaacatacagattattttagtggaaagaaaaattaacaaaagtattcatttcccagcaaataaaaatctaactgaaattaaaaacctgatctatcacgtctatgtttatgaaaatcttttgtttctcagccaaacatcagtatattcttcatcaaacttcttcattctgataggtcaaccaaacactaccccagttttacgtatatgtctaagtgcatatttatttatttattattgactgattgaga

SEQ ID NO: 825858 - DNA, 637 bp, Homo sapiens
tgagtggtccactgacagctcattctgatcctgtattgtcttgtttggtttccatttttttttttcattaatttccttgtcaaaaagtcccaaattgagtctcaattttctgttagtctctggctttaattccrgggatggtagattggctagccaacagcaggcaaattaatgttcccaggaatatttggagaggaaagaaacactgatttatataagtgagagcacagcttatgttttctaacataacaaagaggtcacaagtttgcagactggtttccagataaatggtagaaataggcttagggagcattcttcatgaaaggtccttaatctctaggagttgaaggcaaagatttacacaggtaatctgtttcagtaccattagcaattgtacattttagatactcctgttgaaagcagaccccataaatatatacacctactatatgcccaaattaaaagtaaaaataaatgaacaatttaaacaaattttaaagaaaaaagaaagaaaacagacccacatagtctaagcaggtaaatcagtactctccagtgctggaatgtgtactaataatggtggcatataatagctactagtagtagctactatcattatttaaaacattctatgatc

SEQ ID NO: 825859 - DNA, 506 bp, Homo sapiens
ttgacagagtaaacaggcaatctacagaatgggaaaaaatttttgcaaactacccatccctcaaaggtctgatatccagcatctataaggaacttaaacaaatctacaagaaaaaaaccaagcaacctcataaaagaagtaggcaaaggacatgaacagacacttttctgtttttttgagactgagtctcactccatcgctcaggctggagtgcagtgacgcaatctcagcttattgcaacctccgcctcccaggttcaagcaattctcgtgcctcagcctcccaagtagctgggactacaggtgcctgccaccacgccccactaatttttgtacttttagtagagacagggtttcaccatattgcccaggctggtctcaaactcctgacmtagtgacctgcatgcctcagcctcccaaagtgctgggattacaggcatgagccaccgcgcctggccgaacagacactttaaaagaagacatacatggagccaacaaacaaatgaa

SEQ ID NO: 825860 - DNA, 574 bp, Homo sapiens
cacagaagccagtgtgatacgtagttacaaatattcatcagctattcacctgtcrtttaaattccgcacccccaccccccagcccatcacttgtgacactctgtgcccttcactgcatctgtccctgatctaaatcttcatttgtgtgatgaggtttttctctttcccccaactgtaagctccaaaagacagagattgtgtcgactttgtcaccgctttcttacttgaggttcctcttgaaggtggattctgatagataggaggagctgggtacaggaaggtggtcccaggaagcaggatctagggaaggaggaagagcccacaacaggtgtgttacttggtaggttgccactctgagcaactggggtctctctgaggaactgtgtaggcagtatctcagacttatccctctgaaagttgaggaaagggctgcagcatttattcacacacacacaccccaccttctcttccggctgcgggctgctcccaggggagttaaatctgccacacatgcaggctgagggaatgagccctgtctggcaaaaaactttgaggcagaagaatgaagaaactt

SEQ ID NO: 825861 - DNA, 527 bp, Homo sapiens
attattttttaaattagaagtgaagtcttgctatattgctccaggctggtatcgaactcctgggatcaaggcaatcttcctgcctcagcctcccaagtagctgggattacagactcaagccacagtgactgggttgtctattcccttatctttcgaaaggaaatatgtttttaggtatcatgatacactatctttcttaacgcacaagaacacgacttgtaaaaacactaagagaaatatgttgtatttccaatgtttttaaagtaaaattgcaaaagcaaaaaatatcccctctcttgctgttacttgctaggtttttcccattaagaaatttacatcatgtttacccaagttaaattcaccttctctaggtgtacagcatgatgagttttgacagattatgcagttgttgtaactatcagcgtacttaagatataaaatatttccatcttatsaagtaaattctcttttgctcctttcccctataccaagcccttggcaatcactgatttgttcctatagtttta

SEQ ID NO: 825862 - DNA, 625 bp, Homo sapiens
acgtggaggcctgttggcaggaccacctctttctttgctgagagctttctttttgcctactcctcacccttcagtgtgcctgtgtgcctaatttttcctggttgtgagataagaacccagattttagctgaactaaggagcaaaaattctgtatcattttggtggcctgtttggaactatgagacatggtgagtaaaatgtggacaaaaaaatttctctccctttcatttctgagccttgttggacttcttctgagggtagaggaaactctccaccccgacccccgaccccttgtcgctcttgggggtcaggaatgttggtctcggtccaacccagccttttctatggcattttgcttctttttattcgggactgtaatgtcacctatcttttcttttacaatattgggggtgttccactcccaccccaacggccgcaggtgcacatgtgggacaaatgggtgaacagcggctccctgctccccttccctcctggctgaggtgcatggctgagtccaccgcatgtgcatgccatgtccagtggccatgcagggcagggatgagccaccaccaccgcccagcccaaggtggccttgggggccygggccttgtgtggccatctggac

SEQ ID NO: 825863 - DNA, 591 bp, Homo sapiens
aaaataaaaaagtaagttcaactatattctgtctacaggtgactcgctttatctttaaggacacacagaggctgaraatgaagtgatgaagaaagatatttcatgaaaattgtacccaaaagggaacagaagggactatcttaataacagacaaaatagactttaagtcaaaaacttcagttaattatatcaagaattaggattccattaattagaggatataacagttataactatgtgtgtatcaaactttagcaaacctaaatatgtaatataaagcaaatattaacagaactgaatggagaaatatactttgggaaaaagcttctggactttggtttgggcattagtttttgggatatgaccgccaaagcacaggcaacaaaagtaaaaatagacaaatgggattttatcaacttgaaaagcttcttcacagcaaagaagacactcagaatgagagattttcaaatcacatatctgataagaggttaatacccaaaatatataagtaagtcatacaactcattagcaaaaagtccacatacacacacacatacatgatgtgattttcttagtgagcaaaagacttga

SEQ ID NO: 825864 - DNA, 631 bp, Homo sapiens
cactttaatgggatttatctctagaaaatccatcaggttctcatgatgaagatgtgagaaacagcccctcctggccctggcaggatgagggaaagcatagcctttgaaacatgcacagagcattctccaaaacaaaggcctcctctccacaagaaatactttaccagagccttatcccacctgatggaaggatgttatcctacgccagctccctctagtcctctttactcattagaaggagaaaaaaagctaagaaatacccgtgaagtttgcagcctaggaaaacagacttactaaaagacattatgcataagatttttgacaaaaagaattctgtaaaatatttaaagaagtttattctgagccagtattagtgaccatggcccagggaacggtcttatgagaaactgtgtccaaggcaattcagttacagtttgagtttatatattttagggagacaggaatcatagataaaatcacaaatcagcatatggaaggtatacatttgttcagcctaaagaggaggggtatctkgaagtgaggagggggattgggaggagcacttacagatcgatgttaggtcattcttgaatagctgtaaagaaagatctgagacagggaaatttataaa

SEQ ID NO: 825865 - DNA, 631 bp, Homo sapiens
cactttaatgggatttatctctagaaaatccatcaggttctcatgatgaagatgtgagaaacagcccctcctggccctggcaggatgagggaaagcatagcctttgaaacatgcacagagcattctccaaaacaaaggcctcctctccacaagaaatactttaccagagccttatcccacctgatggaaggatgttatcctacgccagctccctctagtcctctttactcattagaaggagaaaaaaagctaagaaatacccgtgaagtttgcagcctaggaaaacagacttactaaaagacattatgcataagatttttgacaaaaagaattctgtaaaatatttaaagaagtttattctgagccagtattagtgaccatggcccagggaacggtcttatgagaaactgtgtccaaggcaattcagttacagtttgagtttatatattttagggagacaggaatcatagataaaatcacaaatcagcatatggaaggtatacatttgttcagcctaaagaggaggggtatcttgaagtgaggagggggattgggaggagcacttacagatygatgttaggtcattcttgaatagctgtaaagaaagatctgagacagggaaatttataaa

SEQ ID NO: 825866 - DNA, 515 bp, Homo sapiens
gacgtcattgttccacctgctattggtgcctatgcttcctcttgggaacacccacctccttctcctttgagaatccagcgctatcatgactactcttactatttttaactcttttgtatctcctggccctaaacaaatatctgatatgtattattgtcaatgattatatcttatagttttgtctcactctttcattaaacataatcttatttgagtcccatgaaggacagaagcaactatctgcaaggtgtagagatgaggctaatatagtttcaatgtcataaggccaagggactcagaaatggtgagagacaggattcaaacctaggacttctgactattaatttggtgtctttttggcttgactgattattttcttttctggtatttagaatattcaatttatatacttttctcccatcagaaaaattgaaactttctttrtgaatgtggtttgggtcatacaacaagattgacttcttaatcctcagcaggatctggattttctagctcct

SEQ ID NO: 825867 - DNA, 590 bp, Homo sapiens
ttcccactaataatataaaagggttcctatttctccactgcctcaccagcatgttgcttcttgactttttagtaattgcctttctgmctggtgtgagatggtatctcattctgcttttgatttgcgtttctctaatgatcagtgatgttgagctttttttttttatgtgtatgttggccacataaatgtcttcttttgaggagcacctgttcatatcctttgcccactttttgatggggttgtttgttcttttcttgtaaattttttaaaattccttgtaaattctggatattagacctttgtcatatggtagattgcaaaaattttctcctattctgtatgttgcctgttcactctgatgatagtttcttttgctgtgcagaagcactttagtttatttacatcccatttgtcgtttttagcttttgttgcaattgcttttggtgatttcattgtaagtctttgtccatgcctatgtcctgagtggtattgcaaagcaagtcttttaacatgccttatggaggcttgcttagaattggatgattataatatgaaagtttaggattggtggatacaaagagagggttttg

SEQ ID NO: 825868 - DNA, 594 bp, Homo sapiens
taaaatatatattatatatatatcrtatatataatggagtgattaaaatgctgcagaataatatttaatggcatggaaaatgtcattgttaagtgataaagacaagatacacaatggtacccacagaatgaccccattactgtgtatacatacccacagtcacacgcatgaaagattgcaaaactataaatgaaaatgttcatagtggtaattttaacatgtaagggaaaaaaggtaacttaaacttacttaacactactttgaaaatttgctaaaacaaacttattattttgtaattaaaacaaataattttctgtagtctagcgtatgacttaaagaggtataagtagccataaatttaaatgaaactgtgagcttcttattagatgtgtgcacatatgtaaacacccacacctttattacatgctataactggcttccagtgacacaagatcctgctactgaggttggtgaatgacattgaagcctgacccctaaacttgtcctttggtggaacgtacacccaggaaatctcttttccatagttgtaaacagatgcatgactgttttaaagggccatgacctcgtggattt

SEQ ID NO: 825869 - DNA, 631 bp, Homo sapiens
tttcaaatgcttaaatagtactccattttacataatatgtcaggagttaagtcatctcctgccactggatgtttacaatattattgtttcactataatgtagctctgtgggagtgcttagagctttaaggtattatttcatgaggaaccctcaattatgtacagatcctccttcctgggttaatcatttattcagaagagtcctccaatctttcttcttaggatgaataggtcaggctgccagaattctatgttagtgggtgtccagggaataaacttttagtctccagcagggtgagggaagaagatctgagcatcgtactacttcttaaacaggcttgcaaccaatccgatgtttaggcccacatgtatccccactttctgagatacttgatgcctccaattcctgagactttctgacattctgtagcaagaatcaacctgtttctgggttctcattactgccagcttagatttctgccttttttagactgaatttttaaccctttagtgaaatttaaggggactacaggaaggaatggtagtaaagatttatgttctatccactgtgttttaaggttgaaaactctttacatgtttattggccacacawatgtgtgaccatgagagac

SEQ ID NO: 825870 - DNA, 577 bp, Homo sapiens
cattccaggtgaaatgaaggcatatgtccatgcaaagacttatatatgaatgtccaaggagttttgtttctaatagccctaaactagaaataactcaaatgttcatcagtaagtgaatgaaaaaaaaaaacaacaaaactatagtatatctctacaatagattactactaagcaataaaaaaggaatgaactattaattcatgcaacaacatggatagatctcaaaataaataagctgcgtgaaagaagccagatgaaaaagagttcattttatatgattctatttacataaaaatctaggaaatgaaaactaatctatagtgacaaaaagcctacagatggcagtgggaagagaaaggtggggaaagaaaatattacaaaggggtagaggaatttgtggtgatgaatatgttcagaatcttgactgaggcaatagtttcatgtgtatacgtacatyaaacttaccaaaccatatgattttaacaaagttctttacatcatctaaacctgttttcattaatcatattgttggtgctggtattctgagtactgtgtatgcactgtgaggtgaacaaat

SEQ ID NO: 825871 - DNA, 598 bp, Homo sapiens
atatgtgtcaaagagtcacttccacaaggaggccctccctgactgcataatctaaagtagtcctgttatagtggtctcagagcacatattatctgaatgtgtgttcatwtagtttatgtgtctcccctccattctagagagtcagctccatgagagtaggcatctcatgtgcttatatatcagtgtacttgtgggctcacaacgagggcctagatgcttgctgttgaataaatgaacgtaaactctttcaagagccctctcaacccccatctgctttatcaaagccatgtgggacttccccaactcctcatgattatttcttttgtgaactcgtgcccttttgggaatgtgtcctctcagtttagcactcaagggttcactcatatgcttaaataactcttcccaaccagactccttaagagctaagtcagagcatcctaaatgtcttctggcccagcaagagtcctcagggtaaactcagcactgacttgtgcccacagctgtcatgacaatcaaatgagatcatggatgtagaaacactcggtgagccataaagcgctctttcatgtaaagaattagtatgaatattatgggaggc

SEQ ID NO: 825872 - DNA, 611 bp, Homo sapiens
ctctaacatctttctcttggggagggggcattcctcagaactgagagtgttcttctcctggggtcgcagctttatagaatgaggagggactctctagtcagacctcccacccagctcaggccccaagctttgtctcctgcctgtggtccattaaaagccagccccagagcttctaaggatggccaatgtccttaggaaatagacagggtccatccctgcctttcctttctggatttgtttctttctctgggtctctgtggatttctctttttgctagatcagaaatatattttaaaaactcgttttcttgttctattttctcaccattttacatgttttgagcttacaaaagccttccctggacctcaggtctactcactgccagagaagctcatccctcaattcatctaatcctttagactttccacgccatttcactcactaggcccctagccccatctctcacctacttcatgctgcagcacagcgtatttcytctatcttagaggctcccaaactttttggcaccagggaccagtttcatggaagacaattttccatttctccacggataacagggggtgggtgggaatggtttcaggatgaaactg

SEQ ID NO: 825873 - DNA, 509 bp, Homo sapiens
gaaatgctgaatgtatttatatgtgttttgtttaaaacataaccagcgtagagcaacttctctatgaggtgccaagaaagtctttaaactcctcatttgtctttgttttcaatccacctgttcatttccatttcagaatgtctagaaaagattgacaaaactttttaggctgcaaacctaaatgtccacaattttacatttcaacaattgtttaatatctcagaatttgacataatgacatttagttcaagagtacttagctgtcaactgtaacaattcatatctacgccttcctactttgtaacatagttgcctccctcatttgtgacattaatttatgactcagcccacatttcaaaggaaagtgatatatgttggggaaacaatactactaaaagaaaaagcccacacctytacattactataagtgagaggcgtgtttgcttatattaataaagatattccttcacaaagatcaatatggatcctattgcatccatttgacaaag

SEQ ID NO: 825874 - DNA, 502 bp, Homo sapiens
ttcccatatggcacatcttttcaggcctcgttatatgtgcattcagaggaacagctagcagtagctgagctgtatgaccaagttcattctattttaagaatctaagactttgacctcagctcagagccatacttyaaacagatagattctatgtcttatgatgaaaaaatgggagttctttacttgatgaatttatttcatcatttctctgggatggagtaaatgaagacagtgataattagagaaagtttttttttttttaatctgtgtagaattcacagaatctgcaagtttggggttacagtgcagaagtcacagactctgcaagttctgagttatagcttagaagtagaatcctttggtgtttgaacttttattttggtcaaaatatgactacaggggaaaaggattagaacattttttgaaagacttccaaaagcatcttagacatcaaaagggttatatgaaacattttaatgatttagtgtaaatgaaccagaaa

SEQ ID NO: 825875 - DNA, 519 bp, Homo sapiens
tttgcttcccattctaggtttattcaacaaacatttattgactatgtactccagaccagatataattcccaagagaagacacttaaatgattcagttctttttcaatatctacagtgatggaaaatggaatcttcactctgcaactcttgctagcatattatcttccacattatatagtttctcatgtctagtaagaaatgtttgcacttatttatcttatttattgacttaacagtactaatttttttctgtttctgaagctatttcacaagagcatatcatagatagtaatcaaataactcttggatgctcctttatttgctttcaaatgagttgaatcaatttagtagaatatttttgatgggtattttgtccccaaaatggagaaaaaaaggtcgttttttgttattttccacgtgaaaaaaattaacattaaaamatgtatcttctgctaagggtcacaaacacttggttccattttgaaatgcaaatttgctaccaatttgtcactaccaatt

SEQ ID NO: 825876 - DNA, 519 bp, Homo sapiens
tttgcttcccattctaggtttattcaacaaacatttattgactatgtactccagaccagatataattcccaagagaagacacttaaatgattcagttctttttcaatatctacagtgatggaaaatggaatcttcactctgcaactcttgctagcatattatcttccacattatatagtttctcatgtctagtaagaaatgtttgcacttatttatcttatttattgacttaacagtactaatttttttctgtttctgaagctatttcacaagagcatatcatagatagtaatcaaataactcttggatgctcctttatttgctttcaaatgagttgaatcaatttagtagaatatttttgatgggtattttgtccccaaaatggagaaaaaaaggtcgttttttgttattttccacgtgaaaaaaattaacattaaaacatgtatcttctgctaarggtcacaaacacttggttccattttgaaatgcaaatttgctaccaatttgtcactaccaatt

SEQ ID NO: 825877 - DNA, 519 bp, Homo sapiens
tttgcttcccattctaggtttattcaacaaacatttattgactatgtactccagaccagatataattcccaagagaagacacttaaatgattcagttctttttcaatatctacagtgatggaaaatggaatcttcactctgcaactcttgctagcatattatcttccacattatatagtttctcatgtctagtaagaaatgtttgcacttatttatcttatttattgacttaacagtactaatttttttctgtttctgaagctatttcacaagagcatatcatagatagtaatcaaataactcttggatgctcctttatttgctttcaaatgagttgaatcaatttagtagaatatttttgatgggtattttgtccccaaaatggagaaaaaaaggtcgttttttgttattttccacgtgaaaaaaattaacattaaaacatgtatcttctgctaagrgtcacaaacacttggttccattttgaaatgcaaatttgctaccaatttgtcactaccaatt

SEQ ID NO: 825878 - DNA, 532 bp, Homo sapiens
gggtggttgttgaactatggatctcagaaccaagacttgccattgtaggggtttgataccacaagtctctgcatttragaaaacctggacatctgcatccattaatttccagagtagatgtgagcttatcaggacacatgaaactggagtgtctggccaggattttccttctctttctgaaataagttggataagaattacataagtgattaatagaaatgtgaaaagagtgtttcctttgtacaatacttttacaacatttcgatacagcaggaaaatgttgttgataacccagaagatataagcataaagaaaataaaattatctataatcccactccatgcagataatggcctttactattttattgaatctcaactggtttttaaatgtatatatactctttaaaaatggaattagccatgtgttttctatagaaatctgctttttttcccttcagtactgttaatattatttccattttatcaaatatacttctgccatcattttaatgactacaaagtactctgtt

SEQ ID NO: 825879 - DNA, 552 bp, Homo sapiens
agagaaggattctttatggttttaggaaaactatttgatgaggtgttatattcatttcttgtggctgatgtaacaaattaacacaaatttggtggcttaaagtgacagaaatttgttctcccacaaatctggaggccagaagtcccaaatcagtttcactaagccaaaatcagtgttcacaaggctaagctccctctggaggcactaggcaagaatctgttccttgcctctcccagtttctggtggcagctggtgttccttggcttgtggccacatcactccaatctctgcccccattttcacattgccttcccctcttctgtgtgtgtcaaacctccctctgtctctctattacaaggacacctgtgattggattaatggacacctgaatagtccaggatactctgctaggtcaagatccttaatacactgtcaaggtcttctttcacttatatggtaacatttacaggttccactgattakgacctgaaatctttgggtggtcattattcagcctgtgacggggtgaactaggttcttatttcacccata

SEQ ID NO: 825880 - DNA, 617 bp, Homo sapiens
tttggaaggtatggacagtgagaaactgcagggcaagggaccttctcatccctgatcctcagcagcaggggtcagctggagtgagggaaggytcggtggttgccaggcacttctttcttctctctatattcctggtgtctagatctgcactaaaaacatgtggtaaccacctagaggagaagggtgtggaggggtgtatgcagtcacccaccgggaaaatcaaggccacctagaacaactgtttgctctgaataatgatgatacagtccccacctttaaggagctcaaggtttcttgagttaaaatgaacaagcctcaaagctgcagactcacttaaggcatagacaagcactggcaaaggtcttcacctcttcttccttctgctcctttttgcacatcaaaaaatagtgctattttctagagaaacaaaagcagcttctctgtaatgcttagcttgcctgattgacactcaaactggcaattttgcaaatttctttgaaaatttacttttccttccctgacttttctataggaacagtgttacaacagggccattcaaggcagagtcactcctttaaaatggctccaggaaagagccacccatttttatttttaat

SEQ ID NO: 825881 - DNA, 502 bp, Homo sapiens
gcttctgaaggctgtgccagagaagtatgtttgtgtgtttatctgaattaaaaccaagacatgttctgacggaagttaagtctgatttggctaattaaattaagaacagactttgccagtttatatgacaggactttttctataaatttaatcagctaaatctatagtcccagggctttcataaaaatatctttgagccaagcatagtggctcaaggctgtaagcccaacactttgggaggctgaggcgggggaatcacttaaacccaggagttcgagaccagcctgggcaacataacgagacaccgtctacaaattattttaattagctgggagtgatagtgaatgcctgtgagggaagctgaggctggaggatcacttgagcccaggaggtggkccgtgtttgcaccactgcactccagcttggatgacaaagtgagaccgtctctcaaaaaaaaaaaaaaactttaaagcacatatataatatgcaatatgttggatag

SEQ ID NO: 825882 - DNA, 621 bp, Homo sapiens
acacctgtaattccagcactttgggaggctgaggcaggcagatcacctgaggtcaggagtttgagaccagcctggccaacatggtgaaaccccgtctctgctaaaattacaaaaataagctgaactatacctgtagtcccagctacttgggagcctgaggcaggagaatcgcttgaactcgggaggcagaggttgcagtgagccaagatctcaccagtgcactccagcctgggtgacagagtgagactccatctcaaaaaaaagaaagaagaaaaaaaaggatgaaagtttagccaggcacagtggcgcacacttgtagtcccaaccacttgggaggctgaggtgggaggaggctcaagaccaggaggtcgaggctgcagtgatgattgcaccactgcacacccacctgggcgacagagccagaccctgtctcaaaataataataataataataatgatgataataataataataataatgaaagggaacagtgctcaacactcacacaagctaggaatggtgcstgttcctacaggccagactagaaagtcccataattcatggggcattagataaagtacatacaagagtcttgcttttgtagtggctaataattagcc

SEQ ID NO: 825883 - DNA, 620 bp, Homo sapiens
gagtggagtgcaccagggacctttcctggcttcctagagtgasagaagtacgtggacctctctcttcttttcctgtccctctagaagaacattctcccttgcttgatgcaacactgttccaaaagagggttgagagtcctgcatcacagccaccaaatagtgaggaccagggctgaggccacacaggtaggggcctgatgaaggagaggatgaaagctgaatgtcccgacggccatgagcagttgagtggcacagcctggcaccagacgcaggagattctggtccttgtaatggagttagtgtccagtcagctgagctccaccctgatgccagtggcgagtgttcactggcctgttaccattagcacctgtgttccctcaccaggccatcctgtcacatgagcccattttctccaaagtggaatctgaccaagcatgagagagatttgcccctgggaccagtggcttggattccatcacacccataaatccttgggtattaacttctagctgcctggggctggccctgctcagacaaatctgttccctgggcatctttggccaggctactgcctccgcagctgggatccctcacttgcctgccacgctctgctcggcttc

SEQ ID NO: 825884 - DNA, 628 bp, Homo sapiens
aatcgacctgggactctatagaagagattcaacactaagaaggaaagtagggtgatctctaaagtcctttccaactctaagattctattataagtagaaaacaaaacamgacctttgttgtagcactggactctataaagtttccgtaaataacagtattatcacaatagaattgattgtaatcaaaagagtgaagcactcatttttacataatggatcataaaaatagtattgattaaaaaatattaacactgtacatattaaaataaaatcctgtttataacatcacaatattgttcttaatttctaaaagaaaccccaagggctgtggcacctgaataatctctaacaatgaacatattgccttaattattaacactagcaattaaaatgtaggagaggcaaattgatcttttttctctaagagctttatctgtttctctaaaggacagttaaaatcatctaagcaccataaaaactggtgaaatcctaaaaggaaattagcaatttctaaggtaaatataaattattttcttttggactcattttttgatttgttttgttttagacattttctttctattttctagtttaagctgtagctgtaaatacaaaataaagcacagga

SEQ ID NO: 825885 - DNA, 616 bp, Homo sapiens
ccatcatctccagaaccagctagtcttcctgcagaagatattagtgcaaactccaatggcccaaaacccacagaagttgtattagatgatgacagagaagatctttttgcaggtarttgtcatgtatttattttttaataatggtcaattgcagtatattttctattagatagaaaatatctaaaacaaaactgaaattctgtgtaaagtgttagtggcagctcttgtaacaacttagaaggatggggaatttccagtcacatcactctatgaaaaatgtggactgtccagagaagcaaaaatgtggttctttctggctgtaagcatttgagaataaattgtatattataatttgattgggggcagtatttagatgcaaaagactaatcattgtgatgttcatactttgagaaatagcagtgattatacctttttattgcttagaagttgtcccaaagcaaaattaaactatggatttaaaaattattctatatttatgtttgaaagctgttttaataaattgctgtactatttaccatctgttccatttgacccacttttaggtgaataaattgatgcttaaggaatttgtttttgatacaggggcaggatttgg

SEQ ID NO: 825886 - DNA, 616 bp, Homo sapiens
ccatcatctccagaaccagctagtcttcctgcagaagatattagtgcaaactccaatggcccaaaacccacagaagttgtattagatgatgacagagaagatctttttgcaggtaattgtcatgtatttattttttaataatggtcaattgcagtatattttctattagatagaaaatatctaaaacaaaactgaaattctgtgtaaagtgttagtggcagctcttgtaacaacttagaaggatggggaatttccagtcacatcactctatgaaaaatgtggactgtccagagaagcaaaaatgtggttctttctggctgtaagcatttgagaataaattgtatattataatttgattgggggcagtatttagatgcaaaagactaatcattgtgatgttcatactttgagaaatagcagtgattatacctttttattgcttagaagttgtcccaaagcaaaattaaactatggatttaaaaattattctatatttatgtttgaaagctgttttaataaattgctgtactatttaccatctgttccatttgacccacttwtaggtgaataaattgatgcttaaggaatttgtttttgatacaggggcaggatttgg

SEQ ID NO: 825887 - DNA, 446 bp, Homo sapiens
acacaccactatgcccagttataataattytattttttgtaaaagctgggtctcactatgttgcccaagctggtctccaactcctgggctcaagcaatcctcccactttggccttccaaaatgttgggattatgagcataaggcactgcacactaaactattaacagtaatttttcctagatgttatgatttggagtgaggtttttatcccctctgttttccagatttttttttttttttccaagacagagtttcgctcttgttgcccaggctggagtgcaatggcatgatctcggctcaccgcaacctccgcctcctgggttcaagtgattctcctgcctcagctgggattacaggcatgcgccaccatacctggctaatatttttgtatttttagtagagatggggtttctccatgatggtcaggctggcctcaaactcccaat

SEQ ID NO: 825888 - DNA, 627 bp, Homo sapiens
gagaaagaaattaacttctgtttttcttcagccactagtatttggggatctttttataacagttaaacctatatctaactaatatagaagcagtatctggaagggrgacttccgcaacaaaagacatatgtaatattaatacagcaattgaacaggaaacagcaaatattcagataagccagggtggaaagctggtgactcttattatgtcataatgaaactttggctaaactgttacctgccatacattggacagtaagccataaactgtcagagtctgtgactctaaggcaactagttggaaaaattcaggatcttggtgtgtgttggctgcttcttgccacttgaagcaaaatcttacaaaagagataaagtctgaaatagtctcccctaagggaggagaattctattttatgaaaagaggcattttctgtcttgcctgaaatataacttgagtgaaagtgcagtaatttgggtgctcaaaggtttaaaaaaagtatttttggttttttgtttgttttgttttttggagatagggtgtcactctgtcacccaggcagtggtgcaaacacagctcactgcacccccagcctcctgggctcaagcgatccttctacctcagccttg

SEQ ID NO: 825889 - DNA, 572 bp, Homo sapiens
tctaactttttcatttttattcattttatgtggtattcgtttatttgattttgtatggtatcaaattagataagacatttaccaaraacagcaaaaccttaaaaatagaaatactgaataaatacctttgaagaggtatggggaaaatactgaagaaaatttagttcttgtcaagtgaggactaaagctaattgtgatcatttaaatatgctgacacgcaaaaaagtattggtagactcttccccattctgatgataatagcagtttaaaacttggttgagtggaatatatatagtaatattaatatgtttcttagaactctaaaattatagttgagaacatgactccacccaaagataaaatgatgcaacaaactcacatacccctttgcaacataatactttgcaatgagaagtttggtaagttatttaacctctccccactcccaccccttgccatttctctttttacgtaattatgaaaactggatagtatatcaattttcaaaagatgaacaaaaacctttttaattattaaattgctgtaagattctaagtaattacagtgagagt

SEQ ID NO: 825890 - DNA, 572 bp, Homo sapiens
tctaactttttcatttttattcattttatgtggtattcgtttatttgattttgtatggtatcaaattagataagacatttaccaaaaacagcaaaaccttaaaaatagaaatactgaataaatacctttgaagaggtatggggaaaatactgaagaaaatttagttcttgtcaagtgaggactaaagctaattgtgatcatttaaatatgctgacacgcaaaaaagtattggtagactcttccccattctgatgataatagcagtttaaaacttggttgagtggaatatatatagtaatattaatatgtttcttagaactctaaaattatagttgagaacatgactccacccaaagataaaatgatgcaacaaactcacatacccctttgcaacataatactttgcaatgagaagtttggtaagttatttaacctctccccwctcccaccccttgccatttctctttttacgtaattatgaaaactggatagtatatcaattttcaaaagatgaacaaaaacctttttaattattaaattgctgtaagattctaagtaattacagtgagagt

SEQ ID NO: 825891 - DNA, 531 bp, Homo sapiens
atgcattgtcaaattagagaaatacctttccagttttaaaattttatatcattatcctttttttgtttcttagtttttgaagacattacaytctgggttttttttggtcagctgttataatccaggtttcacgcttcaagtctttagataatatcatcttattgaaaattttgcagaaggattttcttgttttctcagtggctcagctaaaatcagtgagtggaaaattttctcggattggtttttgaagatacccaataaatcctgtataacctaacagacagctgccttttcttttcttctttagtattttttgaacatgaagtgagggtcgtattgatgagagatcactaaagaaggttaagcctcagcaaaagtcttccaaaaaatgggctgtgctaaaatttcatgtaatactctagcgtttgacacattaaactaaactgagttcataacacattttaagaagagttttctccgttgctcatttgaccattccttgctccttcaggaaacagacaaggttatgta

SEQ ID NO: 825892 - DNA, 602 bp, Homo sapiens
ttttatttttaacttgcatgaacatactcattggctatgtctttgggcagctttttaagaaactgtaagtatgccattggttaatagttatttgatggcttgaaaaagttaatatttttagagctattaacgtacttatgcctggaaaaaagggtataaccagaatcctttttatcacaaattccagcagctacaatattaataacagactccatatctggcatttttttaaagcacttatatccagtgtgacgttgactttagacaactttattatagtaaattttactaaaatctgttaaccaaatagcttttctatttctaaaggcccctaatccaccatgtgtggtgaatgtgttgattgaatttctgttgttttgcatcgtgccctgaatcaagcggggaatttcggcagtgtcatcacacagatgcgtgtgccacccttgctgcttttctccttatttctaataattttgtcctttcagcttgtgttttggagctgtagctgagtttygtttagttggataagatgttgcagggtttgggaggatgacaggagtgagtgaaacggtaattgctgcttcatgcattagcatagaatc

SEQ ID NO: 825893 - DNA, 602 bp, Homo sapiens
ttttatttttaacttgcatgaacatactcattggctatgtctttgggcagctttttaagaaactgtaagtatgccattggttaatagttatttgatggcttgaaaaagttaatatttttagagctattaacgtacttatgcctggaaaaaagggtataaccagaatcctttttatcacaaattccagcagctacaatattaataacagactccatatctggcatttttttaaagcacttatatccagtgtgacgttgactttagacaactttattatagtaaattttactaaaatctgttaaccaaatagcttttctatttctaaaggcccctaatccaccatgtgtggtgaatgtgttgattgaatttctgttgttttgcatcgtgccctgaatcaagcggggaatttcggcagtgtcatcacacagatgcgtgtgccacccttgctgcttttctccttatttctaataattttgtcctttcagcttgtgttttggagctgtagctgagttttgtttagttggataagatgttgcagggtttgggaggatgacaggagtgagtgaaamggtaattgctgcttcatgcattagcatagaatc

SEQ ID NO: 825894 - DNA, 580 bp, Homo sapiens
tcattctgtgcctgcattttctcagttgccttaagctgaaaataatcattatgtcagagtggcatagtttggggttatgtgctctgaaccccttcaaatgaaataatgaatttagatggcctaaatcataacatatacacatacacacacaagatagccagaaattatatttccggatggagtatacaatctgcctttggggtggtcttaccaaaaagtcagatatggatcttatttagtctctagatttaactatcaattaacaaaaaatacagaggacagaggtgcatgttggataacagcacaggaaaaaaaacccagactgtgagaactcgacaagacaggtgaatttttttttcaacaaataaattgcaaggaaaaacagatggagaaaaaaatcattagaataaaagagatattagagataaatcaaccaagtgtactatagaagccttatttggatccttctaactgtttaaaaaattacgatcagctaaatttgatcattgactgrgtatttgatgacattaaggaagtaaatgttaacttaggtgtgatgtaaaagagtccttagagatgc

SEQ ID NO: 825895 - DNA, 580 bp, Homo sapiens
tcattctgtgcctgcattttctcagttgccttaagctgaaaataatcattatgtcagagtggcatagtttggggttatgtgctctgaaccccttcaaatgaaataatgaatttagatggcctaaatcataacatatacacatacacacacaagatagccagaaattatatttccggatggagtatacaatctgcctttggggtggtcttaccaaaaagtcagatatggatcttatttagtctctagatttaactatcaattaacaaaaaatacagaggacagaggtgcatgttggataacagcacaggaaaaaaaacccagactgtgagaactcgacaagacaggtgaatttttttttcaacaaataaattgcaaggaaaaacagatggagaaaaaaatcattagaataaaagagatattagagataaatcaaccaagtgtactatagaagccttatttggatccttctaactgtttaaaaaattacgatcagctaaatttgatcattgactgggtatttgatgacattaaggaagtaaatgttaacttagrtgtgatgtaaaagagtccttagagatgc

SEQ ID NO: 825896 - DNA, 255 bp, Homo sapiens
aaaaatcaaacctgtttctgggttctgggttctctgttttcaactgttggttatttttgctatttctgtgcaaatgccactgtgttaattgctccagctttataaaacacctgatatctggtaaggcaagtctcttccttctgtttttcttcttyagtagtgtttaattcttggctcttttctttccatatgaattttagaatcagcttgttagtttccacaaagaaaccttgttaggattttgattgaaatagt

SEQ ID NO: 825897 - DNA, 514 bp, Homo sapiens
tcatcaaatctaagacatcaattgtaagacactcttattttatttaccattaaggaaaacataytgccaattacaattgaaacacacaattatatgatgtgtccaaattttagagatgtcaaaatagaaaaaaatatgcttcttagaatcatgaactctaagaattaccatatttattgatctttatctttataacatggcacttgccagtctaatgaatctctgattatctctggcaggttttaagtgctaaagaaatgcttgttgaatgaataagtgaatgcataagcaaacatttaagtgttcaagggctctgtgaaatagattgattaatgatggcaatgtaaccccatattttccttttatcataattaatgtaaatatactaccacaaaaaatagaaacttaaaaatttaaaacccagaatccctaccacacaaaaataaatttctatattttttcatattcctgtccaattcttatccatatacttcaggttttttctttaacttaa

SEQ ID NO: 825898 - DNA, 481 bp, Homo sapiens
gagaagtgtctgttcatgcaaatccagtaagtagactgcagctttctgggaagagagcctctgaattgaagaaaagtaggacaggtagttctgagctttccagagagaagaacaggaagggagtgaggatcaaatgactccttgaacaccagtggatattttaaggctgcttgatcgactgacctgaaatgagcaagccaagccaaaagctgctcatcaatgggcttccccggacccacagagagaggacctgacgtactactcctagttgttctcagtgtgaatggaggatgagaaaaatgtgcttttaagttttttgataaaagcttcctatttaggtgtccttttcccaaaaagcaatgtactaatgttcataagccagggtgacctaaaaatgaaagttacaaatgaagcctttgagctggccttctggctyaatacaccaccaggaaatgcggatcctaatactcagctcaatgaa

SEQ ID NO: 825899 - DNA, 637 bp, Homo sapiens
tcttcctttcttcacacatggttatcattagaaattagggttagaagtttccatgacactccttgataccctgaactaaaactctgagttaaataagtaaccagatgctcaatgatagaagaaaaaagaaaggaggaggtaacataaagatttctttaattaattaaaattaaatctattttgctcacaaaaggacaattttgaagtaaaagttttttccaattttgattctttactactttttaaaattcaaaacattatttgtgattctgctgactctaatattaaatacaattagcaatacttcttcaaactgccttcttaggtggttgacatcattaaaacaaaagtggcattttatacatttaaagtgcctcacaaatatgttctgataatatgtctgtgtgaatgagctaaatttctataagatggtagtgagtttaatgtgttgtgttggtgcaaaagtaattgcagtttttgccattaaaagtagtgacaaaaccacaattacttttgcatcaacctacttaaattattttygctttattgctaacaggtaggaaatttaaaggacgcatgcatacattttttgatttttaaaagaataacactgtaaactaatggaatccttacaggt

SEQ ID NO: 825900 - DNA, 547 bp, Homo sapiens
aactctttaaatgtatataactctgctaacataattttaatattaggttcttttcaaaatgccaaattgatatatcttatttctgtgtatacctcactttgaatgttctttatatcacttagtgaccttgagttatgatatgtaaaacttcaagataaataaactttgcactaacttactaaataagtattccgtgatctccaaaaaaatattttgtcattcctaagtcaagatcatttctacatgaaattctcacagaaatgtctctaatttattggaaagatcaagtaaggttacaatgaatgtaaaaaacagtttctggaggtgttactagaaatctttttatcaacgccttctacaaattagtaaccaatataaactcttcagtctcaaatatcgagaaatttaatatgcaatgatagttatttaataaacggaatattggttatggtgatttaaaaacaaaacttkccctataaatggattatatttccataatgtgtgagttgagataccgttttatctcagcaggggagaaaggagggaa

SEQ ID NO: 825901 - DNA, 547 bp, Homo sapiens
aactctttaaatgtatataactctgctaacataattttaatattaggttcttttcaaaatgccaaattgatatatcttatttctgtgtatacctcactttgaatgttctttatatcacttagtgaccttgagttatgatatgtaaaacttcaagataaataaactttgcactaacttactaaataagtattccgtgatctccaaaaaaatattttgtcattcctaagtcaagatcatttctacatgaaattctcacagaaatgtctctaatttattggaaagatcaagtaaggttacaatgaatgtaaaaaacagtttctggaggtgttactagaaatctttttatcaacgccttctacaaattagtaaccaatataaactcttcagtctcaaatatcgagaaatttaatatgcaatgatagttatttaataaacggaatattggttatggtgatttaaaaacaaaactttccctataaatggattatatttccataatgtgtgagttgagataycgttttatctcagcaggggagaaaggagggaa

SEQ ID NO: 825902 - DNA, 598 bp, Homo sapiens
aagagagaacaagtcttttgtaagaaataatcttctgaatgctgcttgaaaattgagcatatatctctctagcacgtatgtctcctgcaacaccctatcatacttgagaagaaaaaaaaagacaattagcactttcaatatgctgccttgaaatctccttagtcacattcacaaacacattaggtacattttctgttttccaatttatcataggcaacaattttcctaaatatctgcaaacacggttttctttgtctccagtccctaacagcaattttctcactgctctaagagacttcactaacagtcttctttcctccatttaggcctttatctcccatataatcacaaagctgatgacagaagggatatcgttttgttataataagagcccacttgcagtttccagtttcggttccacttatctatgcctgtgtgttagtttcctcttgctactgtaagaaattacaatgaagttagtggctttaaaaagaccacaaatgtattattttacagttstagaggtcaaactctgttatggacttcactgggctaaaatcataatgtcagcagtattacattactttaaaggctgcta

SEQ ID NO: 825903 - DNA, 629 bp, Homo sapiens
tttgtcttttttgcctttatagacaggtgataaagcgttatttctaaaattcagttatatataaatgatgtagaaatattagtgcaggaaactagattctatagagaattcatttctgttgccgygttaaagaaaaattcatgattgtttataatttttggaagaaccgtgttaagatttgtaaatcgtgctgactaaatatagctctaaaataccttaatttatactttgtccttaaaagcttttactagtttgtaatctagatctgctttctcctaattctggagtttgaatttctagtaaattacaaggcaagaacccatcccacacttcagtttaaggttctgttgttctgtttgtatatgcagatttagggaaagaaagtctcacattaactatcttcataatttgaggtacaactctattattgagtacacagcctttcattttccaagtggtagttttctttcagtccctaccttgggtgttcagaaactcttgtttggtaaaatgccagtaaattacagatgatttaatgtatatatcctctcatttaagaaaggcaagtcaaattacagatccaggctttgcctcctccaaatcttttccctctctcactttaatgtagt

SEQ ID NO: 825904 - DNA, 618 bp, Homo sapiens
atcctatgagggaggtcctattgtactaaatttatagaagggatgattaagggcctgaatcratgagccactttttcaagttcatcactagttcaaggtctaattagagctggatcttgcagtctgacttcagagctgatgctcttgactagcacgctaaactgcaagtagaaggcatggtagggcacagagcacatttgaggggatgaaacaaagtcatatatggctgtgacctcaacattggaagacatttggcactgattattctcattcaccatcagtattctgcatccacagatgcacttcactataacaaaatttgcatataaaacttgcatgtacaagatagatattttgagggattattaagaatgttattaaaaatcattgctatgggattcctttactttagagtgtgcaataaaaaagcacaataggggcttcagaggtggacagatctggtttcaaatccttactttaccacttaatgtctttggaaccttgggcagcttctgagactcagtgttcttatctgtgaaatggggataataatacctagttcacagagttccaaaatatccctgcaaatagaggatacttaataaaaactagctacca

SEQ ID NO: 825905 - DNA, 654 bp, Homo sapiens
catgacgttttgtgtgtgggaaagaaggtatttcaaccatgaactgtcccagataataaaaaataaggctggacacggtggtttacacctgtaatcccagcactttgggaggctgagtggggcrgatcacgaggtcaggagttcgagaccagcctgaccaacatggtgaaaccccatctctactaaaaataggaaaattagccgagcatggtggcacgcgcctgtagtccaagctgttcgggaggcttgaggcaggagaattgctggaacccaggaggcggaggttacagtgagccgagatcacgccactgcactccagcctgggcaacagagcaacactccgtctcaaataataataataataataatattaatattattttaactttaaatcactcaggttaacaaaagatatatttgttttgtttttgaatacctgtatggggtttttttggcataattaaaacatttattgatcacatagtgtgtgtatggcattttctttatgtgcattgcatcatttaactgcatactagaagaagctgtatattatattggctaaacaagtgaccttggcttcacattatttacctaagtgttagaaaatatttcttctaaatacattaccaatatcttaacaggttataaacccga

SEQ ID NO: 825906 - DNA, 595 bp, Homo sapiens
tcggactacttgtcccaggcacggattctctgcagagggcmtagaagtcagggcattggtggtctaggtggccagcaggaccatgagcagttcccaggtaggctgctttgaaatacttgtgctctgaagactgtaagaatttattcactcatccatctgcctaccctcccctccatccacccatctattttacaaacaggtgcctttcctgtaccaggctctctgacaggcttacacctaagccgtgaggatataatgatgacaaaagcaggcttggtcccttccttcaagaaacctaaagtcaaaactaaaactagatgacgcaaactgatagactgtgggccaaatcctgaccccagaccaatttggatcaccctacatgtgcctaaaaattaattaaatgtcaacattcaaaaagcaggagatttcacctgaaaatctggatttctgccttccttgaaaacaaggaggtctggcagagctgagcctgcaaccctgcactgcagtgatggctgaagctgagtgctttagatggggcaggcaatctccagtttgccccagtcactaccactcccaatagtctgtctctcttggc

SEQ ID NO: 825907 - DNA, 602 bp, Homo sapiens
gtgagccgtgactgcaccactatactccagcctgggtgacagagagactttgtcacaaaacaaatctacctcaaaaggttgttgaaaggaytaaataaattaatatttttgaggcacttaaaacagtacttggcacagattatgtcgtgtgtgtgtgtgtaatccatatcttctatcatgttagaagtttctgtctactcttccctggtgaattctagcaaataaactgattccttttgataaatatagaatgtttaactttttaaatttaatgaaaaatggttaccatatttcctaatgctgaacaacaattcaatctacgcttttattttctatactggctaggtttatatatcttttgggactatttttaaatatcagttttttaatatttctgcccctcacttcacttatttcatttgtttctgctcttaaaactttcttctactttctccaaattaccttttgtttttatgagtttaatgcttagctaattaattttcagtctttcttcttaactaaatatcctctctaatattttatctgcatatgaaacacgtttatccctaatgtttcatatgtggtaatttcattattcagtt

SEQ ID NO: 825908 - DNA, 616 bp, Homo sapiens
atagactcatgttacattgctggtactctcatagaataattttcttctttcctaagtsagaagaaaccaattacaaaccttgatttactttttcattatttcatgcagaaacaaacaaacaaaaaaaactggacaaaaacaaacaaaaaatacgactctaatcatggaaaaaccttaaaaaaaaaaactccattaacacacacagacacacaagaagctactcatgcaattctcctcgactgttcctcactctgattcagcagaaaggtgaggaggttgttaaatccaacaaagaaaatcacagtgggagacccttttcacatctgatcatgagttaactctgtgcggcattttccgtggtggttactgcagtgactgaggggaccaggagttgagggcagtatgatgtggggaacccacaggcctggtcctgttttctgagtctcctgggcaatggatcacctctctccaggcttcactttcctgtctctaaaatggtggtgtgaactccacaatcttgagggtcatttccatctttaacagtttgctatctcatagttctaatattgatcatgtaggaacattagtcattattttcaaaagagcaaacttctga

SEQ ID NO: 825909 - DNA, 616 bp, Homo sapiens
atagactcatgttacattgctggtactctcatagaataattttcttctttcctaagtgagaagaaaccaattacaaaccttgatttactttttcattatttcatgcagaaacaaacaaacaaaaaaaactggacaaaaacaaacaaaaaatacgactctaatcatggaaaaaccttaaaaaaaaaaactccattaacacacacagacacacaagaagctactcatgcaattctcctcgactgttcctcactctgattcagcagaaaggtgaggaggttgttaaatccaacaaagaaaatcacagtgggagacccttttcacatctgatcatgagttaactctgtgcggcattttccgtggtggttactgcagtgactgaggggaccaggagttgagggcagtatgatgtggggaacccacaggcctggtcctgttttctgagtctcctgggcaatggatcacctctctccaggcttcactttcctgtctctaaaatggtggtgtgaactccacaatcttgagggtcatttccatctttaacagtttgctatctcatagttctaatattratcatgtaggaacattagtcattattttcaaaagagcaaacttctga

SEQ ID NO: 825910 - DNA, 573 bp, Homo sapiens
acccaaatatcttcaatattaaggcagttccccagtgcaggaagcactaaatcccaagaaggtgagataataactgtatgtgcatggaggaacatggactcatacgattatggttggtaatgttctagaaagcactgtttgttttgcggtcccttattatttcctgttcagaatgattctgatgtcagaaaagatacatcctacgcagtttgtgtcagaagctgatcctcgagtgtaatttccttattacagggtctctgtccctacattttctttcctgccattattctctcaggtagtccaacttcagtattccttaaattctctagtggaaacttgatgaggcatttgcatgcctgggcccactctcctaggggtggagttagaatgtatgaacatggccatctctgtgtcccctcattctcttgagagatggacattcttggcactggatgcacaccttataagttttaaggaaaggatgaaaaggcaatgagtgataatgctgtccatcttataacatgttcawtctgtgctattaatctaaaatttctcttttaagagaaagtatag

SEQ ID NO: 825911 - DNA, 460 bp, Homo sapiens
tgtctctctctgccttttagtctctcttcctatttctctccctactcttcctctcaggctcctctgtctctctccccmtctctcttcctctctctctctctcactcccttctccccatctctttctgtctccttcttctccacttctgtctccctcctcctctccctctctgcagctgttgaggcaggactcctaggccacctttcagggtacctgcaggcaagcaggaccttggcccccatctcccagcaccctcaaggtcaggggtgtgcgcctttccatgctctcctgggtgggcaccccacactccaggaagcagaagctgcaggtcactgctgactagagtggcacaccgacggggtgcttccacttgtaattgtgacttccatcttgtgatctgctgaggtcaaagcagaggacacatgctcaggccggaccctgcaccagggtgggggtaggg

SEQ ID NO: 825912 - DNA, 460 bp, Homo sapiens
tgtctctctctgccttttagtctctcttcctatttctctccctactcttcctctcaggctcctctgtctctctccccctctctcttcctctctctctmtctcactcccttctccccatctctttctgtctccttcttctccacttctgtctccctcctcctctccctctctgcagctgttgaggcaggactcctaggccacctttcagggtacctgcaggcaagcaggaccttggcccccatctcccagcaccctcaaggtcaggggtgtgcgcctttccatgctctcctgggtgggcaccccacactccaggaagcagaagctgcaggtcactgctgactagagtggcacaccgacggggtgcttccacttgtaattgtgacttccatcttgtgatctgctgaggtcaaagcagaggacacatgctcaggccggaccctgcaccagggtgggggtaggg

SEQ ID NO: 825913 - DNA, 317 bp, Homo sapiens
  misc_feature 1, 2, 3, 4, 5, 6, 7, 8, 9, 10, 11, 12, 13, 14, 15, 16, 17,18, 19, 20, 21, 22, 23, 24, 25, 26, 27, 28, 29, 30, 31,32, 33, 34, 35, 36, 37, 38, 39, 40: n = A,T,C or G
nnnnnnnnnnnnnnnnnnnnnnnnnnnnnnnnnnnnnnnnaaggtgagttttacttgcatgtttcaccagaaggtgaaagagatctgctaaggtgtgattgcatgtttcaccaaaaggtgaaagacctgatarctacaaaacacacctagaaagagtaaactgtgcctgccctctgttgcaggggttccatcaagatttatacagtactagtgtttcagtctccttttgcccctggtgttcaatgaggtctgggctcttgtcccacagccaagaagagtaaggcacatggacactggggagtaagtaagatagagta

SEQ ID NO: 825914 - DNA, 625 bp, Homo sapiens
tttatatcagccactgaattagcttcttgaactgcaaaaaatggtaaaaagtcatggtttcttyacccaaggaattggcagtactttcacagtcaactgagaggacagaaacacgagtcattactgtaaaagagaaggaatgcaacattggtgtgaatgaaacacaatacaggagcatagtagaacaggttttaaaacatgatataaaaagacctacttttaaacaaactgtatatacctatacctacatttattcaggaatataatctttagtaataattttaataaggaacagttataattaactttatttcaaagttcgtaatctagaaaaatattattttaaatgaataaggagaacgcgttgtattcatgagagaggatattttttaagttttccagaaatattggtatgttctccacatgatcactgtcatatacagtctcagtgccattaaaactttgtaccccagaaacactgttaacttacatagctgcaactgaaggaatctatatctatggatatttgttttatgtttgaacatggtacagattgtgatatctaaaatcagaagaattagctataggtgcatcctgttgttgtgcaaacaaaactacaggtggc

SEQ ID NO: 825915 - DNA, 489 bp, Homo sapiens
ttgtctcttcactctactgagtctttttgttgctattcagaatctttttagtttgatgcaatctcatttatctgtttttgctttattgactctgcttttggtgtcatattcaaaatatcattgccaaggtaaaagtcaagaagctctttccctatgtttctctgatacttttacatttttaggacttacatttaagtctttattttgatttaattttgttttttacaaggtatgagataagggtcgaattttcttctgggcatgtggatatccagcttttccatcacctctttgtgtgttcttggcacttttgtggaagatcaattgaccttggatgcgtgaatttattgctgagctctctatcccattccaatagtacactgctattttgattattatagctttgcagtatattttgaaatcaagcactrtgaaggctccagctttgttctttttgctcaagatgactttggctatgcagtcttttat

SEQ ID NO: 825916 - DNA, 537 bp, Homo sapiens
aaaaaagctattacatcatgataaggttgattttattcaaggtatgtaagggtggttcaacatacacaagtcaataaacatgattcattacataaatagaattaaagacaaaacaatatgattatctccatagatgcaaaaaaccatttgctaatatccgacatccattcacaataaaagccctcaacaaactaggcatagaaggaacatacttcaaaataataaaggctatagatggcaaacccacagccaacatcatactaaacaaagaaaagctgatagcaattcctctaagaattgaaacaagacaagtatgcccaatttcaccacttctattcaatgtagtgttagaagtcctagtcagagcaattagacaaaagaaagaaataaaaggcatccaaatctgaaatgaggaattcaaattatctctggttgaacatatgaktttatacctggaaaacccaaaagacctccaaaacactcttagatttgataaatgaattcagcaatgtttcaggatcccaaatcaacatacaa

SEQ ID NO: 825917 - DNA, 623 bp, Homo sapiens
aacattagagggcaatttaagaacaaacttttataatctagggtcagaatgctaacaagaacattgtcctctttactagagcctggaggagaaattttgctcatatctcagaatctggaaacactgtgcttctttggaatactgcttagtttttcatattttggaaactttaaatcttgtaaacaactctattttctctcttctttgccttttagggaagttttaagtcaaatttgcaggcatatctcaggatcatatggtatgttaggtgtgtcacaattagttttagttttattattgttctgtttattttttcccttcaacttggctgccccatttacttatctcagccttctaattgtacatatacaattcaaaaattgtatggaacttggtaattcatacattaaaagaaataagaataatttctagttctatgaggcccacttaataatcaagtcatgtgtttttctatgtttctggctcaatattaaaatgaagcctgaataatcctaaatttatataattactattcttaggtaatcctgtctatatatccactgattcagttgtgcttttataggacctctagtgacaatycctcaaaataaagattgctggaa

SEQ ID NO: 825918 - DNA, 463 bp, Homo sapiens
cagcatttattgagctctatcatgcctaaggccttgggaccatggcagtaatatttgctgacaggtaggtcttagcacattgctgcttcctatccccaatatagcraagtgaagacctcttagcatgtcccacaacaccattgatcagcctcttaccattctcatggctcagcattcttttctctgccttacaatctttttgcattctatatgctatttgctattaaagtggcaagaaggactctaggataaagattgagtaaaattgtgctttggagatttaatagtgaggtaaccttgggtaaatcacttaggctctctgttttcttacttgtaaaggttgagaattataaagcataccttaaacatccagtgtaaaaatcaatgagatacggcatgtaaattgattagcatggcatcctatatcagttaggtgtgtatttggtgataagtaacagaaaat

SEQ ID NO: 825919 - DNA, 623 bp, Homo sapiens
gacatttatgcagccaataaacatatgaaaaaaagctcatcatcactggtcattagagaaatgcaaatcraaaccacaatgagataccatctcatgccagttagaatggcagttttcaaaaaggaaacaacaaatgctggagaggatgtggagaaacaggagtgcttttacactgttggtgggagtgtaaattagttcaaccaatatggaagatattgtggcgatactcaaggatctagaactagaaatatcatttgacccagcaatcccattactgagtatatacccaaaggattataaatcattctaatcatgtaaaaagacacatgcacacgtatgtttcttgcagcactattcacaatagcaaagacttggaaccaacccaaatgcccaccaatgatagactgggtaaagaaaatgtggcacatatacaacatggaattctatgcagccataaaaaggaatgagttaatgtctttgcagggacatggataaaggtggaaaccatcattctcagcaaactaacacaggaacagaaaaccaaacaccgcattttctcgctcataagtggaagttgaacaatgagaacatatgggcacagcgagggaaatgtcacacaccag

SEQ ID NO: 825920 - DNA, 623 bp, Homo sapiens
gacatttatgcagccaataaacatatgaaaaaaagctcatcatcactggtcattagagaaatgcaaatcaaaaccacaatgagataccatctcatgccagttagaatggcarttttcaaaaaggaaacaacaaatgctggagaggatgtggagaaacaggagtgcttttacactgttggtgggagtgtaaattagttcaaccaatatggaagatattgtggcgatactcaaggatctagaactagaaatatcatttgacccagcaatcccattactgagtatatacccaaaggattataaatcattctaatcatgtaaaaagacacatgcacacgtatgtttcttgcagcactattcacaatagcaaagacttggaaccaacccaaatgcccaccaatgatagactgggtaaagaaaatgtggcacatatacaacatggaattctatgcagccataaaaaggaatgagttaatgtctttgcagggacatggataaaggtggaaaccatcattctcagcaaactaacacaggaacagaaaaccaaacaccgcattttctcgctcataagtggaagttgaacaatgagaacatatgggcacagcgagggaaatgtcacacaccag

SEQ ID NO: 825921 - DNA, 543 bp, Homo sapiens
aaggaaaaggtgaagtgacatgtactcccagataatgagatttctataaatttatagtatttatgaaagaatagaattaatgtagtaccttactataaagtaaaatagtaaattaaatagaacagagagttcatctatagacaaacatcatataaatgtgatttctggcagacactgtattgcagattgtctggaaaagaatcaacatttatttaaatagtgacataattgttatacacaagcacaaaaatgcaccaaattcaaacagcaaatgttttaaatcaaaacatagaaatataactatttcaaacttgtactatatgagaagaaataagaaaattattttaattccccttgtgaggggagaatctcttaagccagacataaaagtacaaactgtaaagaaaactttaataaatcaactatattaaaattaagaatatttatagcaacctaattyataatagccctaaactggaagctatctacataatagatgatgatgttcaatatttgcgttattaaacaaactgtggtacatcc

SEQ ID NO: 825922 - DNA, 543 bp, Homo sapiens
aaggaaaaggtgaagtgacatgtactcccagataatgagatttctataaatttatagtatttatgaaagaatagaattaatgtagtaccttactataaagtaaaatagtaaattaaatagaacagagagttcatctatagacaaacatcatataaatgtgatttctggcagacactgtattgcagattgtctggaaaagaatcaacatttatttaaatagtgacataattgttatacacaagcacaaaaatgcaccaaattcaaacagcaaatgttttaaatcaaaacatagaaatataactatttcaaacttgtactatatgagaagaaataagaaaattattttaattccccttgtgaggggagaatctcttaagccagacataaaagtacaaactgtaaagaaaactttaataaatcaactatattaaaattaagaatatttatagcaacctaattcataatagccctaaactggaagctatctacataatagatgatgatgttcaatayttgcgttattaaacaaactgtggtacatcc

SEQ ID NO: 825923 - DNA, 602 bp, Homo sapiens
tcaccatcgttgaatggcattttgaaaaaaaagtggttaaatttgaaattgtaaaacataattgtcacaagcagagagaaaaaactgggaaaattttaatttatgaaactttataccacttttgtaatgttctaaagtaaaatttcatccaattgtgattttaaaagtaatataaatagtggatgttcttttgaattgagaggaatacattataaaaatcatcctgaatggtgctgtatataactctgtaacatatttctcatagatggggagaaggtaggcttgagttggaatcgaactctaaagtcttaataagagagtggtggaaaggcaatgggtaaatagccaagaaagatttagtaacatgcctgtaataacagtacacatataatcaggttctctgtttagaatgtctaaagaattagcctatagttcatgtttttggtaatcatagcaacaataattttgcagccatttgtggaccaaaaaagtgcctttgggcaagcyttaggattaaggcaggaggttgtgaaactctagtggagcccaaaaactaggaggggtgttttgagaggagaaacccatgcttaagtgtcagactt

SEQ ID NO: 825924 - DNA, 600 bp, Homo sapiens
attgtcacaagcagagagaaaaaactgggaaaattttaatttatgaaactttataccacttttgtaatgttctaaagtaaaatttcatccaattgtgattttaaaagtaatataaatagtggatgttcttttgaattgagaggaatacattataaaaatcatcctgaatggtgctgtatataactctgtaacatatttctcatagatggggagaaggtaggcttgagttggaatcgaactctaaagtcttaataagagagtggtggaaaggcaatgggtaaatagccaagaaagatttagtaacatgcctgtaataacagtacacatataatcaggttctctgtttagaatgtctaaagaattagcctatagttcatgtttttggtaatcatagcaacaataattttgcagccatttgtggaccaaaaaagtgcctttgggcaagccttaggattaaggcaggaggttgtgaaactctagtggagcccaaaaactaggagggstgttttgagaggagaaacccatgcttaagtgtcagacttactgctgcagggtcctcgctccagaccaagaaatggactcatctccttgtggatttgg

SEQ ID NO: 825925 - DNA, 575 bp, Homo sapiens
caatgctgtatggaataccatgacagtgggtaaggcattccttgagttcacaaatggtagtcttggcagaagcactgggtgcaggataakcaaacccatagccgtagtaagtgtgtattccagtgaggacaaacctctgccctttccatgatgaaagatgtccaatataatcaacttaacaccaggtagctggctgatcaccctgaggaatggtgctatatcgcgggctcagtgttggtctctgctgctggcaaactgggcactcagcagtggccatagccaggtcagccttggtgagtggaagtctatgttgctgagcccatgtgtaacctccatccctactaccatggccactttgttcatagacccattgggcgatgacaagggtggctggggaaagaggctgagtgttgtccacagaacgggtcatcctatccacttgattattaaaatcctcctctgctaaggttgcccgttggtgagcactcatgtgggatacaaatatcttcatggtttttgaccactcagagaagtccatccacaaacctcttccccaaatttctttgtcaccaatt

SEQ ID NO: 825926 - DNA, 261 bp, Homo sapiens
gcatatgcttttccttcttgatttaatttacatagattgttctatttttcatttttcctctcattttatgtatgtttactaagaaatttatcactttgttttcttctgaattttgaaatttggccataatttatgtcagaacctrtatttccttgtcaatatttgctaggtttgcagtagtgcttgggaatgtgtgaaaggttattttttttttaagtaaaggtggcatctaagatgataagtagaaaagttcttaattaa

SEQ ID NO: 825927 - DNA, 553 bp, Homo sapiens
tttttttttttgagacggagtctcactctgtcacyaggctggagtgcagtggtgtgaccttggctcgctgcaacctctgcctcctggttcaagcaattttcctgcctcagcctcctgagtagctgggactacaggcacacaccaccacacccagctaattattgtatttttagtagagacggggtttcaccatgttggccaggatggccttgatctcttgaccttgtgatccacctgcctaggcctcccaaagttctaggattacaggtgtgaggcattgcgcccagcctccacttacttaatttttaaaatgagcctgttaggtaacaatattaagcacaccactatatgtgtgtaatataatatttttatattgtaatatattatttgacttttacttgtaatcgttagcaaccatttgtaaaatacctaatttgatgctagcactatagtaagcaatttacatgcattagctactcaatctttaccataaccctatgagatatatgttataccattttacagatgagaaaagtgagtctattgcaaccca

SEQ ID NO: 825928 - DNA, 615 bp, Homo sapiens
ttcttctctcaactcgtcaaagtcattctccattcagctttgttccattgctggtgaggaactgcattcctttggaggaggagaggcactctgctttatagagtttccagtttttctgctctgtttttaccccatctttgtggttttatctacttttggtctttgatgatggtgatgtacagatgggtttttggtgtggatgtcctttctgtttgttagttttccttctaacagtcaggaccctcagctgcaggtctgttggagtttgctagaggtccactccagaccctgtttgcctgggtatcagcagcagtggctgcagaacaacagattttcatgaaccacaaattctgttgtgtgatcactcctctggaagttttgtctcagaggattacccggccatgtgaggtgtcagtcttgcccctactgagaggtgcctcccagttaggctgctcggaggtcaggggtcagggacccacttgaggaggcagtctgctcrttctcagatctccagctgtttgctgggagaaccactgctcccttaaaagctgtcagaaagggacatttaagcctgcagaggttactgttgtctttttgtttgtctgtaccctgccc

SEQ ID NO: 825929 - DNA, 554 bp, Homo sapiens
ctgagcagtttgaggcctattgtgaaaaaggaagtatctttgcaaaaaactagaaagaatctttctgagaatcttctttgtgatgtgtgcattcatctcgcagagttgaaactttcttttaattcagcagtttggaaacagtctttttttagaatctgtaaaggatattcagcagcccttcaagtcctatggtgaaaaaggaaatatcttcacataaaaactagacagaagctttctgaggaacttctttgtgatatgtgcattcatatcatagagttgaaactttctttttattgagcagtttggaaacagtctttttgtagaatctgcaaaagatattttggagccctttgagttctatggtgaaaaaggaaataactatgcataaaaacttgacagaaggtttctgagaaacttctttgtgatgtgtgcattcaactcagagttgaaaatttcttttgattgagcagtttggaaacagtytttttcttgaatctggaaagggatgttagggatccctttgaagcccactgtgaaaaacggacagaaaccag

SEQ ID NO: 825930 - DNA, 583 bp, Homo sapiens
aatctgcaaagggatatttttgagggatttgaggactacagtgaataaggaaatatcttctaagaaaaactacacagaagctttcagggaaaattgtttgtgatgtgtgcattcaactyaaggaattaaaatttttatttgattgagcagttaggaaacagtcttttggtagaacatgcaaattgatatttgggagtcctttgagggcctatggtgaaaaaggaaatatgttcacataaatactagacacaagctttcagagaagcttctttttgatgtgtgcattcaactcacagagttgaaccttactttcgattgagcagttttgaaagtctttttgtagaatctgcaaagggatatttgggatacctttgaggaccatggtgaaaaagggaatatcttcacaaaaaaactagacagaagctttctgggaaacgtctttgtgacgtgtctattcatctcactgagttgaacctttcttttgtttgagcagttgggaaacagtcttcttgtaaattctgcaaagggatatttggagccctttgaggcctacggtgaaaaagcaaatatcttcacgtaaaaa

SEQ ID NO: 825931 - DNA, 618 bp, Homo sapiens
acacaagctttcagagaagcttctttttgatgtgtgcattcaactcacagagttgaaccttactttcgattgagcagttttgaaagtctttttgtagaatctgcaaaggratatttgggatacctttgaggaccatggtgaaaaagggaatatcttcacaaaaaaactagacagaagctttctgggaaacgtctttgtgacgtgtctattcatctcactgagttgaacctttcttttgtttgagcagttgggaaacagtcttcttgtaaattctgcaaagggatatttggagccctttgaggcctacggtgaaaaagcaaatatcttcacgtaaaaactagtcagaagctttctgagaaacttctttgtgatgtgtaaattcatctgccagagttgaacctttattttgattgagcagtttggaaacagttttcttgtaggatttgcaaaaggatatttgggagccctttgaagctcatggtgaaaaaggaaatatgttcacataaaaattgtacagaagttttctgagaaacttctttgtgatgcgtgtattcatctgacagagttcaacctttgttttgattgagtagtttggaatcagtctttttgtagaatctg

SEQ ID NO: 825932 - DNA, 526 bp, Homo sapiens
atccctattaaaaaaaaaaaatctgagttgggggtggtgactggctgattggaaagggattcctgagagggtggatccctggtcaggagaaatgtcaccggggggtggtcactggcaggcgcctgaagatggggaaagccagcaagaggagcctgtcacctcacggggaggggctgagtgtcacccctagaggccacacaagggagagccgcagctgaagactgtgagagtcctgctcgtggccccttgtgctgtgtgctgcacagggctgcagtcaccttacatcacatggtgcagcggccctgaggaatatgtcatgttgaagaggaggaaagcaggtgtgcacctggagggaaattactgcggccgtaatctgagtgttgtctggggcggggacaggatcgcctgtgggggtcacagacaggatgctggcctgtgcrggcttttgtttcgtggcagggagtgctggcggtgggagatgtccctgcggagggggccacctcttggaggtgttccagtgctgggg

SEQ ID NO: 825933 - DNA, 611 bp, Homo sapiens
gcatcgtaaaaccttcagaaggaaaggagaatgttctgtggaccactttggttttcttttttgcgtgtggcagttttaagttactagcttttaaaatcagccctttttaatggaaacaacttgaccaaaaatttgtcacagaattttgagacccatttaaaaagtttaatgaggaaaaaaaaggttgaaaaattgtcatgaccccaaatgttcttgcttaaagtcacccagatagtaatgtaacagtgcaacagtaaaacaactaacatgactgactccatttttgtttaagagggctttacccattcccgcacataggttagaataattttagagcactaagattacatgcagaaaacagcaatcatgtggtttttaaactaagtctgggattaaggaaagaatgcaaacaactactatgtcttgttaaagatttgtaggagcattgtgacccgaccacggacaaagtggttccccatctcctccatctgtcactggagcccagatgtctacagacctcygtcacctcttgatacaaacaccctcctcttccctatatccttctcccacaaaaatcctgcggccagcctggaaatttgaaggtggtactt

SEQ ID NO: 825934 - DNA, 624 bp, Homo sapiens
gactattatcagaaagatccaagataacaaatgttggtaaggatgtaaagaaaagggaacccttatacactgttggtggtattgtaaatttgtacagccattttggaaaataggatgaactttcctcaaaaatctatgaacagaactactgtatgatccagcaatttcactgctagtcatgcacacaaaggaggtttaatcactatgtcaggaatatctgcactcttatgtttattgcagcattacgcacaacagccaagttatggaaacaacctaagtatccatcaaccaatgaacagattaaaaatgtggtatacatacacaatggaatactattcagtcagaaaaagaatgaaaacctgtcattcataacaacaccaatgaacctagaggccattatgttaggtgaaataagccaagcacacagaagataccctgtgattttccttgtatacaaaatattttaagaagtcaaattcacagaagtagagggtagaatggtggttactagagtactggaggctggrgcggggagtggtgatggggaaaggaaggatgttggccaatgggcactaaattagttagagagaaagaaaaagttctggtgttctattgcatagcaag

SEQ ID NO: 825935 - DNA, 484 bp, Homo sapiens
atccaacaccagaatatgcattmttttcaagtgccaatgaaatgaaacatgctgtctagggcagttttgagaggaaaatctatagcactagtagcacatattagaaaaaaggaaaaatcacaaatctgtagttgaagtttccatctttagaacccagaaaaagacaagcaaaataaacccaaagcaagcagaagagagcaaaaattaagacaagagcagaaatcaatgttatttagaacataaaaaaagaaagaaaatcaatgaaacaaaaacttgatcctttgggaaaatctttaaaattggcaaacatctagtaaggtgtttttgacaaaaaaaaaaaaaaaaaagaaaacacacattaccaatagcagaaatgaaacgggaatattgttactgcagataagaaaaggataatataagagtactaggaacaactctacaaacataaatgttatgtcttagaagcagcagatcaattatttga

SEQ ID NO: 825936 - DNA, 561 bp, Homo sapiens
ggtaattttatattatattttaaataaatytgtgcatgaaacaaagtttgtgtacactgaagcaccaaaaagcaaaagtgtcactatctcagccacccaggtagacaatctgtggttgctgggcatcaccatcattccggactcggaatttacatgctattaataggcaatcattgtcttacacttgttcacacaaatacttaacagtaaaaaatatgacgtatcaatacagtgaaaaacaatgagttctggggaactaagcagcacagtagcatcgccagaatacctgcatcaactgttaaacagcagctacaacaaacagctacaagctttcaacctccaactacgatgctgtgttttgattaaaaggctattgtacactgtattttatttttttaggtgagaagaaacatcagaagcatttgaggggccagaagtgggtcctctagtaatgaggaggcattctgctagatggctttgtaaaatgtttcctccctagtcaactgcctcattaacaatggtttttgtcttaggagtctctcttcagttttataaactgac

SEQ ID NO: 825937 - DNA, 540 bp, Homo sapiens
caacaacaaccagaacccctccacccccacccctggccccccagagctcactatgagataakgagattggctttattaattgtgtctttttctgcatttggctgctctggcttcttgggactttgctgacccttgggactgcccctcccaaggttagctcattcctagatacagtaaatgagtcaggttgagcatgtctttcaaatgcgaaccaaccaatccagagcctccatccccagccacctcctctattgggcgcttacactctgggccacactccacctgcccttaatccccccagggccaggtcccagacaactagggacagccccatgccccagagcctgctgaaatcatgcaaactagccgatcgtaaccctgctcaccctgcctcacctgttccttctgtggaaaccccagtaaaggcccttacttatacttccccctctccctctgcctcctgacccacctggtgcttccctgtgtggccctacatggcatccagtgccccctgcttctacagatctgtgagtataaaaa

SEQ ID NO: 825938 - DNA, 592 bp, Homo sapiens
cacactggattgttttcattcagggaccaggatgagagagtggcccctatttggacatgcttttcctagagcagagaaaaggacagtgacagactgtgcaatgatgstgtaagcaagacacttcgatgtggcatacatctcttctgatcacagtctattggccaaagcaagtcacatggcagaaccagatttctttgaggtgagaacaaataatcctcctcactgggaggggcacacaaaatttaaaatgttttccaataaatacatagtcagtgtgcaatgaaaacagatggaagaagtcttccataaatacatattgaggagtatataaaggaagacacaaagatacagaaaaataggaactcacctaccaatgataaccaaggttgaattaatgttagaatagggccaaaatttcccctacaacaccaatcaaaccaggctaggtaaaatacagacaccttttgcttcctgatgtgcctgtcctttcaacattttagagaacacaactaatgaaacgtagggagatgcttcatcaattccaccaatgaagtagagacagcaaaaaacttggcaacacatgaagaaactg

SEQ ID NO: 825939 - DNA, 565 bp, Homo sapiens
ttagaaactgaactcattatttttccttccagatttcttcttgattttatctttccttttgtgcaatgcaccaaagcaagatcgtctcaatttcatagccaggttattggcatcaygcagttccctgttgctcaagctccaacaagttgctatccttgacttctcccattccactacttctctatccaaagaatgggtggttcctgtcaattctgcttcccgagaggtcctcagatccatcttcccagtctggctgcagctgttctgacccaggtcattgtttttcactgtattattgtgtattgtgatgacctccaaaggttagtctctgtccacaccatcaccaggttcatcttctgagagcatcaacacagcccgtttcttgcctccttagaggccttctctctcagtcagaatcgagaactcgcttagatacttgcacacgcatttttataacagcacaattcgcagttgcaaaaatatggaaccaacccaaatgcccatcaatcaatgagtggataaagaaactgtgttttatatatatatgaaggaatactactcagcc

SEQ ID NO: 825940 - DNA, 638 bp, Homo sapiens
agtgtttgatgaatgtgacatctgccttctaktttacatttaaggcactttcctaaatattatctcagaccttttatttaatactaaactaatttagcagctcaacagaatttctgaaaaggcttcagtatgctaatgtgcattacaaatctctaagagatgttataaaattaatcatttctcattcatttcccttcaagcattattaaccttccatgggtccagaattccacagaacacagcttagaaagtgtttacactgaaaggttttgaggtctttaggtgtatggcctgtgcttcaatcaaatctctatcttcagaaccaagatcacagattttttaaaaaaacaacagcaaataaaaacattttaatgctcatatcaaatagttaatggcagagatgggatttaattattatttgcagtcttctgctatgtgaactcaggtggtcaggcttcctgctggaggtggagaggagatagggcagaaaggatatcaaataggtaattaacaaataaatgctctggtagtgtgacttgaggcaaattttgcaaacgatctgggcctcatatgcttcctctggtaggaaatagagaaagaattagcttaatgacttctgaaatgcccagtatctctaa

SEQ ID NO: 825941 - DNA, 506 bp, Homo sapiens
ctcttacgactgagtcccaccttctactctaagctatttgcacctcaatgtaccatgtcctatccatttcacagttgkctgagggccacttttttccagactgcacactcaggtttaggcattaactgctgacagatagcttttggccagtagcccagactctgcttcagattatgttatgtattgtatatgcattcttaacattaattgttaaataaccatactaattctaaatcacaaggttctcatgaagatgacagcaaaaaaaacagtgaatatttagatgaagataaattagaaatggcagtaggatgaccgtgagcagaatttcatactctgtggaatacgtaagatatttttaacaatcaagtactgtttaagaggcagcattaaagtgagcagcgctcaagcaagctaatctacagatttaccgggtcaaacgtcagtgacctttgggccctaagcctgggaccctgggactcaacaaatacctggacactactgac

SEQ ID NO: 825942 - DNA, 607 bp, Homo sapiens
cttttatttaaaagaaaagcagaacataaaaatttgaaaaatttgcaaaacgggccaatgtacagcccaggctgtttcttcagagggtgcaagccccaagccttggcagcttccrtgtgatgttgggcctgagtgtgcatagaagataagaattgaggtttggaaacgtctgcctagatttcagaggatgtatggaaatgcctggatttccaggtagaactctgctgcaggggcagagccctcatggagaacctctgctagggcaattcagaagggaaatgtggggccggagaccccacacagaatccctactggggcactgcttagtggagctgtgagaaaagggccagcatcctctagactctagaatggtagatccactgacagcttgtacctgtacctgcaaaagccacaggcactcaatgccagctcatgaaaacagccacaggggctgtaccctgcagagccacaggggcagagctgcccgaggccttgggagcccaccccttgcatcagcatgccctggatatgagacatgaggtcaaaggagattatttggaactttaagattgaatgactgacctactggatttcaaacttgcatagg

SEQ ID NO: 825943 - DNA, 519 bp, Homo sapiens
  misc_feature 55: n = A,T,C or G
tgttgtattgagccactgagattttatggttatttgttatcacagtacaagtagnccttttttttttttttttttttttttttttttttttttttttttgagactgagtttctctcctgctgcccaggctggagtgcaatggctcaatttcggctcctctgcctcctgggttgcaattctcctgcctcagtctccccgagtagctggaatcacaggagtccaccaccatgtgtggttaattttttgtatttttagtagagaccaggctttcaccatgttggccaggctggtctcgaactcctgacctcaggtgatccacctgcctcaggctcccagagtggtgggattacaggtgtgagccaccgcgcctggcccaattgtctgtcttgactaacttggaaattggtaactgagatggggtgatgcagaacaaagttgtatcatgttggtttggtgrtcaggttataggtggtaactgagtaaactaatattagggactggaaaagtggtgattgttga

SEQ ID NO: 825944 - DNA, 476 bp, Homo sapiens
cacaagtggggaggctctcaccattccattctatacacatagtacatgcaggacattggggtcaactgatgaggctcaaaaaggtatgatgcacagtttctgctgtcatgtagcctggaatttagtagatggatagctctatgcattgaataataatataaaatatgatccagttactaaaagagtcaaattaatgttcagtaaaaggtcagacagcaggaaaatagttcagacaaagcacatgagaaaggtgtttatagaataagggacttcttaagaccaaggaaaaagggtagatatagttaagaggaatggagagattattctaggctgagcatcatstaacccaaaggtggagccttatatgatgtatacaggacatgaaaggtagatgaacttggctgaaattgagagttggtagagagaagagtaagaatctcatttccataaaggcagagatttggtttatcttgcta

SEQ ID NO: 825945 - DNA, 476 bp, Homo sapiens
cacaagtggggaggctctcaccattccattctatacacatagtacatgcaggacattggggtcaactgatgaggctcaaaaaggtatgatgcacagtttctgctgtcatgtagcctggaatttagtagatggatagctctatgcattgaataataatataaaatatgatccagttactaaaagagtcaaattaatgttcagtaaaaggtcagacagcaggaaaatagttcagacaaagcacatgagaaaggtgtttatagaataagggacttcttaagaccaaggaaaaagggtagatatagttaagaggaatggagagattattctaggctgagcatcatctaacccaaaggtggagccttatatgatgtatacaggacatgaaaggtagatgaacttggctgaaattgagagttggtagagagaagagtaagaatctcatttccataarggcagagatttggtttatcttgcta

SEQ ID NO: 825946 - DNA, 484 bp, Homo sapiens
tttatatgtaaatcgtgactcactcaacatatttcattgcccaacaatgaagaccagcccattgtttaaacactctgatctaacttttctaaacccttgccctttttctaggactggttcatttacatctcatttagccattcatttatttaatttttaaaaagtattaattccctataggaaaccaggcacttctctacgcactgggaataaaataataatgagcacaccaaagaaattcctgccctcataaagtttgcagtgtccacccccccaaaacagcagatcatccatgcccgtctcttcttaatggatttacctatttcacccatttcattgtgatatcatactactttactctcctcatcttttaatgtgagttccatctacacaaatagactgtracatctttcaagagatgaatctgattatacatatatgcactctgtatctttacttactaaaggaatagggtaaggcaaag

SEQ ID NO: 825947 - DNA, 567 bp, Homo sapiens
aaatacataatctgtatttatatgggtcaccctgaccctcagaaacccagttgaacttaacctaaaccttgtgtctacggtcctatgggactccagaagccagatagcatgtttgctgtctttgagactgcaccttacttcttcgtacttgttttcagccttttgctttgcatcaccttgactcaaatctcaatgccttcactggtttctacaagaaacccattcacagaaaatagttgtgttttctaaaagtctatgttgaagacttaggtgggcaggggtagaggcaatggctgtattactggatgtgaaaaattatggagaaggttacaaattgtaatatgatgttctgctatctcctggctccactgtcaccttctcttccttcttcctttcttttctgtccctcacccctcactttaaaaaaaagaaaaggcggggcrcggtggctcacgcctgtaatcccagcactttgggaggctgaggtggggggatcacgaggtcaggagatcgggaccatcctggctaccacggtgaaaccccgtctctactaaaaaatacaaaaaa

SEQ ID NO: 825948 - DNA, 622 bp, Homo sapiens
ctttggcaggcccccacaggtgaatcacagtggaggcctctaggattttggagcacggctctgccatattctgcagataactactctcctcttgagagacagctcttggcctgttactgggctctggtggaaactgaatgtctgactataggtcatcaagtcgccatgtgacctgaattatcatgaactgagtgctttctgacccatctagccataaagtgggtcatgcacagcagcattccatcatcaaatggaagtgatatatgtgtgatcgggctcaagcaagtcctgaaggcacaagtaagttacgtgaggaagtggctcaaaggcccatggtccccactcctgccaccctgccttctctcttctggcctgcaccagtggtttcatggagagttccttatgatcagttgacagagaaagagaagactagggcctggttcataaatggttctgcacgatatgcagacaccacccaaaaatggacaactgcagcactacagccsctttctaggatatccctgaaggacagtggcaaagggaaatcttccctgtaggcagaacttcaagcactgcacctggttgtgcactttgcttagaagaagaagtggccagatgtgcg

SEQ ID NO: 825949 - DNA, 598 bp, Homo sapiens
tactttggttaccttgggtccccaagggtcaacataggccaggctggtgctcccctcataggacagtgaaggaggtaaaagaagtcaaaacagtctgctgagatttgagtgttcttcacaagtcaaatcctaggctcatcaaaagtttggccaaacatggaaggacacaataaataccacataattatcaatcaatttatcaacaaatattgactggcctatgttgaagcatgttatgggagataaaggacagataaaacgtcatccttacattaaaagatatggccttattttacaacccagttaaaaagaaaattctaaaaattcttacagaatttcaagtggggagagagtcctgtggctggaaccctgaagatgtgagctttggctgggatgtgatttgaaaagatgaatgccattgagaaaggtattaaaggtggggaaacataagtacaatcgcagaatcaggaaaatcrtggtaaattttggtcagagtcaagtagtctcagtagtttctctaaagaatagagtaaaaatcaatccagctagtataaaatgttctaacaaatcaaaggagtgcctcgaatgccagactggg

SEQ ID NO: 825950 - DNA, 599 bp, Homo sapiens
tgaacacatggatgattgaatggggtttacaaagattaatggtgtggcagtagacattctaattggggtaggcacaaactcatggcaagaaaaaccagacattgttggaagagtctagaggtgaatttataagtccctcacaggaattgacaaatgctcagatactgtctgtctcagttcagtgagctcctggctaaagatgggtgatatttaaaattgcaactcaatattccttctagttcaatgtcagtgcaacttgttataaagacacagaacaggatttgaagaaataacttgtaaaaataaaattatatcatcagaattactaataccttgactacctgcacaatagtaaccttgaatcccaacactgtattcagtctaataaaaacatttattgagtaatgttaaattcacaggccttatagttgaactctttttaaatctgtgatatcaatgtaggtactttctcaagaaacccaaaatacatttttgatattcaggaatactaaaatcaagttaaygtttgagtggtatgttaatgtgtagttgcttacttgcaagaacaaaaatacaactgaaactagcctagggaaggt

SEQ ID NO: 825951 - DNA, 544 bp, Homo sapiens
gaccagcttcttgcactctaaggaaaacctggcagccaaaaatcctaggcttttacatctccagccctgggaggaacrccatcacttctccacgctctaattggctaacaggccaacattccaactcctgtggccaatcatctgttacctggagatgtaaaggaatatgattggcagtggtcattgaagccacagggttgaggcttttgggtgatgagcagaaacctttctcaggagaagagccatggctgtcttccgccatctcactgtgctgtagaccaacaggaggctgctgctgtccttatttgctctgcagagatttctgtttttaaccccatgtcttgataagagaatgcaggtgcattagtttcctaggccgccataactgactaccactgggggacttaaacaagtgaaatttatgcctcttggttctagaagttggaagtctgagatcaaggcaggattagttccttcccagggatatgagagagaagctcttccaggcctttctctgagtttctcgtgggctcccggcaatctt

SEQ ID NO: 825952 - DNA, 630 bp, Homo sapiens
agtctaatcatgagattgcagtaattcagtcacatctccaggcaggctccaattctaattctagttctcttgccaccatatttgcaattatttcttctagtgaagtctcaaactcctctaagtcattcatggattattaaaattcacttcttccaaactcttattaatgttaatatcttgacctcatccaggtatcataaatgttctcaatggcatctgtaatggccaaactgttgcagaatgttttcaatttagtttgcccatatccatcagacaaattactatcaatggcaactatagccttatgaaatctatttcttaaataaaaaaacttgaaagtaaaaattctcctggctccatggggtgcagaatggatattgtgttagcaagaatgaaaataaaatcaatttctttctacatttccatcagagccccttgggtgaccaggtgtattgtcaatgagaagcaatattttgaagaaatcttcttttgagctgttagtctcaacagaggcttaaaatattcattcaaccattctgtgaacagacagtagaacaaaactttcaaagtgytcacacaatacagctatgagtttggaattgtaagaaaaagacatttaaagacacgtgt

SEQ ID NO: 825953 - DNA, 340 bp, Homo sapiens
aacacacaggtgcatgtgtctttatggtgcaatgatttatatttctttggatatatacctaataatgggattgctgtgtcaaatggtaattctcttttaagtttattgagaaatcaccaawctgctttccataatggctgaactaatttacattcctaacagcagtgttgagcattttttcatgtgcttgttggaagcatatacgtcttcttttaaaaggtatctgctcgtgttctttgcctacctttttatagggttgttttgtgcttgtaaagttaaattccttatagactctagatattagacctctgttggatccatagtttgcaaaatgtttttc

SEQ ID NO: 825954 - DNA, 498 bp, Homo sapiens
actgtagaaaaagcgtggcctgaggtcaaaaacacagattggattttagagcaagcacctggggtctctgtcctcatgctccctgtagttgaagatctacaaggtgtgttctcatggtcacaaatgctcttcctctgtgaagtgatccacttatattttatctcctcttttggacactgcacttctttaaaggagcatcaagtcttgtttatctttgtatctatagaacctagcctatgctagataaaatgttttctaagtgaatagcttttatctaatataatcaccaagacacaatcccatcctctacttcttattgtgtctcaagagcattagtgtgaatgtgtgtgtgtgcatgtagatgcgcacatagaaattgaaaacacagtttccgaaattagagaggtagttttctcttgctcttgrcaaatgatctcaggcaattttcttaatccaaataatattttcttttccaccttcaaaactgggttaatggtt

SEQ ID NO: 825955 - DNA, 498 bp, Homo sapiens
actgtagaaaaagcgtggcctgaggtcaaaaacacagattggattttagagcaagcacctggggtctctgtcctcatgctccctgtagttgaagatctacaaggtgtgttctcatggtcacaaatgctcttcctctgtgaagtgatccacttatattttatctcctcttttggacactgcacttctttaaaggagcatcaagtcttgtttatctttgtatctatagaacctagcctatgctagataaaatgttttctaagtgaatagcttttatctaatataatcaccaagacacaatcccatcctctacttcttattgtgtctcaagagcattagtgtgaatgtgtgtgtgtgcatgtagatgcgcacatagaaattgaaaacacagtttccgaaattagagaggtagttttctcttgctcttgacaaatgatctcrggcaattttcttaatccaaataatattttcttttccaccttcaaaactgggttaatggtt

SEQ ID NO: 825956 - DNA, 669 bp, Homo sapiens
tataaactgactttttaaccaagcattaggcaagatctgggtgcaagccattctataataaacagtgacatggctatattaaaatatttacttagtgtgctaaagtgacttataggaagagtggctactacatagaagtcctaagtattaaggcgtcaggtgccacgggcagcataaatattccatgtgcacttgtttataggaaaaccccatctggattcggctaaaacagcaggcaccctggtgaccccagttttgctattggaaaatataacacaagtgttcactcatctagaataactacagtgctaagtgccaaatgacagatgggaggggattggcttttctcaataaaatccaggcactccattgtgaagggtttcattgtaaggcctcctccacatttatagactctcagagtagacacgcagctagacaaggcaaggtgctgggtcagactgaccaaagcctgcctagtcaggcagttaaggttaggattagggttagggccttgcctatacacaatgtgcaagctcgacaggatttggaagacttggcctggaacartccatcagcgtcatcaatccccacccttaactccacttcccctctaacttagttatgctgaatgatgattaagcagataagctgaggaccaagcctggtgag

SEQ ID NO: 825957 - DNA, 598 bp, Homo sapiens
tttgagtgaggagggaaggcaacccatcctttagctttggaaggaccacatttagattaaactttttttttagtgcaaactcataagcttatttagaaagagctctttaatggtcttatttagcgtatcagaacttagaccatcggaagttctttttgaagtctgacctaaaagctgaacttcttccttcactcatttcagcccacctttatctcccattcggtagaaacgctacaaactctactcatcatccattctaaatcttcacatttggaaaaacagactctgcaagtgaaaaccagtaatgcttgtattttcaatgtcatcttttctttaaaatgatgttaaatgattctaggagtgcagatttgtgttttaggtatatggatggttccggatatctgttaggtatactctctgggttttcatgggatgagagatagtaagaaaagtatagcaagaaagctttggaaagagccatttccctaggtattgtgtttgcaagcatcrtaacctcattcctgagggcacaggcactgtatctgaaagctttgctgtgcagacatccattcagcaaacatttaatggcaatgtccag

SEQ ID NO: 825958 - DNA, 661 bp, Homo sapiens
gtgtgctgctgatttcattttctttggatatatacccagaagagggattgctgggccatatggtagttctatttttaatttttcgagaactcataggaacagaaagcggaacrgtggttaccacaggcagagggttaagggaaaagagaagatgttggtcaaatggtataaactttcatttataagatgaatagtttcggccgggcacagtggctcatgcctgtaatcccaacactttgggaggctgaggcgggtggatcacctgaggtcaggagttcgagaccagcctggccaacatggtgaaaccccatatctactaaaaatacaaaaagttagccaggcgtggtgttgggtgcccgtaatcccagctatctgggaggctgaggcaggagaatcgcttgaacctgggaggcggaggttgcaatgagccgagatcatgctgatgcactctagcctgggtgacagagcaagactctgtctcaaaaaaataaaaataaaataaaaggatgaataatttcaggacatttaatatacagcacagtgcttatagttaatgatacttaattgcatacttgaaatttgcttaagtggtctcaccacttaatcacaaaaaaagagtaactagatgcagtaatagatgtgtaggtatgttaagtaactg

SEQ ID NO: 825959 - DNA, 566 bp, Homo sapiens
gcatggtgatggggatcatgttaagagattaaaacrtgaacgtggaatatggaaaattcctcccttccccttaaaaatcaaatgtttccttataatattgatgtcattagtgtgtgatgctttaataaaataattttaataatataattaaattatttaaatgcaataggcaataatacaatctggggaagggggacttgtaattggagtgaggagtgacaagagtgggtaaatcggacagaacaaactcgaggagatgtttataaatcccgagggaagtaaagagaagctgagtttccagggagaagcatgggtgagaagcccagaaacacaagttgagtgctggattgtgctgtgccggctctgaaattgtaactaagatgacagtggcaaacaatatggaacagccatgccttcctttaggtggatttgtgagaaaggagttttacagcaatgtctaatataacttggttgcctaaatattgtatcaactattagtaacactgaactctgttcaacattcttggaaaattttcattcacataatagaaagacaagctgtgaca

SEQ ID NO: 825960 - DNA, 502 bp, Homo sapiens
ccacacaaaagtttcatcctttatctcactcagcaatttagtcctacttcatcccccataccagcttatctacacatgaggttaaacaaagatctccccatccacaggagcccactcttcttaraaaagggaaggaagtggatagaagtatatagattaatacagtgttgtatgggagccagtttatcccaactggaagccaactgctaaattttcaggaattttgcaagtggttcttaaacatgaccattattaaaaactgaattacagccttggagcagtgggtcatgcttgtaaccccagcacttcggcaggcagaggcaggcggatcacccaaggtcaggagttcgagaccagcctggccaacatggcgaaaccctgtctctactgaaaatacaaaaattagccagacctggtggcgtgcaactgtaatcccagctacttgggaggctgagacagaagaatcgcttgaacccgagaggcagaggttacagtgaaccag

SEQ ID NO: 825961 - DNA, 646 bp, Homo sapiens
aaattcaataggagcatagagcacccagcaattaagtttgactgaatggataaggagagctttcaagagccaaagatatttgatctgggacttaaagtgtgggttatgcaaacagagagggaaaggtgtttatgcgcaaaacagctcaagggaaaaggatgtgtaaatattcaaaagtaaaggtgagccatttacctgggtgacagaacacaggtttcatgggcagccaggagtgaagagtggggaaaagaaagtttgctgtagacctaccttgtgttcagctttgaatatcatgttaatgagtttgaactctattccaaagatgatgggaagccactcaaggattaagagcagaagaagtaatgtatttgaatctgtaatttagggagataactgatacctatgcagaggatggacaggtgagaggctggagctgttctcagcatccagggtagagaaggtgcaaccctgagagtagaggcagtggcaacaaatggagaaaactgattctgggccgggcacggtggctcgcgcttgtaatcccagcactttgagaggccgaggcrggcagatcacatgaggtcaggagtttgaggccagcctggccaacatggtgaaaccccatctctactaaaaatacaaaaaa

SEQ ID NO: 825962 - DNA, 580 bp, Homo sapiens
atctgaaaaagccacagacacacaatggcagcccatgaaagcagctgagaggggtcctgtgccctgcaaagccacaggggcagagctgcccaagacaatgggaacccatctcttgtaccaacgtgacctggatgtgagatatggagtcaaaggagatcagtttagaactttaagatttgactgcctgatgggtttcagacttgcgtggggcatgtagcctgtttgtttggataatttctcccatttggacccaatgtctgtacccactgtatctaggaagtaactaacttgcttttgattttacaggctcattggtggaagggaagtgtcttgtctcagagaagactttggactatggacctttgggttaatctttaaataaagactttgagggattgttgagaaggcatattggtttagacatgtgaggacatgagatctggaaggggctggggmagaatgatatggtttggctgtgtccctacctaaatttcatctggaattcctgcttgttttgggagggacctgatgggttcatgtcctttgcaagaatatggatgaagctgggaaccatcattca

SEQ ID NO: 825963 - DNA, 580 bp, Homo sapiens
atctgaaaaagccacagacacacaatggcagcccatgaaagcagctgagaggggtcctgtgccctgcaaagccacaggggcagagctgcccaagacaatgggaacccatctcttgtaccaacgtgacctggatgtgagatatggagtcaaaggagatcagtttagaactttaagatttgactgcctgatgggtttcagacttgcgtggggcatgtagcctgtttgtttggataatttctcccatttggacccaatgtctgtacccactgtatctaggaagtaactaacttgcttttgattttacaggctcattggtggaagggaagtgtcttgtctcagagaagactttggactatggacctttgggttaatctttaaataaagactttgagggattgttgagaaggcatattggtttagacatgtgaggacatgagatctggaaggggctggggaagaatgatatggtttggctgtgtccctacctaaatttcatctggaattcctgcttgttttgggagggacctgatgggttcatgtcctttgcaagaatrtggatgaagctgggaaccatcattca

SEQ ID NO: 825964 - DNA, 576 bp, Homo sapiens
aaagagggtgaccctagcttatacttgggttacacttttttatatacaagtatgaattttgatgctaataatctcttttttttgtatctactacattacctctaatggtgcaaaaatttccaatagcactagatggttttatcattaagaggtattggacaggtgagtcagttcttatattgccttgaataagtttccttccatattttaagttccacatcttcaatgtatgcaaacaaaaacaggcatttgattttaagccacaattaaagctgccttagagatattgaagaaatatctgttttagacaaaaaacaaaaactcttaaaagttagtattttcccttcaatattttatttatctgtgtataagtctataactaaattattatttctcataaaatattctgattctattaaaatgagtgaatcatctattataaaaaggagatttaaatggggcrtgacaaagattcatgattgttaaaatattttattttaacttaaaatataaaaatgtacatttatcaattatttcattaggagtcaagacaatttttcaaaaaaacctttgggt

SEQ ID NO: 825965 - DNA, 576 bp, Homo sapiens
aaagagggtgaccctagcttatacttgggttacacttttttatatacaagtatgaattttgatgctaataatctcttttttttgtatctactacattacctctaatggtgcaaaaatttccaatagcactagatggttttatcattaagaggtattggacaggtgagtcagttcttatattgccttgaataagtttccttccatattttaagttccacatcttcaatgtatgcaaacaaaaacaggcatttgattttaagccacaattaaagctgccttagagatattgaagaaatatctgttttagacaaaaaacaaaaactcttaaaagttagtattttcccttcaatattttatttatctgtgtataagtctataactaaattattatttctcataaaatattctgattctattaaaatgagtgaatcatctattataaaaaggagatttaaatggggcatgacaaagattcatgattgttaaaatattttattttaacttaaaatataaaaatgtacatttatcaattatttcattaggrgtcaagacaatttttcaaaaaaacctttgggt

SEQ ID NO: 825966 - DNA, 530 bp, Homo sapiens
taggaatatgtatatatgtatatatcctatatataggaatatatgtgaatatatatacatatatasgtgtgtatatatgtataattcctatacatatgtgtataaattaatatataggtgtgtgtataaatatatagacaggaatatatatataaagtgtatatacactttatatataattatacatatatatacacacctatatatgtatatacactatatatatataaagtgtatacatatatactttttctttagccacagaaaaggtatttttcctatggctaatactttacccatgctttttctatggctaaagttttatcactccccacaaattcaactgtaattgaatttaatataaattaaatgccttttgtattattagttaacaaaagtacagaattcatgacctttcctcaattttgctacctacttttatctccctcacactagactctatataattgctaaagatatctgaagtgggggaaaaatacaccaggggatgcaaaaatcattttctggga

SEQ ID NO: 825967 - DNA, 548 bp, Homo sapiens
atccctgggcagtggaggagagaggcttttcaaccaacatgtccccagaccagcaccagaaaaccttgttgagcctattcaggattgatggctgatgaggttctgaggaaatctttctggaatttgtcccccctgaaccaacccgccccaaacagtgccctccctctctggttctggagtccctggggttgcctcatgtcgcctccggtctgagctctctggatggtagacagagaaagcttttgctcctgacttctcactcactttaattgatttgtttaccttccattattttccactgacctgcacaaatactacttttcatcaagctgactacacttcagcttattaatcataataagttattatgcagtgattggattggtaaaatacttctctcagaataaggcagcagatattaaaaaatgtctaggttttaatcattatgggtacataataggtatgtatatttatggggtacatgtgatgttttgatataggcatacaaggtgtagtaatcatgtmcaggtaattggggtatccatctc

SEQ ID NO: 825968 - DNA, 604 bp, Homo sapiens
tttctcagcatcaattgaaataattattttttgtcatttattctgttttttttttttttctttttgagacagagttccaatctgtcgtccaggcttgactgcagtggtgctttctcagctcactgcaacctccacttcctgagttcaagtgattctcctgcctcagcctccctagtagctgggtaatttttgtatttttagtagagatgggtttcaccatattagccaggctggtctcgaacttctgaccttagatgatccacccacctcagcctccccaaagttctgggattatggccttgcgccattgtgccctggcctatttattctgtttatattgaatatcacattgattgatttgtgtacattgaaccaactttgaatttctgggataaatctcacttggtaataataaatggcctttttaatgtgttactgaattcagtttgctagtagttagtgataatttttgcatcaatgttcatcrtactgggatttattttttatgtgttattattattttttgatgtgtctttggttttagtatcagggtaataatggcctcatataataaatgtgaaagtattcactcttcgatttttta

SEQ ID NO: 825969 - DNA, 669 bp, Homo sapiens
ttttaaagtactaagtcacaaaaattaaaacctgaacagaaacgcactattgatttattaaaatttattattttaaaagacattctatttaaaatacaaacatgcaaacataaattttcaatagtattctatgtgttattaatgtagttcaattttaatagcctttgatctatgcctttccaggaactaaatggagtaatggtagattgcttggttccaatatagtgttagcaaaaagagtcaagagggaaaaaaaaaggaaagtcctacccctccgaagataaaaagctaatcagctataaaagagaccgtcaataaaatattttatttgatcttggttgagatgcggtgctttttaagaactaagtgtattttcaagttgtccattcctcaaagatatgacaattgcttcagacttagccatgcataatctcataaattccatttcattgtgacatgtagtaaacccattagtttatttttaccatatatttttacagttttaaaaataaatgtacttacactctctttagtcacataataatcattaatattagaaattgaaaaaatagatttcatataatacagcaaatttkcagggcatttttaattcttacacagtaaaaaaagttacatactttgaacagactgtcttaaaatattttctta

SEQ ID NO: 825970 - DNA, 616 bp, Homo sapiens
aagtaataagcaacaccaaaaattccaaacccatattctcacataaaaaaatcagtgacttaaaaaaaatctttycatgtctttttatttacagactaatttgcaaggggatcaatttaaattttaaatactaatatacatataactgccaattcaaactttagacatatatctcttacagaataaatgctatatacataagtgtatttggtaaaggccctagctaaaaccatgagaaatgtcctaatgtcaatgcagcaaagaaagaactcagatttttctcaagaagatgttctagaagtgattatcattcgtttaatgcagaatttcaaagggttcagagatctgccacagggtatgtaggtagatggggcaaattcttaacctatgccaatgtctcttgtattagcctaatacagtcttgagactggcaccattaataaaaccaattttcttagtattcagtagttttgggtgttttggctcccttacttgaacaacttctcatttctatcaacggtctttcttagcttcctgtggccattcagaaaatggaaaacagaatgtgcagtaagttaatgctggttgattaaataaaaccaaaatataccagagt

SEQ ID NO: 825971 - DNA, 635 bp, Homo sapiens
aaaattattttaggttcagggatccatgtgcaggtttgttttataggtaaattgtatgtcattggggtttggtgtatagattatttcatcacccaagtgagaygcatagtacccaatagtcagttttttcatcctcaccctcctcccactgtccaccttcaaatattccctggtgtctgttattttctttgtgtccacgtgtattcaatgtttatctccaacttataaacaagaacatatggtatttggttttctgttcctacgttactttgcttaggataatggcctccagttccatctatgttgctgtgaaaaacatgatctcactcttttttatggctgcatagtattccatggtatatatgtaccacattttccttacgcaatccatcattggtgggcatctaggtttatgctatgtctttgctaatgataatagggctgcaatgaacatacacatgcgtctgtttttatggtagaaaattaatattcctttgagtatatagtcagtaataggattgttgggtgaaatggtagtcctgttttaagttatttgagaaatctccaaactactttccacagaggctgaactaatttgcattcccaccagcagtgtataagcattcccttttctt

SEQ ID NO: 825972 - DNA, 527 bp, Homo sapiens
ggggaaggggtttatcttatggttagactgtttctggtcagagatgttatttgtcgtttatggtcaggctgaccttagccattaggmtgatgccctttggatttgggcagtttttgatcaaggtgaactttaaaatggcagtgcttgtccaagatggcgatgctcctgctctgtcaataagtattgtagatgaagtccaatgtcaattccttggcttggctttctaaacttaagagggtttaaaacttgtatttgctatatctcataagttccagcaaagtggactttaacagatcctatacgttcaattgctactcttgctcacttatataaatactcgaagtttagtgagactacttttaatttgcaaagaaaccaatgttactatgattatttttggtaaaaatggaggtgaatgtagagagaaaaattatagtatacctattagattctagtccttttcattgtccttgaactactgttacctatccataaagtaaactggattcggaattcttccagttttt

SEQ ID NO: 825973 - DNA, 621 bp, Homo sapiens
tgctcctatttagtgcttccaatccttccaatacccatgacascgaacaactttcaattttattcataatgcttaaaatgacttaacctacacacagcatcttactattgcagttatcatatgttttatttctttcctgagtataagctcaagagggcagaattatttttctcttttggttatttatataacccgagacctagaacagtgcctggcacaggttatagatgccacatcaatgtgtcaaatgaaggaatgacaaagtatgtggattttgtgcagacttctgtcagaacttgtgtttttcaaaacattttgaaccattttggattaagtgtttgtatgaggctcttagtatgaaacttcacaattgtattctgaaggctgcttttatttccctcaaagcccttataatataacatcctaagatttgttaaaaatatcttaaaactgttctaaacatcagcatcctaaccatttaccatgttgattcaaatttcatcattctcccaagacaatttcagataactatttcttatttgtaattataaaaaatttgaataaacactaatatttaaaaatatgctcgtgcttgtaatcccagcactttgggtggctgac

SEQ ID NO: 825974 - DNA, 568 bp, Homo sapiens
ataacatcctaagatttgttaaaaatatcttaaaactgttctaaacatcagcatcctaaccatttaccatgttgattcaaatttcatcattctcccaaracaatttcagataactatttcttatttgtaattataaaaaatttgaataaacactaatatttaaaaatatgctcgtgcttgtaatcccagcactttgggtggctgacatgggaggactgcttgaggccaggagttctagaccagcctgggcaatatagcaagactctgtctctagaatttttttttttttttttaagtatccaggcatggtggcacacacctgcagtcacagctacttaggaggctgaggcaggaggattgcttaatcccaggagtttgaggttaccatgagctatgattgtgccactgttctccagcctgggcaacagagaaagactctgtctataaaaaaagaaagtgtagaattacaagttgtatgatataaatgatacatcgtacacatgtacatgatacaaatcaaggttcatggctcttttcttctagtctgatactagtgcttaaagtccac

SEQ ID NO: 825975 - DNA, 506 bp, Homo sapiens
tcaaagcactgtgccagccgaggcccagagagtcataggagcagtgcgggccgcagccgaggcaaggaagcaacctccttaggggggactagggtgggggggtatccctttccagctgggccgggggtcaccccraacttgggatgagggcactcattctgtgagcttcttcaccccgcttaacgccccacaagcgccctgaaccctctgtgcaagtctgtaagctgcacaggcgagcagagactctgggagctgggagaggtggagggtccccagaaggagacggaaaaggggaaagagagggaaagaacaatgtcacagccagcgagagggccagagcagggcagacacagctgtggggggcaccgaagcagtatccacataacaaaggaggcagggccagaggcgaagacagggccgagaggcagagtggcttgggcacaggtgccagacttgccccatcctcccacaccaggaacacggcgccggcctccgggacttcgccg

SEQ ID NO: 825976 - DNA, 475 bp, Homo sapiens
acactcctctaccctgggtttcagcttctccatccaacragatgggaagaataatattcaccctcccacttccttccctctgccttcagaggaggctggggtggagcatgaggctgagggtgctctgggtgcctgagatccaatttgtccagggtgttctgatgatgataattatcgccatgcccagtttcactggaatggcatttccgaggcctctccttctacctcggagagaaaaatcaataagctcacccagcagccaaatgcaagcgagtgcagccgcacgggagctggccactaggacactttctcctagcacaggtcacaggttaggaagcagaagtatttgcctgtgagctcatccccaaaccccaaaacagagtgctggtttcctggtgctgtccggtcgtaggggagggagcacagaaggaaagccacccccgccaccccaccactggcctcagcagacactgtg

SEQ ID NO: 825977 - DNA, 620 bp, Homo sapiens
ccgcaaagtaactttccttgtctcctaggaggagtttcttttaggtttaccttacgccctgagataggggcccaggtttgccaggtraaggccttcttttagaacatcaccttgggagagccttgagttttgatgtttggcctatgtgcaagaggctgtgaaaaatcacaattcatgtttctccctggacaaaaatgtccatagggcaaaaggaagtgaatgatgccgaaaatgacgatgattgtggtggggatggtggtgcagtggtgtgtgtgggaaggacagggaaggaggcgctgcctatctgggttcttgctttcacttctttttgccctgatagttctttacaattttgtcaccttttcaacaatttaaagtttaaaattatatataaatatatataatccaggcattttatttgtttaccaggaaggagagttggtatcatccaggagggaaaactccaggttatcaaattttaggacacattcatcatagaaagtactagtgacaataatcaaatatctcttagaatttttactagatatttgaatttttcacttttatttttgccaagcctagcttattgtaagcatttaacaaacatctgttggctaaaa

SEQ ID NO: 825978 - DNA, 600 bp, Homo sapiens
tttttggtgagaacacttaaaatctactctttctcaattttcaartatgaaatatattgtcattaattatagtcaccatattgtacaatagagctcttgggttaatttcttctaacagaaattttgtatcctttgtccagcatctccccaatcccattcacaccccaacccccagcccctggtaacttccattttactctatgcttctatgagttcaactttttagattccacctacatacattccacaagtgagatcatgtggtattcgtgtttctgtaacttcattaacttaaaaactatattcagtgcctcctttattccaggccttatgctagaccctaaaaacacaagtttatgtaatacatagccatttcatacaggacctcatgatcaattgaaagtgctaatgatgttaatacataaatcaaatatactatttcatatgctataagagtgtttttggttaaatatatctttagcaattttgtcaaatataatggccaaaagtgtgtatcaatgattttttaaaatcttataagaagaaaatgtgatattttttcttattcattgtcccacatgaattatatacacagatttg

SEQ ID NO: 825979 - DNA, 293 bp, Homo sapiens
caacaggcctgtggccatgtccacagccatcagtgcatgcatataaccttatgactttggcagcagcacgatgtagtctacccgccacctggtcaagggcackcaccctatcgttacttgctgtgtaacactgggcagctgcctccatttagggtatgcctgagcacacaccaggcatttctgaaaaggctaccaaatgtcttgcttgggcagggacagaccccaacgcttattgacctgttgcatcagtttaccccatgcatgtcccagtttccattgcagccacaaggcca

SEQ ID NO: 825980 - DNA, 293 bp, Homo sapiens
caacaggcctgtggccatgtccacagccatcagtgcatgcatataaccttatgactttggcagcagcacgatgtagtctacccgccacctggtcaagggcactcaccctatcgttacttgctgtgtaacactgggcagctgcctccatttagggtatgcctgagcacacaccrggcatttctgaaaaggctaccaaatgtcttgcttgggcagggacagaccccaacgcttattgacctgttgcatcagtttaccccatgcatgtcccagtttccattgcagccacaaggcca

SEQ ID NO: 825981 - DNA, 542 bp, Homo sapiens
tttgtgtttttttgtttgttcgtttgttttttgtagagacagggtttcaccacactggccaggctggtctcgaactctgacctcgagtgatgtgcccaccttggcttcccaaagtgctgggattacaggcacgagtcaccacaccaggccgcaaaaaagaccactctctgacatgaatttatactttccactttggaattacagttacttgtacacatgtttaatctcagtaagctgaacttagtgcatttaataaactaaagttttttgagaacactctatatgtctgatgtatctttaatgtattacagagtttagcacgtgccttgcatttacagaggattcatgagtatgtgctgaatgaaggagtgaaagaaaaagtatttcatcctacaatatacatttcaaagagcactttcaaaaaaactaaaatctctgacatctgaatatgctagagttaaaattatggtaacaaatgagcgagtcatttaaaacaattsttcctcacctctttcatatcagtgattaacaaaactggaaga

SEQ ID NO: 825982 - DNA, 547 bp, Homo sapiens
actggttaagccagaaatacttatcatttagtgtgatcttggttaccatgtaaaacaatggtttttgcctacttcaggagcttttgtaattaccaaaccgtctaccttcctaacttgctatattaatgctgaygcttgaaagtaagatctttggcatttatgcttacactttgcatgaggaataagttgagtacaagacgttatgtcatgtcttaagtctattaattaaaaacaaattctaagattcaaggagttttcagtgttccacatttctccctttagaaaaagtaaatgtgtgcagaattaacaaagtgtttaaaaatagatatttattactttactatttggatgaatgtgtagggcagtgcttccttggcactggggatatttcattgagcaaaactaaaaatatcttccctcatggagtttatgttatagtaagacatacatgtacatctataataactattacattagaaggtgtgaagtattgtgaaaaatatgtagagctgtagtggagcgggaagaaatgttttgaaatagagct

SEQ ID NO: 825983 - DNA, 498 bp, Homo sapiens
caatttcaaactactgacatgagatctcggaacatagcattaggaaaagatgcagaaatgggcttttttagaagccagtgcataatacttccaacacaacagtgacttagcagactgagcgtcactttactttaatgattaatcacaataattgtcaactgacattttttatttaatgacttataacatggttccaattataaaatgtggaaaatataagtaaaataaagacaaaattaacaataaatctaacacccccaaaatgattgttacacatatgtatatatcctttgagagcttttattaaaatatttatacttgtatttgttacaaaattgaaaatgtgttttatttcactttggcattctacccaaactgacaatatactataattttctacaattaytacttattcctttaaaagtacatacaaaactgaatgaaactctatgctcccaatatactaaaatcaaatgattttattctctatagtttata

SEQ ID NO: 825984 - DNA, 498 bp, Homo sapiens
caatttcaaactactgacatgagatctcggaacatagcattaggaaaagatgcagaaatgggcttttttagaagccagtgcataatacttccaacacaacagtgacttagcagactgagcgtcactttactttaatgattaatcacaataattgtcaactgacattttttatttaatgacttataacatggttccaattataaaatgtggaaaatataagtaaaataaagacaaaattaacaataaatctaacacccccaaaatgattgttacacatatgtatatatcctttgagagcttttattaaaatatttatacttgtatttgttacaaaattgaaaatgtgttttatttcactttggcattctacccaaactgacaatatactataattttctacaattattasttattcctttaaaagtacatacaaaactgaatgaaactctatgctcccaatatactaaaatcaaatgattttattctctatagtttata

SEQ ID NO: 825985 - DNA, 622 bp, Homo sapiens
ttgtaagtcacaataaaggagcagttgggataatgtwcttaagctgaggtagccactcggagttgtcatgaagagagaaaaggaggctaaattttatacccatgtcaactagtcattggatgtaggcttccccccatgaccttggatgagcttgttctcctcaaccagggctgtcctggagaaagacaaggccttgagaactctcagctgtcactaatcccagcagctggggaaatgagccctgaagccttgtgggttgggatttgggctgtgtacatgcatttatcacatcattagcgctcaaaatataacacctgtgaccctcccacaacaaggtgagggataaatgatatatctcacatgcctaacatggcctgaaagagtcaattaaatatgtgtcttttgaattaatgtggaaacaggaatttgaactgccggtgggaagagcatattcaaatactaattggcgaggggctgggagaggggggacacagctgattgtaggaaaaggaaaatattgaggaatagttggagataagacataggagagttggtgccacacttcgtttgcccttgggagccaaataacaataatgctataaatgttagaaatactgtctta

SEQ ID NO: 825986 - DNA, 480 bp, Homo sapiens
tgacgaatacatataccacgacaataccaagtatgacaagtgtgtaaccacaaccctaacaaatacataaattaactctattaccctaagaagattcctcatgctcatttacagtcatcccagttaccccaatttatcccaggcaaccactgatttgacctatttccaaacattcatttcacccagtttagaacttcatgcaaatgtaataatttttgtgcctcttctttgcctcaacccaatgtttaagttcatccattattatgtttgacaacagtttctctacttttattgctgaggagactgtgccatgtagaatatgccacaacagatgacacttgggttgcttctacttagggctactatgagtaaaactgctataaacacttatgtataagatggtgggtttgtttcatttcaggctaatacttaggagtcwacgttctggatatacaatagatacttaactttgtaagaatc

SEQ ID NO: 825987 - DNA, 603 bp, Homo sapiens
caccatgtcttctataggcactttgtctgtaacgttaacaatgtcatcttcattgtcctgtcagcactcaaagagtttcagattttggagcattttggattttgaatttctggataaggagtgytcagcctgtatagccttaaaatagaatattattcatcaatgaaaaggaagggagtgctgatatgtgctacaatgtggatgagcctcagaaacattatgctaattgaaagaagccagacacaaaagaccatgtattgtataagttcatttatataatgtatccagaataagtaaattcatagagacagaaagcagattaatggttgccagcaactaaggggagagaagaatgaggactaactgatcaatgggtaagacatttccttcagggagatgaaaaggttttgaaaccggatagtggtgatggttgcacaatgttgtgactatcctatacaccattaaattgtacattttgaaatggttaattttgtgttatatagatttcaattcaattttttaaatgaataatatataaccttttaaaagacatgttcagccagagacatacactcctgttgactcattttattataattttac

SEQ ID NO: 825988 - DNA, 630 bp, Homo sapiens
tgggtcggaataactcagaccgggatccccactaatggttctggacaaacattgcattccctctgtaatgtcgagcacacagatgaaaatcaccaggagaatgagaagatagcacagttcaaaaggaggaagcactctgaggaatcaggggaaatattttcctataaaatatagtttctgaaagagatgggaaaattttgagaacacttctgatctgtgtttccaataaacttcaaatgagcatttcttctatgaaattcgagtagagaaccataaagaaaaaaaacaaacagggtagggaaggctgtgagatgatttaaaaaatgttcatttcagaaatggaaacggggaaggggagagcaaaatggacctttcagtaaaaaaggttttataagagagaagtcaaatttgacatcacagaagtcagaggaagaggataagagaaggttaattagagaaaatataggaaaagcatgggctgagatatatttaatttataaatattaggcattccagagaaagaacctccaaaagtggagctatcattaaagaactatttggtggaaattttcccaagttaaagaaagactcttcagaaatctagayaaaataatgaagggcttttttttg

SEQ ID NO: 825989 - DNA, 555 bp, Homo sapiens
tccatcgtagagggaaacactcttaaaaacattttttttagcaaaccgaattcaataatataaaaaatgaatcaccaccgagtagttgtattgcagggattcaatgatgatttaacatttgaaaatcagtcagtgcatttcaccacattaggaaattgaaaacgaaaaaaaaaaccccacctatcatctcaacaaacacagaaaaagtatttgacaaaactcatcacgtattcctgataaaaactctcagaaaactaggaatagagaaaaagtttcctgatctgacagaaggcagttaggaaaaaactctgtagttaatgttcctacttcaggctgacagaccgaatccttcccattatgatcagaaacagaacaaggtgtctgtctttaccttttctagtcaacagatactgggtgttcctgtcagggcaattaggcaagaaagagaaaaaagtcactgagagtkgaaaggaagaattaaagttatttttactcacagatggcataatagtccatgaagatgtgatggattccacaaaacctcgtagaagacat

SEQ ID NO: 825990 - DNA, 722 bp, Homo sapiens
gagatgacaattctgccagatttggatcctgtgggcagagmtgagaggtctgtaaattcacattcactcttcaaatcctggtttatagcagccagtcaagtgtgtcactaagatgaagataaattataatgactacaatttggtaattcatttactttactgaaatcagtgctcagtcatgttacaggcgcgactccatctggttcccatcaatgacagagggagcatcatgtttggacagaggggctgcatctgtgtctatgcagggaaagctgcatggattatccagcaaatcatggtgtagaccaccagcttggccagtccaggtccaagccagccgggtgactctgtcttgctatttattcacttctgcattcgacaagtactgtggacacctgctgtgtgccaggcactgctcgaggtgctagggggagatcaggaagcaagaaaaagtttccctgccctcctggagttgatgcgtattccaactgagaagtgggggtgtagccaacaaacaatgaacataatccccaaatcatagagcaagacatgggtgatacaaatcatggcaaagaaagcattgtgcagactgaggggtttcttatttcctgagaaggacgtggattgcaatttaaggtgggatgggggttggtccgatatgtgagcctggctaacaagatcgggcaggaagtaatgtctccttcagaccccgcctgcccagt

SEQ ID NO: 825991 - DNA, 544 bp, Homo sapiens
gtgaagttgtccaataaggatatgcctcccaggcacaagaayagaaaagcagtcaccaagtctgagagttggcaaagtcactgtggcagaaggactaattaattgcatgagtgaagtgagaataacaaagtttctcaaaactgttggtccaagggtctatagtgagcagactgccaagtgacattaaataagaaggtaatgacagactgacccccaaagaagattttggtcctgacgaaggtaagaaggaaactcattaagagctcacaataaggtccagagacagaagcaggtatgatcagagaaggacatggcagaattcaagatcttggtatgagagtagttctaaggcatgatacaatatgcacaaggaggaaggatggttggatgaatggatggatacgtgaatgaacagatggggggatagataaataaagagctacagataaacataaatcgataagaaaaattacttacataaagattagaaagttccccttatatctaggctttccttctaaattttctgctgtccttttaagtt

SEQ ID NO: 825992 - DNA, 631 bp, Homo sapiens
attacactaccctctgctccagtttttagttgagatttcaaaggtcatgctccaaaaaaagcactttattgtgatattctgagtcaaaattaaagtgaaaaattgtgactagtctcataggaactcytaagggagcaaggctttgtcttcttttaaacacagtatgtttgagggaacttcaaaggttgtagaataaaaattaattttgaaatcacataaaattcttatctctaccctaagtaatctgaagagttttctacttctactcaaaagtcctataattgttggaaaattaaggctacaatgcaatttaaggtaatttggaaacaaatacgttcatataactgaggggaaaaatgatggtgctgaagtggttttcgtgattttctcgtttatcctcacacagtatatggtagcatgttgttatagtgagcaggtgggcaggtaaagaaatgataccagttaagtaatacattttccagttgtcattctgctgttgccaataattacttgattttttcttaaagaagcctatttaacattttgagtttggggattacaatcatgtacttaaagttaaaactcattttagtcaagtaacaggaaagaagcattatgattaaattatgct

SEQ ID NO: 825993 - DNA, 625 bp, Homo sapiens
atgaggtgaatcataagtggattttaagcagtggtatgctgggaaatatttaaaagttggcttctkcgagaagaaaaatcaacataccaaaccttgctttgtagtgttttctaattttcatggtgtaaatactcattctgtgactgattccaagctaccaaatgtacttactaaatgaaaagttggaaagtgatttttgtagagcagtatgttgtatggtatttctaccatacagtacaatagacataaataatctcaaaataatagcaaaataggtaatagtaaatgctaaataataaattccaagtaaaataaatggaaactgattagttttaagtattgattccctatgatattattataatctacttcactatacatttatataatttaatatttagtaatagctgtatttaacatcaactacacaaaattttttaaaaatttaataattgctttgtccaggtataagccttctccaacatatcactgaataaatggttttatattaatgcaaaaaagatgatctagttttacctcagcaaatataataataaccacattatgatgaggaaattacctgaatggaaatgcaaatgacccttgagaaaatggaactaattta

SEQ ID NO: 825994 - DNA, 593 bp, Homo sapiens
cattagagcaaagcctgtaggatgaatatatctccaggaacagaagacaaaagaagmtattctagacagagagaattacttatatattggcacagcttggggtattctccaaaatagtgggaaattttgtatggctggtgcttagcctatgctcatgacacaaaagtagcagaatattggcttggatatataagttattgtaaaattccatttacaaaatgctaaagaatggagactttgtctgtagttgaaggaaaacattaagagaatttgggagagttgcaagataagaattatgttttagataaacacctagaggcaaaatagaggatgctctgaaaagtaagatgaaatcttactgttagattgtcaaattatatagtataaaggcaaaataaattattttaagtttcatttcagaatcaaatggtgatcctccatctcaagatcagcaagagctttaagacttatagacaatcatgaataccaacacattacagcattgggggggatatagtggtaaataagagcatctactctagattagatatatttctagatatactcctacttctattacttgtgaaagtgaa

SEQ ID NO: 825995 - DNA, 592 bp, Homo sapiens
tcttactataaagtaaaagtatgaaatgcatatatactatatgcatttgtatataatgcagaaaaacctaggaaaggagtaacaaaataaacaaaaacaaaagaagaaattamagaaaatatgcaattggtaaacaaattgactagctgcctctctgagaaaaaacaacaatgtagaacactctggtaagtttcatttaatataaaagagaaaacacaaacaatataatacaccatgcagaacatactgaaaattataaaaaataacatgtttaaatctatttgattctattctcataaggcaggaaatcttggtgaaaataaactatttctaataaactacttccaagaaaaatgaaagttaatcaaattaattccataaccctcagagaactaaggaaggttgtcaaatacctacaagatggtgcatgaccctggtagtttcaaaaaccactgctgtcaaaatacccaaggaatttatacaacttcattaaaatatcttaaagcacacaagaaggaaaacttttcaatttacttatgaactattactccaataacagaatttaatgaagatagagaaaagaagaaaacaa

SEQ ID NO: 825996 - DNA, 268 bp, Homo sapiens
agttacacttatgcagttatccycgttggctaatgtagaaataaatgtggtgctttctctgggttttcattttgcctaatttatctcagacttgttgctgaagataccaggaaactagcaacaccaagggacaatttcagaaccaaaaagtccccaacaaaagcctgttctctctagacaaaagactagaaaagaaaaacttttagaaaatagccactttagccaaacacgacagaaaaactcttctccactcctaactatgctatcc

SEQ ID NO: 825997 - DNA, 622 bp, Homo sapiens
atggccccagcacgggatccactaggtgaagccagctggactcatgagtcaggtggggacttggagaacttttgtgtctagctagaggattgtaaacgcaccaatcagcaccctgtgtctagcycaaggattgtaaatgcaccaattagcaccctgtgtctagctcaaggtttgtaaatgcaccaatcagtgctctgtgtctagctaatctagtggagacttggtgaacttttgtgcctagctacaggattgtaaatgcaccaatcagcactctatgtctagctcagggattgtaaatgcaccagtcagcaccctgtcaaaatggaccaatcagctctctgtaaaatggaccaatcagcaggatgtgggtgggaccagataagggaatgaaagcacgctgcaggagccagcagtggaaacccgctctggtccccttccacactgtggaagctttgttcttttgctttttgcaataaatcttgctgctgctcactctttgggtccgcactgactttatgagctgtaacactcactgcaaaggtctgcaacttcactcctgaggccagcaagaccacgaacccaccgggaggaatgaacaactctggacgggaagaatgaacaa

SEQ ID NO: 825998 - DNA, 643 bp, Homo sapiens
ctctccctcctcttgccccccactccctgacaggccccagtgtgttatgttcccttccctgtgtccatgtgttctcattgttcaactcccacttacgagtgagaccatgcagtgtttggttttctgtttttgtgttactttgctgagactgatggcttctagcttcatccatgtccctgcaaaggacgtgaactcattcttttttatggctgcatagtattccatggtgtatatgtgccacattttctttatccagtctatcattaatgggcatttgggttggttccaagtctgttctattgtaaatagggctgcaataaatatacctgtgcttgtatctttatagtagaatgatttacaatcctttgggtatttacccagtaatgggattgctgggtcaaatggtaattcttgttcaagatccttgaggaatcaccacactgtcttccacaacggttgaactaatctacactcccagcaacagtgtaaaagtgttcctatttctccacagcctcrccagcatctgtttcctatttaataattgccattctaactggcatgagatggcatctcattgtggttttgatttgcatttctctaatgactagtgatgatgagcttttttccatatgttttaggccac

SEQ ID NO: 825999 - DNA, 549 bp, Homo sapiens
tattcctttgtgtatatacctggtaatgaaattgctgggttaaatgatattcctgtctttaggtctttgaggaatcaccacactgtcttccacaatggccaaactaratttttaatttgattttcttatgtcagtaatgtctttaatggtttatcttatctacatggaatccaagatgctctttaatatggtaaattagaacatgtcaattccatgcctagaaatcttactggatttctagaacagaaatcttccttcttctcatgactccaagattccagatgacctcggatctcttattatgccatatttccattgatcaccatgggccattgaactggcctgctttcttcctcttgaacatttctgcttatcactatctccattttctgtcccttctgccttcaattctcttattccaacaagtaatgtggctaactctttcataatttaggagctccgagctcaaatattacttcttccaaaggctttcactaacaagaagctgaatatgaatctgctgtctcatgactataaggcaataaagac

SEQ ID NO: 826000 - DNA, 641 bp, Homo sapiens
  misc_feature 1, 2, 3, 4, 5, 6, 7, 8, 9, 10, 11, 12, 13, 14, 15: n = A,T,C or G
nnnnnnnnnnnnnnntcatgctattaaaacattargctgaattaaataaaacacatttttccccaaatagtttttaagataaaaatgtgagccaggtgcagtggcacacgcctgtaatcccagcactttgagaggccgaggcgggtggatcacttgaggtcagaagtttgagacgagcttggccaacatggtgaaaccccatatctactaaaaatacaaaaattagccgggtgtggtggcacatgcctgtagtcccagctactcaggaggctgaggcaggagaaccacttgaacccgggaggtggaggttgcagtgagccgtgattggttcagtattttcctggatatgcctgtgagggtgtatgagttcattcttacgctgctatgaagaaatactcaagactggatactttataaagaaaagaggtttaattgactcacagttctgcatggctggggaggtcttgggaaccttacaatcatagcagaaggcacctcttcacagggtggcaggagagagaatgagtgccagcaggagaaatgccagatgcttataaaaccatcagatctcgtgggactcactcactatcacgagaacagcatgtgggaaaccgcccccatgatctgattacctccaccta

SEQ ID NO: 826001 - DNA, 641 bp, Homo sapiens
  misc_feature 1, 2, 3, 4, 5, 6, 7, 8, 9, 10, 11, 12, 13, 14, 15: n = A,T,C or G
nnnnnnnnnnnnnnntcatgctattaaaacattaggctgaattaaataaaacacatttttccccaaayagtttttaagataaaaatgtgagccaggtgcagtggcacacgcctgtaatcccagcactttgagaggccgaggcgggtggatcacttgaggtcagaagtttgagacgagcttggccaacatggtgaaaccccatatctactaaaaatacaaaaattagccgggtgtggtggcacatgcctgtagtcccagctactcaggaggctgaggcaggagaaccacttgaacccgggaggtggaggttgcagtgagccgtgattggttcagtattttcctggatatgcctgtgagggtgtatgagttcattcttacgctgctatgaagaaatactcaagactggatactttataaagaaaagaggtttaattgactcacagttctgcatggctggggaggtcttgggaaccttacaatcatagcagaaggcacctcttcacagggtggcaggagagagaatgagtgccagcaggagaaatgccagatgcttataaaaccatcagatctcgtgggactcactcactatcacgagaacagcatgtgggaaaccgcccccatgatctgattacctccaccta

SEQ ID NO: 826002 - DNA, 641 bp, Homo sapiens
  misc_feature 1, 2, 3, 4, 5, 6, 7, 8, 9, 10, 11, 12, 13, 14, 15: n = A,T,C or G
nnnnnnnnnnnnnnntcatgctattaaaacattaggctgaattaaataaaacacatttttccccaaatagtttttaagataaaaatrtgagccaggtgcagtggcacacgcctgtaatcccagcactttgagaggccgaggcgggtggatcacttgaggtcagaagtttgagacgagcttggccaacatggtgaaaccccatatctactaaaaatacaaaaattagccgggtgtggtggcacatgcctgtagtcccagctactcaggaggctgaggcaggagaaccacttgaacccgggaggtggaggttgcagtgagccgtgattggttcagtattttcctggatatgcctgtgagggtgtatgagttcattcttacgctgctatgaagaaatactcaagactggatactttataaagaaaagaggtttaattgactcacagttctgcatggctggggaggtcttgggaaccttacaatcatagcagaaggcacctcttcacagggtggcaggagagagaatgagtgccagcaggagaaatgccagatgcttataaaaccatcagatctcgtgggactcactcactatcacgagaacagcatgtgggaaaccgcccccatgatctgattacctccaccta

SEQ ID NO: 826003 - DNA, 654 bp, Homo sapiens
taacttagtctgcagatgggagatgagagtttcaaatttgggatcagagttgtttttctatttgccaagctcagtgtgctgttcttatattttaaccttaactttttwaaaaaaaatcctgattcaacaggaataaaagaaaatgccacgttctaacaactaaatattggaagagttgcttaaaaactgtttcttgtgttcaaaaactacccttcaattactcctcataagattgcaacattaagaaaagcaagataataaactagaagctggtggtgggtatgtatgtactgtgagcaggagtcttcctcttcctactgcctcaaggaaaacttgttcacccactgccacagttacctttcctgtgcattgaacacaggtaatactaaaaccagcaaggagataacagaagaatatgtgggagtacctgcaacacagcaaaacctttgttatgttctgctcaaattaaatagcatcacactttattatgactctagccaaattaaccaaaaacctggtttctacaatcttgagtcctgtttttctgacatcattgaaacttttctaacatttgcttaaaaatttaggatatcaaattataaagtttaatagttataaaaacaaatataaatacttttagaaacgattttagag

SEQ ID NO: 826004 - DNA, 501 bp, Homo sapiens
aatttatatcagcttacatgcttatttaggaatactttctaattctcatagtgaaaattcacatacacacacctacagcagatttgttttaattattaaagcctcagagtagtatggtaaagaataaaagatacaaatttttataaaatcttcaattcagagcctcatacctgagattctgcattcaaatgagccattgaaaaataaattggctcttaggtgtcaagaagaacattagaaattacctttatgtgccattttagagttccacctgctcactaggaaacaaaatgtcaggaaataatgaatcaacattatacatattgaagttgaaagataggaaataggattcagatcaaaggtctctgagggacaaaacttacaaataaatgaatttttgacaggactcttccctgtggcatgtcaaacaayggtccgctaaagacggttgtgttctaatctctgggacatatgaatctgttaaattacatggataaaagg

SEQ ID NO: 826005 - DNA, 596 bp, Homo sapiens
tggatgctccaactgcaatgatatgatcaaaagtctataggagcaacataaaaggaakcaggaaatctgccccaaaagttgtggatgattcagagtgaatgtcatataaattgaggcagaataggagcaaaagccatttaagacagaaaacagtattacccaaggcatgaaagaattataaataggtgctttaaacactgtttagggaaatggctgaaagtttatagatttctttcatgaattagctggtttatgtttatttgtggtatgtactagaccagacattgattcattatacaattatgataatatctattttatgatcaacagggtatctaaggtacttgcatctctttaaaagagaaataagaagtatatatacagtacagggaggggaaaataagcttgtgtttctgaactgtttcagttcaataattaaaggcaatctcaatacctgtctttggagaactaacctctctagaaaaaaagactattgtttcctgtaccattgaaataaaatttccagttttcaggaaactcaattgaaataactgtagattctatgcttggctaatcaagaaatgtcatactgaaac

SEQ ID NO: 826006 - DNA, 510 bp, Homo sapiens
gccagcctctggtctcaggatctcctgcagaggcargctcatccttggaggttccttcttccttcccctagcatccagtgagctcaattcatggccttggctcatttcatctgctggggagctaagctgctcctgcctgcctcaacagacacagcctgtaaaagcctgactgggcctagagccccagcccttgcctctaggctttctgccctccatggcttgggggaagcaccaccctaggagtcaggacaccgtgtactagtccagctctgccactgcctgtctgaggcctcagacacagcacttctctccctggccttggatcccacatttgaggctggcccaaggaacctgcatgtttcctcccagctctgatgtctcgaggcctgttcccaggtaaccagaaacatctggaatgcagggttccctgtctaagcagctgttatatgtgggatgcacacaggacaaaagggtttctgttgccacaaggctaggccaggggaaagtttt

SEQ ID NO: 826007 - DNA, 613 bp, Homo sapiens
gggctttgagagatatggtcacacaccctgggagcacgcagctcagctgggaaggcaagactgcctcagaggccaggtcagagggcagctgagagctgagttggcagggtctggtggagggagctacacacactgcaggtgctagggctacaacgtcctttgggaaggcacagcgtggcctcagaccttctgacagctgccaagcctgagacctcatgtctacacagaacgccaggaaaatcagcttgtggggaaggtcccctcgtgcaaggccacccaggcacaccctggtaatatctggtgggagcccaggtggccccacataggaaaggaggctataaaacaggaagccagtgcgaggcctgcagagcgggggacacagctcttcccgggaatgcccactgtttgtttgccagctgggcccacgtgcctgacttcccctattaaggatttggtcccttctctttttttgccccacccttctagatttttctaaactcaaaatgtctgggcttccccagctgggaagagattgtgacatactaaggcttgcttcagtggccttaacctrtctactcctcacagtgtccccatcctcagaagactctccctg

SEQ ID NO: 826008 - DNA, 547 bp, Homo sapiens
gtaaatatgaatcaactaaaggcaagagatagactgtaatacaatacagtaggggacttcaacaccccacttttcagtaataaacagatcatccagacagaaaatcaacaaagaagcatcagaattgaactacacactagaccaaataggcctaactgacgtttacagaacatttcacccaactgctgcagaatacacattgttttcataaacacatgtaacattctccaaaatagactatatcttaggctacaaaacaagtctgaacaaattcaataaagtagaaattatatcaaatatattttctggccacaatggaataaaactggaaatcaataacaacagggatctcagaaactacataaacacatagaaattaaacaacttactcctgaacaaccaatgggtcaatgaagaaattaaaaagaaaatttaaaaaatttttcaaacraatcaaaatggaaataaacataacaaaatatatgagatatggtaaaagcagtactcagagggaattttatagcaataaatgcctacatcaaaaaag

SEQ ID NO: 826009 - DNA, 619 bp, Homo sapiens
tgaatgactattaagtcatctaagaaattaaggagataattttaaaaattcttgaaacaaatgaaaattgaaacaatacaggaaaacctgtgagatatagcaaaaggagtgtgaagagsaaaatttatagcaataaaaacactgaatcaaaaaagtagaaaattttaaaataagcaatctaacaatatacctcaaggagctagaaaagcaaggacaaaccaaagccaaaattaatagaaggaaagaaataataaaaattagcacagaactaaacaaacaaacaaaaagactaaaagaacaaaagttcaataaaatgaaaagttggttttttgaaaagataaacaaaaccaataaaccacttgctatactaaacaagagagagagacccgaataaacaaaatcagaaatgaaaaaaggagacattacaactgataccacagaaatacaaaagttctttaaataccactgtaaacaacaatatgctaacaaactggaaaacctagaagcggataaattcctgggcacatacaacctactatgatggaaccaggaagaaacagaaaacctgaacagactgatatgagtaatgagattgaattggtaataaaaagtcttccaa

SEQ ID NO: 826010 - DNA, 579 bp, Homo sapiens
attcacttaatgctgtttgcataagcaaaaagaaaacctaataaaaacccctgtatcttaacttcatctccctgtttttgagtttttgttctttctatttgtattttattgtactgcccatgtcttcaaaaattgtagttgctatttttgattggttcatcatttagtctttctacttaagataacagtaatttatacaccagttacagtgttataatgttctgtgttttttgtgtgtagttactattaccagtttctattataatctgtttgttaaatttatctgatagaattctgaatttctttcctgtgttatcttgaatttctatgagtttcctcaaaacagctattttgaattctctgtctgacaggtcatatatgtttcttcagagttttgtaccttcggataatttcttactgctaattaagatctgtttctttctgattgaagtacttcctttagcaattcttgtagtacargtctggtgttattgaaagccctcagcttttgtcagaaaaagtgtttatttaccttcatgttttaaggaggtattcaccagatatgctattttaggtata

SEQ ID NO: 826011 - DNA, 530 bp, Homo sapiens
tgtggtagttgctgaattaccacctgatattcctagtgggttgggrgggtagcccactcctgcctcactcatgcctgtctaactacctgtaacacctctgctgctcagaaatattcacaaacggagtgggagtggggagaagcagtcagcagaaagccccacccagctcccacgcagttggtgaggctggtctcactcccacagtgctcccttaataattactaggtttaaatccaggaagtctgctcacagaattcagacctgccccaggccatgagcttccctgcatagatagcaagcacagctttcaggccacactcctccccttctgcccataaagctgagctgcgagcttctgtgttcatgtctgcagcacacttcctgctggcccccagattctggtcaagggagtttgtccccattcaagattatatcataaaattcagttgggagctttcatcttgcgacccctccctgagttctctggctgatttcttcaagagcccctgtgggatatagtcagaagtgac

SEQ ID NO: 826012 - DNA, 613 bp, Homo sapiens
aacagaaatttattccctcccatctttggaggctacatgtccaaattcaaggaattggcaaggcygtgcttcctctgaagcctcaagtagaaagtctttcttccagcttctggtagcactagatgtcccttggtttgtggtagcttaactacaatttattcctccattcttacatggtctgtgtgtttctgtgtcttcatgtgacattctgctctatgtgtgtgtgtctctttccttttcttgtgaggacagcactaatattggattaagagcccaccttactccagtatgaccccatcttaattattaacatcggcagtgacactacagtgatgtttcatttagtgatagggatacattcttagaaatacagtattaggtgatttttgtcattgtgtgaacatgttaagttcagtatacagtaacagcattagatagggtagttaaagaaggcttctctaagaaagtagcacttaaattgaatacttgaataatgatgacaagacatccatgaaaaagaatgattgtgggtatgggggagaatgattcactcaagagaacagcataaacaaacagaatcaaatactccaatatgtgaaagatgagcagtgtg

SEQ ID NO: 826013 - DNA, 343 bp, Homo sapiens
gatgagaggggacatctttttggggttaatattaagtactagtaaattcatttatttttctttttctatctcttttcccttgggaacacatgtgcaaaagttttgatgtttatattcttcattaaaccctacaatgccattcttttggtttagtttattgtattaatgttcatttatctagggattcccattcacactctttcctacaggcacccactcaaatttatttgatataaattcttggataggtatatatcttcgataaatacatayagttgtatttgtgaggtgttttaatgtccctgtattttctatgtatggtattatgtaaccttataaattc

SEQ ID NO: 826014 - DNA, 561 bp, Homo sapiens
aacaacatggaaaactagatgatttgtggttcaaatttactgatagataagttaaacattagagccataaagtgtaaatttgcgtagcatttaacaagctttagaagagcattaaaagtaacctatatgtaatatgcaatacgaatagagcttcacagagccccagaggaagctgaaaatgtagttcaggatgcttcaggctgtctgagatgttgagattatgttccacaaagaccaaaataaggtttcagcaaggttttcttgcaacatgtaagttttccagatgaagagaaatggacatatattaaatttccagcagcttaaaaatgcagtcatttgtaagtgattaaaatggacgttgtttttagtttttctgtagtagttggcattccttaactggtttttatattaaaccagttatgttaaaaaacaaacatgtatacagtgtgcctatcttgtcactatgttaatagaaaatcattcaaaaattaaaggaaaraaaagtaaaaccattataataaaagattgtgagagctgcttgagagttgtggggagtaatct

SEQ ID NO: 826015 - DNA, 447 bp, Homo sapiens
cttcaaggtatgcttcatccccagggtgcaaggttggttcaatacacacaaaacagtaaatgtgcttcactacataaactgcactaaagacaaaaaacacatgattatctcaatacacgcagaaaaggccttcaataaaattcaacatcccttcatgttaaaaaatctcaataaactaggtattgaaggaacatacctcaaaataataagagccatatatgacaaactcacagccagtatcatactggaagcatttcccttgaaaaccggcataagacaaggatcccctctctcaacatttctattatgcatagtactggaagttctggccagggcaatcagkcaagagaaagaaataaagggtattcaaataggaagaaaggaagtcaaattgtctttgtttgaagacagcatgatccagcatctagaaaaccccatagtctcagc

SEQ ID NO: 826016 - DNA, 558 bp, Homo sapiens
aactgaaacgcaggtatctccatttagagtatcctgmttggtgtccaccattctcagggagagtgggggaagcaagtagttggccaggaataaagataattcagtggcatgtctctgattcataaagtgagcatgcagataaaagtaaacattcgcatattatttagtattttttggttactttcagataaatagctgaggtcagtgcctcttataagtcgttggttctacatttgacatcagagatcctaggttttacagtctctgtcctgcatcaaacatattctccagtttacattcaacccagactccacagcttatgacttgaacacattgtttaattcctttaagcctcattttggcaacataatagatggtgatgatgatatttaaattacaagttagccaaatttaaataaaagatatttaaagcacttcccatagtatctaatatatagtaaaatgctgtaaacacaagtaatcactattatctattaagaagatgatggatcaggacttaggaagcaccaagccttaggaaaccaaatcttttgaggt

SEQ ID NO: 826017 - DNA, 617 bp, Homo sapiens
aagccaacctaaaacttagtggcttagaacaatacacatgaatttaactcaagtgtctgcatgttcacaaattacggtggacttgattggacagtcttctgatctcacatatattgggggattggctgcagatcagctgatctaggatgttgtagcctgggatgactctgctccttatgcctccatcaggctagtttaggcaaaatcttgtggataaggcacacaagcaagagtgtttaaaatgcagtagatcttttgaaagctacttgatgcatcacacctaataatatctcattagctaaggctagccatatgatcaaacttagaaacaagggcagagacatagaattctgtctcttcagtgaaagaaactgtaaaattacatggaagccttggatacaggaaggagtaaagaactaagttctatgttgcaatctgcaacacaaaaattgagacaagtttttaaagatttttaaaacagaaaatgcttctatggattgactgtatttaatcatcacaaggttacaaattaaaaacagattaaaattttctcaagaatgcatgaattgttttcaagtctactttctgaaaamctttattcttacatgtttagcttt

SEQ ID NO: 826018 - DNA, 614 bp, Homo sapiens
acatagctaaacaatatgcccttgattctaatatataataaagacaactaataatacttgctttccttttctttatatctagatttttagggcagaggcaggtttttatttatttggctgttcagataactgaatattatcaatatgtttgttaagccttatatattgttatatattgttaagccaatatatttgttaactcctatattacttcagtattttcctggatttgcttcctttcttatttgaatacttcttccaagagtagttttaataagaatgttttttatagcagaatttctgaggcctcacatggtcaagaattgaatatgtgtgtgtgtgtgtgtgtgtgtgtgtgtgtgtgtgtgcttaaacagaaagagagagataaggaatctatatcttatgatttatgtatccagatttcaggatatcccaacactgagtgatatagtctgaatgttgtctaagcaataacatcaaaataatgataatgttcaaaaaatgtacgagttaaaaatttaactcagtattaattasagagccaggaagatgttacaacaagatcaaaggaaaaatcaaagaagcatacttttatttgtagtagtaaaaga

SEQ ID NO: 826019 - DNA, 585 bp, Homo sapiens
aggcacagcatctttaatggtgttccaggaatctctggtgagtacaaagtagggacctctggaaatgaattcccaagaagagaawcatagcacataccatgggagttttcaaactatgacttcttttgttgttaaattatctttagaaaattattaatagcttaggtatcattcctggcctctgtagagactttacactttaattgcaactccaaataatatttcatcaaagcaggctcttatgaagtgttttctttctttttccacaaacttgggtatgagtagcaactctacattatgaaatagaagtgagatttcacacaagtaggacttaagcaagttgtatgagcagatgactgagactcttacaacacctactacaggtacgtagctgctcttgcctttaccaggtttagaacctcactaagagttcattatgaacagttcaaaggggaacagaatatttcacgcgtcagtatgaaattctgtcattgggcataagtgggctccttctgcacttcagtccctttagtggctagccctgaaagacaacggggaaaggaaatacttctttgggcagaattt

SEQ ID NO: 826020 - DNA, 422 bp, Homo sapiens
tttgccatgtaaggagacatatttacacatttacacattccaggatgaggacctaaacatctttaggagctattattctgtctaccatagcaggcattaaattagtgatgtagggccattacgtctgatccaaactttatttggggtgagctacctctaggtatagattggaggtgggaatgtagatgatgagtggcagggagcacagataagccctcaccataagctctctccctcataatagctttatcaatgataaagatgatatagattatttacttagctcctgtgtctatttctcaaataggtctgaaatcattcagggaaaagtgggrtatgttattggcctccctataacttcaacagtgtgcatatgtaagagtttcttttttgctttcttttttatcttttaaatttctttt

SEQ ID NO: 826021 - DNA, 524 bp, Homo sapiens
ttcccggatccatcagaggaattactatctatggcagatatagccttacaaaatgtatttcttaaatartaagactttcaagttgaaagtactccttaatccatgggctgcagaacggatgttgtgttagcaggcatgaaagcaacattaaactccttgtacatctccataagagctcttgggttaccaggtccattgtcaatgagcagtaatattttgaaagaagccttttcttctaagcagtaggtctcaacagtaggcttaaaataatcagtaaatcatgctgtaaacagatgtgctgtcacacaggctttgttgtttcatttttagagcacagtcagagtagatttggcataattcttaagggccttgagattttttgaatggtaaatgagcattggttctaactcaaagtcaccagctgcatttatccctaacatgagtcagcctgtcctttgaatctttgaagccaggcattggctaatcttcattagctataaaagtcctacatggcatcttcttct

SEQ ID NO: 826022 - DNA, 566 bp, Homo sapiens
aattgtaataattttgacccagagacaaagtgagcacatgctgttggaaaaatggcatgaattaactttcttgatgcagggttgccacaaaacttcaatttgtgaaaaatgcmatatctgcaaaatggaataaatgaagcacaataaaacaaagcatgcccatattattattttgctgtgaaacaaatactacaaacttaaacaatatacctttattatctcacagtttctgtggctcaggagttcaggcatggtttaactgaggcctcttgctcagggtctcacaaggttgcaatcaagatgtcagccagactgggttctcatcagaagtttagctggggaatgatccacttccaagctcactccagttgttggcagaaattattttcttggaattcttgggctaagggcttcaatctcttgctggcactcagctagaggccatcctcagctcctagatgttgccaacagctttttctttatgtgtgggcttccccaacatgaccattggctgcatcaatctagcaaggaagaaaaaggatcctagcaagatgactattacagtc

SEQ ID NO: 826023 - DNA, 522 bp, Homo sapiens
ttggaaaaatggcatgaattaactttcttgatgcagggttgccacaaaacttcaatttgtgaaaaatgcaatatctgcaaaatggaataaatgaagcacaataaaacaaagcatgcccatattattattttgctgtgaaacaaatactacaaacttaaacaatatacctttattatctcacagtttctgtggctcaggagttcaggcatggtttaactgaggcctcttgctcagggtctcacaaggttgcaatcaagatgtcagccagactgggttctcatcagaagtttagctggggaatgatccacttccaagctcactccagttgttggcagaaattattttcttggaattcttgggctaagggcttcaatctcttgctggcactcagctagaggccatcctcagctcmtagatgttgccaacagctttttctttatgtgtgggcttccccaacatgaccattggctgcatcaatctagcaaggaagaaaaaggatcctagcaagatgactattacagt

SEQ ID NO: 826024 - DNA, 549 bp, Homo sapiens
ggtctcgatctcttgacctcatgatccgcctgcctcagcctcccaaagcgctgggattacaggtatgagccaccgcgcccgacaaataatttctgtattcctttttaaactcaccattttgtctccctgctttgttaggaaacaaaagccaggtatcataggtactaattcagtgcctcttttttatcacttatttgggcaacgtttagaaaaataggcctacatcactgagttttggcctataaaccctccaggtcacactatgttgtgcctttgtccattgttattttgttaaatatcttcggtttatttgctgtgttttagcaattatactaagaatgccaggtcatttcatagcatccagactcttatccccaaatggctctttatatctctgaatctgaccctcctcaactgtcaaaactttcccactgtacttgtagaacttactacccttggcaaaatctcttacaatcttagcctattccagaatgttgccttcaccttytgactctaatagaaacctgcctgtaccctggagacgttact

SEQ ID NO: 826025 - DNA, 472 bp, Homo sapiens
aatagctaaagcaatcataagcaaaaagaacaaagccagacgcatcacattgcctgagttcaagttacattataaggctacagtaaccgaaacagcataatacttgtacaaaaacagatgcatagagcaccaaggacagaatagagaactcagaaattaagctgcacacctacaaccatcacacctacaatcctaaatcacacctacatcacaatcctatatcacacctcaaatcaaatcacacctacaaccatctgatctttgatgaagtcaacaaaaataaggaatggggaaaggacttcctattcaataaatggtgctgggatagctggttagccatatrcagaagaatgaaactagacccctacttttcaccatatacaaaaattaactcacaattaattaaagacttaaatataagacctcaaactataaaaatcctagaagaaaaccttggaaatatcattctgga

SEQ ID NO: 826026 - DNA, 564 bp, Homo sapiens
ggatttttaccaatctgatagtgaaatatggtatctggatgtaattttaatttgcatttttttgtatgtaggagtgatttgaacatcttttcatatatttatgagtcatttgtatttctttttctgtgaactattactcactttctaatagggtttttttccctctttgaattctattttctccttatatattagactgtattgtaaattgcaaatagtttttcctagtttgttgctgtctcttaacttaaaagagttgttttagagaccaatatgggtaattgcattagtgttccatgttatttttgcctgcatacacagctatggatgaggatagaaagatagataggtacacacagttagatagtgtatgcatgtgtatgtatatgtgtgtgtgtgtgtgtgtgtatatatatatatatatatatatacacacacasgccctctttttttcttgaagcataaataacaccatgcggacaatgcatgcatccacatacagggccaaccttccccatagaaaaaggaggaaggcaaacatattatccaaaagtggttcaaagt

SEQ ID NO: 826027 - DNA, 548 bp, Homo sapiens
aagttgtatacttaagactcttctcttctgtgcaagtaaatctctatacctattcttaaatgacatttgtctataaattttttttaaaggacgtcactgctagagtggtatcttcattagaaatgcctctgtaacaaacactgttgctactccctaatgctgatgttacactgaaattttcattcctccagaatcgatgcaaatcatatcaaacactacaccatacaacaaagaaaaagagatagcaaatggaagtatattagcatagcaaatccttagcaatacatgacttactgcatgcaccaaaaataatattcacatctgaaaaaattttgcaacgcattaaaccctagcatttatatatttttttctattctaaagtaaaattgaccaaacaacttaaaaccaactttttcttaaggaaagaagagagagagaattgacatataaacataaatctgaattggtcatatractaataatatctatgtacaaattatcctttccagggatatctcacagtaaattcaacaaaatacaacttcaat

SEQ ID NO: 826028 - DNA, 586 bp, Homo sapiens
aaaacccacaggcatttaactccaaccgatgagaccagctacctgggctgcgcccagcaaggccatggaaatacggctgcccaaaacctygggtgcccccttctaccagtgtgcccatgatggggacatgaagtcaaagattactttagagctttaagacttaatgtctaacccttctaggtttcagacttgtatggggcattttaccactttctataggccaatatcttcttttttgaatggaaacatttacccaatgcctatacaaccattgtatcttcccagtaaatcatttgtttttgagactcacagttttaaggaacttacttgccttgagtcttgggcgagactttggacttttgagtctatgctgaaacaatttaagactttgtgggactattaggtttaaatgattatattttgtatgtgagaaggatataagatttgagagatcagggcagatttctatagtctggatgtttgttccccttaacttcatgtcagaatttgatccgcaatgttggaggtgaggcctaatgggacctatgtgagtcatggggtggatccctcacaaatcttcatggta

SEQ ID NO: 826029 - DNA, 586 bp, Homo sapiens
aaaacccacaggcatttaactccaaccgatgagaccagctacctgggctgcgcccagcaaggccatggaaatacggctgcccaaaaccttgggtgcccccttctaccagtgtgcccatgatggggacatgaagtcaaagattactttagagctttaagacttaatgtctaacccttctaggtttcagacttgtatggggcattttaccactttctataggccaatatcttcttttttgaatggaaacatttacccaatgcctatacaaccattgtatcttcccagtaaatcatttgtttttgagactcacagttttaaggaacttacttgccttgagtcttgggcgagactttggacttttgagtctatgctgaaacaatttaagactttgtgggactattaggtttaaatgattatattttgtatgtgagaaggatataagatttgagagatcagggcagatttctatagtctggatgtttgttccccttaacttcatgtcagaatttgatccgcaatgttggaggtgaggcctaatgggacytatgtgagtcatggggtggatccctcacaaatcttcatggta

SEQ ID NO: 826030 - DNA, 511 bp, Homo sapiens
ggaactttattcattatcaacaaaaatgtattgaaccctagatgtattgaaccctagcgtgctgaggggactgggctagctactgtagaggatgtcatataccattctccccttcttcagtatgctccaaccatatttacagtctttcagttccatatctctgcaaggtatttcttgcctcaaatccacatacacgctgttcactctgcctgtgtgcacgtcccctccttgtttattcccacaaatagacatttgttattcccagctgactcttccttatccttaaggcctcagattaaatgtaccttcttcagagaggtggtctctcatcaccaaatataagttcttcttcctggcacccactgcctttattgtacatcataatctgtgattattcatttaattgttttcttgtttaatttctctctcccacaaaactataagyttcacaagggcaaggaccaagtctgttctgttaaccactgtgcaaccagggtttctagtgcagggt

SEQ ID NO: 826031 - DNA, 655 bp, Homo sapiens
gccagtcacgggccaaccttgtaagccttttttttttttttttctggatatcagtctcaggcctgctwcattaacttctttctgcacacctgttcatttatttgtgtatacatgtagtcatataattagaagaatagccattgaatttgtattatagtttcaatttatgttaaagaatactggatcttccctataatatataaaacaaatttaatacctatttttagtggtatgctggagctattctgtaactgcatgttagagccaattattaaatctccaggaattttgtgagctactcacttgcaatcacctataacaggaatattcacaccaaagaaattggcaagttctgcagatcaggacttccccgtctccatgaagagctggttattaaacattgaacagcatacctttgctgttgaaaggaaagagtgagaaagtaaaaagaataaactttcacacctaataaataaaatccctattcagatttatttattcattcatttaaatttatttaataaatgtgaaatacagaagaagttctgcagctaaattcactgactatatggagcttacaatctagtaggagagccagatgatacacacaaacatagtggagcaaaatattctcatcttagtctgtcatttcctt

SEQ ID NO: 826032 - DNA, 606 bp, Homo sapiens
ggaggctaggaaaatgaagacggctagggaggaagcatgagagtggatccctatagctctgtggcttcagaaaaaggaaatgaatcacttggatttgactacagatattgtatataaggtgacaaattctgagagtttcctgaatgcagggccatttgattctcattctgggctcagcctcatctcccccatgggaaccccagccccagcagcctgtcaccaacccagaggctctgaagacagtggccctgggagagacaggacttctcttttcaaagtaaacactgacaaaaaccacttaagatgtccatggtcaggagatgacactaagagtaattaaaatcaaattctgaaccctcttctagcactcacatcacaaatcatggtgccaggaagggaaatagaccaagtaaacaggcaatgtcagggaaaggcctgaaagtaggctctgaagacaatgtcagtctttagagtgatccagtcaggaggcaggacagyggggatatttatacccctgcaacagtaggtccttagttgaggacacttcccagcaaaatgtaaacttccaggtatgttcctactctgctaacatattggttccagcag

SEQ ID NO: 826033 - DNA, 672 bp, Homo sapiens
cttattttcacataaccagggagtttctggattaacttccatataagacatatttattaaaaggtaaataatttggccgggcgcggkggctcatgcctataatcccagcactttgggaggctgaggcaggcggatcacaaggtcaggagattaagaccatcctggctaacacggtgaaaccccgtctctataaaaatacaaaaatagctgggtgtggtggcacgtgcgtgtaatctcagctactggggaggctgaggcaggagaatcgcttaaacctgggaagtggaggttgcagtgagctgagattgcgccactgcactccagcctgggcgacagagcgagactccgtctcaaaaaaaaaaaaaaaaaaaggtaaataattaaaatgtgctgatttgaagcctatatagcattaaaactcaacagtaaccacaactattgtttaacatttagatcattgaaaattttgtcagggaagagtttttattatgacattatttagaagtgggggtacatggtgctattagaaaatggatctcagggattgtatgcagtatttcaagcagctgggcgtggtggctcaagcctgtatcctaacacattgggaggctgaggggggtggattgcttgagcccaggagttcaagaccagcctgaacaacatagtgagccc

SEQ ID NO: 826034 - DNA, 595 bp, Homo sapiens
tctctgacggaaaagacagccttgaatattgttgccctttagcatttcaaacatgtttatatctgttcacatatttatctcagaattctttttactgattatatttatccctgttcctctaaatcagtcttaataccttactgattttctttcattatttaagagttgaataaaatcattgacatttggtcattttatatttgtatgtgccaattttttaactttaaaatctttgttatgctttgtattttatatgtcatatgataaatgtaaacaaaaacacataagataaatgtaagaaaaagagaaatcagagaactgggttatagtattaccttaagatttgcacctctgcaaggtaagaaatctttctaaaaccacacggaagatctgaaccctaattcttcttagtttggcaaaatttaaaagtagagtcagttggaactttggtctcacaaggtttcttgcattgtcrtcaggcgttggattgtcaagcttccatgtgagccatcacccacaggtttccgtatcacatctgcactagtatttgaagaaagcaaaggacatgtgggctatctcatcagttcgtggttgt

SEQ ID NO: 826035 - DNA, 595 bp, Homo sapiens
tctctgacggaaaagacagccttgaatattgttgccctttagcatttcaaacatgtttatatctgttcacatatttatctcagaattctttttactgattatatttatccctgttcctctaaatcagtcttaataccttactgattttctttcattatttaagagttgaataaaatcattgacatttggtcattttatatttgtatgtgccaattttttaactttaaaatctttgttatgctttgtattttatatgtcatatgataaatgtaaacaaaaacacataagataaatgtaagaaaaagagaaatcagagaactgggttatagtattaccttaagatttgcacctctgcaaggtaagaaatctttctaaaaccacacggaagatctgaaccctaattcttcttagtttggcaaaatttaaaagtagagtcagttggaactttggtctcacaaggtttcttgcattgtcgtcaggcgttggattgycaagcttccatgtgagccatcacccacaggtttccgtatcacatctgcactagtatttgaagaaagcaaaggacatgtgggctatctcatcagttcgtggttgt

SEQ ID NO: 826036 - DNA, 554 bp, Homo sapiens
ctgtatgggtgaaataagaacctagttcaccccgtcacaggctgaataatgaccacccaaagatttcaggtcmtaatcagtggaacctgtaaatgttaccgtgtaagtgaaagaagaccttgacagtgtattaaggatcttgacctagcagagtatcctggactattcaggtgtccattaatccaatcacaggtgtccttgtaatagagagacagagggaggtttgacacacacagaagaggggaaggcaatgtgaaaatgggggcagagattggagtgatgtggccacaagccaaggaacaccagctgccaccagaaactgggagaggcaaggaacagattcttgcctagtgcctccagagggagcttagccttgtgaacactgattttggcttagtgaaactgatttgggacttctggcctccagatttgtgggagaacaaatttctgtcactttaagccaccaaatttgtgttaatttgttacatcagccacaagaaatgaatataacacctcatcaaatagttttcctaaaaccataaagaatccttctc

SEQ ID NO: 826037 - DNA, 623 bp, Homo sapiens
gcacaagccatcatctcccaggggacggaacgaccccttcatctccctttcccagacacatccggtctcccgtccccacggcctccgccccccaacccgccttctgtaggctgcgtggagggtgagtcagtcgggggaagggaagaagagacaggtttagaaaacgctggcggaggctggattgacagggagaggtcccgagcctgaccttcttgagctgggtgtgaccctggtctaggggagagcaacaaaatccagcccgccccctttctgctcacactcccccaaggggtcctcctggcagggccgtggtgcctgggagacaagaaccccaccggttgcatcctcagcaccagcaggcctggggctttcctagaacgctactttccttttcaccccagcctgctcttgatgctgcggtgctcaggacgggacctacggactgcctgggagacccacggactgtgctggcccctttccccgcatgcaagaccmtaagtagagatgcaggtggggaagtgatgcctccgttcttgtgaaaatgttttcacacgctgaaaagttggaagacaacaaacactgcgacatgtcacctggatccagcgcttcgtagcatgttgtga

SEQ ID NO: 826038 - DNA, 589 bp, Homo sapiens
tctgggcattcacatgttttgattgtaaagtcatttgtatgttagcgatgagctgctggagggcatcgagtgtactttgatccttgggtactcacctgtgtactcactctccaaaggctgagaatggggaggcagggagacagtgacagccagactctaatgtcactgtcaaatgaagtggatgaatagtctaactgtggtttttctcctagagaagcctgttctggctttaagaaggcatctccaagaactgccagtggcctgaaacatcagccgaaacctgggaagggtccctgccccaccagctgtactgggagcctggcagggcatgattttgagccatactgggccctggcagctgctgacactactgagtgctgggagccattgggctggcgcccctccttcaggccatgcagcaggagaccatgtaagaaacaagagagatggagtctgtctcgaggctcaaagcccgcttcccgctcggctgctttctcactccgggctgcggcagggcagatgctgtctgaaggagaayaggcggtcctggcaagcccagcttccatgagaaagcacccatgggtgtgat

SEQ ID NO: 826039 - DNA, 594 bp, Homo sapiens
ggtgtgggacttttcttttttttttttctttttcttttttgtagagatgggctctcrctatattgcccaggctagtctcaaactcctgggcccaagcaatcctcttgcctcagcctcccaaagtgctgggattataggcatgatccactgtgcccagccctatggggaatatttgttgactaaatatgttttatgtaaattgcttatcatactctttgttgtaacatctgtggcattaatatgcctcttgttaacactcacctacattttacctgttgtaaatccactgtcataattattgaaaatatttctccagagctttttaattctatggttatttatttattgtagtatagaacttttatgatttcttccatcagggtgcattctgaatcatgcttagtgagagatggtttttaactccactttaacagttagcatctatgttttacatcagtgtcaatgtcacttttgtattatatacgacaccaacattttattatctgagtgatgagaatgtttatttttgtggaaatggagatctcatgagactttaagcagattgctggccttctcctcgatttccttgattga

SEQ ID NO: 826040 - DNA, 604 bp, Homo sapiens
ggcccctgaaatgagcctgctgtacagatgattccagaactctgtcagtgtgaagaccaaacacaattaagcacattaaaatacttacggtaaagtgtttctttcactttagatgtgcaaaaacttaaagagagagagacttatgagaagactcagggaagaaatgtaagataaaggtgttaagggagacaaactccacaaaattgtaaagtgaagctgctgtggggagtagagcccagacccagataatatgcaggcatgggtccaagggaggctttgcacaccaggcgggggaggtgcagggccatggatgaatggtcttgggaaaacggcaaatcgtttggaaaaaaaaacaaaactttgctctttatatcaaaataaattccaagctgaacaaagaataaaaatatagcattgaaataatgaagctattaaaagaaaacttaggtgagttttaaaataattgtgaagaggcctgtctaaatgtgataaaacatatgaatttatattcacactcatcacaagattgataagcatgatttcctaaaattttaagcaaatccccataaaatgaaaaaatatayaaataagtgaaaaaaatggt

SEQ ID NO: 826041 - DNA, 534 bp, Homo sapiens
aaaaacctaaaaatctcccacatgcacataataatttaagtgatattggattgtcgtttactacttatacatgcatttctgcctatacatattctatccagtgtgtacacatgtgtatgtaaatatgtagcatgatctggaagtgtaagcaccaaattaagaacagcagctttggggggaggggaatagaattggtttagagaaaaaggtgaaattaacatttttattctgcctacttcagtgtgcctgcagtatttacaacgatcaggagtgtgtacttttttcaatttagaaaaatgataataataaggtttgcttggggggaaagggtaagtaggatgagaccaggaagagaagtaacttagaaacacatcatgcatcatgactgctggcaccattctgtcctccaatgaagagygaggctttgagaggttcagcagctcacccaaaggtgtacagccatggtctcaaacatgcttgcaccctgctgtcactcaggtcctgaagcccaggccacctccaaggacactgggg

SEQ ID NO: 826042 - DNA, 569 bp, Homo sapiens
attttgttgattgttgtttcttaatgaccattattcaccttgtattattaagacttttaargggctcccatgtaccaacttcaaatataagatttgtttaaagctaataacatttcacggaaaccaagtcagtaattgagcagagacaatctgtataaaccttttagctttgtaaaccttttagctttgtaaaccttttagcttaggctgtagatagaacatttagggcagaatagtacactaaattatcaaccttttccaaacatttactcttaaagatccgaattcttccaatctataattttccctctagttttgactgtttgtttagacagggtctcattgtatcacccaggttggtcttgagcagctgggttgaagcgatcctcctgcctcagcctcccaagtagctggagttacaggtgtgtgtcaccatgcccagctccataactgtgttttgaagcaggattaatttagggtataatacagataaaggctgtgggtttgttttgcctgagatcatgcttctatctcattcacaagaattcaagtttcttctaaaatattat

SEQ ID NO: 826043 - DNA, 666 bp, Homo sapiens
ggaagagtattctaaggtgagggatgagagatrgatgataactaaacagacgggcagacagtggtgcataacttccaactctgaagtcaattctatctaccccaaatcaatccaaagactttgaatacctacataaatgttataaaattattggaaaaccaaaaaatcaacatgaactctccctctgtccagatgtttcagtatcatgtgtttagtatatagcatgtgcactttatgcaaaagcattatcaccagatcaacactttcaagtatggagtttgttcctatgtaaaaacgaatcatgttcacatggtgttagctacaaatggaagggaggtatgaaaatgagccagtgatacaactagagatggctagaaacctcctctaacatctggacacaagaaccactatctgaaatcaattttaaggagtggattcctcatatatgacctgactgtattaaagaattatttgttacctggaagcaaaggtgagaaccatcctaacctgtcctttctgagcttgtgcctgacaactagtacagcacccagcattgcctttggcagtattaagcatgtgtgtgatgggccagcctcctttctttgtgtctgtcttcctgccatggggagtcttctcagatctcccgccagaattgttttctaaggg

SEQ ID NO: 826044 - DNA, 481 bp, Homo sapiens
ttgttttcctatgcattgtatttgctggagacataccacccattttaccccctactttttttctttggcaatgaagctgtctattctatgcctaactcaacaggacacagccgagrctgtatccagtttgacaagattcagcacgaaaggttcctattacctgagccagatgcatcactgatatgcggccaccagttccttaggttcatatcactttaagggaccaaatacaaatgtcagtagcgtatgtcattcttaagctgcagatatggtgtcaaagaagaatgtggagataagagagcaggaggaattatgaaaatccagacagcatcttctcttctagagtggaaggtacactagtaattttatgaaacaataacataaatgaaatgtgtcatcatcatggagtgtctcacagtggcagtgcacaaataaatttctaaaaattccataaggtaggtgtgatggatgcggcttattt

SEQ ID NO: 826045 - DNA, 479 bp, Homo sapiens
aatcacctctagtgttctattcagggcaatctacactttttatagtctgatcctccaaattattccagactttgtgcattactacatccacttctacattttggagtayttgtaatcacaaaagccccacctcttgatactgatttttttgtcttagtccactttgtggtgcaatgaggcaatacgacagactgactaagtataagtaaaagaaatttgtgttctcacagttctagagcctgggaagtccaatatcaaggtgctagcatcttgcaggggccttcttgctgtgacacctatgtgggaggcaggaaagcatgtgcgaaggagagaaatggggctaaattcatcttttaatgaggaccccaggcctgtagtaactaatctactccctctatgagtaacccactctgccaataatggcattaattgcttcatgagggcagagccctcacgacctaatcattcctgaaagttct

SEQ ID NO: 826046 - DNA, 520 bp, Homo sapiens
gcttcatctccttgcaaaaccaatgaaagaaagtgaaacacaacgccatagtgtataccagacagtggattgagggaagagtttcctargtcgtaatcgacaaagtggagaaaacatacaaatctttgcatggtgctaacatttggactgtggcttcattgtttcttattaacattttagtgaaatattgctagaaggagactgaaaatgaagtatgaaaagttaaatgggatttctgttccaagttagtccttttcagatgagaggaactaagaagttacagggaagaaacaataatatctgctgagcaagatttttgcagggcaggccaaggaattaccaaggagaaaaaggaaatgtcagcttcaccttgcatctgctcccgagccaggtcctgagcaccccctgctggcgctgatcgtcccctggtgtctgatctcctctggttccctcagcttccctggtggtgtctgagccgctctactggtgtctgagcccctctgcctgccctcagctcccc

SEQ ID NO: 826047 - DNA, 651 bp, Homo sapiens
tcgtttcttacttttaggctgtaaccaggtatggggatctctcacttggcttccttagctcttgtgaaggatttttggacgtggatagttgttcagattaatgttccggcagggaaccatcactggagagtcctattccgccatcttgctcctggatgatcactcaagactgtcagactaaaggacacacatacactgaaactgaaaagaaggaatgaaagaagacatttcatgtaaatgttaaccaaaagagagtgaggtgggagtatctacatatatatcagaaaaaaatagattttaagtaaaaagctctcacaaaagacaaagatctttgtcttatataattattatatgtgatacaaagtttcacttatcagaaagatacagttatgcacacacacacatgcatccaacatcgaagtacctagacatataaaactatcatttacagatcagagaggagacacagaaagcaatacaatacaattaggagatttcaacaccccacgttcatcaatagatagaacatacagacagaaaatcagtagggaaacagcagacytgaatagcactagagaccaaattgacttaacagatagatacagaacattcaattcaagtccagcagagcatgcattctccccaaatgca

SEQ ID NO: 826048 - DNA, 651 bp, Homo sapiens
tcgtttcttacttttaggctgtaaccaggtatggggatctctcacttggcttccttagctcttgtgaaggatttttggacgtggatagttgttcagattaatgttccggcagggaaccatcactggagagtcctattccgccatcttgctcctggatgatcactcaagactgtcagactaaaggacacacatacactgaaactgaaaagaaggaatgaaagaagacatttcatgtaaatgttaaccaaaagagagtgaggtgggagtatctacatatatatcagaaaaaaatagattttaagtaaaaagctctcacaaaagacaaagatctttgtcttatataattattatatgtgatacaaagtttcacttatcagaaagatacagttatgcacacacacacatgcatccaacatcgaagtacctagacatataaaactatcatttacagatcagagaggagacacagaaagcaatacaatacaattaggagatttcaacaccccacgttcatcaatagatagaacatacagacagaaaatcagtagggaaacagcagacttgaatagcactagagaccaaattgacytaacagatagatacagaacattcaattcaagtccagcagagcatgcattctccccaaatgca

SEQ ID NO: 826049 - DNA, 638 bp, Homo sapiens
accttcataatctttcaaatctgcccattttactacatgtgcaataccactgttaatgatgatcacaataagctcctaaccatcctctttgtcttcaatcctatccactttaattcattctraacaacagtttggaaataaaattgtgagtgtatcacccctccattttaaactgttccagagtattttcatttaactcctgccacagtttaagcccatcagcataaccaggcaaggtcctccgtaagctgacccttcttaaacttctagcttagaatttttactccttctgcaaatatttcatccaaattaaatatcatgtagtttcctaagagagattcttctctcttcttctcccaagtccttttttatttcctccttttagagcgtacttcctctcacctttcacctgactcatgttaccagtctgttgagacttagttcagaaatcacatctttcattttgtctttccccaccctctcctctcctatgaattaagtcttgcttctatgtaaacaattagcttagatatttataactgatgctgtacttatatggttctgttgtattccatgaacatgtgttagatctttgaagacaaatatatgttattcatcttatgaaatttgtcctacac

SEQ ID NO: 826050 - DNA, 564 bp, Homo sapiens
tatcaggtctgttggaaaagtctccaagcactttaaggtgtctgatttaccggcatgtgcctttagagttaccttgctatcaattttcactgctgggtagcattttataataataatagctatggttaattgagtgcctattttatgctgcagtattcctaaaaggtgctttacagatgttctcattgctcttcaaaaaaaccccacaagagacttgatggtatctccatttatagataaggaaaatgagttttagagagattttataatgagcttggcatcacacgacaagttagttgttaaatttaggattcatgccctggtctgcctgactgtaaagcctactccaatgctttttccactgaattcactacttctctaggatagtggaaaaagccttatattaggagtaaaaattcctattctgccacttactatgatcttgataaaatattgacaaaatattgctgcctccatttccttatctctatgatggggagaacagcatgcactctacctgtctcacagttrtatcaatgattaagtgaaagagtaaatgtgatg

SEQ ID NO: 826051 - DNA, 619 bp, Homo sapiens
aaggaaattgctctagcatatgtgtgtagaagacataaaacttgctacagcagtatttttatttccagattattcttaaagctatttaaaagtcaccrcagaatgagctttacagaagcaatgtaatggctcctttaggtttttgtgtaaattcagataactgaaatgttagccttgattgatgattaaaaaggaaggaggtacaccaaagctgatggtgagctctggatacaggataaaggaattggggttgtgggggaaagatctcaccatagtcccttaagttcttttatagaatttctgttgtgattggtaacgtaaggagcatttgaaagatgatcgttatttgagaaatgtttctgaactagaaacttgcaagctttgaatcctgttaatactcactggcaatgatagccattttccattccatgagatcactttggaacttgagcataattttatttctgcttcacagttcttaaaatcctgtttggaaatgtcattaggaggataagggatgtaatgaaaaatacgttttctcatgtaccaaatcaaagtgtatagttatggagctggctatctatactgaacaacagttaacaaaatgaattggctgctt

SEQ ID NO: 826052 - DNA, 460 bp, Homo sapiens
aagctagaaacaaatatattgataatgaatacgaacactgtcattttgcagctatgaaaactgaggacagtgtagggaagagatttcccataaaacgtcaactctgatttagttcaggcagttagtttcagraaaaaaaaatgtattaaatgtgttatgtaaaacggtgtggggagaagaatggttaagtttaaataacttgttatttagaagatggtaggtgaaaagaaatacatatatatttgctgctgtctgtctgccccctatactccactgtgtgaaaatgcagtaaactgggctaataacttatagcacaatttgcacagtcaaaatgaaggtttctgctagataccattaaactcaaaggtcacatttaatataaaccttttatcctgcctggactcaaagcagtttcaggatttgtcatttaacagtcataaataatgtgcctcattttgtg

SEQ ID NO: 826053 - DNA, 598 bp, Homo sapiens
actcttgtccataattccatgattagttcacctttgggctgagatgtcccagcacaggtcatctgctagtagtgtgrgcaagtttctaattcagtgagacccccaaattgcggtgttgtgatgatcattctcctagtgaactagatatggtgaagtaatagcatctatgctctatcattctagggtgatctgaccaagatttcttggtatacgatttagagaatattgctactctaatccacactgttcaaagaaagaactcatctcctcatacatccagtgtgcctctctttgatttcttatagggaacacccagacagcatgtaggttagttagttattttccttgtcgtacaggagatcagaaatgacagtggctcaacttgccagagaaacaagtatcctggaccacaaaaacatcgttaacctagaccttatagcctgttggtgttagtaccttcagcaggaggacgtactagacaatggaagaggttgtgaatatgcccagtacaaacctcgagggcagttcacattttgtgatagaagtgtctaattccttacccaatttcaattcctttttcttccttacccacgaacct

SEQ ID NO: 826054 - DNA, 609 bp, Homo sapiens
tgtaatattaacaaacttcaagctaaataaattatgataattatttatatttcaaaagtataaaaattgcatcatatttcatgagcagtgttacatgaacacaaacctaccgctgaatcccaattttttatatatatatatatatacatatatatatatacattttttttttttttgagacacagtctcactcactctgttgtctaggctggagtgcaggggcacaatctccactcactgcaacctctgcctcctgggtttaagggattctcctgccttagcctcccgagtagctgggattacaggtgtgtgccaccacacctggctaagttttgtatttttagtagagacaggatttcaccatggccaggctggtctcgaactcctgacctcaaacaatctacctgtcttggcctcccaaagtgctgggattacaggcgtaagccaccacgcccagcccaatcttatattcttgctgtcaatctaatgacactgtagttatttagttattaataaattgtgattaargccataggactttggtccaacaaaatgttcaaactgtcctggtcaataaaaatattttctggggaaaatacaattgtaagg

SEQ ID NO: 826055 - DNA, 601 bp, Homo sapiens
gtaatattccactgtatggatataccacagtttgtttatccattccccagttaaaggaatctggataactttcagcttttgtgatcatgaataaagcaactatagacgtttacatgcagggtttcttttttgttttttttttgttttttgttttttgtggttttttttgagatggagtctcgctctatcgcccaggctggagggcagtggcgtgatctcggctcactgcaagttctgcctcccaggttcacgccattctcctgcctcagcctgccgagtagctgggaccacaggcacccaccaccacgcccggctaatttttttttgtatttttggtagagacggagtttcaccatgttagccaggatggtctcgatctcctgacctcatgatccagccgtctcggcctctcaaagtgctgggattacaggtgtgagccaccgcgcctggccgcatgcaggtttttgtgtgagtataacttttcatttcttttgggtaatactcrggagtaggatagatgggcagtgatatggtatggatatttgcctcctccaaatctcatactgaatgtgatccccaatgctggaggtagggcctagtg

SEQ ID NO: 826056 - DNA, 529 bp, Homo sapiens
gtcacgttgctggaagcctgcggagtgctgcctgcgtgcactgggcgcaggtgcccttggcgtcaggagccggccttgtctctgccaccgggaccttgcgtggttgccatttccagccctcacctgcttcctactcgtctgtcaagacccagctgttacagctgctgtgacactgttctagaagcttccttcctcgtgtagaactaggcatctgctgtagtcatctgccggtggcacctccgtcttgcagtcgctctcgtctgactcgtattacactgttggtgacagcaggcagtgcgcacccgactcagcttatagtcaactttcttcagacctcaggctgcgctggtggcccaagggaggctgtttgtgggaagcagggccagcttacactcgctcttagacctgtgctggggaaggcaggtggcacctgggcttgctaccagcccttccttggagcaggaggcccccrtcctttgtggcagcctagtgtcaatgtgcgacgggtcacacagcttcccaggcagga

SEQ ID NO: 826057 - DNA, 529 bp, Homo sapiens
gtcacgttgctggaagcctgcggagtgctgcctgcgtgcactgggcgcaggtgcccttggcgtcaggagccggccttgtctctgccaccgggaccttgcgtggttgccatttccagccctcacctgcttcctactcgtctgtcaagacccagctgttacagctgctgtgacactgttctagaagcttccttcctcgtgtagaactaggcatctgctgtagtcatctgccggtggcacctccgtcttgcagtcgctctcgtctgactcgtattacactgttggtgacagcaggcagtgcgcacccgactcagcttatagtcaactttcttcagacctcaggctgcgctggtggcccaagggaggctgtttgtgggaagcagggccagcttacactcgctcttagacctgtgctggggaaggcaggtggcacctgggcttgctaccagcccttccttggagcaggaggcccccgtcctttgtggcagcctagtgtcaatgtgygacgggtcacacagcttcccaggcagga

SEQ ID NO: 826058 - DNA, 561 bp, Homo sapiens
tgcaggggcttacggccacggtggcgccaggtctgcaggggcttacggccacggtggcgccaggtctgcaggggcttacggccacggtggygccaggtctgcaggggcttacggccacggtggcgccaggtcgtcaggggcttacggccacggtggcgccaggtctgcaggggcttacggtcacggtggcgccaggtctgcagcccggaaacctctagttgtccttacaggtggaggatccctcctcccccaaatccaaagctttttgagtgcccacatggtgcttaaaggaaatactcattagggtattttggattttttggattggggatgttcagctggtaagtttaacgcaaatactccaaactcagaaaaaaattcaatatccaaaacgtccctggtcccacgcacttcaggtaaggggtgctcaccctgtccggcctcttcacagcaaggttgccaaggcctggtctagagggtggtggacttcacagccatggagaagggtgctgctttaacttggaacgttatttaatgtttaatgctaaattgcggtaactt

SEQ ID NO: 826059 - DNA, 573 bp, Homo sapiens
cacagagtgactggtgattctcacagcatctcgttatcacagcgcgaaacaactttaggcagcatcggtggagctggggttttctcagccgggtcctgcttggcccctgtgtcctggrccccttggcccgtgtgcttctcctcttgggtcccaggccgccccctgatagaaggttccacaacagtccggatgttagggatgggcgatctgcgcagcaccgtccttcggagactgttctttaggaggactgtcctggaaaaccacatcccatgtcctcctgtaaggtgccctcatgggtggcgcctgtgtggggtgctcacctgcagctggtcagggcacaggccgtccccttccctcaggtcttcatgttcccaccagagcctatcctccctgcccgcctggcaccgctgtcctctggagagagccaccattctgtttgcatccagaaggcagcagaggttcttgaggaggaaaacagctcctgtgtatcttcaacagtagcagaaaaatgcagatagttctattcaggacagactcgtctcagtaactcaggtcatcacctttagacgccag

SEQ ID NO: 826060 - DNA, 487 bp, Homo sapiens
tcgagttctcacaactcttgagaaaagtgctgtgggtgggttgcaacagcccacacccccttcaacagtaaagccctctggaacagcgcccacgttgcagaatgcctgcagccagcagccgccctgccggcctggccgagcccctggccccaaacggaagcatctgcctggtcatcacccaacgcacaccgcccacgagccccccaggggcgcgcaaggcagtgtggccatcggaagactccatcatggagtgcacgttgtcaggtccctgcacagactccaaagcccggggcctcagcctccgccgtggtttaaaagcctttgtcagccatccttgggccaatcacagtcctctgccactgaaaamgtgtggtttgatggagaagaagtgatttccaaagggaggtgctggtcctatgagaagggcggtttagggcaagaaaaataactgacgtcactcccccgcacacaggcccagactgggagg

SEQ ID NO: 826061 - DNA, 551 bp, Homo sapiens
tcagagcaggggccgccacgcgggcgcccggtccaacccgcggcctcccgggtccctcctagcggggccgcagacgcccgcgagccgcgtccccggagcgcagaagatccccgcgcacagcgcaggccccgccggcccggtggacccgcttgaggacgcggagggggcgcgtttcctctgcggcgcccgcacggcctctgcccgcctgtcccgcgctcccgcccggcaggcccagctcggacgaggctcagctgccgcccccgttgcctttgtgggtttttctgcggaagccccttttcctcgggtggatgggaccctgcgcgtggaaccccgcacagcccccgctccgccgcgggccgcaggacccattccttctccacggtggcgctggggaggggctgcttccacccaggagattcgcgagggagagaraacatgcggctcacatccggacggcagccccgccccgcttagaaacaatatggccagtttgctaatgaaaggtgaaattaatccatttcttcggaacactcggggtcgcacccagggcg

SEQ ID NO: 826062 - DNA, 608 bp, Homo sapiens
acctgaggatcaggaggtccccacgtgagcccacgccaccagggccttggatcccaagaacactgctgtgcagactcacagaggctgckcaagtgggcagaaactcgagcaggcactgagacacaggagtatttgcatactctggctctgggaactctagtaaggcaagagatccatccactccagtgggaagggggctgaagccaggaagccaagcagcctcactcccatggagccccacaaggtaaaactcactggcttggaatcccaactggccagcacagcaggctggagattgcctaagaagacttagttcctgggggagagagacagtcgcaatcactgcggctccagttggcctttttcccctactgctggtgccagcgagactggccagtatggaccaggagcaattccccacagcatagcacagtatctgaagcaggtagtggccagaatatttctttaggtgggaccccaatccactctttctcactgggcggggcctccctacaggaatttcagcatccccagccaggggtttatggacagaactctgatatccctgagaggagcacctaggaggagggatggctatggtatcgtgg

SEQ ID NO: 826063 - DNA, 565 bp, Homo sapiens
cttaatgttgttaaaacaaccatactacccaaagctatctaaagattctatgcaatctctatyaaaatcttaatgacattcttcacagaaatagaaaaaaaaaaacccaaagtttatatggagccacaataaaacaccagaaagccaaaccactcgagagaaaaaataatgaaactggaggcatcacacttcctgattagcaatatatattacacggctatgttaattaaaacagtataggatacacaattgggagagaatagtctctttaataaatgttgttgggaaaactggatatacacacgcaaaagaatgaaattggacccttaacttacaccacacacaaaaaaatcaactaaaaatgaattaaagacttaagtgtaaaacctcaaattagaaatctacaagaagaaaacagtgaaaaagcatcatgacattaatcttagcaatgattttatgcacatgaaaccaaaagcgtaggcaaaaaaagcaaaataaacaattgggatatcattaaactaaaagcttctgcattgcagaggaaattatcaacagattgaaaagg

SEQ ID NO: 826064 - DNA, 622 bp, Homo sapiens
cattttttttagactcgtcagttctatttttagcaatttcaagtgggaaatatttagaattatagcacagctcctattaaagagaggtataaaagtatgaaaattatccagaatttaaaaaaaaaaagggttgtgacatagtacattttatatcatcaagccactactattagaagaatatggtattggaacaggaagagacaaaatggaaaaacaaagtagtactcagaaatagatccagccaaagggaatgtactaaatatgacattttaattcattcattaaaaaactgaatatataatgattatcttttcataaagttagactttcctaacttaaactaaaaaaattctagatagattacagattcaactatacaaaaatgaaaccaaataagtgatgaatctatagcagtttgagttatggggcattcttaacccaaacactaattccagatgactttaaggagaaaaatgggcctggggcagttgctcacacctgtaatgccagcactttgggaggtcaaggctggcagatcacttgaggccaggagttcaagaccagcctggccaaagtggcaaaaccacatctytactaaaaatacaaaaattagccaggcgtg

SEQ ID NO: 826065 - DNA, 657 bp, Homo sapiens
ggttaggaccttggttttctattgwgttccatgggttgatgtctctgtttttatgcaggcaacatgatgttttgattacaatgactttataatatgttttgaaatcaggagtgtgatactaccagctttattctttttttttttttttttttttttttttgacagagttttacttgtcacccaggctggagtgcaattgcatgatcttggttcactacaacctctgcctcctgggttgaagcaattctcctgcctcagcctcctgagtagctgggataacaggcacctgccacctggcccagctgatttttgtatttttagtagagacagggttttactatgttggctaggttagtctcaaattcctgacctcaggtgattcacccaccttggcctcccaaagtgctgagattacaggcatgagccactgtacctggcccagctttgttctttttgcttaagattggtttggctatatgggtttttttgtggttccatgcaaatttaaggacatttctccatttctatgaaaaatcacatggaaactttgatgagaatttctttgcatctgtagattgcttttggtggtatgactattttcacaaaattaattcttctagttcatgaacacaggagatctcttcatttatctttgtc

SEQ ID NO: 826066 - DNA, 561 bp, Homo sapiens
taaatccaggctagatttagtttccctgaaagccacccacaacttcaaacgctgttttytaaatgcatgtgctcagagttttgttaatccaaatattaggcatgattttaaaaattgtagagaaactagctagtcaaatggaggatcttggaactgtaggatttacaactcaaatggatcttggaggtaatctagctcaaactccaaactgtgcagatgaaaatatgtaaggcccagagcagtcttataattgcctggtaactttcctttcatggcacagaagaacttactacaccttttggtgccatcacaggactttatgaatgaatggcttttgcacaaaagcgaggacaatgtcagaatcagttcacttcataggcttcatcacttggtaagaagagaaagccaacaagttctggggagtcaagtgctccttcactgaataagtgataagtattaataaattgcttttgcaaggcatgaccccagagctgacaataagcttttcctataggctccatgcagaaggctggagtatgtccaataaccaaaccaaaccaa

SEQ ID NO: 826067 - DNA, 511 bp, Homo sapiens
tgtcatgtcaaccatttcttagtgcacagttaagtggcattaagtaccttcacaytgttgttcaaccattaccaacatccatccatagaacttttttcatcttgcaaaattgaagctatacccactaaactacatcccattctccctctctaaccccagctacaattctgctttctgtgtctatgaatttgactacgctaggcacctcatataagccaaatcatgcagtatatgtccttttgtgacctaattatttcacttagcatagtgttctcagggttcatccctgttgtagcatgagttagaattcccttccttttaaaggctgaatcatattccattctatacatatgccacattttgtttatccatttatctttttctttttttgagatggagtctcactctgtcatctaggttggagtgcaatggtgcaatctcggttcactgcaacctccacctcctgggttcaagcgattttcctgcctcaccctcccgagtagctgggact

SEQ ID NO: 826068 - DNA, 511 bp, Homo sapiens
tgtcatgtcaaccatttcttagtgcacagttaagtggcattaagtaccttcacattgttgttcaaccattaccamcatccatccatagaacttttttcatcttgcaaaattgaagctatacccactaaactacatcccattctccctctctaaccccagctacaattctgctttctgtgtctatgaatttgactacgctaggcacctcatataagccaaatcatgcagtatatgtccttttgtgacctaattatttcacttagcatagtgttctcagggttcatccctgttgtagcatgagttagaattcccttccttttaaaggctgaatcatattccattctatacatatgccacattttgtttatccatttatctttttctttttttgagatggagtctcactctgtcatctaggttggagtgcaatggtgcaatctcggttcactgcaacctccacctcctgggttcaagcgattttcctgcctcaccctcccgagtagctgggact

SEQ ID NO: 826069 - DNA, 511 bp, Homo sapiens
tgtcatgtcaaccatttcttagtgcacagttaagtggcattaagtaccttcacattgttgttcaaccattaccaacatccatccatagaacttttttcatcttgcaaaattgaagctayacccactaaactacatcccattctccctctctaaccccagctacaattctgctttctgtgtctatgaatttgactacgctaggcacctcatataagccaaatcatgcagtatatgtccttttgtgacctaattatttcacttagcatagtgttctcagggttcatccctgttgtagcatgagttagaattcccttccttttaaaggctgaatcatattccattctatacatatgccacattttgtttatccatttatctttttctttttttgagatggagtctcactctgtcatctaggttggagtgcaatggtgcaatctcggttcactgcaacctccacctcctgggttcaagcgattttcctgcctcaccctcccgagtagctgggact

SEQ ID NO: 826070 - DNA, 392 bp, Homo sapiens
tacacctgtgacccatacacctgacccatacacatgcacatccgtacacctgtgttcatacacgtgcacacagtcaaacagcttggcttgggagaaatttaggcarggctgcccgagaccgggctcatttcacggacgctgctgccacctaccggctatatcttgcattagcatccttgcttagttcctgctctattccattctgtcctccattgctcatccctggaagctgtgcattggaattggttcctgaaagagggacacgaacaagggaggtgagtggggtggggaattatcattgactaactgtccgttatatgtcaggtactgctgtcccttacagctgttatatttgttttctcaatccatgtgccttatgcagtgcttggcca

SEQ ID NO: 826071 - DNA, 490 bp, Homo sapiens
aaagaaccggaagggaatatttactgagagctattttgttccaagttgtggagctataatcagagattatatgatctgtggtaaatggtaaaaggaaggcctccctacctctaacccaacacccctgtactgtttgtgtttctcttctgtgaatggtaattagatattccgtgggtaactgtggtctcccctaagggttatatagacctggtgttgatcacatgaaagaagtggggcctgtatcagatataaccacaggctggtaagataaagaattttttttttccctctggaccttctcctctgtatttagagaaatctggatatgctggaggcactcccaagtagcagaaataaagatggcttctgccactagaaaacatatgtgttgtgggtcaagtaagggaggtatcccaayagaataccacaaattacagaggtgtgtgttttatctcgtgagccagatattacagaagcataatagtaactc

SEQ ID NO: 826072 - DNA, 640 bp, Homo sapiens
ctgaataggttcaaaggttacccaaagagttttcaacctcaggtatccaccattctgcttctctggagccacactcagaccagaggtgtgggagtgaacattcctcagtctrtactattaaatggaatcaaatatttagatgcagatctaagtatatatacaaaatattttttaggaatattatctgttattatacatatacttaacaagaaaaggtaaatacaaattatgcaaattataaattacccatttttattaatttaagatatgtaaaatgtcactagtattttttatgttgtgtgtaatgtgtgtataaataaaaatgaataactgttttcaaaccatcattcaagatttcaatcccttagcccaatttttctccttaaaaggctcaaacctagtcaactgagaattcttctatgaaggagtgtttcagtaataccttatatgtacatatatatgatgctgatggtgtaatattcatggtaagcataaaattccataataatagacttcaaaagtatttgaataatttttatattgatagacatggaaatggaatagagttaatgctcagccctttattagggaattagaactttgctttaaaaatgttatgaatccaggtagaaaaaaggca

SEQ ID NO: 826073 - DNA, 670 bp, Homo sapiens
attaactgggcgtggtggcaagtgcctgtagtccaagctactcaggaagctgaggcagaagaatcacttgaacccgggaggcagaggttgcagtgagctgagatcgtgccactgyactccagcctgggtgacagaaggagactccatctcaaaaaaaaaaaaaaagaaaaataggatctaagaatgaggtcatgttctaaggaataaaggtgacctctggttgctgaaaaaaatcaagtaatacattctgccacatagccctcagaaagactgcagccctgcccaaaacttgatgttagccctgtgagtttcatttaaggcttctgaactatagaactgtaggattaacggtcactttattgtaagatatgaagtttgtggtaattggttacagcagcaagaggaagtttatattgtaagtgtatcatcaaaatgagaaccataatttacaactgcttttaatactgcacttggatgtttgaaatcacgtacatggaaatgatctctatgtgcatgagggaggatagcaaattgatgccaaaataatgcaaatgcaaatcttgcactcatttctatgtaggtttcatttaatctttgaaattaaaatgaaattaaaagattgtgatcttttgatgaaattgggctaaaatgaacaataacaaaataagaa

SEQ ID NO: 826074 - DNA, 575 bp, Homo sapiens
gagtcaacgaatggaatcaaatggaatcctcgaatggaataaaatggaatcatcatcaaatggaactgaatggaatcatcgaatgsactctaatggaatcatcattgaatggaatcgaatggaaccatccaataaactcgaatggaattatcattgaatggaatcgaatggaaatatcgaatggaaatgaatggaatcatcatcgaatgaaatcaaaaggaatcatcgaatggactcaaatgtaatcatcattgagtggaatcaaatgcaatcattgaatggactcgtatgaaatcatcatcaaatggaatagaatggaatcctcaaatggaattgaatggaattctcgaatggcatcgaatggaatcatcatccaatggaatcattgaatggaaacgaaaggaatcatcatccaatgaaatctaatggaatctttgaatggcatcgtaaggaatcatcatcaaatggaaccaaatggaatcatctagtggactcgtatggaatcatcattgaatggaatccagtggaatcatcgaatggacatgaatgggatcatcataaaatggaatcgagtg

SEQ ID NO: 826075 - DNA, 681 bp, Homo sapiens
ggaatcgaatggaatattcatcgaagagaaatgattgggatcatcaaatgaaatcgaataraatcatcatcaaaagaatcgaagtaaaacaaagaatggaatacaaaggaaccatcgaatggaatagaatggaatcaccatcaaaaggaatcaaagtaaacaaggaatggaatacaaaggaatcatcgaatggaatcgaatggaatcatcattgaatggactcgaatggagtcataatcgaatggaatcaaatggaatcatttaatggactcaaatggaatcatcgaatggactcgaatggaataattgtatgaaatcggatttaattatcatcgaatgaaatcaaatggaatcatcgaatggagtcgaatggaatcgtcatcgaatggaatcctcatcgaatggagtcaaataaaatcatggaatgcactcaaatttagtcatcaaaatgactcaaatggaatcaacgttgagtgaaatcgaacggaaacatcgaatggacttgaatggaatcatcgaatggaatcgaatggcatcatcatcaaatggaattgaatggaatcatcaaatagacacgaatggaatcatcgttgaatcattgaatggcatcgaatggaaacatcatcaaatggaatctaatggaataatcgaatggactcgaatggaatcatcaaaaggact

SEQ ID NO: 826076 - DNA, 681 bp, Homo sapiens
ggaatcgaatggaatattcatcgaagagaaatgattgggatcatcaaatgaaatcgaatagaatcatcatcaaaagaatcgaagtaaaacaaagaatggaatacaaaggaaccawcgaatggaatagaatggaatcaccatcaaaaggaatcaaagtaaacaaggaatggaatacaaaggaatcatcgaatggaatcgaatggaatcatcattgaatggactcgaatggagtcataatcgaatggaatcaaatggaatcatttaatggactcaaatggaatcatcgaatggactcgaatggaataattgtatgaaatcggatttaattatcatcgaatgaaatcaaatggaatcatcgaatggagtcgaatggaatcgtcatcgaatggaatcctcatcgaatggagtcaaataaaatcatggaatgcactcaaatttagtcatcaaaatgactcaaatggaatcaacgttgagtgaaatcgaacggaaacatcgaatggacttgaatggaatcatcgaatggaatcgaatggcatcatcatcaaatggaattgaatggaatcatcaaatagacacgaatggaatcatcgttgaatcattgaatggcatcgaatggaaacatcatcaaatggaatctaatggaataatcgaatggactcgaatggaatcatcaaaaggact

SEQ ID NO: 826077 - DNA, 218 bp, Homo sapiens
atcatcaaatggaaaagaattgaataatcatcgaatggaatcgaatagaacaattgaatgaaatcgaacggaatcatcttcgaatggaattgaatggaatcatcaatgaatggaatcgaatggaaacatagaatggaatccaaagtaatcgtcatcaaattsaacccaatgctatcattaaatggactcgaatggaatcatcgaatggactcgaatgg

SEQ ID NO: 826078 - DNA, 541 bp, Homo sapiens
atcattgaatggaatagatgggaaacaacgaatagcattgcatggaatcatcctcgaatggagtcgaatggaatcatcgaatggacacaaatggcattgttatggaatgtaatcgaatgtaatcttcgaatggactcgaatcaaatcatcattgaatgcaatcgaatggaatcatcatcaaatggaatcgaatggaatcatcattgaatgaaatcatatggaatcatcaaatggaatagaattgagtcttcatctaatggaatcgaatagaatcatagactgaaatggaatgggatcatcatcgaatgcaattgaataaaatcatcattgaaaggactcgaatggaatcatcgaacagaatcaaacggaatcatcatcaaataaaatcaaatggaatcatggaatggactcgaatggaatcatcatcgaatggaattgaatggaataatggaatgcactcgaatggaatcatcgaayggacttgaatgaaatcaacatcgagtggaattgaaaggaatcattgaatggacttgaatggaat

SEQ ID NO: 826079 - DNA, 595 bp, Homo sapiens
gtccttcatgcagtcggctggtcctgtgtggggctggttcctcctggggctgcctgcccacctccagcctccagcaggtgggagtcctcctgggtccaggctgtcctggtgggacaggagggcagaggggaagcccgggaggaagaggctgcaggagtggggtccctgatactgccccatcgccaggaaggcctttgtctttcatgagctccatgcaggaagaaggcatgcagctgagaggccaggcctggcgtgtcctcagggactttgtgtggcagccacgggtgcctgctcacggacgcacctggctggccccacccaggcatagtgaatcagaccccaggcaatcccagtgacctctggagcctgagagccctgttgtagagaatgcaggacctggccttgctccgcctgcacacatgtgtgctgtgcacatgtgaaggagagccacggcttctgtacaatgtatgtgtctgtgtaacacgtgtgcccagcatgtgaaaggtctgcgtgcttcctgggctgtgcatgtggagcactggstatgacaggaacacacaacggacatggagtttgcaagtgtgtgtgtgctgtg

SEQ ID NO: 826080 - DNA, 546 bp, Homo sapiens
ccttgtctctacacagagcctgtacagcaggaccatggaggcgctggacttcatgctgcaaagcctcatcatgcagaaccccaccgccgacgagctgcatttcctgctgtcggtgaggctgcagggaggccagtcggctggggccgaggggtcctcagcctatggccagactccaaaggagggcatctcagaggagacaaggcgggacctgggggcttcgagtggtccaggaaccaggaggggtgagggccacccgcacttagggatcacagtggtttggggcactggggagggagagacagcaggtggcctggtagaaagagggctgataggccaggcacagtggcccacgcctgtaatctcaacactttgggaggccaaggcgggtggaccacttgaggtcaggagttcgagaccagcctggctaacatggtaaaaccccatctctactaaaaatayaaaaaaaaaaaaaaaaattagtcaggcatggtggtgggcacctataatcccagctactcaggaggctgaggcaagagaatcgcttga

SEQ ID NO: 826081 - DNA, 607 bp, Homo sapiens
tcataatagaacttttgcagggaacagtttctttccaatgacaatgcttttaacagcctccaaacattcttcctctgygtgcactccacctccaatcaaaaactgaaattccaaatcaagtctgaaatactttttagcaaacagctcaattcttaatctcctgaaaatcaaggaaccagatctttagtgaaaatacattcagagcagcagcctctaaacaaggttatctttactttctttcctcaaatcacactgctgtgcctattcacataattaaggacaaagtgatgctaggtgaggatacattcaaatgaagtcatgcctgtaatctgtaggaaacgggtactaggtatagcctgataaaatccctaggagagccactttggtgctcctggtttgtggttagatacagcagagcaaccctggcagtttactctttttacatgcagcattttattggtgcatttgtttaattgaacacatcagtccagcattgtctgaagcgtacatcatatctttgggtgaggcaagttcaggagtcttcccctggaaaaaaacaatgtacatgtgtgtgtattttaatcttgaaaaatcactgtcaaataaa

SEQ ID NO: 826082 - DNA, 602 bp, Homo sapiens; identical to SEQ ID NO: 815804

SEQ ID NO: 826083 - DNA, 506 bp, Homo sapiens
catatatatatataaaatatgtatagtatatatattatatatattgcattatatatatagcattatatatatatatattatatatagcattatatataattctatattatatatagcattatatatratgctatattgtatatagcattatatataatgtattctatattgtatatagcattatatataatgtattctatattgtatatagcattatatataatgtattctatattgtatatagcattatatataatgtattctatattgtatatagcattatatataatgtattctatattgtatatagcattatatataatgtattctatattgtatatagcattatatataatgtattctatattgtatatagcattatatataatgtattctatattgtatatagcattatatataatgtattctatattggatatagcattatatataatgtattctatattatatatagcattatatataatgtattctatattatatat

SEQ ID NO: 826084 - DNA, 542 bp, Homo sapiens
tagacctcactgtctttcaaatcctttttgacaccaatgttaagtggttctaggacaaatcacagcatctacwcagaatgtattattttagagatttaaatggacacataagccgtaaagggagttcttcatgttgcttttcactagtcacatttttgactagcactggggttaatatctcagttttaaccttttttgcactccaagcagaaaatgccttagattggaggaatgggtattatgaggggggctgtcactttccaccatcagcagcagatctggggaaggagtcacgcattatttgcagaataatggacctttctgattcacacaccctctagtcagctggtctgctcaccagggaaagcagatcaatgcagatttgggaaatcaaggaaaaacaagatggtgacactggaaagaaaatgaataaatgacaagtaaaaagagaaaagaaaggatattccaatattggcaccatgcttctccgcatatgtaatgccttcagtgcaccctccaagaaaggtatggatatctctcct

SEQ ID NO: 826085 - DNA, 554 bp, Homo sapiens
tctcctttcttcccttggagccctcacctgctgtagtgggcacattcacgatccttcctgggtgcgtgcttctcgaatgcacagcggtcagctttgaccttccgccaaagcctaaygagtccgtgtctgcattcctcccagccatttcctcttggtgatcccactgccaacctaagtatagttattcaataggcatttattgagttcttcttctttgtcagggactttattctgctgtggagacacagattaatagagcaaagtctctaccctggtggagctcacaaaccagtgagggatgccgacttgaaaagacacaaggcactggcttccgtgctaacacggacatccattcggccaagcagccatgcccggcaggcctgggaccgcatgtcattgaaaccccgaaggcccagcagcccagcaggcaggctggaacagaaaccgtgctccaccccactttggtgcacagaatcgttaagtattgggggagcagaaaccttcaggacatttaaaggaattaaatgaattctacgcatatactaataatgtaa

SEQ ID NO: 826086 - DNA, 554 bp, Homo sapiens
tctcctttcttcccttggagccctcacctgctgtagtgggcacattcacgatccttcctgggtgcgtgcttctcgaatgcacagcggtcagctttgaccttccgccaaagcctaatsagtccgtgtctgcattcctcccagccatttcctcttggtgatcccactgccaacctaagtatagttattcaataggcatttattgagttcttcttctttgtcagggactttattctgctgtggagacacagattaatagagcaaagtctctaccctggtggagctcacaaaccagtgagggatgccgacttgaaaagacacaaggcactggcttccgtgctaacacggacatccattcggccaagcagccatgcccggcaggcctgggaccgcatgtcattgaaaccccgaaggcccagcagcccagcaggcaggctggaacagaaaccgtgctccaccccactttggtgcacagaatcgttaagtattgggggagcagaaaccttcaggacatttaaaggaattaaatgaattctacgcatatactaataatgtaa

SEQ ID NO: 826087 - DNA, 564 bp, Homo sapiens
tagactgggtgacttataggcaacagcagtgtatttctcacagtcctggaggctgcgaagtccaagttcaaggccctgtgagattgggtgtcaggtgagggctcaatttatgattcacaggtggtgtcttctccctgtatcctcacatgctggaagggcaaacaagccccctcacgcttcttttataagggcactaattccatttatgagaactctaccctcaggcctaatcccctcccaaaggccccgcctcccaataccaccacatgggggtgaggcttcaacgtacgaatttggggagacacaaacattcagaccataacaaaatgacatttctaaggttatatatgtgtgtacttttccttcatttctacttgtcttgtgttctcaaattctctataataagcctgagcttctttgaaaaacaaacartacctacatactaggataatgaaacttaacaggagtcatcctttaagtcgctagtgcaggagccaagggcagacgtcttctctgccttctgaaggttgcctgaaaatcaactgacagaagggagattaaaag

SEQ ID NO: 826088 - DNA, 544 bp, Homo sapiens
gacaaagcttgtcaaatttgctcgttagtgacaccagcaaccttatatctctctattagcctaaattattttcatgtacttcgggattaaaatttgaacagggccagaggcagstctagcctccctccctgggccaaccctgtatgctttacactgggtgttccagccattgacaattgcgcccctagaccctgctctcttccttctaaaactcagcttacaaatcactctgaggctctctctcactgcccaggtgggcatgaggtctctgtgttcccagagccttgactgtgtgtcagggtgccggaggcctcaccactcccatcgcctgctcactaatctcacctgtttcaagcccctcaagggcaggggctctttcctatttggccctagagctggagcattgagtgtgcccagcgtgatcagaactgtctgctgaatgcgtacgtgaagagggtaggggagagccaaatgagacaggatcagcagaggctgtaagtgaaaactgcagaaggaggagcatctgattctgatgagcaaacag

SEQ ID NO: 826089 - DNA, 490 bp, Homo sapiens
caggcccaccggctgttgcttggcttgtctgcactccacactgtcaggaggcgacattcatagacagtgatgactaaccatcctaacaaatggtacagagagtaagtgctaraagcgttcaaaaatagcccagaaagccctgggcacacaccaaaagggcagaatgacactctgagtatttcaaagagggagacacaaggaatgccagtgctgagctggagtgaccctttcccacaccacaaggcttgcaggagctgctgaggccagtgtggagtgcagggccacagaagggccctctgcctgcctctgtgtgtgtgtgtgtgtgtgtatgtgtgtgtgtgtaacaagcagcctttagcaggaagatgctgcccagatagaggccttcctggattcaaatacaatgaagggcctgaccctgcttgtgtctaagctcatgaaggaaatcctgctgctgtgagattggacagctatgtgatggtaaaagcaa

SEQ ID NO: 826090 - DNA, 580 bp, Homo sapiens
cttgatttagaaaagtatatataaatgaacagtacaaagacttattataaaatgaacaaacccatgcaaccatcacctagggcaaaaattaraaaattaccacaagcaacccagaagcaaccttcttgctacctgccaatcattactctcactacctcagaatgtacccaccaatcttgacttctaccaccacttcctatttttgaaatttatataaatgaaaacatatttttaaaaatttctggcttctttcactcaatgccatacttataaaatgcaatcatgctgttgcatgtgcaataatttagccattttatcacggtatagtaattcattttataaatataatcaagatatgtctatttctattttaccattagtagacatttactattgaaagtcttgaaaattatgagcaacttaggatctatgaattctatcggtagctgtgaaattatcttggcattaaactattacaaataacactgctttgaatattctttttttttttgaatttcttatatgtctcttttggttgatataagtgtttgactttgtcagacacatacctatggagtag

SEQ ID NO: 826091 - DNA, 580 bp, Homo sapiens
cttgatttagaaaagtatatataaatgaacagtacaaagacttattataaaatgaacaaacccatgcaaccatcacctagggcaaaaattagaaaattaccacaagcaacccagaagcaaccttcttgctacctgccaatcattactctcactacctcagaatgtacccaccaatcttgacttctaccaccacttcctatttttgaaatttatataaatgaaaacatatttttaaaaatttctggcttctttcactcaatgccatacttataaaatgcaatcatgctgttgcatgtgcaataatttagccattttatcacggtatagtaattcattttataaatataatcaagatatgtctatttctattttaccattagtagacatttactattgaaagtcttgaaaattatgagcaacttaggatctatgaattctatcggtagctgtgaaattatcttggcattaaactattacaaataacactgctttgaatattctttttttttttgaatttcttatatgtctcttttggttgatrtaagtgtttgactttgtcagacacatacctatggagtag

SEQ ID NO: 826092 - DNA, 660 bp, Homo sapiens
tatctttcccaccaggtgtgtgtgagagacttttctcaatacactcatggcagcactaaatattatcttttaaaaaaggacaacttagaaaacatcgtattgtctgttttaactggtatctctatttattaataacttgaatattttatttcatatcttattaacaatttatatgccatcttctgtgaattttgtattcatgtctattttcagtctaagttttagtgtctcctttatgagtttgagtaagtttttaatatagaaaatattattaaatatcagtcagcatggatataaataatattctcagtttgaattgtcttacaattttctgcagaggctttgctcttcagagatcttcaaattttacataggtaagtttagaatttcctaatgaggaatttcatttttttcccagtttagaaagctcttatccattctgataattctgagatcagttaaacagttgccaatttacatttgttttctgcttttattttttaattaaatttattttcatggatggcattwtaaaattgcaacccaacttaatctgttcctcaaaagtataatttcctcagaacatttggataattcatctgcatgccttagtttgtaatgattcattcatgtatatatgtatatatattttatttatat

SEQ ID NO: 826093 - DNA, 660 bp, Homo sapiens
tatctttcccaccaggtgtgtgtgagagacttttctcaatacactcatggcagcactaaatattatcttttaaaaaaggacaacttagaaaacatcgtattgtctgttttaactggtatctctatttattaataacttgaatattttatttcatatcttattaacaatttatatgccatcttctgtgaattttgtattcatgtctattttcagtctaagttttagtgtctcctttatgagtttgagtaagtttttaatatagaaaatattattaaatatcagtcagcatggatataaataatattctcagtttgaattgtcttacaattttctgcagaggctttgctcttcagagatcttcaaattttacataggtaagtttagaatttcctaatgaggaatttcatttttttcccagtttagaaagctcttatccattctgataattctgagatcagttaaacagttgccaatttacatttgttttctgcttttattttttaattaaatttattttcatggatggcattttaaaattgcaacccaacttaatctgttcctcaaaagtataatttcctcagaacatttggataattcatctgcatgcmttagtttgtaatgattcattcatgtatatatgtatatatattttatttatat

SEQ ID NO: 826094 - DNA, 613 bp, Homo sapiens
ggtttcattgttgtgtgaacatcacaatgtatttacgtaaatctagacggtatagctgactacacacccaagctatatggtataatctattgtttctaggttactaacctgtacaacatgttactgtacttaatactgtaggcaattgtaacacaattgtaagtatttgtgtatctaatcatagaaaaggtacagtaggcaaggcacggtggctcatgcttgtaatccctgccctttgggaggccaagggtgggttgatcacttgaggtcaggaattcaagactagcctggccaacatggtgaaactctgtctctactaaaatataaaaattagccaggtgtggtgggcacctgtaatcccagctacttgggaggctgaggcaggagaatcatttgaacccaggaggcggaggttacaatgagtagagactgtgccactgcactccagcctgggcgacagagcaagactccgtctcaaaaaaaaaaaaaagaaaaagaaaagatatagtaaaaatatggtattacaatcttttggaccaccttatatatgtgactgaagyattgttatgcagagcatgactgtacaatagaatttaagtaaaaataaactttg

SEQ ID NO: 826095 - DNA, 479 bp, Homo sapiens
tgcaaagagcctatgagaaatgaaaattaagaaaaggagccatgggcattgggagactagaggctataatgatattggagcagtttcaatggttgagtggtggatgtagaccaagttgcagttggttgtaaagcaagagaatagaaaattttcttcacatatattacaaatgaataaattgaaggagaccaactgacatacaggagtaaataaggggacacagaatagatatatcctcttcaatgaaacgtggaatatgaaaatatgactttaaattataaaaaagtagcattatacatttacagaaaatcccccataaaacaaaacaaaatttttttatttctttgaatagcttttytaaaatgattcatttactgaaatacattatataggcatctctgctgaattatgtcagcagagaacagtaaactatcgatataacttaatttttattacttcttcatttgaataaatacctt

SEQ ID NO: 826096 - DNA, 476 bp, Homo sapiens
cgtgaacccgggaggcggagcttgcagtgagccaagatcgcgccactgcactccaacctgggtgaaagagagagattccatctcaaaaaaaaaaaaataaaataaaatagctcagatattcacaagccctctcatctgtctcttctagtttcgtatacactgttagtgttacataaaatctattgtgttataatgtgatcctgtgttcctaaaatttagttatccaaattcatgcagtaaaaacaattgtttcagtggaggaaaaagagattgggggcaagagagttgcaaactcaacaataaatttagttttcctgcaagactttcagtaataaaattggcttcttaatgagtttaagtacatagctrtaaatgaaacttatagttcttgataatgactcaagaaagagatcttgctttcatattattgcactaagattaacacattatttctgagttttataatgttttttatt

SEQ ID NO: 826097 - DNA, 513 bp, Homo sapiens
cccatcagactaacggtggacttctcagaaaaaaccttcaggtcagaaaagattgcgagtctatttttagcctccttaaagaaaaagaaaatgtcagtcaagaattttgtattctgccaaactaaggttcataaataaaggtgaagtaaaatctttcccaaacaaatgctaagggaattcatcaccactagaccagtcctacaagaaatgctcacaggagttctaaaatggaaagaaaaggacaatactcaccattataagaggacacataggtacagagttcacagatcctataaaacaattacataattgaaactctaaggcaaccagctaataacactatgacaggaacaaaacctcacatattaatattaaccttgaatctaagtggcctacatgctctacttaaaagatatagagcggcaaattgggyggggtggggggacagtgtgaggaacaagacccaaccaactgctactacaagagacccacctactagctaaaggcagctat

SEQ ID NO: 826098 - DNA, 523 bp, Homo sapiens
cttaaaagatatagagcggcaaattgggcggggtggggggacagtgtgaggaacaagacccaaccaactgctactacaagagacccacctactagctaaaggcagctatagactcaaagtaaagaagtggaaaaatatatattatgaaaatggaaaacaaaagcaagcaggagtagccatccttatataagatgaaacaaactttaagccaacaacaataaaaaaagacaaagagggtcattatataataacaaagggttaaatacacaaagaagatgtaactattctaaatatatgtgcacccaacaccggaacacccagattcataaaacaaatactactagacctaagaaaacagattgatagcaatacaataagtggggactttaacacctcactgacatcactaaatagatactgggatagaaactcaacaaagaaactctggatttaaactggactatagaaaaaacaaaygtaatagacatttatagaacattcattctatccaacaaccacagaa

SEQ ID NO: 826099 - DNA, 593 bp, Homo sapiens
gaacttgaattgcattacaattctgttgtcaaatcatcatgcatgtttttccccattctctttcacaatcacccatctcatactcctctaataaagaaaatgggccacgcgcggtggytcacgcctgtaatcccagcactttgggaggctgaggcgggcggatcacaaggtcagaagatcgagaccatcctggctaacatggtgaaacgccgtctctactaaaaaagtacaaaaaattagccgggtgtggtggcgggcgcctgtaatcccagctactcgggaggctgaggcaggagaatggcgtgaacccgggggacggagcttgcagtgagccgagatcccgccactgcactccagcctgggagacagagcaagactcagtctcaaaaaaaaaaaaaaggaaaatgtacctttcattcgtcctaaatattactatagtacatggctctggaatgttaatcaaacctcagggtgccaaacaacagtgaaattcaaaatgaaaatattcaattggtgagctgtcaaaaatcaaggcatctatatttgtttagggattcttctcattctctgcattatatatttttgtgtaaaga

SEQ ID NO: 826100 - DNA, 486 bp, Homo sapiens
atctttattatggcttccaatatcactcaaagcaaaacttcaaactcttaccttctccttcagtattttggtaacttgttgcttccatgcactactccccaccctcttagttcaattttctaatactcttcatgttcatttgtttttagtcacacagacatttgtgatttctttaaatgcccagtaagtctctgaggttgttgtagaatgctaaactttatacctagaattcatttttccatatgaatatagagattttatttctgttctttcagattttttaaaatattatctcatcagagaagtctttattgattgtctcaaatgaaatatcaaccctatttcacactcttttcacattgcttcatcttcttcactctaaaaattataaaattaggagctaaaggatttamtgtcagaaaatcagagcagaagtttgttaagctcattgaggtaagttgcaaggagggcctgaactgaggcacg

SEQ ID NO: 826101 - DNA, 499 bp, Homo sapiens
tgtgactgatgaccacatccggatgcacaaggtgctgcgggaatcaggcctgaagtacgtggctgtgatgccgccacacataggtaagcagggcagggacctggtggcaccaatgccatctgcctgttccctcctgccctctggggagatctgcaaggccttccctgaccaccctaaaattgcaaaccttcctatgatattgtgacatatatatttggcctttgtccctgtttcctggcatacaactcctaaaatccttggaatctccaaaatggtaaatgtctttttctatgctaatgagttcactgagagctggcagcccctaggcagcttcaggtctggtcaccagaaagactaaggctggattacagggttgggactttcacctctggggagtggtgagggattgaaggttgaggggattaccactggctaatggtttaatccattatgtctatggattctggggcttcagmctcctgagtagctgggattacag

SEQ ID NO: 826102 - DNA, 593 bp, Homo sapiens
gacaatttttgcatttgatgctctcactgggtaacgtagttttaagttcacattttatatttagccatctatccttttattttttatttttatttttatttttttttgagacggagtctcgctctgtcatccaggctggagtgcagtggcacaatctcagctcactgcaagctccgcctcctgggttcacgccattctcctgactcagcctcctgagtagctgggactacaggcgcccgccactaggtccggctaattttttttgtatttttagtagagatgggatttcaccgtgttggccaggatggtctcgatctcctgacttcgtgatccgcctgccttggcctccttgacctcccaaagtgctgggattacaggcgtgagccacagcgcccggcctgccatctatccttttagatgacatccttaaactctatactctctcctcaaaaacaatgggaaaagcgttataaatggaataggtccagtccaggttcactttggttggkgtcttcagggctaatattgtagctttgatttttacccttcaatatgttgtaacctacataaatgagtggtttcaaggatcattt

SEQ ID NO: 826103 - DNA, 607 bp, Homo sapiens
cacctttgcgaagtgtcccttgcaaggattacctgacccagaatcactacatcacaagtcccctgtcggaagaagaggctgcattccctttggcctatgtcatggtcatccataaggactttgacacctttgaaaggctctttagggctatctatatgccccaaaatgtctactgtgttcacgtggatgagaaagccccagctgagtataaggaatctgtgaggcagttactgagttgcttccaaaatgctttcattgcttcaaagacagagtctgtggtttatgcaggcatttccagactccaggctgacctgaactgtctgaaagaccttgtcgcctctgaggttccctggaagtacgtcatcaacacctgtggacaagacttccccctgaaaaccaaccgggagatagttcagcatctgaaaggatttaaagggaaaaatatcaccccaggggtgctgcctcctgaccatgcaattaagcgaactaaatatgtccaccaagagcrtacagataaaggtggcttttttgtgaaaaatactaatattttgaaaacttcacctccacatcagctgaccatctactttggcactgcctatgtggcgct

SEQ ID NO: 826104 - DNA, 579 bp, Homo sapiens
tgggaaggagaatgagaatcctttaagttctttgaaatgacctcaaatctgaggttgtcaggcttttaaagagagccagtaggtagtcactccacatattgtagataatactgkgtcaacagctcaagttatctgaagctctctttgtgaaatgggacccaacttttgctctctgggaacactatcacatttctctctggcatgcaaacttaggtgtgtttgatgaagggagcctgcctctccactcctctgggtatttcttgcaaggtggagatgagagactgagaaaagaaataagacacagagacaaagtacagaggaagaaaagtgggccctgggggaccggcgcttagtaagtgaggaccaacaccggcgctcacttactctgagtctctgagttctttcagtatttattgatcactatttttcctatcttggcgaggggaatgtggtggggctatagggtgaaggtggggagagggtcagcagaaaaacatgtgagtaaaggaatctgtgtcataaacaagtttaaggaaaagtgctgggcctaaatgtacacgtaggctagatttatattta

SEQ ID NO: 826105 - DNA, 579 bp, Homo sapiens
tgggaaggagaatgagaatcctttaagttctttgaaatgacctcaaatctgaggttgtcaggcttttaaagagagccagtaggtagtcactccacatattgtagataatactgtgtcaacagctcaagttatctgaagctctctttgtgaaatgggacccaacttttgctctctgggaacactatcacatttctctctggcatgcaaacttaggtgtgtttgatgaagggagcctgcctctccactcctctgggtatttcttgcaaggtggagatgagagactgagaaaagaaataagacacagagacaaagtacagaggaagaaaagtgggccctgggggaccggcgcttagtaagtgaggaccaacaccggcgctcacttactctgagtctctgagttctttcagtatttattgatcactatttttcctatcttggcgaggggaatgtggtggggctatagggtgaaggtggggagagggtcagcagaaaaacatgtgagtaaaggaatctgtgtcataaayaagtttaaggaaaagtgctgggcctaaatgtacacgtaggctagatttatattta

SEQ ID NO: 826106 - DNA, 592 bp, Homo sapiens
agtacagaaaagcagaacctatttcatatgggcaagtgttcctattactcatccacaactgctmcttgtgtcaaattaacactccagatcatgaattgcaattattttagactttcactaactcctcattatactgctactatgaccttcactctagttaataaaacttatctaccattttcgacatctgtctcttcttttccttgaatttacaatttccttatttggtatatcgtccacattcttcttctccaattcacacctttagtcaaaacctacaacttttcattggcttatttttttatagaatatccagaatacttctagttatgcaaactagtcagttccttccctccagctcactgcctagtctaagcatgacagaacaaaaggacaagagaaggaagacgtaacacgaaatagaaaggaaaacttgcttcgaatctttcttggagaagatgaactataggcatctggacacaaaagaaacaagcaacttagtgtaaataagaagaatatacaaaaaaatggaagtgggacaaaggaagatatagttcaaattggtgaaaaatgagaaaatgagaaaacaaag

SEQ ID NO: 826107 - DNA, 595 bp, Homo sapiens
ctgcaacctcctcctcctgggttcaagagattctcctgcctcagcctctcgagtagctgggattataggcagtcgccaccacgcccagctatttttgtattttttagtacwgacagggtttcgccatgtttcccaggctgttttcgaactcctgacctcaggttatccacctgccctggcctcccaaagtgctgggattacaggtgtgagccaccacacccggcctatcatttttatcaattatatttccaatgtaaagttggtaaatacatgataatggtgtgtatttaacttatgcttgcccagctctgatcttttggttggttaggaactaaattgatctttaaagattatgacctacagacttgtgaacttccataaaactgggaattaagacaaataggtctgtctaataatataactaaaataaaaatacttgagaaatagtataaaagtacttccacttttttctcataattcactgagattattttctcatcatatttttcatacattaagagaaacaataaagaatgatagcccagaaagatgatatgtaactagaatataataaacagaaacctaagaaagttaa

SEQ ID NO: 826108 - DNA, 632 bp, Homo sapiens
tcttcaccctggtgccaccccatccttcccaattcgttgtgacctctctttgggtcacggaggacaaaccgatcaatactatgttgtgacgagtgagatgacstcacatagcagctgacgtcccctgtttgggcctgttggctttgcctggagtggctgagttcatctgtgcgctgagtcatctgactgggaggctgcagcctggcgtccctgtgcaggaggcctgcaggatggaaggaaccctgtcggggagcccagagactgaggctgggtcccaagcccccatgactagcacgtggtcctggcagagtccagcctcgtcctcttgtcctcaggaaggaggttggtcagggttggtggctattgctcaagacctctgaaggtgcctggtgagaggaggaagacagctcagagccagaagcaacagaagctgggaggctggcccaggggctgccttgcttgtcagatgcatggcccagagacactctctggagtggacctgccttgggtgtgcccgaaggcggagttgactctcatctgtggaaatggacgagggcatttccaggcacacggcactttgaggcccaggtactgggcaggaaggacagatggccacagagagccaagcactt

SEQ ID NO: 826109 - DNA, 640 bp, Homo sapiens
tgtcagagccaaatttagggcattgggaggtgagtcgtagtgaaggaggattgtttacttacatgtgaatattataatatgtatatacattaggaataataggagtctgctttctctcaatgaaaggaatgatttacaaagttagaaggggaaaatgtcagaatgagtcctgtgttgttgaatttcaattgaaggtatcagtgtgaactcacagttttcaaaacatatagacatagaaataaatataggtgtgtgtgtgtgtgtgtgtgtgtgtgtgtgtgtgtgtcttccccagctctatacatggagaggaccagggagcagccacaccaccacagcagtgagcacacctatcaccaccacagcacggagcacacctaacacccagctctggagatgaggtctcactctttgcccaggctggagtgaagtgatgcaaacacagcttcctgcagtcccagtctcctgggttcaagcaatcctcccgcctcaacctccacagtagctgggaccacaggtgcacgcyactgcactcagctaatttttttagatttgtcgtagagataggttttcattgtgttgcccaggcggatctcaaactcctggattcaagcaattcccttgcctctgcctcccaaag

SEQ ID NO: 826110 - DNA, 605 bp, Homo sapiens
cattgaaagaatcaatatcatggaaatgaccttacttccaaagcaatctacagattcgatgcaattcctatcaaaatactaacgtcattttttcatagaattagaaaaaacaatcccaaaattcatatggaaccaagaaaaagcccaaatagtcaaagcaaacctaagtaaaaataacaaatctggaggcatcacattatctgacttcaaattatactataaggctatagtaaccaaaacagcatggtactggtgtgaaagtagatacataaatcaatggaacagaaatagactccccagaaataaagccaaaaactttgaaccaactgatcctcaacaaagcatacatagaaataattggaaaaaggacaccctcattcaataaatggtgctaggaaaactagatagccacatgtagaagaatgaaacttgatctctatctctcaccacacacaaaaatcaactcaaactgctttaaagacttaagtctaagacctgacaccrtaaaaattctagaagaaaacctaggaaaaagtcttctggacattggcctaggcaaataatttacaagaaggaaaaatccaatttgtatactgtaaatgaaa

SEQ ID NO: 826111 - DNA, 605 bp, Homo sapiens
cattgaaagaatcaatatcatggaaatgaccttacttccaaagcaatctacagattcgatgcaattcctatcaaaatactaacgtcattttttcatagaattagaaaaaacaatcccaaaattcatatggaaccaagaaaaagcccaaatagtcaaagcaaacctaagtaaaaataacaaatctggaggcatcacattatctgacttcaaattatactataaggctatagtaaccaaaacagcatggtactggtgtgaaagtagatacataaatcaatggaacagaaatagactccccagaaataaagccaaaaactttgaaccaactgatcctcaacaaagcatacatagaaataattggaaaaaggacaccctcattcaataaatggtgctaggaaaactagatagccacatgtagaagaatgaaacttgatctctatctctcaccacacacaaaaatcaactcaaactgctttaaagacttaagtctaagacctgacaccgtaamaattctagaagaaaacctaggaaaaagtcttctggacattggcctaggcaaataatttacaagaaggaaaaatccaatttgtatactgtaaatgaaa

SEQ ID NO: 826112 - DNA, 673 bp, Homo sapiens
tctaattctcagcatgcactttctggatccacgccaatgcrtttaccactctggaactgctagactgagccctcctgcttgctcctgaggagcccgtggtctgcctctgctcccctgtccacatcgcacatgggcttgaggtctagcctcactcctctgtggagcccccagggcctctgctgcccctgtgacgtgatttcctcaaaattaaatttcaccggattcttcattatattctaccacccatgtttatttaacattcgactatatttatctatcttcttccaggctattttaaagttgcaccaagaaaattaccatgccacatacttgtttgcatccctgactctaaggggtgtctaagtcctagctggcagcatggggaatgaaagaaaacccagacttgggaacctgacatttctagatgagcatccacgtgctgtctcctgatggctgccatgtgacctcagaaaagtctgtcaatcagctggagcctcagcagtaaaagggaacaactctactcataccacagtgttgttgtgaaaggtacacaggcaacacagggaaagcactttgtgcataattcaacagatattcgattttcaaaaaaattgtagctattatgtggttgaataaataaatgaaagttagatctagtaatttttaaaaatca

SEQ ID NO: 826113 - DNA, 351 bp, Homo sapiens
cagaccatattattaaccctatgccacttcaatctcccttaacaaccctgtgaggggaacctgagagtctcattaactgggttctggatttagggtcactgttgtcaaaactctggtaactgttctcactrgaaagttatggatcagaagggcagtcttgggaaccagtgggaaagctagggaaacactaccaccctgactaggaggaagagcctatgttcatagacatattattctgtgttaatgaaaaagtttatctgttcacccaacaaatatttgtggcttttttcccatgtgtcaggtacagtttaggtgctagggaaacagcagggagcaaaacagaccaaaatt

SEQ ID NO: 826114 - DNA, 470 bp, Homo sapiens
ggagtgggtccctgccagccccaactggaggtgcgccgcgcggggtcagaagtgagggcgtccggagcgcaaatatctcgccgtttgtatttggtaggacmgcggccgtaggcactgggtgcccaggtccctcgcttcccgcgctcggcggggcctggggcccccagagggcggggagggcagagggctctggcggccatgccaccgcgcgggagacccggagagctggctaacccggctgagcgttcgcctggcttccgcggctcttccgcgtcttcggctctcaaacaggggaaactcgggcattgagctctcaagaataagaaccctaactctgcttcctgactgtggtaggattcgcgcaaactgaagattcgaagggtttccagaacttctggtccctctccctcgccgcctttcctaggtttggaatgtctcgagggaggttagagacctgggcatgaagaaac

SEQ ID NO: 826115 - DNA, 704 bp, Homo sapiens
tattaagtcacaaaaaaatatggaggatccctaacttactaagtgaaagaagctagtctgaaaggctacatactctgatcccaactacagtcatgcaccacacaatgacatttcagtcagtgatggrccatatataccactgtatcacataagattataatggagctgaaaaattcctattacctacttatgacataatcatcataacatcctagcacaacacattcctcatgtttgtgatgatcctggtgtaaacaaacctactgcactgccaggcatataaaactatagcacatgcaattatgtacataactttttacatacacaaacattgtacaactgtataaaagtattttatttatatccttatctataagcttttttctattttttaaattttttaattcttttttttactttttaaacttttttgttaaaaactaagacacacacaccttagcctaggcctacacagagtcaggatcgccaatattactgtcttccacctccacatcttgtcccactggaattcttcaggggcaataacacacatagaactgtcaccttctatgataatgaggtctttttctggaatacctggaaaaatctgcctgaggctgtttcacagttaccctgaaaaaaacatagagagtggcggtgtctgtgatggtccggagcgaggcctcggccaatctgggtggcgt

SEQ ID NO: 826116 - DNA, 570 bp, Homo sapiens
tgctaggaagttagtctaataattcactgcagaaaattgattaartggctgtccttttaattaagattatggagccattaacttaagttcttcatatagtgacaagagtccttagagattgttattcaagttccttagaaattgttatttaggtataatatcatcttgtcttcgactagagcttgaaaccttgttatctgattgtgtaccactccaaattccctgccttctgcaagttgaatgtcttgctgaatgtgtctaggggttcatcttcagtaatcgacattccactagtgccagttaacttctttttttttttttttttccagttaacttcatgacatgtagacattcaaaacttgagccttggatgttcctgtggacctgacagttaaaaatataaagaacctaagattcaaatccaactttctctgtttgccttgggttgaataacttatcttttggagaacagctttaagtgccttggacactgataaaattcagctatattgttgacactcatctcttttgtcttatgcttagccatatttaaatcttaaatttaataga

SEQ ID NO: 826117 - DNA, 631 bp, Homo sapiens
ccatattttcttagcttttacctcatgtcctctttttgttccagaatcccactaggatactatactgtgtgtagtttttaaatctcctttgacattgactgtgacaatttctcaggatttttttttttttttttcaattaccgtgaccattttgaggagctctggtcaggtattttgtaaaatctccccctgttaggattcatttgttttccttatttgtctgggtttgttttggggaggaagaccgcagaggtattttcatcacgtatatagggcacatactatcagtattctatttgctaagtataacttaggttttacatcaatgataacattaacactgatgtgaaccttaatcatctggctggggtagtgtttgtcaagtttctccactattaaactactcccacacctccttcctgtctttccatactgtactgttggagagaaagtcactgtacagtccacacttaaggagtgggaagttaatgtacttcactgccttgagggcagagtatctacaaaaaattatttaaaattactcaacatgggaggtgtatttattcagacatttacatcagtatgaactcatgatcmaattgttccacttttggcctttagaaactcgttt

SEQ ID NO: 826118 - DNA, 668 bp, Homo sapiens
aaagtcgtataaaatcagaatctggaaaagaaaaatttgttgaacacaaaacaagagggctctttgggggatattgggaacatatgtgtttgtttgtttttatttttatttatttagttattttttattttgagacagagtcttgctctgtcacccaggctggagtgcagtggtgcaatcttggctcactgcaacctccgcctcctgggttaaagagattctcctgcctcagcctcccaagtagctaggattacaggcacttgccaccatgcccagctcatttttgtatttttagtagagacagggtttcatcatgttggccaggctagtctcaaactcctgacctcaggtgacccacctgtcttggcctcccaaagtgctgggattacaagtgtgagccactgcacccagcctgtttgtttttaattttttgtagagacagggatctccctattcttgcccaagttggtcttgagctcctggactcaagtgatcctcctgcctcggcctcttaaagtgctgggattacaggtgtgagmcactgcactaagacttaagtttgtttttctaaatctctctttcacacaaatgaaaaaaagatataccaaataacaaaatgtatcctgcttgtaaaataatgtaaaacagtttcttcaagatgggcataa

SEQ ID NO: 826119 - DNA, 315 bp, Homo sapiens
tgggatcccatccagagtcattcattggtactgcatctcttccagttggataaagttmgcccattccctgataatatatgtgataaaaaaaaactcatgcccaaatttctctgctgcttgcaagttggcctgattctcagtgttcatcaaggtctgattcaaaagtaacataatgtcggccgggcgtggtggctcatgcctgtaatcccagcaccttgggaggctgaggtgggtggatcacgaggtcaggatttcgaaaccagcctggccaatatggtgaaaccccgtctccagtaaaaatacaaaaattagccc

SEQ ID NO: 826120 - DNA, 315 bp, Homo sapiens
tgggatcccatccagagtcattcattggtactgcatctcttccagttggataaagttagcccattccctgataatatatgtgataaaaaaaaactcatgcccaaatttctctgctgcttgcaagttggcctgattctcagtgttcatcaaggtctgattcaaaagtaacataatgtcggccgggcrtggtggctcatgcctgtaatcccagcaccttgggaggctgaggtgggtggatcacgaggtcaggatttcgaaaccagcctggccaatatggtgaaaccccgtctccagtaaaaatacaaaaattagccc

SEQ ID NO: 826121 - DNA, 515 bp, Homo sapiens
tgtaaacatttgacatctgttgtttccagcctttcatttaattcaaaaatttgaatttcaagtgtatatattgaaattattccttaagaaaatgcaatgagacttaccaaattagtaacagaaattgcctatacatctagaaacatactctgataaagatgtttactagttacccagtcagtgatatatattatcaaatccctccagagcccataaatatgcaaaccaacgttcagcaagctaccattatttgaagaacacacagagctatgaaggcctaaaaagttaaaggaggacatagtctctgttttccaataaccattgtccatggatattttcaggactagagataaaagtttagttctgtatcaatttagtgtgaggaacaaaacacttattcacatgagttctgttatattaaagttaaaagggctttgcatggctcaatactagttcaaatgaragaaaagacacatccttaacatctctgtgaagatagtttgacaaaaacttgt

SEQ ID NO: 826122 - DNA, 537 bp, Homo sapiens
ataattttggtggtccagccagtgtggtcaccattatcaactcagatggtgaaaagatcttcagcagagaactctcagacaaaatttcaaagataattgtgcttgcaaagtgtgatcacaaaggtaatcagaaatcaacacaaaagtatataatattgaagatgtctgccttagcttacagatcctttaccaaagctttgaagccagtctctgcaacaaactccacattaccaattgtttttggtactgcttgtgtacaccagcatcaatcacaatgatgtctacaatgttaaccattatccaactaagacagtatgttgtgttttcttagtggcttctggaaaggtcttaaaagcaatttactttagaaaatttatttttttcaataaaaattgaataatgtgagatayaagctgagcaatcttttctggaaggtgaagttttttgtctcctccttttcatggcatgcattctgttaggaaaatgtggatggtgctggaaagtgggtagttgcaagaaaaataaattaatagacta

SEQ ID NO: 826123 - DNA, 622 bp, Homo sapiens
atctagaaaatgcacataagcctgcttggactttagccaggatctgtctattatctggccctgtcagctcccactctaacaaagggccattatgatcctttggatctccmtatataagcatcagttcagattctgtatctgtcagtttttgaaatgtctgtgtattctgcttttcccagtgaaaaatcacctgaataaatagctatcctttcagggaaggccagggaataattacaatttatatttattacaatgtttcagggcccttctctcaatgggttctggaactgaatagtgtctcaggttcaggaactgagcaggatattgtgacctttcattaggaggaccactttcaggttcctgttcctccattctttttttcaggtcatagacattacttgggaccattactggctacccgtctgttttgccctagtctgccattctctgctaacaatctacacaactcattgctggtgaagcccccttgactgtttctccgaccttgctgatgctcaaggtatttgtgattccctgcctcattgtgattaagcactgccacctggcttccatactctgggatcaatcaatcctcaaggatgttaagtccaattctgtatca

SEQ ID NO: 826124 - DNA, 622 bp, Homo sapiens
atctagaaaatgcacataagcctgcttggactttagccaggatctgtctattatctggccctgtcagctcccactctaacaaagggccattatgatcctttggatctccatatataagcatcarttcagattctgtatctgtcagtttttgaaatgtctgtgtattctgcttttcccagtgaaaaatcacctgaataaatagctatcctttcagggaaggccagggaataattacaatttatatttattacaatgtttcagggcccttctctcaatgggttctggaactgaatagtgtctcaggttcaggaactgagcaggatattgtgacctttcattaggaggaccactttcaggttcctgttcctccattctttttttcaggtcatagacattacttgggaccattactggctacccgtctgttttgccctagtctgccattctctgctaacaatctacacaactcattgctggtgaagcccccttgactgtttctccgaccttgctgatgctcaaggtatttgtgattccctgcctcattgtgattaagcactgccacctggcttccatactctgggatcaatcaatcctcaaggatgttaagtccaattctgtatca

SEQ ID NO: 826125 - DNA, 627 bp, Homo sapiens
gtgaacgcgtagtcactgtgaatataatagtaaacaaaaacttatgtgttctctaccctcttagagtgcacagtytagtgagagagagattagataagtaaatcatcccataaacagaaaaaactggagatttggtaaatattgcaaagtagatttaatggggagtagtatggtttggctttgttcccacccaaatctcatcttgaattatagttcccatattcctcacatgtcatgagagggacatgatggaaggtaatttaatcatgggggttgttactctcatgctgttcttgtgatagtgaatgagttctcatgagatccaatggttttataaggggcttttccccctttgcttggcacttccctctcctgccaccatgtgaagaaggacatatttgcttccccttccaccatgattgcaagtttcctgaggcctctccagccattctgaactgtgagtcaattaaacctctttcctttataaattacccagtcaggggtatttcttcatagcagcatgaaaatggactaatccagtaaattgttactgtgcagtggggcactgctgtaaaaatacccgaaaatgtggaagcgactttggaactgggtaataagcagatgttg

SEQ ID NO: 826126 - DNA, 627 bp, Homo sapiens
gtgaacgcgtagtcactgtgaatataatagtaaacaaaaacttatgtgttctctaccctcttagagtgcacagtctagtgagagagagattagataagtaaatcatcccataaacagaaaaaactggagatttggtaaatattgcaaagtagatttaatggggagtagtatggtttggctttgttcccacccaaatctcatcttgaattatagttcccatattcctcacatgtcatgagagggacatgatggaaggtaatttaatcatgggggttgttactctcatgctgttcttgtgatagtgaatgagttctcatgagatccaatggttttataaggggcttttccccctttgcttggcacttccctctcctgccaccatgtgaagaaggacatatttgcttccccttccaccatgattgcaagtttcctgaggcctctccagccattctgaactgtgagtcaattaaacctctttcctttataaattacccagtyaggggtatttcttcatagcagcatgaaaatggactaatccagtaaattgttactgtgcagtggggcactgctgtaaaaatacccgaaaatgtggaagcgactttggaactgggtaataagcagatgttg

SEQ ID NO: 826127 - DNA, 627 bp, Homo sapiens
gtgaacgcgtagtcactgtgaatataatagtaaacaaaaacttatgtgttctctaccctcttagagtgcacagtctagtgagagagagattagataagtaaatcatcccataaacagaaaaaactggagatttggtaaatattgcaaagtagatttaatggggagtagtatggtttggctttgttcccacccaaatctcatcttgaattatagttcccatattcctcacatgtcatgagagggacatgatggaaggtaatttaatcatgggggttgttactctcatgctgttcttgtgatagtgaatgagttctcatgagatccaatggttttataaggggcttttccccctttgcttggcacttccctctcctgccaccatgtgaagaaggacatatttgcttccccttccaccatgattgcaagtttcctgaggcctctccagccattctgaactgtgagtcaattaaacctctttcctttataaattacccagtcaggggtatttcttcatagcagcatgaaaatggactaatccagtaaattgktactgtgcagtggggcactgctgtaaaaatacccgaaaatgtggaagcgactttggaactgggtaataagcagatgttg

SEQ ID NO: 826128 - DNA, 627 bp, Homo sapiens
gtgaacgcgtagtcactgtgaatataatagtaaacaaaaacttatgtgttctctaccctcttagagtgcacagtctagtgagagagagattagataagtaaatcatcccataaacagaaaaaactggagatttggtaaatattgcaaagtagatttaatggggagtagtatggtttggctttgttcccacccaaatctcatcttgaattatagttcccatattcctcacatgtcatgagagggacatgatggaaggtaatttaatcatgggggttgttactctcatgctgttcttgtgatagtgaatgagttctcatgagatccaatggttttataaggggcttttccccctttgcttggcacttccctctcctgccaccatgtgaagaaggacatatttgcttccccttccaccatgattgcaagtttcctgaggcctctccagccattctgaactgtgagtcaattaaacctctttcctttataaattacccagtcaggggtatttcttcatagcagcatgaaaatggactaatccagtaaattgttactgtgyagtggggcactgctgtaaaaatacccgaaaatgtggaagcgactttggaactgggtaataagcagatgttg

SEQ ID NO: 826129 - DNA, 592 bp, Homo sapiens
acgaagcagcacttttaagagaatatgtgagtgtaaaaattkattaatggcaagactactagcaagaatgtaccctgaatacatcatctgaacttacagctaaaagatctgtgacaaaattggggagaaatcagatgcagacataaaaccggctgtacttgaagcttggcaatcaagtctaaaaatggggttagacccaatgaacatatgtaattaattaaaaagcatacaggtgagtaggtcagacttagacagcacttcaataatagataagaagtatagaacaggacacagaagctgataggatccaagtagatggcctaagtatcaggtagaaatctgaaaaatatctcaaccagaggagaaaacaatttaaattattcacacatgtttttctgagaggaagaaccaaagccaaaatacagagatgtcattgatcattctgaaggatacaccacatgttaggtgacaagacaagtctaaaaacattcaaaaaattgaaataatatcaagcatcttctctgaccacagtgcaataagtctagaaatcgctagtaagaggatttttgaaaactatacaaataattaaatt

SEQ ID NO: 826130 - DNA, 587 bp, Homo sapiens
atgtcagtggatgtggacgatgcatcatacccacttgtgccactccgtgtgctgttacagctttcatgagatagactgttggtgcgtgtctggtgaccagaggatgaattgcccaactcaggacatttttgaaastgaaaaggatactatcaataatcacaccagaacaacaacataaagaaataagtacttttgtaagaaaccagcatctccagttatgtgctcttctgattgtaattttagcgccttctgtcccattcattaaaatatttcagagcaagagtgagaggaatattatatggggataatctgcagtattttctaatttactttgatgaagaaggagaaagaggaggaggagtcacttgtaaattcttgtactgtaacctgaatgataataagttgcctacacaacacacagctgattgaatgacagcaaaatctgacctttgtctaaagtacaaaacctcctgcccaaagcactcttttccattggccctcatcattggctgtagaataccctgatttaaatctccatcacagtttattcttcagttatgacagatagcccatttcattttatatca

SEQ ID NO: 826131 - DNA, 613 bp, Homo sapiens
gcctcaaccacccaagtagctgggattataggcrtgtgccaccacgcccagctaatttttgtatttgtagcagagaaaatacaaaatgttggcaaagctggtcgctactcctaatctcaagtgatccacctccctcacctcccaaagtgctgggattacaggcttgagccactgcacctggcctttatttttgagaaaaacaaaaaacaacagctagcaaacttggttctctttgctactttaaaagaagaaaaggaaagtacatttcacattttatctaaattttattgtccttttggcaaatttcttgaataaacctatttcacaataccatgtgtaggcaatttctatttgataatattaggcaattgtattgcctgcttaaacctatttattaagtgcaattactcagtttgaagatgctaatacagactaggaagaaaattatattgaatgaatgaatgaacagttgaaacaagggatgattgatttcaataggaagtaccatgttaaagaaaaacagttgattagaaatatttttggctccccaaaccgagttctttgtttgattgcatgaataatattcttcatgttgatgtcaattgttttcaaa

SEQ ID NO: 826132 - DNA, 613 bp, Homo sapiens
gcctcaaccacccaagtagctgggattataggcgtgtgccaccacgcccagctaatttttgtatttgtagcagagaaaatacaaaatgttggcaaagctggtcgctactcctaatctcaagtgatccacctccctcacctcccaaagtgctgggattacaggcttgagccactgcacctggcctttatttttgagaaaaacaaaaaacaacagctagcaaacttggttctctttgctactttaaaagaagaaaaggaaagtacatttcacattttatctaaattttattgtccttttggcaaatttcttgaataaacctatttcacaataccatgtgtaggcaatttctatttgataatattaggcaattgtattgcctgcttaaacctatttattaagtgcaattactcagtttgaagatgctaatacagactaggaagaaaattatattgaatgaatgaatgaacagttgaaacaagggatgattgatttcaataggaagtaccatgttaaagaaaaacagttgattagaaatatttttggctccccaaaccgagttctttgtttgattgcatgaataatattcytcatgttgatgtcaattgttttcaaa

SEQ ID NO: 826133 - DNA, 623 bp, Homo sapiens
aatatgaatgttaaataggagtggctttgttgtatttttgagacttctgaaccacttttcggmttcactcacaatcagttaatacactaatcagttgtattttgagacatctaatatgtatgggagaagcaaaatccctgtgcaatcaaattgggtcatcttgaaatataaaatataaacaagtgttaaatggtgtcatgaatcaggaagtactaaatgaattcagaggagtaagtcagctacaacacttgtagagacttcaagatcacctgtttttgatgagtgggcaaaaaagatattggaaggaaagaaagaaatttcaggtggaggaagaggctgagccttggagacataggcctggttaagaatattctccagaagtgaaagggattgttctctctagagtttaatgggaaatgattctagattgtttgagtgagggcagagaatgaaggactttgaaatcctggtagtgaagggatctataatagtagcctcttaaagtgaactcttgctaaatcttcagcaggtacatgaaaactgtatgtgagaaatcttgacatattggattggaattaagagaaactaaggtcataggacctcacagtcaggcagaggattgt

SEQ ID NO: 826134 - DNA, 640 bp, Homo sapiens
agatagtggtgatggtcgtacaactttgtgaatacactaaaaacaagtgaattttgcactttaaatggataaatgttatgtgaattatatctcaataaggctattattttaaaaaaattagattccatccactcttattttaaaaaaaatctagaatccattccaatattacatccttgggaattctaactaaatttctgccaaaatagctgtttttttttccttaaaaataaaaataaaaataaaaaaagaatctcacttggctgcccaggctttagagtaaagtggcacaatcatagcccactgcaaccttcacctccctggttcaagagattctcgtgcctcagcctcccgagtagctgggactacaggcacatgtcaccactcccggctaattttgtacttttggtagagacagggtttcaccatgttggccaggctggtctggaactcctgacctcaggtgatctgcccacttcagcctcccaaagtgttgggattacaggcgtgagccaccgtgcccagccacaaatttttarcatatgtaacttatatgggtaaatgttatgtttgttttataaatcaattttttaacacacataaccatcattcatatattcatataccccatttttcagta

SEQ ID NO: 826135 - DNA, 561 bp, Homo sapiens
acctaagaataaaattactgagccacagattactgagtcacagaakatcttcaattttagtagataatcccacattgttttccaaagtaacacctccacaatctgtgttttctattgttccataatcttgtcaccacttggtattgtcaatctttttaatgttggcagttatagacagtacgtggtagtatttctttttttttagacagggtcttgctctgtcacccaggctggagtgcaatggacctgtctcggctcactgcaacctccgcctcccaggttcaagtgattctcctgccttagcctcccaagtagctgggactataggtgtgtaccaccacacctggctaatttttgtatgtttagcagagacagggtttcactgtgttggccaggctggtctcgaactcccgaccttgtgatttacccacctcggcctcccgaagtgctgggattacaggtgtgagccactgtgcccagccagtatttctttgaagaagtaatttacagttccctgataaccaatgagactactgagcatcacttcatgtgtatgaacca

SEQ ID NO: 826136 - DNA, 503 bp, Homo sapiens
tccttccttgacttttatgacactgaaaatttttaatagagggcagatattttatagaatgtcactcartttggttttgtttattgcctcatgattagaccttgattctgcctttttggcaggaatattgcagaggtgatactgggttctcactcactgcatcctgtcaggtggcgcatgatgttgatttgttcccttgctggtggtggtaactgatcacttgattaagatggtgtctgccatgtttctctagttacagttttctttatgattagcaaatgtttttttgtgaagatactttgactatggaaatgtcctcttcctctgtcccactttacctcactagttttagcatccactggtatttgttgcccaagtcgttatgataatggttgctaaatggtaatttcaaaattccatctacatttatttatttgttgacattctattgtaagaaagagtttttgctttctccttttatttatattaatgtggactagtgt

SEQ ID NO: 826137 - DNA, 581 bp, Homo sapiens
tgtaagtgacaggaggtaaattaatatggaataagtatatacttcacatgtttcttggcatatatgaagaagcactgaagcaaatgaatctatctcatgtaaggcaaatattatggaaaaactccagaatcagtagaaagagatatttttgccttttcttactatggaaattcactgttataatacttaaagctgcagatcttttctttaataataacttctgtttaaaaatctgtaacaagagataccattgctgattacataacattggtgacatactactgtgattttttcagttctgtaccaaaagacaagaaaaaaacaaaaaacaaacaaaacgataaattctgccaatgtttttaaacaagaatgtcttctacaccaagtgctactttcagatacagggctacagtgcttgaacaatcaccgtattagaaacaataagtgatacaaagagtaaaaacaattttcaaaaaaatyaaacttttataacatttacatagacaccaaagaggacaaaatatccatttccagaagatgtgcagtataattagtcagaaaggtatcgcaatgcttttgat

SEQ ID NO: 826138 - DNA, 616 bp, Homo sapiens
aatccatggttgattctgctggggaacaaacattaacacagattagatttttctgaaacaggatcacaccatcctcttttttaatttwgtacaaaatcttccttcataaaggttcaaatacaccaaaataaattgtaagtgaacagaaaagttaaatataaaagcaaaaacattttccaaaagtaggaaaagaaacagagccaagtattttcctgatctagaaaacagaaaaagatttttttccgcaaaaagaaaccctttgaaacaaattacaaaggaaaatatcaatatattgaaaaatataaaacttccgtgcctcaaataaaaatgaaaaggaaaacaactaattatgggtaagtgtttgctaaatatgtcagtgagtattggtcttgttatataaattttattgatttctcatacatcaataagagcattataaatggccttataggcaaatggacaaaaagacataaacaagctggagtcacaaaagaggaaatacaaatgtcccataacatatgaaaaatatgcaaacaattaaaaattaaataattaaacaattaaaaaggtagttactaccgttccctgtttaagtgacgaggactcagtgtgagac

SEQ ID NO: 826139 - DNA, 630 bp, Homo sapiens
tttccttttgtttaatttttttttaactaattatgtgttcaatatattgtggattrtgatagcactaactcaacatttctttcaggaaaattgtgttttctggaccacagtaatttgaatagctccttcaacttagatattctcttgaagttcattacatgctgtgctggaggatgggacatattggaaataccctcctctatattcttaggttcttcctcctatgatggatgttcatgggttttggtacccagcatgagttacccttcctaagagctcccagcttccgtttgggggactacctcttccgcgtcatgtgtgattttggtggaagagtaattacaagtagctgactcatgttctgggaacttcagctccagttccttctcctcccctggctctgctgcaggtagaagagctcccgggaaatttatgtctagagcatttgcagcaaggtcctcagggacagtcggaggccctcgcagtgttgactgctgccaaacccatgctatgaagggaccatggctgtgacttctgcttcctgaccttgtttctacttgtttccaaagtgctgctccagtgtctgcctcctgttgattctgtgggtttgttagccagcattggttttaa

SEQ ID NO: 826140 - DNA, 468 bp, Homo sapiens
tagttttggtagcaaaataaatgctggaaaaatatgtttaagctttcttttttaagacttacgggcagcactgttttgtwtgttttacatattatattgccttatccctagccaaaaacaaaacaaaacagtaagccttctcatactctttgaacatatttgcctgcatctgaaatatcacaataacactcaaataatattattgccatctaaagatgtattcaggcactacaccaccagcaattataaaacatcccttttttgttagtttaagaagtttgcatgcaggtgttaagattatgggaaatcggtggtgaaatatacaatcagggcctacatttttttaaaaaaatatataaattcttgtaaactatgatttacctgtgacagcagagatcttttctctgtctctcagaatagtattgtcatttcttttttggcaagaagaagaggcccctcctcttctct

SEQ ID NO: 826141 - DNA, 625 bp, Homo sapiens
accgcacccggccagcctctttcttttgtaaattgcscatctccggtatgtctttgtcagcagtgtgaaaacggactaatacagcatccaaattaaaaatcggaatgaaaagcaggtttcatcctcaattcatccctagatcaccacttggaccccagctcttagctccagatttccagagttccaagtctacatgaacatgaaagagtcagggagactgtacatcttggcttgggcaggatggtcctgctttatacttgttgtcctggcataattattaatggcaccctccttcactctcaaaagtgtcctagtttacatgagaagtcttagagccatccaaagtcagggggaatcagtgactaaacacaaacttttaggagcaagttcatttattcaagtttgtgcaagccttcagatgaagctaagtagatttggcattgttttgtaagtataaagatatttaaataaacttccaaaatatcccaacagaacggttcaataaaagcagtatgtcatgaattttaaaatcatagacaatataggaaaggctatcaatatgtgaaaaattttgaaattcactaataatcaagaaaaatttcaataacaatgaggtaacattttg

SEQ ID NO: 826142 - DNA, 525 bp, Homo sapiens
ggaggggagacagagtcctgcttggggcatctggcaacctcagtcaagtcacagcaggggtgcccaagggccagctttctgcagctgctggaggggtgtcctacaggagttgggccctcctctygctggccattcccccatgcctcccattggcaagatctagcagggagccaggtgagaaaggagcctgggaaacatccttcacacagtcttagcatcagagcagaagcccgtggcttcctttgctttccctcttccttgttggcctttattatcagttgtattcacttatctgactataaaacagggtaatattagtgagagaggaatctgttactgataaagaacaaggaaaggaatccattaatcccttttgattatcatacagattattccccagtgattattagaaaatacttttatcttaatgaggaaaaatctcaatttatttttaaaatcctggaaaatggaatgccgggtaatattcttatttaacttttgacattttttaaaaagtcatgttct

SEQ ID NO: 826143 - DNA, 619 bp, Homo sapiens
tgagactctatacatttcatagccctgtggtgaggtcagcaacctcacagaagaaaccctggaacagattctctttattctaggcttagactatcacaggtgacatgacacaaatgcatgtctactactcatagtttctaaaagcatagctatgcctagccacgtggagagaactaagctaaatgcactctcaacttgtgaatcatcaaaaccttgtcacttgggttatggctataggatatagtgttgatgatacatggggtgaggggaaaaataaaagcacacaatgcagtcttctcagagtgcagaggagtgatttagtattgcaacttaaaaaaaaaagataaccatgtcattatttcatttttatattgagcacatttcctgctgaagacagaaaataccaatccatatggaatgctttgatatcaggtttatcttttcttctctaattttagaggaggggcagatggactggaatcttatggactgattttattggtcatagcaaagacagawtagaaacttacatgacaaactggggagagactctactaccatgatgaaataggctttgtatagaggtgttaggtaatttcttcctctccttcattgtcct

SEQ ID NO: 826144 - DNA, 624 bp, Homo sapiens
tgattacatgggttaatacaaatcatgtgcttagaacagtagctggcacatagacaatgtttaacaagcatttgatttttacattctataccaattgctgagaaggggaataggattactattattggtttgrattaataagactatattagctagagatgagatcacatttcattgaatcatgcaggaatatagaaacctcacaacaaaattgagttatattaaatagaaaaccaagtctgatcactacactcaaagtattatcactcttactactgctcctattatcttaataccatcatcatgttacctccacaaataacaatcaaatgacagaacaactgtaggtggccctacctgatttttttaaatctgataatctgaaccatgaacatatttttgccagcaagtatttgggcaaataaaagcacaacttcttatcacccataatatcaataaaataggattttattttggccttgagtcatctctaaatccaaagaatccagaatctctgggcccttctgtcctctgagaagccatcatccatgggaccctagtaaggtgaagttttgacaaaaggaaactataagagattggagtataaggagcaggtggagaaga

SEQ ID NO: 826145 - DNA, 564 bp, Homo sapiens
gagggaggggggctcccccagctccttgcacwtcccgggtgaggcaacgccctaccctgcttctgcttgccctacatgggctgcacccactgtctaaccagtcccaatcagatgaaccgggtacctctgttggaaatgcggatatcacctgccttctgcattggtctcactgggagctgcagaccggaactgttcctatttgaccatcttgccaggagtccaaaagctttgccattacttttaatgagagaggattctttttatatagcaaataacaaaatgttggaacttgttcaggtataaatatttattattctaagcagggtgtagggcaatatagaacaacattttttttttgaatcagggactttttaagaatctgctgaaagccattttctctctcaggaaaacgtatttactcactggattttttttttaactgtttctggggttccacagatgcatttctccactggaagtccatctatttgtttaggatttcatggtttagataaatattcaattataaatgtttaagttcttataacagtacttgccacatat

SEQ ID NO: 826146 - DNA, 588 bp, Homo sapiens
ttttaggggtcttagggataaagagagagtatctatgactatgaacatctctttccagttatctgtgaaacttatttgctacttggactgttcacctccagtgaaatagacaaacactaagactggagtctgagagacctgagagttaaagaacgtactctggtgttctaatccagttggtggtggaagtaggaatagtttggtgctttttgcccagaagtgacatcatttcttcttgggggaagtgagtttctgagatgcagaggcaaagttgtcactcttgtcacccaccctttggtgccacccagtaagtgtcaactgtgtgggagcaatgttgtcagcccatcaggtgtggacaggaggcctttgttctgctcaacagcttaacttctggttatgccataccactgtaaggataccagaccatcagacatcttctttagcttcagccatttaccatgtaaatctgtctttgaggcagtatcagtgacaagctcaatttgsggagagggaggaaggagaatcgaggagcagtgcccttctagatgaaatgcttggagtcttacacccatgaacatttggttctga

SEQ ID NO: 826147 - DNA, 611 bp, Homo sapiens
tccatctattatagacccaaaatagtgctccttctattatttcataaggtgccctaagcctttaatgaataaagatgttattttctaaaataactaacaccattcatttaaaaataaaaatgaaaacaacttactagcgttttctcataaaagagtacaatgttccaaaattatataaagagaagctcaaattaagttattagtctttggtgaaaatttaatgaaacctacataggaaacatttatttaaggagcataatttttgacttaatagtttcttattcctaaggtctctaatcatttgagcagtttttgtaaaagagctgcttgtatggaaaaatgctgagactttcacaagagattaactgtttttatcagcaggagtgagagatacttatattacccaacagagagggaaacaggtcagcaaaatcattcatcttttataataatgtccttctcattattaacagctatggggaaggtttgaccatcagtccgtattttgtygtgaattttgtctactttgtggaataaaaaagggtggatctgaaatcttattttgttaacttaagcctattacattttttaaagcaactcagcaacagcaa

SEQ ID NO: 826148 - DNA, 515 bp, Homo sapiens
gttattgtgctatttgtataaaaataaatgatctatcccctccgccagaatgatagcacagaccagtaaaatagagcacttcttgtttttcaaatatgtatttattcaaaaggttttaaattaaataaataatatagttatacccacattcgtatataaattcaatgtactctgcccagtaggaatttcatgaaatttaatgagataatcacagagtggcatgaaaatacaaaaggccaagaataaccagtatattttggaagagaaggaagaatttgcaacaataagccctatatataatatcagagcttatcataaagttataataattacaagcatggtagtgacagagggataaataaaaagaacaatggaacataatggagagccctgcatatatggaagcttgccatgtgacagaaatggcattataatacatagccagaytattttaaaatatttaaacttttgttcttattatggaaaaaaaacttactcttcaactcacaaagaaa

SEQ ID NO: 826149 - DNA, 532 bp, Homo sapiens
caaaattttgatttaaagcataactgaaacataactgtgtagttaaatatgttgaatgcaaaagcaatgcttacaaagtttgtttatttatttatttatttatttatttattttgagacggagtctcactctgtmgcccaggctggagtgcagtggctcgatctcagctcactgcaagctccgccttctgtgttcacaccattcttctgcctcagcctcccgagtagctgggactacaggtgcccgccaccacacccggctaattttttgtatttttagtacagagggggtttcaccgtgttagccaggatggtctccatctcctgacctcgtgatctgcccacctcggcctcctaaagtgttgggattacaggcgtgagccacagcgcccagcccaaaatttattttttaacatcattttttaaaaagtctgtggtgcacttaaaacaactatcccccaattcctagtaaggtgtcagttttctgcaagtacttaatggtatctggactaagtgtacatttcaaaacactc

SEQ ID NO: 826150 - DNA, 675 bp, Homo sapiens
ctcgcactcctgtgaggcttttgcaggtcgaaggcccccctgaggactctggggggacgttgagaagaggggtgtgggaaggtaaagaaacttgctggacaagtcattaacacactttaagcgaatggtgccctgggaagcgcactccccctgcccgggccccctgcccgctcgcggacagattttttatccctgggatcatgagcgtccggtcttgcccacagggcctgtgctgcgacgcacatacatacgtgttgtgtctgtcaataaagtgtaaataaggtctccctgccccacacggccggttgcagtgccagccctcgggggggggtttcctccccttcctcctactgcgcaggtgggaaaaccaagcccaccgcacctctggtgcacgggacagcgcggccaggccggagcctccggtgcacggggcagcgcggccgggctgaagccctggcgtctggtggctcgtgtagtccaggaggtcttcgttccttctgttccacgagaccctcgtggctgctgggaggtgcagcaggcctacggcccttcccgccaggtttcggggcacatggtgcctcctgtgccctggctgcttgagcragcccgacggtccagcacggcctgttcagtccacgtgtacagcttggtggcctcggtccagggatccacacg

SEQ ID NO: 826151 - DNA, 572 bp, Homo sapiens
gaagaacattgagaatggcccccaagtctggccaggaggttraagaaaccgaggaagaggctctcctgtcccccacagagcaagagtcggtcagtggtcacctgggacctccagcaggcgcacctgcagcccccgagactcccacgtgcctgccagacaccacgccccaccccgcaccggtggtctgctctgccgacccgcagtaaggaggagagggaggactggtgagcctcctgggccaggtggccaggggccggcctgagtaagcagcagggtctgctgccgctgcaggttggctcttgagtccctggaccctcgcacactgcggctgctgtggagacagcgagaactggagatccaggccttgcggtgggccatccagaatggcgaggacgcccggctctgccacatcctggaagaggtggcggggcttccgcccaagaggtctgcagcacagtccccagcccaacccaaccccgccctgtcctcgcccggactcctggtttctgtctgaccccaaccccaaccgctgaggcagatccttaccctcatccttgcccgcgctgaccctc

SEQ ID NO: 826152 - DNA, 546 bp, Homo sapiens
cgttgtggtcaaggatgcagctgccccttctcagcctctgaggatccaggctcaggacccggagttctcggtagagagtrcatccaaggcctcccctctgtgggtgggtcagggctgtacgtgggaggcagcctggccggggactcaatgagaccctgtccaggacctcaactcggccatcacatatcgaattaccaaccactcacacttccggatggagggagaggttgtgctgaccaccaccacactggcacaggcgggagccttctacgcagaggtgcggggcagggcaggcgggcatctccaagggtgtggggcttaaagatgtgtctaggagggacaagccccttcctgccccaggttgaggcccacaacacggtgacctctggcaccgcaaccacagtcattgagatacaagtttccgaacaggagcccccctccacaggtaagcccccctccacaggtgagcccccagggttctccaaataagccccttcggtggctcctttcccgcggtaggtgtgcaaggggcgggcagaggcaagc

SEQ ID NO: 826153 - DNA, 637 bp, Homo sapiens
gatcgctcacgcctgtaattccagcactttgggaggctgaggagggtagataacttgaggccaggagttggagatcagcctgggcagcatggcaaaaccctgtctttactaaaaatacaaaarttagccgggcatggtggcgggcacctgtagtcccagatactcaggaggctaaagcaggagaatcacatgaacctgcgaggcggaggttgcagtgagctgagatcacaccattgcactccagcctgggcgacagagtgagactctcttctcaaaataaataaaaggggttttaaaatttgttgtggggggcggggaggattggtaaaggctaggaaattcatttaaaaagaagacccaatgtttgtcatggcatcttcaacttccaccctcagggatggagggagatgtgcacttggccttttctagttggacaggtgtgcaggtgagggcaggactcctgggggctttaatcggccagggtttgcctggtgcacactgccaagaaggtgaaaagacgcaggatagggatctcctataggcggtaaagggatgggtcaggtgtaagtcatcacacgctcctaagccctgagcaaatcacccaggatccggtggagatgacattgtcatgacaatt

SEQ ID NO: 826154 - DNA, 650 bp, Homo sapiens
aaaaagtaacactctttagagttccagatgttcaaaagaaagagaaaatagaatcctccttccagtccccttccaaaccctgtatgcctcaggaaataatgagttttttatacggcctgctccacacccatgtgttttgaaaccctttcgcagcttgccactgccgaggccctgcagggcagggaggggctggccggctgacgggtcctgcactttctccctcctacctgggctccagccacattggtcctctgtaagggtcaaggttctgcactgccaagaagagaatctgcctctggttaacttaagttacagagcaatgggaagttactgctgggctcaaggctattggagagcccataggcctgatgggggtgctacaggaccaggcttaggacggggaaagcagccgagggagcctggctggcactaaggccaccagatgccattacctgcatcatcatcacctggatgaactctaaagtccctactgcactgagctaacatccccacccctgcctcagagtcatgaacctcatcacagaccacaggggcaagggagccagggcctggccttgtccggccctttcgtgggagacaggaccccarctccaaaagcctcacatggggtggtttccccaaacctctgg

SEQ ID NO: 826155 - DNA, 532 bp, Homo sapiens
tatctacctaaagaactttccattcttgcccctcctcaccacctacccatcaccgtctktaatcttcttcagagcctttatccccatcagaaagtgtcctattgaataattttcttttttgcgctgccaggtctccagtagaatgcaaactccctgaggtccgctgcgctcccaccagtaccttggacagcgctgggctcgcagtaattgtgtgttagcgaatgaacaagtgggcaaggatggaacgctccacctgatcctgaaaccgaacattcatccacaccagtctgctccttaagggagtgcaagtgctcatgacattgatgagttcccagtgagtcgaggctctgaccccaccctgaatctgcagaagggtccacggattgaagtcattatttatttttaatatttatttatttatttatttatttatttattgagacagggtcttactctgtcaccaaggctggagagcagtggtgcaataacagctcactgcagactcagcctcctgggctcagtggatccttca

SEQ ID NO: 826156 - DNA, 637 bp, Homo sapiens
aatattgtcaggggcatatcaaaatgcgtcattttttatcatgagcatctgtcaagtgaaaatgtgccaggcaccatgcagttttgaaagcagcrtgaggaaatagactgagtcgaaagtaagagcatcattctaatacttttcttctatttagtatctttgctccattggccaaggtatctacctcttctttgcccatgtgtcctgatctgtagcatgtggatattcatggtgaatctgagcaaatagatcattgtttgaatatatgaagaaccctaaaaaatgacacatagagacctgagaaggcagtatggagttaaagagattgttgaaaatgaaaaagccaacaaggaaacaatatataggacagaactgggagagcagaaataagcttagaacatatattcatacccaaagaacaatgagagtggacatttctatgcctttaatgtgataaagtctaagaatggctggtgactagctgtggctttgtttgcttgtttagttttgtttatgaataagaagagttcatcttatgttgtagacttgaatagtgcctggtacataataaacactcaatgaataaatgttagacgaatgaacaaatggatatactgatagatgtgtatatcctcat

SEQ ID NO: 826157 - DNA, 637 bp, Homo sapiens
aatattgtcaggggcatatcaaaatgcgtcattttttatcatgagcatctgtcaagtgaaaatgtgccaggcaccatgcagttttgaaagcagcatgaggaaatagactgagtcgaaagtaagagcatcattctaatacttttcttctatttagtatctttgctccattggccaaggtatctacctcttctttgcccatgtgtcctgatctgtagcatgtggatattcatggtgaatctgagcaaatagatcattgtttgaatatatgaagaaccctaaaaaatgacacatagagacctgagaaggcagtatggagttaaagagattgttgaaaatgaaaaagccaacaaggaaacaatatataggacagaactgggagagcagaaataagcttagaacatatattcatacccaaagaacaatgagagtggacatttctatgcctttaatgtgataaagtctaagaatggctggtgactagctgtggctttgtttgcttgtttagttttgtttatgaataagaagagttcatcttatgttgtagacttgaatagtgcctggyacataataaacactcaatgaataaatgttagacgaatgaacaaatggatatactgatagatgtgtatatcctcat

SEQ ID NO: 826158 - DNA, 587 bp, Homo sapiens
tttagggcccacctgggtaatctgggataatctccccattccaagatatttcatcacatctgcaaagccataaaggtatcattcacaaattcaagggattagaacatggacatttgggggktttagctttttggagctggtcctgtcattgaccagagtacttgaaaaagaagaatgcatttttgagagatgataatgaattcacttgggatctgctgaagtacctatgggccatgtgtatgagggtattcaatttatgttatcagaaaacctcgaatcaggtggcttaaacaatacggacatttatttaaaacaaaaaacagcctcagagttggttaaattagcaattcagtgacatccttgaggacatacgttcttgctttgccatccttaggctggctctcctatggtaacaaaacgatccccacaattctaggccttcaatacagatatgcaaatttagttggcttgttttgtgtgccccacccccacctttttttttttaaagtctgcaaggaaacctaacttctgaagctacccattagcttctatttttcttggccagataaacattctcttgaccaccg

SEQ ID NO: 826159 - DNA, 646 bp, Homo sapiens
ggcaaatctaatccacacccccagtatcagcattagtggaaaatctcgtcctaataaacattttccctggtgacatttccacygtttgaccatttagctgtgtcaagagtactgtgtatgtgtaccgcattgttttaatgaagatcacccagccaatctcagataacccagtcactaaagtaaaattagtcatcgaatattgaaagaaatattcattatttttaaaaggttcagattttgctaagcattccaactttagtcagagcaaattaattccatttaaggatatttttcaatactgaaataatccaattagaaaagaaaattaaaggcagaaaaaagtgtacaggcaacttataaaagtcttaagacataaaaatgcagaagaaggaaatttcaaacacataactcaatcatgtgttctaagcacaccatgttagtttttaaggatttcagccctgcaaaaagcttcgtgtgcattgctgttgaatgacttacatttgaagatttgcttgctgtcagttcaatgtaaaagccatgagtataccttaccttggggaaaactctttcctgataacaatatttcccttatcaggttgttctacttgcacactgtgtttgctccaaaagccaaaatgcttttctt

SEQ ID NO: 826160 - DNA, 599 bp, Homo sapiens
acattcatttattattttacaaataaggacccagcataggagcagagatactaaatttcttccctgtttgattaagggatagatgctgggtggctttaataatttttagatggtgattgctaccaaagaggtgaggacccggtgtctgggggtagcaaaaggcctgttgaggatggagcccactaacatatcccaagagcagcctctgaataaactaaaagtatccaatggctataaatacagtagcatactctatactgtgaatgaatttctgcctggaacacatcagtcttcacttcaataccgaagtcattttaaacgaattaaaatgtttaggcaattggattatctgcatttttacttttcttatacaaataaagtccttgtagtttgtttagtttgggctttggcttttcagatacattaatttccaaagagttgattaaataataaagtgcaacttttctcataacttaaatggcagttatgagattaataatctcttatcaactaagatttgacaatatggtgtycaaaagcaaagttagaggaaaatgaaatacatggaaaatgatccatcccttcctctactgtaaaat

SEQ ID NO: 826161 - DNA, 546 bp, Homo sapiens
actttcctcactgaaataaatgagcatcttaattcttatcacagatcatgaatgtaaatgtgacattataggcacagcagtggaatcagwgtcaccatcattttatttctgcccccactttgttagtcatcatgcctgtaattacaaacctaattaattgcctttattagaatcttaacacatacacagataactcattattatccagtaggaggagggtatgaataatgaaaatccatcatttataaaataaccacaacagtttcatcaacaacaaaaaaatatcaatttaaccttctttgcttatgattttagtagtcataagtattgccagagacaactgttagaggctgaattgtatcctccccaaatccatatgttggagtctcaaactccggtacctcagaatgtgactgtgttaggagttagagcctttgaagaagtggtttagtgaaatgagacttttagggtgaaccacaatccaatatgacttgtgtccttaaaagaagatgaaatttagacagaaaagagacaccaggaatgcac

SEQ ID NO: 826162 - DNA, 439 bp, Homo sapiens
gacgggctgcaggtcccgagccctgccgcgcgggaggcggctgaggccccgtgagaattcgagcgccgcaggggcaggctggcagtgctgggggacccggtgcactctccgcagctgctggctcgggtgytaagcccctcactgcctcgggccagcggtgccgacccgccgctccaagtgcggggcgggcggagcccgcgcccacctggaactcgcgcgggcccgccagcgccaaccgcagccgcggttcccgcccgcgcctctccctccacacctccccgcaagcagagggagccggctccggccttggccagcccagagacaggctcccacagtgcagcggcgggctgaagggctcctcaagcactgccagagtggacaccgaggccgaggagacgccaagagcgagtgagtgctgctagcaggttgtcacctctca

SEQ ID NO: 826163 - DNA, 548 bp, Homo sapiens
caacttttgattttattagcaaagtaaaagctttcttaatattaaagttgacttccaattccatcttctttgccaacattcacaacaacaacaaaagtaatgatactggcttttccctttatagcatgtattacgtgccaggtatttttctaagtacttcacatataataactcgtttacatatctaagaggtagctattcagattattcgtattcaacaggagaaagaactgagatacagtgaagtcattctgtgccccaaatcacatagctggtggatagaagagacaggatttaaactcaagcatttgccttcaaaatccatactggtaaccataatactagtaaaatatgtcaccagtcacctctgctgcagacagggtggggctatgtgtataaaatttctccatcattttaagtgaaagtagacacaagataacatatttagaaaatgaaagttgggtctgccaaacttttgtctaccacagtaatattaaccaccctgtgttwgtctattaaccttgtgtaaagttagctttctccatata

SEQ ID NO: 826164 - DNA, 598 bp, Homo sapiens
acatactcagaacctggtgaaattaaaacaaatgtgcagctaaaaacttagaagatggcaatggggaaagaatgcaaaggargtagataatgtaaacccaaccccaggtcacaatgcagactttctacccattgtgagccagagttgggagagtagagaagataccactacaaattaagaccagagtgctggttgttacacttgtgtcaacattttaattgttaaactattgctgtggaggcttggaaatgacaagctaacttattaactgagattgaacagagaagagcaagacttatgtgagacttcaaacaggaacaggggacaaactagctccaataaaagcatttacaagcacagtaaaaggaaaaaaatcattggcctacctgcacgaaaagaaatatggaagggaaatctctggtttgaaagagtatgatatcaaaatgaaattatgatctactgaaaggaaagatcacaaaaatgacaaacatgtagataatataaaattatatttttgtatcttttcttaacttctttaattttttagcagtttagaacaaagctaacatatacagaatattagactacataaaataat

SEQ ID NO: 826165 - DNA, 539 bp, Homo sapiens
ggatcctgctcaccttttccctgcagggagaaatctctctgagaggatccctcctcggctccaagctgctccccatgggggaatggggtggcagagcagagtggcatctctgttttctgctctccacaaggtttctgcggcttctctgctgtcttggagctatcccagcgtggtttccatggtgtgtagtgtctttgtgttgttttgttgttttgtgggtggggcggggggaagcactgagatctcctagtccaccatcttgctgatgtcaccttgggaatggttttatactttaccaagggacagtccacagggtggattttaataacaagggccccaacttgtattcaaactaatgcttggttgatttcaaggtgccttgtgtatgactttgcaggaagctgrtatcttgctaagggaggcacattgtagctgtggggctcccctttagtacttgcttccaaagtgtattactatacctctgatgtgtcttccacaggccccagttgagtaagtgtgcctgtatcacttgttacttt

SEQ ID NO: 826166 - DNA, 558 bp, Homo sapiens
cttcccctttgccttccgccatgattgtaagtttcctgaggcctccccagctaggcttcctgtacagcctgtggaaccatgagccaattaaacctcytttctgtacacattccccagtctcagatagtggtttgtttgttttttgggttttttttttttttttttgagacagagtctcgctctgtggccaggctggagtgcagtggcgcaatctcggctcactgcaaccttccaattccctggttcaagcgattctgttgcctcagcctcccgagtagctgggattacaggcacacaccaccacgcccagctaatttttgcatttttttagtagagatggggtttcaccatgttggtcaggatggtctcgatctcctgaccttgtgatccacccgcctcagcctcccaaagtgctgggattacaggtgtgagccactgcgcctggctcaggtagttctttatagcaatgtgagaacagattagtaccactggatcatatggtagatcaaattttggattttcaagaaaccctatactgttctccacagtggttatgca

SEQ ID NO: 826167 - DNA, 528 bp, Homo sapiens
gatactaaaatgttctattgtttataaagcaattaagctagctgggcatggtgcctcatggctgtaatcccaggactttgggaggctgargcaggtggatcacctgaggtcagaagttcaagactaccctggccaacatggtgaaaccctgcctctactaaaaatacaataattagctgggcgtggtggcaggcacctgtaatcccagctactcaggaggctgaggcatgagaattgcttgaacctgggaggcagaggttgcagtgacccgagatcctgccattgcactccagcgtgggtgacaagagtgaaactcagtctcaaaaaaacagacaaacaacaaataaacaaacaacaacaaaaacaattaagaaaaaaaatagatctttctaatgtcctcggcaataaaagagagagaagaggccagcttgttagtcagcaaattcatttgttcatttgttttgaatgtcccagtagacggtatccaagcctgggaatcactaacagaatctaactgcttactgatcc

SEQ ID NO: 826168 - DNA, 628 bp, Homo sapiens
gggcatggtggctcatacgtaaccccagcactttgggagggcgaggtgggaagattgtttgaggccgggagttcaataccagcctgggcaacatggcaagaccctgtctctacaaaaataaattrgcctggcgtggtggcgcatacctgtagtcccagctgccctggaggctgagatgggaggatcatttgagcccaggaggtcaaggctgcagtaagccatgatgatgccactgcactccagcctgggcaacacagcaagaccctgtctcaacaaaaaaaagtatacacacacacactcacacacacacgattatttcaaaagagtttgcactagatgagaagtaaagcatgtgatctcaaattatcttgaagcaaggagtcctccaacagatttaaaaaatataaatttttttcttcctgatgataaaagtaatacatgctcattgtagaaacagtgtgaagcaaagagaaaataggtagtgcctgtcagctttcaaaaaggcacagagatgaaaatgccaacctgagcagcttgccctatagagagtaagttaggagccttttggaacctcatctgccaggactgagaaacagaaaagaaacaacccctttctccttgtttgcca

SEQ ID NO: 826169 - DNA, 628 bp, Homo sapiens
gggcatggtggctcatacgtaaccccagcactttgggagggcgaggtgggaagattgtttgaggccgggagttcaataccagcctgggcaacatggcaagaccctgtctctacaaaaataaattggcctggcgtggtggcgcatacctgtagtcccagctgccctggaggctgagatgggaggatcatttgagcccaggaggtcaaggctgcagtaagccatgatgatgccactgcactccagcctgggcaacacagcaagaccctgtctcaacaaaaaaaagtatacacacacacactcacacacacacgattatttcaaaagagtttgcactagatgagaagtaaagcatgtgatctcaaattatcttgaagcaaggagtcctccaacagatttaaaaaatataaatttttttcttcctgatgataaaagtaatacatgctcattgtagaaacagtgtgaagcaaagagaaaataggtagtgcctgtcagctttcaaaaaggcacagagatgaaaatsccaacctgagcagcttgccctatagagagtaagttaggagccttttggaacctcatctgccaggactgagaaacagaaaagaaacaacccctttctccttgtttgcca

SEQ ID NO: 826170 - DNA, 583 bp, Homo sapiens
aatttttgcttttgttgcaatttttggcatcttcatcatgaaatttttgccagttcatatgtccagaatgatatttcctaggttatcttctagggtttttatagctttaggttttacatttaagtctttaatccatcttgcattgatttttggatatggtacaaggaagggatccagcttcagtcttctgcatatgactagctagttatctcagcaccatttattgaataggaagttctttccccattgcttgtttttgtcaactttgtcaaagatcagatggttgtaggtgtgtggctttatttctgggctctctattctgttccattggtctatatgcctgtttttgtaccagtcccatgctgcttttgttactgtagccttgtatagtttgaagtcaggtaaacgttatgcctccagctttgttctttttgcttaggattgccttggctatctgaactgctttttggttccatatgyattttaaaatagtttttttctaattctgtgaaaaatgtcagtgatagtttgatagtaatagcactgaatctgtagactgctttgggcagtatgggcattttaa

SEQ ID NO: 826171 - DNA, 546 bp, Homo sapiens
tgtatattaatttggggataattgataattttattatgttgagtcttccaatccatgaacatggtattcttggattattggtatgtatcttcatttatttagatctttggtttctttyttcagcattttgtaattttcagcatgtaagacctgaaggtgttttgttaaatttatacctaagcatttcctttttttttgagtgattgcaaatggtattgtaatttaaatttttgtgaccttgtgtttattgctggccatgggcagaaggaatagaaagaggtagacagggcagccagctggagagggctaagctacaactgtacattgagcatgtgggcagagtgctggtggtaccaatcctggaggcaggtcagcatgggctctatagccccaggacatacttttcccttgatttcttcaggtgttcctcatccaggtcttgcatgaactccgtgtctatgacgtgggcaaggatgctgaaggaatgtgactggcctgtcctagaccatggtggccagtccttggtgttctccatcagccactgct

SEQ ID NO: 826172 - DNA, 598 bp, Homo sapiens
tctaacatttgaaacaaaaaggcccattagctcagagcatttttaatattctaaccaggatagaaatcccttaattaggccaaaggattagaactttgaaatggagcagtttatttcagtaaagcttttgggatgagagaaggtgggggcattgcttcaatctaaagtgatacacattttaatttaatctattgaaactgccttggaaaaacaccaaataaatatagatacttcagaatctttattacgttttatgcacatgctcaaaaattctcttggggaacaggaacttgaatagtgggcagaatttaaatagtgtaggtttccagggaaggcattccagatggaaatgaataataaaaataatctaaggagaagtagctcaatgattatatttgatcaaaggctgacacttcctattgaaactagtatattctatttagagaaaatatatttgtcttaattttagaaacrtgcctctattttatactaaagtacctctgtatttaaaacacttacatattttacttataacaaaatgatatgttggccattcctacagattcctaacttacattgtcattcatatttatatagt

SEQ ID NO: 826173 - DNA, 609 bp, Homo sapiens
tatatttcaatatagttttcaatgtattcacagcctattaatagacaatacccatgacactagaaaataattctgctgcttttagattattttgtaggtgcttacagcatgcacacacacacacatacacacacactgtaccctacctcactgggcaaatcacctcacttattcgtgcttcagcttcctctggtagtcaatgaggacagagtagttgcaaggattaaatacgtgcatacatgaaaatatttagaggagtggttgggatatactaggacctattatggtttttgttgttacctgaaataaaaagtcagagtatgttatacgatagatgctccttttatattttgcatttttatggtttgtaacaataattagtatatttatttccattgcttccttacaaattttaataagctgcttcaaatagctcactactgttacgtttgccaacccattcttcaaattcattccaataattttatactagtggtaagatgagtgatcggagtagggtctgaaagccctgtttattmtaagcttcttttctatccatagatgtgaattaaaatcttctttataagtgattctgaatgactttaatag

SEQ ID NO: 826174 - DNA, 634 bp, Homo sapiens
tatcagttcttattttatggaggattttttaaaattaaaagtgtttccgggtgtggtggctcacgcctgtcatcccrgcattttgggaggctgaggcagggagatcacttgagccaggagttcgagaccaggctgggccacatggtgaaaccccatctctactaaaactacaaaagttaaccaggcatggtggtacaagcctgtagtaccagctacctgggaggctgaggtgggaggatcatgtaagcccatgaagtcaagcctgcagtcagctgtgattgcaccactgcactccagcctgggcgaaggagtgagaccctgtatcaaaaaaaaaaaataaaaaattgtgttaagtttttgtcaaatgctttttcagtgtttatggagtttatcatacttttttcctattaaaaagttaacaagtattaacaagatgaattttattaacagtttttctgttgttaatctttgaatacctggaacaaaccccacttggtttaagtagcagactttcaatcatctctctggttattttgcatcagtaatcataagtgagataaaactgtatatttcttttaaaatcaggtttattttcagttacagtaaattcagagggtagattttgttattgttg

SEQ ID NO: 826175 - DNA, 615 bp, Homo sapiens
tgtactgcacagatcatcttttaactaagatctaaacgttcatctttgcttatcaarttaattatggtataaaaataaactccttattgttgaaatatatgtgcataaggacttgatatgatcttttaagaagtaaagtaactacttcaaggtaaaaatacacaaagtagtcagatagtaagttcttaataagtaactgttgagttgaatacatctaccatgaaaacattgataagatttatgatcacctaagacatatgaataaaaattgaagcattataacaaaaattgacagccaaaatgtttgggtgcctcttaaatctgattctcaggccaacaattatattaaaatggctcttgcagaagagagcaaaggactctttatacatctttttaatatataaatagcctgctattgacagctctgtattactgaaactctcctcctctgctttctccaattactgtctcctagttcctctcctattttacaaataatttgcaattttgtcttaggccaacttctatatattactctacaaactctttctgagccacttcttcattcttcaaggtttcaatgctctcctacatgataatgactctcaaagacca

SEQ ID NO: 826176 - DNA, 516 bp, Homo sapiens
tttgttttcgcaaaacagccttaacactccaagttagccacctgattgtttactctaattctaaagccaacttcatctattsatgatttggaaacaacactgttgaataaataattcagggttggttcttcctaaagataaagggtgacattgtcatcacagacctgccagcctgggaaagctcaacttaatttttggaaaaaatagagatcccattgtgcaggcacacaaaagtggctcaacaatttaacaacaactaaaacaattcagtagagacaaaccaagttgtaagattgcatgtccctcatagctcagagaaaaataattttatgagagaaatgagaacaattagtcctgaatatatagtgttcaaggatccctgctgtcataccagtcaataccctcaaactaaaggaaaaaaaaaacttaataagaaaaagataaaaagaaaataaatagccaaaatgactagagtctaaatttaccaatattgtatttaaaaaggtagcaataatt

SEQ ID NO: 826177 - DNA, 564 bp, Homo sapiens
tccagctgcagtctcctcaccttccctgttttccatacatgagcctgtgttggccagaacaacaaggcagggacctgacctctgtccacacctcttctgccctggtcccagtgcccggagctcctgcaggcagcatctcattcatcattagaatgaccctggattgatttcctggggcttcaatagtgaaacatcacaagaggtgtgcctgaaacaacagaaagctactgtctcacagttctgggggctggaattccaagatcaaggtgtcagcagggttggttccccctgagggctacgagtgaaaatcggttccagggctttctcctggcttctcatggttttctggaaatcttttgtcatttctccacttgtggactcatctccttaatctctcccttcatcttcacatcatgttctccctgtatgggtgtctgtgtccacagtctccaatttcagaaggtcaccatctatattgaattagagacctactctttttcactataacctcattttmactaattacatctgcaatgcacttgtttccaaataattcagtctgag

SEQ ID NO: 826178 - DNA, 525 bp, Homo sapiens
agcagcagaggcagggaggtagaaatttacataaagcaggaaagtggagatggtggttggtcaatgtgattagtcgtttcttagggaagttaggtccctgtcctcccacagagactgggagacgcggccctgtcttccggtattggctggaatgaacagcaagttttttgggcggccttggggtttcccaggcaggaatttaagagggaactgaagctgttgtcctagagacatggccttgagctattagacattatgctagtgttttcaagtctcttaatgtgttggtaggtgagaggagtggacaaaaacatttgtattgacagtctgtagttcttataggctaagtttgaggctggttgagaagagggctcagaggaggctgtctttggtcaaaacttaccctgttctagtgccacakaattgaagaaaaggtaaattgtcatagtaaatatagattttgtactgcaaattagacataaagttaaatcagaaagtgaattctgagaaaaataaataagattg

SEQ ID NO: 826179 - DNA, 613 bp, Homo sapiens
aactaaggttcagagaggctacataaattactcaggctccgtgaatgtcagatccacacacccatcctggggaccattccatggcacaaaccctcactgatgtccctgcagctaactcaggaagcatcctcattctgggttctagaggaaatgtgctggagagggcgtcaccctcccacccccattacctggaatgatggttcctatatcttctcgttcctcattcttcaataaaaacccctccagggatgttaatttaggggctgagagtgagtcagacacatcctaccacagtcccccttgactttgacaggtctgtcttttttccctgcatcctattggatcaggtgagagttcagttgttcttgttgtctttgaacatactttatttttaaagaagtcttaggttcacagtgtaattgagtggaaagtacagggagttcccataggcccactgttcccaaacatgcacagcctcccttattaccaaagtcccccaccacagcggtgcatttgttgcaattgatgagcytacattgacacatcaccaaaagtccctagtttacattaagattcattcttagtgttctatattctgtgaatttggacaaat

SEQ ID NO: 826180 - DNA, 621 bp, Homo sapiens
aagcactagacattcattcttgttttgatccctgctgccctcctagcaggcaagaagtctcrctctaccaaggctcagagaggatggcaacttgcttaaggtgacatagccagcctactgtggcaaattcagacatccaatgcaggtcattgactccaaagaccataggcctacactgccccagactatttaacacatcacttttattaggttgtatttgtcctaattcactccatacttcttaaagattttctatcaatggtcaaaaatacaaatacaggttgggcacagtggctcacgcctgtaatcccagcactttgggaggctgaggcaggtggatcacgaggtcagagatcgagaccattctggctaacacggtgaaaccccatctctactaaaaatacaagaaattagctgggcatggtggcacgtgcctgaactcccagctacttgggaggctgaggcaggagaattgcttgaacctgggaggcagaggttgcagtgagccgagattgcaccactgcactccagcctgggcaacagagcgagactccaaataaaaaaaaaatacaaacacaatctaagatatttttattaatagcccaggcttggattctgcaa

SEQ ID NO: 826181 - DNA, 599 bp, Homo sapiens
cttgggaggctgaggtggaacaatcttttgaactcaggtatttgaggttacagagaactatgaatgtgtcactgcacttcagcctgggtgacagagcgagaccctgtctttactattaaaaatatatatgtacttgatctgcaataagtatgtgaaaagacactcaacatgattagttattaaggaaatgtaaattaacaccataatcagatactatcacatatcagaataaatattaaatgactggcagtaccaactgtagatgaggatgtgcagtaactggaattcacacactttcatatactgtttgtaataatgatgagagtttgaattggtacaactatttagaaaaatgacagtatttattgaagttggagatacaaataccccataatgctgcaattctactcataaatatatactaatagaaatgtgtacaaatatcctgaaaaggcatatacaaggatgccattggcatcattaattacatcagccctcaaatggaaacaattcaaatgcygataaacattagaatgatttttcttgatggtggtatatccacacaattgaatatataaaacagaataaaagaatatact

SEQ ID NO: 826182 - DNA, 643 bp, Homo sapiens
tgcatggtagaagagaacaagcccatctgctgactgtgcattgcacaaaatgtcagcaaaagggtcagcggcagctgaaacccactaccyaagctttgatcttggcctatagaccacatctacctggtggaaaatatgacttcttcttcacacaaaggcatccttcattttcctagccatgttccctggaactacaattgtctaaaagtttgtttctactttgtcctttttctagagaaatctctcttcttctcactctccattttaaacaacaacacatgttaagtatagccctggatttggatgaatagctgccatctctagacccagctatagcccaatttatgctacggagtgcttacgtactataaatggggggaaaaatctgagctcagaaacctgcatccttgtgcttagttttccagtaaccctccaaagaactttatacttgactcttaaacttcttcatgataatgatgatgccagaggtctaacacagtttaaattagatagaatgacagatttaaaaaagtactttgaaaatgttgcaaaaaaaaaaaaaatcattattgctaggtgaaggagattttggttttggtttggtttggttggttggttttctttgacatattttttgattctc

SEQ ID NO: 826183 - DNA, 499 bp, Homo sapiens
gaaactgctgatttttgcactttgattttgtgaaccacaacttttctgaatttgtttatcagttctaacagttttaaggtggatcgttcagggttttctatatrtaagattatgttatcaagaaacagataattttattttttccctgttaggattcctttttttattgcccttacctaacagcactggctttgtactgtcccggatcttagaagaaaaacttttctatttttatgtttgagtatgatgttagctctgggattgtgatttatgccctttattgttttgaagtacattccctctatatctaatctgttgagagtttttatcctaaaacagtgttgaattttgtcaaatatttcttctgcttctattgagataattgtgttttgtttattctttatttctttattttgtcaacgtggtatattacatttcttgcatatattgaatcgtccttgcatccagggggtaaatctccgtttatcacggtgaatga

SEQ ID NO: 826184 - DNA, 542 bp, Homo sapiens
atctgaaatatctaagatgacaacttttgagactagtacctgctcttgtccgcccaaatacagcaggcatcaatggggttaaaaagtaaagctcttttactataatttgtatgcaattaaaagcatttaaaattaacattgggaataacagttttattacatttagaaatacttcctaaacatattcgggcaaaaaaatgtccctcacttccctaaaggcctgaaacgaagcaaaaggcattttcacaaggtgttcacatgcagaaggcacgtggttttcggcatcagctggtgtgtgcacattcatcaagagtcacacttccaacagcacctgctatgctcagatttctacaacagcaattaacggcagaaatggtagaatggtaaggacaagcttattgttaccctaaaattattacatattgccatatgttatttktatttgttaactatttaatcaacatcttatagtttgcctttttaaagtataggttaagttgtttgttgaagtaaggcactgattttcagtctacactgtgtta

SEQ ID NO: 826185 - DNA, 530 bp, Homo sapiens
gggatgcagagatggtttaacatatgcaagtcaataagggtgatataccacaataaacagaattaaaaacaaaaatcacatgatcatctcaatagatgcagaaaaatcatttgataaaacccaacatctctttataattaaaactctcagcaaaattggcatacaagggacatatctcaatgtaatcaaagccatctatgacaaacccatggccaacagaatactaaatgggggaaagttaaaagccttccttctgagaagcacaacaaggtaaggatacccactctcaccacttctattcagcatagtactggaagtcctagtcagagcagacaagagaaagaaaggtaaaatttctagaagataacatcggaaaaacccttctagacagtgccttaggataagatttcatgascaagaacccaaaagcaaatgcaataaaaataaaaataaatacctgggacttaattaaactaaaaagcttttgtatggcaaaaggaactgtcagcagattaaacagaaaacccaca

SEQ ID NO: 826186 - DNA, 530 bp, Homo sapiens
gggatgcagagatggtttaacatatgcaagtcaataagggtgatataccacaataaacagaattaaaaacaaaaatcacatgatcatctcaatagatgcagaaaaatcatttgataaaacccaacatctctttataattaaaactctcagcaaaattggcatacaagggacatatctcaatgtaatcaaagccatctatgacaaacccatggccaacagaatactaaatgggggaaagttaaaagccttccttctgagaagcacaacaaggtaaggatacccactctcaccacttctattcagcatagtactggaagtcctagtcagagcagacaagagaaagaaaggtaaaatttctagaagataacatcggaaaaacccttctagacagtgccttaggataagatttcatgaccaagaacccaaaagcaaatgcaataaaaataaaartaaatacctgggacttaattaaactaaaaagcttttgtatggcaaaaggaactgtcagcagattaaacagaaaacccaca

SEQ ID NO: 826187 - DNA, 619 bp, Homo sapiens
aaaatactagctaaccaaatccaacaacatatcaaaaagataatccaccatgatcaagtgggtttcatgccagggatgcagagatggtttaacatatgcaagtcaataagggtgatataccacaataaacagaattaaaaacaaaaatcacatgatcatctcaatagatgcagaaaaatcatttgataaaacccaacatctctttataattaaaactctcagcaaaattggcatacaagggacatatctcaatgtaatcaaagccatctatgacaaacccatggccaacagaatactaaatgggggaaagttaaaagccttccttctgagaagcacaacaaggtaaggatacccactctcaccacttctattcagcatagtactggaagtcctagtcagagcagacaagagaaagaaaggtaaaatttctagaagataacatcggaaaaacccttctagacagtgccttaggataagatttcatgaccaagaacccaaaagcaaatgcaataaaaataaaaataaatacctgggacttaattaaactaaaragcttttgtatggcaaaaggaactgtcagcagattaaacagaaaacccacagagtgggagaaaaatct

SEQ ID NO: 826188 - DNA, 600 bp, Homo sapiens
gatacaatggaggtacaggcattggatagatacagccattccaagtgggagacattggctaaaacaaaggrgctacaggccccatgcaaggccaaaatcgggcaggatagtcaaatcttaaatccccgaaatgatctcctttgactctatatctcacatctaggtcacactgatgcaagaggtaggttcccatggtcctgggcaactctgcccctgtggctttgcagggtacagcctcccttccaactgctttcacaggctggtgttgagtgtctgtggcttttccaggtacacagtgcaagctgtcagtacatcttccattctgtggcctggaggacggtggccctcttttcacagctccactaggtggtgccccagtagggactctgtgtgggagctcagaccccacattacccttctgcactgccctagcagaggttcttcatgagagccccaccaaacttctgcctgggcatccaggcatttccctacatcttctgaaatctagatggaggttcccaaacctcaattcttgacttctgtgcacctgcaggctcaacaccacatggaagctgccaagggttgagacttccaccctct

SEQ ID NO: 826189 - DNA, 586 bp, Homo sapiens
agcagctaatatacattttataaaataaaaagacattcctccaaacaaaataaattcctccttttttacctgccgacattctttgttatctttgagaaaaagtcattgaaaacattttcttctcmatctttccaattccctctcttcccattctttctaaaacacacttaaatcttatttttgcctttagcatttcactaaaactgctgttgtccctgtgacagtgatagggtgaattatttgctcatgatttgttctcctttcctttttcttggcatggctcaccacctactggtgttggtcttggctaagtggtttactttggtcaatggaatgtggaagaatggcctgtgtgtgagttttgagccaaggtaagtttctaccagccttcttgagacatgagggaggcatactgttggtagccatagctccttgagctccttcaatcctgtcccaggattataatgtatgaagtagacctaaactagacctcatatgtggcttatgagaatgattttctgagttgtcttatcttttatgtatcttcatacccactgtctatttccagcaattgaatcctgtgata

SEQ ID NO: 826190 - DNA, 578 bp, Homo sapiens
cttaaccaagtctgacagttgtggtcaagatactaaaagtgacacttgtaaagtgtcaatcagytggtggtttaggcaacaatagtctctgtctgtatcgtctccccttaaattttgtttgaaaatattttatttcataaccttttactttaaaatgtaaacaattgagagtttaattttgaagatgggggaacctaaaaaattgtaatacaatgataaaagctctacaaatctttatatcttcatcaaaaattgttgacattgaaattaaggttgaataagcaggatggaaaatagtttcgtattttgttggaagaggtgatatatgaaaaagagtttaagacatatgaattttttttcagcattcctatttgtacagaagaaaaagatttttttttctgaataactcttatttaaaatgaaaacaccattatgttggctaacaacagccaaagttctagtttttgaggccatatctttattcctaagtaaatgatgagaattaaaattaattttttcactcgaggccacttatatcagttttgcaaatatttgcttttttacttgtttttgtcagt

SEQ ID NO: 826191 - DNA, 622 bp, Homo sapiens
agttgtggtcaagatactaaaagtgacacttgtaaagtgtcaatcagctggtggtttargcaacaatagtctctgtctgtatcgtctccccttaaattttgtttgaaaatattttatttcataaccttttactttaaaatgtaaacaattgagagtttaattttgaagatgggggaacctaaaaaattgtaatacaatgataaaagctctacaaatctttatatcttcatcaaaaattgttgacattgaaattaaggttgaataagcaggatggaaaatagtttcgtattttgttggaagaggtgatatatgaaaaagagtttaagacatatgaattttttttcagcattcctatttgtacagaagaaaaagatttttttttctgaataactcttatttaaaatgaaaacaccattatgttggctaacaacagccaaagttctagtttttgaggccatatctttattcctaagtaaatgatgagaattaaaattaattttttcactcgaggccacttatatcagttttgcaaatatttgcttttttacttgtttttgtcagtagtttattatatggttctaagatctaacaaatatctttgctctcatctgtgtgacaagcc

SEQ ID NO: 826192 - DNA, 628 bp, Homo sapiens
agaaggagaaccagagtattggtggacagttctgatgagtatcactgatctactgctcatacactttgacagccagaaattgtcttgagcccctataggaaaactacagttgaacttggtgtagctcttcacctctgtggaagaagattttgctcctattgcaaaggaaaatatcttgtgctcctctaatgacatggctttattataacaaattgtgagtagccttaataagggaacttctaatagatttgtgatcagaaagaataacatcaactagctaagtatttaatattttataattatggaaggcttagtgtgtgcgtgatacaagacactgcatgcattaacttatttaatccccacaattgaccctgaaacaagtattattaccaacatttcacaaaggagaaagcaaaggcacagagaagtcaagtaactcacccaggctcacacagcaagggtgtgactgaataggaatcaagcacagaaagcctgactccagagctagccctttyggccacggcaatgtactgcttcaaaggaaatgacttggaaaaaaaatatttatttcttaaattaataatgtggcttccattcaagaaaaaaaaatatataaatcaaacattaa

SEQ ID NO: 826193 - DNA, 598 bp, Homo sapiens
tgtcatgaatgatataaactgaggtccatttagagcctttaactaattggttaatgactacccttaatattttattcaggataaaacttcttcctccaaacaaatgatgtagatatccaggatctcagagttttcagccaaatacttgggcaaattcaaaaatttttttagagaaaaaaattctacccacagacacccttgcagactttcctccaaatgagaattgaatggccctctgttgagatcagagtatgagtcagatttctgaaatttcaaatgagaaatgttagtctttctgtctgcacaccacacatataaagcatatggatgtcaccttaactgacgacacagaatatctgcactacagctctcctgagaggatccagccaagaatctactacagcccagcatttgcaaagagctcatttgacctatctcattttagagagtcaacctaaagaacataatagctgctcactcctctaggttcttctaattccatcattgcattagatcagcttgtgagataataaacttcatyggtcttattatcttgacttttttatcctacctctcctcaaaattcttagactttgta

SEQ ID NO: 826194 - DNA, 615 bp, Homo sapiens
atagactattatgaacatggacatctgacccatgcccttatyaagaatgtggggcatttctgtgaagtagtgtgcaggcggaacagggcctctgatcatgtaacctagaattggagaactgaagaatagggacaatctcttagccatctctatattcccattggctagcacagtgagagaacatcataggcaccctgaaaatataaataatgggagtgatgacttttatcatttagagagccagcagcactccatgagtccagctcccttctctccaaatagatgagaccttgagttaggagagattaatttcatttggccatcaggcaggagtgctcacttggcaatttttaaatgcaaatccaattgtggattgctcacaaagtaattctgcttattttctcctttttttttttgaaagaattgactaggatgcaaatgcaattacaagggataatgaccgccaccagttatattaaaacgtcagatataaagtacaagtaattacctgcccttcaagaaaatcttgatgtatggacccccaaagtcattatacagtccattcatcaacatttattcaatacccaccatgtatacaatattgtactaaatgca

SEQ ID NO: 826195 - DNA, 615 bp, Homo sapiens
atagactattatgaacatggacatctgacccatgcccttattaagaatgtggggcatttctgtgaagtagtgtgcaggcrgaacagggcctctgatcatgtaacctagaattggagaactgaagaatagggacaatctcttagccatctctatattcccattggctagcacagtgagagaacatcataggcaccctgaaaatataaataatgggagtgatgacttttatcatttagagagccagcagcactccatgagtccagctcccttctctccaaatagatgagaccttgagttaggagagattaatttcatttggccatcaggcaggagtgctcacttggcaatttttaaatgcaaatccaattgtggattgctcacaaagtaattctgcttattttctcctttttttttttgaaagaattgactaggatgcaaatgcaattacaagggataatgaccgccaccagttatattaaaacgtcagatataaagtacaagtaattacctgcccttcaagaaaatcttgatgtatggacccccaaagtcattatacagtccattcatcaacatttattcaatacccaccatgtatacaatattgtactaaatgca

SEQ ID NO: 826196 - DNA, 557 bp, Homo sapiens
tcctacttctttcttctctccttaacataaatcagatcatgtaatgctactgctaaattctttcaatgatttcctatggcactgaaataaaattcaaattcctgaccatgacctacatgacctgattcttggcccaatctccagtgtcatcctactttgtactactctccccacaactaactatactgcagcaacactggccttctttctactcagcaaacacatcaaaccaattcagtgtcagggcctttgcacttgctatttcagtttcttgccaatttttagctcaaacgtcacctcttcagggaagccttcttctctatcagagtctcttattttagtttttttataatgcttactactatgaaatttactcatttatttgttatttatttcttgtcttcctcttctaggagtctgttttctctctttcaccactgtatctcttgtttatgaaaaaytccataactgggttgaacatatgaatgtgtgaatgaataaggttgtcaaagtccagttgacagcattacacagatagttatgtgtgttggttgggg

SEQ ID NO: 826197 - DNA, 445 bp, Homo sapiens
ggagaactatagagaatactttatctcacatcctttatcacagcaagttaccctaacgctggcttttttytagtttgtgattttttccagtttatggttaaccagttatctgtttcctatgacaaatcccctgccttaattttattctactctgaatccttcagtgatttctaataggaaatataagtcattagcaaactctacagggcaaataatttcaggtttcactcttacactctttaaatagtatcttgttggtaatgcacattgtattttaaaagaattagaactgaaaatgcaaataaccaacacgtattagtgattgctacaagccaggcactattctaagcactttacttatattaactctttcaatcctgacaatcctattaagattggtactgttattatcaccattttaataatgaagaaactgaggcataga

SEQ ID NO: 826198 - DNA, 558 bp, Homo sapiens
caagattgtggccaggatgaaaagaaaccaataaagagktgatgaagcttcctacaactaacaagggccagaaacctttatcattctgaggcctgaaggaacaagatataagaacctagagacaattatagctaagggagaggaaatctggaagaatccatgtgcttagattgaggattacagccactgccaaacaatagaccggcacagacagagccagaggaacaaatagcccaacctctctcttatctacatctaaatctgctgctggtgtctcccactggtcaaacctaaacagtagctacagttcatgagaacactggattgttgcagtccttagatatctgcttcctggggcacatggtaaactggtaagaggggcaggatgaatctggaggcacaaatggagattacctattacaaatatacaggtatataacttcagagaaactttcagcataacttttgggagtagaaagcaacatatgcacttctaccaccagagactaaaatttaattttttttccatatactgtaagtactctaagatgtttagaa

SEQ ID NO: 826199 - DNA, 558 bp, Homo sapiens
caagattgtggccaggatgaaaagaaaccaataaagagttgatgaagcttcctacaactaacaagggccagaaacctttatcattctgaggcctgaaggaacaagatataagaacctaragacaattatagctaagggagaggaaatctggaagaatccatgtgcttagattgaggattacagccactgccaaacaatagaccggcacagacagagccagaggaacaaatagcccaacctctctcttatctacatctaaatctgctgctggtgtctcccactggtcaaacctaaacagtagctacagttcatgagaacactggattgttgcagtccttagatatctgcttcctggggcacatggtaaactggtaagaggggcaggatgaatctggaggcacaaatggagattacctattacaaatatacaggtatataacttcagagaaactttcagcataacttttgggagtagaaagcaacatatgcacttctaccaccagagactaaaatttaattttttttccatatactgtaagtactctaagatgtttagaa

SEQ ID NO: 826200 - DNA, 537 bp, Homo sapiens
ttgtaggggaaaaaaatcttttttcttgcattttctagcttctagaggctgcttgcattcctggctcctggcccatttctctttcaaygcagtgtagcatcctcaaatctctttaaatgtctaacctctgcttccatcaccacatcttaggtgacaatgactgtgactctgcctattaatgggacccctgtgattacactgggcctatcggggtaatccatattcctcttcacatctcaagatcctatatcacaggtttcagggattaggatgtgcacatacttgagaagggggaatattaaactgcctaataggaactggaaacatcaatttgagtgtgatgtccaagtttcacacacatacacacacacacacacacacacacacatatatatgtggtgatagatttgtgtgaagttctttgtgtgtgtatatatatttatatacatatttacatgtataagcatacatatgcatgtatgtatgtaatttctttgcttttttgttgagagaacctagaaacaagatcacccagta

SEQ ID NO: 826201 - DNA, 453 bp, Homo sapiens
aaagtaggcgcatacttttctaccagtcaagaagaaatcctttaaaatagacttcaggttgactcacttttytatttgtcatggtgccgaaaagatgattgacacataaaagctgagcaaataaatatttgctgaatgaatggctttccataatcctcaactactctttattatttgtgaaagtaatctagtaataagacattcaaacaaatttcagtgtgctaattgcactttgaaatttacgtacaagtctgtagatttgcatagcttcatgactttatttcttctaggcagataatttcataaagactcatcttgctgtactggtttgacaacataagaatgtaataattgttgatttattagccaggctctgcccaactttataagctcttaaactgatactctggtaatatcaacaactttaccttattttggtgaattgccatgctt

SEQ ID NO: 826202 - DNA, 586 bp, Homo sapiens
aaaaaaactagagaatgactacaagtaaaataaatgtcagcaaaaaaaaaaaaaaaaaaagwcaaaaacagacattgaaacgatggtatattttacagaaaaaaaaaggccaagaattgaaaaacttaataaagttttaaaaattggcaacattaatcaagaaaacggaaggcacatataaacaataatacaaatagagtcaaggtataggcacatatgaagcaggcatttatatcctgataataagataatagagaataatatgaaaaggttgaaatttagatgaaatggcacactccaaaaaaaaaaaagaatcacaagaaaataggaaatacaatgcttcaggatacctacatatgtggttaaatactacaaagaaaagtaaaagtatcattaacataaattttagaattatggcttctttggtttgaggagaaggggctgtataagggagggcacattcctaaactatgtggagggaaatgtttgttccttttgcacatattccttaaaaagtgtaccaagttagatatgcactctttagtatgtcatatgtattcaaaaataacaaaataaaatatataaa

SEQ ID NO: 826203 - DNA, 547 bp, Homo sapiens
tttactagtaaacaacagaaacctactccagaagtttaagcggaaaagtaatttatttaagtctatcgtgaggactgctaaggacaacttaagagtttagaactgctctgtggaaatgtgaataccactgctattggcacaggaagcagaattctcaccactattgctgtactctggaccctatcactagagccactgccacagatgcctctgaagtagaggtctctgctgccaatgtggctgaattctgcaagcacctactttgttgcattgatgctaatctatgggtgcatctgattggtaagcctaagttatgtacctgaacccgggcttcaaagtaaactgggaaagatattttaccttctatcttggggaggtagcagtgggttaagagggaaattttccccaactacaaatagtgtcccaagaacctgagaaacccaaaagaagagtaaatgtccattataatcttctcatagcaaattttaagtagaatgaactttayatatgtgtatatatatatatatatattattttttttttcttt

SEQ ID NO: 826204 - DNA, 354 bp, Homo sapiens
ttaaagggcaaaaggaactttgcacatgtaattaaggtttctactcagttgtccttataataagcagattattcaaatagaccaggcctaatttgatragcgctttgaatgcagaaagttctctccagccactcaaacaagaggaagtcgagatttaaaacattggaagtatttgatgtgccattgctagcttggaagtggcaggaggccatgaataaaggtcagggagtggcctttaggagctgaaagcaacacctggccacagccagcaaggccctcagacctacaagtgaaaagaactaaatcctgccaaggacctgaattagtttgaaagtgaattggttcccagagcct

SEQ ID NO: 826205 - DNA, 354 bp, Homo sapiens
ttaaagggcaaaaggaactttgcacatgtaattaaggtttctactcagttgtccttataataagcagattattcaaatagaccaggcctaatttgataagcgctttgaatgcagaaagttctctccagccactcaaacaagaggaagtcgagatttaaaacattggaagtatttgatgtgccattgctagcttggaagtggcaggaggccatgaataaaggtcagggagtggcctttaggagctgaaagcaacacctggccacagccagcaaggccctcagacctacaagtgaaaagaactaaatyctgccaaggacctgaattagtttgaaagtgaattggttcccagagcct

SEQ ID NO: 826206 - DNA, 551 bp, Homo sapiens
gtctccctctgctacctcttatgtcataaactgcattgcagtcaccccaatgtggaaatctcacattgtgtattatgagtctttttccatgacactagtgttacgatgagctttttagtgtttttgtattaagttctgatgctttgaaaacattctggcccatgcatacacttccacatacataatgaataggttttacagattaagactcttagactaaacagtctttagtctaagagtgatttggcatcttaaccacccctgtagttgaatttaagttgtgtttgttttgttttgttttgttttgtttcattttctttaaagaaataggtggactggcttgtctgtgtggaactgtaaacagatgatgatgtcatcattatgaattctcactttcaaggcctttaagaagtggtatgggctttgaggtcatacaaatctagggatgtaatccctagggatgtagtcgtagccaggggatttagatttacctagccttcttktcctaataacagtaatggtagatgtgtggattacttgagaaaatgcat

SEQ ID NO: 826207 - DNA, 656 bp, Homo sapiens
actctctctccctagaaatgttatctcatctaggtaataaayacctgaaattggtgaatctgctattaaaaaaataaatcttttccataaaaacagtgtttccttagtcttcaagattcatgtatgactgtcatgatttctgccatagtctatttttaataataatttttattttacctatttttatgtttggtatcttcctaaacaataatctttatgaaattactacattcatatgttagttacaagggttaaaatgaatacataagtatcaaaaaatgttatctatgaccacccaaagtatcactcagtgatgtgtgcattatattttgtgaaacactgagttaaatattctccccaaattgtcattccttcctgaaacacaaacaattttgggagacaatttagcattatatatttaatcccattaaaaatgtccgaaagagaggagaaaggggccaagcatacttcccacattgctttgagaaagtcaagaaaatgaaaaccttctgtcctgcaggatttctgttgctaaaccaccaaaagtgtaaataccaatataaatttttaaaacttatgatacatgttatttctaatgttcaattatatgtctacacacacacacacacaaatatatacataaacatgggtgtgca

SEQ ID NO: 826208 - DNA, 656 bp, Homo sapiens
actctctctccctagaaatgttatctcatctaggtaataaacacctgaaattggtgaatytgctattaaaaaaataaatcttttccataaaaacagtgtttccttagtcttcaagattcatgtatgactgtcatgatttctgccatagtctatttttaataataatttttattttacctatttttatgtttggtatcttcctaaacaataatctttatgaaattactacattcatatgttagttacaagggttaaaatgaatacataagtatcaaaaaatgttatctatgaccacccaaagtatcactcagtgatgtgtgcattatattttgtgaaacactgagttaaatattctccccaaattgtcattccttcctgaaacacaaacaattttgggagacaatttagcattatatatttaatcccattaaaaatgtccgaaagagaggagaaaggggccaagcatacttcccacattgctttgagaaagtcaagaaaatgaaaaccttctgtcctgcaggatttctgttgctaaaccaccaaaagtgtaaataccaatataaatttttaaaacttatgatacatgttatttctaatgttcaattatatgtctacacacacacacacacaaatatatacataaacatgggtgtgca

SEQ ID NO: 826209 - DNA, 622 bp, Homo sapiens
ttctttcacacatgagatagtaggggaattagcccttagtgtcatatttttaaaattgggtgtttgttttttcttgagatgggatctcactctgtcacccagtctggagtgcagtggcatgagctcagcttgctgcagccttgactgttagagctcaagcgattcttccaccttagcctcctgagtagctgggatcacagatgtgcgccaccatgcccagctaattttttaaaattatttgtagagatgaggtctcactacattgcccaggctggtcttgaatttctggattcaagtgatcctcttgcctctgcctgccaaagtgctgggattataaacatgaaccaccatgcttggccagcatcgatattttaaaaaatcatttagttaaaattttgtttgtaatgtaggaaggttaattttagtatttctgaggcaggaagataaataagatatttttaaaaagtatttcaatagactatttttgaaagcagttttaggtttaaagcaaaactgactggaaggtacagggagtttcagaaatacctgatcagccccgcccccctcccaacacacrtgtacacacagtctccctcaccattaacatcccacactagagcag

SEQ ID NO: 826210 - DNA, 568 bp, Homo sapiens
ttcaagattatggcctctgagagttctgggaacaacttacttgacctcttaattgctctccattcccctaaatggtagaaaatcacacagttataggtgcataaatactaagttaataaataaagaggttaactctctgttgatggagaaaagaaaaaaaactctgtaaaatatttgaacagatttattctgaaccaatacaagcaactgtggcccaaggaacagtctcaagaggtcctgagaaagggtgcctgaggtggttgatgattgagttacagtttggttttatacattttatggagagcaatattataagcaaatatttaaatcaatacattggttcagaccaaaaaggtgggacatcttgaattggaggtagggtgggagaagtagggtaggcttacaggtcataagtgggttcaaagactttctaattggcaattagttcaaagagttaagctttgtctaaaggcttgaagtcaatagaaagaaattcttgagttaagataaggaggytgaagaagacaaggttcttgtttcgttatgtagatgaagcttctaggtagca

SEQ ID NO: 826211 - DNA, 592 bp, Homo sapiens
cagtctgtacgtttgtttattccttgttcattcagtgaataatttattgattgcttacagtggactaacagtattacttgctggatgtaaaactgaataggttagaattagtccctggcctcatggaacttagttttgtaaaagacaagacttggctgttatctatacatatacatatacatatacatatacatatacatatacatatacatatacatatacatctacatctacatctacgtatacatatacatatacatgtatatgtttgacttctttggtttctttaataactttgggatcacttgagggaagagattatgtcttaatatacgaatacatttttccatacatatatacatatataattggtacacttgtatcttttaattgattggagggcattgaaagcctactgatcttatctctgcagtgtgtgtcttggttcttatcattaatatcaagagtagcctttccttctcttcagctaggtacgtgttgtcagagttctttacttattcactatttcccaggttccttgacacacagaatacaarcaatagtttccattgctgctccagaaattatttta

SEQ ID NO: 826212 - DNA, 571 bp, Homo sapiens
ttccaaaagcaccctgaagatcagtagtagccaaaccctccctcacaatgcctacatcattcacctcacctcatctctttatgtaatcattgtatcatctcacatcaatacaagaaggctgagtgcaatacartaagatattttgagagagagaccacatttatgtattttgtattataacatattgttgtaattgttctagtttatttttagttattgttaatctcttactgtgcctaatttgtaaactttaccatagatatgtatgtgtaggagaaaacatagtagttatagggctcagcactatctgtggtttcaggcatctactgggggtcttggaatgtattccccatggataagggagggaccactgtagcacatatttgcttacagaatccaggaagtccaacagctttccttcattctctgcatctttctctgtcctctttagttcaaactggcaatgtctttgctgatataatcccatctctattcctggcttctgctgagatgtctgattaagtccatgaattgcacccgtgatctttttcttaaatgggtattcagccac

SEQ ID NO: 826213 - DNA, 576 bp, Homo sapiens
cacctgttgcatgtccaagtttcagacacaaaaacaaacgtgctgagttttgtttttggctagaataaggtctctggatttgagacatctgtaaagtacacagatcaggaaaactgccttctatagcaagtatgtgcaaggtatgctcttagaagcagtaactgaggggacaatgtccattcaggccagccagagaatatgtcatccacctcagagaaaggtatagggctggaggtccctgagtaggtagggggagggcagtaggaaggattctatagagtccaacaaagcattctttgagagaaagaaccagcatttatttgcacatctgccaaactgatggcctcaatgccagattccaatggcaatgatcaagttaaaccttgcgcttttcttctagttcctcttctttgcctgatcttaaaggagccagacgcaacagctaacaagtggtagaagaaatagaacaaaaccagtgaagaaataggccatgttttggcccattcctcaatgctgccggttgtagaacctgggttatgcctaagccaagacyggggaataccaagatgaacagaa

SEQ ID NO: 826214 - DNA, 622 bp, Homo sapiens
tctatttctgtgagtcttgaaaagagggagagggggactctcccagatgcccccaatccagcagcaatctcctttcccgtcagagttgcatcacattactggcttaaaccaaccccaggcagaggaacagaaytgtcaagtttggcttcgaggctttgccttgtagtagccccaacctcccctgaatcacctggacccacgggaaagggtggataaggaagcaacattgtaattgttttcggaaggagggttgaggggatggatgctggttagccagacaacagtgtgtgctgtgccatatgtcatgtatatatattaaaaaatatttttcttattcatggaggttagacgatctaagtcacataggtagtgttacaaaataatagatgaaatattgtagtgtcacataatgttatagagtacagagtgttaggattattagcaaatgatctaacaagacagcccatgctggtgtgcaaaaacgaagaaagtttttctactgtgtaggtaaaactcatgtctgattgtaaggcagagggaagtatcaaataacaaagggctgtctaaggagttacaacaatgaggagtggcacgcatattctctactccctcctgtgttaat

SEQ ID NO: 826215 - DNA, 471 bp, Homo sapiens
cattactggcttaaaccaaccccaggcagaggaacagaactgtcaagtttggcttcgaggctttgccttgtagtagccccaacctcccctgaatcacctggacccacgggaaagggtggataaggaagcaacattgtaattgttttcggaaggagggttgaggggatggatgctggttagccagacaacagtgtgtgctgtgccatatgtcatgtatatatattaaaaaatatttttcttattcatggaggttagacgatctaagtcacataggtagtgttacaaaataatagatgaaatattgtagtgtcacataatgttatagagtacagagtgttaggattattagcaaatgatctaacaagacagcccatgctggtgtgcaaaaacgaagaaagtttttctactgtrtaggtaaaactcatgtctgattgtaaggcagagggaagtatcaaataacaaagggctgtc

SEQ ID NO: 826216 - DNA, 597 bp, Homo sapiens
caagaccatacaccatgtgtcactagagatattttggcttccacttccactgacagtccttctgcctggggatggtgccagcaagtgtacaacacccatctctggggccttcatttgcagcccaattttttgttgcaaattttgtttccccaatatgcaaagaaagacaagtactcactggggctacctcaataagcgctgctttgaggcagaagaacagttacccagttttcaggtaaataaatattttgttttatgaactagaaagtaatatctggaggactaatggctttttggcctcattttaggcagataaattttccatttcttatggctaaaccaattagaagaaaaaaacctgtgtttctcaacccagatccattggcctaataactaatgaaaattcctccataaagttgattctagttttcagtgctattgtgtattgtctttgtttttgctttcaaagataytttagtgggaatttggggattactccatttcagggacttctagctaggctctgttttaactgaaagctggtggtactgtgatagaagctttaaacgtgtgtgataatagcttgacgcagttgca

SEQ ID NO: 826217 - DNA, 507 bp, Homo sapiens
aacgttacattatcacagttatgctttctatttctrtggcttcagcaagaatttcttatgcaatttgaaagaagaggaagaatagacaagcagcagaaatcatggcatggtggtgggatagctatcagaaacagcaacagcaaattatagacttttttgcaaaaaaggaaggttagcaacaaggagaaggaaaggtgtagattcataaactgcagagtagaggcaaactaccgtcttgtcaatagtcccttcacccctgcaagcacatacacagaagaaaacctttgcatatcttgctcctacttccgtgcatgctctctttattaattcattagaaggttacgccaggcactgtgtcaggttctgcatattcaacgatgaacaaagcagatatgatcactatcattatggaactcactatgtggtaagagagataagcactaatcaagcaaaactcaaaactgtaaaagtgcaataagttctaaaagatgtgcatgagtgatgaga

SEQ ID NO: 826218 - DNA, 507 bp, Homo sapiens
aacgttacattatcacagttatgctttctatttctatggcttcagcaagaatttcttatgcaatttgaaagaagaggaagaatagacaagcagcagaaatcatggcrtggtggtgggatagctatcagaaacagcaacagcaaattatagacttttttgcaaaaaaggaaggttagcaacaaggagaaggaaaggtgtagattcataaactgcagagtagaggcaaactaccgtcttgtcaatagtcccttcacccctgcaagcacatacacagaagaaaacctttgcatatcttgctcctacttccgtgcatgctctctttattaattcattagaaggttacgccaggcactgtgtcaggttctgcatattcaacgatgaacaaagcagatatgatcactatcattatggaactcactatgtggtaagagagataagcactaatcaagcaaaactcaaaactgtaaaagtgcaataagttctaaaagatgtgcatgagtgatgaga

SEQ ID NO: 826219 - DNA, 507 bp, Homo sapiens
aacgttacattatcacagttatgctttctatttctatggcttcagcaagaatttcttatgcaatttgaaagaagaggaagaatagacaagcagcagaaatcatggcatggtggtgggatagctatcagaaacagcaacagcaaattatagacttttttgcaaaaaaggaaggttagcaacaaggagaaggaaaggtgtagattcataaactgcagagtagaggcaaactaccgtcttgtcaatagtcccttcacccctgcaagcacatacacagaagaaaacctttgcatatcttgctcctacttccgtgcatgctctctttattaattcattagaaggttacgccaggcactgtgtcaggttctgcatattcaacgatgaacaaarcagatatgatcactatcattatggaactcactatgtggtaagagagataagcactaatcaagcaaaactcaaaactgtaaaagtgcaataagttctaaaagatgtgcatgagtgatgaga

SEQ ID NO: 826220 - DNA, 479 bp, Homo sapiens
aacctgccgttaaaaacaatctcatttaaatttacgatggatcaaattaatcttaaaataatccgaacttgcatcacaaatggtacatacctttttgtctaagccgtaagcaatagcagcagcagttggctcattaataattctaagtacattgagaccagcaatagttccagcatctttggtagcctgacgctgagagtcattaaagtaagctggcactgtgaccacagcattggtaacagtctaggaataaggaaaagaccacagattggtaactattatacttacatatatgcaaactccagcaaatggattaatgctggtgaaagaacagctggagcaccccccccmccaaaatgtaaattactgtgtaattgtcaagattcactggtttctggtgttgacagacccatctacctagagagcctagggcactgttgggcacgtggtcttaaccctgagctgagccccatctgttc

SEQ ID NO: 826221 - DNA, 442 bp, Homo sapiens
ctggttgaaagcaataagcctgtggtgagttgggttttcagggaacagactgaaatggagatttgcatgcaggaggtctctagactgaaatagagatttgcatgcaggaggtctctagcagagcaacctggggtacctttaagggagtgagggaagcggggctgggcagagatgggctgtgatgcagacacagcagtagccttggccaaggttctgagggttctaaagttggggtggcccttcgaaggcaagggacccaggcttttgttctcccataccaacctgccattggatagtgactgcccctggggaagggtggtcactttgtgcacagcagctccacgtggctgaggcagtgtttagggaggaamtcagctgtgagccatcagcagacaacactcccagcgtctggagaaatgagtgcctcagtacagaagggcct

SEQ ID NO: 826222 - DNA, 359 bp, Homo sapiens
ctaatctttgagattaatccagaggcaagcagagatctatttcacccctaccccacaaaacccctcttaaatatccaagatttttggtgggctgtggtgtcacaggtgagtgaattgaaatcattaggtagttggatgtatttcattcagcatgcaggactatctggcagcagagactagaagggccaaatcctacttctctggattttgcctctgcaataatctaacarccatctgcttacatcactttttagaataaccagtcatttaatgtcgttcattcatttaataaatacttattgaacacttgctatatgtcagtcaccatctgcagcgctgggcatacagcagtgaacaaa

SEQ ID NO: 826223 - DNA, 576 bp, Homo sapiens
gatgcttcatgggcaagggcttttaattcttaattattattattattwtttgagatggagtctcactctgctgcccaggctgcagtatagtttgcaatctcggctcactgcaacctccacctcccaggttcaagcaattctcctgcctcagcctcctgagaagctgggattacaggtgcccaccaccaagcacagctaatttttggtatttaaaggcaggtcctttacattcacacctaaagaagccacaggtcatttggtgctggaacaatgtcttggctgaggctgcagctctgtgacaggtagctcactgaactctgtgggttgtttttagtgggagatgggaatgaacaggaggggcacctcaggagggcccatttccagagtcaggtgggcttcctacttggtagcagactgtccctcccctttgggcctcaccagcacagcattttacaaactttgttctcttctccctggaaaccagtgctgccacttaagaatcgatgcttcctcagggccatttacccaaatagccatctcaggaaaaattagccaagttcaaaaaggcatctaagc

SEQ ID NO: 826224 - DNA, 612 bp, Homo sapiens
tagacagcacccaagccctgagggatccaccctrccatccagacacctcccaccaggccccatctccagcagtggggattacaattcgacgtgagatttgggtggggacaaatattccaccatgtcacttggctgtatcagtttagggaaatgttatgacttgctttacactcagtcagcctctgttttgccattgtgcatgaataatttgcttgggtgtattagtgcctgattctgctgactcattcgttctgctcctcagggaataaaatgatgaaaagacatctctgcttttgctctgagattttgtttttgtctcgttcctatacagcgactgcttcctctacctcctcttcagctagcagctgccacggggaactctgtggctcaagcagcagcagttgaaagatactctcactgcccacttcctgtagacaaggaggttttggtgggctgcttaggaactgtgccagccttgtgtctgactggtaactgactcatgagaaaagcagccttatgtcggaaagataagggccaacaaattgcctccaggtggtggtagtttggaggtgactgaccattcatttcctttctttgggaggagacagtggg

SEQ ID NO: 826225 - DNA, 638 bp, Homo sapiens
gtgaagaattgctgggtagccatcagaaggtaggagaaaggcattaaatggattctttctgagagcctccagaaagaatcaacatttctgacaccttgatttcagacttctggcctccgtatctgygggagaatatatttattttgttgtaagtcactcagtttgttatagttgtcctaggatactgatacacaacgttattttttaaataggtaaaatatatgaaaacatatttcacaaaagaagatttttctatggcaaacaggcatatgaaaggatgcacaacatagtttttcattaaggaaatacaaactaagacaattatttactagtacacacatattagtagggctaaaatatcaattactggtgaggatgcaactagatctttcacacattgatggtagggatgcaaaatggtacagccactttggaaacagtttggcaacttcttataaagttaaacctagtcttacatggtccagctgaccaaacacgtgaaaacttaacgtcaacacaaataattgcacaaaaatgcttatatcagcattattcataattaccagaacccaagatgtccttaatacgtgaatgaataaattgtggtgcatgcatacaacggaataccattcagcaat

SEQ ID NO: 826226 - DNA, 430 bp, Homo sapiens
tgatttgactactgatacctctgtatgctttcccgtgctgtgtttttcagctttaccaggtcaattatgttcttctctaaactagttattctagttagcaattcctctaaccttttttcwaggttcttagctttcttgcattgggttagaacatgctcctttagctcggaggagtttgttattacccaccttctgaagcctagttctgttagtttgtgaaactcattctccatccagttttgttcccttgctggcgaggaattgtgatcctttggaggagaggaggcattctggtttttggaattttctgcttttttgcacctttttttccctcatgttcatggatttatctacctttggtctttgatgttggtgaccttcatatgcggtttatgtgtggatggatgtcctttttgttgatgttgatgct

SEQ ID NO: 826227 - DNA, 529 bp, Homo sapiens
cttgtttttctcaggtttgtcaaagatcagatggytctagatgtgcgatgttatttctgaggcctctgttctgtttcgttggtctatatctctgttttggtaccagtaccatgctgttttggttactgtagccttgtggtatagtttgaagtcaggtagcatgatgcctccagctttgttctttttgctttggactgtcttggcaatgcaggctcctttttggttccatgtgaactttaaaatagttttttccaattctatgaagaaagttactggtagcttgatggggatggcattgaatctataaattaccttgggcagtatggctattttcacaatattgattcttcctatccatgagcatagaatattcttccatttgtttgtgtcctcttttatttcattgagcagtggtttgtagttctcctttaagaggtccttcacatcccttgtaagttgtattcctaggtattttattccctttgtagcaattgtgaataggaattcactcattatttggctctctgtt

SEQ ID NO: 826228 - DNA, 628 bp, Homo sapiens
ggaatgaagctgcagaccttggcggtgagtgttacagctcttaaggtggcgcgtctggagttgttcgtttcttctggtgggttcgtggtctcgctggcttcaggagtgaagctgcagaccttcctggtgagtgttacagctcataaaggcagagtggacccaaagagtgagcagcagcaagatttattgcaaagaaagaaagaacaaagctttcacggtgtggaagcggaccccagcaggttgccactgctagcttgggcagcctgcttttattctcttatccggccccacccacatcctgctgattggtagagccaagtggtctgttttgacagggcgctgattggtgtgtttacaatccctgagctagacataaatgttctccaaggccccaccagagtagctagatacagagtgttgattggtgcattcacaaaccctgagctagacacaggatgctgattggtatgtttacaaaccttgagctagatatggagtgccaattggtgtatttacaatccctgagctagacataaaggttctctacgtccccaccagactcaggarcccagctggcttcacccagtggatcccgcagggggtctgcaggtggaggtgcctgccagtc

SEQ ID NO: 826229 - DNA, 579 bp, Homo sapiens
gtaaacattcatgtaaaactgatgctacacaaatcccttccagcaatcagtttcataaaacagcatccagagcttatccctaccctgactctaccagcactgaaagttttcaaattatagttgaattaccatttccaaaggattacatcaataagctaacacacacacacacacacactctctctctctctctgcttctctccaattgccctttcatccatgccatagaatttcagacctccagtttattttcagagcagccagtcaacagatcctgtctaaagtcaatagaaatacaagcatactatttaaaatcacaataataaccaacaaagaacaaaacaaaaacctattcaaagtgttcacttctagaaaattcgattttagaaatgaaaagtgtgaatggctcagaagaaatgctttgctttatattttatacctgtctgtactatgcacgttccttgatctatgcatatgattcctataactgtaagaagcaagtaaaaaatgagtaaacaacatcctcatcaataagattagctaaayaaagcatatgcatacagtggaacattatgtaga

SEQ ID NO: 826230 - DNA, 602 bp, Homo sapiens
ataaagcatatgcatacagtggaacattatgtagatacaaaaaaaagcacaatatttagtgatataaaaagataaccttagaatgccagtttttttaagttgcaaaggagtatagtctgattcaactgaagagaaattacacacatgcacacataccacagacctgtataaacagagatatcatggaaatataccaaactgttgggacttggagaaatggggagagagggtctttcactttttattttctatgcttttgtaatttatgagctttatacagtgagcatacagtgtctttgcagtttaagattctttaaaatacacacacacacacacacacagaggtgtgcttcagacccagaaaatatgaagcaaagagcttacatcatatttgtaaattcttagaaccttgatagagaaagaattttaagaggcccagaaagaatcgatgcctttcgcagagtcacactgctggaaagtgtcagaaccaggtttagatcacaggcatactgcaggaggaggcagamaacgctttcagaacttcaagttctaacaaataaatcaatcattgtgccttctccctacttcacttaatactttaa

SEQ ID NO: 826231 - DNA, 635 bp, Homo sapiens
tagagagatactgaaatgctgttttctactgtgcacaatttacttatgctctctcttgctgggacagggtgggcagggtatggggacatgcacgggacatttggacaaccaaaattccagtcacttaattatgatgtgagatactttttgaagagctttcgaagtagcatatacatgcgataagtaaattaaccaaccttattttgattgagaggatcgtttcgcagtctctgtttgttcttctgtaatttactaggcatcatctttccagttctgaagtcaaaactgctgagatcaacagtatttcccaggtaccttgccaactgaggcttgcttctgaacttcttaccacttggactagaagaaagtaaggttaattgaacaaaaggcaacaatattctccacataagccttttcttcatgtcttcccctaccctcaattgataccccattctaattttacatatttttaaagaaatgttaaagttttgctaggcgcgatggctcacgcctataatcccagcactctgggaggcagaggcaggtggatcacctgaggttaggagatcaagmccagtccggccaacatggtgaaaccccgtctctgctaaaaaaaataaaaaaataaaaaatac

SEQ ID NO: 826232 - DNA, 679 bp, Homo sapiens
tcagtgtatttggcatatctatcatcttgagtaattatcatttttatgtgttggaaacatttcaagatctctcttsaggctgccatgaaatataccatatattgctcctaactattgtcatcctactctgttatcaaacattagaacttataccttctatctaactgtgtatttgtagccattgaccaatctctcttcaccgcctgcacctggcccaacccacacacccttcccagcctctggtatcaatcattctaatctgtgccttgatgaagtcaatttttttcagctcctacatatgagtgagaacatgggggaaatctgtctttctctgcctaactttctatgcctaataacataacataaatattatgttatttcatttagcagaataatctccagttccatctgtgttgctgcaaatgacagaatttcattttgttatggccaaatatattccactgtgtgtgtatacaacattttctttatccattcatctgttgacagacacttaggttgattccatatttttgcaattgtgaatagtgctggaataaacatggtagtgcaggtatccctctaatatactcatttctttttctttggataaacaataatgtgattgctgaatcatatggtacttttagttttggagaaatttacacactgttttccatag

SEQ ID NO: 826233 - DNA, 504 bp, Homo sapiens
tctttagctgtaaacagtgtcagtggtgtctgtgatttcctggtggcttagggtataattgttagtggaggctgtgacraatttttcctggggactgggatgctcagtgggccagtcttcaggccccaggaatggcagctgtggactgagagtgccttttcatgggacccagggcagtgtatgctggaatttgcattggcaggtatagacaggtcaattcttaagcctccagctggctttttttgatatgaaaattggatatggtgggtcaaataggtgaatggtttctcaagcccctgggcaacaagcatggcatgggcaatgacagtaacagtagtgggacaaccctcagggacccaagcaacccatgctgatgttggcattggctgcaatgtgttgggtgggccatttctctaacctataggtggtgcatgtgggtgggtgccagctacaggggtagtggcaggttgagtgggcctgatttcaaacctttggaggagttct

SEQ ID NO: 826234 - DNA, 628 bp, Homo sapiens
tcaaaaaggcaaagttacaatcaatgttaaatgctgcagtgagggcatatgagatcagaagaaacatttctgtttggtggcagaaagccatctcagtgaagaaatgaaaccttgactgatatcacagattaaccaagaaaccaacttaaaaagatgagtttgagagttggagaagggatccatctgaggctctctcacctggcatgttctcctgagatgagttcatctatttctttgacatcagttatactctaaatgatggtctatcccaagaaaaccactctaacactctaacccagattctctctgtctctctctctgtctctctctgtttctctttctctatgtcttccctctttctctttcccttccctccctcctttttcccccaccacacttcaagccaacagcctatcagacattcccacttacatgtcctatgaaaattcccatttcatcacatccaaaatagaactcatctttctcttaaactgttctactttttaactttctctttcytggtgaacagtatccatattaacacctaagaatagcctggattcctcccttttccttactttccgcataaaccactaaccaaatgctagtgatacttgtaaccccttga

SEQ ID NO: 826235 - DNA, 501 bp, Homo sapiens
taagtgagatactgaatataaactgcctaggacagtacctgacacttagtaggtgctcaaaaaatgwttgattgctcgctccacatatgcctcagttgttcactttgtctatgaatacatgcagagctatcttaatgacagactaatttctgcaacgtcatgtcctttctaaatatgtagttcatttctttttaacacatgccattcatctaagcctctctgtgggctgtaaaagattcataaaattcttgattttgacatatttctagtgatcgttttgaattagagattaaagtttgaactactgcagaactttgcataggaatttgacttatttgtcttataccttaactgaaataaacttgatattagacctttgcttaagttagctgaattaattctgctttaattcaagttcatctctgcagtggaaaatgacaggcattattgagttatatacacttctcatccttgcaggagcaatttaatacactgcagagc

SEQ ID NO: 826236 - DNA, 498 bp, Homo sapiens
atggtttgagagaagctaccagaagacagaagagataacactccaactactagagtggtctaaaggtaaatatgttttcctcaggagacactgaatttttggttattagaggtgtgcaaatatggatccactgacctggaacgttacctcaccagtataatgagtgtaatgataccagtatacgtagactgaggataatgtgggtgaacatacctctattaaagtagttgtaccatttcactaggcttattgattgacatgtctatcttaattagctaaagaatgccttaaaatcaaggactacatcaattcatcttttttttctgtaacatcaaccatggtatctggctcatgaaggcatttttcataaatgtttttgaatgactagagataacagatataagagtactttagaaataaatacagcacawccctaatacaatatactattaattgttaatattaataatttcttcctaaacggcctgtcaattcagg

SEQ ID NO: 826237 - DNA, 538 bp, Homo sapiens
attaatgtggcacgcatcatagtctcttctatggtaaaaagactttatggacgctgtgattttaaaatgtcattatttggcaattgaccacacagatgatctaggtcagaagtcctaaactaccatttcataggtcaaacctgacttgcagttatagttctctttttgttttgttttcctacataattgaaatagagattttacataaaatcccagtttccgacatcacttgcaaaacataagattggtcaccttgcgcttgaattcccacagagcatcagtcagtcagaattgaattgagtagtagtagctcctttttttttttttttttttttttctcccctttgagacagggtctgttgcccaggctggagtgtagtggggtgatcatggctcattgcagcctctacctcctggactcaagtgatcctcccacatcagcctcctgagagctgggactacaggtgtcagccatcccacttggcctagtagtagctcatttyagatggatcctgtgctccctctcattgccacagtc

SEQ ID NO: 826238 - DNA, 292 bp, Homo sapiens
ctatggcttagtcagtgtttcccaggttgctttttktacacatgttctctaagagcagggagagataacttgaggcaaaacctaaagaggcattcagcaatattgtttttatatttacttaaaaacaagaaaacacattggccgtttctataacagacccatattgatgacaataaaagtttcaactcattgtgatgtcaaattttctgggaaaacagtccacattaactttgtggctttataagcatagagctttataccctgtgtttctgtaaacacgcactttggatgc

SEQ ID NO: 826239 - DNA, 292 bp, Homo sapiens
ctatggcttagtcagtgtttcccaggttgctttttttacacatgttctctaagagcagggagagataacttgaggcaaaacctaaagaggcattcagcaatattgtttttatatttacttaaaaacaagaaaacacattggccgtttctataacagacccatattgatgacaataaaagtttcaactmattgtgatgtcaaattttctgggaaaacagtccacattaactttgtggctttataagcatagagctttataccctgtgtttctgtaaacacgcactttggatgc

SEQ ID NO: 826240 - DNA, 579 bp, Homo sapiens
  misc_feature 553: n = A,T,C or G
taaggtatcagcaaatttggttcctgatgaggcccttctttctggtttgcagatagctgccttgtggctgagaaatcatctatcttgagtctccttataagrgtgctaattctgttatgagaaccacaccctcattatttaattacttcctagaagtaccccttccaaacactaccatattgaggtttacgtcttcaacatacgaattttgagaagacataaacagtcactaacatacattacaatatttggcatatagtaggtatttaataatttgagtaattgataaatactacttattatatgtcagcattatgataagtgctctatacagatgttacttgacttatgatatggttacactcatcctgacaaacccatcataccatcataagttgaaaatattataagttaaaaatttatttagctgggtgcactggcatgctcacgtagtcccggctatttgagaggctgagatggaagcattgcttgaacccaggagttcgaggttgtagtgcattatcatcacatgaataaccactgcactccagcntaagcaacatgtagagatggaaaccc

SEQ ID NO: 826241 - DNA, 638 bp, Homo sapiens
tcttgttaaatatgcacctattgatccactattattcctttgttcattgttcatttttttaattcagtcatcaacatctaccttgttcagtggcaccaactgagrgttagaaataaaacgtatgacttttgcctttgtaaagctcatagtctaatgagggaaacagatggtaaacctgaaaaatcattcacaaattgtgttaagtgttcagaaagaaacgaaaaagctgccatgattggaaaagaagaacttatcatatctagggttgtcaaggaaagcctctccacatagctgggatttttccaagagataaggaaccagcaaggcaaagagtgtttacagcagaaggcacatcataggcaaagatccaacaaaaggggagtgtttgttgtgtccaaggaactgaaaggctcctgcggctggagtgtagtgggtgaggatgcaagcaaggagctgagctgggataccagatgtaggcagggaggagcgagtcagggctttgcatgccatggagagaatctgaatcctagtttaagtgcagtggcaagcttattcattggtttaaattgagagttaggattccttgtattacatttcagtttttgttcttgaaaggaaaaaaaaaaacaagattaaaa

SEQ ID NO: 826242 - DNA, 512 bp, Homo sapiens
cctgtatgagattggagactattactctaagtgaagtaactcaggcatggaaaaccaaacatcgtatgccctcactgatatgtgggagctaagctatgaggacacaaaggcataagaatgatacaatggactttggggacttgcggggaagagtggaaagggagacaagggataaaatactataaatatggtgcagtgtatactgctcgtgtgatgggtgcaccaaaatctcacaaatcactgctaaagaacttactcatgtaaacaaagaccatctgtactccaataacttatggaaaataaaaactaaaaaaaagaaaatgtccatgaacacttgagaaggaagtacattttgctttcattgagtggtaccttctatagaagtttgttgggtctaggtggtttatactgtcrtcttttattttcttgttgatcttcttagttgttttatttattaaacgcagggtaatgatgtctccaactatatttttaaattgcttatttctcttttc

SEQ ID NO: 826243 - DNA, 679 bp, Homo sapiens
ttaaaataaagaatggcaataaaacatgattgttttaataaaygcagaaaatgaaattaataaaattcacatcctttcaaaattaaaaactttcaacaaattaggtatagaatgtctatacctcaacacaataaaggttgtatatgacaaatccacagctaacatcatatcaaatggaggagggcaggaagattttcctgcaaggttatgaacaaaacaaggatgctcattttcaccacttctaatcaataaaatactggaagttctagccagttaaagtaagcaagagaaagaaataaaaatcttccaaattagaaaggaagaggtcagattttccctgtttgcggaaaacatgatcttaactatacaaagccataataacttcatgaacaaattattggaactaataaatgcagtaaagttgcagaaaataaaatcaacataaaaaatcagtagcattttaattcacaaatagtgaactatctgaaaaagaaatcagaataataatttaatttacaatatctaaaaaaaaaaacaaacctagaattaaacttaactaaggagatgaaagatctccacactgaaaactaccaaattttgatgaaagaaaataaaaaggccacaaataaatgaaatgatatcgtgtgttcatggattacaataattaaagttttcaaca

SEQ ID NO: 826244 - DNA, 626 bp, Homo sapiens
tatctacacttatgatttggctcatgtagtgtttattaggtttctccactgtaatgttactcatttttcttctcttttaatactgtastctttagaaggaagtcactataagtacccctcacttaaggaaatgagaattgcccctgacctcattgacaaaaaattaattgcacaaatttttggtatttttctgcacagaacatgtgtttcatagcaaaccccatttttttacttatgcatttaatcatttatttctgtcagtataaatgatatggtttggctctgtatccccacccacatctcatctcatcgctcccataattcccacatgtggtgggaggaaccaggtggaagataactgaattatggggacaggtctttcccatgttgttctcatgatagtgaataagtttcatgagatctgatggttttaaaaatgggagtttccctgcacgagctctctatttttgcctgctaccatccaagtaagacatgacttgctcctctttgccttctgccatgattttgaggcctccccagccacgtggaactgtaagtccattaaacctctttttcttcccagtctcagttatgtcttcatcagcagcatgaaaatggactaatac

SEQ ID NO: 826245 - DNA, 563 bp, Homo sapiens
actgtctttggcttactgtctgcrctgtaaatcttttgtttactttcaacctatctatgtcttttaatataaaatgtgtcacttgtagacagcatatatttgagtcattttatatctattctgtcagtctctgtctttccattagaatgtgtttaaactattttcatgtcatataactaataagctataatttacacctgccattttttatattcgtttcctatatgtcttatgtccttttggtttctctgtttcagagttcttgattactttcctattaaacatatactttttggggatatatcattttgattaccttcttgtttatttcactatattttaaaaaatattttcgttttggcttccctgaagtctcagttagcttttaaacaattcaatttagttcagtttaacacaaatttaatttcaatagtatacataattttcttgcattgtagctttgcccctcatttttgtgctattattgtcaaacaaattgcatcttttgattaacacatttttatatttgttgctgcatgtagctgtgttttaaattacgtagt

SEQ ID NO: 826246 - DNA, 432 bp, Homo sapiens
catccctgcaggatgcaagagagaccatggcttatggagggacatgacctgggtcacacraacgggaatgccccacaatgaccacttccaggcactctcatttgcttgtgaggcttttttttttttttttttttggagatagaatctcgctctgtcgcccaggctggagtgcagtggcatgatctggactcactgaaacctctgcctcccaggttcaagtgattctcctgcctcagcctctggaatagctgggattacaggcacctgccaccacatccagctaatttttgtatttttacttgagacggggtttcaccacattaaccaggatggtcttgatctcctgacctcgtgatccgcctgccttaacctcccaaagtgctgggattacaggcttgagccaccgtgcccggccctgaaccaatgcgcccg

SEQ ID NO: 826247 - DNA, 432 bp, Homo sapiens
catccctgcaggatgcaagagagaccatggcttatggagggacatgacctgggtcacacaaacrggaatgccccacaatgaccacttccaggcactctcatttgcttgtgaggcttttttttttttttttttttggagatagaatctcgctctgtcgcccaggctggagtgcagtggcatgatctggactcactgaaacctctgcctcccaggttcaagtgattctcctgcctcagcctctggaatagctgggattacaggcacctgccaccacatccagctaatttttgtatttttacttgagacggggtttcaccacattaaccaggatggtcttgatctcctgacctcgtgatccgcctgccttaacctcccaaagtgctgggattacaggcttgagccaccgtgcccggccctgaaccaatgcgcccg

SEQ ID NO: 826248 - DNA, 640 bp, Homo sapiens
gtttagaggtggcaaatttaacttctagtgagaattatcttgaggaggtgaatctcatcagtggaatcttgccatttgtgatgcaaagaaaaacattaaaatcaagggagctcagaagggttgagtccagctccagaaatacagcatctccggtcccatttcaaacctgctgaaatataatccacattttaggaagatctcagccattcttattcatattaaaagttgagaaccactgtcgtaaaacaagaggtgcaggggaacttctaatttattcttataaaataacgttttggtcctcaatatatgttgtttattaaaatcaactatgggacttaaaaaaatgaagtagctgttgggtttattgcagacctgttgaatcataaaatacatggtgtgggacattggcacatggcatagataatttgagaaaaattaatacaccaccccccaagacatatacataaacacaaatacacttaatatgctctctcccccccccaacataactacattaaaatgtatgtgggtgattctaacatgaccacagtttgagaaaactgagcgaagtctctttgatgcagaacaagccatcttcaaatcatctttctggaaaaarcagcattttgtgctaacattt

SEQ ID NO: 826249 - DNA, 288 bp, Homo sapiens
attaatgtttctgaatactggaaactgtgctygtggctggggaccaggaataagtatagtggagtccttgctggcaaggagtcctttaacagaggaaaaagacagggcagggtatgacataaagaccagattctatttggagctgttgactcaaagagcaaaaggagatggccgttagcgtatcagacatagaagccatattccccatgggcaaaaatgaagaatgttctgtaagggtccttcaagctataccaccctgtggtcctcactagtgttcatggtcctgtt

SEQ ID NO: 826250 - DNA, 567 bp, Homo sapiens
agcagccaactttctgtaactgtaaaatcaagcttgaaagtttgcaaatgcttgttttttggtttcaaagaatcttaytttgtgaaagcagatttttaaagtttttaaagcagatattcactgcctgaatgaatacctctcacataccacagtgagcatgactgaaagtttacaccattagctaaaccctgggaaaaactaatgcagtgagtcagagtttctggtgagggaggcacatctcttgcctgtttacagtagtattcaacaattgggggcagcccttccatatgatgccatttaaataccacaagttatgggccaggtgcggtggcacacacctgtaatcccagcactttgggaggctgaggcgggcaggtcacttgagatcaggagtttgagaccagcctgggcaacatggtgaaacgtcgtttctattaagtatataaaaattggctgggtgtggtggcgcacacctgtaatctcagctactcaggagcctgaggcaggagaatcgcttgaacctgggaggtggaggttgcagtgagccgagatcgcgccactgcactc

SEQ ID NO: 826251 - DNA, 567 bp, Homo sapiens
agcagccaactttctgtaactgtaaaatcaagcttgaaagtttgcaaatgcttgttttttggtttcaaagaatcttattwtgtgaaagcagatttttaaagtttttaaagcagatattcactgcctgaatgaatacctctcacataccacagtgagcatgactgaaagtttacaccattagctaaaccctgggaaaaactaatgcagtgagtcagagtttctggtgagggaggcacatctcttgcctgtttacagtagtattcaacaattgggggcagcccttccatatgatgccatttaaataccacaagttatgggccaggtgcggtggcacacacctgtaatcccagcactttgggaggctgaggcgggcaggtcacttgagatcaggagtttgagaccagcctgggcaacatggtgaaacgtcgtttctattaagtatataaaaattggctgggtgtggtggcgcacacctgtaatctcagctactcaggagcctgaggcaggagaatcgcttgaacctgggaggtggaggttgcagtgagccgagatcgcgccactgcactc

SEQ ID NO: 826252 - DNA, 602 bp, Homo sapiens
atgaagacgtgttaatctagctctgtctgcatacctgaagacatctgagctgctggaatgtccttctccacccacccgctgccaagcctgctggctgccctggcacccaccaactaggcaggcaggggctccaggccatggaaaggagaactctgtgcctctgacacatgcacctatccattctccacgtggacggagagagacagggaaatttattgcagacatctctaggcccttctccatttacaagtaagaaattgaatgggacacatggagctcctagtgattccttcccaccttccacagggtgtcaactgcaggacggaagccaggaggcccaagttacagaagggatatgagacttactataaaggacattctctgatggtttctaggggttaaatagcagtctcaatttttccctcaaaaacaccctaaaaatatttaacttccaaatcatcaacttctggatgtagttggctgcacraaagtaacatccctacatatatttatgttccaacttagcactatcgcactctttttttttatcttcagaaacagggtcttcctctgttgcccacgctggagtgcagtggtgtgat

SEQ ID NO: 826253 - DNA, 615 bp, Homo sapiens
ttaatctataaatgttaattgattaaaattagttgattatgcagttcaacttttctatatacagacagtccttacattgcaaagtagtctgggaccattaaaagcacgatgcaagctgaaatttctgatatgatgaagccagcctttattggcagtgaaatgttcttcttcagtcttcttgtagctgccattttcttcaatatggcaactagaacctttctacctgaatgctagccaaactgagtagaagacatttgaagctgcactgaaaccaaaaatttagcggagactactcatgtaatgaagatagtactagctacattagattttcttgtcatttgagtgtacctagaattttatttttcctacgaaatgaatcttgggtcctctctctaaactagcttcatatcccatggtgaggtaatctgttgtgatttatatatttatatatagatttattatataatagatctattatatttatatatagattaatatttaacttttccctagcttataacattaaaatttactgtaatctttaaatgtttctactaatttctcatatcartgcgatgtatatcctgacatctatgtcactgaatctgaatttta

SEQ ID NO: 826254 - DNA, 587 bp, Homo sapiens
atagcttttcaaactggcttctttcacttggtaatatccatttaagtttcttccatgtctttttatggtttgttagatcaagtcattttaaaaytcaataatacttcattgtctagatgtgccactgtttattaagccactcacctactgaaggatatcccggttgcttcaagtttaagcagtttttttttttttttaagctgctataaacatctctgttgcaggattttgtgtggataaaaaatttcaaagtatttatatacatacaaaaagtgctactgatgcatcatatagtaagggtatgtgtagtcttaggccaggtgctgtggctccatgcctgtaatcctagcactttgggagactgaggcaggaggatcgcttgagctcaggaatttgcaaccgacctgggcaacatggtgaaaccttgtctctacaaaaaatacaaaagtttgtcaggtgtgatggtacatgcctatagtcccagttactcaggaggctgaggtgggaggatcacctgagcctggggaggtcaaagctgcaatgagtgtgatcacaccactgcactgcagcctaggtaacagagtgag

SEQ ID NO: 826255 - DNA, 595 bp, Homo sapiens
gcttaaacaattgaaatttatttattcacagttctggaggctggaagaccaagttcaaggttttacaagacaaggaaggagagaggcctcagaagagatccattctccttccttgtcttgcaaaagtttgatttcccactatgtcctcacatagttgcctcttagtctctatgttcacatgcctaatgtatctctctgtgtgtcctaatctcttcttcatagaaggatacacatgatgttaggttaaggctcaacctaacaacccatagtaactgaattacctctttaaagtcgctatgtccaaatatggtcaccttgggggatctgggggctttggcttcaacatgtgaatttttctttctctgggggaagaaggatagaattcaggtcctgaaaccagaggacaaacaggagtcaggaacacatatcatgagaatatgtaatacgaatgaaagttggagtggggccaaatctaaaatttctgactaaacagataaaatacacacacrcacgcacacacacacacacacacacacacacaaactaaaactcacaattatacaaacgcacacacacaaaaataccttcaaacttc

SEQ ID NO: 826256 - DNA, 595 bp, Homo sapiens
gcttaaacaattgaaatttatttattcacagttctggaggctggaagaccaagttcaaggttttacaagacaaggaaggagagaggcctcagaagagatccattctccttccttgtcttgcaaaagtttgatttcccactatgtcctcacatagttgcctcttagtctctatgttcacatgcctaatgtatctctctgtgtgtcctaatctcttcttcatagaaggatacacatgatgttaggttaaggctcaacctaacaacccatagtaactgaattacctctttaaagtcgctatgtccaaatatggtcaccttgggggatctgggggctttggcttcaacatgtgaatttttctttctctgggggaagaaggatagaattcaggtcctgaaaccagaggacaaacaggagtcaggaacacatatcatgagaatatgtaatacgaatgaaagttggagtggggccaaatctaaaatttctgactaaacagataaaatacacacacacacgcacacacacacacacacacacacayacaaactaaaactcacaattatacaaacgcacacacacaaaaataccttcaaacttc

SEQ ID NO: 826257 - DNA, 686 bp, Homo sapiens
tttgtaacacagtagaagaactggatccaagtgtcagacaattggtttaaaatccaaggtgtgacatttattatctctggacattggggaatttacttatcaaataggagcttcatttttctcatttgtagaataatacttatcttttagggttattgtgcattcacacaaaaaaatgagatagtggacaaaaaaagttgtaattatgtaaggcgtatagacaaggtaaataaaaggtaaatatgagatatgtaaatgaggtaaagaaaataaaatacctaccatagtgcccaataacttcaattagctcacactgtagatatttccaatatagattatatattgtttcagagtttgaattgttaatatgaatttctctaacttttagatataaattaaacaaaaatccttaatctcttttttaactaaaaaaattcaggaggctgaggcaggagaatggcgtgaacccgggaggtggagcttgcagtgagccaagatcgtgccactgcactccagcctgggcgacagagcaagactccgtctcaaaaataatgatgatrataataataataataataataataataataataatttattgtgataatatacacataacataaaattaaccatgttaatcatttttaagtattctgttcaatagtgctaagtacaacatattaaac

SEQ ID NO: 826258 - DNA, 670 bp, Homo sapiens
tttaatttctataatataaacagttgtttctcttaatctttaataaacaaggcattttatgccaaatttcttccagtwacctccttgcatttaataaggaattgcatttttttattattttgaaagtcaaaaattttaaaagctgcctacttagttattaataaattgtttttgattggcatcattataatgtccttgtgtttgaatcccacttccctcaccatttcctaattgaaaatttgaaaactgagagtttcctagaataaacaaaataattctgacttactatctcttcctaaaataaagataaattgggaatcaagtaagtgtttataaacagtgcaatacaaacagcttactttccaatgttttgggaagtgaactttaatcgaaatcttgcttgtaaatcgattgcagatttgtaagaaagtgtatattattataatggcttggtaataagtatgaccctttgcaaaggacatatccttagggtattaatttaactttctcataagcaggagtaaagtccatatttacctcagggcactttttatattgccagaaattaaggtttgcctagataaaagtatatttcaaataaccacagaaaaggcactgtaaatgtaatttctgcctttattgaaaagcttctgtataatacatacaccat

SEQ ID NO: 826259 - DNA, 530 bp, Homo sapiens
ttacccaccttttgaagcctacttctgtcacttcgtcaaactcattctctgtccagttttgttcccttgttggggaggaactgtggtcctttgaaggagaagaggcattctggttttggaattttcagcctttttgagctagtttctttccttctttgtggatttatctacctttggtctttgatattggtgaccttcgaatgaggtctttgagtggacatgctattcctttctgttctgttagttttccttttgacagtcaggcccctctgctgccagtctgctggagtttgctggagttctactcctgacccccttcgcctggatattaccagtggaggcttcagaacagcaaagattgttgcctgatctttcttctggaagcttcttccaagagggrcacctgccagacgccagccagagctctcctgtatgaggtgtctgtcggcccctactgtgaggtatttcccagtcaggatacacggggtttagggacccacttgaggaggcagtctgacccttagcagagc

SEQ ID NO: 826260 - DNA, 488 bp, Homo sapiens
catgagatacactgtggtaaaaaccattagaactgggaagcttcatgaaagctggatcagtataagtggtgtctttcatcratgtctggtgagaccaattgctgataacggttagtgtgttgtttgtttcagttgaaatagtctaacctgcattgtatgattctaccttaccctggtgcaatgtatgccttgtgaacagccttccctttttttttttttttttttttttctgttgttgttgttgttggattgggcatttatttctcagcatttccccgacagcagaagagagaggtcttgaatttttcaagggatgttggtgacattaaggtaaagcctcactcctgaccaaattgtgccaccagaactaatttgtagcaattgtgtcgtgataacaacaaagcatatcaccttccctctatatgtataaaatgtatacttaaatgcacactcatatatttgtaactcatagtttttacccttgcaga

SEQ ID NO: 826261 - DNA, 488 bp, Homo sapiens
catgagatacactgtggtaaaaaccattagaactgggaagcttcatgaaagctggatcagtataagtggtgtctttcatcgatgtctggtgagaccaattgctgataacggttagtgtgttgtttgtttcagttgaaatagtctaacctgcattgtatgattctaccttaccctggtgcaatgtatgccttgtgaacagccttccctttttttttttttttttttttttctgttgttgttgttgttggattgggcatttatttctcagcatttccccgacagcagaagagagaggtcttgaatttttcaagggatgttggtgacattaaggtaaagcctcactcctgaccaaattgtgccaccaraactaatttgtagcaattgtgtcgtgataacaacaaagcatatcaccttccctctatatgtataaaatgtatacttaaatgcacactcatatatttgtaactcatagtttttacccttgcaga

SEQ ID NO: 826262 - DNA, 623 bp, Homo sapiens
aagcgttccaagagaataaggcaatgccatcactaccatcatttttaaaayttccagctttttgaagggctagaattcaagcccttatgtctcattttgttgtatctttcaggaaaggagcctggtcttgcatagattcttccagaaagatgtagagagaggaactggctaggaagaaccatcagttcaatggcccaggctatttcttataacagcaaaatgaagataacatttggaattgcctaaaacttatcatagagctttctcaaacattgttttactctgtcttcacagcagtgaagattctgatccactgctagtgataagaaaactgaagcaccaaaaagttaacatattttctttaactcacacaactctttagaatacttgaaatgagcctaaatatcctaacacatggcctgagactggtcctggaaatgacatagcccctgatgtccactcttgactgcctctatgaagccatttcctacttcctagatggcacaatcaacccctcctcaggggtttcataattcttctcacaaatgtttaattaaacatattcacatggctatttatttttgtatctatcttcctctctggactgttagctttctaaagct

SEQ ID NO: 826263 - DNA, 623 bp, Homo sapiens
aagcgttccaagagaataaggcaatgccatcactaccatcatttttaaaacttccagctttttgaagggctagaattcaagcccttatgtctcattttgttgtatctttcaggaaaggagcctggtcttgcatagattcttccagaaagatgtagagagaggaactggctaggaagaaccatcagttcaatggcccaggctatttcttataacagcaaaatgaagataacatttggaattgcctaaaacttatcatagagctttctcaaacattgttttactctgtcttcacagcagtgaagattctgatccactgctagtgataagaaaactgaagcaccaaaaagttaacatattttctttaactcacacaactctttagaatacttgaaatgagcctaaatatcctaacacatggcctgagactggtcctggaaatgacatagcccctgatgtccactcttgactgcctctatgaagccatttcctactycctagatggcacaatcaacccctcctcaggggtttcataattcttctcacaaatgtttaattaaacatattcacatggctatttatttttgtatctatcttcctctctggactgttagctttctaaagct

SEQ ID NO: 826264 - DNA, 625 bp, Homo sapiens
ctggatgctgcaggcttctagagagcagcttggggactgaggccaactctgcattcagggaggccgaaggcagtgccaggtgagtttggacacactttccagccacctgccccgtgtgacgatcccgcgaaatgcttccaagccagagatccacttcataggctggcttaggcttttgaaataaaacacccgcctgaaacaagcattggcaggttctatttcagggatggggcagaggcaaggaccctggccttgtctccatacagctttaggtgatgcagggtttttgaatttggcctctatttcaagcactttctgaaaaagaaaagcataaccaggatagttccaaggcagacagttcttctgtttattttttcacaggagcgtgtgagaaatggagacagagggattggagagatgaagatgggggatccgtggtctctgaagcccccaatgcttgtgtgagggtgagagctcaggtgcgggacagcctggacatggggaagggctttcctctacataaattactgggggatctagaaatgacttccacaaaatgcttcccttctggacctcactctgttgaaaggraagatttgtctagctaatcaggacggtagctgat

SEQ ID NO: 826265 - DNA, 608 bp, Homo sapiens
tgcaaatagaaacacaatacagaactcactgtgatgagaccatttactcacacggcagatattactgagcatctgatatgaggtgggcattcatataagttagggaaatagcagtgaaaaagacagacaagattgctttcatggggtctagtacggggagacaaaaataaaccataaataaataaaaagataagttgaggcagagagtattaattgacatggagaaaaacatttgtgatgagataaagactgggttgggagctactttaagctgcgtagtcagggaagtcctctcttaggagatgacactgatgccgagacttgcatggtgcacagtgaattgtgctgaggtcctgggggaaagcgttccaggcagagggcacagcaagcacagaggtcctgaaacaggaacaagccagggctgcccacaggctagaagacagccagtgtgaacaagcagagaatggaggcacaagggacaggggtcagatcatgcagggtcttatcggcatggcaagttacctaaattttattctgtaatgtgattataagccattagcaggatttatgcaagggagygatatggtagatttacacgcttaagagat

SEQ ID NO: 826266 - DNA, 618 bp, Homo sapiens
ctgtgactcctcctctgccacttggggccatcccttcctctaaactgcaactgtatttaaaatttggacccctcagtcaacacycagcaggaaatcttgtaggacaccaatttttctgcacatttatgtctgatttctcctgggaacatgctagaaatgctgaatcttcggctccacctcaggcttactgaagcaaattctctatctcaagatgccctgtgagtgaaatggatgctgaattatagaagtgccacacagtatctctcagagttagggctgagttcaggccctcaaaagcaattgtcaagctggtgaatgcctctctcttatctctcagggacttattctgtcctccagtggctgactactattagtggtcatagaatgtagactactattagcattaattattaatatcactagacccactcagttctctgcagaacaaacaatattcagatatgacacacaggatggtgaatctgaatttctagatcaaacataaatgcttttttggttttttttttcctgctgtctgggattccctgtgtcatgattctaataattctcgcaggattatcatgatcatcagttaactggaacttttgatagttttaa

SEQ ID NO: 826267 - DNA, 591 bp, Homo sapiens
atgatgatcattctttagtagatcttcttttccacccgctcctatcactcctattcttgtctcgtcttttgtctcttgtgtatggccctttcagtgccttgcccattgattggtgactctatctccatctagtctataagaccaattcttctgaacacttgtttttttcatgttttcccccggttcagagtctttcagtggcttccacttacttacaacagcagcctacaattctcaaaggcacctcctattcttaatgtatgtgttttgtttgtttgtttgagacagagtcttgctctgttgctcaggctggagcacagtggaggcgatctcggctcgctgcaacctccgcctcctgggttccggtgattctgctgcctcagcctctcaagtagctgggactacaggtgtacgccaccatgcctggctaatttttgtattttttagtagagacagggtttcaccgtattggccaggctgacctttaactcctgacctcatgatccacccgccttggcctcccaaagtgctgcgatcacaggygtgagccaccatgcctggccaatgtttgtatttatttataaatcaaat

SEQ ID NO: 826268 - DNA, 513 bp, Homo sapiens
catgttgctgtgaatgataggctttcgttcttttctttccgcccacctccttcttacaacctcgttcgttgtaatactgggcccacctgggtaatctggattcaccatctcatttcaagatccttaatttaatcacctttgccaagtcccttttgccatttgaggtagcatattcacaggtacaatggattaagctgtgggcatctttggtggggctggggttgggggtgttattctgtctaccccaagtgttatccattcaaggaagatttgttaacagaagacctagtcaggattcacatacgcatctgtccatgctaaaccagtatctaaaaccaacgtactagagtttcctgtaagtgatcaaagtgacaaacacagtgtttagtactctgggacccacccattaccagtctacattccagaccataggtcctggtttgagtttggaaacsttagtctttggatccaagttgtattttcatgtcaagcttatcagaaggtccaggtgta

SEQ ID NO: 826269 - DNA, 248 bp, Homo sapiens
atcataatttcatgtttggaaaaggtttgtttaaaacgttaattggcaygtcatacgggtatatagatgcacaagacttggggcacctcaggaaactactctgtgaaaataaaacacatgtctatgtgcactgtcagtacaggaaactcaaaaacagcatgcagggatccataatattcatatcattcatggtaaacaagtttctattccactcacagcacaacagcttatttaactaaaaaaagttt

SEQ ID NO: 826270 - DNA, 248 bp, Homo sapiens
atcataatttcatgtttggaaaaggtttgtttaaaacgttaattggcacgtcataygggtatatagatgcacaagacttggggcacctcaggaaactactctgtgaaaataaaacacatgtctatgtgcactgtcagtacaggaaactcaaaaacagcatgcagggatccataatattcatatcattcatggtaaacaagtttctattccactcacagcacaacagcttatttaactaaaaaaagttt

SEQ ID NO: 826271 - DNA, 659 bp, Homo sapiens
caaatttttcaattgtagccatcatatattagtatatcactacagtttccttaggattttcctggttaccaatgagattgagtatcttttcatccatgtgttgacaactggaatttcttttatgaagtgcctattcaagttattttatccagttttctattgagagtcattggtctttttcttattgattcaaagccattctttatataatctgaatattaaccctttgttgtttatatgtctaacaaatatcttttcccagtttgtggcttgtggtttcattttctttgtagtgtctttcaatcaacattaacttaaagattgtcacatttaacaatcttttcctttattgtttttacattttatgtcttgggaatttctttctatgaaataaaaatactctccctcctttagagttttcttagtccattgatgctgctataacaaaacaccttaggctgggtaatttaaaacaacaggtagttatttctgacaattttagaggctgggaagtccaagatcaaggcacgggcaacttcattgtctggtgagggctgctccatctgcttctacgatggtatcttcttgctgcatcctcacttggcagaagaggcaaaggaatggamgggacaaacttgtcctctcagcccttttacggt

SEQ ID NO: 826272 - DNA, 575 bp, Homo sapiens
tgccctagacccagactagagctgcaacacagaacaggcmcccaggcatgaagcctccacccgatccaggctgtgctcctactagcttttgccagtaaaatcgtggccacagatcatgcccagtttctgcaccactggctaagagacactcttccaagtttacatgttggcttaagcaaatttactgacatgtccatattcttatttcatttaaactttattttctgttctgaaacagaaaaaagaaaaaaaaaaactagcagtgctactaagacacgcctttaatagcttcaaatatcccattgaattctaatcattataacatgtaaatgtttacctttgatctacatagacaaattttccattcactgcaaaccgggttataaattcagttggtttcacattaatctctccactgttctgtggaacaatatatggctgtaatcttccaatggccacaaggcaggtaaaattactgttgtctttcttactgttcctttcttcttccattccaacaatatttggaggccagcttctcaagtaaccagtgcaatggatagtatagaattttctgt

SEQ ID NO: 826273 - DNA, 570 bp, Homo sapiens
caactttatttgaaccaaaatgtgaagatgtttcaatgatattatgtgattttatgataacagatgataaccaaggaattgacaatacagctactcagaagtttttttacccaggccagtgatgtttttatggaggcctcattatgtagcatgagtaattaaacctctggccattggtgatcaacttaccttcaaccgctctatcctctcaagagttttagggggtggggctgcaagtcccaaccctctaatcaagcctctgtctttccagtgactagctccatgtcaacatcagcatacaaaaagacagaacttcagagactaagaattttaggagttgtatgacaggaaaagagcccaggaatctttttgccatttcttcctttcttaatctcctgtatttttctctttatttatatcctgtttcttatctccctttaaagtttaaaaaatgaaatatttttgtatctgtttatcggttgctctaccaaatatcaattcaaggakagtttaggtgcaaattttgcactttttaacttactaaaaaagagacagtgttttttcttcaat

SEQ ID NO: 826274 - DNA, 617 bp, Homo sapiens
aatgaaaaaagaaaggatccaaaaaaatacttgttctggccctawgagtttccttgtaaccttggttagatcttttcaactaaagtcttaaagaaaaattctggcattttcccttctggtcagaagaaatcctataaatttactttgctgcaaggacctagaatagagctttccaagctggtgttagaaatgagcaccacaaatcctcagctattgatcctccccttcttgttctcggggacccgaatagatcctgaggtcctggactgcaccctctccctttattctagtgggccacctttgcatgtgtgtcattctgtgtgtggaaagagcgagagacaatgtagtctgcatgatctagctatcatgtgcctctataatcacactctctctgattttttctgtttctcattcttgtgagccaggctggcctccctgctagtcctagagaacagagaagaaaagttatagaaccatctgatcttcctgatcttcccaccctacacacgtgacttagccatttctttttagttccttataaaatgccacctccttatgaagtattttcttacctaggatagcatcccccatactgtctattttttttcttcatagta

SEQ ID NO: 826275 - DNA, 502 bp, Homo sapiens
tatttcaatcagttatgtgactggaagtcataayacttctagtcatagccaaccaaatattttctctgtagttctctttatttcttcatccactagctagatataaaaatcccaggataactttgaaattcatgtgtttttttattccaacagcttattctagaatgtgtctagctagtcttctttcctccccagtcaagttttacctgagcaagatacaaacttttcttgttacagcaactagcattaacttaattaatacgagagttgttatcagaaatgtgatactaactttaaaaaatcttaaattatagcagcatgatttacacatgcacacatatgtttattgcagcactattcacactagcaaagacttaggaccaacccaaatgtccaacaatgatagactggattaagaagatgtggcacatatacaccatggaatactatgcaaacataaaaaatgatgagttcatgtcctttgtagggacatggatgaagc

SEQ ID NO: 826276 - DNA, 612 bp, Homo sapiens
cctgcctcagcttcccgagtagttgggattacaggcatgagccacctcacctggctaatttgtgtatttttagtggaaactkggtttcaccatgttgaccaggctggtctggaactcctgacctcaagtgatccacccgccttggcctcccaaagtgctggatttcgggtgtgagccaccacgcccagctctacctacttctttaataaaaacatctataaaagtaagcaagttaataccagccctatcagtattatgaaaagacatgtatattttgatcatatggcttgttattcttcccagctttattgcctactgattatttgtcactgatcatgtctaacaactgcttaaaatatttatctgtatcatgtgtctgggttaatatgtttagggggagatggtataataccaccaacctcacaggactgattaaaagattaaaggagaaacatatgggaaagggattttataaagaacacaatgatcaaatatattattattgttgaatagttttcggatatgtaaagaaagtttttcacttaaattctcagaatcattaaaagggaggagaaacaataaaaataatgatataactgggaaactggatta

SEQ ID NO: 826277 - DNA, 592 bp, Homo sapiens
ataaaactatcagatctcctgagactcattcaccttcatgagaatagcacaggaatgactctccccattatttaattacctctcacagtgtccctcccacaacatgtgggaattatgggagctacaattcaaggtgaaatttgggtggggacacagccaaaccaaatcaatataaatagcacttcaaacacaataataatgagacagacaacctactttgaaaaatagaaaaattccttaaaagatgcattaccagagaatatatatgaatgccaaacaagcatatgaaaagatgtttaacatcattactttttagtgaaatgcaaataaaaaccataatgagatcctgctatgcacttactggaatggcaataaaagaaaaagaggaggatgaggcggagatatcacaaaattgtgatgataccgtccagccatagaactctcatgaattgctggtgagaatacgaaattgtccagtgactgygtaaaacattatgacagttcgtcacaatgctaactacttactaatcacattactcagcctgatgggcttttaggtaattatcttataggaatgaaatatatgtccttg

SEQ ID NO: 826278 - DNA, 581 bp, Homo sapiens
attattagtgatttataaaatgttataggatccttccagtcatgaggtttctctcatgtccccaagaagccatgacggctatgaaaaagcagtcatggtggtaaaattgtcagtgtagtggtagccacagcttagaactcagtgaaacttagtgcaatttagtattgatgtcagggggcaacttccttcagtgtgaatcagttgatccaattaaaaagaggtgatatgattcccagttgtcaggcaccagttcggttacttgaatgcataaaacagaatgtttgaaaacagaatgaaactcatttcttccttaattgttaaagtcacacactagtcatgcactaaagtaagtttccagagacatttagctgtggggagactgctcatttatttatacattgctatttttgatgtaatcatttagagatattttttctaccagaattakgtagataacttgtgatggttaatactgtcaacttgactggattaaaggatgcaaagtcttcttcccgggtgtatctgtgagggtgttgccaaaggagattgacatttgaatcagtgaactaggagaggcagac

SEQ ID NO: 826279 - DNA, 619 bp, Homo sapiens
taggtttcgggggaagaaaaaagattaagtttggtttaaatccttgagagtctttataataatttttagacactctgaaataaatataaaatacatttttataaagaaaaatctccaaattatttttgcaattagctaccttgggctaaataaagcaatgttaggctgtctattagaattattttttgtagataattttttctatttgagaaagagaataatctatggcccaaataacattcagagtttaattaaaatgagtacattttaacttaaaacacattctgaatcaaatatagcattctggggggcaacataacacaatcgtatgataagatttgttaaaattgtgtctctaaataagatttatccatagtagttagattctactctcctttgttttgatttttcacaatctgtaagtaataagttcttctctacaagagctttctcaaatgccactttggttttagaacaatggcttacgaactgaatttttccccactatgcaaaagtgggcttatatgtgtgcatgtattgtggatgacactataaacyaagtaattcttggtcacagaatggagctttattagttggagttctttctaccctgttagga

SEQ ID NO: 826280 - DNA, 619 bp, Homo sapiens
taggtttcgggggaagaaaaaagattaagtttggtttaaatccttgagagtctttataataatttttagacactctgaaataaatataaaatacatttttataaagaaaaatctccaaattatttttgcaattagctaccttgggctaaataaagcaatgttaggctgtctattagaattattttttgtagataattttttctatttgagaaagagaataatctatggcccaaataacattcagagtttaattaaaatgagtacattttaacttaaaacacattctgaatcaaatatagcattctggggggcaacataacacaatcgtatgataagatttgttaaaattgtgtctctaaataagatttatccatagtagttagattctactctcctttgttttgatttttcacaatctgtaagtaataagttcttctctacaagagctttctcaaatgccactttggttttagaacaatggcttacgaactgaatttttccccactatgcaaaagtgggcttatatgtgtgcatgtattgtggatgacactataaaccaagtaattcttkgtcacagaatggagctttattagttggagttctttctaccctgttagga

SEQ ID NO: 826281 - DNA, 631 bp, Homo sapiens
ggatccagtttcattcttctacatgtgcctctccaattgtcccagcaccatttactgaatagggtgtcctcttcccagtatgttttggtctgcttygtagaagatcaattgcttatagatattggctttatttctggattctctattctgttcaatttgtgtacgtatctgctttataccagtaccatactctttgggctactatagccttgtaaattgaaggaaggtaatgcgatgcctccagatttgttctttttgcttacaattgctttggctattcaggctctttttggttccatatgaattttaggattgttttttctaattctgtgaacaaatgatggtggtattttgatagaaattgcatttaatctgtcgattgctttgggtagtatgttcattttcacaatattgattcatctaatccatgagaatgagatgtttttccacttgtttgtgttatctacaatttgtttcatcagtgttttggagttcttcttgtagagatctttcacctctttggttaaacatactctcaggtatctgggaaaaatatttacaaatgatacatctgaaaaaggactaatatagagaatctacaaggaactcaaacaaatcagcaagaaaaaag

SEQ ID NO: 826282 - DNA, 657 bp, Homo sapiens
agacactgttgcattgcccaaaccaccattactccatcctctggcagcacagacagaaaatttgtgagcttgtgggagggagagtgaagtgattgtgaggctttgcattgggactcggtgctgtcttgtcacaagagaacacaacacagaaccaaattctgccagtgctcacagagaaaccatttagaggtttcccctcctgccagaggagaatcctccctcctaggggtaggaatctgagctccagctagctccaccaccagctgaccaaagtggcatggggtcccaaataactttgaaagacaggtcacaagaacttcagtccttgggcaaatcccagttctgcactggacttggagccagtggacttggggtacacatgacccagtgagacaacacctgtggcagccaagggagtccttgcatcacccctctcccaattccaggctgtgcagcatggggagagactcctgcttgaggaaaggagagggaggagtacagaggattttgtcttgcaactggtaaccagctcagctacattaaaatgaagcaccctgcatattcctgaagccactgattctagrccccagcgcctggatggcatttctagacccagcctgggctagaagggaacctgctgcccggaaggaaggatcc

SEQ ID NO: 826283 - DNA, 481 bp, Homo sapiens
tgtaattcagaactttatgaaaagcctgttttagcaaggtcctattccaacggcagaaaaccattggaagtgttggggggaaaatataatagtagatggaatttttaattgtcactaaggagaaaatataaaataacaaaaggttaaaacaaattagaaaatatttttctggattatttactttttctttcttctatttgcttaatatgtattccatgctttctttgtttgatgccctgttctaggctttggggatgtttcattatatatatatatataaaatagtacatgctctaaagtatcttttgctccagtattgggtgagcctcacattaaataagtaagcaaacatatattatktaaaatagtgataaatattattgagaaaaaaggaagcatggtaaagcagatacggaaagattaaaaaaacagcagttgctgttttatagagaatggtcagggatgacataatgataaggtg

SEQ ID NO: 826284 - DNA, 644 bp, Homo sapiens
ctaaagactgtcactaattgagattttgcattggatcaggtacttttaaacaaacaaacaaaagtaggccatrcatggaccggtggtgaatatatgccttgaaaaggagattatcattaatctattattcaattctggataatagaagaaaaatatagactatatttcttacctaggttacttagattggcattaaattaagtgcacccatgtcccaaagtcataggtgaaaatgagtggagcaggcagagtacgtcctttccctgagaatggatttagactaaaaatgttgttaaaaaaataaggtcacatattcatttggttattgctaaaataaaaagcattgaagaaaacatcactatgagacacttagaaaagttaaacaaaagaagatatgttgtctgtaagatttcctattccagcaagccatggtacagactccatcctcaaagctcagatcctaaacccagattcattcagtcattcactccctctgagagattggataagtctctagcatgttctacaccctttcccagatgtgcttgtgctcacttttctctagagtcagttcaaactacaatgcattaggtctaagccaatataattatattataaattttaatcaatttaaatcattttca

SEQ ID NO: 826285 - DNA, 598 bp, Homo sapiens
aattccacatataaatgagattttgcaactatcagataggtaaattaatatgagacttctaacagaagaaatattcgttagattatatatatatwttttaaacgtcaagttaaaatataatttcctttagaaatgtttcacttggagacacagcattttgttccagaaacaaatgttgaatatgccatcagtctagaaatccattttcattaggaaaataccatgaggtaaaattgttttgattgacagatatttacatgtgttacaaattttaacaaaggaaaccattactacctcatgtgagttttattggtaatctggacctggaacataattttactttcaaacaaataatattaaccacaaaatgcttccggttagaaaaataataggatccaaaatcctgtgtactactgtgaaatatttagaatttgacaacttttctatttgtcaatttaacagttaaaaaatttaagcaaatcatcatctgacttaggttttgacaatcaacactgatttgactaatgagtggattgattggcatcgataaaatacgaaaatttggaaaatacatatggatgaaacagcaaataattgt

SEQ ID NO: 826286 - DNA, 598 bp, Homo sapiens
aattccacatataaatgagattttgcaactatcagataggtaaattaatatgagacttctaacagaagaaatattcgttagattatatatatattttttaaacgtcaagttaaaatataatttcctttagaaatstttcacttggagacacagcattttgttccagaaacaaatgttgaatatgccatcagtctagaaatccattttcattaggaaaataccatgaggtaaaattgttttgattgacagatatttacatgtgttacaaattttaacaaaggaaaccattactacctcatgtgagttttattggtaatctggacctggaacataattttactttcaaacaaataatattaaccacaaaatgcttccggttagaaaaataataggatccaaaatcctgtgtactactgtgaaatatttagaatttgacaacttttctatttgtcaatttaacagttaaaaaatttaagcaaatcatcatctgacttaggttttgacaatcaacactgatttgactaatgagtggattgattggcatcgataaaatacgaaaatttggaaaatacatatggatgaaacagcaaataattgt

SEQ ID NO: 826287 - DNA, 636 bp, Homo sapiens
gtggaagtgtctttgtttggtgcagtgattggcagtggctacctgcacttgcagggcaggggcggagatgttggaggtctctcratgcctgaggacagccctccccaataaataactgtcccatcttccacaaggagaaaggcctgtttgtaatcatctgaccctacaaccaaaccccattttgtaaataaacacaaagcatgtttgcacgatttcaatgtacatggagtttccggcgttgtagttacaatgggaaaggagggaagcttgcactgtgtttagtttggagtggtgtcaaccatcagccactgtcttgaaaaacatcgtcatccacggcaatgccctgtgtggtactggagttcccagcaccgtacacggacaccatctgcagcttgcggctgtcagacatgctgtgattacagatatgtacatcctcaaaaggacatatttagcctttactgcaaaatgtcaaagacagatgaaaatgtctattttagctgaatatggtcctacttcccttatagccaggtttacttttttctttttgttaactttatttttgtttaattgatacataggagatctccctagtttcccacgcatgtgtaatttagtacgcctatcatttgtaaaggc

SEQ ID NO: 826288 - DNA, 636 bp, Homo sapiens
gtggaagtgtctttgtttggtgcagtgattggcagtggctacctgcacttgcagggcaggggcggagatgttggaggtctctcgatrcctgaggacagccctccccaataaataactgtcccatcttccacaaggagaaaggcctgtttgtaatcatctgaccctacaaccaaaccccattttgtaaataaacacaaagcatgtttgcacgatttcaatgtacatggagtttccggcgttgtagttacaatgggaaaggagggaagcttgcactgtgtttagtttggagtggtgtcaaccatcagccactgtcttgaaaaacatcgtcatccacggcaatgccctgtgtggtactggagttcccagcaccgtacacggacaccatctgcagcttgcggctgtcagacatgctgtgattacagatatgtacatcctcaaaaggacatatttagcctttactgcaaaatgtcaaagacagatgaaaatgtctattttagctgaatatggtcctacttcccttatagccaggtttacttttttctttttgttaactttatttttgtttaattgatacataggagatctccctagtttcccacgcatgtgtaatttagtacgcctatcatttgtaaaggc

SEQ ID NO: 826289 - DNA, 576 bp, Homo sapiens
tggacttcatgtctgagaattttccatgttgcctctagttggaggtagttcggtttcacggctgccttgtataaattcaccgccacttacttacctgcgcacctcctgacgggcatttgtgttgtgtccagcctggggcctgtgttagtctgctcaggctaccataacaaagtgccacagactgggcggcttaaagcacggacacgtattatctcatggctctggaggctgcaaatctgagatcatagcaacagcagggctggttccctctgaggctgtgtggggagggaggacgtgttccaggcctcactctgtggcttgtaggtgggcgtttctttctgtgtcttcacatcgccttccctttgtgggtttctttgtgtccaagttctcccttctgatgaggactagggtctaccctactgacctcacttcagctttgttacttctggaaagaccctccatccaaataaggccaattccaaggtcctggggtcaggacttaccgcagctttttgggtgggggacaaaattcaaccccrtaacaggctggtaccaatcatacagcggtggatccct

SEQ ID NO: 826290 - DNA, 595 bp, Homo sapiens
aacacagggaccaggtgcagcaactggactccagacaggaagcactctgtcctgagagctgcccacacccagattagggtttggatcccccaagaaacccccatccaatctcttccccgcctcctttggcccccagcagacctgcttctcactcacgttccctttctgcccctgcttcagctttttcctagaccgcctgcctccagcagaacgaatcaagaagattacagggcaggcgggtgtgagagcagctcctggggcgaaactagacgaaaatcccctggccctgtttccccaaacttccctttgatttttaatttttttcaaaagtttcttcatcacaaaatttccggatgtgacatccctggcagctcacacagcaagttttggcaaaaaccaatgtcttacttctcgctgggctgcaagaaattagagtaatcgcccccaacacacaaaggcatgaactcccgatgcaattaaggagaggtgaggggatsaaaggaatcatggctgtggatgaactctccttctctcgttttcccttaaaagtcacgagaggcaacttgcagtctagttagcttgggggcacccgggg

SEQ ID NO: 826291 - DNA, 676 bp, Homo sapiens
atttcgggggctactgatttttctcttttaaaagaggcaaagtgggtatattgaaacgacctgaatgttagagtatcacccagagtttgtggtctcatggccgtggagaacaaggacatggagatatgaagagtgaagttaaaagtggaagtttaattggcaaaagaaagaacagctctctgctgcagagaggggtcctggagaagtgggttgccggatccatggtgaaacacagggggttttatagatcagctggtgaggaggcagtgtctggtttacatagggcatgaaaaactggttggaccaaatgtgccatttgcatagagtgtgaaaaactggttagaccagaagtgccatttgcacagggctcgaatctctggcagcccccaccctaatctcttactatgcaggtgggtcccctgcctcagctgtgccatgttgcccattcctttactgtacacctggtaacaaaaaaagggaagatggagcctccatgttggacacacctggcccccacgtagcccttttctattggcacagctgccggcattcccccrtgcaagcttccagcttgcttatctatgtttgcagcttgatttttcaggctgctctttgttagacaagaaatgttttcctgggctgctttgtgttagaagggaagctctgctgaggactc

SEQ ID NO: 826292 - DNA, 581 bp, Homo sapiens
tgggaaggaaagtctctaggggactgtgccttactggctakaacttcaccacatggaccagcccttgcaaggaacaatgggaacttgagcattttacttgtcacctctggaggagaggaaacaaaagagtagaggcttcggagggtgatgagtagaccccgcagtgtctgccccagttcgagaggtgcccgcatgggagaagctcgtgctggatgtgcacacacacacacacaagcaggacatgcgtcaccacgcttcagggcccagcgtggaacctggtagctgaagatgctggcttggacacagcatccttgaatggcactgtatgcctgtgtttctctgcagatgatcagactttagagtcaggtgttccagtcgtcagtgtatattgaggtttggagaattcgggttaccttcccaaggccacttggttggtaaaaggcatggctgagctgtgaacacatgtccccaggaccccgggcccaaggaggacctgatgaggacctgatgcctacacccactccttagagttcacactcgtgttcagaaccagtctccgtaatcctctgagcccaggagca

SEQ ID NO: 826293 - DNA, 600 bp, Homo sapiens
aaccaaaacctcgtctctgctaaaaatacaaaaaattaactgcatgtggtgccgtgcgcctgtagtcccagctactcaggaggctaaggcaggagaatcgcttgaacctgggaggcacaggttgcagtaagatgagatcgcaccactgtactccagcctgggtgacagagtgagaccctgtcacaaaaaaaaaaaaaaaaaaaaagtgcaaattaaaaccacaggaagatatcactatatgcctattaaaatgggtagaaaatcttttgaaaactgacaataccacatgctgatgaggaaacagagcacttatccactgctagtagagatggaaaatggtactaccactctggaaaacagcttggcagtttcttacaaagttgaatagtgaaaaatacatcatataatccagcaatcccagtcttaggtattaaactagagaattgaaaacttaaattcacaagaatcactctacatgagtatttacagcagctctattcataatcacaaaaagctggtaacagcctaaatgtccttyaaacagtgaatggatccacaggctgtgacatacctgtacaacagaaagcaactcagaaataa

SEQ ID NO: 826294 - DNA, 603 bp, Homo sapiens
ctctcaaagtgctggaatttcaggcataagccactgtgcccggtctaaatttcttctatcrcttgtatcatttctttttttttgtttaaatctctgatccatttgaaggttatcttgctgtgtagtgtgagtaatggatccaatttttctgtttatccacggggctatacagttctttctgaatatcactaaccaccaccaccccccaagaaaacccacaaaaacccaaacaatattcacacaaaattgagatattgagatcgtccttttaccatatattatttgtgtataaattgcaggatattccttttttcatgattttgtctaaaccgtgcacatatcccatattgttttaatttagattctttatagattgagttgttttaatatttgggggaggtagctcatcctcttgcccttttggatcgtcttcaggattctcttgggttttcatgctcactggtggatgtctttaacctgactaactagaaaagagtcagtcatttacctcttgccaaatcctaagagtggagctaaggaggtgcaaatctgtcatgaagtcctgagtgttttttaaacaaataaaatgcccaaagatacatt

SEQ ID NO: 826295 - DNA, 660 bp, Homo sapiens
atcgaattttttaaaaaagttttaagtctgcaccttgcactgtatgcagagctagcctccartacatcagttggttctctgctgaaacttactacttttgggggtgttataaaagcattagtttgagactagctacttgaagattagaaagtatggcagcaggcaagcccatgggcagattctttagcagattcagagataaaaatacagcccaggccacattagagagcctggccaactccaaagatttgagaatgactctggaattttcctggcttgcagttccagttcatgaccagagatggcgctaagtgtacagggaacctgcggctaacctgaaataggactgaagtctgagagcgtgaatcctcaattaacctcagcagcacaacatcaagatagagagtttgcaagaaagaaaagcaaagaataaatcaaaaagacttgcgttaggggagcctcacattagaaaagagataacagtgaaaatccctacagttaatatgggtagaagcactaaccaagtaaggcatcaggaatgccgatgaaaacactctgaacattgaggcatccgtgtattttctctgggtaaatccccttgagggaagtttttatttggcggaatgatattggaaattttcagggtttcatgttatatat

SEQ ID NO: 826296 - DNA, 570 bp, Homo sapiens
tctgtgatcttggaaggggtacaaaagaagatgtgtgcagttcctttgtctccctgagatggggcatagcagttaaatgaggaagtatgagttcaggaggctgctaaccctagcagggttttgtccattccagaaaagtaattgtgggcatgaaccactgtcatggttaaggagacactgctgctatctctgaatggggcaacaataacagatgaggcctgggtgaatactggggaacactgcactaagaaaaacactcatacagccatttggggactctcatgaccatgagtgtcaccagcagcaaggaaaatgaactcaaatcagagcaagaccaggggctagtgcccatgaacagccttcaggtagttgtataaatacaccttgccactaatatttctcccccagaaccccaggagatctaaacgcagaaaatgaaatgggagaaggaggtcagagtagactccatctccccgtcactctagcagccatgattacgagtcaaatctattattgaaaatggacgtggggtagaaagggaagatctaygattaaaatcgagtttcagat

SEQ ID NO: 826297 - DNA, 463 bp, Homo sapiens
cctgcccctccacctgttgcagagtctgcacacctcttctccaagcccatttctccatttctcttttcttctgggcacacagctagactacatttcccagcttcccttgtagtgacatatagccacgaactgagttctggccaatggaacatgggcagaagttgtgtgtatcccttctggacctggcccattaaaatgttctaaatgatcatacacattctctatccactggaggacattcttgggccagatgcagaaattccaagaccttagaatagagataaacaagtttttgggccagatgtaaatattttaggcttgtgagctacacagtatttgttgcaactgctgtcagagttcaaaagcagccataaatacgtaagtaaatgagtgtgattgtgttctagtaaaacttcatttacaaacagctggcagrctcaatttggcccatggctcttgccct

SEQ ID NO: 826298 - DNA, 629 bp, Homo sapiens
ataacaatattagccttaaatgtaaatgggctaaatgccccaattaagacactggcaaattagataaagcgtcaagacccatcrgtgtgttgtattctggagacccatctaacgtgaaaagacacacattggctcaaaataaagggatggaggaatatttaccaagcaaatggaaagcaaaaaaaagcaggggttgcaatcctggtctctgataaaacagactttaaaccaacaaagatgaaaaaagacaaagaagggtattacataatggtaaagggatcaattaaagaagaagagctaactatcctaaatacatatgcacccaatacaggggcacccagattcataaaacaagttcttagagatctataaagatatcttcaaatcttagagatcaacaaggagagctaactatcctaaatatatatgcacccaatacaggagcactcagatttataaaacaagttcttagagatctacaaagatacctacaaatcttagagatcaacaagaagagctaactatcctaaatatatatgctcccaaaacaggagcacccagattcataacacaagttcttagagatctataaagagacttacactcccacacaataatagtgggagact

SEQ ID NO: 826299 - DNA, 615 bp, Homo sapiens
aacagttgtttacccatgtatgtaggtgtatcagtccattttcatatggctataaagaactggctgagattgggtaatttataaaggaaaarggtttaattgactcacagttctgcatggctgggtaggcctctggaaacttacaatcatggtagaaggcaaagggaaagcaaagcaccttcttcgcaaggtggcaggaaggagaagtgccgagcaaagggtgaagagtcaccttataaaaccaccagatctcatgaaaattgactcaatgtcatgagaacagcatggcggaaactgcccccccacttgattcaattacttcccatcagatttctttccataaaacatgtggggattatggggattacagttcaacatgagttttgggtggggacacagccaaaccatatcagtgggtgttagctgtaacattcttttcactactctataggttcaaatttttttaaaataaaaaattggtgtaaaataaataaactaagctgagattaggaccatcctcaactacttggtaggagcaaataaactatgcctgaatgaagagataaatatatgaagtacgaaattacttcatctgtatctcagctgtcactcaca

SEQ ID NO: 826300 - DNA, 615 bp, Homo sapiens
aacagttgtttacccatgtatgtaggtgtatcagtccattttcatatggctataaagaactggctgagattgggtaatttataaaggaaaagggtttaattsactcacagttctgcatggctgggtaggcctctggaaacttacaatcatggtagaaggcaaagggaaagcaaagcaccttcttcgcaaggtggcaggaaggagaagtgccgagcaaagggtgaagagtcaccttataaaaccaccagatctcatgaaaattgactcaatgtcatgagaacagcatggcggaaactgcccccccacttgattcaattacttcccatcagatttctttccataaaacatgtggggattatggggattacagttcaacatgagttttgggtggggacacagccaaaccatatcagtgggtgttagctgtaacattcttttcactactctataggttcaaatttttttaaaataaaaaattggtgtaaaataaataaactaagctgagattaggaccatcctcaactacttggtaggagcaaataaactatgcctgaatgaagagataaatatatgaagtacgaaattacttcatctgtatctcagctgtcactcaca

SEQ ID NO: 826301 - DNA, 640 bp, Homo sapiens
tgccaatcacagtcctggctccagacccaaaaatggccctgttcccctgtgtatttggctatagtcacatttggcattggccctactaaaagaactatctactaagagacccaaaataagtcaggcccacttgtgcctcaaatgtcacacctgcctatctcagtcctgactgtggagaaccccgaaatggttcagtaacttggctccagccctacttagtagttctgtacacacagggactttctgagagatacacttgtctgtgctgctgaaacatatttgctgaccttgatgccagcagatggcaaaacatttctgttattcaactatggcctttctcagctgccctctgagagtagttctgcacaccagggacctgaagggagatatgccaatctgtatccctgtgcacactcccaacaaccttagtcccacagtaggtcatgaaacagttggataacttagctccagcccctctcatctatggactgagacatgttttcctggcccagatgcccagagagaaatamactagtccatgcccccagaggaagcctgcagatccaaatataagctgtagctgaagccggcttttgactcagttctagtccctctcatttgcagtctggggctagtaata

SEQ ID NO: 826302 - DNA, 508 bp, Homo sapiens
tacatctattctcactagcagtatgttattatatatctgaattagatcatggtaaactaagatgtatttggtaagtcctagagcaaccaatataaatttaaaaatacagtttaaaagccatttaagtatgaaaatattatactagaaaatacttaatgctaaagaaaaaaatgaagaagaaatagaaaaacaaacaagatataagacttacaggacactaaaatgccagacataaatccaactatctcaataattatatcaaaagtatgtagattgaacaatctaatcaaaaattatagattgccagtctgggtaaaaacaaaaaacaaaaacatactccagttctatattgtctataggaggcacatcttagtttcaaatatatgsatagtttcagaataaattaatggaaaaagcaaacagcaagcttgctgtattagtgtctgacaaagtagactttaaaataagaaatgtaactaagagaaagagtagattttatattgatgaa

SEQ ID NO: 826303 - DNA, 617 bp, Homo sapiens
attttatagttttattttcttctttgcagatgttcagcatcatcaggattatttattggatcactaataactgtgttaattggagaaatcraatgacatttttcttcctcagcaagaaaacctgaaacaggtgaaagaagtaaaggtggaaaagcaaagattccaataggtaaatgtttgtggaaaggctatttgtggcttccctggtttccctttggtacaaccttttaggatttatctccagtgtaaagaatgtatatttcttttaccataagaaaagctctctggttgtcatgaatttctatactgttcctttttcagaataaattcccttgaattgagttgtggaagagatagtcaaatatgacagccactcttctaaagaaaagtaaaatatcattccagtgaaaaaaaagtaaattttgattgtgaaatttagtgaaaagagaccagggcttaagtgaccaaagatgaaagttttagtcccaatttgtgaccttaaaatttgtataatcttgaccaagcacggtggatcatgcctgtaattccagcactttgggaggccaaggcaggtagatcatgaggtcaacagattgagaccatcctggccaacatgg

SEQ ID NO: 826304 - DNA, 523 bp, Homo sapiens
tgtagtatattttgtgtgtggtgcctacagctttgttctttttgctcaaaatcctttgtctatttggggtctcttctgatttcatataaattttaggattgttttttctatttctgtgaagaatattattgttattttgacagggattgcattaaatacgtagttttctttgggtagtatggacattttaacaatattaattcttccaatccatgaccataggatggctttcaatttctggcgtcctcttcaatttctttcatcagtgacttatagttttcactaaacagatctttcacctcttcggttaaatttatacttaggtaatttttttgcacctgttgtaaatgggattgctttcttgatttttttttcagatggtttgcaattggtgtatagaaatgctactgacttttgtgtgttgattttctattctgcagctttactgaatttgtttattsggtcaaacagattttggtggagtctttaggtttttctaaacataagattatgttgtctgcaa

SEQ ID NO: 826305 - DNA, 563 bp, Homo sapiens
aggagacgtacttccagggataaaaatttattaggataaaacctaatgcaaacacaattttctctggaaacaccaacaagaggagcaaaagaataagcaaagatgattccaaagaaaatgaaagcgattgcgattaatggttggggaggaagggaggaaactacaggccaagaacaaagaacaagaaacctctgaagcttgctacaaagggagctcttgaccccctagttgaagtcattattatttcatgcctactagggctgccaaacgggcctctctgaacttgagctctgcttttttgaataatacactcccatcatcatgttgattagagtacaggctaggagcatggtataaggtagaaccttttgggatcagacagacctggagctgtatgagttatttaacctcactgtgccacaatttccttgtctgtacaatggggatatgatactacctgcyttaaatgcaatcatgcttgtgaggtacctaacacacttatccctcaataaacgatattattacttctcttagcactatacttctttcacaccacttccctg

SEQ ID NO: 826306 - DNA, 563 bp, Homo sapiens
aggagacgtacttccagggataaaaatttattaggataaaacctaatgcaaacacaattttctctggaaacaccaacaagaggagcaaaagaataagcaaagatgattccaaagaaaatgaaagcgattgcgattaatggttggggaggaagggaggaaactacaggccaagaacaaagaacaagaaacctctgaagcttgctacaaagggagctcttgaccccctagttgaagtcattattatttcatgcctactagggctgccaaacgggcctctctgaacttgagctctgcttttttgaataatacactcccatcatcatgttgattagagtacaggctaggagcatggtataaggtagaaccttttgggatcagacagacctggagctgtatgagttatttaacctcactgtgccacaatttccttgtctgtacaatggggatatgatactacctgccttaaatgcaatcatgcttgtgaggtacytaacacacttatccctcaataaacgatattattacttctcttagcactatacttctttcacaccacttccctg

SEQ ID NO: 826307 - DNA, 482 bp, Homo sapiens
tgtttttattttatttttcccaaataagaaagtttagtyatttttttaatgagtaactgagacagtaaactgcctgctttaaatgtctgaagaagtctttattttgacttcattattgatagatagatagatagatagatagatagatagatagatagatagatgttataaccttaccattgtttttctgcagcacttcaaatatattaatccatggctgggcatggtggctcagtcttgtaatcccagcactttgggaggctaaggcaggcggatcaccagaagtcaggagtttgagaccagcttaaccaacatggtgaaacccggtctctactgaaaatacaaaaattagccaggcgtggtggtaagcacctgtaatcccagttacttgggaggctgaggcaggagaatcgcttgaacctgggaagtggaggttgcagtgagccgagattgcaccattgcactccagcttaggcaacaag

SEQ ID NO: 826308 - DNA, 359 bp, Homo sapiens
cctggcctccactcactaaatgttaatagcatcctcctagtcataacaagcaaactatgtctctagacattgtcaaaatttcccttgagggaaaaattacctcttgttgaaaacaattgcccmagatgatctataatcatttactacagtgctgaagataactatcatctttagttccagggttgactgacttaattcatgttatgctaattctccaaaaacattagacatcttcattaaaatagcatataaattataaggcatccctgaactatttttacaaaaataacttattttgagaaggtgttgctttgatgttgaaagaataagagcataaattttttaaactatatgtagaa

SEQ ID NO: 826309 - DNA, 359 bp, Homo sapiens
cctggcctccactcactaaatgttaatagcatcctcctagtcataacaagcaaactatgtctctagacattgtcaaaatttcccttgagggaaaaattacctcttgttgaaaacaattgccccagatgatctmtaatcatttactacagtgctgaagataactatcatctttagttccagggttgactgacttaattcatgttatgctaattctccaaaaacattagacatcttcattaaaatagcatataaattataaggcatccctgaactatttttacaaaaataacttattttgagaaggtgttgctttgatgttgaaagaataagagcataaattttttaaactatatgtagaa

SEQ ID NO: 826310 - DNA, 596 bp, Homo sapiens
ggacttccactcctgccaggaatcagtaaggcagcacatacccgttctcttgctcttgtggtgccagaggaaaaaaaaaaaactaaaacagaaaattgaaacagagccttgtagccaataacatactagcccagatgatcaggttttagtacaaaatcactcatgttatgaatattcaagaagatgtcaaactgaatgtaaaataatcactagataccaactttgcctttacatgtgtagttttacctgacaaaaatgtaataaaagaagtaaactcaatgaatgttttcaacagcagaatgatgagtacataagaaagtatcagtaaactcaaagatagaagaatgaaagggaaattagaattaatcagtaaactcaaagacagaaattacctaatctgagcaatagaaagaaaacagagtagggaaaaaataacagaagtttagggacccatgcaattcaaacaatagatctatcattcgtatcatcactagtttttaaaggaaagaagaaagtggatggkgctgaaacttactggaagaaagagtggctgaaaactttttaaatttggtaaaacaaaaacaaacaaaaaacat

SEQ ID NO: 826311 - DNA, 402 bp, Homo sapiens
tgtatctataaaataaaacagtaaactcagccataatgagataatggggtctaaaggaattaaattgcacaaaatgtttggtcaaatttattgtgagattgataaaaattattttttactattactgtcacaaaaagcacaaaattcatgactttgaaacttattgcatgcattccttattagtgaattgagtaatccccattgattgtgaggcagtgatttctatgacccctccccatctcattacttataagtcatgtatgagtctcctttgttctataacttttctgacacttgggactggaattttaacttttcttcacacyggctagtgtaaaatgtcatcctgccctgtgttgaaatagcatttccctggttaccaaaattaagcatcatatatta

SEQ ID NO: 826312 - DNA, 548 bp, Homo sapiens
caagactggttccttctcctattgttctttagattattaatcgagactgtttctcaagataccccatgaaaataaataacattatttgaatttatacctttcacaacagttgagatccacgttagttttaacatcagataaatttagcagtcttagctatataatgtgacttgcacatgaatttaagagattagaaaaacaaaaggcaaaaaatagcctaacacagaaatgaacgcacacactcgcgcacacacacacacatacagacacgcacacgctagagagagacatcttttaaagcaaaaattggttttatattcctaattcattatcagttgtttatctagacgttacttaatttagatatactatatacgtatgacactatggtcctcatgctcttgaagtagtgtttcttaaattgagtgtgcataggaactccctggagagtacaagtaaaattcctaggtccccaycctcagaaatgttgattatgtaaatctcaggatgggtctgaggtattttaaatgttatgtttggaacctgct

SEQ ID NO: 826313 - DNA, 577 bp, Homo sapiens
ctgcagcccaggcatagcaaaacattcggggaggaattgtgctgtacaaatgattttaccaaccttatcacattaagcagcattcaagggttttctgaccacaacttaggcaaatttcatgttatgctatagtaatgaacttacttgttctatttctaaacaaaacattgggttcacattggcctggacaaagctttccactccagtactatttacttgtccacttattctcaaaaatacaagatgaatgatgtgcaataccatggctgtggcacatgacttttctagacctggatcatttgtgtcccaatatttgactgattttggggtgggatgaaagcatgccttcagtttgtacttctatcatgcccattgctaccatacacttaatgacataatcatgttccaatgtgtcctcagaattactattcctagctggatatactaaggctttatatctaggtcagttcattgagtctgtgtcccctctactccctccatcgtccctccacagtatgaagcatcctcataggaagccttgtaagtagmtctaaagatagaccccgcttggcctttc

SEQ ID NO: 826314 - DNA, 609 bp, Homo sapiens
tcttcgtaatgcgtgacggaaacagatttcttgtacaaaacaatgtatgataacacaattaagagattaagtcctgccttcagatcatcacagaaataaatgtgacatgaggggatgatggcgyttggaagacaaacaaaaaaatgccaaaactaaggaagtaagtcacaagaacttatcataagaacatctttgactctaagggacttaaaactaaacttgggcaagatctttaagggcccaagttaatgtaggagctacatgatctctttcattttagtgcagcaaactttgtaacatctaataaactacacttgagcattctattctttctatattttgagacataataatttaagtccatatgaagaaactttgtgaacctagaataatttccatttgatcgtaaggtagagtcattttaacaaagtgctaaaataggcctttaactttgtattattaaatctatgtttgcaagaatgtgctttagttttcttatatgccagataaattaagaagctttatattttttatagagtttagaaattattacaaaatatagaaattaactgctcgttgaaaatcttggtaaatttttgaaaagctttt

SEQ ID NO: 826315 - DNA, 641 bp, Homo sapiens
atggtgttttataaatatttttgggtgagtactactaaaattattacagtggaccagagatataaataaaarataacactccagatgttttcagaagacaagctgttaatgagtgtcaatgtaatgataagaaaaatatgagttaaatgaaaaaggaaacttaatggcaagaaaggagctatgaggaataaaaataaccaggagcattaaattttgtacattatgaattcaagacttcaaaaacaaatttgtcacaattgacttgtagtcacttgtgatagtacttgaaatttttaaaatgagaaaaagaggtaaggaaagcaagtaaaaaggaaagaggaatcttaaatctagcccgagaaaacaccagccagcaataaaagttacattataagtatctcattcaattcttccaacaatcatgttttgtaacaatttattttataggtgtagactgagtattactgtagtatccacttctgagatctgagaccttgatgaaatttttaatgatatgtaacaacaaagagattttaaatgtcttttaggaaaagttcatttcttacttagcccaaataaggaaaacacaattcagcattctattctagattatcttcttttcttattccacatgcacctat

SEQ ID NO: 826316 - DNA, 641 bp, Homo sapiens
atggtgttttataaatatttttgggtgagtactactaaaattattacagtggaccagagatataaataaaaaataacactcmagatgttttcagaagacaagctgttaatgagtgtcaatgtaatgataagaaaaatatgagttaaatgaaaaaggaaacttaatggcaagaaaggagctatgaggaataaaaataaccaggagcattaaattttgtacattatgaattcaagacttcaaaaacaaatttgtcacaattgacttgtagtcacttgtgatagtacttgaaatttttaaaatgagaaaaagaggtaaggaaagcaagtaaaaaggaaagaggaatcttaaatctagcccgagaaaacaccagccagcaataaaagttacattataagtatctcattcaattcttccaacaatcatgttttgtaacaatttattttataggtgtagactgagtattactgtagtatccacttctgagatctgagaccttgatgaaatttttaatgatatgtaacaacaaagagattttaaatgtcttttaggaaaagttcatttcttacttagcccaaataaggaaaacacaattcagcattctattctagattatcttcttttcttattccacatgcacctat

SEQ ID NO: 826317 - DNA, 580 bp, Homo sapiens
tagctccctcggatcccttctgttcctgagaagtagrgagtgcgccgatgtaattctgtgcaggactccggcagccggcaggggttctggtggcatctatgtcccacgttttaaagcagaggccccttacagagatggtgcaggagggtgaatggaggcagggaatgagaagttttcctgaccctccctcccttaactccacccccaggtctctgcctgcacgcccctcccctcctccagcttggcactggctgctcctgcgtgctgggaggtgcccccctctcccgtgcccgcccgaagaaccaggcgccccagtgccctctccgggagaaagcgtgcccctgtcggcgagcctgttgccaacgtatggttccgagttcccaagagcaaaggccagcctggttggggttttcagtttgcctttggcctttctcacggtctcctcgctcttcgcctgcttagcaggggcctctgctgcggtgacagccaaggccacagccacccacgcaggacccgttcactttcccctccgagcttacttgtctttctaccctaaggggctgctgcggccagagcagcc

SEQ ID NO: 826318 - DNA, 476 bp, Homo sapiens
catcttgatccacctttttttttttttttaagtggkgaggtaaacgccaccctatggtcttttgaggaaacaaatgcattggtgccaggtgagaggggctgcaccaagtcactgctgcacgaggaaaccaccttgtgggagaccagccccaggagacagcagctgcccacgcatgtacctgtgtgtaccctccctggtctcccttcactaggtgcctttcccagccttagccctgctgcattgacagcatcggctgcagggcatcgtccattccgctgacccctggctccttgccctggggatccagcttttccctttgtgagatcagaatcctatgggatttttgtgaaacaaacaagtaaacaaacaaacaaaacaaaccattataagaaaccaggagaaaataaagggaagatatgcaaaccacaaaagtaataaaacaggtgagctgtaggtgcacagatttctgaattttc

SEQ ID NO: 826319 - DNA, 572 bp, Homo sapiens
taatctaagggcagttagatggacttctttagaggcgggaatgrgacagccaggtgggagggggtcactgcagaaactccaaccggcctgcacagtgaggtggagccttgggaagttcatgacgtttgcagcagggaggagcctcgccccccctttcctatgtggaacctgggactcaagctgtgggcaggaagcgctctagcagggtctctggcccagcgagactccctgtttcccccttttcttccttttcacccaataaaaccctgtctcactcaccattcaaattgtctgtgagcctgaattttcttggctgaactaaggaaaagtcctgcaactttatcaccccaagttgttcctgacgtgttttatgtaaactgaatcttgggtcccatgacccttccctaaggctttactcagaggctgacttggtattaggagcccagaaatgtccatcttggtcctcttgggaatgaagacccatcctctggtttcggtggcccaacatgcagcctgcactgatgtgcctcccagggtcccccacctgggactctcactgcactaggtttggg

SEQ ID NO: 826320 - DNA, 705 bp, Homo sapiens
ggggcaagtatcaccacccataggatccgcatacmcagagggccccccagggaaggggaagagttctactacaatcgtattgctgtaatgtgtaatttaagtaacaaaggtgctgtgtttcactgggggcactgttattgatttggaatatgtgctgacaactgtctggtgggagaaaccccagagtgtcattggggaagccatttaaggcccccaaacaaagggggggccataaggagtccagctaccagtatgacaggttccccgtatacgctgttccaggcatatcaggtaggatacaaaagcttttgactcattgcaagggtggatttcgccttttgttgaatttgggcaagaatagactgtttagtttggttaaaagaagttcaggttgtactacaggtgctattctcccaaccccattggtagcgacatagccacttggaaatattagcagagataatattctaaggtaatccattccctgcagcctctggcaactcgacacataccagcactgactgcggttgagctcttttgcagcagtggctaccaggtaataaattcattctaggcctcagacacaaagacacaagacacatcagtagataggtcattccctgtaatagcaaaagtggaggggaacatgatattgttttttcatatttaggaaattgtactatgccttcattttctgctcccata

SEQ ID NO: 826321 - DNA, 539 bp, Homo sapiens
tttcagctcagtgcaacctctgcctccagggttcaagtgattccccctcctcaccctccggagtagctgggactgcaggcatgtgccaccacrgccagctaatgttttttgtatttttagtagagacggggtttcaccatgttagccaggatggtcttgatctcctgacctcgtgatccacctgtctcggcctcccaaagtgctgggattacaggtgtgagccaccgcgcccggccaattttgttttttaattggagaaaaggaacacaaattttattaacacgtacacagaagaaccacagagtgagtaccctgtttaactttttttaaccaagctgtattggttaggatcttccagagagacaggacaaatgggatatatataaaatggaacttattaagggggaattggctcacatgattacaaacacaaagtcccaagagagatcgtctgcaagctggaaaaccagaggagccacaagcatgtctcccagggaactagtagtgtggctcccaaagaggctcagtccaagtccaaa

SEQ ID NO: 826322 - DNA, 529 bp, Homo sapiens
atggtagcaaacagtccctctgacggttaattttatgggtagactatggttctggtcaaactcaaggtcyatatgtggatgggcttcagccaaacaattgaaggccttaagaaaaaagacagaggtctcatgataaggaaagagttttgcatctagattgcctttagacttaagactgaagcattgacttctgctggaatttctagcctgctggcctgtcctacaatttcagacttgtcaactcccatatttgcatgggtcaagtcctcaaaataaatctgtttctctctctctctctctctctctctctctctctctctctctctctctctctatatatatatatatatatatatatatatatatatattccagtcatattaattaattaatcactcaggggtcagagctaaaggaagcttcacctcaacctgtgctcccgtgatcacagtagcagggggagagagtcatggtaaatcacacagtggctcctaaagcttccatccagaagtgatgcctgctactttca

SEQ ID NO: 826323 - DNA, 529 bp, Homo sapiens
atggtagcaaacagtccctctgacggttaattttatgggtagactatggttctggtcaaactcaaggtctatatgtggatgggcttcagccaaacaattgaaggccttaagaaaaaagacagaggtctcatgataaggaaagagttttgcatctagattgcctttagacttaagactgaagcattgacttctgctggaatttctagcctgctggcctgtcctacaatttcagacttgtcaactcccatatttgcatgggtcaagtcctcaaaataaatctgtttctctctctctctctctctctctctctctctctctctctctctctctctctatatatatatatatatatatatatatatatatatattccagtcatattaattaattaatcactcaggggtcagwgctaaaggaagcttcacctcaacctgtgctcccgtgatcacagtagcagggggagagagtcatggtaaatcacacagtggctcctaaagcttccatccagaagtgatgcctgctactttca

SEQ ID NO: 826324 - DNA, 609 bp, Homo sapiens
aaacaggtattctcggctgggtccagtggctcacatctgtaatctcagcactttgggaggctgaggcaggcagatcacttgaggccaggagttcaagaccagcttggccaacatggtgaaaccccatctctactaaaaatacaaaaattagccagtgtggtggtgtgcacctgtaatctcagctactttgggaggctgaggcacaagaatcacttgaacctgggaggcagaggttgcagtgagctgacatggcgccactgcactccagcctaggtgacagagcaagactctgtctcaaagtattctgactccagacccagtgctccatctcatcttcaaatcccttgccaatcagtgacattttttgttttgcaaaaatctttacaaatttcacttaaaagttgctccaatatgttctgtgattctattttagatttttatttcttaattcaaaatgatcatctttgtcttttcacacaataatacttcataaattacccttytattgactactgtaaatgtcttcacatcaaattgtttttggtttcattaatatattgcaaacagaaaatacctggttctgcatgggtaccacataagataagccaa

SEQ ID NO: 826325 - DNA, 693 bp, Homo sapiens
caaagccaatgactgaagtctttataagaaaaaggaaaggaagatttgaggcacaaagacacgcagggataaaggccatgccacatgaagatggaggcagacattggagttctgcagttatgagccacacaacagcccccagaagccagaaaagaagtgtcatggaaagggatctccctcggagtctccagaaggaaccaaccctgccaacaccttgattttggacttctggcctccagaactgtaagagaatccatttctattcttttaagtcaccaagttcgtggtaacctatttggcagccctaggaacctaatttgccacagtagaatgagcttttgtaaacagaagtaaatcttaaattgtatcaaaaaatgtaattattattttaattgtattataaaaatttttgtagtcagattttaaaaagtttattgctatagtttagagacaataatttctcatttgctgcatttcgcccatggccactgaagtacatattcatgataggaatagacatttactttcagctgaggttaatgtaagagcaagatttctaaggtgcctaattttttccttacaattgtttttatcttyttcaaattctttttacgtgtgtatctaagataacttatcgctgacatacataatttgggagttaaaatcaactttagttggccaagttaatattta

SEQ ID NO: 826326 - DNA, 625 bp, Homo sapiens
ggcatccctttgtatccccaggcaattggtttctggaccactcctccttatccccctactttcctataccaaaatcctcagatgctcaagtccattatataaaatggcatagtrttttcatataacctatgcacattctcctatatactttaaatcatctctagattacatccagtaccctaacgcaatgtaaatgttatataaaccgttgttacactgtcttggttttttatttgttatttttattgttgtattatgttttttttttttaatattttcaatactcaattggttgaatctgtggatttggaacctgcagatacggagggctgactatatatttggcattcaggtgacttttgttttgcagtatattcattcaataggggtagaagactgtaatattagttataggagaggcactaagctttagggtaaattttatattagaaatgtattttattgtctaatcattgaggatctgatctcatcaattcgctgactttcattatatccacctggaaagaatggccatgaatatggaaacttatgttgtccttggccacaaatgtttgaaactctccaatctggactagttgtcttttcttcctaggatcctccttca

SEQ ID NO: 826327 - DNA, 570 bp, Homo sapiens
tctcccaggctggactgcagtggcgtgatctcagctcactgcaagctccgccccccgggttcacgccattctcctgcctcagcctcccgagtagctgggactacaggcaccygccaccatgcccgactaattcttttttgtatttttagtagagatggggtttcaccgtgttagccaggatggtctcgatctgacttcatgatccgcctgcctcggcctcccaaagtgctgggatgacaggcgtgagccaccacgcccggccacagcatcacttttaatggtggcatggcattcccacatatttctgcgtcattgtctaaataatttcctatttttttacatgcaagttgtcccactctttttattatcataaaaacactttgacaagcattcttagagctaagtctttgttgacatcctaattgttgggataaaatatgtgcagattttcaaggtcttaatatatatcaccaaagctggaccagtgaaggtatactgccacaagcgatattttgccactacattttggttgttctttgcttttcttttccaagggatacctatttgagt

SEQ ID NO: 826328 - DNA, 505 bp, Homo sapiens
ttctccaaggatacaagatttaatactctggcaaggatcccaggaggaagaactcctgtgttgctagtgkggcttctgggaggccggagaaagcaatgattcgtgctaaaccaagtcagtgtgccagaactattgtggcaagcgctggaagaaaagatcacaaaggccagagaagtgggtatactagagtatactcgcactatgtgaggctggaaaattcaccagatagtctgcaggagagtctgaagtacatgccacttcctgaagtgatcaggaatgaactggggagagggacaccagcattgttgaaaagtttggcgagtctcactggttcagctgttctcaatagaccagcactgatggtcattatagaactgggatctctgatgacaacagggatgataagatccccaaagaatagggatcaggtggttacattttgctgtcagaagtgagggggcatgatggttataatgagtgcaagatcagaaggtcagctaaggga

SEQ ID NO: 826329 - DNA, 505 bp, Homo sapiens
ttctccaaggatacaagatttaatactctggcaaggatcccaggaggaagaactcctgtgttgctagtggggcttctgggaggcyggagaaagcaatgattcgtgctaaaccaagtcagtgtgccagaactattgtggcaagcgctggaagaaaagatcacaaaggccagagaagtgggtatactagagtatactcgcactatgtgaggctggaaaattcaccagatagtctgcaggagagtctgaagtacatgccacttcctgaagtgatcaggaatgaactggggagagggacaccagcattgttgaaaagtttggcgagtctcactggttcagctgttctcaatagaccagcactgatggtcattatagaactgggatctctgatgacaacagggatgataagatccccaaagaatagggatcaggtggttacattttgctgtcagaagtgagggggcatgatggttataatgagtgcaagatcagaaggtcagctaaggga

SEQ ID NO: 826330 - DNA, 539 bp, Homo sapiens
aggacaaaaatatactttccaaaatgggtggctgcttaatatgtacccaacctctgaattcaccttcctctctaatagccctatttctcccaaaaagctacctaaatctttaaccgataacttcaacctgtaccatcctacttcaggggtttaaaaatagcccacacttatttggatgagccctagcaaaaatctaaccgagcaatctcttgaggggaaacaacttctacagtatgtagataacctcctcatttgcttccccttcacaggacacacacaacaacatgcagtacaaaccataaattcctaacagaaggaaaataacttttctctaattcaaaggttataaaggtaaagaggtatttttgttaaggaagattataaagaaaagaaattttatatgagaaaggatcttttgtcgtaaatttgcrtcctaaagaaaaataactgattgtttaaaaagagggatgcttaggacaagtgagaaagtccaagcttttcatagatgttctgtgtaagtcatgaaaagatttgtgaaa

SEQ ID NO: 826331 - DNA, 622 bp, Homo sapiens
taaaactgagattgattgagtaggataaatatgaaaaacgtaacatatatccacacaaagtagttacaactgaaacctaataaaacttaatagctgtgcaytgagtagaagagacactgaggtcagtatttatgaattcatattagaaactctttcttttgtgtatatcaaggaaactacttggtatgaatagacagtcttcttttttcccttgggttttcttccttctctttatcccttgctactacagttactactttacagctttaatttaggaggaggaggaatctgctcactaacgcctgccactgtgaacacaaagaatgagagaaactaccccagggctcagcaggaagcctgatctctagcactggattaagcttttttgcaaacagcaaataaaggcagtgatctgaaaaagctaatcagatcctgctgtggtatttagactatctcggttgctagtattggataatgttaagcacattaaaacatctgtaggtgaaaagacagcccccaggctggctttcttagtcacatggccctagtccacttcccactgcagggaaaatacaaacagctggactgggctctgtttgggtcactgaaataaatgactgag

SEQ ID NO: 826332 - DNA, 612 bp, Homo sapiens
aagacctagtatttgacagcacaaggtgactataatcaataataatttaattgtacatttaaaaataactaaaagggtataattagattatttgtaacacaaaggagaaaagcttgaggggatggataccccattttccatatgtgattattacacattgcatgcttgtatcaaaatatctcatgtcccccataaatatatacttatgtgcccacaaaaattaaaaataaattttttaaataaaatttttagtagcatcatctacaaaaaagttttaaaaattaaaaaattaaagtacacacacacggttggttacctcaatatactcagaaattgcgtttaataaatttaaaaccctctttttatttaaaaagaaaaaactcttagaaaaatatgtatatgtatgtaaaaggaagtttcataaatctgataaaagtcatatactaaaaattaggctggtgccatgtgcctatagtcccagctattcagggggctgaggtgggaggatcacttgagcctgggaratggagggtgcagtgagccaagataacgccactgcactccagcctgagtgacagagtgagaccccatctcaaacaagaaaagaaatga

SEQ ID NO: 826333 - DNA, 616 bp, Homo sapiens
atactcctgaaatatagtagctaggtcttaagcgcatctgatacttaaaactttatttctgtttaatctaggcgacagaaggctagagagaggcagcagaaattgcttgcggagtttgcttcacgacagaaaagctttatggaaactgcaatggatgttggtaagtcaaaattattagtttagaactctcataattatacttattactttagggatgatgtagtccagtcttttactaatttaaaacattacacacttttgatttctagtgtttatttggtccttaaacagtatagtgatggaagatcagacttttattatagacttttattatattctgttgttagtagctgtaattggtaagaagttcttcctgatggtagcaatatagtatgctccttttgttctcttctgggaaacggtctttagatttgtgagatccatcaatgtacatttacttgtcttgatctttttctgtgaaattatcttaaaatccttaaaatagtttcaaatgcttctagtgcctctttctggtmtcccttcattctttcttaaaatcaggtgaacttctcatttcccttaagattagcattagaatttatacagtgagagagga

SEQ ID NO: 826334 - DNA, 708 bp, Homo sapiens
aaaagctaataacgtagtaaatcaacctacagactatcgtaatttttaattttctttcactaaagaaaattatatatttatatagctataaactaatacactaatatatatttatatggctataagccaatatacttctaattaatgttctgataagaatctgtctcatataaagtattttattaagtgttttttaaaaataactaacaattacgaggttcagaaaaaaactggaccagttacctaaattacatcatgttcctcccttcatagatttacaattgtaaatagttagacccaaattttatcagcaaatttcttaaatgtgttatttttcatgattagacagcttactaaggaaacatttaaataatgacacagcacagaaacctaatatacctcatttgaatactatctgaacactaacaatccaaatatcagattacattgcagtcagaaaaattaaaagaatatttaggaaaaataggccaggcaaggtggctcatgcctgtaatcccagcactttgggaggccaaggcaggtggattaccttgagtccaggaattcaagaccagcctgggcaacatggtaaaaacccagctctactaaaaatacaaaaaatcagctgtgtgtggtggcacaagcctgtagccccaactactcrtcagggctgaggtgggaggatcccttgggcccaggaggttgagg

SEQ ID NO: 826335 - DNA, 574 bp, Homo sapiens
caggctgctataacaaaataccatagattgggtagcttataaacaacaaaaatttatttgttatgtcctggaggctgggaagtgcaggatcaagsgtgccgatagatgcagtgtctcccgagggcatgcttcctggttcatagccattttgctgtgtcctcatatggtggaagggggtagatatctttggggttccttttataagggcactaactcgcctcatgagggatctgccctcatcctataatcacctcccagaggtctcacctcctaatgctatcaccttggcaattaggatttcaaaatttgagatttggggaacacaaaattttgaccatagtagtcacctttcacaaagagcaaccttcacaaagcataaagctttgctttgaagcagctcagtaatagattaagtatgtttgaccataacagcctgccagatatctcatccagagactcaaattagctctatgatatttcatataaaatcctgactttcaaattaccaagaatggaaggaaatgacattacataaataaaatctatgggaaaataaatggaaaatagacacaga

SEQ ID NO: 826336 - DNA, 523 bp, Homo sapiens
atttgtaattcaaaaatctcattgcatgaacatttttaggtcagtttttcaccaaatacatacagtaaaaatgtcgatgtgtattaaatagcctcactggttgtcatggtgacattatctaatttgttkcccattttctgtttaatcactaatgctacaggagacttgcctatagcttgtttggcctctggaaagtgactgacaaattcatggagagacaaacatatacacaaataaaatatgactgctactccctattttctcttcttccttttagtcatttttgaagcactagctcggttcacaactgaccgaaacatcaatagcttccaaaagtctactttagcatatctttttaaagtgggaagcataccatctgggcattagataagttcgtttctagtcacagctcttacacttacacagtgcctattattttatcatttacctggaacttgacagtctacaaactactttcaagtaaactattatatttgatcctcataaaagctctgagattcat

SEQ ID NO: 826337 - DNA, 590 bp, Homo sapiens
aacaaagccatgaatctttcaaaactgctttgcctcatggagaccaatcaccctgcattaaaagacacractttggagttgtttttttgttttgtttttttgttttttgtttttaagtaaagtgaacacaaagagcagaagcaattattgaaggccaccacttcatcaaatgtgtctacactgaaacgatcatttttagtggctaaccacactgctaagctaagaagccatttagcattagtgaagagttgatcctgcctgctgctaagaacatttgtcttgaacttctaggagaggatgcccttcaaaaggtgacacgccttccccttttggctagcaccataactagacgaactgatgaagtagtagaggacattgaggcacagttggtaaagaggattaatgagtcaccatgttacgcaatccaggttgatgagtctaccgatgttgacaaggcaacaatgcttgttttgcgcaatatatttttcaggaggatgtgcatgaggatatgttatgtgcgcttttgttgccaaccaacaccgcaactgaattattcaagtcttgaataacgacatttcaggaaaactgaa

SEQ ID NO: 826338 - DNA, 550 bp, Homo sapiens
catgaaaaggaataaagaagtagaaagaagaatgtacagatgattcttgagctgagggcctaggagtgaggagaggagatggttattttcattrggttttcctaaatgagttttatttttatttttaaaatatttttaatgccttaataggtttaatatcatttctaccatgtggatctggagttttctttgtaggatcttttgagtaatgagtctaattactattatagatatagaacttgtcaaaatttctatttattctaatgtcggttttaaaaatttatggtttacaatatatttatccttatttctaagttgccaaatgtgttgataaagttatgtataatactttttgttctcatcttaatgtctgtagtaatgtctctcttttcattcctgatggttggtaattcatgtcctctctctctttcctctctctttctctttctctctctcattgaaaaattgtgtcattttcacaatttttagatttcacaatttttagattgaaaaattgtgtcattttcaaacatccatattttggctttgt

SEQ ID NO: 826339 - DNA, 598 bp, Homo sapiens
ctgtgatcaagttcagcctgaaagatggaggtttagaggaaaatagaaatygattgcagtaacaagcatgacgaatagtgtgccaggagaaacaaacctagactgaaggtgtgagcgctcgagtttacaaagtcaagttttgcattggtttggctggtggggaaactctagaatgccatgcagcagaaatgaaaaagtaacatctcagaatctctgatcattttggatgtctatcaataaacctagcatggcagattagcagagaataagtcaagaagaattatgaccagagaagattaattgaagtcaaggttcctatgactaaatttgtttatatctgggtgctgagttagaagcccaactagttcgtctgcctcacttttgtgttgctaatttctttaaaaaaacaacaacaacaaaagatcatcatggcagatgggaggcaggactagattgcagctctgactcagatggacagagcagtgtgcagaggcttgcatcatgaattttagctccagaatgacaagaataaaccagaaatcctgagaggatccacagaccctctgaaagaagcggactgttcctgcaggacctggaa

SEQ ID NO: 826340 - DNA, 525 bp, Homo sapiens
tacacatagtactctgtcagattggaaacaaattatggaatacaatttcttgatttgcccactcatgtagctttagcagaatctcaaatccaaggcgatactctagttcatgaagtygcataaataactgtattgtttcatgccaagtttagcaacacaacattcttgctatgaatagcacagtcactgcagggacagacccagccatgtgacaaggacttatctgccctgtctggtgtgacagcttctattcctgtcactgaagcatttgtgattggaacgtttgtgattaaatagtgttccttctgtacaccctggaaaatgatgagcacaggtaaacctaagctaagcaaagactgtcatggatgataatcaatgggtggggagatttaataacatagactgaatctttgaagcctttccccttggcttgtttccttttactttgctcctttaaggtgatcttaggccatggagaatatatgaaagctttaccttcaaaagagagagtctgccaactcttgg

SEQ ID NO: 826341 - DNA, 501 bp, Homo sapiens
atatctgtccttggcttcattttcctcctacctcttcagacatctcttctctggctcttccccttaacccctaactgggggctttctaccctgtctttgcacaccatttatcctctctataatgacaactcctaaatctaagaaatgggcacatttcccctgctaagctacagacctgtgtatttacgtacttcctagatattgccccatgcatggcccaccatcaccttaaattcaagatatccaaaacaattctccatcaaaaaaaaattctttatagccaaatggaagtgtgctgtaatgagaggcatggactttgattctagtgccaaattgtaggtcttaatgagcttgctgactgtgagcacgtcactgattctccctcatctcagagttttgccatctcataaacaggcttgacctcgattaatgggttttactccacaatccatggggcccttkattctgtgggtccacctcagaagctgtccaaacatcaag

SEQ ID NO: 826342 - DNA, 601 bp, Homo sapiens
ccctgggcatagcctggctcttgtttgaaatgtgtggtacttctmtgtgacaagatatagaataagtcattggaagaaaaactgtcctattactatattttatataaaagtgtatcttgtgttataatgggcctggtatacagagggtgcttagcaaatcttccgcagagctgaaactgagctgaagctacggcccccttctctgcttgctctcctttattctctagagtgctgcttcccaatgcgtggtccatggaccaagcagcttcagcatcacctgagcacttgtcagaaatgcagcacctaggcgccgcaccagacctgttgaataggaatctacattttcacaagattccagatgatttgcatacacagtggcatttgagaagcattaatccaggggcttctttgcagtcagtgatggtgatttgccaatcattagcatttcagaaaccccaggccgaaaccatacatttatccttagctaggtcggtatcaagtttctctgctttcatccagaatcctaacaattcagcttggttgattatctaagaagcttctatttgataattatatatctttcattttttttaaagtgctg

SEQ ID NO: 826343 - DNA, 570 bp, Homo sapiens
gctggcttagttctgcatgttactatgtgatcagtttccaaagttcttcgtcttggaagacaggcagccccaacctaygggaatctgctcaccctacaatggtgagcagacccactccacccatctttgccattcaagtctacagcatttgaacagatcagcccgttctgtgtcaagaaactccttatgcatgttctggacacagccctgtgtctctgcaggttcaaattcccctgaatgagagaaaagttagaatcttcccttcgtatctcagcttctctactcattactcaaacccttgggaaagctgctctattacttattatgtctgcttcctctggaaaatggcagggtaatatgaataccttatttatagggctgctgtgagaatcaatatttgtaaaacacctggaagagagcttgacacatacaaagcactccaaaaatgttctctggcattaaaaacatttgataatatgggctgggagggatcacactgcttctcagatgcaatccttcaatggcaccccatttcttgtaaaaataaatactaatctcctcaacctggct

SEQ ID NO: 826344 - DNA, 591 bp, Homo sapiens
cttatgctttttgatagaaactgaggttttaatatcatcagcaacactgtaggtgctcaatgaatgtttgttaaatcaaggagaggaatgactggtcattgaataaattaactgagcacccttggagcaaatcactttgcatccctggttatacttccattatgtataaaatgaatgttttgtgccagtaattatcatggcttcatcccataatcatgtggggagagctaaatcaattcaggttcttgatcccttctccagtaaacctcactcactcatttattcagttagtatttactgagcatctactatttaccaagctttgtttcaggcacaggagactcattggcgaatgagccaggcgagggccttttgctcagtgacttgtagcaatgccaactcactgtgactgactcaaacaacaatgcaggaagacctggccatcatgaacaataaatacatccagacatcatataatgctgttttcttcaatgttgttttattataatgttgatgagaaaaaaaaaaacactaactcttggcccasaccaccctgtgtgtggagtttgtacattctccccatgtttgtgt

SEQ ID NO: 826345 - DNA, 631 bp, Homo sapiens
gagatcctctcaaaatgagaattattgasgagacgattaaagttcccaaggattagaggaaactgtccagtgcttttctggtagctgtacctctccctggctgacagatcctctcatctcctccttctgttcggcaggcatttgtttcctccctaactttagcaaagagaaaggacgggttctgcctaatgagccgctgtcctaggtcctcacccattctatctctgcttattgcaggttattcttttgttgaactggatacgtttttgcctacagattcaaaatgttgtctctggataacatctcatttagaaagtaggcaccatgtccttaccttgaagcagaaaaggtttcttacttcgatcaatgatggagggttgtcagcaactaagtaattcctaatcactgttggcaaacatgagagcgtgctaaggcaccgggcgatggcaggcttcctccatgagggacattgcccttaatagatgggcatacagagaatgaactgacatgttttaaaagcaagtctacgtatcagttaatcaaaaatctgtccctttttttttcttaacaggcaccttatatgtatcttgagaaggctgtaaattgttctaatccacttcttttactgctg

SEQ ID NO: 826346 - DNA, 631 bp, Homo sapiens
gagatcctctcaaaatgagaattattgaggagacgattaaagttcccaaggattagaggaaactgtccagtgcttttctggtagctgtacctctccmtggctgacagatcctctcatctcctccttctgttcggcaggcatttgtttcctccctaactttagcaaagagaaaggacgggttctgcctaatgagccgctgtcctaggtcctcacccattctatctctgcttattgcaggttattcttttgttgaactggatacgtttttgcctacagattcaaaatgttgtctctggataacatctcatttagaaagtaggcaccatgtccttaccttgaagcagaaaaggtttcttacttcgatcaatgatggagggttgtcagcaactaagtaattcctaatcactgttggcaaacatgagagcgtgctaaggcaccgggcgatggcaggcttcctccatgagggacattgcccttaatagatgggcatacagagaatgaactgacatgttttaaaagcaagtctacgtatcagttaatcaaaaatctgtccctttttttttcttaacaggcaccttatatgtatcttgagaaggctgtaaattgttctaatccacttcttttactgctg

SEQ ID NO: 826347 - DNA, 631 bp, Homo sapiens
gagatcctctcaaaatgagaattattgaggagacgattaaagttcccaaggattagaggaaactgtccagtgcttttctggtagctgtacctctccctggctgacagatcctctcatctcctccttctgttcrgcaggcatttgtttcctccctaactttagcaaagagaaaggacgggttctgcctaatgagccgctgtcctaggtcctcacccattctatctctgcttattgcaggttattcttttgttgaactggatacgtttttgcctacagattcaaaatgttgtctctggataacatctcatttagaaagtaggcaccatgtccttaccttgaagcagaaaaggtttcttacttcgatcaatgatggagggttgtcagcaactaagtaattcctaatcactgttggcaaacatgagagcgtgctaaggcaccgggcgatggcaggcttcctccatgagggacattgcccttaatagatgggcatacagagaatgaactgacatgttttaaaagcaagtctacgtatcagttaatcaaaaatctgtccctttttttttcttaacaggcaccttatatgtatcttgagaaggctgtaaattgttctaatccacttcttttactgctg

SEQ ID NO: 826348 - DNA, 526 bp, Homo sapiens
tcctcatctcactcctcacaattgagcagcataatgtctactgtttcttttctcttatcccattctatgaagccttgttctaaaattgctaggaattacaagacagygagagtagctcattaagcctgggacctcagaatgtgggattctgtgggactgcatggggtatacaggttcacaatgaagatcacctgcttgccggcaaggagacattgagtgcttcttagtttgaggtctaagaactgagtttcagttccagctcagcctctccctcattcaatgacaccgccaggcactgctcctctctgagcctcagttttcttatctgcattttgaaaatataaatatgcccctcataaggttagttttacaatttaaataaaatgatgaacacaaagttctgttatcagcattgaggccacacctaccataacattttatatatttttctatcatttttaaaactaaccagggaaaagactactatagcgcttacgatgtaaggcagtcataatttgggaatgac

SEQ ID NO: 826349 - DNA, 456 bp, Homo sapiens
aaaactgcctgtcaagaaaaaatytacacttggattatcatgtgaatcagcagtaagtatctattacattaggacactgaaatttgtggatctcctggttttagtaactagcattcaagtaactaatacagatgttgggctgcttaatacagaatatcactaatatcaataatttataaaataaattatttcccaagattaaatcttaactagatgtggctgagataagttgttttctcccactcaccactgtcttcttccacattagtaaaatgtctgattttatttgggaggatgatggctcagaacaaacatggcatgacatttcccagccttcattgtgtgtcatgggtatgatcgtgtgataacattctagccaagtggctaattctaggatataagcagaagcatcatgtggtagcgactgggatccttccttaaaaggtagatgcttcg

SEQ ID NO: 826350 - DNA, 591 bp, Homo sapiens
ttaagaatgtcaagaaaaaaattaaattatcccttctgtattacaagaatcttaatacacttttatatgtaattcttttagcctaccagaattcctcattatgactttgtaatattttatggaatacaaattgtttacttaatatttcatattgataaggacactgtgctcagtttcctgggtaagttagtctgtaaatttccttacagctttttgaagtataattgatatattacaatgcacatcagccaaataaagattacaatttcacaaatctgggcacatgtatatatccataaaaccatcactgcgattagggtaatatacacgtatacattgcccccaaaagatttttctcatttatttgtaaaaatccattgttagcttgatgtacagataacttctatttggtccttcacattcaccttttgactggggaggaggtggtctgtacagtgaaaaaattgcttgaccttgcttcactgtacagttaggaacccataataaaaggsagatctaaagataggtcattagccaggagagagcgttgccaggactgccctggaggagatgactatacgctgaaagctt

SEQ ID NO: 826351 - DNA, 524 bp, Homo sapiens
aaatgaaattgatgggcagcgggatccattgtctctagcatagttatgagacataagccagtaatgacctgactctgagctcctagactgagggagagattggagcccttcaaggcmgcaatgtcgtctcaggtatgtatcatgtatcttttccctcagcttccccaaatgtccccaaaatcaaaggcaattactgctgtgaccacactttggaagaagggagatacctacatgcattttctggagaatttcgtctacatgtttggagcagattttgaatccccaacatcagaaaagctgtgtggcccagcaagggctttggaagtctggggatagaagctgccttggcccaaggttaagattgttcagtgggaccatggcctctgcctgtggttactcctcagttccagaaaggatgtatttatcaactagtgggataggaatttttagccactggcggaatctgcacactggtttcctgaacccaggaatttttcttactagggaagaaaggcccaagtaaa

SEQ ID NO: 826352 - DNA, 652 bp, Homo sapiens
atccaacaaggatcagcctcgttcctggaccacagacacggtgtccgacgctctggcaccctctgccctatagcaagccctcatcacccaagccccaaacctaactctgctctgaatgatgtccagggagtggagagcattttcccagggtctcagagcacaatgggcactgatggataagccatatcaacagacactttctgagtatgtggaacccttggggtcactcacccaagcaccccaattaatacaggaggaaacggaggctttctctcccatagtctctgtccgcactagcagggagggctcatcctacttccaggtgcccagaccaatggcctgaggaccccggccctggcctctcaaggctgtgctggggcccttagggagccctatgtctgccctgctcatgccctgggttcctgagcatgttgccgatgccactgactcataacagagctgcctccaacctctttcttctttccctctgggaggaggctcagcactggcctaggaagctggagccctcccttaccttttagactctgtgcatyttctgtggtctaagccaggccctgtctctttctggaattcggtttcccaaatgcacaatgaggggatgggtgtgaaactgcctcagtgtgctcagtga

SEQ ID NO: 826353 - DNA, 646 bp, Homo sapiens
agccatcagttatgggtactacttaatgtcctacgtcttttccagaaagcacatgaagaggctatgggcaggagataaacattttcttcctttgaagttccataacccggcctcgtcggagagcatggtgagtctgccaaggtctctctctgatctgagactaagccatatgccaaaacctgagggtgagcatgacacctgcctcactggattggtgggtgaacttccaatgagaaagggatgctgggcacatgttgcagaggtgatgaagttttcctcctgctctgagaccccttttttccttttaaacctcaggtggccattgcaaggtactctggctggcaaatagcctatattctgtggggtaagtgccgttatgtgacccatccaattcagcacacatcccttcatcacctaggaagtcctggctgtgagtggggaggagagaggtggtcagaagcagccctagcctctgcccttgagggaccttcaggacagaaggagaaacatagtctcgaggtcctcctcaccacccgtcctgaacccagggagttcatatgctaagggyggtggtgacccagagaagaaagtgactatccagccccagggcagggctcaggtgccttctaggggagttgacactcga

SEQ ID NO: 826354 - DNA, 563 bp, Homo sapiens
atttaagcctttattttatgttatgttatgttatgttatgttatgttatgttatgttatgttatgttatgttagaaagagggtcttgctctgtggcccaggctagagtgtggtgcaattatagttcaccatagcctcaaactcctgggcttaagcaatcctcccacttcagcctcctgagtagctggcatgtaccaccatgcctggctaatgtttaaatatttttttagagacagggtcttgcccaagctggtcttgaactcctggcctcaagcaatcctcccacctcagcctcccaaagtgctgggattacaggtgtaagccactgcagctggctaaccctgtattttctatactggtttgacctcaggacctcttttgatggaatagctcttaccacgttggagaccaagattttctctttgggaagctgctttgggcctttgttgtagagatcgcctctgcaagttgattctaatctgttccctcccttggcctcttacccgcamttctggcagaattacggatccagatcaggagatttgaggagctgctgccccaagt

SEQ ID NO: 826355 - DNA, 608 bp, Homo sapiens
aaacaatagagaacagaaacagacctcccaaaaaccattagatattagaaatatcagatatagactataaaataactaggcttaagatgtttaaaggaataaaaagtaagcttcaaaatatgaacaaggagcaggcagttttgaaaaagtatcaaatataattataaatgggcagagagtagtggctcacacctgtaatcccagcactttgggaggccgaggcgggtggatcacttgaggtcaggagttcaagaccagcctggccactatggtgaaaccgtgtctctactaaaaatacaaaaattagctgggcatcgtggcacatgcctctagtcccagctactcgggatgctgaggcaggacaatcgctcgaacccaggaggtggaggttgcagtaagtggagactgtgccactgcattccagcctgggtgagagagcaagactctgtctcaaatatatatatacgtatatatgtgtatatatatatatgtatatgtgtgtgtrtatatatatatatatacatacgtatatgtatatatctacaaatggaaactataataattaaaattgaaaactcaatgaatagatttgcagaaggttcaacaca

SEQ ID NO: 826356 - DNA, 595 bp, Homo sapiens
tataccaaataagtttttattggtagcctagaacctaatcatttcttttagaattaaaattttataagaaaatgtgcttcrtttcaaggaattgatctaatttttagactgttccatactattcaaaaactggcagctatgtgtaccatgtcactatcactcactatagtcccgtacccactgctgggcaggttgtagtcatttattcattcggtcatgattcattcagtcattcttacaatattcatttgccttgcatgtatcaagctctgccccaggcacttgggaacacaaacaattaagacacttagagtctagtgtgggaaacagacatgaatataaatgatgtgtgtggggtttatttatgtgtcttcatatttggaaaaatcttcctacatatatccagtataatttatataaaatttatttttagtgagggtatgaggtagggatctatttctttttttcaaatagttatttgaccagtccctcacctgtctgttttgaaatgccactttcattatgtaccaagatataatgcaaattgcatgtttctaagttctctaccattttacctgtctgtacaactcattta

SEQ ID NO: 826357 - DNA, 577 bp, Homo sapiens
atagcttcaactactagctcatggacatcatttcatctatatccttacttctactcgctcccgctggctattgattattttgaagaaatttcacattatccttgcagtgacaaaaaacaataattccttactatcatcaaatatccagtcagtgtttacatttccccaattcaattctcttctctctccctctccccatagtttaatatttaaatcaggattcaaataaagtgtagacacagtctcttgatctgtgtgctcttcctatgtccttctctcactccctctttcctttgcaaggtgcttttgaagaaatgggaccatgtgacctatagagtttctcatcttttggatttttctaattgtgtctcctgggtgtcatctaacccacgggtccgtggcccattaggaatgtgaccgcacagcaagaggtgaatggcgggcaagtgagcatgacygcctgagctctgcctcctgtcagatcagtggcagcattagattcttataggagcatgaaccctattgtgaactgcacatgtgagggatcagattgcatgctctgtatgagaatctaatg

SEQ ID NO: 826358 - DNA, 313 bp, Homo sapiens
atctaaagccagaacagcccatctaagattcttccaatccccaacccacagaaactttgtgaggttgcaaagggaacaaaggagaaaggaagggacagagagaaagaaaaaaagaaagtagtaacacaaaagaaagaatacaaaaacactgtctgtccacatgtcgatctcattagatttatagattgcatctcattgatcataagacaggacactaaattagtgcttaataaytattattaaatacatttttaactctcctcttctgcctagatcttttccctcatatttattcctgcactgcatacctgtc

SEQ ID NO: 826359 - DNA, 506 bp, Homo sapiens
ctttattgctgaattccttgagtgggccagcctgttgcttgggtccactagggtaagactggaacttgagtctgcatgtgggcctgatggctgggttggtggggatgggcctgcagcatggttccatggaaacaggcccagagcttgtgtttgcaggggctaacctgaagtccaggtccctgggagccagcctggcactggaataggcttgtagcctaagtccatgggaacaggcttaaatcttgggtcttcagggtccagcctggagcctagaaccacataagccagtctggtgccagggttcactttaaagtctgtgttaaagtcaggtgcttcctttactctcctttccccaagaaggcatttctctccaggctgcactgcataggcctgatggaggagtcacacctgtaatataaaactatccatgctatcatcttyaatgactcagttcttatttctgcattccaggtactgtaatctcttatctggactccttagctctt

SEQ ID NO: 826360 - DNA, 630 bp, Homo sapiens
agggggtgtggagttaaggtttaatgagttcaaagtttctgtctgggaagatgaaaagttctgaaggtggatagyggtgcagctgtacaataatgtaaatgtatttaatgctgctgatctgggccaggtgcagtgactcatgcctgtaatcccagctttttaggaggctgaagcgggtggatcatgaggtcaggagttcgagaccgtcctggccaacatggtgaaaccccttctctactaaaaatacaaaaattagccgggcatggtggcacatgcctgtaatcccagctactcagaaggctgaggcagagaattgcttgaactcaagaggtggaggttgcagtgagccgagatcatgccactgcactccagcctgggtgacagagtgagactctgtctcaaaaaaacaaaaaacaaaaacaaaatacaaaaaacaaaacagaaaaaaaactactattgatctgtactcttaaaaatggctaaaatggtaccttttatgttctgtatattttactacaattaaaaataatgtttttaaaatgcatgaggtagaaagacatctttcctacccaaagcatgtcacagaagtcaggagacaaactctctgagaggcttgatgaagaacagact

SEQ ID NO: 826361 - DNA, 630 bp, Homo sapiens
agggggtgtggagttaaggtttaatgagttcaaagtttctgtctgggaagatgaaaagttctgaaggtggatagtggtgcagctgtacaataatgtaaatgtatttaatgctgctgatctgggccaggtgcagtgactcatgcctgtaatcccagctttttaggaggctgaagcgggtggatcatgaggtcaggagttcgagaccgtcctggccaacatggtgaaaccccttctctactaaaaatacaaaaattagccgggcatggtggcacatgcctgtaatcccagctactcagaaggctgaggcagagaattgcttgaactcaagaggtggaggttgcagtgagccgagatcatgccactgcactccagcctgggtgacagagtgagactctgtctcaaaaaaacaaaaaacaaaaacaaaatacaaaaaacaaaacagaaaaaaaactactattgatctgtactcttaaaaatggctaaaatggtaccttttatgttctgtatattttactacaattaaaamtaatgtttttaaaatgcatgaggtagaaagacatctttcctacccaaagcatgtcacagaagtcaggagacaaactctctgagaggcttgatgaagaacagact

SEQ ID NO: 826362 - DNA, 620 bp, Homo sapiens
tggatcccttcctcaaaccttatataaaaattaattcaagatggattaawgacttaaatgttagacctaaaaccataaaacccctagaagaaaacctaggcaataccattcgggacataggcatgggcaaggacttcatgacttcatgactgaaacaccaaaagcaatggcaaaaaaagccaaaattgacaaattggatctaattaaactaaagagcttctgcacagcaaaagaaactaccatcagggtgaacaggcaacctacagaatgggagaaaatttttgcaatctacccatctgacaaagggctaatatccagaatctacaaagaactcaaacaaatttacaagaaaaatcaaacaaccccatcaaaaagtaggcaaaggatatggacacttctcaaaagaagacatttatgcagccaacagacatgaaaaaatgctcatcatcactggtcatcagagaaatgcaaatcaaaaccacaatgagataccatctcacagcagttagaaaggcgatcattaaaaagtcaggaaacaacagatgcttgaaagggtgtggagaaataggaacgcttttacactgttggtgggagtgtaaattagttcaaccattatggaa

SEQ ID NO: 826363 - DNA, 233 bp, Homo sapiens
ttcttacatatcaccatcaaacatgaaatgttaggttaatgggacactttctcccttcttccactccaggtaaataaacaagcatcatgtgtccacgtgtgtatttacgaggtactctctgatgttctatgggaagggaatgaaccrgtgttttccatttgccacactctagatcagcggttctccaaatgaaggggtgggatgggaagtgtgggaagtgtgattttgctccc

SEQ ID NO: 826364 - DNA, 618 bp, Homo sapiens
gtgggtcttggcgactacttcaatgaacaggatatggctaatgtgatgccatgtgacttctgagggtaggttaggaaaagtgatacagcatcacgtgtcagagacrggagtgaacaagccttctgatggtcccagatactaacctttcagtaatccctgcctttaggtcttttagctcaagcttcagatatcatggagcagagacaaaccattccctctgtaccctttgagaattcctgacccatacaatgcattggcttaataaatggctgttttatgctactaagttttggggtaatttgttgcacagcaagagataatcagaataggagccctggcttgaggggaccctgggcatgttctgtttgcaattgccaaaaggtaagttcagaccctgctgctaagcctagccctccctgccagttgctttctgcatataggtcatctctcaggggctctactgttcctcccagtgacagcacttccccttccccttctaagtccattaggtttgtttttaaagatctgaataccaattgcacgcagagttttagctcttttccttaagtttcttgggccctggataaatcaggaagtaagttatttcagttttcaaac

SEQ ID NO: 826365 - DNA, 595 bp, Homo sapiens
tccaacctgtgacagtttctcagtctttccttgtttttcatgaccttgacagtcttaagcagtactggccaaatatcctgtaaatgtcccctgtttgggccttttctgttatttttaccatggttagattgaggttatgggcttttgaaaaggaatcaacagaggttaagtgcccttttgtcatgtcacatcaagggtacatgttctccacatgacaacatgattaatggtaactttcatcacttggttaagataatgttttccagtattctccactgtaaagttactgttttccttttgctcactctatgcttaggaaatgattcactacgtctagcttacactcaaggggaaagagtggagggcaaggggagtagggggcagaactgaactccacctcctgtagaagggaatatctacacatatgtaataattttattgaatagaaaatttttgagaaaaggagaacaggagacttaaggattgagaattatactcctaggaaacgtcytatgacctgtggaaacaatagtacttcctatttttgggataaatgcacatgcacattccaaatgtcaaaacagtctcttccata

SEQ ID NO: 826366 - DNA, 461 bp, Homo sapiens
ttaggcacacagtagaattagtcaggatcccagcacaggaaacatatagcacactcaagttgtgtaattaaggaaagtagtgaagtttctatttacaaagtgtgggcgaggttttaaggaagccaagaagggctaaaaaaacctaggcttagggttcttattcacatggcctcttccaaggccctctccttaaaatctataagccagaattttgtgttctttgtcttaaagaaaactctcaaaataacatatgcctcatgccccacaaaacttcattctacctcaagcaatagctaatgaagccttcccatctggcacctggtgaggtcctttcccatcttaggcctgaaggagcaagaggggaaagcggctcgggaatatggggagagagaacagcggcggargtgggctgcctggcagaagccctggtcacacccagccacacccaacccagagcccaa

SEQ ID NO: 826367 - DNA, 571 bp, Homo sapiens
ttgtgttattgtagaagtattgtacacttagtggatgcttactaaatgctgacacgttatttattattaattgtcacaggaattttaaaaagtaattccatggaatgactgtattaacaagaacctaattacaagaattgagcaagaccatttgactctctagaatatagaatctctgtacgtcattttattttattttatttatttattttgagacacagtcttgctttgtcacccaggctggagtgcagtgcagtggcatgatctcggctcactgcaacctccacctccagggttcaagtgattctcctgcctcagcctcctgagtagctgggactacagatgcccgccactaagcctggctaatttttgtatttttagtagagacggggtttcaccatgttgaccaggctgttctagatcttctgacctcatgatccgctcgccttgscctcccaaagtgctgggattacaggtgtgagccactgcacccagcctaaaagtcattttaatttgtaagatatgtttactgttttagagagacagaggctaacttttcattttcaaggac

SEQ ID NO: 826368 - DNA, 470 bp, Homo sapiens
tgaaatctggtatctactaaaaataaaaaaataaatagctggacacggtggcacacacctgtagtcccagctacttgggagccttgrggcagcagaattgcttgaacctgggaggtggaggttgcagtgagctgagttcatgccactgcactccagcctgggcaacagattaagactgcatagagagagagagagagagagagagagagagagagagagacagacagacagacagacagacagacaaacagacatgatcttgtatatagaaaatcataagagatccacccaaaaaaaaaaactattacaactaataagcatgctcactaatgttgtaggagacaagatcaatcgacagaaatcagttctatttctgtacactagcaatgaacaatttggaaataaaattaataaaacagtttgaagttcagttggatcctggcagcagctgcagcagttctcttctgtgt

SEQ ID NO: 826369 - DNA, 644 bp, Homo sapiens
atgagatggtactggtcatcctttagctatgaaggaagccaagctggttatagggaattgttactactatrcctagattaacccatggtattcaattttcatttttttaactagtagattttatataccaaaagcattaataatagtggagaaaatgcaggccattatggctctgtctatatagctaattagttttgtaagttctttatcccattcaaaacgttaaaggtgactgagtaacatggaagaggatgaggtgaggagtaaatgtactggtttaaatcttattgattggttaattagtccacataactagtacatgctattaaaaaccagtcaaatccttatcaatgttccaatgaagtgaccagtcaaattaatgatcctgttcaggctgcttatgtcacagtaaggcatatacaatttgggggaaagtatcaacccatgattctcgctttcccatcatctgccccagatctctgccagggcccagggacgtttggactgaccacttttattattgtttcacagtcgtcagaccaataatagtgctgaagatgttacctatatgatcaatagaaatggccgagctttctgcctaagcattccccacctgccaggataaaaggaagggtataggtagg

SEQ ID NO: 826370 - DNA, 631 bp, Homo sapiens
taaatcccaattccatgacttaccaattttgtgacttttggaccagttacctaaactttctaaactttaatttcctgatatgaaaaatacatagtaattcaggcaatacatacaactcgtaagttgtgaagattttatgagctaatatatgtagtacttagcaacgtgtgtaacacaacaagcacatttttcattatcatttaatattaataattaaaaatagactaatttgaaaacaccaaaaccagaaaaaaaagaatctctttaacactctactttcagttcagaaacagttctgatcccaactctgttgtttaaaataacagcacttcacaagaaaattgacggctctcttctggtaatcaacaataactggagatgttggtcaatgaattcctcagctggtcccctgataatgcactctagagtatctgagtttgcaaatcctgccaaaagagtaggggtttctcttttgtctaaaaagattctatttttttctttctctggagttgtgtgaagttaaaaaacaaaaacaaaagtcagtatgcacgtaatttacagatgctgcctctctaaaatccacamaaaaaaaatcaaaatggtcaataatatatgtcagtggtcctgctca

SEQ ID NO: 826371 - DNA, 602 bp, Homo sapiens
tggatctactacaatagaacttatagaaatattataaagtctttagtcaacattttattttcagaccttaccwctggataaaggagaacaagaccagttacatttcaggcctcaaatcatacttggttttcttaggtttccctgcatataaaagttccaagtaatttttcataacgatctggtcaggctgctgaacctgggcatgaaagcttggctatctgtcctcagtgggatctgtatcatcaccccattcaaatttcctatccagttgatagtttcttcctgctaaggcaatgcttagacataacggcggtcgcggaaaaagaaatataatcaggttgatgcaaccactctaagaaaaaataaatatttttggctgggtgcggtggctcatgcctgtaatcccagcactttgggagatggaggcgggcggatcacgaggtcaggagatcaagactgacacggtgaaacgccatctctactaaaaatacaaaaaaaaagttagccgggcatggtggtgggcacctgtagttccagctactctggaggctgagggaggagaatggcgtgaacccgggagacggagcttgcagtgagccgag

SEQ ID NO: 826372 - DNA, 631 bp, Homo sapiens
ctaatttatgagcctcactcttagaaggcttagtttatgaccagtttgtaagagatctagtgaatacacatttttctaaatactgcattccaaatttaattgtatttaacagatacattccaaaggtcctaacaaaaacaaaaccaggaaataaaatgatgggatgaattggctcttctggtggttctctttgaagctgagaaactatagtagtagcacagcattgtattttaagaacatgtactttggagtcagagaaatctgagttcgttctacttcctcaatcacaacttaatagtcgctgcagcaagtttgttagttgacttctcaagtttgtttctatacccataaaataatgctgttaaaagaattgaatgaaataatgaatataaacacttcttacaatgcctggcttacaggtatgtgctgaacaaactgtagttactagtatatatgatcattataatgagaattacattgtctttctgttttgttttttggccacaaacatgaagtccagtgattatgtttcaggaaatcaaacaygcatctctcctaagattgcttaagctctgatgaaggggacttaaagctataacacaaggcaaatttttatttcctcaaaggtgcc

SEQ ID NO: 826373 - DNA, 566 bp, Homo sapiens
accatgtaagtagttatatgtttatggcttagttgataagccatgaattatatgtttatggcctacttcataaacatataactacytacatgtttaagtagctatataagtacctatacgattatcattgatattggtatgctggaccacagaccttagactatttactatctggctctttgtgtgtagtttgctaatccctaataccagggacaagtgtggaaaagtatgtaagagaaactaataaaatttacaattaactatacattaactaatcgatttaatttgctgtgaagtggactagtaatgtactcccatttaattgtcactccctagaaatttcatggaactttgaaagtgtgataatcctccagaggtatactcaaactaaaaaacaaatacgtaacacaagaatgactgtggaaccaccaaaacatatcatgtatatggaaatacccaaagaaacatttttcaagataaagatttaaaaactcagaaccatatatatatgtgtgtgggtgcatatgcacgtgtgtgtgtgcacgcacgcgtgcacatgcgtacgt

SEQ ID NO: 826374 - DNA, 620 bp, Homo sapiens
attgtgattttaaacacaagttttattgcttgtgtcagttttttcactcttctgtcatactctaatggttcttctggcttcaaactgtcaaccgccttcggcaaaatccacactagactatcagattctgtctcctcgacactatagagaataagggaaacaaagactgtgcaaagcaaatcattttaaataaattgcagaccaccaggatttgggatttgggtaatctactcagattagtatggctgtgtcttaaaaggacgattctaagatcacaatataggtcatgtccttaagaaataaagtaagtaatgaaatcaatgtcaattacacaaactttccatatttatatgatgccataactggtaaaaacagttataactggtaaaacagataaaagtttttgtaatattttcagccccagcataagcaagaaaaaaaatcataaaacatacagattattttcaatcaggttttgcaaaagggtaaaatatttacacaaaaaaaaatggtattcaaactgaaaaaaacaagcttgggtttataattttagactgaacaactttaaactttcatttgagacasagaaggagaaaggaaaggaggggtgttttgcagag

SEQ ID NO: 826375 - DNA, 598 bp, Homo sapiens
agtgagctgagatggcaccactgcactccagcctgggcaacagagagcaagaccccagaaacaaacaaacaaacaaacaaacaaacaaaaacaacaacaacaaagaatacacagaaaamcaaactcaacaataagaacaccaacaagatttaaaaatgggccaaagaccttaagaattatttcaccaaagaagatttacagatggcagtaaagcagatgaaaagatgctccatatcatctgtcatcggggaaatgaagttaaaacaacgagataccgctatgcacctattagaatggctaaaatccagaacactgtcaacaccaaatgctgtcaaggatgtggagcaacaggaactcttgttcactgctagtgggaaggaaaaattgtagagccactttggaagacagtttggtggtttcttacaaaactaaatatactcttaccataagatttggccattgtactccttagtatttacccaaaagagtggaaaatttacgtccacacaaaaacatgcacatggacaattacagcagtttcattcacaattgccagaacttggaagaaaccaagatgtccatcagtaggtgaataaat

SEQ ID NO: 826376 - DNA, 639 bp, Homo sapiens
gatataaaaacaatcaaatttgggatcctacctggagactcaggctgcatgttgccccagaggtgtgcagatcttttggtctggacaccatttttaaaatatgtgaatttgactgccacccaatcccctcaacatctgaatttctagcctgcattataaaattttttttaatttttttatttccatacgttattggtgaacaagtggtgttttgttacatgagtaagttctttagtggtgatttgcaagattttggtgcacccatcacccaagcagtgtacactgaacccagtttgtagttttctatccctcacccccttcccaccctttccccctgagtccccaaagtccactgtgtcatttctatgcctttgcatactcatagcttagcttagctccaacttatgagtgagaacatacgatgtttggttttccattcctgagttacttcacttagaataatagtccccaatctcatccaggttgctgtgaatgccattaattcattcctttttatggctaatataccttcatatgtgtgtgtgtgtrtatatatatatatatatatatatatatgaaaatccaaataacctcaatgagaaataaaatgggagatattacaacggacacaatagaaat

SEQ ID NO: 826377 - DNA, 541 bp, Homo sapiens
agccatacatttcccccttagcattacctttgcttctcataacttttggtatgttgtgtttttgttttcatttgtctttaaatattttccagtttccatcgtgatttcatttgtgatctattggttgtttaagagtgtgtcgtttaattttcacaaatttgtgaatttcccacttttccttttgttattgatttctaacttcatatcattgtggttagagaagatactttatatcttttaaaatctattgacagtttgtggcctaatatgtgatctatcctgaaaaatatcccatgtgcactcgagagaaatatgcattttgttattgtttgggtagagtgttctaagtatgtctggtagattttggtttatgttttgttcaagtcctctgttttttttatttgtcttctgcctcrttctactcattattgagagcggggtattgaagtctccaacaattattgtcgaactgtctattttccctttaattctgttaatttttgcttcatatattttgatggcctgatataatgatataaca

SEQ ID NO: 826378 - DNA, 398 bp, Homo sapiens
ccattttatagatgaggaaactgatgctcagggacgtgaagtaacaagcttagggcacacagcaggtagtggcccagcagaccttcatgccagaggctacctgaycccacaatctctcccctacctctgggtagaggagtagtgcgggaaggatgttggggggatgatgaccttgacttctggtcccaggctggccaccatgggcagtaaaggacagagaccacagccagtgcacaccactctggggagatgcccggtccttccatacatgtagctccagggagcagccctcttgtaaccaaggcttactctgaaagcagctgccatgtgaaggaaggagcagtgtccccaacctggtaggagctcagagcaagttgctcaaactctctgggagagac

SEQ ID NO: 826379 - DNA, 398 bp, Homo sapiens
ccattttatagatgaggaaactgatgctcagggacgtgaagtaacaagcttagggcacacagcaggtagtggcccagcagaccttcatgccagaggctacctgatcccacaatctctcccctacctctgggtagaggagtagtgcgggaaggatgttggggggatgatgaccttgacttctggtcccaggctggccaccatgggcagtaaaggacagagaccacagccagtgcacaccactctggggagatgcccggtccttccatacatgtagctccagggagcagccctcttgtaaccaaggsttactctgaaagcagctgccatgtgaaggaaggagcagtgtccccaacctggtaggagctcagagcaagttgctcaaactctctgggagagac

SEQ ID NO: 826380 - DNA, 620 bp, Homo sapiens
aaaatatgaggcggcataatcaatgtagcaagagctgcccggcgacatgtctttgagaagctgattattgcgagtaaacacagctaaatattctggatctttggactgtgcctctggtgtcgctggagaatccgattcccttatcatccttctgcaggcgtggccccaggggagcgtgggaggtgctggctggatgtggctgcatgggcagggagtcacttgggcccaagcaggagctgtgttcgttcttttccaaacactgattcctgtggggtgggagtgggtgtgtgtggatgatgcccaaggcggtgtgtgtgtgcatgggggttggagcggcctctagagtctactcctgacagctaatgacacgatacgagtcatgccaagggagccccggctctagagtggccttcttcggggttcccaacaggagacctgatagatttgggggtgattcaggagtgggtgtgcattcaggggtctccacagagattgtagtctatccaactaaactgtamtggagagggtgtggtgggtcgactgcaatataagctcatagcgtacacattactgcattaaagggccccatgtctgccctgcatccctcaagctcagtgact

SEQ ID NO: 826381 - DNA, 589 bp, Homo sapiens
aaaattattatcaccctgtctgacaggtaagcaaactgagacccagacagactaagaagtttgcctctggacacacagctaacaagcagcagtgccaggtttgaatccaggcaggctggcttgagaatccaggccgtatttcctctcccaatgatcactacctttattaagtatttaacatacccgtgctgccaggcactgtcctaagcactttctttatatgcatgcaatcctcacaacaattctatgaaatacatactctcattattcccactttaccaatgaagaaattgagccaacctgaggcttagttacttgcccagggtcatgcagctggcagggagaggggtccggattgaacccctggctgcagagtttgtgccccaaccctcactggcatgcggcaacgaggtcaggaccctcattcccagttccacagagcttatattgtgggattacaggacctggccccttgttcattcacccagccggtacctagaaagcacttgggccttgtaaggctctgactgtgacagatactatgagggacagaaaggtggatggatccsagttcctaccttcaagtcac

SEQ ID NO: 826382 - DNA, 632 bp, Homo sapiens
tttcttttgctgtgcagaagatccttagtttaattagatcctatttgtcaatctttgctttgttgcaactgcttttggtgtcttcatcattaaattcttgcctrttcctatggccagaatggtattgcttagattgtcttccagagtttttatggttttgtgttttacatttaagtctttaatccatcttgagttaatttttgtatatggtgtaaggaaggggtccagtttgaatcttttgcatatggctagccagttaccccagcactattaattgaatatggagtcctttccacattgcttgtttttgtcagctttgtcaaagatcagatagttgtaggagtgcagcattacttctggcctctctattctgttccattaatgtgtctgtttttgtaccagtaccatgctgttttgattactgaagccctgtactatagtttgaagttgggtagtgtgatgtatccagctttgttctttaaatgccttggctacttgggctttttgtgggtgttaagggaacaggggttccatatgaattttaaaataatcttttctagttctgtgaagaatgtcattggctatttaataggaatatcagttaatctataaattgccttgggcagtatagc

SEQ ID NO: 826383 - DNA, 611 bp, Homo sapiens
tttctcctgcaagaatggccataatcaaaaagtcaaaaaacagtagatgctggcatggatgcggtgaacagggaacacttctacactgctggagggaacgtgaactagtacagccactatggaaaacagtgtrgagattccttaaaaaaactaaaggtaagaaactaccatttgttccagcaattccactactgggtaggattacccagaggaaaagaagtcattatttgaaaaagatacttgcacacacatgtttacagcagcacaattcacaattgcaaaatcatgaaaccaacccaaatgcccatcaatcaatgagtggataaagaaactgtggtatagatctatgagggaatactatgcagccataaaaaggaatgaattaacagtatttgcagtgacctggatgagattggagactattattctaagtgaagtaactcaggaatgtgaaaccatacatcgtatgttctcactgatatgtgggagctaagctatgaggacacaaaggcataaaaatgatacagtggactttggggacttggggggaagagtggaagcggggatgaaggataaaagactacaaatatggtgcagtgtatactgctcaa

SEQ ID NO: 826384 - DNA, 573 bp, Homo sapiens
attttaattttagtaaaaactctttctgtcataattcttagtgtttgcaaacaacatagatgcttttttcaataatgcggtatctcagtaactagacctcacttcctttaacaactccacaaatataatttcatgaagctgaatttttaatacttatctattcagcttacccttaagttgctcaaaactactctcttggactccattgaaatacttcgccatttaagttctcctcatcttcataatgttttcatttccctctttaattacctttgattccatagttcatattttaatctctgttttgcattatcaattccattatcacagccatgctttcttttatacttatctgctggtagatgcaattctttgcctattcctgaagtcaattgttgctgcagaaagctagtcctgtttactggctttattttaatatcatgactattagcatcaaggggcccttagtcctgccaggggracctttaacattttcctacctattcattaacctatttcttcccatctcatcctttagcttcacaactctggctgctttctgcccattctcat

SEQ ID NO: 826385 - DNA, 684 bp, Homo sapiens
gtacatgcaattttttgtgcatgtggatatttctgtaggagagatgtcaagaagtggaaaagctgcctcaaatgatatgcccaattaaakgtaggtagatattgtattatgacctcaaaaattgcaacaatgtacactgtaaccaattttatatgacatcatatttcctacatcccctctaaaactagttttatcaataattttaatatttgctagtctgataatcatattttatttaaaattctaattatgtatttactagtgaatttgtatgactttatactatacatgacacttgtacaattatttttaaaattgaatcttcatatttttatcaatttttgtcatattagattattgtcttatttttattgattattagaaactgtattttatattcttagacacatctttcacttctgttaggaatcttccttgatttacatctggtatttaaacattgtttactatgctatgtttcttgcagaaatcgaatattatactataatctaggattctgagatttatcttgatgaaaaaataaatactatcaattatgttttacttaaaacatcatttattaaaacttttataaatattgttttatttagttcattatggtaagggagaatttaagtctttctgttttatatgaacaactgaaatgttaaataccatctactg

SEQ ID NO: 826386 - DNA, 618 bp, Homo sapiens
cctggtctatgtttgtatactgagcatgtcaattgaaaccatgttgaacttatttattatttatactagtttttaagtggatgccttatgactttctatatataagatcatgtcatctatgaaaagacatagttttacttttatttcccaatctgtatgcttttctttctttttcttgactttcttgactaaaatctatagtacaatattgaatagaagtggtaagagcatacatccttgttcgtgagtttataatgacagttatcttttaccattaaatatgatttgagctacagatgttttcatatattgcatttatcagttctatgacatctcttttatttctgttttgacaatttttatgatgaaacgttggattatatcaaatatttttctattctccaaagatgatcatatagtttttatcctatattctattaatattgtttactcattgatttttggatgtttaaccttgtaattctgcaataaatctcatttagtagtagtatatgactcttgttataagtttctgattgattytctagtattttatatgtagaaaaactttgttctgttttcttagacatattggtctttaattttattttttgcacg

SEQ ID NO: 826387 - DNA, 666 bp, Homo sapiens
tgagccaccatgcctggtctatgtttgtatactgagcatgtcaattgaaaccatgttgaacttatttattatttatactagtttttaagtggatgccttatgactttctatatataagatcatgtcatctatgaaaagacatagttttacttttatttcccaatctgtatgcttttctttctttttcttgactttcttgactaaaatctatagtacaatattgaatagaagtggtaagagcatacatccttgttcgtgagtttataatgacagttatcttttaccattaaatatgatttgagctacagatgttttcatatattgcatttatcagttctatgacatctcttttatttctgttttgacaatttttatgatgaaacgttggattatatcaaatatttttctattctccaaagatgatcatatagtttttatcctatattctattaatattgtttactcattgatttttggatgtttaaccttgtaattctgcaataaatctcatttagtagtagtatatgactcttgttataagtttctgattgattttctagtattttatatgtagaaaaactttgttctgttttcttagacatattggtctttaattttattttttgcaygtggtgttatttaatagcgttctaggcaatataaaac

SEQ ID NO: 826388 - DNA, 396 bp, Homo sapiens
gtcccggttcttccccacctcggttctggactttctggttccccgcacccagctaggtaactccacgtatgacctcacccactcctcccatctacatttctcgccatgcctatttayaccctgttttctctcctcaccttcagcgtatagactcgatctccctgctcgttgaggtaatactggagaaacatgatcgcttataagccagcggtcccaattcggtccaccgctcagtctgcagtggtccgcccgaccgcgtcacgtgttcgtcaatttccttcctgcataaccggaagtctctctctcctggcactccggaaaatgtagtcaatttttgccttgttttcagctagccagaagggggcgcacgagagcagggcttggcttggggcccta

SEQ ID NO: 826389 - DNA, 396 bp, Homo sapiens
gtcccggttcttccccacctcggttctggactttctggttccccgcacccagctaggtaactccacgtatgacctcacccactcctcccatctacatttctcgccatgcctatttacaccctgttttctctcctcaccttcagcgtatagactcgatctccctgctcgttgaggtaatactggagaaacatgatcgcttataagccagcggtcccaattcggtccaccgctcagtctgcagtggtccgcccgaccgcgtcacgtgttcgtcaatttccttcctgcrtaaccggaagtctctctctcctggcactccggaaaatgtagtcaatttttgccttgttttcagctagccagaagggggcgcacgagagcagggcttggcttggggcccta

SEQ ID NO: 826390 - DNA, 456 bp, Homo sapiens
aggatccaccagggtggtctggcaacaaatgtgttatgacctggtagtggcagggacacctgctgagaaaatagataaacagcctaatgcttttctggtcagactggggcagaagctcaagccagaacagtggatcgctaaggagcctcaagttcagcccactaccccttctgcagaggaatagcaggcaccaacccgttagactaggatgaaggccaaggctccagaatctcaataagagcagtggttgccagggtgtccaggggtcagaggccacaggtggaactagctacatattggtcacctaagaataggcagattgtgcatgcccttactggatactgaagctgatatggtttggctctgtgtcccyacccaaatctcatctcaaactgtaacccctagaatccccacatgtcgagggagggacctggtaggaggtgattggatcacagg

SEQ ID NO: 826391 - DNA, 611 bp, Homo sapiens
agaatgtctcacattaggatgcaccatcctagcactgcctaaagacagcagtccatttgaatacactatactaaggaaaaccactttggaacaattgatcaagaaaaatgtgaaaactaaaattgtgctttcttttccccccatcttgtggggaagggaaacagctcgcctcattaaggattcagagagtggctagtactgccttgcagcaggctgactagttttggagtctcttatttagccgaaatgcaaattataatctctccaaaaagtcttgagtctgggcaaagagtgctgatcaagaaaatgtaaaaggtataacagcagacactgtcactcaaagcctccactcctgtggactgttcaggctgaacagagtaggcttgagcaccccagcaccgaaagccaaagggcagcattccaagacagcaccctctaccagctgtgtcttggttaaagacatttaatctctcggaatgatctgaaaagtgaagacagtagaatttcttcacaggattctggtaaattttaagcaagataatacaygtaaagtgactagagcaactgtctggcacatacttgatatttaagaaatgttaactacattttat

SEQ ID NO: 826392 - DNA, 600 bp, Homo sapiens
atctattagaatagctatgaataaaattctgttaggatggctaaaaaactgaccatactgtatgctggtaaggatgtggagaaacagatactstcattcattgctgtggagatgcaaaatggttcaggcactttgaaaaatagttggcagtttcttacaaagccaagcattgtcttaccatgggatccatcaattgcactcctggatatttacttaaatgagttgataatttatgtccacacaaaaccctgcataaaaaatgattatggaggttttattcagaattgcccaaacttgaaagcaacctagatgtccttcaaaaggtgaacagataacatgtaaatccaatgtaatattattcagcaataaaaagaaatgagctgtcaagccacaaaagacttagtgggactttaaatgcatattactaagtaaaaacacccatctgagaaggctatgcactctatgattcaaactatattacattctggaaaaggcaaaactagagagacaataaaagatcagtggtttccggtggatggggaggcagagatgaataggtggaacatgggaattttggggcagtgaaactcttctgtagga

SEQ ID NO: 826393 - DNA, 600 bp, Homo sapiens
atctattagaatagctatgaataaaattctgttaggatggctaaaaaactgaccatactgtatgctggtaaggatgtggagaaacagatactgtcattcattgctgtggagatgcaaaatggttcaggcactttgaaaaatagttggcagtttcttacaaagccaagcattgtcttaccatgggatccatcaattgcactcctggatatttacttaaatgagttgataatttatgtccacacaaaaccctgcataaaaaatgattatggaggttttattcagaattgcccaaacttgaaagcaacctagatgtccttcaaaaggtgaacagataacatgtaaatccaatgtaatattattcagcaataaaaagaaatgagctgtcaagccacaaaagacttagtgggactttaaatgcatattactaagtaaaaacacccatctgagaaggctatgcactctatgattcaaactatattacattctggaaaaggcaaaactagakagacaataaaagatcagtggtttccggtggatggggaggcagagatgaataggtggaacatgggaattttggggcagtgaaactcttctgtagga

SEQ ID NO: 826394 - DNA, 552 bp, Homo sapiens
ttcaagaatcaaattttcctaaagatcagactacctttgacccatgccagctatgagtacattatactgttcattttccaatacaatattaaagaaagacaacagatctgaaaacctgttaaattctygacaaatttaaaccttgcttatgtaagctatgcacagtgaggcaagaaagacttcaaggatttgcaagggctgaaagaggaggtctctgccagggcaacagcagttcgaatgtgcaccaccacatctgtacatttggcacagtcatctcagtctccacttggcagctacggagaagggaaggcaggaagggaccatagagaaagaagcctatttcttaccataaaaccacaaggacagaataaattgcttttcctaggatgcagagaaggaaaaagcagcctgcagacttgcaaggggagagacactgctgacattcaatagccatagtggtctcaatactatccacctggtcactgccatcaatgtggttacaaaaatacggtgagtcatggaggcaaaggtgaaactctatgtagtcataat

SEQ ID NO: 826395 - DNA, 638 bp, Homo sapiens
agttcttttatcctcaccattcagtgggtcccaagttcttgtcctgygaaaaggaagaatgaggtacgcagacaagtagagggtgagcaagatgaaggggagccttactgagtgatagaacagctcagaggaaaaccacaggggcagctcctttctgttcccagggtgttccaaggagtgttcggctcctagcagagagggtagctcctctcggctacacaattcatcctgacagatgttcagctatcagcagagcagagacggtagctcctttctgcagctggttgtcccattatctgtgcagcactcagcagagaggagaccctagagggaatggcttctctctgcaggcatgtcatcctgatatctctgcaactgtcagcagagaggaggccctaggttgggttgctcttctctgcagctggttgtcctgaagtctgctcagctctggctgagtccagggcttctatgggccacagaggggaggcagtgcatgcctattggtccatgggcaggcccagaaaaggcacctcaagttcccaatctggtctgtgggactggcagcctggcacccaattttcaggccctccctggcctgaagatggggccttagggggcccgcccccttccacccagga

SEQ ID NO: 826396 - DNA, 501 bp, Homo sapiens
agacatcctagtttgtccagaatattccaggtttattacggaaagttccatgtccctggaacaatccctttccccaagttcctggcaaaccaagacacttggccaacctaacaaaaaaaaatccatttttattataatatgcagcataaaaatgtattgcgtatcaatggacataattatatttaatgccaaaatgttaacatgatggaaaccatcaatatattaattttgcattaagtttgtggttaagtacacatgtaagactttatactaaatgactcctgctatttctatgtttatatttaaacattttattaaaggtgtttccaatttcccagattattgcccttccattttctctatttttaaatttattcctgagcaagtctgttcacataaaattatatgagtgagcacagtgctctagcaaaagtgtgtcatgttcaatcaaatgctgagaaggtttaagcacatytgctcagtgattgctcttttaatggc

SEQ ID NO: 826397 - DNA, 642 bp, Homo sapiens
aggaaaataaaaatctagttagtttttggagtgaatctgaaataaagagcgattttattgtggtgattataaccagtagtaaaacagcactgattaaactacttaatatgatttctcaagggacagaaaattggaaaagtaataaaggcaaaatgtgagaaaccctagtacccttgtcaggtaattttaatgatcacttggaaattatgttagtgaaaaaaacaatgaaacttctggaagaaggattgaaacattcgaaagagagaaatattctacaaatttctggctcagcctctgacaaagctcttcttatatactactatgtcattgacaacaaaaatatctttacagaaatagtatccttgattcattataacagattcagcaaaatgtaaacaagcaatgcaggaaaactcaaaagatattataaatatataaaacttcccactataaaagaaaatgttgaacttattaggtggatgagttattaactttaattgtaggcataaattactaaagagatggtttgtgacaacaacaacaacaatccaaaacattaaacagaaaacgagagatcgaaggtttgtragaattcataaggaatatatcttgtaaaattcattttatatccttcattgagag

SEQ ID NO: 826398 - DNA, 614 bp, Homo sapiens
cggaatttacctgagaatgctggaatacttcacattttcagcgtgagaacaaatcgcaggcaaagaaataacacaggacataaatgagagtataaccagctttgtatcaagcagagcctaactccaaaaactagtgatgcaaacaggggtaagaaactgtactgtggaaaagcagcactggcatgaattagaattccagctccaaaactaattaattgatatctttattcattcattcaaaaaagcatttttgatgttccagacactggattatatgatgttgagctaatattaataatctttctaattcacactttcattatgtataagtaggtgttgataataattgtctacctgaatatattttaaaaatctgagatactatgttgtcaatatctgaaaaatctacaacactatgaacaaaatggttattaaataatatccaaaacaatgtattaagccaagttgggagggagagtttattcatctaagaaaatgctctgtgtcaggctacrggctagaaattgcaagctttcttcgattggaagtaacataatcataattcacatttaatcttttattccttacctcttacaatacacatacaaaccaca

SEQ ID NO: 826399 - DNA, 623 bp, Homo sapiens
aatcatttatcgggttttctacaaaagcaactgtttgaggagtaagagcaagagatacatgaaaactgagtttttgcttttgtttttttttgtgtgtttttatttttgcccatatgtgcrctaatttttatttgctgtacatattcaactgaatatttccatttgtgatgaaaacacgttaatttgctgtaagatgtttgttttctcagcagtgtcatttgggtggcccctctaagctactgaataatttttcaataaacttttaattttagacaatctgaaaatatagtacagtggtttcacatttaccccatgcctagtatccactcttgttatcatgttacatcactatagtgcctctgtcacaactagtaaagtaatattggcaggttataataaactaaaccatatactttattcagtttttcttagttttttcctaacttttttgttgttgtttttgctccaggataccacattactttttagtcatcatgtctccttaggttatttttgactttgataatttatcagatattttcttgattgtgataaacttgacaattgtggaaaaaaaacttgtaggtattctgtagaatgtttattatttgagatttgtctat

SEQ ID NO: 826400 - DNA, 579 bp, Homo sapiens
gagagagtgaagtgaggaagggagggaaggaggaggaggatgggggaaagaggaagaaagaaagwcgaaaaaaagagagagaaagaaagagaatacatagagtatgaggtgattatgagagagtgaatgtaataaaaatgaaaaaggatgcacagagaaagaggagtgaataagagaagggataagacagaggttggaaaagaaagaaacaggaagaatgaatccagggacacggtgggcttattcattattatccaaaagatttctcttttttccccctcttctttaaatcctaatttagatatcttgtgatatttctgccttgctggatagaatggacaaataacatttattttatatatatttatatatgtatatatatatataaatatagatatagatatatatatttccaggttattgtgaaatcatatacaggtatagaagttatttaaaaaatataacaagactaatttgccattgttttcatcagggaagctgtctctgtccataccaaacatttttgtttacacagccccctttaggctttctgtgtacatgtgtgtgcatatgcatgtg

SEQ ID NO: 826401 - DNA, 633 bp, Homo sapiens
aaaaaaagaaaaaaggagaggttgcaatcctagtctctgacaaaacacactttaaacgaacaaagatcaraaaagactaagaagggcattacataattgtcaaggcaacaattcaactagaagatctaactattctaaatatatatatgcacccaatacaggagcacccagactcataaagcaagttcctaaagacctacaaagagacttagactcccacacaataatagtaggagactttaacaccccactgtcaatattagacagatcaatgagacagaaaattaacaaggatattcaggacttgaactcagctctggatcaaatggaactaatagacatctgcacaactctccaccccaaatcaacagaatatacattcttctcagtgccacatcacacttattctaaaattgaccacataattggaagtaaaacattcctcagcaaatgcaaaagaatggaaatcataacagtctctcagaccacaatgcaatcaaattagaactcaggattaagaaactcactcaaaaccacacaactacatggaaactgaacaatctgctcctgaatgactcctgggtaagtaatgaaatcaaggcggaaatcaagaagttctttgaaacccatgag

SEQ ID NO: 826402 - DNA, 640 bp, Homo sapiens
gcatcagaatcatattaaaacctcaatatattgaatggattttcaatctagcaaaatcaattttgttcttcctaatttaattttacatgactgttagaaataacagaaaaataaataatagtcacttcaacctttttaaagcagtaactaccctcttgtcttctccatatcattccctcagttcctgttttttcccatgaaggaagaagagacagggggaaaaaaaaaaaaaaggcaagcgcagtggttcatacctgtaaacccagcaatttgggaggcagaggcgggtggatcacttgaggtcaggagtttgaggccagcctggccaacatggtgaaaccccgtctctactaaaaatagaaaaattagctgggcgtggtggtgggcacctgtagtcccagctattcgggaggctgagacaggagaatcacttttacctgggaggtggaggttgcagtgagccaagattgcaccactgcactgcagcctgggtgacagagcaagactccatcatatatatatatatatatrtgtgtgtgtgtgtgtgtgtgtgtgtgtgtatgtgtgtgtgtgtatacgtgtgtatacatatatatgcatgtatatacatatgcatgtatatatacacatatatacatat

SEQ ID NO: 826403 - DNA, 606 bp, Homo sapiens
tcaagtggagcagggcccagaagacagagagagcaagagagaagggggaaaagattcttcacgggataaaattaccagccaagacagaaggcgaagaggcagaggggcgggctcccccgcccagaaggcagccctggccacccccagcctccacccgggctggaagagcagatgctcccagcctgtggtgtgagccccagaggggggctggtcgctccctgcagtgagcacaagggcagggtgggagacggagacggggtgaggccgggggagccttctggagtaaatggctggaaggagggagggggcagaagctgctggccacctttggccactgcaaacactatcccttttcctcctgtgatgtgagtaacaacaaaaaattaacacagccacaactgctgtttgtgtttaaagcttaatgagaattttaaaatacgtatctcagtgatacttaaatgaatactttctttccaaaaaataaataaataaaaagagagagagagamgaggagggggggaaaacaaagatgatggctttgagatttacgctgccactcatgcttggatgccgatcacttatctggataattaagcagtatcagtg

SEQ ID NO: 826404 - DNA, 526 bp, Homo sapiens
tgaaattttctccctaagattccatctccctttcagtacccggatccagctgagaactacaagacagataacattttgttctagtcttgtcctatacagaaagcaacatgtgaccccatagaagtccctaacttattggaccctcagttatctcttttgggaagtgatgacctctaagggcattgccatgtcaacaagccatcaaatctgtgctgatcattgaaaatacaggggaccaaaaaaaatgcagaaatgtaaatggcatgaacactgctagtgtaaccaacatgcaaagcttgcaagcagaaacatgttttattttgtctcttttcccaagttatagaaacccttgcatatggttgtctttactttaatgtgcatgaataaaatatattcttgtgaactgmtgtagtccacaggcttttgagatcaaacagttttctactccaggtgaaatgtgggaatgacagataatgttgtcaatatgctatatttttgttaggttgaacaaacatggccatagcca

SEQ ID NO: 826405 - DNA, 679 bp, Homo sapiens
ggctagggagaccctgcttcttggagcagggagaatgttttgttctatgcatactgccatgcatattcaggaaagcagcagaaggaagccaggagagggatgctaagatgctttattcacctagaaggaaaagtaagaaaggagaagtagcattgtcctgacttaaaccagattagcatgctcctaacacagtgggcttgaaaattctgtgtgtgacgccactgtgcccagaaagaaggtgaacagatcagcaatctatctggttgatccgtcccacattcataggctccttgcctgataccaaccccattctcctgtctgggcccctggggctactggggtgcagtttagattttgccactagaaggctctgaggtgggttaacagcaaggaggcttcatctgtcgaggctgaacttgactcatttctctcttcctgctctgaaagatctccagctgcgttgccaaaccagcacagaccctacagggagatgaatgacccaggaagacaggaaggtaacaagcacacaaggtcactccactgagcaaacggcaacatttgagcctccccaaatttgaatataaacctctcctattatcaaggtcccactgagaaggtacaatttgaagattacatccccttgyaagttggatcccaaagaaattaaggactgatatcg

SEQ ID NO: 826406 - DNA, 489 bp, Homo sapiens
attcatgtcagtcatctggatcccaaaasgtggcaccttaaattcaaatggggaaaatctttctttgacaatttaatttgcacaaggtgcacttaccaccatggagaggaagacctattttgacatcttgtctgcattctcagaaagggtcggctgcctttcctttccattggagaattctaaacctcagaattctcactttccctcttggccagtgttcctcctcccactatattcaactgaggtgggctctgtctagtgggattctcccatgcaaacaggaattttctgtcctggggcccagtggtggattgcactctcctgctataaaatgacttagcagggagacacatgtcaccagtccacatgttggctctcactggagaatgatgcacaggacatcactacccttctgtttctatacccaccctatgaacctttgggcccactgatgcctaagtctctgcctgagccgtgatttctcagcct

SEQ ID NO: 826407 - DNA, 498 bp, Homo sapiens
aggaggctgctttgagggtcacaggaaagaaaattatgcctgcacaagcaccttgaaactgcaatatgctgtgcaaatttcatatactaattaattaattgataagttcatagcctgcattattkacaaaaacaacttgatttaaaatgaaaataacaaattgtaagtaagcatacacacacatctgttgaaaggaacaatgataaaaaaaatagataagatagaacaaggaagaattaaatgataaaagggcttaccatgaggggaggtatctaaatttgtcatctatttaccccctgtatctgaatcacctgctgtctggccaaaacgtagattcttagcccgtttctagacctgctaaatggccatagttgagggcagatatgcaaacagcatattttaatgtttcaatttccagacaatttacactatggtttgagaaacattgtccaaagttttagaaaattactaaaagaaaactgcaaatttaacttgtgg

SEQ ID NO: 826408 - DNA, 416 bp, Homo sapiens
gctttggttcacaatatggatcccctgtggaatctcatttacagcccttctcccacttcttcaagtctggctcaggggcaggcattatttgttaatatttcacatgaaagaatataaaggctttacaggaatggaaatccatagactaacaacttaatgttccattaagaattaaatcgtctgatgcattaataataacttcttaagtgttcatagatatttatagctaagaaaaccctcatgataaacatggtagacaccacactcctggctttagggataaggaatgtgaagctcagcacatatgaagcagctcacctgaaatcatgctgctagatactgcagagctgggaactcaactcagaaatgtcctaccatgaacttgaagcatttcaarttaatatttataaagcttc

SEQ ID NO: 826409 - DNA, 616 bp, Homo sapiens
gaaaatggacaaaaagcataaagaaacacttcaccaaaaagcacatagaaatggtaaataagcacatgaatagatttacaacattattagccatcaggtaaatgtaaattaaaaccacaatgagggacaactacatacctatcagaatggctaaataagtatagtgacaacatcaaatgctgacaaagatgtgagaaaactggatctctcagacactgctggtagaaaatgcacatatatgcactctacaaaacaatttgccagtttcttttaagactaagtatgcaattagcatgtgacccaacaaatgtactctggggaatttatactagagaaatggaaacatatgttcacacaaaaacctgtacaggtatgttcataacagctttattcattattataaatttgtgctgttctttcttggaactggaatcatcccagatatgcataaacaggtaaactgttaaacaaaatgctgcacatctatgytttggaatactgctcgaactgttgagatatgcaataacttgagtgaattttcagggaattatgctgagtggaaaaaaacaatttgaaaaggttatatattttacaattttatttgtgcatttttgaa

SEQ ID NO: 826410 - DNA, 540 bp, Homo sapiens
attttattgctcagtaatattccatagatgaaccatagtttatttatctatattcaccagcaaagaacatttaagttgttcactgtttttggcaattatgaagaaagccactgcacacattcataaacaggcttttatgtcaacataagttttcatttctcttgggcagacacctattaagtggggtcactgggccacacagttaagcatatttctaattttataagaaattgcatccccaccagcaatgtataggagctctagctgttccacatccttgacagcccacaatttgaaatccagcatctgaaatctcatctgtatactttcttcagtgaaacatttgttcaagtctttttgtctattttattttgttgggctgtttgttttactatgattgaagtcttttgtcagatatgtattgtccaaatattttgtcccagtttgtggcttccctttttgttaactgtcttttgtgaagartttttaatttgtaagaagtgtattttatgactgttttccttaatggagtatgcttag

SEQ ID NO: 826411 - DNA, 634 bp, Homo sapiens
tttagattacctactttgagttcattgttttttctatagtgagatatgggtcaaaggtatttttctttcttcctttttttttaattgcatgtagatgtccaattgttacagcgccatttgttgaaaatactatcccatcctttcaacatggaattttctttgtacttttgttgaagattaattgccatatatgtgaggactctttgctttgttccactgctttatgtgtctactctttcaccaattccaactgttttgattacggtggctttatagtaaatcttaaatcaactttgctgcccttttgcaaaattctactggctattcaagttccttcccctttccatataaaatttttaaaaaagctgttcatctctgcaaaaaagcctgctggattttttactgagaatgcactgtgtctataggaaaaaattaacatcttaacaatagtcttctggtccctgaacctggtatagctcttcatttaagtctcctttggtttcttttactgatgatttgtaggtctatgcatattgttagatttaagckaaatattacatatttttgatgctattataagtagatccttttaaaaattttattttcaactgttgattactagtatatagcaata

SEQ ID NO: 826412 - DNA, 531 bp, Homo sapiens
cataaaaataaaattagactctcatctcacaccatatacaaaaatcaattgaaaataaattaaagacctaaaygtaaaatctaaaactataaaattactagaagaaaatataggctaaaaacttcatgacatttgtctggacaaaagattttttttttttttggtgtaaccccaaaagcaacagaggtaaaaatagacaaatgggattacatcaaaaaagaaagcttttgcacagcaaaggaagcaattgacagagtgaatagataacatacagaatgggagaaaacatttgcaaactatatctctgataatggttgatatccaaaatatctcaggaacttaactcaatagtaagaaaacaaataacttcattagcgaatggacaaagtacccaaatagacgtttctcaaaagagacatacaaatggccaacaggtgtatgaaaaaatgctcaacataattatcgggaaaatgcaaatcaaaagaataatgagatatcacctcacacatgttagggtggcaattatccaaa

SEQ ID NO: 826413 - DNA, 611 bp, Homo sapiens
tagacacaataaacaatgataaagggggatatcaccaccgatcccacagaaatacaaactaccatcagagaatactataaacacctctacgcaaataaactagaaagtctagaagaaacggataaattcctggacacatacaccctcccaagactaaatcaggaagaagctgaatccctgaatagactgataacaagttctgaaattgaggcagtaattagtagcctactaacaaaaaaaaaggcccagggccaaacgaattcacagcttaattctaccagcagtacaaaggggagctggtaccattccttctgaaactattgcaaacaatagaaaaagagggacttctccctaactcattttttgaggccagcatcatcctcataccaaaacctggcagagacacaacagaaaaataaaatttcaggccaatatccctgatgaacatcgatgcgaaaatcctctataaaatactggcaaaatgaatccagcagcacattaaaaagcttatycactacaatcaagttggcttcatccctgggatgtaaggtgggttcaacatacagaaatcaataaatgtaattcatcacataaacagaaccaattacaaa

SEQ ID NO: 826414 - DNA, 603 bp, Homo sapiens
ttggagggaccagggccagaatgatatggttaggctctgtgtccccacccaaatcatatattggattgtaaccccactgttggaggtgggcctggtgggaggtgactggatcttgagggctgtttctaatagtttagtatcatcccctactgctgtctcattatagggttttcatgagatctggttgtttaaaaatgtgtggttccctcccaccccaacaccagcacctcgctcccttttttctgctctggtcatgcaagacattgcttacttcccctttgccttcagccatgattgtaagtttcctgaggcctccccacaacctgtacagcctgcagaaccataagccaattaaaactcttttttaaaataaattactcagtttcagatatttcttttttttttttttttcagatatttccttttagctgtgtgagaatggaccaatacacctccctttagaatttaggcacagytgcccagcatttaacattaaaacagagaccttaaaactggcaaagtaaactctgtagcaataaagataccaaaatgacagatagtaggccctcaaataaatcaacatattttatccccaaatatatt

SEQ ID NO: 826415 - DNA, 642 bp, Homo sapiens
aagttgaagttttcttttaattgaataaagtaaacaaacaaataaacttggcttgaaaatrctttttttttaatgttcctgtacttgagttttttgtttctaatttatcaagattgattgtttagtaatatggtttggctgtgtccccacccaaatttcatcttgaattgtaactcccaaaattcccacatgtcataggaagaaccccatgggaggtgattgaattatgagggtgggtcttttctgtgctgttctcatgataatgaatgagtcttacaagatctgatggttttaaaaagaggagatcccctttacaagctctctctctttgcctgctgccatccaagtaagatgtgacttgcttctccttgccttccaccatgattgtgaggcctccccagccatatggaactgtaagtccattaaacctctttcttttgtaaattacccagtctcgggcatgtctttatcagcagtgtgaaaacagactaatacagttagcattaatgatctggtaatagttttcttagaattataagaataatgaacaattattattccatacataattgataatatgattagaaagaaaaataattgttccaatttagttcctactgggcagacatttttatacaacaa

SEQ ID NO: 826416 - DNA, 651 bp, Homo sapiens
taccactcactaatctcactgtgtctcattccagagctccagatgggatggatccatccagggagrcagttgcctgttctttttctcagacatttgccaatccttcagaaagggtccaccacaccctgtcctgtgttatagtgggagacattattttggccatatttatttttctttgctcaagtcctactatggtatctgtgctactattttctctttctcagagaaagagaacacaggattttctcatatttacatttatttatttttctgaactttttgttgtatttggggtatagacatttgaatatggccaggatagacgtgccataaaactaggaagcttgagtttcaaggcccctcacttgtgcagcctccatacaaagttctagacttgattttgacttttatatttttaaaaaagaaggttccaaacatatgtataaactcttggcttcacaaaccctgaatctgctcttaggatggctcacctaaagtcctggcgtttgtgacgttgcagtaacttaataatatctgaatgattggcttcatgttgttaatagtaagacaatacaccttttaaagcctagcccctgtaattatcagatagattaatcctctgctttttctgcctttaactcttctccctac

SEQ ID NO: 826417 - DNA, 524 bp, Homo sapiens
tgtaactaacctgcacatcgtgcacatgtaccctaaaacttaaagcataataataataaaataaaaaaaagaaagaaagctgaatattgttgaagattgtgtcaaggaacctctgtaataggatatagaacgcctcctcttttcacatgaactgctaatactatatgtgaagaatgacgatttttaggcagaggggtgaaacatatccctttagtcaagctatgcaaacacagcagctgctcacataaattccttgagttttatgccgttgtcttttctcagacagagccctcattgagtttgggagaatttgggttggctgggtaataaccgcatgagctatgtagctactctttcattctgacctcaccttgggatagacacagaacccaatgtatcaaatcgcctggtgtacagatctcttgtccaagtgaggtgcagctgractttatatttctgtgcatttgacttgcaggctgcgtcttattcaccaagacagaagtttatacttgggccttctcatg

SEQ ID NO: 826418 - DNA, 587 bp, Homo sapiens
aggaagaaataaattctcccagggaagctcatcacattgttattataaacccaagattttaggccaggtgcggtggctcacgcctgtaatcccagcacttcrggaggctgagatgggcggatcacctgaggtcaggagctcaagaccagcctggccaacatggcaaaaccccgtctctactaaaaaatacaaaaattagccgggcatggtggcgggcacctgtaatcccagctactcgggaggctgaggcaaggagaatcaattgaacccaggaggcagagattgcagtgagctgagatcactccactgcactccagcctgggcaacagagtgagactccgtctgaaaaaaaaaaaatacttagggtgcatatccacggtctccagcagcattttcttcaagatcaaatagatgctggctgagaaattttgagagtctataatgaaaacagaaaccaatggtttaggcaggaaacgatatggtaatcataaatcagctcctaattcacccttgggaggctgtccaagcaagtatgctgaaagtaggcagggctagaatattctcttcttcatggtcagatatattgg

SEQ ID NO: 826419 - DNA, 630 bp, Homo sapiens
gattggacaaaaaggttttgaccttatactagtagaccaagtggggtggcccagcaaagcctgtccagattcttcttggcctctccgtgcagcatttcttccttcytgatatgggacaggaccttctctgcaatgcgggtcttatgacatacaattaaactaggggggtcagagaatttctttaaggccagttgttacacagaaagacagggggacttagggtaatattttcaggttttattgctggctttggggaaaagaggttctggtttctataacctgcctttgggaaagagggattctagtttctatggttagtctcaggggagaatgaggggccagagataggagggcaggggaaggtcagagagaagcttttgcttctgaggctgcttctgaggccttcattatggagtattgttttctgagttcctataccagtaaactattgcaaatcaaagaaaatgactgaggtgagtctcaattatttttggagacttatcttgccaaaattgaggatgcacctgggaaaaatgaacacaaaactaccagaaacatctatggtccatgtttgtttacaaagagtccgaggacttcagtatttaaaggggaaagaacaggcaataggag

SEQ ID NO: 826420 - DNA, 550 bp, Homo sapiens
aaggcaaataaatctggaacttagtgggtaagagtgagaggtgtctgtattggtgtcctgtggctgctgtaacaaatgaccacaaacttggtggcttaaaacaacagaaatttattctttcatcattcaggatgccggaaatctgaagtcagtttcactgtgccaaaattaaggagttagcaggatgtgctcccttctgaggagtgaatatggtccttaactccttcaggttctggtggcttctggcattccttggctgtggctgcatcactccagtctctacttctgtggtcacatcattgcattctcatctgtatcaaatcaccctgtcttcttcttacaaagatgtaaagtgattacatttagggttccccctggtaattcagaataacctttccctcttaaggtcttaatttaatcacattggtgaatttttttttttccttataacattcacaggttccagggattaggatgaggatatgttgtgsgcgtcattatttaacctactgcagtgaagggctggatcctataggtctttataatccaa

SEQ ID NO: 826421 - DNA, 571 bp, Homo sapiens
acactatttgtgattacataatattttattatcgccaagaacccaaacattagttcaaatagtaaataaattcagataccttaaagagccaagctaaatataactgaaaaatgactctccacccattttatacaaacacacacacgtacatacacacacgttcatatccatgatctttagtaatcccacaatttcaacatctttgtgtaggaagggagttgctgtcacatgaaaaggttacagatggatcctatttcttatagacctgaaggaatctgggcatgcttagaagcaggagaatgaatattgtggaaatggacaataatctgcatgaaaatgtatccagttatctccatttaggattgactcagtacagactatgttatatttggggagatatttttcttctttaatatgaattgtctttggtgataattatttgcccttgagatatrtatgtaagtagaatcccatagatgatcaagaagaattaggtggcaaatcttcactgctaccaatgggcaagaattggaatgaaaactctacagagactgtgctatgagagagtttt

SEQ ID NO: 826422 - DNA, 577 bp, Homo sapiens
agaatatatatgcttgtatacaataagcatataatgatatatatacacacatgtatacacacactctaaccctaaccgtaaccatatatatgtgtgtgtgtatatatagagacacattctcataatatatgtatatataatataaatactctgcctatatatgtatctgtatgtatatgcagatatatccatctacctatctatcttttagtcagttcaggctgctatgggcatggtggcttctaaactacagaaatttatttttctcagttctggaggctgaaagtctgagatcagggtgccaatatagtcaagttgtcatgagggccctctttcaggttgcagatggctgacttattgtatcctcacatggcagagagcagagagaggaagcaaggtctctcatgatccttatgaaggcatcaatcccatttatgagggctctactctcatgatctcatttaatcccaattacttcccaaggtcccacctcctaataccatcacatggggtgggggtagtgtttcaacatataaatttgagggggrggcacaaacatgcagtccataactctctc

SEQ ID NO: 826423 - DNA, 625 bp, Homo sapiens
gtaacattttcaaaaagaaaaaaaggaagttataaataatcagaagaggacaaaacagttaaaatcttcaagagtacttgaatgagacctcaagtcaggtgaaatctagagaggaacaagatgtggagaagggacaagcccatggtccagatgttgtttcctttcccctctgttccttcctatgcaccaagaggaggagggtccctctgcacagcacaagagagctggtctgggaaacctaccaacaatccacaatggaaactggaaaaggaaactgatgttttgattaagtgaatatttgaaattatttcattccaaagaaaaatatcccaatgaaagtgccaaacattcaatattcacaaacagaaaacagatgcaacatgtgttcagtttgaaactgagttgggaataactctcatgaagctgagtgaggacatatttaaacaatataattcataatagctttggagaggtttcatagaggatacaaaagagtactatacacacatttagctatccctagagtatgtgcatgaaccaaatataataaatataygtctgctatttagctttgcaatttccacatgctttttaaatgatggaattacttaccatataagacact

SEQ ID NO: 826424 - DNA, 587 bp, Homo sapiens
taaaataattttaaggcactgaaataggaaaaaaaaggtttttggagagtcaagtttttatcaagactccttgtaattagatctctttttcacatccttaattttgattgtctcctgtaaaattatccttattaagtcaacatagaatctcagaataattatttttatagttgaagtatccttccaaacatttcctcaagcagtacttttgcagcattttggggtaattggattacccatttggaggattgagatggaggaaaaaggggagagggagagtaccctgttacagagaaagcaaaatactatagaagtggattgctgaatatcttgttccttgaatgcacttcaacactgcacattagtaagcattataaagaatcaatgcaaacattaatttagctttctcaacattacagtctgtaaatgaaattctttagatttaaattgattactataaaaggtttactttttttcccttcttgtatttccaagggcatactatgccacttagytgtgtatttaacttcatttagcctctatcaaggacctgaaacaaaatgcttacaaagaatgctattttgtct

SEQ ID NO: 826425 - DNA, 633 bp, Homo sapiens
taagtattttacttatgaacacacactaaataagtgagttgagggaggaatcattttgccaataaatctcacacttttttgatttcattattgtgcrtatcttacacgttggggaattattttaaacatctattagtaactattataatttctgaatatttggctatgatgagaaattaattctctaacttgtttcaactttaaatcatagggatctaaggaaagtgaaaagtgcttcagtgtagatgatttcttcaggagcaccactttgaatcaaacctgaatataccttttaagttcaaaacatattaatactaaattttactttgtacaataaatttaatggaaatttcacttgtttgcacatctaaggtattactacttttatcttcaaataatagcaatatgtttaaactattgaaaaataaaaatatctgagtgtaatggtctcagctgaattctggagattagaagctgaataaactttgagcattaaaaaagataaaatgacttttaagaggggcattgaaattaaagaattttacatataaaaccaaaaaaatatagtattaacagtgtattatggattttgcaggaagtattttaaaatttcaaaacgtcaaggggactaaa

SEQ ID NO: 826426 - DNA, 637 bp, Homo sapiens
gcatcttactttctatactttgtagtgctgaatccttggctttgcgatgctccttgaattgtttcagttcattcactttttcctgaacctcactaatttgttttatattaaattgttcctctttctcataaatctcttggatcttaaacataattataaaataagttaatagtcataaaaatatgtaaacacacacacacacatacacaacttaagaggaaaaggttgcttcccaaaacaattaagcatgccaaatagtagtcttcataattcagttagctactccaaacccacccatttcctcccactgtttcttcatccccaatttaccttgttctgtaatttatcattgattgcttctaactgcttttgaatggttgatatttcagtttccttctctgaaagattcactcttaactcattaatagtttcctcttgttctttcaggcaacaatgagcaactttaagttcctcttcagtttccaggtgctttattattagaggaaattccaataaatttatagaaacattataactattwtgttgtaattaactcccctttccaaatatttagggtttataataatatttggttacaaaatattttttaaaaacatggtgaaagatgaaacctact

SEQ ID NO: 826427 - DNA, 669 bp, Homo sapiens
tgtataaggtgtaaggaagggatccagtttcagctttctacatatgactagccagttttcccagcaccatttattaaatagggaatcctttccccattgcttgtttttgtcaggtttgtcaackatcagatagttgtaaatgtgtggtattatttctgagggctctgttctgttccattggtctatatctctgttttcgtaccagtaccatactgttttggttactgtagccttgtagtatagtttgaagtcagatagcgtgatgcctccaaaagctggtagttttgagtggggttcagagcaaaagaaagctccccagtaagtccaggctgatgtgcaagttgctctgctacttgagccatatgatcaagcagatacaatagtagttgaaaggtagaaatggcagataggatgctacttggagtctctggtagaccctattggaaaattgcagggtagtcctttggaatttcagggcaaaggtctgccatctaccacagataatactctccttttgagaaacggctcctggcttgctactgggcattagtagaggctgaatgcttgacaatgggccaccaagtaaccatggaacatgagctgctcatcatttactgaatgtcatctgtcttaccatgccataaagttgagcacgtacagcagatctct

SEQ ID NO: 826428 - DNA, 669 bp, Homo sapiens
tgtataaggtgtaaggaagggatccagtttcagctttctacatatgactagccagttttcccagcaccatttattaaatagggaatcctttccccattgcttgtttttgtcaggtttgtcaactatcagatagttgtaaatgtgtggtattatttctgagggctctgttctgttccattggtctatatctctgttttcgtaccagtaccatactgttttggttactgtagccttgtagtatagtttgaagtcagatagcgtgatgcctccaaaagctggtagttttgagtggggttcagagcaaaagaaagctccccagtaagtccaggctgatgtgcaagttgctctgctacttgagccatatgatcaagcagatacaatagtagttgaaaggtagaaatggcagataggatgctacttggagtctctggtagaccctattggaaaattgcagggtagtcctttggaatttcagggcaaaggtctgccatctaccacagataatactctccttttgagaaacggctcctggcttgctactgggcattagtagaggctgaatgcttgacaatgggccaccaagtaaccatggaacmtgagctgctcatcatttactgaatgtcatctgtcttaccatgccataaagttgagcacgtacagcagatctct

SEQ ID NO: 826429 - DNA, 669 bp, Homo sapiens
tgtataaggtgtaaggaagggatccagtttcagctttctacatatgactagccagttttcccagcaccatttattaaatagggaatcctttccccattgcttgtttttgtcaggtttgtcaactatcagatagttgtaaatgtgtggtattatttctgagggctctgttctgttccattggtctatatctctgttttcgtaccagtaccatactgttttggttactgtagccttgtagtatagtttgaagtcagatagcgtgatgcctccaaaagctggtagttttgagtggggttcagagcaaaagaaagctccccagtaagtccaggctgatgtgcaagttgctctgctacttgagccatatgatcaagcagatacaatagtagttgaaaggtagaaatggcagataggatgctacttggagtctctggtagaccctattggaaaattgcagggtagtcctttggaatttcagggcaaaggtctgccatctaccacagataatactctccttttgagaaacggctcctggcttgctactgggcattagtagaggctgaatgcttgacaatgggccaccaagtaaccatggaacatgagctgctcatcatttactgaatgtcatctgtcttacyatgccataaagttgagcacgtacagcagatctct

SEQ ID NO: 826430 - DNA, 581 bp, Homo sapiens
tcaatggaaaactatcacaactcaattcagacaggactactaatgacagacctttcagaaaaaaaggtttgggtcaatctaccagatatagaaccaaaaccatacaaaatgggtaatggaagaaggyagttacatgtaccagttatatcagctacaatcctgtgacaagttataaaaatcaagtaactagttataaaactcatgtaaacagttataaaaatgaagactgtaattgtcatgagtactttgttatgaacatatgtgtttctgtgtgtatctgaaaatatcgttttcttctctctcttattcccctatcatataacaagatgtactgattttatgtgagtacaacataaattttattttacaacaaaattattaaattacagaatattcataaaaagagtaaacaacactccaagatttacctcttcttttaggaaaggtgctatcatcagaatgttggtgtccccccaaaatttgtgtgttggaacataatgctaaatgtaatagtattaagaggtgaggcctttgggaagtgattaagttatggggatccattttcatgaaggggttagtgc

SEQ ID NO: 826431 - DNA, 614 bp, Homo sapiens
caaggcattctaccaggtcaaatgcctacccaggagtgctctcaggatccatgttgctcaagcaggccagagtcccctgcagggatgctccacagggcaggcctaagctgcctaaggggctgcctcaaccatccatccattaattacctcacttcctggtcagggaaccaagaaatgtagcaggacaagccacagacaaaacccctcagacaccgagttaaagaaggaagggctgtattcagccgggagctttggcaagactcacatctccaaaaaccaagcactccaagtgagaaattcctgttccttttaagggcttacaactctaagggggtccatgtgagagggttgtgatcagttgagcaagcagggggtacgtgactgggggctgcatgcacaagtaatcagatcagaacagaacacgacagggattttcacagtgcttttccatacaatgtctggaatctatagataacataaccagttaggtcaggggttgatctttaaccaggcccagggtggggsgctgggctgtctgcctgtggatgtcatttctgccttttagtttttacttctttctttggaggcagaaattgggcataagacaatatgtg

SEQ ID NO: 826432 - DNA, 521 bp, Homo sapiens
gctcagagaactcagggaaacacatttactggtttatgataaaggatattacaaaagatacaattaaagagatgcatagggtgaggtgtgggaaaggatgtggagcttccatgccctccctgggtgtaccattctccaggaatctctatgtgttcagctatttggaagctctctgaaccctatgtttttgggtgtttatgaaagcttcattatgaaagcgtgactgattaaatcattggccactggtgatcaacctggctctagcccctcttccctccctgaaggttgaggggtggggctgagtgtctcaatcagctaatcacgcctttgtctttctattgtctagccccaccctgaagctatgtcatcacttagcatacaaaaaagacagcactttggagattccaaggattttaggagttaatatattgcacagtatcacattgagcttgccaggaagtgacattccttactcrcctataagcctggaaacgctgtaagtcaggtgataggtcagtttt

SEQ ID NO: 826433 - DNA, 475 bp, Homo sapiens
acaaaccaactttgggaggaacctagtttatagtttaactttgaaataaagatgataactgccctttcccaaaacaaaccccctttctgcccggggactagactgcatctgcaagactaacaaattagctacaagattagaaattatggttcaagagtcatgcagctggaggctgccagattctgaacctcccgaactgctcctcaggataatatcactattgtaaaacctaagatcagtgcttcggatattttgcagatcctgaacttgatggatcagctggcatcacccagatcaataaactggctcatgtagttttatggctcccacccaggaactgactcactgcaagaggacagcttcgactccctgtrattttatctccaacctgaccaatcagcactccccactttctgactgccctacccaacaaattatccttaaaaatcccaatccctgagtttgtggggagacc

SEQ ID NO: 826434 - DNA, 612 bp, Homo sapiens
ttattcctatttttcaactatactcagatattagcattttagcaactaaagagcagggccatatctctcactgttattcttccagtgcataaagtagtgaatctctaaatttgtccagggtatttaatagacytcattttaagtgagaatgaacatcaagaagggagaaagaagcctcaggaaagagatgttgacaagactaaacacggccagcgccatctttgccagcatttggaatttgttgggctgttgcaaatataaatggttatttttttcccaaaagaaagggatgaggaggaagatatgaaggagaggaaatagaaactcaaatctggttgcaaaatgacctttgttaccaatgatcccacgaatattgtagcagacagtcaaatggatatcaatcaagtggattacagtgtttcccttccctgacctttgcaatacaggcttactgagaaagaaggcagggcaggaagaggctggaccaggaacaccagcccatctctagttcactactttaggagtggctaatgaatggtgcccatcaggtgtttcagaaggttctgaacaagcagggctcaaactcagccaacagccacatccacgagcact

SEQ ID NO: 826435 - DNA, 612 bp, Homo sapiens
ttattcctatttttcaactatactcagatattagcattttagcaactaaagagcagggccatatctctcactgttattcttccagtgcataaagtagtgaatctctaaatttgtccagggtatttaatagacttcattttaagtgagaatgaacatcaagaagggagaaagaagcctcaggaaagagatgttgacaagactaaacacggccagcgccatctttgccagcatttggaatttgttgggctgttgcaaatataaatggttatttttttcccaaaagaaagggatgaggaggaagatatgaaggagaggaaatagaaactcaaatctggttgcaaaatgacctttgttaccaatgatcccacgaatattgtagcagacagtcaaatggatatcaatcaagtggattacagtgtttcccttccctgacctttgcaatacaggcttactgagaaagaaggcagggcaggaagaggctggaccaggaacaccagcccatctctagttcactrctttaggagtggctaatgaatggtgcccatcaggtgtttcagaaggttctgaacaagcagggctcaaactcagccaacagccacatccacgagcact

SEQ ID NO: 826436 - DNA, 632 bp, Homo sapiens
tagttgaagaccaaaggcatgaaatccctgcatttgatgagcttaggatcctrtattataaatcacttacaaatttgaaaaatgtcatcctttgaattaaaggaataaataggattagtctctgattcttaagatttattcttaaagtagcatagcaagaaaaggaagcataaggcttgtaaaggcccaaacatttcaacccaaatgcactgccaagagttatctctgcatatattcaacaagaaatacagacaagcaaaataaacatcctaggacatatttcatgggggaaaagagcctaaaagcctgtttccccaaatctatcttttgaaatctcaaagataatttttcacctagttgaaataactccagcctcctccacgccctctaatactcaatcttctttacctgtgaaaatcctacccattcttcaagatgcaattcaaaagaaaattacatattgaagctacaataatgtgaatttggaatttggtttcctggtgtagttttagaaacgtgataagatccaacttaaataattccttttatcatatgtgaaatcaaaagtattaatacattgtttatcctacatcagcggttctcaaactttagcatgcatcagaatcagggga

SEQ ID NO: 826437 - DNA, 607 bp, Homo sapiens
cagaatcaggggaggatctgctaaaacaaagatttctggtgggtctcaccccgctgagtttctgattcagtaaatctgaagtgagacctgagaatctgcatttctaacaagctcccgggagatactgacgctgctggtctggggaacaaactttgagaatccctgccctacataatgcaagagtgaaataagatagcacatgggcaaagctgttttataaggtataaattgctatactactgtaagggaatcttgtttttattgttgcattgaataccttaagaaagcttctttgtctctctaactagttttttgcagtttttactttgaaaatctctgaaatattctgtacatcttttctgacactactgatagtccacctaggactgaagtgatttttattctgtttttattactccaactaaacttcactgagatctttcaaacccggcattgcacagcagactattttgcagacaataggtattctgggcaataagttgttgaactgtgttaaacatcccttattataagaatactgctggcagggcrtggtggctcacgccggtaatcctagcactttgggaggccaaggtgggcagatcac

SEQ ID NO: 826438 - DNA, 580 bp, Homo sapiens
agatcgagaccatcctggctaacayggtgaaaccctgtctctactaaaaatagaaaaaattagctgggcatggtggcgggcacctgtagtcccagctactcgggaggctgaggcaggagaatggcgtgaacctgggaggtggaagttgcagtgagcagagatcataccactgcactccagcctgggcaacagagcgagactctgtctcaaaaaaaaaagagaatactgctttactttctgatgattgtaatgaaaacacagttgaaacatattacaaaacacacaatatattattttcatgaattgggtgtctaaggtcgcattgaaactgatacagtataaactatttgatcaaattttaaacaccaaataaattctatgctgacataaatgataattgctaagtatgctgttaatgggcaagcattttaaaagttgtatcagcttttgatcagtagcataaattttccaagtatggctttgattccatgagtaaatgtgttttcaacttcattgcttcttccaatgaaattgatactaaaagagctgttgaccctgcatcagtggttctcaaacttta

SEQ ID NO: 826439 - DNA, 580 bp, Homo sapiens
agatcgagaccatcctggctaacatrgtgaaaccctgtctctactaaaaatagaaaaaattagctgggcatggtggcgggcacctgtagtcccagctactcgggaggctgaggcaggagaatggcgtgaacctgggaggtggaagttgcagtgagcagagatcataccactgcactccagcctgggcaacagagcgagactctgtctcaaaaaaaaaagagaatactgctttactttctgatgattgtaatgaaaacacagttgaaacatattacaaaacacacaatatattattttcatgaattgggtgtctaaggtcgcattgaaactgatacagtataaactatttgatcaaattttaaacaccaaataaattctatgctgacataaatgataattgctaagtatgctgttaatgggcaagcattttaaaagttgtatcagcttttgatcagtagcataaattttccaagtatggctttgattccatgagtaaatgtgttttcaacttcattgcttcttccaatgaaattgatactaaaagagctgttgaccctgcatcagtggttctcaaacttta

SEQ ID NO: 826440 - DNA, 599 bp, Homo sapiens
ctcaaaataaggaacagttctctaagcacttraaatgcccaggatggaatgtactgggttccttctattgaggggtagtcaagtaaacaatgggtttccactcctcagagacactggaggggaacctaccagagtgacaagctggaccaaatcaactctcagaggccttagagttcccatgaagaactacagactttaatgaaaggtttgatcattttctactggagctgtaacacaaatctaggatatttagtgacctgcagaaaaatgtaacatttatcctctggggtctatcttggtcccagactaatttaaaacaatgactcttatccccaaactgaagaaattcaatctccactattttacacccttctgaaagctgacaccagttagtagaaagaagcccctcatttgctttcctttctgctccctctgggtccattctgtgtgcctgggatttatgccccgagggctttagggagtcagggacaaggatgactgcagtctccagctaatggcatcaaagtgttctagttctctgaagagaattgctcatcattgtgaatcttgcttgatggatccaaatctctgaactcttc

SEQ ID NO: 826441 - DNA, 431 bp, Homo sapiens
tcctaagcagattaattcaggaacagaaaatcaaataccrcatgttctcatttatgagtgggagttaaacaccaggtattcatggacataacaacagcaacagtagacactaggaactcctggagaaggcagtgaggaagggaggcaagtgttgaaaaacttaactattggaaactattctcagtacccaggtgttgggatcatttgtaccccaaaccttagcatcacacgatatgcccaggtaacaaaccggcacatgtaccctttgaatatctaaaataaaatttgaaaaggaaaaataaaaaggattcttactttatagcaatgtttcttaaacttgagttgtaccaaaaccacctggagaccttgttaaaacacagattgtttggccccaccttcggaatgtctgattcagtaagtttctaaaattt

SEQ ID NO: 826442 - DNA, 431 bp, Homo sapiens
tcctaagcagattaattcaggaacagaaaatcaaataccgcatgttctcatttatgagtgggagttaaacaycaggtattcatggacataacaacagcaacagtagacactaggaactcctggagaaggcagtgaggaagggaggcaagtgttgaaaaacttaactattggaaactattctcagtacccaggtgttgggatcatttgtaccccaaaccttagcatcacacgatatgcccaggtaacaaaccggcacatgtaccctttgaatatctaaaataaaatttgaaaaggaaaaataaaaaggattcttactttatagcaatgtttcttaaacttgagttgtaccaaaaccacctggagaccttgttaaaacacagattgtttggccccaccttcggaatgtctgattcagtaagtttctaaaattt

SEQ ID NO: 826443 - DNA, 669 bp, Homo sapiens
agtaagtgaggatgccagtggaggtggtttgccaagaacagcatgttcagtcctcagagtgggagaagggatggctcagtagtgaaaatgaacaaagattactattattgggacagataaattaagagggaatcacaggaaatgacaataattatgtgagtaaaaacctactaaatgcttttaagcatggaagtaacaagataagaattagggctcgaaaagacttgcatgcagtaaaaaaaatgaattggagggtgtagagcaagagtgattgcatggagattcattagggggcttttgcagtctagttttgagatgaaggtggctagaaattagattggagtggataatgtacagagaagaagtcagattctacatggtaaaattagtaggacatagtagtaagtatgatagaggaactggggaaaaggaagtgaagcaaaagtaaatatgaagaatattctcagatttttaacttatgcaaatgaataattatgttacttaccaaactgaggaatactggaggagggcagatttagggggaagatcatgagatacgttttggacccattgcattagaggtgtttttgagaaaactgagtcaagatattraagacatggttggattaaaaggtcaaacattaggtgatgatacacattttagagtca

SEQ ID NO: 826444 - DNA, 332 bp, Homo sapiens
tgcaggtttttaatttcattacattttcttctctctctctctatgtctcactcactctctctctctctctctstgtgtgtgtgtgtgtgtgtgtgtgtgtgtataggtagaccttgaagatattgtggattcagttccagaccacagcaataaaagtgaatattgcaataaagtcacacaatatttttgttttcccagtacaaataaaagtcatgtttacactgtagactattaggtgtgcaataggatcaactcttaaaaacgtatatactgtaattaaaaaatatttgctaaattgctaaataaattgctaaaaatactaatgatcattt

SEQ ID NO: 826445 - DNA, 571 bp, Homo sapiens
ggtgggaaagggataataggagtagagaagggakgaagtgaacacctatatataaacatcctttttgttattgctgtcttcacttttcttccaaagatttgtttttacttgttgacgtcatttattgtaatttcatacaagatccaaagaaaattatgttttaaaatgctgtaagataacttcaatatttcaatgaaaaacggattccaaacagttatattgttttaaaatcagaaagaatcatgtggtttaacaactttttatttttttctttattatactttaagttctgaggtacgtgtgcagaacgtgcagttttgctacacaggcatacacgtgacatggctggctacacccatcaacccattacctacattaggtatttctcctactgttatccctcccgtagccctacaccccccaacaagtcccggtgtgtgatgttccccttcctatgtccatgtgttctcatatttcagctcacacttatgagtgagaacatgcagtgtttggttttctgttcttgtgatagtttgctgagaatgatggtttccagattcattcatgacat

SEQ ID NO: 826446 - DNA, 576 bp, Homo sapiens
tttctatttctgtgaagatgaagtacatgtatgtttcctattcttctagccaaacacaactaaaaactatggacgttatatataaaasaaatgttaagaatcctctgaaatttggagagaaggctgatcagctagggatctttggattcaaagaacgacatgatggtgaattttctcagttttatgtttgccccatatatccaagactgggtgctggaaaagccagcaacctacataggtcaatggatacagacaaaaaaagcctgaacaatattttgctctctagctgaggaccaaaacttgtaaaaacagccactctattccagccaaacatcacaggaaaaactgtagcctcattatcgaacacattagcaaaggctaagtggatagccacatttccaccagcatcagattaaaataaggttgtccaacgacaatattggggtggggtcagagaagcctgaatagagggcctggatttatcctcacaaggatgaaaaccctcctcactttggtgtcagtggagaccacatggagttcttgaatttccatctctaaaaggtagcaacaactgcc

SEQ ID NO: 826447 - DNA, 641 bp, Homo sapiens
agctacttagtccacctccacctccaccaagctctgcatctctgtcaacctccaggcagctacttagtccacctccacctccaccaagctctgtcaacttgagctgcagtaccatgtttcccttggattagagtgcagtgtttagtgaccacattgctctagtcagaaggggttgtcactccattagcaggccatcttgatgtcatttcttcagttgttttgtgagttggctccaccaccattcaacagctccattggcctgaggatgacaaagtgtatggaaagtccattgtattttaggagaatgcacacattgttgtgttatttgggtagtaaccattccttggtcagagtgaagttccgtggggtaatcaaaaacatgacatgtgttccttttaagagaagctatgttagtcccatcctccacatgagtgacatatatactttcccattccagacagcaagttattgtaatagtacttgtcctttaataatccatccacttagttgcctttyttctgacgagatgtctaggttgttggcaacagctgatgagtcagtgaaaatgtagcaagatagggtggtagaggaagtctatgtggctatcaccactgcatgtagtttggcccattgttcaaaat

SEQ ID NO: 826448 - DNA, 593 bp, Homo sapiens
acctatccactggctagatggctaccacagcccagggaaccctgcctgcttgccatttggaagagccatcaktaaacaagccatgtcatactgtcagtaggcacgtctcagtcttgggccccaggtatccataggaggatccaaaacatcccctacatgttgtttagtcccttctggcaagttagccacttgctcatggagcctactggtctcttggctgctaagcccaatcttttgaatgtatcctatccatttgatcattgagctgtattgagcctgtccaatttcattggcaaggtttgtgagtgcccaggtgagaatggacagttcaagttgcagtgtcttttgtggcagttcagtcacaagatgctcagtctcctttagtgtccaatggcaagcaaggagttgtcattcaaaagaggtgtatctgcaggcggcctcaggcaacttacatgtccaaactccaagaggcttgcacaccccattggcaattttctgttgccacagactccaatccacatgcagagtggttatgcacacatgtcatttcatcagggtagcaggctttaaagcttttaaagtcagtgcctggg

SEQ ID NO: 826449 - DNA, 633 bp, Homo sapiens
cttttaaaagatagttttttttaaactcacttttaaaagatagttttttgagatgcaaagttctcattctttgggtttttttttttttcttcagcactttaaatatatcaacccactgcattctggcttccagggcttctcatcaaaaatgtcctgatcatattattatggatcccttctatgtaatgagtcaattctttcttgctgttttcaaggttctctctttgtctttggctatgactgattataatgtgtcttggtgtggagttctttgagtttatcctacttggaatttgttgaacttattggatatttatattttgtcttctattatatttgggaacttttcaaccattatttcttcaaataatctttgcccctttctcttttcttctcacaatgtgtatgctgcttctcttgacagtgtcccacagacccctaagctttgttcacttttcttttttaaaaaaattgttcctaaaacttggtgattttaatagtcctgtcttcaaattcactgatactttctcctgcctgctgtgtttctgggactcctmagtgaattattaataacaattgttataattttcaactggagaatttggaatggtaggtcctttttacattttcttt

SEQ ID NO: 826450 - DNA, 648 bp, Homo sapiens
tctgggtattgcttaacccagtcaagttgacacataaaattttccatcacacatgcttcacacatacacacattacatgtgcactgctctgtgcatgcttgtgtaatcctataatcaatttagccttctgaatttgcactcagtgagctcttggctcagttaccctagtccttggggatcccctactgaatgccctcaggtatgatgaatgagcaagtgggccagtcaacggtagaagcagtgtgaaaagcattcaagagtggacaccgcttatggaagttcacagggatttggcttcagaaggcttcttcagctcatggtcagtggttccaaatggacaattaccaacatatgacttttatcttggaatttagccaatatctgctcctcagctttggctgcagcctcagcctttgaaagctcaaatagcaaaatgcctaagtgcaatatcattcctggcattcctgaaatcacgggtgatcaatgatcataacattgcatgttactctcatatctaaataatgtatcaatatcagcaataaaaacagatcatgtcatctggatgtgttgtcrtctggatgtgttgtgattgcataatattcactttcaaatgtggatcaccattttagatataggtaggattaaaat

SEQ ID NO: 826451 - DNA, 622 bp, Homo sapiens
agccatgcaaacaggattttaagacaagtatcctatccctttccaacaagatagccactcctagaatatttctatgttcaaattctagaaccgagatgatcaccctgggaaaggtaggaagctcctggctgctgttcaggagagcttctccaattccaaagcagatcttggcaacccacccctcccccactgcgcctccctggagctacttgagggcaggcaacacgtttacctgattcactgctatatcctcaaaacctagcccagaaaatcaagagcaataaaaagagtgaaatttgtttagtattttatgatgtgctaagtaccattctaagcatgtttgtgactctactttaagtcttataacaacccggcaagaaaagaattaatgttaatgccattatgctccaagcaaggtcaccaggccatcttcaccagaatcacctgaaggcttctcagaatgcagatttccagagtctaccccagatctgaaacaggacctctggggtrgagccaagaagctgcatttttaacaaggtgtccaactgcctcttcttacccagaagctctgaagtctaaccccgactcaacttccttttgagatcccaactgacccatccta

SEQ ID NO: 826452 - DNA, 600 bp, Homo sapiens
ctcttcttacccagaagctctgaagtctaaccccgactcaacttccttttgagatcccaactgacccatcctacagtgatgtgcattattcgtctccaagtgagaatatttcctttaaccattaaccctctgctacatatagagaagttgagtgatttgccctatgatgtggggttaataccaaacagacaggcagtcacagctctagaacccagacagcaattctttctaacacataataatgtattagatacatctatgagattccccagattctttaagttctaagacttctggcccaaagtaagcttgagtagggagtcatccaagctagattcagaaaggtttagatacttgagttgctgttgtgttgttagatctctacagcaactaatgactatctatccaggcaccagtgcagccacggggtggattcccgcattcctacttcatgagcctgacactaagccccctggaggaaggaatagagggtgacttgatctgcrgaatccctcctgactcctatcctcaacagatcagagttcatcccctgtggagtttcatataccacactttggggttccatcacctggccctttt

SEQ ID NO: 826453 - DNA, 630 bp, Homo sapiens
aaatgaaacaaatggccatgaagcactcatgacaaaaaycaaaaagttgatgagtagtacagagcgacatgatcaaaggcatgctggaaacaaacctattaaaaatgagcttggatcaagctttcattcgcatctgcctgaagtgcacatatttcaccccgaagggaaaattggtaatcaagttgagaaggctatcaacgatgctttctcagtttcagcatcccaacgaatttcctgtaggccaaaaactcgtatttctaataagtataggaataatttcctccagtcttcattactcacacaaaaacgggaagtacacacaagagaaaaatctttccaacgtaatgagagtggcaaagcctttaatggtagctcactcttaaaaaaacatcagataatccatttaggagataaacagtataaatgtgatgtatgcggcaaggactttcatcagaagcgataccttgcatgccatagatgtcacactggtgagaatccttacaagtgtaatgagtgtggcaagacattcagtcacaattcagccctgttagttcacaaggcaattcatactggagagaaaccttacaagtgtaatgaatgtggcaaggtttttaatcaacaatcaaacct

SEQ ID NO: 826454 - DNA, 630 bp, Homo sapiens
aaatgaaacaaatggccatgaagcactcatgacaaaaatcaaaaagttgatgagtagtacagagcgacatgatcaaaggcatgctggaaacaaacctattaaaaatgagcttggatcaagctttcattcgcatctgcctgaagtgcacatatttcaccccgaagggaaaattggtaatcaagttgagaaggctatcaacgatgctttctcagtttcagcatcccaacgaatttcctgtaggccaaaaactcgtatttctaataagtataggaataatttcctccagtcttcattactcacacaaaaacgggaagtacacacaagagaaaaatctttccaacgtaatgagagtggcaaagcctttaatggtagctcactcttaaaaaaacatcagataatccatttaggagataaacagtataaatgtgatgtatgcggcaaggactttcatcagaagcgataccttgcatgccatagatgtcacactggtgagaatccttacamgtgtaatgagtgtggcaagacattcagtcacaattcagccctgttagttcacaaggcaattcatactggagagaaaccttacaagtgtaatgaatgtggcaaggtttttaatcaacaatcaaacct

SEQ ID NO: 826455 - DNA, 621 bp, Homo sapiens
tcactctgttgcccaggctggagtgcagtggtgcgatctcggcttacagcaacttctgcctccagagttctatcgatttttctgcctcagcttcccaaatagctgggattacaggcgctttcccccaccgtgcctagcaaatttttatatttttagtagatacaggttttcaccatgttggccaggttgttcttgaactcctgaccttaagtaatccacccaccttggtttcccaaagtgatgggattacaggtgtgagccccaatgcccggccatatatatatatagtttgtttgttttttgacagagtctaactctgcagcccaagctgagttgcagtggcacaatctcagctcactgcaaccttcgcctctggggctcaagcaattctcctgcctcagcctcccaagtacctgggattagaggtgggcaccacacacctgtgttcaagcaattctcctgcctcagccttcaagtagctgggattacaggcaggtgcaccacgcccagctaagttttgtacttttagtagagatggggtttcaccatgttaccctggatggtctcaractcctcaagtcaggtgatccacctgccttggcctcccaaagtactgggatt

SEQ ID NO: 826456 - DNA, 621 bp, Homo sapiens
tcactctgttgcccaggctggagtgcagtggtgcgatctcggcttacagcaacttctgcctccagagttctatcgatttttctgcctcagcttcccaaatagctgggattacaggcgctttcccccaccgtgcctagcaaatttttatatttttagtagatacaggttttcaccatgttggccaggttgttcttgaactcctgaccttaagtaatccacccaccttggtttcccaaagtgatgggattacaggtgtgagccccaatgcccggccatatatatatatagtttgtttgttttttgacagagtctaactctgcagcccaagctgagttgcagtggcacaatctcagctcactgcaaccttcgcctctggggctcaagcaattctcctgcctcagcctcccaagtacctgggattagaggtgggcaccacacacctgtgttcaagcaattctcctgcctcagccttcaagtagctgggattacaggcaggtgcaccacgcccagctaagttttgtacttttagtagagatggggtttcaccatgttaccctggatggtctcaaactcctcargtcaggtgatccacctgccttggcctcccaaagtactgggatt

SEQ ID NO: 826457 - DNA, 618 bp, Homo sapiens
gtatacattgccctatagcagacagacccgggacgggaccagcctccrgacgactttaaacccgaaaggaagcgacacccggcctctcactgggctgtctcaatttgctctgggcgaaggaagacgggcgagaatttccaggtctgtggggaccccacgtcccagggacagaagcggcggggacctgggaagcggagacttaatgcaacacagagcaaaactcaccatggcgacgtgaccttcactccacccgatccgcttccgggtttgcgttaatctccgcgcgcaggacggaagccaggcctgggcgggaggtgggaggaggtgggcggggcctgggcgaggtagcggcggggcgcgaggcgctgagaccttgccctttagaaccggcagagggcggggccggggcggggccggggcgggacttgcgcgtctttcagcctctctcctagcgtctctgtttttaggttgtggaggcgagagcgccagaaagtctgaggcatgattccaaagccctggaattgtctggaaccgggatgcaaactagaatgtgaaatgcaaagccctgcctgggcggcatgtacgatgtcatggtgacggcccacggaacagaataga

SEQ ID NO: 826458 - DNA, 534 bp, Homo sapiens
attgcttatattccttcttccttcaagcactattatttttgattacctaccataaatatagcacttgctaagttatttactcataataatattagattatcttattgtacacattttcagatgaggaacctgaggcagattgggggataagtaatgtacctacacagaggttgttcaaaacagagctgtatgtgttgaaatcaagaatttgaactcgagtttctgattccaaagctatggcttatgcagcttctcagtacaaggaaatttgatatttagtttagcagatgtgtaggcaaaatcctaagaaagggatcacttgtcccaagtaaggtagaaactgtcttgcaaattaccattcacttctgacttgtcaaatggaacctctctttgaagccatggagtatgtctaattgtctaattcatacctatttctccatcagctagctcagtgcctagttggctcttattaaatgtctmtttttttccttttctttggagacagagtctcactctgtcacccagactggagta

SEQ ID NO: 826459 - DNA, 629 bp, Homo sapiens
atatatgtgtaagtggatatatatgcactcacatatttaggcatatatacaggaacatatatgacattttatgatataattacatataaaatataagtatatatacttatatacgtatgatatatttatacattatgtaatatatatagtatatgttttaaaaacattagttgaaataaatctatagatcttcccacatgtattcaaaggaataatatgattctcccgattgtgttttgtttcagctactttcaaagaaatctttagatcataaaaaagtaaatcatcaattttccctgtactattcacctctaaacataaacaagaaactatgagagccgaaatgtagtcactccaaggatacagacaaagacagaaatgcagacctcaatattttcctgtttgatttaatgctgttttttgtaaaatttttccagggcctgaaacttaacacgattttatgcattgtctttaagtaaaaaagcacatgattacaagcaaaaaattaagggctttggatggagcatgtgcccttagagtttatacattatcagctttatttaaaagctatctcagcctccagagtctaccayataaaaaattattgcccaaagatagaatctgtctag

SEQ ID NO: 826460 - DNA, 563 bp, Homo sapiens
tcctgacttaactcatctctatcagcttgatcccttgcctaatgaaaaaaataaaatcttcttgctctcytttttcagttgcttactctgtaattagtcataggttcccagtaaatataataaattctaagtgattctatttaagctaagtctttatctgctttttcacaggctgtcataactacataccacctaattggtatattcttatttaagtatattagatttcctggcatttcccattcattatcactcatccatattgaagtgctaaaatcatcagttttattgattagaaaaatattattcaagatcaaataaatctattctaacatagagaatatattacttataagtgtaattgatatttatacacacacacaatattggggtaaatctggcaaatatacatataagttacttgcgtcatgatatgagggaagctatgtatagcatatatcctacttaatttcacagcataatatcaaacctccattatattttgttcacctatcacaaatcttatttttataaatgcacttagaataaacaaaggtataaat

SEQ ID NO: 826461 - DNA, 588 bp, Homo sapiens
atgattcacccgcctcagcctcctgaagtgctgggattataggcgtgagcyactacgccaggtctattcttgctaaatttctctgtagtaatcctgtcaaatatttacaatgagataccaaaatcctcaaaaattggtattaaattgtctatttcttctttcaatagtgtcagtttttgcattatgtttctggagcagtgttggtagttgcacatacttttataattattatatttttctgattgacactttcatgattataaagtttcttctttgtctctagaattatttcttattgtagagtctattttattagacattaatttagtcatgccagttcttattatgacaacttcttctatcctgttactttcaatctatttgtgtttatgaatctaaattatgttttttatagaaagcatacatctggaaacttttaaaatccagtttgtttatttctctcttttgataggagtgtttgagccattcatgtggaatttaatgatattaatttaatacaattaatatctacttttagatgttgtgattagacttaagtttgtcatttgtaatttgttttctatatat

SEQ ID NO: 826462 - DNA, 682 bp, Homo sapiens
ttttacgttaattgcagtcttgtttctttcttgaaggccttaaagacataagtccttgtggttataattaaatcctactgctaataaaattcttatgtgctcccatggtcctagttaaataactcatttctagaatcttccttatactagctaggccctttaaaaaaatcgaggaggagagggctttattagtattatttgtgaagaatagttcctcctggttttacatatatataaaatgaaaaaagatattaagaatttatcatgtgaatagaactatgaaatcggtaaagagctcagctgcacttgaaaaccttttaacatacttcatttttggagaaagctttctcagactccagcagaagtagcatctgcagtcttctgctatgatcatacttatttctagtcatttttattccataacaaataggctcaatcacattaaccacctacttatacaacattcataatttatataatgacattgaaatctgctattaatctcagaaagcactaggatagtgtcaagttatatgatactggaatgcttttttttagtttctggttctcaatwgctgattgacttattgttagctttttaaaaggtctgcagtgacaaagtaaaattggaaccatatctactataataagcctttgcaactgaaaaaggcctttaactact

SEQ ID NO: 826463 - DNA, 587 bp, Homo sapiens
tgcattttttttttatttttatttttttgagactgagtcttactctgtcatccagccgctggagtgctcaatctcggctcacagcaacctctgctgcctggcttcaggcgattctcctgcctcagcttcccaagtagctgggattacagatgcctgccaccacacctggctaatttttgtaattttagcagagatggggtttcaccatcttgaccaggctggtcttgaactcctgacctcgtgatccacccgccttggcctcctaaagtgctgggattacaggcgtgacgactgcgcctggtctattattgttattgtgtttttttttttttgagagagagtctcactatgttgccctggttggagtacagtggcacgatctctgctcactgcaaccgccgcctcctgggttcaagcgattctcatgcctcagcctcccaagtagctgggattacaggcatgtaccaccatgcctggttaactttttgcgtttttagtagagacagggtttcaccatgttggccaggctggtctcgaactcctggcctcaagtgatccaccygcctcagctttctaaaatgctggga

SEQ ID NO: 826464 - DNA, 640 bp, Homo sapiens
gcaaatgctgtctgctattattatctatagtattgatattggtgctctacccctttttaaaagccccttactactaattttagtagatagttaaagtgtaaagattctgtgctattaagaaaggtacgtttcatttgtcaaaaatcagttgattgtagatgctgttttggttaatatagctctgtagtatatttgtaagttggctagtgtgatgcctccagctctgttcattttcttcaggattgtttgtgttaatcagggtttttatgcttttgtacaaaatttacggttgctttttcagtttctttgaagaatgtcattgtaattttgatggggagtgcattgaatctgtagaccactttggattgtatggatatttcaacaatattaaatttttcagcccatggggggaaaaaggggtgtgtgtgctgctactatgtatgtgtatttttgtatatgtaaatgaaattgaatggaatgcaaaagtaccttgagtccctgtagaacttaggttgatagctggtgtatgaagatgcactttcttgaatgtyacccaactttattgataattggtgtttaattgcattgtttctgagccgggagtagtgactcatgcctgtaatcccagtgatttaggagg

SEQ ID NO: 826465 - DNA, 543 bp, Homo sapiens
ccatttaacaagtctctagcaagttccaaactttcccttatcttcctatcttcttttgacccctccaaactgttccatyctctgtctattgcccagtttcaaagctccttccacatttttaggtatctttatagcaatgctccactcccagtaccaattttcagtattagtcaggtctcacactgctatagagacatacctaagactggttaatttataaagaaaagaggtttaatccactcacagttctgtgggctgtatgggattctgcctctggggatgtctcaggaaatttacaatcatggcagaaggtgaaagggaagcaaacaaatcttcacatggccagcatgagagacagagagtgatgcgagaagtgctacacacttttaaacaaccagatcttatgagaactctatcatgagaacagcaaaggggaagtctgcctccatgactcagtcacctctcatcaagccccttctccaacactgaagtttacaatttgacatgagatttgggtggggtcatagagccagccaaaccata

SEQ ID NO: 826466 - DNA, 587 bp, Homo sapiens
cttttacttatctattatctgatttgatcgtcataatatacctgaaaaacaggtaaggaaatttttatgatccacgttttacagccaaggaaactgaagctcagattaggagtgaaagcaatttccttacaaatggcacaattaacgtctccatccagattttctttatactttttcaataggaaaaaggaaaaatgaaatgttatctggactcataagagcagtcagaaaggtaaaagatgagagtgaattttgaataagaaaatggatttttggttccttttgtatttttccccatttggaacaagatgaagaattgaaatagacccctgcctggattagattagaaagaacttccccactcctgtttcatccatcaaagataatgatttcccagcagaaactggtagaataaacctccttaagagaaaatgtttgaagtccttaataagtaaaaacacctgtagctytaaagggatttttttttttttttttttttttttttttttttttttttttttttttaaaaaaaaaactcctggcccaaggaagttacacctgaggatcctgagtgaccatgtaacttc

SEQ ID NO: 826467 - DNA, 587 bp, Homo sapiens
cttttacttatctattatctgatttgatcgtcataatatacctgaaaaacaggtaaggaaatttttatgatccacgttttacagccaaggaaactgaagctcagattaggagtgaaagcaatttccttacaaatggcacaattaacgtctccatccagattttctttatactttttcaataggaaaaaggaaaaatgaaatgttatctggactcataagagcagtcagaaaggtaaaagatgagagtgaattttgaataagaaaatggatttttggttccttttgtatttttccccatttggaacaagatgaagaattgaaatagacccctgcctggattagattagaaagaacttccccactcctgtttcatccatcaaagataatgatttcccagcagaaactggtagaataaacctccttaagagaaaatgtttgaagtccttaataagtaaaaacacctgtagctctaaagggatttttttttttttttttttttttttttttttttttttttttttttttaaaaaaaaaactcctggcccaaggragttacacctgaggatcctgagtgaccatgtaacttc

SEQ ID NO: 826468 - DNA, 588 bp, Homo sapiens
atgcagcattaacatagaatttttaaactgtcagttaaagaggttataaaaatgaccaagacatagatccaagacaaagaactgtgtaagaaatactatataaattattcaattatcaggaaatacaaaaagatccaatatcctctcctggtccatttaacataaccaacacctcctagtctaactgtaggacccctcttcctacaagatgacgcattgtatgttacatgcaggggtggcaaaatacatattctgtccaaatacacctactctaaaattgtaactatggatgggaattttctggacacagcaagaacctgggatattaggataaaacattataaaaccttgtctcaatttctcagctcagtggtgacttatgaatactatccacactggtaatattttatttcattttcaccttctcatctctatttttttcccttacaataaacgttttccttcttattggtataaaygccatctatcaataaagtaaaagatacttggtatttattacatgcctcatgtttataaaacaaatgtgtcatttataagcaggatgtgtatgcacctgtaacagtgatt

SEQ ID NO: 826469 - DNA, 603 bp, Homo sapiens
ccatatcctacaagaaaaagatctatctttagttttcaacctatcctaattttaggggataaaaagtagtatgatcttatactgtcaaactgatttgatacactatcttcctttctttgcttgacaytgtaatggaaattttttaaaaaaatttgaatggagatttatgttgagcacaggtcatgtccaattatttaattagagtaatgggaatattttctagtgaactcatagcatttgctctagaggttttgtcttgtataaagggtttctaaaaatctaaagtgattgaagtttgatgaatggctagataggcatgtcatataaaaactaaataaagaaactaaaaaattaaaaataaaaaaataaaaaaataaagatgtgtgtcgctatttgccagcataatggtgcaacaagaaacaggaaatatctagccatttcaaagtcttatagatacaggaatgagttaacactaataccaggaacatgaaatgctttcatcggtttctggttagacctggtgctgctggaggaactgaggtaaatggagtgttgtcccaagttcatcatatagaaatcaattgttagtttttcttatttgat

SEQ ID NO: 826470 - DNA, 605 bp, Homo sapiens
taataacatattaataatataaatgaagtacacaataaatgtaatgtgcttgaatcatcctgataccatccccaccataccaccagtctgtgggaaaactgtcttctacaaaaccagtccccggtgtcaaaaatgttggagactacagtcttactgactatattacctggaattgcattgtactttatataaatgaaattatagaaagtgtactcttttttgatggggctgctttatctcacctgcatgtttgtgatatatatacatagccaaatgtagttgtagatcattaactctcattacctcataatattccagtatgtgattatactatgatttatgcatccatattttccatttattgtgttgttatatatatatatatatgctatatatatatgtgtgtgtgtatatatatgtgtgtgtgtatgtgtgtgtgtgtgtgtgtgtgtgtatatatatatatatatatatayatatatacctgttctgatggctctatacctacaaatgaaaattctgagtcacagtttgtgtatgttcagctttagtacataatacctaatattctcccaaaatgattctacaaatttcctcttttcatc

SEQ ID NO: 826471 - DNA, 585 bp, Homo sapiens
gtcatgagaaagagatcccggggctgcccaaaccagcatcccagccacaatagccaggcatcaggtgccctctggcctactgggcgcacagcaggggcagggccagctctgccttggtgcagggcagtctcccctttaaaatgtccgtccccgggaagcgagaggctcccctgtcttggtcactgctccagcccagtgtctagcatgcagtaggaacttggccagtacagagtgaacagaagaacccgccaatcccttgccttggcctcctatggctccatttcctctaatcctgtgtccccattgtatttttttttttttttttttttgtattttgtttagtagagatggggtttcaccatgttggccaggctggtctcaaactcctgacctcaagtgatccacccaccttggcctcccaaagtactgggtttacaggcatgagccactgcacctggaccccactgtctttccttaactgcctgtctgctctgtcagacgctgtctctccctgcccccgtggtggcyggctggtcctatgtctaggcctcagtctccctctctgactgtctttctgcctcaggt

SEQ ID NO: 826472 - DNA, 565 bp, Homo sapiens
caggagctcaagaccagactgggcaacatagccagattctcatctctacaaaaatgaaaacaaataaaaattagctgggtatgttcacacatgcctgtagttagagctacttgggaaacttagtggggggatcgcttgggaccaggagttcaaggctgcagtgagctatgatcgtaccactgtactccagcatgggtgaaagagtgacactctgtttcaaaataaataaataaataaaaaataaaaaacactatgaactttcctttcattgttatttctctacccagaccataaggattatgaagttggcatagaaatactagattgcggagaggtaagtgaagagtgaccagttgtatgtgtgacaaattatcctggtaacaatacgttgtcttagatgaggttattggcttcaaagccacaagataatttctcycccatgaaacctagaaagagttgctaatttctatgggaaatagaccatttatccactaaatgtacatttcagcctattttgtcactctgattctggtaagggtacaatgatgttaggtcttatttgagt

SEQ ID NO: 826473 - DNA, 565 bp, Homo sapiens
caggagctcaagaccagactgggcaacatagccagattctcatctctacaaaaatgaaaacaaataaaaattagctgggtatgttcacacatgcctgtagttagagctacttgggaaacttagtggggggatcgcttgggaccaggagttcaaggctgcagtgagctatgatcgtaccactgtactccagcatgggtgaaagagtgacactctgtttcaaaataaataaataaataaaaaataaaaaacactatgaactttcctttcattgttatttctctacccagaccataaggattatgaagttggcatagaaatactagattgcggagaggtaagtgaagagtgaccagttgtatgtgtgacaaattatcctggtaacaatacgttgtcttagatgaggttattggcttcaaagccacaagataatttctcccccatgaaacctagaaagagttgctaatttctatgggaaatagaccatttatccactaaatgtacatttcagyctattttgtcactctgattctggtaagggtacaatgatgttaggtcttatttgagt

SEQ ID NO: 826474 - DNA, 565 bp, Homo sapiens
caggagctcaagaccagactgggcaacatagccagattctcatctctacaaaaatgaaaacaaataaaaattagctgggtatgttcacacatgcctgtagttagagctacttgggaaacttagtggggggatcgcttgggaccaggagttcaaggctgcagtgagctatgatcgtaccactgtactccagcatgggtgaaagagtgacactctgtttcaaaataaataaataaataaaaaataaaaaacactatgaactttcctttcattgttatttctctacccagaccataaggattatgaagttggcatagaaatactagattgcggagaggtaagtgaagagtgaccagttgtatgtgtgacaaattatcctggtaacaatacgttgtcttagatgaggttattggcttcaaagccacaagataatttctcccccatgaaacctagaaagagttgctaatttctatgggaaatagaccatttatccactaaatgtacatttcagcctattttgtcmctctgattctggtaagggtacaatgatgttaggtcttatttgagt

SEQ ID NO: 826475 - DNA, 518 bp, Homo sapiens
cagatttatcattatctaagataattgataaacagatttatcattatctaagataattgataaacakatttatcattatctaagataattgataaacagatttatcattatctaagataataaatagatttatcgttatctgagataattaataaatagatttatctattatctatctaagataattgataaatagaatgatttgtcactctatctattatctatctagctatctagctagttagttgttagctaaaatagcttttggggctttcagctttttggatactcagttcaaaatctactcttcttgttttcatgaacttgactgctatattgtcctttacattagaccatctgggtgaacagcatttggctttgctggtgccagccttaacagaacacttgttatttggagcactgtcttagttctggcgctcatgcattctggagtgaatatcatatggacaatacaagttgatgcctcaagagaataaaacccccagaatggcaaggca

SEQ ID NO: 826476 - DNA, 459 bp, Homo sapiens
tttgagaaaacaaaacaggctccaagagatgaagtcgtatgtaaagggcaatgatggtattcaaacccaagtgtattatgtatctattgccaagtaacaaatgactccaaactaagtagttaaaacagcaaacatttattacatagttgtgtagcatcagggatccaggagggacttcgctttgtggttctgtctcagggtctctcatgaggttgacgtcaagctacagtcatctgaagggtagaactggatcttccaaactcgttcatgcagctattggcaggaggcttcagatccttgacaaacaggcttcttcatagagcagttcatgacatagcaactggyttcctccagagcaagtgatagaagaaagagagatagcaatcaaattagaagcaacagtgccttttataagcccatcttatatgtaacatgctatcacttctgctgtactctttt

SEQ ID NO: 826477 - DNA, 552 bp, Homo sapiens
acaaggatcccacctctgctctctrccatatgtatgatcttggactagtcacttaatcttgctgccccatttctgttttcattattgattgtagttgtgattgtcttgtgttatggtgcttcagcattggattcagcagccagcttcctagtacgaaggcaacgattacctccacagggtcccttccattgtcctcctgcatcattttcctccaacttgaataaatgttctacccacctttctcctttattttctctaccccctgtaccccgctccctctcacaattaactctacagcagaatgtgaattctctgattttagaataactattttatggtaacttcaaatatatcctagttgtatccacattcagcttgggtaggtaccttcatagtagctcatggattaattgtccactgcacccaatcatagtcatttttggtttgggttgtcatatgctccccaatagatgaagaagagaataactcttagccgacttcatcagcaggtagggagagagtctctgatggagttatatttcattattcctc

SEQ ID NO: 826478 - DNA, 663 bp, Homo sapiens
ttagagacacagggcatgtttgtggtcagtcccttgttatccttgaaaagtaaaagactttattagcgtctttcctaactcttgggaagaaaatcaggtggtaatcattttcttgttgttgtttcyagtttggtgtgaatgtggtgtttcactgatagacaaatttacctataagggaaaactcagcctagtagaaatacatctagtaaagaattcccaggatgaacaaagcactgtggtaggcttgaggaaatgggccaaggcattggaaagggtatatgtgttttttttcatcaggggagaaagaataaatatttaaattaaacattctaatcatatgatattatttagtatcataaaaatcacaaagctaccttttcttttagttttatctgttattcatgcttgtcttggggaatatattattctacttttactctttttacatatatttttatactccaagacaaaaatcaaccattctttttcatattttcagataatagccttattttttaggtttgtcatgttcaataagcctactacaagtgtataggatgtacaccattaatcctttcaatgtttagaccctcatttccataccaccgaaatgagcattgagtcacattctgtgtaggcctatacagaatgcattcatccttg

SEQ ID NO: 826479 - DNA, 663 bp, Homo sapiens
ttagagacacagggcatgtttgtggtcagtcccttgttatccttgaaaagtaaaagactttattagcgtctttcctaactcttgggaagaaaatcaggtggtaatcattttcttgttgttgtttccagtttggtgtgaatgtggtgtttcactgatagacaaatttacctataagggaaaactcagcctagtagaaatacatctagtaaagaattcccaggatgaacaaagcactgtggtaggcttgaggaaatgggccaaggcattggaaagggtatatgtgttttttttcatcaggggagaaagaataaatatttaaattaaacattctaatcatatgatattatttagtatcataaaaatcacaaagctaccttttcttttagttttatctgttattcatgcttgtcttggggaatatattattctacttttactctttttacatatatttttatactccaagacaaaaatcaaccattctttttcatattttcagataatagccttattttttaggtttgtcatgttcaataagcctactacaagtgtataggatgtacaccattaatcctttcaatgyttagaccctcatttccataccaccgaaatgagcattgagtcacattctgtgtaggcctatacagaatgcattcatccttg

SEQ ID NO: 826480 - DNA, 612 bp, Homo sapiens
gtttcagcaaaagtaaggcagctgaaagctaggaaggtctctaactggacccaaaggtatttcaattttctgcytgagcatccaggcacactcaatgtttacttggaaatttagagagcctctgcaattctaagagttggcacctacaggcagaacagccgaccactcatgggtggaatctcaggactcttgggaaggctgaactccagtgacctccagtgacatgtgcttcctgttgctgaaatgaaaccctcacaagtcattgctttacgttgaggcttgctttctcttaaaattcaaatgttcctcctagagctgctagcaggaaccagtcaagccccacaaagttcatttaaagccgtcctaaacataatccttctatcctgaaactagacactaccaaacagaggactgtgtctgccctggatgttgctttcatccttcattgtctagaactctggtacctctttaggaccatcttgcatcctgctgctcatcctcctgcttctgtagctcccatacttcatgactttctattctatcagcctagcaccattttcaaggctgtctttggacctcaacccaagctctctctcccaggtgactgactca

SEQ ID NO: 826481 - DNA, 621 bp, Homo sapiens
aacatggctctgctgataaaggctcttacgttagtataatgatggctaggaaggcaggtgccaggaaaaaagggaggtcagtgaaaagacaggacaacaggacacstcagatggggaagagggagtcctgaaagcagggatggggcccactgggctcttctgggttgcagtaaacaccttaggctatttctattaatatatggactgccaatttaaaataatgtttaaaattcaaaatggatgtttagggaaggacaagagatgaacacacagcaaagaagccagaaaacaagctcgagtggccacagacatactcccagagcctggaaggtcatttcaatacagctctagtatgagttatgtgtattctcttcagctgcaggatgccaccgtgctctccattctgggctcacactttatggtgaaacagtccattccccattgctcttgcctccaccaaccacaggttatctgttcattgttttggtctttaggttccagtctctctctgtgactacgtatttcctgattctcgttccttctctccctgtatccttctcctccctctcctccctaacattgcattgaacagaaggcatgaagtacaagaaaaccaacagg

SEQ ID NO: 826482 - DNA, 576 bp, Homo sapiens
ctaaacaaaagacgccaatctgaaaatgctacataccgcattattccaactatgtgacattctggaacagaccaaacaatggagacagctgggtacggtggctcacrcctgtaaggtcagcactttaggaggccaaggcaggtggatcatttgaggttgggaattcgagaccagcctggccattgtgttgaaaccccgtctctattaaaaatacataaattagccaggcatggtagcaggtgcttgtaatgccagctactcagaaggctgaggcagaagaatcgcttgaacccaggaggtggaggctgtggtgagccgaaattatgccactgcactccagcctgagtgatagagcaagattccatctcaaaggaaaaaaaaaacaaaaaacaaaaaaaaaacaatggagacagtaaaaacatcagtggttgtcaggagttgaggggagcggagattagtaagcagagctgaagagtattttgggcagtgaaactattctgttcgatactacaatattagatagatacatgtcattatacatttctcaaaacccctagaatgttcaccaagagtgaa

SEQ ID NO: 826483 - DNA, 585 bp, Homo sapiens
gataattttataggctacaccataaaggcctatttaatcactaatataactgraatgctatgtaattgcaataaaaagcagtaaactaccacactactgacaattacagcagaaaataataaaaatcaattaagaacctgtttcactttctccatatatcttgaataatagtgtaaaacaaaatgtatatttaatttgaagaagatgaagaccaaggtagaaattctggaattctgaagaggcctttaaagaaatttcaagacatggtattcacagctaatgtgtctgatgccgcgcccttccctcccaagtggatggttttgcttttctcagttcacgtgcatcaccagcattgctctgatctttagcagctatgaatagggtcactcaggactcctagtggtaaggagcagtaagggaactaaaaaggctattagacggctccctgaggcaggcacactggcccaggccagctctcaccagagatggactattgcctattttcacctgtcccctagcttggaaaatgcagaaatggggagaaaatgaaaagggaaaaaactagcttttctcaaaaaattgagc

SEQ ID NO: 826484 - DNA, 653 bp, Homo sapiens
gaaagagggcatcattttctaaaactggaagtttatgccagaataatcagacaagagaaagaaataaaagtgatcctaattagaaggaagaaggcaaatcactcttgttagcagatratatgaccttatatttagaaaaccataaagactccagcaaaatattcttacaactgacaaatgaattcagtaaagtttcaggatataaaatcaacatacaaaaaccagcaacatttatatatgccaacaatgagcaatttgaaaaacgaatcaagaaagcaattccatttaaaataggtacaaggcatataaaatatctaggaataaacttaaccaaataagtaaaatatctttataagaaaaacaataaagctgtgatgaaagaaactggagaagacacaaaaaatgggaaagccattccatgttcatgaataggaagaatattgttaaaatgtaatacccaaactgatctatagattcaatgcactacctatcaaaataacaatgacattcttcacagaaatagaaaagacaatccgaaaatttatatagaattacaaaaaccccaaatagctaaagcaatcctgaccaaaaataacaaagctggacacatcacactacctgacttcaaaatatactacagagttatagtaact

SEQ ID NO: 826485 - DNA, 578 bp, Homo sapiens
ggggtttgaggctgcagcagtgagctatgatcgccccactgcactacaatctgggtaacagagcaagccctgtctcaaaaaaaagaaaagaaaaagaaaagaacttccccacagggtcgaagkttagataaaatgatgtatgtgtataaaagtactttgtaagtcttaacattgtatacaaatgttagttattattaatagcaagcagaatattcatcaaactagctgtccactgaagctatcactagccgtgctaaactctgtaactatcacacaccacatgaccagatgtagactcctgagtaacctggggctccctactccctacaaggaatagcttggtctggtcaaatgtcatcataatatcccattttaacatacaaaattttcattacacttttttcaaagataaaaattaagatcactataatcaataagccttaatatatttccaaaatttatcttgtagcaagtgaatataaaaatggaaagttgaatctattaatctctatttaaggcactgcacatcaataatttttgaaaaaatattttgaaatatttgagtaagaagctacaag

SEQ ID NO: 826486 - DNA, 445 bp, Homo sapiens
tccccaccttctttgtggatccttacccctttcccttcctattgttttctttcttacagcatttaaacacactcwaatgcctcattgtaagataccatatctcaacccataaccctacccaactactcaattctctccttcctcttgcaacaaattgcttttagaagactctattttaccatttttatttctttatccctactaagtccatcttgccctgcaataggaaggaaggaagaagggatagaattcatgtgagtaagaattgtcaaagcagggagactttttatttctttatcccagctaagtcccagtcccactacaatctggcttctgtgtccatcacttcgatctcaataaaaccaaaaagcctatggtattaagaaagccaacggatacttttcagtctttattttacttaatcacttagcaacagttttgatat

SEQ ID NO: 826487 - DNA, 561 bp, Homo sapiens
tcccaaacctcaattcttgacttctgggcacccacaggctcaacatcacatggaagctgccaaggctcagggcttccaccctctgaagcaatagcccaagctgtaccttggtcccttttagtcacagctggaatggctgagatgcagggcaccaagtccctagactgcacacagcagagcctgggcctggccctcaaaaccattttttcctcctaaacctctgggcctgtgaagggaggggttgccacaaaggtctctgacatgccctggagacattttctccattgtcttggtgatcaacatttggctcctcattagttatgcaagtttctacagccagcttgaatttctcctcaaaaaatgagattttcttttctatcgcattgtcaggctgcaatttttcaaacttttatgctctctttcccttttaaaayggaatgcctgtaacagcacccaagtcacccttgaatgctttgctgcttagaaatttattccaccagataccctaaatcatctctctcaagttcaaaggtccacaaatctctagggaaggggcaaagt

SEQ ID NO: 826488 - DNA, 520 bp, Homo sapiens
gagggaggtacagccagggccgttcactccatggagctggcagggsccgggaacatgcaggagccccactatttactgagttggtggggtgggagccccatactcctgggtgcagctgcagctgcccagccgcagctgcagacctgggcacccctgctctcggggggtgcccaggaagcccctggctcccgcaggctcagaggtgcctgctcccactccctggcctctccctgctcccagcacccattctggtgtggagcaaggttgtggccaggaccaagcactgtcacaaaccggccaggtgtccacacactcggggcagcactgacaagccagccccctgccaccttagccccctccagactttgggcaccgatgagcatgggagggaagccagatgggggatgctaagggcagctcagtgcaggcctgcagccacccctcagcacaaacagcctgagcggtatagacagcatattgatgcaaggaggcagcatgttgacacaaggaggcagacagg

SEQ ID NO: 826489 - DNA, 646 bp, Homo sapiens
ttggattctgagttcatggggacagtttgaagcattgggctaccaaggctggtctggaaatagggcaagcctggagattgaggctgagggagctggcctggcttggcatgggcctgaagttggggctcactgtggctaatctggtactgaggcgagtctgaaggcttggtctgtggtactagcttgaagccttgggcattgggagctggcctaatgccagatttcaataagcaggctcactgctgtggtccagggcaagattaggaactcacttcactctccttcccccacatggagggtatctcttccagtaatgtgctgcctgtactgggagaaggggtgattcaggtaatgtgaaactgttttttcctaccctcttccaggtgtctttgttttatttctgtactacaaccaagtgctataatctcacatctggattacttggttcttttgaaggtatttcatatatgggtagttgttcaaattgatgttctacaaggggatgagcactggaaagtccttttccctgctatggttctcaatgaagcctgcastgtcctagaactagagacatgctctatattttatatggtttcacaacagacaaccaggcccttttggcactgtttatctgacaaaatttaat

SEQ ID NO: 826490 - DNA, 357 bp, Homo sapiens
ctagcctcttagggcaatggaagaactatctctgtggcctggagatgagagacccttccctttgctaagaatatgtgagcaagagtctctatcctcctgaagatgttcaaggctgaaaaacaacctcctttttctgcagaaacacccccaagtccggacatgatgtattcagagtcagaatcagctggcacgtgtgggtatgccctccccaggcaggactggtcccacaggctcctctccagagcagacaggacaagaaggccatgctggacaacaaaggctaataatgctcaccatmttccctcactgccaggtgtcactttctcctaagaacagcccacttgcagcccttgcccc

SEQ ID NO: 826491 - DNA, 633 bp, Homo sapiens
acacagaggttctactgtggtgagccattcctcagagggaacacagacattgtgggatgcactttccaggctctctccctcatatgtcttctgaccccttccattccacctcgactgccttaagaggagtatgcttggtcatgctaccctggtgataatagagtcaggatgagctgggggaggtccgtagtggagagccacagctccccaggctgtccctgtactttttagccatttcaccaaagacaaggcagaagatttaggaagtatgtttagcaaatggcactgacctagggctggagacagctgggtattagactaacattaacaagcccaaacaaacccaagctaacaagagcatgtttcatggggataatggtgaagtttcccatttaggttcacaaataaattgcatacatttcaaatggaggacctgtactaagaggagttcacatggaaagaacttgggggaggtcttagttgaccagagatattgtagtagatgccactgatgccgacccagatccccctcactggaccattgtgcatcctgccccagctgctgtgagtactggctactaatggyttgcagcactacctcctcaagaaagctgaccttggctgagcataggc

SEQ ID NO: 826492 - DNA, 564 bp, Homo sapiens
aatttggggtgagggaatgatgtaatggttgattagtgcattactaccaataatctcaaaacaattatataacattktttatccgagtagaggagaagcaacaggaaaagaaagacaagaaggaccagttccttttattaagtgaatggcatttctgccatatggtattagataatgcaaagataatgccagtgactgggagaccatcatgtgggctttttggaaggaagcatgtatgcctgacacctgtcacatagctcaaatgtgatgctggcatatttgcaactaaattagaataatttaaccttcattaaccccttcctgtgtttatgaaagtagagcgtaattgacaaaattctgggggaagggtggctccttgacttagattcggtggaatttttgtgagtagacgcaaatactgttgtgtcatacttctatgctatcaggctttctgcccaggattccatttatttggagactgtgaacctgaagtcaaggatatctcatgttccagtgttttcagtagaaaaataaggcgaactgtcaattgacagatttttcata

SEQ ID NO: 826493 - DNA, 586 bp, Homo sapiens
aagtgaaagggtgaactgaaaaaagttgaggtgattaattcactatagttttatgtttaacaaacctatccatggtttattctcatatgggtttaggtcttctccaataatcctcttcttgccctgataaagtcctgagttaaaatccaccttcagggttggtatttgagtctacatttgtggagttcagattaagattccagataaacaacacccatgcaatgtttctcaaaatgcgacccgcaggatgtgcaaaacaagaaactggagtacttgtacttattaaaagtcagattcctgggcctctcattagaacagggcccctttctcgtctttttttttttcttcctttttgtggagaacggggtctctctatattgcccaggcaggtctagaactcctgggctcaagctatcctcccgcctctgcctccctgagagctgggattacaggcgtgagccactgcaccyggccaggcccttttctcaatggtcctctccccaccaaagtccaagaactgagtctcatcagttccagtttccgggattgagttgtgtgccacccctgaatccatcactgtggccag

SEQ ID NO: 826494 - DNA, 631 bp, Homo sapiens
tgcaagtgtgatgaagttagggatcttgagatggggagattatcctgaattatctyggtgggccccatgtcatcacaagggtccttaaaagggaagagaaagcaggagactcagagaaggtgatacaatgatggaagcagagatgagagtcacgtggacccacgagccaaggaaagctgatggcctctagaagctggaaacggtacagaataaattctcccctagagcttccagaaggaaccagccctcctgacaactttgctttagcccagggaacctacttaagacttctgacctccagaactctaagagaataaatctgtaggtttttaaagtcattgagtttatggtaatttgttagcgcagcacaggaaaattaataatatggcaagcaagagctctctagccaatggactcaggctctgatggtaggcataaccatttgttcatttgctgagcaaatactatatattcggcaccatgctgaaaaaacatccagcaagcaaaacaagcatggctcctctcatcagggagcttgaaatccagtgtggaagacctgcagtatgcttgttatcgattcatggcctctcagctccaagttcacccctcattacctgctctgtgaaaatag

SEQ ID NO: 826495 - DNA, 623 bp, Homo sapiens
tttctaaagtatttatgtattaccctaccatactggaaccagacataaatacttatttgtgtctaaaaatgcattgttacttacagtttgttttctgcagtaaagaaaaattcttcatttgtgcaaagtttgatcaaagaggaaatcatctttatagtaatgaaactttgtacagtgtttccttatattggtaattattcggtggattacttttctccatggactttttgcactcttgtgactaacttctataacttatggttcagaatttgttactatttacagacaccactggaatgtggatatattagattgtgagagacaacagttgcctccttttgacaaatactggatattagcagtttatttatgaaaatagcttattatcacttgtcaaatcattgaaattgatgtggggtcaaagacttgagtgacccagtattgagccatgaataatttactgtagtgtaacctgcattacaagtacattgatcagttctgcatcttgtttggttttctgtatctttttaatcaagtctagaaactatgttcatcaatcactaatttttaaggttggsgagttagattttatgatagaattatgaccgttagcttttctcctt

SEQ ID NO: 826496 - DNA, 650 bp, Homo sapiens
tctcccaaaatgctgggattacaggcaggagccactgtgtctggcctatttttatcttaacagtgcctttgatgacaggagtttttaatttgactaaagctaattatcaatttttttctrttattcttagtgcttttgtgtcctttaaaaaacaatctttagcccaaagttgcaaatgtattctcctatgttttctttgagaagcattttagttttagctttctgatttgaggactacagtccacctcagactgagttttgagggtgatttttttattcagttagtctagcaccatttgttgaaaaaactttcccttctcaattaaattgccttggtacgtctttaaaatgataatgggccatatatgttttatctatttctaaccttttgttctacttcattgatgtatttgtctacctttatgctgattccatcctgtcttgattgctatggctttattgtaagtcataccctcagtaatgtgagccttctaaatctgttcttttttccaatttttaaaaaaaattttattttactttaagttgcaggatacaagtgcagaccttgtaggtttgttacataggtatacgtgtgcgctggtggtttgctgcacctatcaacttatcatgtaggttttaagccccacatg

SEQ ID NO: 826497 - DNA, 534 bp, Homo sapiens
attaaacatgtttccatgactgcataacattccttcatgcttcttcccctattctaatccccaggcaaccactgatctgctttctatcatcagatccatcagatacacaccattctgtctcttccagaatatcacacgaatcatacagtatgttctcttctgagtctaggttctctcactcaggatgtttttgagattcatctatattgttgtgtgtatcagtggttagtttctttttattgctaagtagtatttaattgtttggatataccacaatttgtttatgcattcaccagttcatgggcattttgttgtttccaagttttgactactgtgaaattaaagcgctattaacattgttatacaagtctttgtgtgggtatgtttattctctctctctgttgaaatacctggccatgtgcagtggttcacgcctgtaattccagcaatttaggagggcaggattkcttgagctcaggagtttgagactagcctggacaacatggtgaaaccccgtctctgaatctaaaaaaa

SEQ ID NO: 826498 - DNA, 633 bp, Homo sapiens
accagggtgtgcagggaaggcccatcaggttggggcagggccaggcatgtctgagctcagactctccttgggcatatcttgcttcagctgctgtcgggaatgggggtgagcttcccaggtcactggagttgcgtacctaagaggattatcactacctctgttgagtcatgcaggttgtcagggaagtggggaaagctggcaatcacaggcctcacccagctcccacgcaatctgaagggcggtctcacttccaccatgaacccccacaaacagccccgagtctgtgtccaggcagtgggcaagcagggcttgagaacttgccccaggctacctgcctcccagcttggaaagaaaaggactttggttcttcccctgcttgtggagtctgcatgccggattcttgttctgccccgagttctggccaggaggcttcttgcctggttcaaattgttacaaagtttagctaaagatttccttctgtttgtggcatttccccccacacctctggctrccctcttgaaggatccctgtggtgccaggcaagagtggcctacttggggacccgggaagctcccagggcctttcccgctgcttgctctacccctgtattttgcttggctctctaaattgact

SEQ ID NO: 826499 - DNA, 476 bp, Homo sapiens
ttttttaagaatttttgcatcaatgttcatcaaggatrttggcctgactttttgttgttgttgttgtatctctaccaggttttggtatcaggatgatgctggcctcatagaataagttagggaggagtcactcctcctcagtgttttggaatagtttcagtaggaatgataccagctcttctttggacacctgacagaattcagctgtgaatccatctgatcctgggctttttttggttggtaggctatttattactgcctcaatttcagagctcattattggtctgttcagggattcaatttcttcctggttcattcttggaagggtgtatgtgtccagacatttatccatttctcctagattttctagtttatgtacatagaggtgttcataatattctctgatggttgtttatatttctgtagggtaagtgataatatccttcttgtcatttctgattgtgtttattttaatc

SEQ ID NO: 826500 - DNA, 476 bp, Homo sapiens
ttttttaagaatttttgcatcaatgttcatcaaggatgttggcctgactttttgttgttgttgttgtatctctaccaggttttggtatcaggatgatgctggcctcatagaataasttagggaggagtcactcctcctcagtgttttggaatagtttcagtaggaatgataccagctcttctttggacacctgacagaattcagctgtgaatccatctgatcctgggctttttttggttggtaggctatttattactgcctcaatttcagagctcattattggtctgttcagggattcaatttcttcctggttcattcttggaagggtgtatgtgtccagacatttatccatttctcctagattttctagtttatgtacatagaggtgttcataatattctctgatggttgtttatatttctgtagggtaagtgataatatccttcttgtcatttctgattgtgtttattttaatc

SEQ ID NO: 826501 - DNA, 610 bp, Homo sapiens
tttgtttacattatactgtagtctattaagtgtgygatactattctgtctaaaaagtgtacattaatttaaaaatactttattactagaaagtgctgttgatcctctgagccttcagtgaataatgtttttgctggtggagagtgttgcctccatattgttggctgctgactgatcagagtagtggttgctgaaggttggcttggctgtggcaatttccaaagataagacaacaatgaagtttgacacattgattgactcttcctttcacaaaagatttctctgtagtatgtgatgctgtttgatagcattttacccacagtagaacttattacaaaattggactcaatcctcttcaaccctgccactgctttatccactaggtttatgtaatattctacatcttttgttgtcatttcaacaatgttcgtagcatcttcaccaggagtagaatctatttcaagaaaccactttcttctctcatccataaaaagcaacaattcatccattcaagttcgatcatgagatggccccatcttcaggctccactcttaattctagttttcttgctatttccactatacctgcaatctagaacccctcaaagttat

SEQ ID NO: 826502 - DNA, 632 bp, Homo sapiens
gtttccagggttgtaatattatactttttccaacatctagatttcattccaaataatgagacaggaaaacaaatagaaaagtatggccaatacacaaggaaaaaaagcattcaacataaagcatacctgaggaagcacaaatgttggatttataagaccaagtctttattttaatttttttaacttttaaattcagggctacatgtgtaggtttgttacattggtaaatttgtgttatggaggtttgctgtacagattattttgtcacccaggtactaagcctagtatccattagttattcttccttatcctctccctcctcccaccctttaccctcaggtaggccccagtgtgtgtcattcccttatatgtgtccatgtgttctcatcatttagtttccactgataaatgggaacatgtggtatttggttttctgttcctgcgctagtttgctgaggataatggcctccagctccatccacatccctgcaaagtacatgatctcattcctttttaatggctgctyagtattccatagtatatatgtaccacattttctttatctagtctatcactgatgggcatttaggttggttccatgcctttgctattatgaatagtgctgcaatgaa

SEQ ID NO: 826503 - DNA, 541 bp, Homo sapiens
cttccccctccccgtcgtcacatgctaaaagcagaatctgagaaacagttggctgaattttagcacctaagacctcgacaaaggcaaaaacaaaagcaagaaataatgattccttagttgtcaccaattaaatgtattttgaatgtaattttttaattactggagacctggccaggcagagattcatggttcttcaacagcagagcacacctgaatcacccctgcagcttcttaaaaaaagatgagtacttgtgccctaactctggatttcgaattcaggaagcctgaggaggtgccaggtaactgtgccaaacacacacacacacacacgcacacacacacacacacacatacagttctcatctcagacctgacacttcaaagcatggactttgaagtatctctctccatctgtgaaatgatgataatgatagtaccaaccacacagagctgttgagatggtggcataattcaaaccttgtgcttagcacagarcccagcgtagatgcggcttcagtttccattagctgatgttgccatt

SEQ ID NO: 826504 - DNA, 583 bp, Homo sapiens
aatatttatgggatgagaatgaatgaatgacaaatgaatgggtgactgagtttatgttttttattatccattcatttatccrcagacatttgttgaatagctcctatagacaggacataagctgagaacccaaagaggagaagggatgatgttatttaggatgcatgtgagtgttttaattttcccagagcacttggactgattttactttttggacacagcaagttgtgtaattgtataatttttccttttccacattggctgctacaaacttagaaccaaatttgtggcccatacgtcttcttggtatgcaatttagcctcattcttggacccatttcatgttcccgtcctcgtttttcttttccttttgttcctatttttaatttatgccatcttgtattttttatatccttataagctgccttaaattctccctgaaacaagacaaagtatcaatcaatcaatatattaaaatgtgaagagaagggctttatgagaggtataaataaagtgcttcttgcatgaaagaggaagatatttcccacagcttctgtaaccctagggagcagggaggagaggtg

SEQ ID NO: 826505 - DNA, 583 bp, Homo sapiens
agtatgctaattttgaaaggatccttgacaattcttgggccagagttagccttaatcacttcatttgacaataagactcaaagagaaggaacatgataacagtggcagcaacacagcagtagtaaaaatatataacagtaagccaatatttacttgatattcacttgtgctaagtgcaccacaagttttatctcatttaattttataatacgcctaggaagtatacaggtatatcccactaacagctgaggacactgaagttctgaggggtgaggaaataggcctgactcctggtttaaacacccttgctgcctcttcctgggaccgaggagctcgtagctaagtgagaacttgatccaagtctcctaatgcttgagtcaatgtgcctccgtggtaggttgcaaaatggcctcccaaatatatgtccatgtcctgatccccagaacctgaaaatcataacatatttgaggaagaagcccttgcagatataattaaattgaaggttttgaaaggaagagattatgtasattatacaagtgggctctagatgtcacctcaagtatccttagagaggcagagggaa

SEQ ID NO: 826506 - DNA, 580 bp, Homo sapiens
aaaatcatgttctaaaggaagatcccttttttgccttcatcctatcacttctcacataaaacaagaccttgtggttcagggttcggtgttgtaaataacctgtcaaaatctcaaggataagtattcctgccaccaaccctgtccccagtctactcatgatgaatcctttcaagtaatggcaggcaagttaattggtatagattgttagtcattttccaaatgataacggccactggtgcagatgaccaagctacttggagatagttaaagagagggtctccgcctgacaatactgtgtatgccatgaaagggctaattatggctgctgagatacggaagccatgatttaatgctgcaactttggggtagaggatttgcagaggttgttttggggtagaggagaatgcagaatctcctctctctaaatcatgccttattcctcagaaacctgtcattcacaaacccaattatgtgcagrtagaatgtcaactctgacagaatgaagccaatgcaccctttgtatgtttttttttttttttaacgaaatcctgctttgctagcaggttctattttcataaat

SEQ ID NO: 826507 - DNA, 612 bp, Homo sapiens
tcaaatctaacagatttcttattgtacacacttacataagatgtagaagctttcaaaaacaatgcacaccacctgatttgactgattaaatttacagtactgttaacacattgagtggtgaatccgcagcccatgctgctaaaatattgctgcattctatacctctccatattgccaagtttagaagttaataatttaatcttttttttttttttttaaagagatggggtcttgctatgttgcctgtgctggtgtgcaatggcatgattatagcacactgcagccttgaactgggctcaaacaatcctcccacctcaggcacctgaccagctgggactacaggcacacaccactgtccccagcttaatcattctttttaaattacatttttattaactttctttcctgaatacagtgaaaggaaaaagtgaatcaggaataaatatttgtaatagttagtacatagttggatattttcagagaaattttrtattgtaagattacagttaattttatgtattttttgaaaagctaaacatgtaatttagaaatatcaactttaatcagagataagttgccagggcttacatgtgagcacaaggtaggcgttcg

SEQ ID NO: 826508 - DNA, 239 bp, Homo sapiens
ccctgaaccatgtaaaaggccttgggccctcagggacagcctcactgccaaccactgtgcccaagcctcaggcaatggtagtctgaggcaaggyactcaggggctcttctggtggcccccctcttttactccacttccaaggggctgaaaactgctccagagtatccctgaattctccctccatctggccatctttcctgtttagtgaatttgggggctcactggagccctgaactaat

SEQ ID NO: 826509 - DNA, 618 bp, Homo sapiens
ctgattccaaagggaaaagtgaagtaagacagagaaatgatctgtaaaatggaatgaaagtggggtgaatggatggcgaatgtaaaataagcacaggtatgttggcagtcagtagtccctctggggycatatttgttatgtgtccctcagcaaatgattctggaatgttaaacagtcaatgtgtttgctttaatgaattaggctgtcaaaaataaataaataagctcaatttggggactatggcacatcaattataaaattccaacacacgcgaacattatccaggttctattttgggttttgtctacacatactgaatgaattgaattaagactgtagagttcttggcctagtttgttgtgcttcatatagttggaaggtcaaagtggtggtttcaccttttcatagcattaggacaattctggatagctgttttaaagttccacaaaggattaccctctatgacactgttttattgtgtgcctgcatctcttactcactacccttttcccattctgttccattccaacccattttctaaactggttatattttgttttgttagaaatatttatactagtcaaatcctttttgatattccaatattacttgatttat

SEQ ID NO: 826510 - DNA, 613 bp, Homo sapiens
tgctctcaaagtgttgtgtataagctggcactttagctgtgccttcaacagattagtccattactatatcaggctgaaagcttctagatggtgtggtatgtggcatgaccaggcaatggattcctgttctgaacactgggcaagacatcatgaaattttactgggacaattgcgctcaaccttctgatcattatccttgattgctttcggttatttatattgaatatatatattcaatatatattcacctgtctttctcctaaagaagccatgctccattaaccatctccataactctccatgtgtcaagccaccctttcctttccctgaccattaccttgccactaattacaataattacatccacttggattctgttggttcttcctccccacctgccttgtattatttgggaattctatcattcccattgctctcagggaacaccgttctataatggcatatcctaccattagcttggcctgacagagacaggcatgactgagcttctttgtgatatggttctcttattgccaatrcattctttattgcttcagtaagtaatgaatactggatgctcctaaggagcagaatctgtggtggtctttcagac

SEQ ID NO: 826511 - DNA, 607 bp, Homo sapiens
ctgacagcttgcactgtgtacctagaaaagccacagacattcaatgccagcctatgaaagcagcgaggagggaggctgtaccctgcaaagccacaggagtggagctgtccaggaccattggaacccacctcttgcattggcataacccagatgtcatacatggcatcaaaaaagaacattttggagctttaagatatgactgccctgctggatcttagacttgcatggggccagtagccccttagttttggccaacctctcccatttggaatggctgtatttatacaatgcctgtatccagtgtatctaggaagtaactaacttgcttttgattttatgggcttataggtggaagggacttgctttgtctcagatgagactttggactgtggacttttgagttaatgctgaaatgagttaagactttgggggactgttgtgaaggcatgattggttttgaaatgtgaggacatgagattcagaggggccaggggtggaatgatatggtttggctgtgtccccacccaaatmtcatcttgaattatactcccataattcccacgtgttgtgggaggcacccagtgggagataatttgaatcatgggag

SEQ ID NO: 826512 - DNA, 553 bp, Homo sapiens
aagcaggatccatttaacaaggcactttggctgtcccttggtggaggtggtgtgctgtgctgggggaaractcactcatctgggctgcctggattcctgagagcaagcaagaggaaagactaagtcttctggtctgtggagactaaagccacccctacctctaggggtttaggcctagggagatcacagttctgtccctgagcccctggctagagttggagttcctgctgggaggccctgcagccagaatgatggttcctgtccctcctccatgaagctcaggtggcttagaccacaggcagccatagcattggtgatggccacaccgcccccaaggaactcagcaggcttaggctgattccagccgattaggtgttgagaaactgcatggctccatggttgggacccaaggcctcagtggtgttggctcccaagtgggatcttccaatccgtgggttgcacagttctgtggaaaaagcatggtttcccagtttgggtagcacactcactcactgcctcccttggctgggggtgggggctcccctgccctgtg

SEQ ID NO: 826513 - DNA, 629 bp, Homo sapiens
caaactacttacttggcatcgccacttggatatctgttggacaattcaaatttacacacatcctaaacccgtctttccccttcaaaagacaagcaacaacaaacaaaacaaaacaaagcaaaaataaaccttgttgcacttgaacgccttttcatctcatttgatggcaatgtcatcaaagcccccgttgctcaatccaaacatctctttctcaatccatcaggaagtgcgagtgactctaaaaactctctccaggactcacttcccactgccaaggtgcagctctgagacggtgtcacttctcacctggatcactggcttctgtccccccatttctatcattggccctcaagattgtttttcttacagcatccagggtgatccttttaaaatgttaagtcagaccataacagttctctgctaaaaatattctgagatgccttcccatttcacccagagtaaaagctggagtctttacaatggtccttaaggaccaccccaggcgccccacccacccctcacgyctcctgccctgtcctccttctgcccttgcacttgtcaccactctgacttcatctcctgtgctctccactggcctcctgaccattcctgctgctttagagcattgt

SEQ ID NO: 826514 - DNA, 629 bp, Homo sapiens
caaactacttacttggcatcgccacttggatatctgttggacaattcaaatttacacacatcctaaacccgtctttccccttcaaaagacaagcaacaacaaacaaaacaaaacaaagcaaaaataaaccttgttgcacttgaacgccttttcatctcatttgatggcaatgtcatcaaagcccccgttgctcaatccaaacatctctttctcaatccatcaggaagtgcgagtgactctaaaaactctctccaggactcacttcccactgccaaggtgcagctctgagacggtgtcacttctcacctggatcactggcttctgtccccccatttctatcattggccctcaagattgtttttcttacagcatccagggtgatccttttaaaatgttaagtcagaccataacagttctctgctaaaaatattctgagatgccttcccatttcacccagagtaaaagctggagtctttacaatggtccttaaggaccaccccaggcgccccacccacccctcacgtctcctgccctgycctccttctgcccttgcacttgtcaccactctgacttcatctcctgtgctctccactggcctcctgaccattcctgctgctttagagcattgt

SEQ ID NO: 826515 - DNA, 609 bp, Homo sapiens
gctgatgctgcggataggcagagcacatcttgaccagcacatagcttgcttgcttgttctccatcttgtttgcaaactgaaatcagtggaggaatttaaaaaatactgattctggtttccaccccgatagattatgattcaattggtatggggtacagcttggacatctagatatttctaatgatctccaggtaattctaatgtgaagcaaagtttcagaaacacagctagactgacctgctcctgcatgtagaaaatccaggttctggtcattggtggctgagcaggctgggggagccacattcagagtgtggtcactctggcctggcaagaagcctggcctggcaagtgtttttcctcgtatcctgacacccacatagcagggatccagccacggtgcccagaatacaggacaggaccgtttctctggagagttagtacaagcaaggctgcctcttagttctaaaggactgagatacaaggcagagacttaggcacaggagcatcrcaccgggatccaggcagaaggcctggatgtaaagctaggggcttggttacaaggatagaggcaagaggtcagttactagaattggttatggtgtcagagtc

SEQ ID NO: 826516 - DNA, 545 bp, Homo sapiens
ctccctcttacattttttttgggatgagacaattaaacattctataacagtatacttcmaaatgatgctgtaatcctcttatgtgaactacattcttaaatatctagaagaggccaggtgcggtggttcatgcctgtaatcccagcactttgggaggccgaggcaggcggatcacctaaggtcaggagttcaagaccagcctggccaacatggtgaaaccccgtctctactaaaaatactaatattagccaggcgtggtggcaggcacctgtaatcccagctacttgggaggctgaggcaggagaatcacttgaacctgggaagcggaggttgcagtgagccaagattgcaccattgcactgcagcctgggcaacaagagcaaaactccatcttgaaaaaaagaaaaaagtacctaggagagcagtttgcctttggaattaataattaattaattaattactatgtacaattcagtcttaggtatggattatgaagacttctaacctggccagtgtcctcctccctgtcccccacttcaactata

SEQ ID NO: 826517 - DNA, 551 bp, Homo sapiens
cctcccaaagtgctgggattacaggcgtgagccactgcacccggcctgagcagatcaaaaacaaggcaagaggggtcaggacacacaggcagaggctcgttccctctccytccagagctgagaataaaactgcagtagactttcaccagggaggaggacaagacaaaaccatgacaacaatcaggtcccttggtgacgacgtgccccatcagcaaggctacccacctacggagtgggaaggttgccgtgccaacctcccctagggcaggagaaacaactggcatatgttcaaatgatcaatatcccaccccccgcaacaaaacttttttctgaaatttcatatagcaacgtgctttcttgaaccgagacgtaagactttacatttagccattacactatgaagagtattgcagatctaacacccaacacatcttgcccagcactcttctttgccttctatatttttattcaagttatggatacaaatgtcaaacaggatgctgctagagtagctcaccttaagtgatcttgccaaagatccgttcttgcca

SEQ ID NO: 826518 - DNA, 573 bp, Homo sapiens
ctggccctgcctctcccactcttactgcacctcggagctccttaactgctcctaccctgcgtcctgtttccttttctcagctggagcctcctccctaccacctgaggcccgcagttcctgctaagagcaagactaagcttccctcctgccttcactcactcattcctaattccctccgcctcatcttcagtgccacctccactggaccttccatgaccattcccccaccacaggacagtcattctctttatgaatgcacagttcatagcatgtgattcatagcacaatttacatgaaataataaccaactgtccattggttgctttatgtctctctacgtgctccgtgtgtacaactctgcccccagccctgagcactgggcctggatgtagcagggaccaccatgttattggtgaatgagtgacagaaacaaacgatggcagtgaaygaagccgaaagtagttctctaatttgcacagtaatctcagccaccttgaaaggtcgtttttagtgtcacttcattgtgaatttgtcagacgtggagcacatccatccaaacggaaagacgaagca

SEQ ID NO: 826519 - DNA, 653 bp, Homo sapiens
gtgtttaagaattggaatttattatgatctttagattatgattatggttagccacagatggactatttattcagttttacatttttgctctgttttctttctcatcaaaactggatgattgggtatttatcatatggattccaggattggtctaactggaccaatggttgcttccaatttcatgccacaaactcttctcaaaactttcccagggatgtgaggatctttaggcccgagcacagactgtcctgtttggcaggcttgctttaccacctgccctgtgtccacttcagcaagtggccccaagtatgaaagtgtacgctatcccttgcttacctaggaagtccccttggcgtttagttcttttagatttctatacatttatattttttgggtagctttgaagaaaatttttttgtttttgtttttatgtggtcactttttgtttcagctgaagtgaaggtttttatgtctttttatagcctagcaagaaatagatcttcttaaaattctatttaattttcataagatgtttgaatgtatgagtgtttaagtgttttttttttttgttttttttgattgattcrtgtttatcctgtgggccatctttaaacgtggtttataataaaaatgcactcaaattaaatgtgctt

SEQ ID NO: 826520 - DNA, 571 bp, Homo sapiens
agtatttagtcttttgtgtctagcttctttcatttagcttaaygttattgcatgcatcagtagtttgttccttttaattgctgagtaagtatttcattggatggatgtaggttttcttaagctttaaattggcattggttgtttccattttttggtgattatgacaaaagtcattataaacatatacatttttatgtagataattttctcatttcttggggaaacgagtggggttattttctaggaatagggttactgggaacatatgttaagggtatatttaactttgagaaactccccagttgttttccaaatcagctcttccaatttgtgttcttgccagcagtgtatagagttcgagttgcatcccatcgtgtcagcacatggtattgtcagtcttttaattttagccattctagtaggcatgtagtgataccctactgcagttttaatttgcatttccctaatgactgaacatctctacatgtgcttatttgccattcatatatcttctttggtgaaatgtcttcaagtcttttgtctctcttttgaaattgtgttgccttagtaa

SEQ ID NO: 826521 - DNA, 613 bp, Homo sapiens
ttagctattgaagaaaatggcttttataacaagagctagctctaaagcactgtgtgggcctcagcaaatcaagtgtctactacatttttctacaggttaaaataccttaacaagaagatcaaagactatcttakgaagcaaaaaaaaaataaatatgtaaatattgtatatctatatatttgtacatttttgcttatgtcggtatatagacattgaaaaagatcagccttgccctaaggacatgataaaaacagagtgtatactctcaaccaatttttacttggtgaaaactgatgtctgaagataggttaggaggatggatgccatgggttttcttttcttttattcttctgactaccttctgtaacactgacaaatcatcatattcttgtactaaagttctaatataggtagagttgactttatttttaggactatcattaccacaagcaaaagaaatgttaatttgcttgtgttgtcttttttccagcttcttcagaataggaaggaaattgatttaagatagaggtattttttctgcttttcccataacaggcctatgttataatttataaacaaaccaaatttgtcagttgcttttaactcattattt

SEQ ID NO: 826522 - DNA, 610 bp, Homo sapiens
atcaggaatctaaatgattaaacaaaagaaaattactgaagcatattagatcagttaatacaacggtggaaaacaaatgacaagaatacttctcggaggtcagtaaagtgagagatcaaacatgattaattttttcttctgccagggcagattctgtctgccaggttaacattccataagaaagagaaaaacattgtcatgttcaattataacttgcctttgatagtcttcttggcatggaagaaagcaagctgaaagtgacaaatatatttcgaggaagaaaatgtattgtttatggtctctttcctgctccaaatcctagacagaaaaagaatatggcttttggggaagctatcacttgtgtgctattgcctcattatacaagtcaatagcagtgcacttgtgaataaaacagatgcaggcagagactaggaaaagccacctgggccagctggtatagattttagcaaactgattttgctgggtttccacacaaagtcctaaaatagatcctttaaaagcccatttaaatggctctcctcyggcagaagggtcaaaacttctggcatttgatttgctgatcactgtttttggctgagctctaataggc

SEQ ID NO: 826523 - DNA, 606 bp, Homo sapiens
  misc_feature 594, 595, 596, 597, 598, 599, 600, 601, 602, 603, 604, 605,606: n = A,T,C or G
tctcgtggtgcgccgttttttaagcccgttggaaaagcgcagtattcaggtgggagtgaccctattttccaggtgccgtctgtcacccctttctttgactcggaaagggaactccctgaccccttgcgcttcccaagtgaggcaatgctcgccctgcttcggcccgcgcacgtgcgcgcacccactgacctgtgcccactgtctggcactccctagagagatgaacccggtacctcagatggaaatgcagaaatcaccgtcttctgcgtcgctcacgctgggagctgcagacgggagctgttcctattcggccatcttggctcctcccataggacacctttctaaagtcagtcatgctttgatacttttagttgtctaaaaagtggttgatttctcattttaaacagtattgagttttcttgagctaattgaccgtgataaatgggttttattacataaaatttcaaattatccaaactatatctatatttacatacatattttctccatttaatacaagaagcacactcccaggtraggcatcatgtatgaaagtcctgagtcatcgagcctgttattaaaagctcaccagannnnnnnnnnnnn

SEQ ID NO: 826524 - DNA, 610 bp, Homo sapiens
gtgcctcattacctctaatcactccagtttgtatttccttggtatttttgaagagtacgagccaattattttgtgtaatatcccccaatgtgggtttgtytgtttccttatgattagactgaagttatgcatttttgggcagaaatactacaaatgtggtgctgagttctctggcatctttattagaaggcacgtgatgttgacctgtcccattactggtgatgttctctttgatcaattggtaagttaagtgtctgccagatttccctacagtaaaggatttcctttttgtaagtactaagtagttgtgaagagatactttgaggctatgtaaacatcctatttgtcatcaaacttttacctaccaattttagcatctgttgatgattcttgtctatatcaattattactatgatggttgcaaaatggtgtttttctcactcttaacactgcttctatatttattagttggcattttactacaaagtagtttcccttaaaaaatgaactagtatcagtatgaacccatactgacataacttttattctatgggttataatctcttactatatttatttattctgaagctcaaattgtcccagatttggc

SEQ ID NO: 826525 - DNA, 550 bp, Homo sapiens
aacctgagattttgcactttctctccatgagtacacagaatcacatctataaaacggacaaaatttacacccctataaaatgttgagcagactagtgaataatttagttttattcaatcattagaaatggactatttctagacccaaagtccacgagaacaatggtatttgtgaactaaccagacaaggctagttaggaaaggaaaacaaacaatgtagaaggaaaatatagaataattaaaaataaaaaaaatttacggccaggtgtggtgattcatgcctgtaatcccgcactttgggaaactgaggcaggaggattgcttgagcccgggaggtcgaggccacagtgagccaagatccagcctaggtgcactccagcctaggtgacagagggagactcagtctcaaaaagaaaaaaaaaaaaamaaaaaactttaaaataatacatagctatacttactccaatagattattaaatttcatctttgtagcagttggctttagtttatattgtagtagatgttactttgaaccaatacactttttccca

SEQ ID NO: 826526 - DNA, 642 bp, Homo sapiens
cgatttcatgctaaatattttcctctcagcagggtgcagtggctcacgactgtaatcccagcactttgggaggccgaggcgggtagatcacttgasgtcaggagttcaagaccagcctggccaacatggtgaaaccccgtctctactaaaatataaaaatcagctgggcgtggtggtgtgatcctgtaatcccaggtactcgggaggctgaggcaggagaatcatttgaacccgggaggcaaaagtagcagtaagccgagatcacgccactgtactccagcctgggcgacagagtgagactccgtctcaaaatatatatatataaataaacatatatatatatatttttttcctctcttggataaaggaagtcttcaatgtacttctcttggtgatcaagtaaaacattttttccctcttatatctgtgcaaacctacaaattgatgccatgttgccaaattcttccactatctccatgcttaaaagtgtgcatttgtaggactaatgactggctttctatcctgttttaaagttgatcaaaaaaataacattttctaggtaactaaaacaggaccagagcagccgtacgaatttaaagaaaagaacttgttactcaaaatgtaacagaaatataaacttta

SEQ ID NO: 826527 - DNA, 558 bp, Homo sapiens
aaaaaaaaaaaagaagaagaaagaaagaaaaagaaaaagaaagaaaaggaggacaacagaatctcaccaatgactctctctctctctctctccatatatgtatatatccttccycttctttgaatgtaatccttcactcttttacctttgtctcatcccattatccacctcccaataatccttatttgctgaaactggccttggatgatgatctacaaatataactaatacagaggatactaacaccttctaggaattatctgcagctctaaagattagtctaccaagtcaaaataatatctgttgggtggaaggtacagtggagacttttgagcaaaggattttattctgtcacagatattctaccaattcatttagtcttcctcagaaacaaaaataatttgtcccttttttcctttgtaagttgctctgccccacaagggttaattttaaaacagctatcattcctgtgggctaatacagggatataaatatcagtatcagttaaagtgaagacaattttaaaatgttggtagtcatgtatgaaggaatgaggag

SEQ ID NO: 826528 - DNA, 631 bp, Homo sapiens
aaccgtgcccacacattagtccagaccctcatcaagcctgggttttgtcagccttaatgtttggccagatcaacagaaggcaaatgatgcttgtttctattggcattgctaagattatagggagggggaaataaatgtctttttgttttttcaggcatttgtagttattttctttgtgaattgcctgttcatgtcctttgcccatttttctaatgagatatttatctttttcttaatgatttgtaagagctctttgtacattagaaataaaattaaactgttgtcatatatatatatatatatatatatatatatatatatatatatacacatacatatgtatatacccctcttttaaaattttcttataatgttctttaaggtacttaaatgtttaattttcatatagtcaaatttatcaatcttttcttttatgatttcaaatatcacgtcatacttagaagaatcttccccaccttaagatgatcaaaatattcactcatatttatgccatgtggtcttcatggcttgagcttattagaccragtcagagagttcttaccccaataaggagtgttgctatggctggcccattatcccaacgccatttataaaatagcccatattttcc

SEQ ID NO: 826529 - DNA, 653 bp, Homo sapiens
acatctgccttgaactccaaatatagacatctcagaatcctgtcaagactgaaggagaygcccttccaacccaacctccaacatctcactttagtccacgttcaactcggctccaacttcaaatcccagctctagcctcagccctggcctctgcccatcctcaaactcagccccatggggtcatacaaagcctccatcccagccccttcaggccctgtcctttccactccactgctaaggaccattcctattctgtctcccccagtacctgaggagattcagaggactctatgcagggtggcagccaaaggacacaaaagggaggaggtaggatcacccagaaacactcctcagccacaccacctgaagctgttaatttgagagaagcctggagagtttgagggcacatgtgctgtcccctcacccagatgcctcctcatgcccatgcctgggtgccccaccctcatctcatcccaggcgggagcttagcttcctgccccaaactctcagggccaccagaaaggtttaggggtggaccagccctagtgagaaaattggatggtgctcccagcaaaggagtattcaccagaaaagcttcacacaatatatgtaatatgacaaagtcgggccttgggcttcctttcagctgctgt

SEQ ID NO: 826530 - DNA, 633 bp, Homo sapiens
actggatccaatcagcataacatcatcaatgtaatggaccagtgtgatatcttgcggaagcaaaaaagcaatcamggtctctccgaataagattatgacacaaagcgggaaagttgacatacccctgaggtaggacaataaaagcatattcctggccttgctggctgaaggcaaattgcttctggtgggccttatggacaggaatggagaaaggcatttgccaagtcaatggctgcatgccaggtaccaggagatatgttaatttgctcaagtaatgaaaccacatctggtacagcagctgcaattggagacaccacttggttaagtttaatccactgtcattctccaagatccacctgtcttctgcacaggccaaatgggaaaaccgaatggggatgtgttgggaatccccacccctgtgtctttcaagtccttgatggtggcactaatctccgcaatccctctagggatgcaatattgttttttatttgctatttttctaggtagaggctgctctaatggcttcaatttggcctttcccaccataatagccctcaccctaccagtcaggaagccagtgtgggggttctgccagctgctaagtatgtctctgccaattacgcattctggcat

SEQ ID NO: 826531 - DNA, 610 bp, Homo sapiens
acttgtattttaaaaaaatatgagagcatcatggataattagtctttgccttaaaatattaatagatacaatatgagagaggatatcatagtaacaagaattcagaaaaaaaaatgttaacaggtccatcaaccatgcacttttttctatgcaaccacatacacactcacacacacagacacacacaatatagtagacacacacaatacatgagatataatgcatgtgcatacactgatttttgtaatatattatatgaaaaatgtagaccatatatcagaatgttaatgaaggtattttacgtagaaattggtttcatttggcctgattaagtattctaacttttcaaatgttacaataattaaatggaaagctattagaatgaggaagctctaacactctgtgttccttcgctgtctgctgaaataaactcctaaaaactttaatttgccaaagtttatctttaacactacaattatcatcttaaaaccacaaggattattttaaaaaatcaatttgaccacatgttccactgagaagggagttmagtcctggcttagaaaggctgcttcatattttcataggtaattatagacaactgcaacacaaa

SEQ ID NO: 826532 - DNA, 478 bp, Homo sapiens
caaatgatggtggctgcctcctttgctagagcaagctctgaataaacaggctttkcttgtcctcatataaatctttcgggtaaaagagccaaatgaagtatcaactcaaaactagtgtctgtttctaggattgactttcaatagctgactctatacaaccttaagtactcaacatatgtaactcttaaataacttatttacaatggaatacagggaaatagaatgctaaacttatataattctaaacttattcatttgtctgtggagataatgtagatagcataagatatattccacgatgagcaataattgagatgtgtgaacatgttcactttggcacagattgaagacatctataattcttttctaaagacaaaaaaattgctgcagtattttattctacaacaaacaaggtatggaagtaactggtgaatgattacaagtatgtcacgtacgcattcaacttactgatactaag

SEQ ID NO: 826533 - DNA, 668 bp, Homo sapiens
actttggaggtcaaggtggaaggatcctttgagctcaggagctagagaccagctggggaaacattgtctctayaaaaaataaaaaatttgacatgcctctagtcctagctgttcaggaggctgaggtgggaggattgcttgaggccaggaaatcgaagctgcagtgaaccttgtttgagccactgcactccagcctgggtgacagagaaagaccttatttaaaaaataaataaataaataaataaataaataaaagaaaaataaaagagtttctgttgttattacttttatagttaccagtataagtttaaattttataattctatttactattttataacatcctataacatctgttggctgccaactatgaaaggtgaacaattgatacacttacactagaacaattgaagcacttacactatctcttactgcccttttccaccacagcttcaggttgtggttattaaatttcattttctgtggcagtgtttaagattttaaatttagtacttatatccatattctatgattaattaatgttaatgattatgtgttaactccctactataaaatgtgatactattataatttctgtattttctaataactctccttttaatatttcacttttagttacttttaaattttaaaggttattttaaggg

SEQ ID NO: 826534 - DNA, 668 bp, Homo sapiens
actttggaggtcaaggtggaaggatcctttgagctcaggagctagagaccagctggggaaacattgtctctacaaaaaataaaaaatttgacatgcctstagtcctagctgttcaggaggctgaggtgggaggattgcttgaggccaggaaatcgaagctgcagtgaaccttgtttgagccactgcactccagcctgggtgacagagaaagaccttatttaaaaaataaataaataaataaataaataaataaaagaaaaataaaagagtttctgttgttattacttttatagttaccagtataagtttaaattttataattctatttactattttataacatcctataacatctgttggctgccaactatgaaaggtgaacaattgatacacttacactagaacaattgaagcacttacactatctcttactgcccttttccaccacagcttcaggttgtggttattaaatttcattttctgtggcagtgtttaagattttaaatttagtacttatatccatattctatgattaattaatgttaatgattatgtgttaactccctactataaaatgtgatactattataatttctgtattttctaataactctccttttaatatttcacttttagttacttttaaattttaaaggttattttaaggg

SEQ ID NO: 826535 - DNA, 467 bp, Homo sapiens
gcatttccaaacactctcttattcttggttttcttacactcaatttatctgttcttcatctgtctttaagatcagcagttacttttctgtttctaataacctttatcatccttcatgttctgttttcatttgggttctcccagaagcagaccatgaggcagtgttgagtttaagagcacaagaagtttattttgtaagtgatatcaagaaacattactagggcaatgataaaagaaaagacagtaaagcttttgttattaggcaagttctttctgatagtaacttaaagttaaacatgtcagggtactggcatagccaacgtagacaatgtgcttcaaagttatcctatccaaggtgcaaaggagctggagtatttatgtactaagttccatcaaatagtggctgasggctgggggttggagggaaactctctgacactactaacctatagggtgagcaagcatagc

SEQ ID NO: 826536 - DNA, 648 bp, Homo sapiens
atatgtccacctttgccactttaattcaacattgaagtaaaaatcctcaccagtatgaggtaagaaaaataaaacaaagacattccaactgtactagaaaaagtaatattgtatttattcacagataacattattgtttatttacaaaacccaaagaaatcttcaaaaaatctcctagaatggaactataaatttaacaagttcacaaaatacaaaataaatatacatggacatgtcatggacaaccagaaaataaaatttaaaatacagcataaagaacatgaaataattatggatatatttaacaaagtatatgcaaattctgtatactattaactataaaatatcttgaggagaaaaaagtagagataaaaacaaataaatggcaaaagatccaataataatcatgtattagaagaaaaactgttaagaaatcaatttttcaaaatgtttataggttttatgaaattcctattaaaagtcaattgttatttttatgtaaatacagagcttgactttttgatcagtgwaacagaatagaaagtagagaaatgtagtgatacatatgtagtcaattttttttaaaggaaggtgtaaatgtaactaaatgggagaaagaaaagttcttgaacaactggatactcgtac

SEQ ID NO: 826537 - DNA, 565 bp, Homo sapiens
cttagattaaaattgagccttattatgagtgaaggcactatatgatctggcttcccactatgttggaactcaaaatcctaccagtctccacctcattaaccacactttggatacaaaggcctagttactattctttgaccatgccaagaccactcccaatgccatatgtgaaatatcatctcctctatctttctatatgttcactactgtttttttttccttcattttcaccacttgacatttttattgtttgtttattgtctgtttccctaactagattgcaaacatcttgaagagatggtgttggcattgctcactgcttatttcctagcatctataattgtacttggcacacagaaagcattgaataaatattttaaattaactttctaattttaactgtatattcacctgtgaatttaagaagtaatagaagcttcacaaatcctttactagttttttcctgatggcggtatttgtaaagtgtggtccaacatcwcaacaaaatcacaggacatttacattgatagagtcaagatatagaacatttctatcatcacaagga

SEQ ID NO: 826538 - DNA, 608 bp, Homo sapiens
taggaataatgaaatttctaaattcagtattgctctggctgtatatttataatcatcatcacattattaaaataattaaaacaaggctgggtgcggtgtctcacgcctatcatcccagcactttgggagactgaggcgggcggatcacaaggtcaggagatggagaccatcctggctaagatggtgaaaccccgtctccactaaaaatacgaaaaattagccagacatggtggcgggcgcctgtagtcccagctactcgggaggctgaggcaggagaatggcgtgaactcgggaggtggagcttgcaatgagctgagatcgcgccactgcatttcagcctgggcgacagtacgagactctgtctcaaaaataaaataaaataaagtaaaataaatataaataataataataattaaaacaaaatgctcagctgcttgcagtgtagtgcttatgaggtcaaggtagttggttcactctctgggtaggccaactggtattcaaagagggagaaaatggttttctggctatggactgcacccttaayctcagccagccatcttacaaaggcacagcattggttacaagcagactgggttgagagaaagaga

SEQ ID NO: 826539 - DNA, 642 bp, Homo sapiens
tactgcatttctggcttaaaacaattatggtttacactttcacctggaatagtacacttaaccagagcaatgagatgctaaaagtgatgatgaacaggttgccaaatacataacatcagacaaactagcctattgatagcaattatacatagtatttgtccaagatttttaaagtatatattgaaataaaattacattgtattcctaccttttgctaactttcctatttttactacatcacattcttacattttttggagctgatattccattgatttgggaagtgtttctgaaaagataacatgtatccttctctgaatattctctctttttctttctaattggcccttctttcctataacatttcctacaactacataacattttatattttctgctgaaaacagctctctcttactccaaggtcagaggttgccttttttgagcttagctgatgagtgctttttgcactctagttcatctcttctctacccactctctatgccacatattcagsgttggcctttgaagggaggctgcctaggaagaacttattttcagaaaacttagattttatgtgattacagataatggagctaagagtaattaagaaaagatcccaattctttgtttttctaaatc

SEQ ID NO: 826540 - DNA, 621 bp, Homo sapiens
atagagagacaagctacaacatacttaacaatattcctcaaagctgtccaagtcatagccaagtcatagatgtgaggtggtaccctggatgagatcccagaacagaaaaaggacactaggtaaaaactaaggatatttggacaaactatggactttagttaataataattacccattttattatttttattttatttatttatttttgagaccaggatctcactctgtcgcccaggctggagtgcagtggcacaatcttagctcactgcaacctccacctcctgggttcaagtgattctcctgcctcagcctcctaagaagctgggactacaggcacgcaccaccatgcccagctaagttttgtattttttagtagagacggcgtttcactatgttgcccaggctggtctcgaactcctgacctcaagtgatctgcccacctcagcctcccaaagtgctaggattacatgcgtgagccaccgtgccyggccttattattattatttttttagagacagggttttgctaggtcacccaggctggagtacagtggtgagatcatagctcactgtaaccttgaactctgggctcaagggatcctcccccctcagcctcccaagt

SEQ ID NO: 826541 - DNA, 483 bp, Homo sapiens
agcttctgagatctaagacataaagtcaccctttggggaaacacacatgcaacatacaactgattttccaaatgttggatatattgacaaaacagagcagaaaggaaattctacacgagrgtggtgggagggggtaaactcctaggatcgcattcaatgattgatgataaaatggaaagaacaccgctttaaagatcagatgactatatgtatgaatctctactgtgtaatctcggacacatttccagacttcctaaggctgaatttcctcacctgtaaaatgggttgacagagtttcctgcatataaccaccaaacagccacttctagttatggttcccgggcgtaacccccggacctgcccatcatgaggtggagactttgaagcactcccagcattcgagaaaccgccactgtgcaatgtgcaagagcttgggcctctgtgattcacgtcatggtgtcctgtattactcagctcatcctc

SEQ ID NO: 826542 - DNA, 546 bp, Homo sapiens
caaaagttgaaactgttatttttgtgacaccgcatgtgcacttgataccagccacgtattttctagcatacagtgagcatttcatacagagcagtggtttttattggctatggttatctccataactgatatccttgagaaaaacaattgatatttatcaaagataggaagtaacttctgaagtaaataacattctttgtcagtgataactgttacagaaatagcagagcaatgaaagaagtagcagtgtcactatataatccaagcttgagagtgctgaacaagggtgtaatgcaatttgccattttgcttactgatgtcacatataaatggggaagacacagtggcatacttttgagaaaaaggaattgttttcagatttctttcaaataatttccaagatcagcattgtcaagtgcaacaatctgtaatgatggaaaagttgcayaacagcaaaaagctggcatgcatctgtgtcattaaaaactcagtatgatttaacaaattttagctaagatttaaaaataccgtgttatgtgatgtgga

SEQ ID NO: 826543 - DNA, 517 bp, Homo sapiens
catttgtaccccaaacctcagcaacacgcaacatatccatgtaacaaacctgcacatgtaccccctccgaawtgaaaatgaaagttgaaattatttttttaaaaaaagaaagaggtgctatgagataagaagccgcgccccccaccctcagggacaggcccacctgctcatttagagagttatgtcttatatcccactgactctttacaagtggggtttccccctttgtcagaatctgccaacttcttgaattattctagggcattatattctcacagtttgcccctaatcactcactacaaagagggaactggcatgtctttattatatattcgtgtatttataccatattcaagaagaatttgataatcttacagttgcaaatgcaattcataaaaataaaaaggaaactgagaaagcccagtgctagtgaggaaagctgtgaatattaatttaaatactaagcctaacacatttaccatacatactttttgaaatacccatattaatgttttca

SEQ ID NO: 826544 - DNA, 522 bp, Homo sapiens
tttgctcacttagaaaatctagaaaatataaaaggaaataaaaggcactcatatatkacataaaaataagaactgttaacattgtttacatttatgtcaagtcaaacagaaatgtttatttctatgtaattattgctaggatgaatatacaattttgtatcttgcctcatatccatggtgaatataattccaatatcactaaaactttgctgaaatactatttttaaaaaatagttggaagtctgcataaggaaagtagctcccacgtgccagaaacagaaaggtccttaaggaggtgctctgggattcggcacacacctgtcatctgctagacactggacactgttggttggcatccctgtcctgataaatggccgagtggtaggtattaaggagagaggtctcatggcttctcatctagcattgatgttgaatcttatttctgccatacgctgaatgacactgtttcgcctctgctatatttggatgtttgcatcacccaaatcttatgttgaaatgtga

SEQ ID NO: 826545 - DNA, 564 bp, Homo sapiens
aatggatggacactggggaatgaatatcaaggacacagttaggtatgaatttaagctagatgttcacttaggtaactgtagcctggagtggaatgacaggttagaagaagtctcctaggctgggtgcagtggttcatacctgcaattccagcactttgggaagccgaggtgggaggatcacttcaggacaggagttcaagaccagcctgggtaacataataagatcctgtctctacataaaatttaaaaagttagttgggcatggtggcatgtgcctatagtaccagctactcaggaggctgaggcaggaggatctcttgagccaaagaggtcaaggctgtagtgaactatgattgtgccattgtactccagcctgggtgacagagcaatactctgtctcaaaaaaaaaaaaaaaaaaaaaaaaaggacttcaaatagcttacctatgaaraagctgcttggtaataccttaaatttcccttctatgcttttacacaaaaccctaaccttgcagttgaggacttgagtcatctcacaattcttttgggtaaaaaaaatgtaaac

SEQ ID NO: 826546 - DNA, 564 bp, Homo sapiens
aatggatggacactggggaatgaatatcaaggacacagttaggtatgaatttaagctagatgttcacttaggtaactgtagcctggagtggaatgacaggttagaagaagtctcctaggctgggtgcagtggttcatacctgcaattccagcactttgggaagccgaggtgggaggatcacttcaggacaggagttcaagaccagcctgggtaacataataagatcctgtctctacataaaatttaaaaagttagttgggcatggtggcatgtgcctatagtaccagctactcaggaggctgaggcaggaggatctcttgagccaaagaggtcaaggctgtagtgaactatgattgtgccattgtactccagcctgggtgacagagcaatactctgtctcaaaaaaaaaaaaaaaaaaaaaaaaaggacttcaaatagcttacctatgaaaaagctgcttggtaataccttaaatttcccttctatgcttttacacaraaccctaaccttgcagttgaggacttgagtcatctcacaattcttttgggtaaaaaaaatgtaaac

SEQ ID NO: 826547 - DNA, 640 bp, Homo sapiens
aattggctttaaagaaaaaaatcccctttttaatcccatcaggawttagtttgacaaatttttcagaaacttataaagatgaaaacacctggatgtatttctctgtaaactttggctgttagcatcctttttcaatgcttgtgtagtttttcagaacagaacctaaccttcaagatgagtcatttgttcccaaacttgaattgtcatgaaacactccttgggtttccctcccgtgctgaatatgatttctaagaatgggatggcatggttactgtataaagatcatttgttctacaggtcagaaggcctgagttctcatcattaattaactttgtgatgtatgttgggtaaatcacttaacctctacagttttatcttctgtaaaatatgaaagaaagactttgagctaaagtttgtttctactgtaagaacatgagatattttatcttggtgacatcatggcttatgggcaggctgaggtgggattagtaattgcaaaagcagtggtcataaggtgaagaaacctggacatgacttcagacttaacctgggaaataaaatcagggaatgtggacaaagtcagacactactttagcacaggatgagatgccagaagatgatggatccaacaaagacatgc

SEQ ID NO: 826548 - DNA, 646 bp, Homo sapiens
tccaaacctcatttatccaatagttttacccagagcagctaacacaggcaaaagtatatgggttttgaatgtcagattattatacatcttttatccmtgaaattgctggaaagtcatgagccagatggcacacaaccaatgtcatagaaaatgtatggggacctatgtcatagagatttgggttcaaatcccagttctgctgcttacaaggacccccatcttctcatcatgttatatgaaaaataattgcgaggattaaatcaagtaatcaagtacagcgcttggctcacagaatactttttttttttgagacggagtctcgctttatcgcccagactggagtgcagtggcgcgatctcggctcactgcaagctccgcctcctgggttcacaccattcccctgcctcagcttctcgagtagctgggactacaggggggcacccgccacaatgcctggctattttttttgtatttttttagtagagatggggtttcaccatgttagccgggatggtctcgatctcctgaccttgtgatctgcccacctcggcctcccaaagtgctgtgatttaccgcacccaacctagaagactcttaatgaaagttagcttctccctccttttcttcccacttacaaagtcaccct

SEQ ID NO: 826549 - DNA, 610 bp, Homo sapiens
agttctgagatgatatttccagactcagcagataggaacaggcatgctaggtgagatatggcagggaatattagtcagggttctccagagggacagaaccaatttgtgtgtgtgcgtgtgtgtgtgtgtgtgtgtgtgtgtgtgtgtgtgtgtgtgtgtgacagagacagacagaaagagagtgctttagtttaaggaattggctcacaattatggagactggcaaatctaaaatcttcaggctgggttggcagtctagagactcaggaaaagctgatgttgcagtttaagttcataagatttctgttgtcagaattctctcttgtttggggagaggtcagtcttttgttctattcagatcttcaaccgattgaatcagccccactcaccttatggaggacaatttgcttgactcgaagttcattgatttaaatgtaaatcttgtctgaaaacaccctcctagaaatattcagaataacgtttgacaaaatatccagggaccagggaccatggcccagccaagttgacacaytgaactgaccattacaagtctagttggcacccatatacatctccttaagccattcttaatctccaaatgtggtcacat

SEQ ID NO: 826550 - DNA, 426 bp, Homo sapiens
ctgggcaacagagtgagactctgtctcaaaagaaaaagtcttcaattattcttttgtattgttaaaagtgtatttgaaagcaagaatcactttatctccaactcttcttatgaaaggaaaacattccaactagatccagcagccagatttaccctccgacgaagcctgctaaactgctcaagtctaaatgcaaagcccttctctaaaaaagccctacaaacatcatatagtgaactgaaaagcatatttcaactgaaaattgatttcacctgctttccatcacaagaaagcctcaacagattatatctggtctagttacatattagtacaaattataaaaaattcaaaatctcrgtacagttgggaaggaaagatgcacaatagggcatttcctaatttctataactataagggaaaatctttaga

SEQ ID NO: 826551 - DNA, 426 bp, Homo sapiens
ctgggcaacagagtgagactctgtctcaaaagaaaaagtcttcaattattcttttgtattgttaaaagtgtatttgaaagcaagaatcactttatctccaactcttcttatgaaaggaaaacattccaactagatccagcagccagatttaccctccgacgaagcctgctaaactgctcaagtctaaatgcaaagcccttctctaaaaaagccctacaaacatcatatagtgaactgaaaagcatatttcaactgaaaattgatttcacctgctttccatcacaagaaagcctcaacagattatatctggtctagttacatattagtacaaattataaaaaattcaaaatctcggtacagttgggaaggaaagatgcacawtagggcatttcctaatttctataactataagggaaaatctttaga

SEQ ID NO: 826552 - DNA, 536 bp, Homo sapiens
gcacacctttgtggctgtaacttcactaaggcacagagtttgcaagagaaattgaggctcattggcaaatccagtccaccactgagattgtgatttcttgtacttaaacccaacatgtaggaggtgttgactctcattccttgattcaagacaatgtcatatttttttcttttgagatggagtcttgctctgttgcccagtctggagtgcggtggcacaatctcggctcactgcaaactccacctcctgggttcaagtgattctctgcctcagcctccccagtagctggaattataggtgcatgccaccacgccaggcaaatttttatggatttttagtagagatgaggtttcaccatcttgggcaggctggtcttgaactcctgatttcatgatccacccgcctcggcctytcaaatgctgggattacaggcatgaaacaccgtgcctagccctttctttttttttttttttttttttttgagacggagtcttgctctgccacccaacctggagtgcagtggcacgatcttggct

SEQ ID NO: 826553 - DNA, 564 bp, Homo sapiens
tctctgtgaatgaggtgggttgtcacagggagaatattcttggagttatctctatctggattcatgctggaaatctagcagtacttttttttttatgtcacccttataaatagaaactgagggtgaaatacttctcccattcccattattgtgaaggtgcagttctacccaggaggcctgcagtctcctctccctgcagcgcaggctccactctctgatgtgacactagagtactgctgtggcattggggttcatgtaagatgtgaaccagcagctttgagctgtgtgttgtgggctgtgtttcagtggaagttggtaggcgtaaagagaggacactggccactaggagaacgcaagcagggtgctgcatgttctacattctgtgagaggttccgagagtaaatagaatctgatggccaaatctgtaaatgtaaacaagcatcttaggagtgaaagatcaagrctacaaagtatccagagcgataaccacaactatacctaccagtaaaatgcaagactggaatacagtattgttgtccttcctcttactgaagagctagaatc

SEQ ID NO: 826554 - DNA, 593 bp, Homo sapiens
cattttctttagcaacaggatgcaactggagaaactgtttgtttgtttgttttaaccaaggctttgactgaaagggtrtgcttccctttaaagagtcaagcttgacttgcagagatgataaaagccccttgaaaaaactgccctcatatccttgtctacacagtctctgtacagcgttcctgacctgtggtcagtgaaaaatatcactttttaacaagcctaggagctccaagtttgtcttgggaccttaaaaggaaaggattacccagctcacaggtatttgaggatacaaacacatggctgtgctcagctttagaaggtcttattccttgtggaagatttccatcgaagccaatctaaaaggcctatgtagagatagtcatttttgctcaccttatgcaaataatcagggcaagtataggactaaaggctatgttgcaaacaactcagtcctgttatgattttttcttttcttttttttttttttttttagatggagtctcgctctgtcacccaggctggagtgcagtggcacaatctcggctcactgcatcctccacctcccaggttcaagcaattctctgcctcagcct

SEQ ID NO: 826555 - DNA, 557 bp, Homo sapiens
acagactctgcctattgatgaatgagctacaaagtcacagtgcaaagagcaaagatacaggtttgaaaattgaggcctttttgccaatggtttacagcagggtagatatttttatacttaacatatgtargcgtaagaaattacagctcaggaaatttacaaggtcatccatctaaaaagtggaaaatactaaatttaaacctaagcctgtttgattctgactgaccagatcatgtgcaaatagctataatacaacatagtatgtgcgaagtagaatagaggcccagaaaagagattgtaatagttcaaaagacagaaagatgatttctggctggagaaatcagaaaattctcaatgagaacaatgaaatttgaaggatgagcaatgtaggagtgaaataagtttgagcataaaacaaaacatttgttgaaaactaccaaaattccattggtaaatacatgaaagctcttttagctggaatttagggtatttaaaaaggaaaagaaagagatacatttagaaaaatagtcaccaacatggagaactttgaataccaa

SEQ ID NO: 826556 - DNA, 499 bp, Homo sapiens
aagcttttgatgaagatatattttttttgtctgcatccattggcatttgtagctttctagcttcttcagtttccagtctggaatatatgatgccaaaaaaaaactcaaggaactcaccattgtccaattccttggatcctgaggtccctagccagtctgtcttcttcttttcagctttcagttttcttatgtttgcttcatagattatgtcctgggatttagttgtacttcatctaattttattttatttttcccctctattcacatggaattcaacacaaaatataaaaaaatatatctaacataatgtaagcatgtatatagaaaaccctcaataatctgcaaaaagttactagaactaataaatgaatttagtatggttataagatataaggtcaatatacacaattaattatatttatatatcctggcamcaaacaattacaaaataagaattttaaattcagtttacaagtggcatagaaaaatattaagtact

SEQ ID NO: 826557 - DNA, 499 bp, Homo sapiens
aagcttttgatgaagatatattttttttgtctgcatccattggcatttgtagctttctagcttcttcagtttccagtctggaatatatgatgccaaaaaaaaactcaaggaactcaccattgtccaattccttggatcctgaggtccctagccagtctgtcttcttcttttcagctttcagttttcttatgtttgcttcatagattatgtcctgggatttagttgtacttcatctaattttattttatttttcccctctattcacatggaattcaacacaaaatataaaaaaatatatctaacataatgtaagcatgtatatagaaaaccctcaataatctgcaaaaagttactagaactaataaatgaatttagtatggttataagatataaggtcaatatacacaattaattatatttatatatcctggcaacaaacaattacaaaataagamttttaaattcagtttacaagtggcatagaaaaatattaagtact

SEQ ID NO: 826558 - DNA, 619 bp, Homo sapiens
taaatactgaataaattcccttttctttgacccaagtcttttctgcttttctgtctcttaaaagccttataaatagttatttatccaactacttattaagtatgttctttctatcaactccagtgccaggcagtggatatcacggaagaatcaggcatggcttttacctaggaggagctcatggtctggtaaggaagaacaatatataaacaaatgctacatcgccattctacagtcaaaggcagtagtggaaagagtagaaccacacaggtagagtgactagttttgcttagctgtctcaggcaaggctttttagagaaggagcacaaagcaggtcttgaaagatgcgtgagagttaaccacgtttatgtggatttgattgtggattccaaactgaaaaaaacaaaagctgtacattgcattcataactattaccaacaaagtcctttttatagctcatacttcatgatataattctgaatccacatgcactgaaaacaacttcagggcctccctgagcttagcaatctgccccaatactccctggtccatttagagaggcytgatcattctgtatgattttagcctccttgatcttgcctgggctctcagaagaggc

SEQ ID NO: 826559 - DNA, 621 bp, Homo sapiens
cttggtttcttcacctagaaagtgagggtttggactagatgagtggctttcagggtgttctgtgaatctcctcatgaatactttagggtrggggagggaagggagtgagtgatgctcaggggctgtcaaagtgactgcgttcatcagttttacactggggctgctacataatattttcatttgaacgaagaacttcaaaaagcacaggactagatgatctctgttccttttggctctaatatgctacaactgtaggccaattatcactttaccaattaagagttaggccagataagtgaaatttaacttaagggcacacagctaataagtaataggcctaaactggatttccttattccaaatcctgtcttttccccactattccattagaccccacaaatgttagttgtgtgtgtgtgtgtgtgtgtttttaatcactgtaaccggatgcatttttttaaggcaaaatttctcccttatctactatgatgacttcagaagatacaatggtcccaggggccaagtagaaagcatttttaaagattaatctgaattaagctttatcagtgtactctttatctgtgttactagtgcctggtatgtagtaggtgctcaataaat

SEQ ID NO: 826560 - DNA, 611 bp, Homo sapiens
aatggctgaaaaatttccaaatttgatgacaccgtaaatcaacaaatccaagaagctcaataaaccccaagcacaagaaacatgaaaaaactactctaaggcacatcataatcaaagtgctcaaaaccagtgaaaagaaaacaaccttaaaaacagagggaaaaaatggcacattacctacagaggaaaaaaggatgacagagttctcattagaaacaatgcaaacaagatgagtgtgaagcaacattattaacatactgaaagaaaaaatactctcaagtctagaattctgaatcagaaaaaaagtctttgaaaaatgatattcggacattcaagaagagcctatggaatctacaaaaatactaccagaactgatacatgagtttaataagggcgcaggatacaaggttgatatacaaatatctattgtatttccatatactagtatcaatcataaattgaaattttaaataccatttaaaatagcataaaactatgaaatacttgggratagatgtcaaagatatgcaacactgaaaactaaaaaaattggtgacagaaattaaagaagacctaaataagtggagaaatatacagcgtatgtggatagg

SEQ ID NO: 826561 - DNA, 645 bp, Homo sapiens
tataaggaggaataaggtggctgtcttcaaggaactcacagtctgttgggtgtttcagtcatgtgaacaaataaattgtaatacaagacactacatgtaaaagacccatgggatttcaaagagagacaatctacctgcctggggttcatattggattggcatttttaaccactgtctctctgttcacacctgagccttagagccttctctttcatgtgggctcctaggaagtctctttgatagacttcaaattcagtttctctgtctgcttagactttttagtttactgactgactaggattctgtattcctcttctcctaacattcccccttccaccaaattcctgtctcaactatgttccttgtctctgtgctctaatgactaaagagcaagagataaattcattaaacacatataaactgaacaaggattatgtgctgggaaaaatgtcagctgctggagatacagtggtgagccagttagacgcagttcatgtctgttgcaaggaacwtactttatagcaggatgcttccgaggatcttggaattacgtgcttgttcttatcaaatgtgggtggattaaaccttgagaaaattagagaagactttctagccaggtgacatttgatctattttttaaataaa

SEQ ID NO: 826562 - DNA, 645 bp, Homo sapiens
tataaggaggaataaggtggctgtcttcaaggaactcacagtctgttgggtgtttcagtcatgtgaacaaataaattgtaatacaagacactacatgtaaaagacccatgggatttcaaagagagacaatctacctgcctggggttcatattggattggcatttttaaccactgtctctctgttcacacctgagccttagagccttctctttcatgtgggctcctaggaagtctctttgatagacttcaaattcagtttctctgtctgcttagactttttagtttactgactgactaggattctgtattcctcttctcctaacattcccccttccaccaaattcctgtctcaactatgttccttgtctctgtgctctaatgactaaagagcaagagataaattcattaaacacatataaactgaacaaggattatgtgctgggaaaaatgtcagctgctggagatacagtggtgagccagttagacgcagttcatgtctgttgcaaggaacatactttatagcaggatgcttccgaggatcttggaattacrtgcttgttcttatcaaatgtgggtggattaaaccttgagaaaattagagaagactttctagccaggtgacatttgatctattttttaaataaa

SEQ ID NO: 826563 - DNA, 637 bp, Homo sapiens
aatggtgtggtctcagctcactgcaacctccgcctcctgggttcaaacaactctcctgtctcagcctcctgagtagctgggattacaggcgcctgccaccacacctggctaattttttgtgtttttagtagagatggggtttcatcatgttggccaggctggacttgaactcctgacctcaggtgatccacccgcttcggcctcacaaatggcatggtggctcacgcctgtaatcagagggctttttataaaggaaactcccttctaggggtccttgattaaaaactttttaaatgattgaaccagtggttggctatgaagacattgctgcttatacagttttcttctttaaaagtgtgtttgtcgcggtgcagactcagcacttaagggaagacttcctgccacaaaatatttgtaactgctcctgaaagagaaagcaattatcacagttcagttaggtcttaaaacaaaacaaaaacaaacgttttactgagatcacccatgtgtaaatttatgaaggggttggatcacttgttaattttatttttatctgcttttcacttaattgttrttaactcaacagcatattttttattagaacattttggctatttttaacgtgccgaaagttattaag

SEQ ID NO: 826564 - DNA, 643 bp, Homo sapiens
tgaaaatgcttaaaacagagaccagcatattgccagggctcaataaaggttggctgttataattagctattgtgactgcacaggatggatggcatgaactgcctgccctttgtccaagttagtagttctctgttttaggaaaataatgcagaggtatttcagtgaaagaacagggaaatattgttctccataccatgggcacttcactgtggaatcctctagtgatagtgttcgagttatctgtgtggggtaaactgcgttgttataactgtttccaattgtttgcattttctaagagaaaactggaaaacgttgcatctggcaaagatagtgagagctatcttattaaacctgcgtctgctgtgctgcttcaagtgattatatataaggcacatgggaaggaagctgaatgaagaaaatgactagataaatacctagtaaatggttcaaaggctgggcagaaaaataaactgtgactgaggagttaccttgctcctgattgggtcagttagaaaaaaacaaacatgcagactattaatatcaggaaattgattctcttgcatgtagcagtggtctagattttactggaacaaatggttagaaagtrgaaaccatttcatataagataaactccagagtgtac

SEQ ID NO: 826565 - DNA, 528 bp, Homo sapiens
agcctattctgcatctgactatakgaaatgagtatctttacacgatactaaggagactgtagtagttagtcttacaagataaggacgtccttccctgctttaactcccctgacattctccctatataagcatgtcgcatccagaaattgagcttattttttgctccccttgaacctgagctggacttttgacaggctgtgatcaatcaaatgtggcagaagtgatggttatgttctcggacttccaagcccattaaaggactggcagatttctctttctcctcttggaacccagccatcatgctgttaggtgcccgagcaacatgaagaggtcacatgaaggaggactgggtgctctagtcaaaatcctaagctgatatcctagcctatggccagaatccaatgccagttgcatgagtgaaccatattggttgttgcagaatgtggagccttcagatgactccagccaatctcacgtggagaagaaaagctgcctcgctgagcccatcaacctccagattatgaaaga

SEQ ID NO: 826566 - DNA, 639 bp, Homo sapiens
caaaaccaaagacattataacaaaagaaaactgaagaccaatatctctcatgaacattaattgcatttctctatactaacaccaataactaaaaattgaaattttaacaatgkaatttataatagcatgaaagcattaaaaacagaaataaatgcaacccatgttttcaaaatctatagactgaaaacataaccaagaaatttaaaaagaactcaatgacggagagatattcccttttcacagattagatgactcaaccgtgttgagatattattttcaaagtgatcgatagtttcaatgtaatcctagtgaattaaataatatagaatcctataaaacattatagtagattgaccacttaattctgaaaagtacatgagactgcaaaaaacagagtaattaaacaaaattttaaacagaaaacaaagctggagaacttacaatatttgatttcaagtcatactctactgctaaaatagtcaagatagtgtgatattgcaataagaatacatattagatcattagaaaaaataaaaaattcaggaatatggttaattggcttttaacaaaggacccagggtaattcaatgtagaaatcttcgttttttcaaaaaatgatgctggaacaattggaaatcc

SEQ ID NO: 826567 - DNA, 644 bp, Homo sapiens
ccccacaagggccttgggtttacaaattgcagrgaagtttggaatgaggcttgtaatatcagattatttagggttgactcttacttattgtttacctgccccactgaaacataaacttcaaaaggacagaaacctcctatcttagtatatagtaagcactcacaagttgttgatcgtttgaattgttcatctcttttctcctgatcccttctaattctaaaattccgtaatttttgtaatgtacaaatgttaaatttgtatcttacaaatgaatcttaataatttttatgaaaatacagacccacagaaaaccagaaaaagccaatttagctcttttagggcatccaatgaaatgaagacttacagttaatccattttttttaagtctcacatgaagaagtctcacattatttaaacccagaagtgcgtaagtattttttgttctcactgacatagttgatctagacatgaaacaaaggggagagatgggaaagcggataacgagaaggaaaaaaagactaaaaattattgatttcctgcaatgtgaaaagccattttgttggacatattttatatctttctaaatgtatccccaaaattctgaaaggtatgtttttattaactctgtttttctcatgaagatg

SEQ ID NO: 826568 - DNA, 631 bp, Homo sapiens
tcttggtctaatcacatagattttctgagcctccatttaatttcatttaaaagtggaatcatgatgtcaatgccatttcattgttgtgatgagtaatattacgataatgtagattaaatacrtggactagtacctggcacatagcagttgctcagtgaatgttatttttggaaagggaaaatggtttaaatacagatgtgagcaaatcagttaattaagcctgagtttatcacccactctgtttccagttttcctaactgatgatgcgtgcctcctttagtagcattcaaacagtgcctatttagcctgaactccaatgtacacgtgaatatcctaagtggagccaggcactccaactgatgaaatggaaaagaaaatagtggtacagaagcccccaaaatgtagaagttctagaccaaaagaagttttaaaccattggtgatgcatggggaaatctgtcattcaaataagttttgacttacaaagtaaccacaaagaaaaataagacatcttagctaacactaaatactggaggattctacctaaaatctagatctggcttcttttgaaaaagcacaggtcttcattcctatgtaacaatgatgggcaagaaccaagtaaagctttattt

SEQ ID NO: 826569 - DNA, 550 bp, Homo sapiens
ttctattcttccatgaactctttaagtgtttgtcattgctttctgccttgagttttctaaatgttctttttgtttctttcttttggtaacaattactatttaaaaacctcattagatatggttacttatgcacatggctatgctagtttgtaatcacctcaagaacatgatcaatatttgttttttcttttttttcctttttctttttttttttgagacggagtctggctctgtcacccaggctggagtgcagtggcacgatcgcggctcactgtaagttctgcctcctgggttcacgccattctcctgcctcgcctcccgagcagctgggactacaggtgcccaccaccatgcctggctaattttttttttttttttttttttttttttttggaatttttagtaaagacagggtttcactgtwtcagccaggatggtctcaatctcctgacctcgtgatctgcccgcctcggcctcccaaattgctgggattacagacgtgagccaccgcgccctgccccctgttttttctttaaattaagcctccttc

SEQ ID NO: 826570 - DNA, 581 bp, Homo sapiens
tatcaatcctctctaaaagccaataaatgcttttagattttttaaaattgtaattcaaaaggcctttcccacatagagactaaaaaagttttctcttttttgggtattttgtggtttagttttttgcattgaaatgtttgattgatattgagatttatgttggtacaaggtgtgaggtatgattccagcttcattgtctttcaggtggttacccagtcattcccacatttatttaattacagttcccactggtgtgcaggaccactttatcttatacctcatgctttatgcatttggaactatttctatacttatctctaccataaaaatgtctgttcatattaattactatagcatttataacatgttttaatatccctcacctgattttaaatgcattttgtaagcaatttattattggtgttcttctggatgcaacaacagaaatagattcttaagcaagaaagcayatttaattggaagatttttgtgggaagtctaagaatcaaattggggaggacaaagagaagatcagctccagagaatctgttggtagaactcttctccagaatggtgtcatt

SEQ ID NO: 826571 - DNA, 638 bp, Homo sapiens
acaaagaactgcagggttctttgggctggccatctccccaggacacctggtatcagactagaattacaagagcactgtttctgtctctttttggaagcacacttattacataaaaagagatgtatctgtgtaaaggagagaaagatggatgcagagaacacaagagtcggacggaccagctctcaggggccagtctccatggggcagctgaagcactcattttgatcattctattttttatgcctgcctggataagagcaaaaaagtgtcaggctcgcacttttgttcccagtggctcctcctgcccatcatgaatgcccttgttgggtggcctaaggggattttcttggtaaagcaagaggctcttcatccattccctcagcaaacatgtcctgaatttctcctgcgggccaggcctgcacagaatacttcaaacctcacagtgtcctggcagagattctagatgctgccagaaaagcatgcaacccccaccaggacaatgatgggaacatgaccgctgtgattaatagctcyggtttggaggtccaggcttctgggtaatggggaccaggcccctgcacaggtgatagaggaatgtagcagcctccagagaagggacacactggaccaggtacgtt

SEQ ID NO: 826572 - DNA, 610 bp, Homo sapiens
attaaaagaagtgacctatcaagggatcctgaatagccaaaataatcttgaaaaagaacaaaagtttgaggtctcacacttcctgattttaaaacttactgcaaagctacagtaatcaaacagtgtggtagtggcataaagacagtcatatagaccagtggaatagaacagagagcccagaaataaactatcatatatatagtcaaataattttcaacaggggtgccaaaactgttcaataaggaagggacagtcttttcaacaaatagtgctgggaaaactgaatatccactgcaaaagagtgaagttggaccttgatttatatcatctgcaaaatttcactcaaaatggaccaaagacctaaatgtaacaacaaaaactataacattcttagaagaaaacatgggagaaaaatcttcatgacattgaccttggcaattttttagatatgacacctaaagcatagacaacaaaagaaaaaatagattaattggtttcataaaaattaaaamttttgggcatcagtggacactatcaacagagtaaaaagacaactcatcgaatgggagaaaaatatttgtaaatcatatatctgaaaaggggttaatac

SEQ ID NO: 826573 - DNA, 612 bp, Homo sapiens
taaaatcaggaggagtcagagggcagcatgatgagctctggctgctgcaagctctgattcctacccactatgccttggctgtaactcacctgccttgggcatcgtaagaaaagaaaaagrataggaaaatggggaaggctgccttgatctcaaaggggacttccgatagataccccatcaacaagaatcattgagaacacaggatttgctcagggctgtgcctatccttccatcatgcctccaatccctcttgtatttcccacctccttgaacccctagagcataaaaagttgcccataggaagaccccaggaagatatggggcttccccttggccctaaccaacaggaaggccctggaggcatgccaagatgaggtaggtgagactgcccagagcaagacaggcacgattctttcctgggtgagcccagcccagctagggagggatggcaggcaggccagcctaggcactgacctctgggcatgtccatggggttgaagctggccagcaggtcacggcaccactggcggtcaccttccaccttgctcagccagttgttgcagttgaagtagtaacggagatgaggcctcttcatgtcggtcacaatcacat

SEQ ID NO: 826574 - DNA, 339 bp, Homo sapiens
taatagtagtaatagttatcacttattaagacttcctacatgtcagactctgtactgagcatgctatggtccttacctcctttaaccctcacaatgacttgagggagtaggtattattacactccattttacaaatgagaaaaccaaggctcagagaggtgaagtaacttgcccaaagtcacatggtagaacttgaactcaaacccaggcttgcctgaccttaaagcstgcattgccagcctctaggagtcttgttgctgtgaactagagataagtactgctgcttagccacaggcaacagaaagagacagcccagggaggtgaccactagccccacaa

SEQ ID NO: 826575 - DNA, 651 bp, Homo sapiens
gatttcctggctgaagaaatgcaggatgagctgaaaaaaataagctcctagttgtttaacaytgcacttgaatcttctgatccttgcagccaaatattttcctaatataagaagataaataaagttaagcaataataaaagctcaactatcagacagcctcattctttacagtcaagttgttataaatctgagttttctattttaagcaataagacctttctcaaaatactttttcaaaaatatataacacattaaccttttcctatcattctgtaatgaacagaaatattatacgttgatgtcttcataactgagggaagtctatgcaaaaggccggttgcctgttttctaactgacctcagcctggtgtgaatttttaatactcttttggtattttatatcttctctgacttccccttactgttctcgataacactacccattacagtgcctctttccccttctaattttccgctagaggtttaaaatgacaggaaacaagtttactagaagggattacaggtaagcaccagattctgagtgcaagtctgaagggggcttccttcaaaatcagggcaaggccagatagagccagggacacgagctttctttacaaactttgaatggaatatgttttagctgctcaggag

SEQ ID NO: 826576 - DNA, 589 bp, Homo sapiens
ctctcctttcttacagttgaattttttaaaaagctagtttatattatatttaaaatgtgtgtttgatgagttttgacatgtgtacacatctgtgaaatcatcatcagtctcaagatactgaacattttagccacctgaaaatttatctcttcctctccacaccctgtagttgggttcatcttactagcattcttttaggtcctcttctccccaccaacccaaatgcacgtgaaattctggaaagttggtttggcattcagtgataatggccactttcacactactaaattttcctctctactgctagtcagccatggggttgggacatcctattctttccagactcagaaagagttaagtctttccttaactctacagtggacagggagagaccatttcctgagaattagacagcctcagtccccattcttttccagagtcttagcttcagagccaactcctatatcctgtggtatattctcattgmttctttctggagtccagacaggcctccatattggtagaacacttggcaacttgcccagtcagtcagaacttacagttcagagtttagagtagtggttcctaa

SEQ ID NO: 826577 - DNA, 504 bp, Homo sapiens
gagaacatgggaagcagccgaccactggtgcaaggaaggggctcccagcagcagcagcaggaggagccccagggaccaacttgggagaggtttgttctcagatccagtgctccctttcttcacacagcaagaactaccaccacggacgtgtctcctttctttaaagtgctttgttatcatttactaataaaggaaaactcacagacccaggccttcaaaagctctcgccaaaagtagggaaccctcaatgaagcgcaggccagatgccagttttcggtgcaaagcgatcctgtgatcatcaagaatttagaagccttgctgaaagtttccactgcacacagaagaccacacaggacagagtttcttccacggggctaaggcctaattcccgaagaagccactgcggcttcctagtttggcacaggtgtcaaaagccacttttggattgaccctttttgyccgggaaggtgaagcttcctaaggctagatggaacaagctgctgg

SEQ ID NO: 826578 - DNA, 641 bp, Homo sapiens
gaaaaaaatatacaaacaaagaaataaaatgttacrtattttctattcatagattgaagaatttccatttttatatttatgctgcaagaagactattcactaagcctacatatgtaataatttattggaaacaaagagtaagatatttttaaattcttcatatttatctaacctagtgtcatttttatatctttatgattaactctttttctaatttttgttttcatcaacacataaaataatttttaaaattctactatcagaaaatgtcacttctctttcagccaaagtcagaatttcatacattttaaaaataagtaacaggcattgtaataatagccataacgtgtaacactaaattcccaatgataaagggatgagctgtttaagttatatattcagttgcaaaatggtaatttaaaacaggaagtaaactggcagattgtttaagtgacagacaataaatttaactttaatcagttaaagaaaaggtattaaagaatgattttttctttttatagttaatgaaattatcttctaataccagtaattttttccatttcggtttttcactctgacttactgcttggcagatgctggcattcctagtctgggttattcctcccacaaagaccacacag

SEQ ID NO: 826579 - DNA, 430 bp, Homo sapiens
atgcgctgaagacactgcacaatcctactgcaggctttagcttccctctgcgccagccacaggacacgttcatcagccaacatgatgttacttgcaatgtcaaccatcacgtcacctagctagcaggggttcaggagaaaaaagaaagatctttaaaaccaccataaactatttcgtagaatcaaaatcctaatggacagtgagattggccttcagtctcaaattccacatgagaacccaacaggcactttacttgtttctcatgaaaacatcttcagatatgaacagttatttcaagtatagccatttggtrgtatttagctcaaaagagcatatgtaagtggccaccacatcactggtgaaaagactgccaggtgttatctcaaatggaggaaaagaaaggcaattagattaattaaagagaaggaaa

SEQ ID NO: 826580 - DNA, 624 bp, Homo sapiens
cctaacaattacaatctattaagactccaacctaaccattttattacactggattacttggttttagtctgctgagcattagtgctgcttttaacaccattggtttttatatccttataatgacctcctttgttttagtacacaaaattgtccttttatcgatgtgctgaggtatataccttccatagaaaatcatcaagataaagtgaggttttgtgattcaactctcatgttttgatttcttcagtgattttgttatctcactttctggctgcaggtggttttgcagataaacagttggattatttcagaagccttagagttcttcctattacacattcaagtcaatggtatcaaagaggtccattgtaagaactcattctttcataaatggaaaagtctaatataagaataactaaattaactaaaaaattctgtttcacagtattaaaaagacaaagaagaaaatatatgtgagtgggtgtcttaatccattttctgctgttgtaacagcataacaaaagctaggtaatttataaagaatagggttttatttggtcacagttctagaagtagggaagtccaagagcatggtgctgacaycttgtgaggaccttcttgcta

SEQ ID NO: 826581 - DNA, 534 bp, Homo sapiens
taatgctaacatagacaccttcattcaaaatttttttaaaataaaaatgttattttcaaaatggcatctttttaacacagatgctcaccacaggaccagggatgccccgaagaccttctggaccaggctttcctgcaggtccctgaggaccgactgggccggtttttccaggaggaccttctgcacctgcttccccctgttagaaagtaaaatatgggagcacattagtgatgagaaaatacttttattattttattaaatgtactgaaaaaagttgatcagtttatgcatgaaattttcaaatataataccttgtatatataatatataatatatattatgtatatattattttttttttaccttagcacctttttcaccttgtcttccctctgcacctgcagctccaggaggaccctatagacataagatttattgtaaaatatgtatcacatataaaagtaatgttaatgagcacttgtttwcaaacactaaactttagtttgtaacagatgaataaattgtagttttcta

SEQ ID NO: 826582 - DNA, 568 bp, Homo sapiens
ttctgttgggactcagaaaatgataccccaaagtgaaagccgctgaggcagtttttctctgacctctgccctcctgtctctcatccctcattctccctcgaggcaagtcatggaaattagaatccctcctccccaaagtgggtcatagaaaccagaaccccttttttgcaaagccagctataaaacctaaacatactactctaactgttatagtaggtagtcagacataaacagggcaggagagccctgccaatcccaccaggaatgtcaggcgaccatcagatgaaggtcaggcagttgttaaactgtcttgctaaaacaattggttgcagctggtgccagggaatggcagtcttcctgttcctcatagaaaacacctgaaactggtgaccagcagcttctttatacgatctcaggaggtgggctactgggctcaagcatgtgcactaagatgcaaatggttggastttaactggtaaataaccttcctctgggaacactaaactgacgcctcaagtgagcatgcgcacagctccaggaaacaaaatgtgtgtgtggcccctcccaa

SEQ ID NO: 826583 - DNA, 610 bp, Homo sapiens
  misc_feature 509: n = A,T,C or G
ttctgttctaaaactttttaataaactttcactcctayaacccttagtataccatatggatttgccactgttaacataaccttcacccacctttctgtgtaacagctggccataaagaaattaaaacccttattccagaggggttctaccccgtacctgggaggatggaatactacaacacaggccagggagtatctgaacagaaggccttactaggtttccctactcggattagtatcattagctcataccctttttttgtccaatattatattgcatttctacacagctgtccctgccttatcgaacctaagcataaaatcagatagcttcctctgtatctttcgagcttgaatctgaaggcgcctatgttatgttgaactataatcaaatacatttttaatatttttctcttgttaacctttttttttataggggtgtcagctttgacctttatactgagaaggaaaggaatcgaattctttctacctttatacttccaactgttnttcatgctgccacttcatttgaaatatttgaattatataagtccactggttatgaacttttaatattttaaaagctcaaattgcttatcttggtgctggaa

SEQ ID NO: 826584 - DNA, 635 bp, Homo sapiens
gctcaaggtaactgattggcattccaggaagwtctgaactgatcacaatcttatacgccataggatgacaactttgctgtttgctggagagaagctcatagtgctctgtcagcaccatcatggcatatgttatatcattttagcattcttatattttcttcaactcagtctgatgcggcagcctgtccccatattgctcagagtccagtcagatagtctcatgactctcattgcacacctcatttatgccatccattccatgcttacttactactaaggttcaagacatcatacgaccttctcagaacccatgatatagcccaccttatcagattaatgacattttcagcttccagccagcaaataaatagtaccactgaccagattttcctcgctgactcactgtgcagtttacagcatgtgtgatgaatgctgctgctactcttgcactgatccagcttttccaggagctgccttcagaggccagggaataaaacctggaaaagtggggagatttaatattcaacggggtaaatgttgacttatgagagataggagatggaaaggagctggtgaataaattctcttccacttctagtaattattctgaggtcctaggttttcataaagtcttg

SEQ ID NO: 826585 - DNA, 485 bp, Homo sapiens
agtaaattttttttcaataaatgatattggaaaaactggatgtccatgtattaaaaaaccaaggggattgggttcctgttttacatcactccccccaaaattattcaaaatggattcaagacttaattacatgacctgaaatttttaaaactcctaaaaatgagaaaaaaactctttgacattgatcctgacaatgacttttggatataacatcaaaagcacagacaacataaaaataaataaattggattatatcaaactaaaaagcttctgctctgcaaaggaaacaattaacaaaatgaaaaggcaacccgtaacatgagaaaaaacatttggaagccgtgtatttgataatgtgttaatatctgaaawacataagaaaattatacaacactgtagcaaacaaacacacacaaaaacaataaatattcagattacaaaatgatcaaaggactcatataaagaaaacatacaaatgggcaaca

SEQ ID NO: 826586 - DNA, 617 bp, Homo sapiens
taagacctagtatttgacagcacaaggtgactataatcaataataatttaattgtacatttaaaaataactaaaagggtataattagattatttgtaacacaaaggagaaaagcttgaggggatggataccccattttccatatgtgattattacacattgcatgcttgtatcaaaatatctcatgtcccccataaatatatacttatgtgcccacaaaaattaaaaataaattttttaaataaaatttttagtagcatcatctacaaaaaagttttaaaaattaaaaaattaaagtacacacacacggttggttacctcaatatactcagaaattgcgtttaataaatttaaaaccctctttttatttaaaaagaaaaaactcttagaaaaatatgtatatgtatgtaaaaggaagtttcataaatctgataaaagtcatatactaaaattaggctggtgccatgtgcctatagtcccagctattcagggggctgaggtgggaggatcacttgagcctgggaratggagggtgcagtgagccaagataacgccactgcactccagcctgagtgacagagtgagacacccatctcaaacaagaaaagaaatgagaca

SEQ ID NO: 826587 - DNA, 506 bp, Homo sapiens
tgtgaactatacatgcaagcgatctaggttgcatgatccttatgagaatctaatgcctgatgatctgaggtggaatagtttcatcccaaaaccaaccaccatccccacccctccatttgtccatggaaaaattatcttccacgaaaccagtccctggtaccataaaggttggggactgctgatctaatacctttagaatctattttcatacatattcttcagtttctgctgacacatattcacaaaaccttgtaatttctttaggtgtataacctactaccatccagtttttctggcactataagcatattgacacacagctgtagttatgggactgatggaaacagagggtccttgtgcttgggaacaaaggacatcctttttcaatgcatgctcccctgagattatcacaggaaagctagacatctcaacacaagaaggaaacrtacttctactggtaagggaggcttagagtgtctcaggagtcagagattctcaggctaatc

SEQ ID NO: 826588 - DNA, 576 bp, Homo sapiens
attaaaaatacccaaataatccaaaacaatatagaaatagaggaaagaggaatcacagaaccaaaaagaaaaaaaaaactacaaaaaattaaggctgagcacagtggctcatgcctgtaatcccaacaatttgggaggctgaggtgggaggatcactgatgccagggtttgagaccaacttcagcaacataggaaaatcccatctctaccaaaaacaaaaacaagtaaaagaatcaaagaacagatggaataaatggaaaatgactacgagatggaagattttaattcaaccatatcaataattacaaaatagtctaaatgtaccaattaaaagacagaaattatcatttgggtaaaactcaagattgaattttttaaaaaagctcaagaatatactgtctacaagaaacccatttcaaatgtcaagatataactaggttaaaaaaaactagcctaatcccctgtttattagcatcaacaaaacgtctaatattaggcattrctgccatctcttctccacccacaattagactgcacaaaaatataagagcctccaaagtaaacaggagacctagt

SEQ ID NO: 826589 - DNA, 626 bp, Homo sapiens
catattatgatttgtacaccatacagtgcatcgtgtacatacacctgaataagaagattttttaaaaaattactgtatagttccatcaattctattaataattgtagaaacttcccactggagagtttccttttatttttctctaattgagaaaagagaacatatttcttcgtctcctactctaacccagatttttttcctggttggttgggtgacctctctgtgattcactgaatcagtggcaagagtggcggcttcagcgagaggtgaagaaagaggagaaggcttcagaggtaattgaggagaggggaggaaatgagtcaacttcccctgggtgtgaagtgtaagttgcctcacacagcggagggtggccctcttcctctcagaatttcaacattccttccctgttttcattctcctacaccaatgccactgtttcttatgaatgaaaatcaggcaggtcgctgtgagtcacccattttcacataaaatcacaagggactaayttttttaaactggaagctaattggtgatttatatgcagagcatacaaagggtttgtagtaattagaccgtatgaatgcttatgaatgtgtaactggaaagcaagctgattttctcacaga

SEQ ID NO: 826590 - DNA, 626 bp, Homo sapiens
catattatgatttgtacaccatacagtgcatcgtgtacatacacctgaataagaagattttttaaaaaattactgtatagttccatcaattctattaataattgtagaaacttcccactggagagtttccttttatttttctctaattgagaaaagagaacatatttcttcgtctcctactctaacccagatttttttcctggttggttgggtgacctctctgtgattcactgaatcagtggcaagagtggcggcttcagcgagaggtgaagaaagaggagaaggcttcagaggtaattgaggagaggggaggaaatgagtcaacttcccctgggtgtgaagtgtaagttgcctcacacagcggagggtggccctcttcctctcagaatttcaacattccttccctgttttcattctcctacaccaatgccactgtttcttatgaatgaaaatcaggcaggtcgctgtgagtcacccattttcacataaaatcacaagggactaacttttttaaactggaagstaattggtgatttatatgcagagcatacaaagggtttgtagtaattagaccgtatgaatgcttatgaatgtgtaactggaaagcaagctgattttctcacaga

SEQ ID NO: 826591 - DNA, 448 bp, Homo sapiens
agcaaaatttaatttaatttaaagtctccttatggagagaaattaaataccaaggggtggacaactcctttgcagatgaattggtagagctcagcagagcccagagcaccaggatacattacttttcttgaagacctcaaaagtcttgccaagagctagtagagcggacagaggcactgaaagccttaactttatggcaggctttggccagtaaacaaaaactactctgaaggtagacacatgtgctttgaaatgattatcttcctaatatcatgagaaaaaaatagcaaatttaagttatttttgttgtgctctgatttgctattcatttggtttttctgtacaaattcattattgtttctagayttttgtatgacatgatgataaacaatgaaattggcttatagtctcaagaaaaaggaataagattttgttggatagggttgag

SEQ ID NO: 826592 - DNA, 604 bp, Homo sapiens
ccttacatatttcccttttttagaattttatrgtaggaacacttaagattcttctctgaaaactattaactatagttaataataattactattattaactatagtattattaactatactccccatgttcaacattagagttatagcaattatttatccttcataactgaaagtttgtaccctttgacctgcatcactccacttcatcctctctccagtccttggtaaccaccattctactctgtttctatgaactcgacgtttttagattccacatataagggagatcatgcagcacctgacttatctcactcagtgcaatgtcctccaggtttacccatggtgtcacaaatggcaggatttctttcttttttaagactaaataataactacattttctttatctatctattgatggatacttacgttattttcatatcttggctattgagaataatgctgcaataaacgtgagtgcaaatgtcttttcagcatactgttcatttctattgggtatatatgtagaagaaggattactggataatgttaattctatttttaatattttgaggaacttacatattattttctataattgctgtgc

SEQ ID NO: 826593 - DNA, 700 bp, Homo sapiens
agtaccaagccgttttggttactgtagccttgtagtatagattgaagtcaggtaacatgatacctccagcttgttctttttgcttaggattgtcttggcaatgcgggctcttttttggttccatataaaatttaaagaaattttttctaattctgtgaagaaagtcaatggtagcttgatgtgatagcactgaatctataaattactttgggcagtatggccattttcacgatatcgattcttcctatccataagcatggaatgtttttccatttgtttgtgtcctctcttatttccttgagcagtggtttgtagttctccttgaagaggtcctccacatcccttgtaagttggcttcctaggtatttttgttctctttgtagcaattgtgaatgggagtttactcatcattaggctctctttgtctgttattggtgtataggaatgcttgtgatttttgcacattgattttgtttgtatcctgagactttgttgaagttgcttatcggcttaaggagattttgggctgagaggatggggttttcttttctttttttctttttctttttctttttyttttttttttttttgagatggagttttgctcttgtttcccaggctggagttcaatggtgcgatctcagctcaccacaacctctgcctccagggttcaaactactctcctgtctcagcctcccga

SEQ ID NO: 826594 - DNA, 487 bp, Homo sapiens
ttgctgaggtttttaatcataaagggatgctgaattttgccaaattatttktctgagagttttcagagtttatttagataatcataagatttttctttttaattctgtttaagtgatgtatcacaattgttaaattgtgtatgttaaaccatccctgcatccttggcatgaaacccacttgatcatggtggattatctttctgatttgctgttgaattcggttagctagtattatgtggagggtttttgcatctatgttcatcagggatactggtctgtagttttcttttttgttatgttgtttcctcattttggtattaggatgatattggtttcatagaatgatttagggaggattccctttttctctatctttttgaatagtttcagcaggattggtaccaattgttttttgaatgtctcgtataattcatctgtaaatccatctggttctggaattttggggcaatttttttattactatttc

SEQ ID NO: 826595 - DNA, 655 bp, Homo sapiens
aggtgcccggtagtgagactctaccgaggaatccrgcaacatttctgattcctgtgatcctctcaccgaaaagtcaagttggggccctggaatttgtatttttagcaaatgccccagtgattctcatgatcagacacctatagaaaatagtgtgatggtgaccatcttcaagccttttccaggagtgaggatgctctaggacacaggactcttatgttaaaattggaaaaccctgggcaaaccagaatgacttgggtggagacttttttttaaatccccgtttaatagatgggaaaactgaggctcaaggcggttcagacagtaattcttgtctgtaatagttttctcccatttctcaaaaaggagaaaaataaatcagatagagtttttcatgataaacgtacaattgaaagagctaactttcatttttgaaaaagaaaaagtttgaatggggtgttaaaatgccctttctttcatgaactgattatatgagtgttttgtctttatgaccttattttacattaaacatacgaagctatggtgggtggaggggtgttgtttttgaaattagacttgtgtttgagggtttggcactttgacactgggggttgattgtggaggttcagatgagaaagccccttcacttccccgcctc

SEQ ID NO: 826596 - DNA, 655 bp, Homo sapiens
aggtgcccggtagtgagactctaccgaggaatccggcaacatttctgattcctgtgatcctctcaccgaaaagtcaakttggggccctggaatttgtatttttagcaaatgccccagtgattctcatgatcagacacctatagaaaatagtgtgatggtgaccatcttcaagccttttccaggagtgaggatgctctaggacacaggactcttatgttaaaattggaaaaccctgggcaaaccagaatgacttgggtggagacttttttttaaatccccgtttaatagatgggaaaactgaggctcaaggcggttcagacagtaattcttgtctgtaatagttttctcccatttctcaaaaaggagaaaaataaatcagatagagtttttcatgataaacgtacaattgaaagagctaactttcatttttgaaaaagaaaaagtttgaatggggtgttaaaatgccctttctttcatgaactgattatatgagtgttttgtctttatgaccttattttacattaaacatacgaagctatggtgggtggaggggtgttgtttttgaaattagacttgtgtttgagggtttggcactttgacactgggggttgattgtggaggttcagatgagaaagccccttcacttccccgcctc

SEQ ID NO: 826597 - DNA, 626 bp, Homo sapiens
ccattattccctgattgcacagataaagaaaccaaggctgagcaatgccatcccctcatctcacgaacgtcacctccatgagggtaggcaccttactagttctacttgcccaagagtagcagtcagaaagctayggggaggcacacctggggtttgaacctgggtccacgtgactcaggcactcaaatcctgaactgcttcagggcagggcacttggcttgaagagaagctgcagacacagagacaatcaagtcacatctaatactccagcaggacagatgagcctgcatggtgcaaaggtacccccgcccccaacccaaagcctttttcaattcctctccctccacatctcttgtcatggtaaagcaggcagaatccatgggctttaacgggcccattgcttttcccaaagctcatgcctttttcctaaaaacaaaacccttctgggttccagaactctttggaaaaaaagaatcttctgtgatttgggacattggtttgttcccccaccctcacttaaatgagaaactactttagcatgccccgccccgtctgttgtctttatttaggaggaagcaccctctacataccctgagtatatacacccagggcctgaagctgctgtg

SEQ ID NO: 826598 - DNA, 638 bp, Homo sapiens
tgagtcttctgtgatgttgctagagggaagtgtgttttttccaagtgaggattaattgccaacttttctttttttttttttttaagacagggtctcactctgtcacccaggctggagttcagtggcaacatcatggctcactgcagtctggacctcctgagctcaagccatcctcccactccaaccttccaggtagctgggactgcaggtgcacgccactacacctggattttttttttttttcattttttgtagagatggcatccccctatgttgcccaggctggtctcgaactcctgggctctagtgattctcccacctatgcctcccaaagtgctgggattacaggcatgagccaccatacctggccaattgccaacgtttaataatcaggaaactttatataaaaatttaaagatctagtctctcatttgtcaattaaaaggtttggcaatattgtcacatcacagtcgcctgggtctaggcgttggcagccttttcaaagggacacttgtttcttagtttatgttggtttccrtcactccctccccgctggccccacatccattgcctatttatcctcaccctcgtgctgccatttttcttggagcaaatttataagaaccatgaactatttc

SEQ ID NO: 826599 - DNA, 577 bp, Homo sapiens
agagattcattttatatggtacattttacattatttagatatttgactaaaatattttctatataagatatacataaatttatatttatatattaaatattttatatattaaatattaaaattaaattttattaagttaattaaaatattaaatatttaaaaataatatgtatttatatgttaaataaatgtatttaatttatatatttaatagatttatatattatttattgtatatatatcttttttctaggtaggtaggtaggtagatatagatggttaaatatagatccatcctattgtttctatttccttagagaaccttgactaatacaacaataaaaatttgtatgcaaaaaaatgacatcctcagattcaaattttaggatccctcaagctgttaggtgtagcatggattaaagagagatcacagaaaggtgggtagacattttrggaaaccaatatcagatgagaatagcttgagtgaacatgatgctaatgacaccacagatggagagtagcataagaattagagataaatttagaagataaagtcgatagagctggtaattgactg

SEQ ID NO: 826600 - DNA, 534 bp, Homo sapiens
aaaagtattggggagggataggttctattgggaagggacaatgaacaccacagccataaattctgattaattttgtaataatacctctgacattcacaatcttattgtaacttggagtaacgctggaattattggtagagttcgataaaacctatagtaacacagatgagcaagtgtactagaaaactgaattaaacttttctcagggtgtgatactgatggaaaataattgacctgaagaggacttgcagttaattaataatctattaataattgttttaaatcatttgactcaaacttataaagtccaaattatagtagctgatagtggcataagaactgctacactcatgcaaaaatatgaaacttatgtccaagaatcttggtctgcttcacctctcccatccttgtygctaccaccttgggctaagaggcagtgagtgtttatttggactattgctggtgtcttctgatgggtctcccagcctccattcttactcacacacgtccccttcaatccatttttatagccag

SEQ ID NO: 826601 - DNA, 508 bp, Homo sapiens
acatttcaaattaggaatcactccatgttgttacttccatgaattacacatttagtgctttttatctgcactatcattttgkggaggagtgcactgattgctattatgactcattcatcttgttcattgactcaactaaattttatcgagctagtcaaaactagtcacagtcaatccagagacctcttcctttttctatctatactcatgcctttagtgatctcatccagtctcttagctttaaataccatagatcatatgatatttagctttaaatatcatatatattaataactcccaatttcatgtctctagtccagacttctctcccaaattctagactcatccaattattcaactgcctacttggcgtctccacttggatgacatataggcatctcgaattcaatttgtccaaaatggaaaccaaactacctcctcctacagacttcccatttcaggaaatggcagcttcatcccttcagttggccaaaaacctgggaggcat

SEQ ID NO: 826602 - DNA, 512 bp, Homo sapiens
agatgaactgctcaaggtcatttgaaggagaaaatgagaaacatttatttattttacccaaagaagatctgttrgctgttctaagtccctttctaaaaacagaagcctcagcccctcctctgtttatattggcatgtgatgtaactgatcttagtagaaactagataatgacctacagcattatcgggactacattgctatatctctaacatggagaaaatgtgtttgcattttatgatgctgaatactcacccatttcatgaccttactatactatctgtttccatctgtgggatattttaaacgaccaaataacattaaaatcacctaaaagggtttctttattagttataaacttttacaattcaatttaaaaagtttacagtccttaacactgcaagaactgccattttacaaagcaccatcctgttctttatcactggggtctgacagcagctctgaccttttcagaacatctttactgaaagaagattttttaaatagataataaa

SEQ ID NO: 826603 - DNA, 575 bp, Homo sapiens
gctagtaaacattgtgaggaggacagctggsggggtggagatcaagagggcactgtagacctactcctctctgcccatttaaaccacataaggtttttaaactccactttttaaaacaggatattaatttacttatttgttgattgtgcacactcatttatacatacatatgcacagaactgcaattactttggaatttggaatctcactgttaatttatggattcagccaattattatttatccagcccctctatttctacttgtgagatataatatgtgaggtgttattcacccagaaagaactcagtacaaggatagcagatgctccctgggactggggaagatctcagtgttctccctttagaaaggagtagtgcaggcccaagctctggcccaaaggcataataacagcctctgtttggattgtgtggcttgcagtttgctaaaggaaattatcaaagtggaccacatcttagacagatcggatgatgaggatgacatttcctccgaaaaccctcaaactgacttccttcacaaggtagacactgaaaaatgggtaagagagacacttaa

SEQ ID NO: 826604 - DNA, 561 bp, Homo sapiens
tagtaaacattgtgaggaggacagctggcggggtggagatcaagagggcactgtagacctactcctctctgcccatttaaaccacataaggtttttaaactccactttttaaaacaggatattaatttacttatttgttgattgtgcacactcatttatacatacatatgcacagaactgcaattactttggaatttggaatctcactgttaatttatggattcagccaattattatttatccagcccctctatttctacttgtgagatataatatgtgaggtgttattcacccagaaagaactcagtacaaggatagcagatgctccctgggactggggaagatctcagtgttctccctttagaaaggagtagtgcaggcccaagctctggcccaaaggcataataacagcctctgtttggattgtgtggcttgcagtttgctaaaggaaattatcaaagtggaccacatcttagacagatcrgatgatgaggatgacatttcctccgaaaaccctcaaactgacttccttcacaaggtagacactgaaaaatgggtaag

SEQ ID NO: 826605 - DNA, 637 bp, Homo sapiens
aaaaccctcaaactgacttccttcacaaggtagacactgaaaaatgggtaagagagacacttaaatgacacagtaggttgaagagaagaacttcacgccrcatatcttaaagtggtaagaaaatatctgagggttttcttctaattggtgcagaacttcaaagcttgaaatcaggagggaggcagggaatatggcattgttcccactggatgctgctgttaccacatgaaggacttactagccttcccatgcgaacaaaaaagaaaaaaaagtgaattatatgttatttttgtcctcgggaatttatgaaataactgtgacatttctcaccttcgagcaaatcaccatatgaccaaatcaccatatgaccataccccctcctcacagattatcttccaatagaattcagctattcacccctaatgcagcctccaggagagaatccttcttcaggcttctgggactccaggccttcagtggcttgtagctacataactcctggtctcttgtcttcatcctcacatggtcttctctttgtctgtcttctcctcctctgtctctcattaggatgtttgtcattggatttaggaacccattcaagtaatctgagatgatcttatatcaagattcttagttt

SEQ ID NO: 826606 - DNA, 637 bp, Homo sapiens
aaaaccctcaaactgacttccttcacaaggtagacactgaaaaatgggtaagagagacacttaaatgacacagtaggttgaagagaagaacttcacgccgcatatctyaaagtggtaagaaaatatctgagggttttcttctaattggtgcagaacttcaaagcttgaaatcaggagggaggcagggaatatggcattgttcccactggatgctgctgttaccacatgaaggacttactagccttcccatgcgaacaaaaaagaaaaaaaagtgaattatatgttatttttgtcctcgggaatttatgaaataactgtgacatttctcaccttcgagcaaatcaccatatgaccaaatcaccatatgaccataccccctcctcacagattatcttccaatagaattcagctattcacccctaatgcagcctccaggagagaatccttcttcaggcttctgggactccaggccttcagtggcttgtagctacataactcctggtctcttgtcttcatcctcacatggtcttctctttgtctgtcttctcctcctctgtctctcattaggatgtttgtcattggatttaggaacccattcaagtaatctgagatgatcttatatcaagattcttagttt

SEQ ID NO: 826607 - DNA, 642 bp, Homo sapiens
ctgacttccttcacaaggtagacactgaaaaatgggtaagagagacacttaaatgacacagtaggttgaagagaagaacttcacgccgcatatcttaaagtggtaagaaaatatctgagggttttcttctaattggtgcagaacttcaaagcttgaaatcaggagggaggcagggaatatggcattgttcccactggatgctgctgttaccacatgaaggacttactagccttcccatgcgaacaaaaaagaaaaaaaagtgaattatatgttatttttgtcctcgggaatttatgaaataactgtgacatttctcaccttcgagcaaatcaccatatgaccaaatcaccatatgaccataccccctcctcacagattatcttccaatagaattcagctattcacccctaatgcagcctccaggagagaatccttcttcaggcttctgggactccaggccttcagtggcttgtagctacataactcctggtctcttgtcttcatcctcacatggtcttctctttgtctgtcttctcctcctctgtctctcattaggatgtttgtcattggatttaggaacccattcaagtaatctgagaygatcttatatcaagattcttagtttcatctgcaaagactctt

SEQ ID NO: 826608 - DNA, 541 bp, Homo sapiens
agggaattggtaggaggtaattgaatcatggggatgggtctttcccatgctattctagtgagatagtaatctcacaagatctgatggttttataaatgggagttcccctgcacacactktcttgcctatcaccatgtaagacgtgactttgctcctccttgccttctgccatgattgtgaggcctccccagccatgtgtaactgagtcaattcaacctccttcctttataaagtaccccgtcttgggtatgtttttattagcagcgtgagaacagactaatacaaaggtggaaaagacaagctacagactgggagaaaataactgcaaatcacaacaaagtgactagtgcctaagatatataaacagctctcaaaacttgacagtaaaataaataatcaactaggaaataggcaaaagacacaattagcagctgaaatgtatacccccgaaactcatatgttgaagctctaacccctgtacctcagaacagactgtatttggagctagggtctttaaagaggtgatcaaattaacatgagg

SEQ ID NO: 826609 - DNA, 541 bp, Homo sapiens
aaatgaattaccttatatgtgtacaaatacatatatatacacacacacatataatatatacataatagggcaaaaagtaatagaaaatggcaaaattcttttcactaaagaacagcttcatggccgagcatggtggctcatgcctgtaaccccagcagtttgggaggccgaggcgggtggatcacctgaggtcaggcgttccagaccagcctggccaacatggtgaaaccccatctctactagaaatacaaaaaattagccacgtgtggtggcaggcacctgtaatcccagctactcgggaggctgatgcaggagaatcgcttgaacgcaggaggctgaggttgcagtaagccgagatcacgtcattgcacttcagcctgggcaacaagagcgcaactccatctcaaactaaagcaaaaaaccaaaagcttcaaaaagtagattttatgaaatctgtgaggacagtagataatagcaatagtttgatttaatattcaaacagaaatcwtcagaaataataaaatgaatgtgaaataaaaaa

SEQ ID NO: 826610 - DNA, 541 bp, Homo sapiens
aaatgaattaccttatatgtgtacaaatacatatatatacacacacacatataatatatacataatagggcaaaaagtaatagaaaatggcaaaattcttttcactaaagaacagcttcatggccgagcatggtggctcatgcctgtaaccccagcagtttgggaggccgaggcgggtggatcacctgaggtcaggcgttccagaccagcctggccaacatggtgaaaccccatctctactagaaatacaaaaaattagccacgtgtggtggcaggcacctgtaatcccagctactcgggaggctgatgcaggagaatcgcttgaacgcaggaggctgaggttgcagtaagccgagatcacgtcattgcacttcagcctgggcaacaagagcgcaactccatctcaaactaaagcaaaaaaccaaaagcttcaaaaagtagattttatgaaatctgtgaggacagtagataatagcaatagtttgatttaatattcaaacagaaatcakcagaaataataaaatgaatgtgaaataaaaaa

SEQ ID NO: 826611 - DNA, 627 bp, Homo sapiens
atgatgaaggataaaataatagataagtagggcaaaaagaagccaaactaagcataattaatggctgtaaagtaaaaaaaaaaaatccacaaaggatgcagatgacacatttaaggtaaaatacaagaaaaatttctaaaatatagaaatgataaagactgaaataataaaccagaaaaaaattgtttcaaatccctcaactccatgacacattctaactgatatattgaactcaacaataaaaatacttttcaggcagaaaaaggaaatcacattctaaagaaggcaaaatatgagacaggacacatacatctccagatcaatattaaatatcagaaaacagtaatgctacaaaatttcacaatgaaaaagtttaagccaagaatatgattaaattaaacctaaggtggcccaaccgacagccacccctcttattcctggtaacagacttcagatttctttttctggcaccagggtacacacctacccaggatgccaatcacggtttgtgtaaggcaggcacggcgatgtayatggctgatgtagcagtgagaatgggcccacttctggctactgaaaactgagaagtctgattgggattccaagaaaagttttctccaaatgact

SEQ ID NO: 826612 - DNA, 602 bp, Homo sapiens
agagttgtgactgttcaaatcatttatatgtttcagtargtaaccattctaaggcattaatttatagtgcatatgtgtatatgcattatatatacatatatatgcagtatatataatgcatatgtgtgtgtgtgtgtgtatatatatcccattttaaaatttctgtagtagaaggaaaattcagattatgtgggactggattaaataatctcatttaatttttagataattaaacccttttttgaattgattggtctaacctccagaaatattatttgcccagaacagagcaggccacaggaattccaggaaaattatcttctgatccatcttctcagatattcctcataatctagaagaacagttcccaaatatggtgtctactctctgatgtatctcagtgagcaaagagatgtgtcataagtaatctgaagctaataaccattaaagaactgatgtacttcaaatgatgtgctttataaataactctgagaaaattcaaggttacctctatgaaagcatccctcttgcttgcactctgatgttttcccgaagtgttatgccagatatcacccctttcctggaccttgctctgtgcccca

SEQ ID NO: 826613 - DNA, 584 bp, Homo sapiens
catgatcccacctccataatctgtcatcctaattagcaaggagagaagggatttggctgctttcaatttgtatgttctaaagctacagagaaattcataggaaatgggcctggctgaatccagcatgaacatctgcttagaaaattgtaaattttgaaatatgatcttggggtggtttagttccaggtaccctgtattatttcaactgataaataacaataaaatcacagtgttaactatgacaataatactaagggaagttattgcttttagtgcctatcaagggttttgtatttttaaagtgtgctccaagaaaactagtccttcaagatactccttggtaaatgcttgtaatgcccaggtccacagggcatgtgtgactcactatagtctcctcttggatgcttataacatccagtagactatgagaagcactgagaaattatgtcattttaaaaagtcatttaagtttaaacctattcaaaactggaaatcatttgtggaatatttaatataacttttgttcaatacaatattttaaattytaaaaactgagtaggtagcttccacatcacagataagaa

SEQ ID NO: 826614 - DNA, 585 bp, Homo sapiens
tttctcatgaaaacaaataatgcaaaattaaattaaagatatcaccccactgaagcgattgctattcccaactttatccttagaattctttttccaagcttgagattactgcatgggcaaatgcrctccactgagccgcacaagcacaagcacacctagatcaatcaaccagtagtcagccaatcaatgaaatctatccaaagccaaagttttcttttcctaaatgtagcgagataattggctttgctctacactgttctttgatagagagttcactgacttaaggtgataaagattttaaacattagctaacatttttgagcactacgtgttggggatgtgccaaatgatttctgtcttgtcttttatcagaatttttgaaataactatatgaagttagtgcatttttgtccccagatgtggacactaaggcttgactacagttgcttgcccaagataacacagctgctaaacaacagaaccaggatgcaaacccagcgtgacctgagccaccaccctataccatctccttaggcgcagcactgttttgcttcagatgcttctggacactcagaagcacacagc

SEQ ID NO: 826615 - DNA, 574 bp, Homo sapiens
attgccaaggtagtgatcaaagtaaatgcaattgtcaatttaattagcattagtccctccaaattcattgtgcatgcgtgtgtgtgtgtgtgtgtgtgtgtrtgtgtgcataaacacatacaagtttgtgtttcaggtttgctaactggcttattagcaaatactaaagacaaagctttaagaaagcattcataatttcttgggtcagctactgagtatctaacataagtaatttccttctatgctctgttatcttgttaatacagtcatttaaaatgagattttctttataggttttaatgaaaagaacagatcaatttttatgggatccatgttcctactcagctagcaagaatgaacaccatttctctagtagttctaagattcttccttaagtaaaattttaatgtttaggagacacagagcacacaaagggagtaaaagagcttaaaaatgtgagtttatattttgaatcatcctaaacaagcacagaaatatacatgagaggaagtaaaattatagtcacaggatagagagactttgaaagaggtaagagcaaaatagacaaaatcag

SEQ ID NO: 826616 - DNA, 543 bp, Homo sapiens
aactatatttagattcatcataattacccaaagtccatagtctacattaaggttcactcttggtgatgtacattctatgggtttggacaaatgtattatgacatgatccgtcactacagtattatacagactatttccactgccctaaaaattttctgtgcttcacccacttatccctcccctgacctcccatctcctgggaaccaatgatctttttactgtctccattgttttcacttttccagaacatcaggttgctggaatcagtaggtagacttctcagattggcttctttcacttagtaatgctcatttgactatcctccatgtcttttcatggcttgagagctcttctttttcagtgctgaataatattccattgtctgggtgtaccacagtttatttttttcagctactgaaggacatcttggttkcttccaaagtttggcaattatgaataaagctgctataaacatttgtgtgcaggtttttgtgtagacataagttttcagctcttttggataaataccaaagagcctgtttg

SEQ ID NO: 826617 - DNA, 634 bp, Homo sapiens
agttcatactaatataaataaataagcaaacaaataaatgaaatgattaaggagtaatggggtcaggcacagtggctcatgcctgtaatcccagcacttgggaggcyaaggtgggtggatcacttgagcccaggaattcaagaccagcccgggcaacatggtgaaccccatctccacaaaaattacaaaaattagccgagcatagtggcaagtgcctgtagtcccagatacttaagaggctgaggtgggaggatcatttgagcccaggaggcagaggctgaaatgagccgtgattgtcccactgcactccagcctgagtgacagagctagaccctgtttcaaaaaaaaaaaggaaaagtggaatatttacattgtctcaaagtaactgcccccagattttattaataacttcacagtggaggaggctggccaacattgccttaatccagtaacaaagtgagcatcaccagcaatggggcaatccaaaatggcgccacctgataggatgcaatgaaaagaatacagctgcacttctgtgatgttcatgccaaagatgcctcatctaaatctgatcaaaaggaaacaacagacaaactcaggctgaggttcattctacacagtaactggttggtca

SEQ ID NO: 826618 - DNA, 242 bp, Homo sapiens
aggcctctcccatcagcccccaggcccaggagtggacacaaaacatggagagcccagctcctgactcctcccattccagccctcccagccccctccacagagaaatccagagcccatcccaggcagcttctccaggyagcaggtggttccacagcctaattcaggacctctaatctccccccaggtccccagcttctgagactttgacgtactgactcctgcctcccacctgcgaagcccag

SEQ ID NO: 826619 - DNA, 604 bp, Homo sapiens
gaggacccacgaggatctcctggatccatggagcccggctgtgctcacagctctgctgcctgctgccccctcaccagcctctcctcaccccagagcggccacccctcatgccttgtctgttcccaagccctttttgggactgtcaccagccctggctcccctgctgacccaggaagggagcatagcccctgtctctgcttctatggggcacccctatgacagcccaccctcctcagtaccctgcccgctgttaggactcagtttacctccttggacagtatcttatccccggttgagttaggtagggctaatgcacaccctgggtgttggggcttcctggaattacaggaactactgagggacagggcaggaactcccctacctgccccaccccacaaggcccctcgtgggagtaggggtggaagtgtgtgcgtgagaggcagtttagaagggtagccggagcaccagctgggacccagagctgccaggccccagtcctggctctgccatttcctagcaacatgactttgtgcctcaacttccccrtctgagaagaatcatcgtgatgattcaaattgaagtgctcagtcacaatgatccattg

SEQ ID NO: 826620 - DNA, 597 bp, Homo sapiens
ggggtgcgatctggactcactgcagcttccgtctctcgggttcaagcaattctyctgcctcggcctcctaagtagctgggactacaggcatgtgcaccacacctggctaattcctggatttttagtagagatggggttttgctatgttggccaggctggtctcaaactcctgagctcgagtgatctgcctgcctctgcctcccaaagtgctgggattacaggtgtgagccaccaagcccagcccaaataaaattattaatctctctctctctctctctctctctctatatatatatatgtgtgtgtgtgtatatggcactcatctccttcttcctgtccttgcagacagctggttcctccatccagaatgccctcccctttattgcaaatgtccaccaaaggacaaccaagccctgccacttcttccaggaagccttccctgttcccttcagcaggagattgaccctccctcctcatggagtcaaaggacaagtcatgcttctctttcagcatttctttctttttatgttatctggtgatgtctctgtatttgtctttgacctccaatggactgcaatctctttgggacaggatgta

SEQ ID NO: 826621 - DNA, 638 bp, Homo sapiens
tttttgtttgtttgtttgtttgtttgttttgtttgtttgtttgagacggaatttcgctctcattgcccaggctggagtgcaatggcgcaatctcggctcactgcaatctctgcctcccgggttcaagcgattctcctgcctcagcctccccagtagctgggattacaggccggcgccaccatgcctggctaattgtttttgtatttttagtagagacggagtttctccatgttggtcaggctggtctcaaactcccaacctcaggtgatccgcccgcctcggcctcccaaagtgctgggattacaggtgtgagccaccgtgcccagccatccatgggccttctttagctgtataaaaatgaagcagcagaagggcatgtggaccaagggtttctgaaacgtcatgagagtaggatggagtctccctctgggttgtcttggggcacaacctcttctgccccggctggccctgggcttgggcactttctttctttacccccagggtgggagccatggtccatcaccctggggctgtttgcctttatcaagatgcccagctccatggtggctctgcccmctggagccatgtgtctatgaaaggcagggctgtaagtcagcgttcaggtgaggagagaggat

SEQ ID NO: 826622 - DNA, 639 bp, Homo sapiens
cctcccatgcccggtcctggggccatgtcctgggctctgggtcaccactgccaattgggcaggctggcctcaggaagcgtgctggccacccactsgcatccggccatgtgcatccacaggccacagtgggaggacagcagggggagagtctcatgtgcccctcgctctgcattctcctgtcaaggaaggggaggtttcagaccagtgcttctctccacagagatcttatccacataatggtccagagagaagcatggtcacatcccccactgggccaagggatgaaggtttcaggggacaaaccctgtcctacccacaggacccctggcaaggcctttcagatatcaggggtcagatatcaagggtcagcctatgcttctggataagcgagttgcagaataatttctgtttatctgcctagaaggtgatgctgagaggtgacttacaccgcaaagtcccgaatcagtgagaggaagggtgaggaggaggggggagtctgggatccatgcccagttccttcatgagctgctcataccctttatctttgtctctgaaaaccagggaccctctttcttgcccttcctaccctctgagggcactagggatgcattgagggaaaggtgagacttgagaccaagg

SEQ ID NO: 826623 - DNA, 639 bp, Homo sapiens
cctcccatgcccggtcctggggccatgtcctgggctctgggtcaccactgccaattgggcaggctggcctcaggaagcgtgctggccacccactcscatccggccatgtgcatccacaggccacagtgggaggacagcagggggagagtctcatgtgcccctcgctctgcattctcctgtcaaggaaggggaggtttcagaccagtgcttctctccacagagatcttatccacataatggtccagagagaagcatggtcacatcccccactgggccaagggatgaaggtttcaggggacaaaccctgtcctacccacaggacccctggcaaggcctttcagatatcaggggtcagatatcaagggtcagcctatgcttctggataagcgagttgcagaataatttctgtttatctgcctagaaggtgatgctgagaggtgacttacaccgcaaagtcccgaatcagtgagaggaagggtgaggaggaggggggagtctgggatccatgcccagttccttcatgagctgctcataccctttatctttgtctctgaaaaccagggaccctctttcttgcccttcctaccctctgagggcactagggatgcattgagggaaaggtgagacttgagaccaagg

SEQ ID NO: 826624 - DNA, 658 bp, Homo sapiens
gcctagcacacggtaagggcttggtgagggttagttgttatttgaggatgataaacacatgtattccgagcttccacaaagcaaattgtatttttctcttacttgctcttccrtgacccaagtcgtcactactgagggggagaagggtggagagaaagctggaaaaacctatgcttcattagtgattaagcatcactatagctgcccaaagggcctgtgaagctgccagagaagctggtgtgagcacaaaagggtccagggatgaggattagcaagcaagggaggggcgggagtttgaatcagcagctcagttcatgactcaggagacggttggagcatctgtttctgtagagtgctcaggggcagcctgtgtaggaaaaacagctcctctcccttcttcagaatgaaactctgtggagccctgatgtaatttgggagcctggagggcagggcccaggaagggcctcatgtgccttcttggcatctttgacaacttccgttctgaccccgccattatctagaggccgtatcacaccctataaccgtcccctctccctgggcagattatgtgtcctacttctgtcagccctcaggggggttcatctgcagcacactccttcatgcagacttcacttggccagggttccggtttctggaa

SEQ ID NO: 826625 - DNA, 572 bp, Homo sapiens
tctctcaaccctgccgcttagcccttcttgcctcctggcctctcctgtaacatgtggggttggttggatcagatgagctttagtgctgtaagtgatataactctgcatttttccagggagaaggagaagcagtggcctttaatcctggtactgcattctagatgatcccaaccccataatgcccttcctgaaatagagccacagggaagaagcccagcccagccccacctgtggggctatctcagctgttggaagaagctgctctgaggaactgacatagatcattccaaaaggagtcaaaacccccagtccctttaatttgtagatacctttgggtggtatggtcatttcaacaatattaattcttccaacccatgagcatgagatgtctttcttttttgtatgtgtcctcttcaatttctttcatcagtgttttatagtcttcattgtagagaactttcatttccttattaaatttgctcctaagtatttttttrtagcaattgtaaatgagattgctttcttgatttctttttcagctagtttgtaattggtgtatagaaatgctactg

SEQ ID NO: 826626 - DNA, 579 bp, Homo sapiens
catcatacagaaaaatcaactcaaaatctattaaagacttacatgtaagacccattactataaaactactagaagaaaacataggggaaatactgcagcrtattgatctaggtgaagattttatggggaagacttcaaaagcacagacaacaaaaacaaaaatagacgaatgggactatatcaaactaaaaagttctacacaacaatggaatcaacagagtgaagacacaatctataaaattgaagaaaacatttgcaaaatattcatgggacaagggactaatatccagaatatataaggcactcaacaacaacaacaacaaaaacacataatcccattaaaaactgggcaaacgatctgaacagacatttctctaaagaagatacacaaatgaccaataaacatatataaaaatgttcaacatcactaatcaccagggatttgcaaatcaaaaccacaatgagatgtcatctcaccccagttaaaatggttattataaaaaaataacaaatgctgatgaggatgcagagaaaaaggaactcttacaagctgtgggtgggaatgtaaatgatgacagc

SEQ ID NO: 826627 - DNA, 576 bp, Homo sapiens
tgtttttaatttgcatttccataatggctaatgttatttaacagctatttgtatgcttatttgccayaattatatcctctttggtaaaaagtctgttcaagttctttgcccatttttaaaattgggttgtttgtttttatgtggttgaaaattgacagttctttatgtattttggatacaaacctttgttgaatatataatatgtaaacattttctgtgtatgcctcagattttcattcatttccttttttcttctctttttttttctgaggcaggatcttactttgtcacccaggctgaactacagtggcacaatcacagctcactgtaacctctaatttctgggcttaaacaatcctcctgcctctgcctcctaagtagcttggactacaggcaaattctttaaacttttttgtgtagagatggtggtctcactatgttgcctaacctgatctcaaactcctggttttaagtgctctcctggcttggcctcccaaagcactgggattacaggcataagccaccatgcctagccagattttcattattttagcaatgctttacaaagagcagagg

SEQ ID NO: 826628 - DNA, 589 bp, Homo sapiens
cccacatacataaaatcagccctccatatactcaagtttgcatcccaaraagtgcggtattttcaatccacatttgcttgtaaatgcagagcctgtggatacagagggctgactacattcattgaaagcaatctttgtataagtgcagttcaaaccccacgttgttcgagggtcaactgtatataaatatacaaaaggagacttattatgagagtgggttcacacagttaggaaagctgagaagtcccacactctgccatctgcaggctggagaacgaggagagctggtagtgtaattcagttttaagtccaaaggcctgagaatcaggggtgctgagggccaaaggcagaagatggatgtcctagctcaagacagaaagagcaaattcactcttcctctgcctttttgttctactggagccctcagtggactgcatgatgcccgcccacactggtgagggtgattttttctttactcagtccaccaattcagttgctaacctcctgcagaaacagcctcatagacactccttgaaagaatattttaccaactatctgggcatcccttagtctcatcaactagtcacat

SEQ ID NO: 826629 - DNA, 620 bp, Homo sapiens
gcagtgaggccatacaagctcctcctgattttaccacgtgtcaagacagcacataataccaattggagccttaaaccacacttaagctttccagatataactatagatttaactgcatacacaaaggggtgcatttgagaaaggctttgccaaattatattcagagcaggctagaattgaagagaaaaccaatatctttcaagctgttgctacgatgcataaaaccaatatccttgcaaaatgtccgtatttcatcagcatttcgtctacagcaggaagaaaattggcctcgaattcacagtacagctgcagcagtagggttcaattggacaatcattaaccaagctttcatggcctgtgtctgggtgagcagagggcccgaaacaatcaggcaggcctgaccaggatgggctcagtgaggatcactatcctgggcaccaaggctaaaatctgttacctaatctgctgccacactccacctcccagtggggagcagaaacggtcagtatagaatgagagccacatcacgattatttatggatctcaamggaacagggcccagcaaaaatgagcaaaataatgtttcagcaagtactggcttcttaaaacgagccagtcaa

SEQ ID NO: 826630 - DNA, 573 bp, Homo sapiens
gacacaaatattggagagggaaatgatccaacatttgtgtcaytggagttccagaaaaagagaaatagaatggggctaaaaaaaatattcaaagaaacaatggataaaaaatactcaaatttgccaaaaggcataaatctagagatccaagaagctgaattaatcccaaataggttaaatccaaagaatgttaggtaaagacacatcataatcaaactcttaaaaactgaagaaaaattattaagagtagcaaagaaatgtcaccttgcctatatagaaaaaacaaattgaatgacaatggatttctcatccaaaccatggaggcaaggaggaagtagcacagcattttttaatgctgaatggaaataatagtcaacccagaattctatacccaatgagagtatcatttaagaataaaggagaaatccattctcggacaaagaagaacaaagagaatttgtcactagcagatgtcccctaaaatgatggctaatggaatttcttgaaatagaaaatgatgagaagaaatttttaacaaaagaaataaagaaaaaatacaaaaagtgaaaatat

SEQ ID NO: 826631 - DNA, 573 bp, Homo sapiens
gacacaaatattggagagggaaatgatccaacatttgtgtcactgragttccagaaaaagagaaatagaatggggctaaaaaaaatattcaaagaaacaatggataaaaaatactcaaatttgccaaaaggcataaatctagagatccaagaagctgaattaatcccaaataggttaaatccaaagaatgttaggtaaagacacatcataatcaaactcttaaaaactgaagaaaaattattaagagtagcaaagaaatgtcaccttgcctatatagaaaaaacaaattgaatgacaatggatttctcatccaaaccatggaggcaaggaggaagtagcacagcattttttaatgctgaatggaaataatagtcaacccagaattctatacccaatgagagtatcatttaagaataaaggagaaatccattctcggacaaagaagaacaaagagaatttgtcactagcagatgtcccctaaaatgatggctaatggaatttcttgaaatagaaaatgatgagaagaaatttttaacaaaagaaataaagaaaaaatacaaaaagtgaaaatat

SEQ ID NO: 826632 - DNA, 551 bp, Homo sapiens
cagaaaaagatattatcacaaaatgagcagaaaattaaaaaaaaaaaaaaaagagaaagtgggaaagtttaatgaccttaaaggaagtacaaagaaaaataattcacagacagaaagggtgccaggcctggtgagaagacacaaccagagagacctgtagcaagaataatgctaagccaaagaaaaaggaagtctgtcctccggtctgcagccttatgctagtgaaggagccaccgttaccaatagaaagaagcagaaattggcagcctctgaggtaatgagggacaggggccagactccgtgaactgtcacatgtgtggcctggggcaagctgttccaattgctctgtgcccctttcctaacatgtcaaatgcaaggctgaggaacttcacatgtgcccaggaagcacggtgctctgggacactcacggggctgcgctatacacacacacaaaagaggagggagtcagggacccarctgggccaaagaggactttgggaatcgttaattaaaatctctatcttgggtacagtttgaaattttcatgacaa

SEQ ID NO: 826633 - DNA, 556 bp, Homo sapiens
cctggattaatcaaaatatatttttatctcccaatcttccggctgaagcttagagtgctgttctttgcctgctgggtgaggttgccatagaaacccattcaggagaagcagtgtctctctataatattgcgactgcaagcagggactgaaacagaccagccactcccagataagaatgaggagggtctggaactctgaaagtgctacatcccctctactccaaattttctgtgccctgatgtgtgaagtgttccccaaacagatcagtgtcccagcacacacaagaaaatatcctttggtccctcaagtctcatcttcattggcccctccttgagggatggctgggaagcccagatgactatcaggagcactggtggaagcactagagtgctctggagcaggctggcgttggttcacaagacctatgtgtgtatttctccccaattctatgttcaggggcatcacattagagcttgaaattagccctgatgagagaacrtatgccatagaaattgataaagcctacagatcaaggtcttgtcttttcttttaaaga

SEQ ID NO: 826634 - DNA, 515 bp, Homo sapiens
agttaagttcagtcaaaagccaagtcacattgttttcattacatcctatactccatataaagtatattttacaaagaaaaatatatattttttctattgttttagatygtattgattatagggaagaacaaagagctagaggctattttttctaggcctttctatctcatctttcttacctagaaaattttgcatgggacattttcttggtacagcaatcaagcctgctaagatacctcagagtatatttacagccttccaaattcaacatatctttgggagcaaaaatgacttggaatataatcatctcttgtttaggggagagatgagacatgtttatatttttttatttgtttatcttattctggaaaaactctatcttttccctaaacgtaaatgctattagacacagtaaaacacaatgattgacttatttgaacataaatgctaaaaattagaatgtatttgtcatcattaacttaacagtatttgtctctgtaattctcagtgctcac

SEQ ID NO: 826635 - DNA, 632 bp, Homo sapiens
tgtttaggatagtggcctctagctgcatccatattcctgcaaaagacattacttcattctttttatggctgcatagcattccatggtatatatgtgccacattttctttatccagttcactgatgaktggcttctgagttgattctatgtttttgctattgtgaatattactgtgatagacatatgggcaaatgtgtcttcttggtagaaaaatttcttttctcttgggcatatacccagtaatggggttgatggatcaaatggtaattatatttttagttctttgagaaatctccaagctgctttccacagtggctgaactaatttgcattcccacccacagggtattattgttcccttttctccgcagtcactccgacatctgtgggtttttgtctttgtttttctttttcttttcagtaatagccattcttactggtgtgagctggtatctcgttgttgtgatttgcatttccctgatgattatagatgatgagtattttttcatatgtttgttggctacttttatgtcatcttttgagaactgtctgttcatgtctttgcctagtttttaatgaggttatttgttttttatttgttaaattatttgagttctttatcaattattgata

SEQ ID NO: 826636 - DNA, 598 bp, Homo sapiens
atatcaatgagtttgagatagaaaacaagatatgagatatgaggggtaacatggaaccagactcatattgcttttaagactttcagaagcagtaagaatgtttaagaagggggaaaaactatttatcttatattttagcaattacttttgctattgtgttgagagtgaactcctcagggataaatatatttctagaaatctgtaagtacatctgaaaatatatagaaaaacacattatcaatgttagattctcactcagaggaaagacttccaatataaagcaaaaaacccacatactattgcaataaaattgacattatttgattacataatcaaaagataaacataaaattacttctgctataaaaatgattacagaacaattatgaaaattgaggaaattttgcaatataaataataaattgttgatatttgatttatgatttaatacaaaataatagtaacagaatagaaaagttggacaaatgatayattagatagtcaaaaatgtgaaaaaaaaagatcattatatactagatgataatttagtactatcattcaaagtatgaaatctgtttatatacttaatgagaaatgg

SEQ ID NO: 826637 - DNA, 632 bp, Homo sapiens
tgtgtggcattgttgtaagttctttatacatattacctcatgaaattctcataacaacgttgtgaagcacatgccrttattatcttcacctttaagatgagcatactgaagctcagaaagttaatcacttcattagtgccaccatctatttgaggtagaattagaacctgtgcagtctagctcaagagcctacaatgggtttcaagtactgaaaagatcactggcctaccagtcaaggagcatggatttggatttgtgtcccagctccatcatgagtgaacccttgggggaaatcctttcacctcaactctgtttcctcatgtaaaaggagggcatttgtttctccatagtcctgagggactacttgcactaacattttaggttcatcaatgaaaggggctgagcaagtgtgctacttctcattcatcagttgttgaggataaccttagactttagtagttatgttattccacagcctctgggattgtacccagaagatgctcaccttctgcaatttaatataccatcatttcccaacacatcaggtgcttttacatctttgtgggacaaagctccatacaccagtgcatattgacatttgaaacctatttatagagatattatatgaccct

SEQ ID NO: 826638 - DNA, 568 bp, Homo sapiens
gcatcaccacataatcaagaaaaatgcatttaaacatgttcaaacacatccaaatatrgtaaaaaaaaactttatgcaatattatttccctgaatcttttttagaggaataaacaaaaacaaaaaagtaaattagaaggcaaattttatcacctaagagatgactgaggatctcacaataagggactgacaattcacactgactacacttaacagctacgaatttaagtttcagttttttaaccattgcttcaaaaaagtatcaggccctgaaaatttactctcatgttctataatcctagagtacagataattactaagcttttaaaattactccaagatatatgaaatgtgaaagtattctaatgtattttagcaacctatcacaagcttggtactttataaacaaataaaaaagtagtctcatgaatatcaacaaaaaatttcatttattatgaaataatagctctgtatttaagaaaactacacagccaagtaggactattctaagaacaaaaggatatttttagactgctcatcacattaaaagctcacatgactttcttatt

SEQ ID NO: 826639 - DNA, 617 bp, Homo sapiens
atgtcaaattaaggagatatatattaaaactacataaatggctatggatatgaaaatgtgtaaaatatagtatagtcagacaactaagtctatatttgtaaaaaacacatgtttatgtaaaacacactctactgaaacataaaataaaaggctatagattccatgtctctctcttgtaatctttctgtctctctgcctttctctttctctgtctcctccttccctcgctaggctcaggtgacagcagaggcctctttctttcagtggaaattgtggtagcctggaagatacacagtggatgcaagggatgcaagctcaagtttcgtgagaagaggcagttaacagtaggattccctgtaacactcattggggaagcacaacgggttgtgggttcattgtaaggccagttctgcagtgcagtttgggtcactgttcttggaagcccagacttggtgcagtaggaagatgctaggccttccaattactttgtgaaccttccarcaacctgtttaaaaaacatacttctgctcaaacagctgagacagccaaataaaaacagcttcttcgcaaatcctcccactggcctgcacacagtggggggtgtgtactggggtaga

SEQ ID NO: 826640 - DNA, 529 bp, Homo sapiens
atgaggtaaattacaagtgagcctagaggtggayagagtccccttagatagggataaaaaatatatctctgtggaggaaatatttcagatgatactaaatctcagttaaattgtttcattaataaaaccagctgctccaggaaaaatctggaggccaaattaaatatattcccaccatcaaactcagcgttcaatctccacataacaatattatctccaaaatatttctcaaatctattaatcgtcttaatttcactaccactaccctagatttcagcactgtatttgttacaggtagttagacaggcataagcagggcaggagagggctctcccccattcactaggaatgttgggtgatggtttgaccattccctcatggtccatacctgttgcactgaagtgttaattgaatgccgataccagagagagggaacttcctgggcatgcacattaagagacaaaatggtagagtatgaccttctgggggcacaccactggaaaagagaagaaagctttcgatgggcatg

SEQ ID NO: 826641 - DNA, 529 bp, Homo sapiens
atgaggtaaattacaagtgagcctagaggtggatagagtccccttagatagggataaaaaatatatctctgtggaggaaatatttcagatgatactaaatctcagttaaattrtttcattaataaaaccagctgctccaggaaaaatctggaggccaaattaaatatattcccaccatcaaactcagcgttcaatctccacataacaatattatctccaaaatatttctcaaatctattaatcgtcttaatttcactaccactaccctagatttcagcactgtatttgttacaggtagttagacaggcataagcagggcaggagagggctctcccccattcactaggaatgttgggtgatggtttgaccattccctcatggtccatacctgttgcactgaagtgttaattgaatgccgataccagagagagggaacttcctgggcatgcacattaagagacaaaatggtagagtatgaccttctgggggcacaccactggaaaagagaagaaagctttcgatgggcatg

SEQ ID NO: 826642 - DNA, 496 bp, Homo sapiens
ttgatctatcaaaggatgtacaagatctctatgttaaaaactatgkaatattgaggaaaaaatttaaagagaaatagtgagctataccatgttcataaataaaagcttcaaatttttactatgcaaactatccatgcattgatctctagtttcaatgtaataataaaaatttcagcaagttttgaatattgttaatgtaattctaaactttacataaaaacaaatttaatagaatagccaagacagttttgaagaaggaaaccaaattggacatcttacactaccatgtgtcaataattactacaaggatattttaattaagatagtacggatatgatgctgtaaaagacaaaaagactaattggaatagaacccagaaacagactcacatatatatggtcacctggtttataataaatatacttctgaaattcagtaaagaaagattacatgatgccagttcaaattggatatccatacaaaaaaagaaaacctt

SEQ ID NO: 826643 - DNA, 628 bp, Homo sapiens
taaagagatctgctcttctaccttgcttctactccttaccacctgagtacttgagaaattcgtgtaaattctctgagacacagttataattcatatttcttggggttgtaagtgctagttaagtatgtatttgaatgttcctagcatattacatggcacatagaaagtgataatacaagattcacttggcattatgcatatatgttcaatgaatcttaattctcattttgattgtgcagacttcaaacatcccatatttctttttttttttttttttttgagatggagtctcactctgtcacccaggctggagtgcagtggtgcgatctcagctcgctgcaacctctgcctccccgattcaagcgattctcctgcctcagcctcccgagtagctgggactacgggcacgtgccatcacgcctggctaattttttttgtattgttagtagagacagggtttcactgtgttagccaggatggtcttgatcacctgacctcgcaatctgcctgcctcggcctcccaaagtgctgggattacagkcctgacccaccgcgcctggcctcatatttctttttagtctcagttttgatgattttattgcacttttagatgcttcagagaatagat

SEQ ID NO: 826644 - DNA, 593 bp, Homo sapiens
aaaatgatgagttcatgtcctttgtaggaacatggatgaaactggaaatcatcattctcagtaaactattgcaaggacaaaaaaccaaacaccgcatgttctcactcataggtrggaattgaacaatgagaacacatggacacaggagggggaacatcacactctggggactgtcgtggggtggggggagtggggcgggatagcattaggagataaacctaatgctaaatgtcaagttaattggtgcagcacaccagcatggcacatgtatacatatgtaactaacctgcacattgtgcacatgtaccctaaaacttaaagtataataataataaaataaaataaaataaaataaaataaaataaaataaaataaaataaagaaaaaagaacatttattggttcacataactaaaaattcctgggttaggtttttgtatttggtgggtccaggcactcaacccatgtcattgggaatctgtgttctcttcatcctcctcccggcaggacctcctttgaatggtttccttttcaggtagattatcctcatgcagtagaaaatgcccatgagcagctacagacttagggcttagc

SEQ ID NO: 826645 - DNA, 540 bp, Homo sapiens
gagtggaaatcaaagagggatctcagagactgcacatctattactccctttttttttttttttttttttttccttttcaggggagaaggagtggtggtgaaagagggatggatgcatgcttgcctcggtcgagcaaaaacaaaacttcattgtcttgaaaaaattagcatgcacctccttccacacatcactgtggtaagaagaacacaatgaggataaagtggccagggttgaaaagcccttcagagaagatcacaggagaaatgctggcagaggaactgtgaggcatctttgggactctggtgagacattcttgtccctcagagtagaaaaaggagggctctgaggcagaagggcttgagtgaccttaagcaaatcatttcaccttcaagtatcaggtccttgaaccataaaatggagatgataatgcccatattgtggtgtgtcaaaacagttayacaaaatgaccagcacatagaagcagcctgatagaccctgggtttctacccacttccatttattcacttactttgatagtaa

SEQ ID NO: 826646 - DNA, 615 bp, Homo sapiens
ttttgctaaatcaggccaagcccactcccacatcaatggttcttcatttgctatatttttggccgagaatactcatccccagatgctcctcacmtgctcgggatttaactcaaatgtcattccagtgaagccttccccagtgccctagtcagtatgacagcttccacccatgtgggagcctccatgtgctccgtctctgaattattgtatttcattgcacttagcatcatctaatcattgtgtattttaattatttttcactgtctgactccgctttgcttcttttgcttctttttttttttttttttttttttttttttgagatagagtctcgctctgtctcccaggctgcagtacagtggcgcaatctctgctcactgtaacctccacctcccaggttcaagcgattctctgcctcagcctcccaagtagctgggattacaagcgcatgccaccatgcccagctaatttttgtatctttagtagagacagaatttcaccatgttggccaggctggtctcgaactcctatcctcagatgatctgcccacctcagctgcccaaagtgctgggactacagacataagccaccatgccagaccatccctttgcttct

SEQ ID NO: 826647 - DNA, 649 bp, Homo sapiens
tttttgcccaaagccccatcgtagtggggactacctggaattttaggatccctcctcacactracaggcctaacaaaagctattcctgaagctaggatatggggagcctcagaaattgtatccttcctattcatataagttaggacaaaagatgtcactcttccaaccctggagaccccttccctccttcagggtatggccctccacttcatttttggggcataacatctttataggacaggggtaaagtcccaatactaacaggagaatgcttagaactctaacaggtttttgagaatgcgtcggtaagggccactaaatccgatttttctcggtcggtcctccttgtggtctaggaggacaggcaagggtgcaggttttcgagaatgcgtcggcaaggaccactaaatccgaccttcctcggtcctccatgtggtctgggaggaaaactagtgtttctgctgccgcgtcggtaagcgcaactattccgatcagcagggtccagggaccgttgcgggttcttgggcaggggttgtttctgctgctgcgtcagtgagcgcaactattccgatcaacagggtccagggactgttgcgggttcttgggcagggggagaaacaaaacaaaccaaaaccgtgggtggttttgt

SEQ ID NO: 826648 - DNA, 589 bp, Homo sapiens
ccagtaatttttcttaataggtggaatcagtttcactaatgctatctaaataactcttcttttcaaacttatttatgataccactgctagtacatactgagttccaagataggcatggatttgttttatatttttattttattttatttttcatttttaaagcatgggttggttgtatgtgatagagactggctagatatcacaaactcatttcctcttctcagacacagagctaaactgtttctcagtcttcttgcatccaaatggggcagaaatgaagtgtgtcacttccaggcctgggcagccgggaacaagtgtgtcttcaccttgttctctctctctctctctctctccttttcaaagacaccttgcaaacatatgaatctgggttgaatgggctcagttctcactcagggagataaccagaacaaactataaatatagtctctgagtccaggggtcagttaatcaagattcctagattgaagctygaagcatattttcctgatttgtggttttaatatctctgtttatggcagaaggcatttcagcaaactcctcaagtgctccctacatcaggcatgagggg

SEQ ID NO: 826649 - DNA, 505 bp, Homo sapiens
aggagttcaagatcagcctgggcaatagcaagaccccatccgttctaaaaataaaaataaataaaaaataaaaattagctgagcatggtagtggacaccttggggttccagccacgtggcmggctgaggtaggaggatggctttgaatcagggaggttgaggctgcagtgagccatgttctgaattagatactggtgatgatcgtgcaaccttcccaatataggaaaaaccactgaacagtacattttcaaagggtaaatttagccggacacggtggctcatgtctgtaatcccagtacttttggagtccgaggcgggcagatcacctgaggctgggagttcaagaccagcctgaccaacatggagaaaccccgtctctactaaaaatacaaaaaattagccaggtatggtggcgcatgcctgtaatcccagctactccagaggttgaggcaggagaattgcttgaacccgggaggcagaggttgtggtgagccgacatcacacc

SEQ ID NO: 826650 - DNA, 605 bp, Homo sapiens
taggaggtttgttttacggggaccttgggtaagcaactcttggtattaccctcccaaatagtcataataatagtctctctcgtgcactgtattctctcaaaggttttaaatgcttgcatgcagccatctctagaatgtcatatggtctctcttcaactgaaatgacaagagctgaaagaaatgtgtgaccatgaggacaccgtaacctatgaatgacgtgctgagaccagaaacccaaaataatggtaactgagagtgatactaaggccctaaattttggtcacactctcacctaagtgagaacctgaccaaaaagggggaattttttaaacaaaattctgggaggccatcgttttggactaatctcatgcactaggccccaagagaccaaaccaaactaaaatggagtcgttcatgctaaggctttaaggaaacatgtagatcctagaatagaccaggttttgttttatckcctgcaaactctgtaacaaacattcctgacagcataggtacccaccctctgaagcccccattaaatattttaatccaattcatttcctctcgcctagagaccatcaaacttaagatgatcaggcaacaaaggt

SEQ ID NO: 826651 - DNA, 571 bp, Homo sapiens
atctaaataagtttataaagttggattggaatatattatgtattataatgagagctggagaatggaagaaatgggaatggggatggagaaagaaaaaaaattataaataatttttctctttcccttgcaaagcaaaataaatgacaatgtgctataaaccgagctgtgttattagcctaattgtgagtttaaaataaaagtcttctggcttataagcacagtccataatgttttattttacctttttctgagagagtctcactccatcatccaggatggtgtgcagtggctcaatctcaattcactgcaacttctgcctcccagcctcaagtgattctcatgcctcagcctcccaagtaactggaattacaggtgcaggccaccatgcctggctaaattttgtatttttagtaaagacagggtttcgccatgttgactaggctggtctccaactcctgacctcaagtgatcctcccatctcagcttcccaaagtgctgggattacaggcgtgagtcaccgtgccyagtctatttttattttttaaataagaattacaaaactgactttttg

SEQ ID NO: 826652 - DNA, 509 bp, Homo sapiens
gggttaatcatattacttctctgcttaaaagcctcaatgaatctgctgcctacagaatgaagtcccaagcaggccagatgtgatggctcatgcccataatccragcactttgggaggcaaagcggagtagatggcttgagccctggagttcaagactggcctggacaacaaagtgatatcctgtctatataaaaaacaaacaaacagcatgaagtcccaacatttatgcatttcttataaggctctttattgtggggaaaggactccctattcagcaaatggtattgggataactggctgccatttgcagaagaacaaaactgggctcctactttcaccacatgcaaaaattaactcaaggtggattaaagatttaaatgcaagacttcaaattataagaatcctagaagaaaacctacgaaacactattctggaccttggccttgggaaagaatttacgatttagtccttaaaaccaattacaacaaaaacagaatatgacaaatagg

SEQ ID NO: 826653 - DNA, 614 bp, Homo sapiens
acttgtctaaggagtttacccatatttttgcttttaattctcacattgaatctacgagaagtatctcccctatttttgagataacgaaacggaggcrtggagaaactaagaaacttggccaagaacactagcccaaagaggagcaagatttgaaccaaagcaccctgcatctagagggagtgagcataatttacattggtctgccaccaggtaggaaattctgggtgtgcatcccaacttccccagcaaatcactaaaaaacatatttctactggacaaatacaaattcccaaggaggagaatgcaaaattttcatcattttataaaataaaaaaccatgaaacaatttcaagccttctaggtggctgctttttggtgtctctagatttccccagctgatatttcagtggaaaattttagggagctctatatgaaagtgttcttcttaataaagcagttaagtgaaggcagaaataaataaaatgtgacttagtcacgtggaagatagcagataactaaagagatggtatgtcaagcagagttatgccttcaattgaaaagaaattctattttacctatgagttcaatttacattttctaatttgccttcagta

SEQ ID NO: 826654 - DNA, 622 bp, Homo sapiens
tttattgattttggtacaaacttatttggcagacaatatgatatcaacgatgtgagaatattttagagactataccagttgttaataatayttataagtttcattgaaagaatattaatgggtttgattatgagttatttccctagatcctatgagattattatggaagatatattttaaaactggctggccttcagagttttagataatatatcttcagacctgtgatgatattttaataactaattttttaaaacttaaaaagtcttacttggatacattggctaatcataacttcagtgtccctatttcaaatttgaatgctgatggcaatggcattattttgaacaaagttgaggactgtatttcctgcttctaaaattcttcaaaggatcactgccatttttttttgtctttcgtgttttaaaaataaacaagagaaatacaactactttgaaaacaagaaatttaggttcctagtctttcatctgaggccttaggtatgtaatttactgttggactgagtgttatgtctaaagccagtccctgtcaggaagattgattagaagtcttcccaacaggcaatatggggactgaaggaatttgttaaatatgcaaccct

SEQ ID NO: 826655 - DNA, 762 bp, Homo sapiens
aaaaggaatctaaggaaaaacaaaaagataaataaagacygcaatatcttaaaaccgctcattttatattgttgcaatgaagaaattaggttaaaagtgctagactagaatgctagagaactgggtttgatcctcagctctaccacaaagtagagcattttgaacaattgtgatccttaaccaactttatgccttgttgcctcctaagtaatctggagctaatagaccttccctgtcataaggttgttgggaagattaagtgagataatgttcattgcagtttctggaaacctgaaaagtgtgatgcaaatataaaggattgttactaccactcaggtcctttgttactggagagtttataaagccttcccatagtgtttcattccacccaaactatgagaatccctattttcatttctgtctgatggctgtcagaaaattcacagaagccattgttgcctgaataagggaatcacagaccaaatatataatagctcactaagatttattttaaatgtctgatcataaaaaggagaagggaaataattcaaagcgttgtgttatatgccaagtggccaaaatggagcagttttttttcagcttagcaacaaactgctattttccttggtttctaggacacaaatacttctgttctaaatgtttagaactccaatttgcacatgtaatttaggggaatgtgaccaactggtttagtaatatttttagttttttccccaaatgaaataatgaaaatgaggatat

SEQ ID NO: 826656 - DNA, 575 bp, Homo sapiens
agagccaaccaaactcaaaattataagaagaaaagcaatcataaakgtcagagcaggcataaatgaaattgcaataaaataaaatcaaaaagatcaatgaaaaaaagatttttttgaaatattaaacaaaattaacaagcctttagccagcctaaaaaaaaagagagaagattcaaataaataaaatcagaaatgaaaatgagacattgtaactaattcagtggaaattcaaaggatcattagtggctaccaggagcaagtatatgccaataaattggaaaatttagaagaaatggacaaagtcctagatacatacgacctaccaagattgaactaggaaaaaatccaaaacctgaacagatcaataacaagtaatgagattgaaaccataatttaaaaaagggcccaggatctgatggcttcactgctgaattctaccaaacatttaaagggaattaataacaatcctactcaaataattccaaaacagaggaggagagaatacttctacactcattctacaaggccagtattaccctgatagcacagtcagccaaatacacatcaaaaaataa

SEQ ID NO: 826657 - DNA, 577 bp, Homo sapiens
tttaatacctgataatttcccttcctctgaagtctccttttcagaattgatatatgtatgttctttcttttgattagtgctatcatggtatattttctmcattattttaattttaatctatctctgtctttatatttaaagtgagtattgtgtagaaaacatagagttggtctttcaagaaattcactctcacagtctctgtcttttagtttgtgtatttagactactattcacatttaaggtgattatcaatatagttggattaataactactatatttataactgttgtctattcattgccccaattctttcttttcttttttttttttgatctttcactctttttttctccttttctggttttgagttcctgtcatttttttttttccaaggcagaagaatttttcttagtacagaacaaaatgaaaagtctcccatgtctacttctttccacacagacacggcaaccatctgatttctcaatccgttccccacctttcccccctttctactccacaaaaccaccaccgtcatcatggcccgttctccatgagctgctgagcacacctcccaga

SEQ ID NO: 826658 - DNA, 598 bp, Homo sapiens
tagaaccatttcagaggagaaaggatgccaataatatcttgctgcaaaaaaaamgttcaatgttacctaacaagagcattccataactgacactaagctgataaataataatcttagaattttataatgcattcccattttcaaagtgctttcacagacctcatttgatcaacagtgagaatcataaaagcaatagttgaggctctatattaagagatttgacaaaagttatcagtttgagtgcctgaacaccataatccttcactcctcatcctattaagtgtgttttcctattctcctggttctattatttccacaaaggaaaatgttcaaccaaccagtaaccacatatttgccccccaacccagcacacaacacacaatttggcccacagtttttctgtatgggtgagaaataaattgttaggcatggaagaaaaggcaatctacaaactgacaaaatgaatctgaggttaatccacagatgcatgacccaaatcaaaaatgatgaaactaaacaagctgagcccttgttctataaccatagctattatacttctagggatccagcttagccccatgagacacatatttttatg

SEQ ID NO: 826659 - DNA, 613 bp, Homo sapiens
gcatgataagggtagttacagcagagaaattgcaaatgacaaatacatttctgaagacgttcacatcagtgataggggtagttacagcagagaaattgcaaatgacaaatacatttctgaagaccttcamgtcagtgatcagtggtggggtagttacagcagagaaattgcaaatgatgaatacatttctgaagacgttcacgccagtgatgggatagttacagcagaaaaattgaaaatgacgaatacatttctgaagatgttcatgtcagtagtcagagaaatgcagacacacaaaccaaaacagagaaaaaattaaaaacaaaaacaaaaaacaaaaccccccaaatgccaatttcaccagttggcagagttgaaatatatacataataccctgtggtggcaaacgtgagggggaaatgtcgttcttaaccaccattagtgggattgtaagttaagtttttgagaaataattcgtctgtatttaatgcaattaagcatgcataaacctttgactcaacaatcctacccctggaaattaaactgggatgttttcacagaatgtctaaaaacatacgagaaatgggtgctatggggaatatgttcccaacta

SEQ ID NO: 826660 - DNA, 574 bp, Homo sapiens
gcaggttcattgtgagtattcgacatttaataccatgaacccactttttagccagagagagcctactggcaagcatagagtcctgaagcatgttaatgatctaaagttaakgtttccaccttgcaatagcgtttaattctccatatatgtcatcaggaaatgttggcctttgagggtggattacactccttttaacagcaaaaagggcacatcaggtgggaggaggctcatgaagagcatccaggaagtgcggcctcttcaaggagaaaccctgtgtaaaaaaagaaaaaacaacaatcccaaagcactagttgtaagtgaagctgcaaggagcaggtgctgtttcttgggtcttatttgcactgcatattggtaaacagagtacttttgagttgcagcgattccaagtcattctcttggacttattttgttttcccagtgacagaaaaatattcacatccatatccagactcacaaatggaatccagaaatgtaccggagcctgaggaaaatgctctatggtaatagccaggcttccaatcgtgggaaagccaaacatttctttagcgcacga

SEQ ID NO: 826661 - DNA, 542 bp, Homo sapiens
acaacacaggcttgaactgtgttggttcacttatacatgaatttttttcaacccctgccgcccctgggaaagcaaaaccaacccctcctctttctctctttttcttccccagtctactcaatgtgaagacaataggatgaagatctttatgatgacccacttgcacttaatgaatagtaaatatgttttctcctctttatgatcttcttaacattttcttttctctatcttactgtgttgtaacaatacagtatataatacatataaaagaatatgtattgactatcaataaggcttccagtcaacagtaggctataagtagttaagttttgggagagtcaaaagttgcatgtggatttttcactgcacagagggtcagcatccctaactcccaaattgttcaaggatcaactgtattttaaattctcccttctaaaacaattgttttcatcaaagttgcaacaaagaaatagaatgactagttaagaaagaggtaaaaattartaagaaaagaggaaagaagcaaaatatagacaaaaaga

SEQ ID NO: 826662 - DNA, 536 bp, Homo sapiens
ttttctatattaaagatagcaaatctttgtcatatatattgtgaatagttttacccagttttctggttatcttttaatattattcatgatatattttgcagtgaagaaattttaagtttttgtgtagtaaaagctgttggtcttctcttttagggtttcttctttctctatcagacttagaaatacttcagtgacctcaaaaccataaagatacatttttaatctttatttccattgattatatttatagcttttatatttttaatgtttggaatattttggcatatgggaaaggtagggctcaaactttatttttttgaaatggttaaccaattttcctaatatcatttattgaataatccatcttgttgccccggtttaaaataccattgtcatatattaaatttccatatatatgtgtgtgtgtatgtccattttctactcattgttttgtttcattgacctattwgactatttctgtgactttttcatcactacattattttatcatccttagctttagtataatatatttc

SEQ ID NO: 826663 - DNA, 618 bp, Homo sapiens
acaaatgagttcgaattcctttggtttctgcctatagttaatcaagttctagaggcaagaaagtaatatagaatattttaggcagttgatctcaactgtgaaaataactagctttcaagaattgactaatgctagagaggatagctctgtggctgacaatactgaggttactttacatggggctagatttatacctaattatggagtagatcaagctcatctctggtgctttttattcccttcaacaccctcatcctgggaatcatgtgggcatacagtattttaggattttttttggtatcctgtgaaactttccccatctttttatacttgtattctttcaatgtgttaaggttctaatacactaattgatccccagatagtattgttacctctccacatcttcatttctttacccctaaactgtaagatattgcttaaattttaaaagagaacttcaagacaatgattatcttcttttaagacttgattcaaatattgcttcttctgtgaagtcttccctaacttgcccaggcaaaacaargttttactttccctaggctgtatttgcattttattttatgttgtacaaattatctgttgacatggatttctcac

SEQ ID NO: 826664 - DNA, 614 bp, Homo sapiens
gctataattaacttatcaagaatctttttgagttcaaataggtggatgtttttctgtgcaaagaacatagattttagctttcatatctttcaattctaatttgatatatactttaggattttgttttgttgtttcagttaaccagtgacaaagtggcatagagaataacttttggagaaacttagaaggtggggaagtcacaacaggctacagtaggctgtggttttctttctaaaggatacaggccatgtactgggtttttagggcccattaaggcagtggtaggtgaaaggggaggggtaggaaggtttctcagtgagcagtaaaggcatccctgatgtcaggcatgcataaaggtggtgggtagagggatcagcagacaggccagctgcaaaatgtgacatctacatccatctttgggaaagcattgtgttcattcatggtaaaaatgggggaaaattattgtggtagagacattgttaaaaaagtgatggaaacctaaagcatatattatagtttacatgtataaccatatagtattacaaatctggacagtcctccaaatccctataatctcttytttgagatgtagttgcagtttgattatttcctag

SEQ ID NO: 826665 - DNA, 605 bp, Homo sapiens
aatgagtggctgtgaacttttaagataatacactggaaaaagctttgaggggaaagtgtttgtttatacctatgactgagtgcagatatgttttcccttgcagacaattaagtgaaggtggaagtaagcatcattttattacatataaataatctgctaagaggccactctcagcctctggtacaaggtaacttgagataggagttgcctgcgagccagccttttaccttaaaatcctgttcaggatcctgccattcataccaactgggtgaataaggctatgaagtttcaccccacaaatcatagtcaaaacagttttagctgaaaacactcaatgcagaaaaaaacagctactggccacttttttttctctgtaatagggagacatattcagcttatccaaaatgaacacattttagaaaaagttaaaaataatattggagagcgtccttctgtctaatctccattaaaaytgttatgtgccctgtgcaaaagccatttatatggacagactcacacaggtttgcaggaaaatcattactctgtgtgtgtgtgtgtgtgtgtgtgtgtgtgtgtgtgtgtgtgtgcctgtattgaatttatac

SEQ ID NO: 826666 - DNA, 605 bp, Homo sapiens
aatgagtggctgtgaacttttaagataatacactggaaaaagctttgaggggaaagtgtttgtttatacctatgactgagtgcagatatgttttcccttgcagacaattaagtgaaggtggaagtaagcatcattttattacatataaataatctgctaagaggccactctcagcctctggtacaaggtaacttgagataggagttgcctgcgagccagccttttaccttaaaatcctgttcaggatcctgccattcataccaactgggtgaataaggctatgaagtttcaccccacaaatcatagtcaaaacagttttagctgaaaacactcaatgcagaaaaaaacagctactggccacttttttttctctgtaatagggagacatattcagcttatccaaaatgaacacattttagaaaaagttaaaaataatattggagagcgtccttctgtctaatctccattaaaattgttatgtgccctgtgcaaaagccatttatatggacagactcacacaggtttgcaggaaaatcattactctgtgtgtgtgtgtgtgtgtgtgygtgtgtgtgtgtgtgtgtgtgcctgtattgaatttatac

SEQ ID NO: 826667 - DNA, 656 bp, Homo sapiens
ctgaaagaagagatagacattgtatagagggtttgaatgagagttatagttacagttgggagtcagaaaatgaaatctaggagaaaactgctggtatcgttctggaaattaggaagctgagttgtagtaacggttttcaagtaccagcaaccttatgaggcagaaaattatagttagctcattttcacgtcaacagaggacaggacaagaagtttccgatgcagctttaaagaagccgagtcaattgcaaagaggaattttgtgattgggaagtatttttttttaccttggatggtttcgtagtagaacagtcaggccagatctgatgaacaggtgctgggatgagaatgggagagaatctccctccccaggtatcagaaggaagtgggagtcctctgtatgccacacgtgcctcctttgtcttgttgctgtgcccttggtttcttgttttttaatcttttatattcatttttctccctgacttgactgttggagtccaggcaatagacaacaattctgaaaaccctcaccttatcacttcctctgaggactttagagctkaatgaatgattctgattctcaaaaagaagagccaaattttttcatgactgctgtgaaagattatacaatatttctttagaggcctttacaagtag

SEQ ID NO: 826668 - DNA, 603 bp, Homo sapiens
atacctcatcttaatgtgttttgctttattgcacttcacacatactgcattttttataaactgaaaagttgtgaacaaccctgcatggagcaagtcaactggtgccatttttccaatagcatacactcacttcatgtctctgtgtcatattttggtaattctcacaacattttaaacttttcactattattacatctgttatggtgatctatcatcagtgatctttgatgttactactgtcattgttttgggtgccacaatctgtacccatataagatggcaaatttaattgttaaatgttgtgtgtgttctcagtgctctaccaaccagctattccctcatctccctctttttccttgggcctttctattccctgagatacaacaatattgaaatcaacccaattaattaccctacaatggcctctcagtgaaaggaagaggcacacatctctcacttcaaatcaaaagctagaaattattaagcttagtgaagaaggcatgtcaaaagcctagayaggccaaaagctaggccacttttgccaaacagccaagttgtgaatgcaaaggaaaaattcctgaaggaaattaaaagtgcttatct

SEQ ID NO: 826669 - DNA, 607 bp, Homo sapiens
gtgacagagttcctttgcatttctggcttatttgcctgcagcatgcaaggcagggagaaggggaaagaaaaggggttaaacactgggcccctctcagkcctgcacaatgttgctgctatagccatttccatttggcaatttgttaagaaaaatgaaaagtctcctcaaaattgccagctactaaaacagtaccagctgcaatttttgaattatcaatttttggttggaaggatagagggagattgctttttcatattctccaaacaggtttttctgtgaataaaggatgtgtgttaaaatagattactcggccgggaacagtggctcaagcctgtaatcccagcactttgggaggccgaggcgggtagatcatgaagtcaggagatcgagaccatcctggctaacacagtgaaaccccgtctctactaaaaatacaaaaaaaaaaaattagctgggcgtagtggccagcgcctgtagtctcagctacttgggaagctgaggcaggagaatggcgtgaacccaggaggtggagcctgcagtgagccaagattgcaacactgcactctagcctgggtgacagagcgagactccgcctcagaaaaaaaaa

SEQ ID NO: 826670 - DNA, 564 bp, Homo sapiens
aagagctgtccctctcaaccctccccatccccaagcctgcgagccaaaggctcacaggtacccagtgaaaggccaaagaatggatcaggagcctgaggctgcaggctgagatccagaatgaccctgaccacctgtgggccctctggccttcctgagcctcagtgtgctcacctgtaaaatggagacgattgtacctgttctttatttttagggctgtgacaatgaaaggagatgccaaagatctttgtaaactggagaatggttctacaaagtcttatgctcacaactgcttttagatttgatatttttgatctctctcttcccactttagctaaattaagcaaagactttcaggggaaggccctgctggaaagactctactgtttgaaagcaaattgtttccctcacccaggtctccatggattatgtacagaaaagcagtggactctgcctcctatttatctgggttttctctgctctattttgtttttattttcttctatttattgtattgtgtgtatcattrcaaactattgtaaatccattgtagaatgatgtggaata

SEQ ID NO: 826671 - DNA, 630 bp, Homo sapiens
atcggaactccttcccagctctcccttccaggaatctgtgyttctgcagccaagactccaggtgtcatgcgctccacacccttgggaatgaacccaccatgcagggctttgtgtgcccctgctccctgctctgacttcctcaggtcctgcttggagatcatgctgctgtccctgctaaaactctttagtgtcttcttgttggccctggggtgaaatcccaacgcctcccgatggcctccgaggtgcttgcaacctcatgctgcccaccctgccaccacactgtgctcacttttccctctagctcatgctactctagccaacactggcctctggttggttctagaacattccagatcctctccctctgagggccattgcacctgctgtgcccgtgtctggaacattctttacatggcttttcatgtagccagcaccttttcatccttctgctcttggtttcagtgttgtctctccagagggtcctttcctgatctcttatctaaagcagccccatcaccactattagcccccatcgcagtcctcctttggttttctgcctggtattcctattttgtttatgcgtctccttacttatttatctctaccttcaagaatgtgagccacaggagg

SEQ ID NO: 826672 - DNA, 610 bp, Homo sapiens
tcttgaattcactgcattggattcatttttttgttgttgttcatttgccgatttgtatccgcattcttccctgggctttcttcccacattcttaaaccaaaatgttgtttacttttgtcttttaaataaccaaaaccaagcaaaacaaaatctattcctatcatcgtcacaaatcttcagtaggaaaccttgaaactgattctggagtcagactgatttaggtcccagtctggtatctctaatttattagctgtgtggtcttaagctatgtaatctctttgtgtcttagttgtctgttccacaaaatggtcagattcatgagaccttctaagtctttttaagtactaaatgagagagtgcttattaaatattagcatgacacataggggttccataaacggtggccgtcatcattattctgtaattatcagtgtttcacatctcactggcatcaaatctcctgtttctcatctcattgctttttttttttccatttacaatctaatgttatcttctrttttcctcctggtaaagtaattgtccatttttcttagtcttttcttgacaacctggcctctcctttcataaaaggctctaataagcatttcct

SEQ ID NO: 826673 - DNA, 178 bp, Homo sapiens
tattgtgaatagtgctgcgatgaacatatgagtgcacatgtctttttggtaggatttattttcctttgggcatgtacccaataataggattgctgggtcaaattatagttctatttttagttctctgaggaatctccaatygagtttccatattggctgtactaatttacatcctctt

SEQ ID NO: 826674 - DNA, 607 bp, Homo sapiens
tatatattttatccagaaggtgaagatccaagcctttatactctttcctctaaaattatatgtatatataattatatattgaagggttggtaratttgtttagcaagagtcaatctttaaaagcctggttgatttgtttaggggcatcaacactaaagagtttctattcccaacagtgaggaccaaccccaggacttcagtgacctcatcactgaggagattctacttgagctgttaaccctttttccacttgatatcttacttttgtcttccaacaacaggcaagtacttccttctgaggcactgaattacatttttagacagaggtagttattagaaaatctttatctttcctctctatgtctacatattagcctgaattcagacctctagaacctaaaggagtatatgtaatctattttccacaagatgatcttgcagttatgtgaaaaataatcatcagatgctattaactgtcatcttcccattctctcattcattccttcacctattccttttctgtagaactcttcaattccagacacttcaagaacttgttatccagaagatcagaatcaaggttttcctttggggatatttcagtata

SEQ ID NO: 826675 - DNA, 525 bp, Homo sapiens
ctgttgggttctaccaaacaatttaaaaataaataatgtcaatcctactgaaattatttctaaaatgtgaggaggagggagtacttcctaactcattctatgaggctagtattatcctaataccaaaaccagatgaaaagacagcagaagaggaaaatgacaggccaatacctctgatgaacatgataaaaaaaatactcaacaaaatactagcaaacagaattcacaacacattaaaaagtacattcatcatcattgagagggattcattccagaaatgcaacagtggttcaacatatgcaaatcaataagtgtgatacatcataccaacagaatgaaggatgcaaaccatacaattatttcaaaagattcttaaaaaaaatctgataacattcaacatcccttcatggtaaaaaccctcaacaagtatgtatttgtcctcaaaatgaaaaatatctcaataagataagcgctrtatataacaaacccacagctagcatcacactgaatggggaaaacctgaaa

SEQ ID NO: 826676 - DNA, 601 bp, Homo sapiens
actttctcttagtattgaatatttttgttgcattagttttaacttgatgttggaatgttattcctgtagcagaaaatactacacagctgtcaactgtgttccttagtgcctagccagaaaaatatttggaggctatttcaaaagtccttcttcatttatgtggctttgctgatcaacttttcaatcaactactgaaattatagtttccagtgaagagagagagagggggtaaagtggtgggaagtaacccatctagatgtgcaataatatcagaaagaattttcgaagaatttatttggattctagaagataaaaggaactatctcattctcattcaaaaagattctcagaacagtgaagacttttaaaatacatgtgtttctctctcccccccacacacaaaaaaacgttaaaaaaaaaaatcataatcagttggtgataaggcaaccggagaaaaataaagcaggcactgagtckccttagcgctaaatttctggctgcctgaaatgctgtcaacaattgctggatggagtttcttctgcctccaccccctgcattttgccaaggtcacctatcacacctttacctaattatctagagc

SEQ ID NO: 826677 - DNA, 601 bp, Homo sapiens
actttctcttagtattgaatatttttgttgcattagttttaacttgatgttggaatgttattcctgtagcagaaaatactacacagctgtcaactgtgttccttagtgcctagccagaaaaatatttggaggctatttcaaaagtccttcttcatttatgtggctttgctgatcaacttttcaatcaactactgaaattatagtttccagtgaagagagagagagggggtaaagtggtgggaagtaacccatctagatgtgcaataatatcagaaagaattttcgaagaatttatttggattctagaagataaaaggaactatctcattctcattcaaaaagattctcagaacagtgaagacttttaaaatacatgtgtttctctctcccccccacacacaaaaaaacgttaaaaaaaaaaatcataatcagttggtgataaggcaaccggagaaaaataaagcaggcactgagtctccytagcgctaaatttctggctgcctgaaatgctgtcaacaattgctggatggagtttcttctgcctccaccccctgcattttgccaaggtcacctatcacacctttacctaattatctagagc

SEQ ID NO: 826678 - DNA, 601 bp, Homo sapiens
actttctcttagtattgaatatttttgttgcattagttttaacttgatgttggaatgttattcctgtagcagaaaatactacacagctgtcaactgtgttccttagtgcctagccagaaaaatatttggaggctatttcaaaagtccttcttcatttatgtggctttgctgatcaacttttcaatcaactactgaaattatagtttccagtgaagagagagagagggggtaaagtggtgggaagtaacccatctagatgtgcaataatatcagaaagaattttcgaagaatttatttggattctagaagataaaaggaactatctcattctcattcaaaaagattctcagaacagtgaagacttttaaaatacatgtgtttctctctcccccccacacacaaaaaaacgttaaaaaaaaaaatcataatcagttggtgataaggcaaccggagaaaaataaagcaggcactgagtctccttagcgctaaatttctggctgccygaaatgctgtcaacaattgctggatggagtttcttctgcctccaccccctgcattttgccaaggtcacctatcacacctttacctaattatctagagc

SEQ ID NO: 826679 - DNA, 578 bp, Homo sapiens
gagccaccctgcccggccctaagcaactttctaaaaaatagtttagtgtcctacgtatcctgatatccagaagaagtcagatgaggccagaatcccagtgtttagaaaataatttgtttctttctctctctctctactgtttcggtaaattctctttctgttttatgtatctgtgaattttgagtttgagttcactctgtagcatttctggacctggaaggctagagtgggacctgaagctcggtggccacaagaacattctgtggtctcatgggtcccttatgtttccatcccttggcatcatctcactcaaactgcaaactggagcatccagtggggctggctggagcacgtgcagaaggcagaagatcaagtccagaaaattaattaaggctggatcagaaccaaaaccatgagcccataatttcaaagctggaaaagagtctgaaatgtatttaattaaattaattaattaattwatttatttattttgagacggagtcttgctctgtttcccaggctagagtgcagtggcttgatctcagctcactgcaacctctgcctcccgggttcaagcg

SEQ ID NO: 826680 - DNA, 558 bp, Homo sapiens
cccttttttatggctttttaatattccatgatgtgtatgtaccacattttctttatttagtccaccattgatgggcacctaggttgattcaatgtatttgctactgtgaaatttcatggcaatgagcatgtaggtgcatgtgtttttttggtataattatctagtttcctttgggtatatacccagtagtgggattgttgggttgaatggtagctctgatttaagtgttttgagaaatttccaaactgctttccacattggctgaacaaatttacattcccaccaacagtgtgtaaacattcccttttctccgcagccttgccagcatctgttgttttttgattttttagtaatagccattctaactggtgtgagacggtatctcattgtggtttaaatttgaatttctctgacgattagtgatgatgagcagtttttcatgtttgttagccacttgtatgtcttcttttgagaagtgtcatttcatgtcttttgtccattttttrgtgggattatttgcttgtcaatttttttaagttccttatagatcctagttat

SEQ ID NO: 826681 - DNA, 607 bp, Homo sapiens
attctggggataaaacagagagctgagaaagatccctgccttgatggaactcacagtctgggtctggagcagcagaaagaggctcatcaagtaaccttccaagcacctttgcaatcacaacagtgaggagagctaagaaatggtacatggggtaagcttccatgatgtactgatggttatgctaattactaaagactgtcaaatcaggacccaaattgtctagtgccaaggtggatgtctttgctccttcctttttctgccctgagacactcttcattctcagttgggtttcccttttagaatgacctgtgacatgtgtcttctcctcatgtgacactcttcctctttctaaccccagcacctagaacaaagcctgacacacgggagacactcagggcatcactgttgaacaaatgaaagaattaattcattaggagaagaaatgtaagcaaattcctgggcatccccaggcccmagttttctcatcagtagaataagaaggatatgatgtactcaagcctcccagctcggcattctgcaatttgtcatgtcctgagagctggactcatctggctttctgattcactcctctctgtggacataaggc

SEQ ID NO: 826682 - DNA, 513 bp, Homo sapiens
ccctcagtaaacacatgtggaatggatggacatgaaggcrtgactcgtgttaattcctttaaggtagggtaggctatggggccatagattaaatgagtctttgtaaataaatgatccatgctctggcacactagacaatttaaaattccaaatcctttagaaatcagtctagaaccctggtggacaagacatgagtgtggtggaggaaatggagtggaattccacgttgatacaagacagccaggcaggagggaatagtgtgcgctctcaggaaggaacaaaggttctgagtgagaaggagagtccaaattctgatataaggaaagacacagagtttaaaaataacccaataatcaggaagcagggaagatacgcaggatgccatctcccgataagtcaagcaagcactgctcaggcaggttggggtctgagcgagcaatcagtttttaagacttcctctagtggaggtagaactgaagacctatgtttgcaagtggggcttgcataacctgg

SEQ ID NO: 826683 - DNA, 513 bp, Homo sapiens
ccctcagtaaacacatgtggaatggatggacatgaaggcatgactcrtgttaattcctttaaggtagggtaggctatggggccatagattaaatgagtctttgtaaataaatgatccatgctctggcacactagacaatttaaaattccaaatcctttagaaatcagtctagaaccctggtggacaagacatgagtgtggtggaggaaatggagtggaattccacgttgatacaagacagccaggcaggagggaatagtgtgcgctctcaggaaggaacaaaggttctgagtgagaaggagagtccaaattctgatataaggaaagacacagagtttaaaaataacccaataatcaggaagcagggaagatacgcaggatgccatctcccgataagtcaagcaagcactgctcaggcaggttggggtctgagcgagcaatcagtttttaagacttcctctagtggaggtagaactgaagacctatgtttgcaagtggggcttgcataacctgg

SEQ ID NO: 826684 - DNA, 541 bp, Homo sapiens
catctcttcctctctgtttctatccataattgaggaggaagagcatttgttcagcctactgtctgccaggcatgtgccaggagcttcactcatctcttcaccccagtatattattgctgttgtatggatggagaaaccaagatttgcagagattatcacctgcccaaggctaccttcctgggaagagggagatctggatttgaaccccacctcggtctgagtccaaagcctgtgctcttcccacattgtgctgctggccatccctgaagctgccgctgtaggtggagcatactccctgagacgaaccaagggagtagtggctatatatatatatatatgtacacacacacaaagcaaacaaacaaaaacaaaataagttggcgaggatgtggacaaattgcaacccccgcatgttgttggtggaaatgtaaaatggtacagccattgtggaaaayagtttagtgattcatcaaaaagctaaacattgaattcctaaatgaccctgcaattccactcctatgcatataagaattgaaaacag

SEQ ID NO: 826685 - DNA, 566 bp, Homo sapiens
aaagtcatatgagtatagatattacgatttacagccagtaagtatgtgtagaaatgcgacttcaacttcagcctttcttattttgtttcaccaactggtctgcttcaggctcttctcctgaggcagtaacatgttgatatcatgtctcctttgtcattcctaaaaagctcttagggacctaaagcctgaagcatacctaatcatccactaaaaagttgaggaaaaggatgacaaactggagggaaaaggaccaattgaaggtgatgtgaaattttcccagctcatttctccgagtgttaggcttctccagcaaatgtgaataggattccttgatgtgggggagacaacttcccttgctgcttcaatcttccctctgctttgtagaacaagtgttggctttgcagtgtggacataattccactaaatttgctcacttaaaagtaaatcctctaatgaagcatgttccaacaaaaaaaaaattctaagwctggattggaaataccagacttagaaatttttttttgttgttggaacaggctgcattagagagttcttatgacttccct

SEQ ID NO: 826686 - DNA, 546 bp, Homo sapiens
attaaataaacaaagcaaaatttactacaagccatttgtataaagtgtggtgacaaaagctaggtctggtastagtgataataataatagtaataataaaaaattacataggacccctttcttgagaggcacatcctctccctttcttgagaagaaagggactagtatgtgcccacggatttagaaaggccacctggaaaagtaacattttgattggattgaatatatacataggttatcaacagagaaagttatttcagactgaagtaaaaacaatttatcaaggaacatagtttatttgggaagtggccagaatgtaattgtagctatggatggaatgtcagattggaaggaaactgtataattttttttaagacagggtcttgctctggtgcccagtctggagtgcagtggcatgatcttgtctcattgtggccttgagctcccaggctcaagtgatcctcccacttcagcctcctgagtagctgaaaaaacaggcacacaccatcatgcctggctaattttttgtattttgtttttgtagag

SEQ ID NO: 826687 - DNA, 637 bp, Homo sapiens
ggtaagtaggatatctagagctgtgctatttaatataatccctagtcgtatgagtctatttaaatataagtgaatttagagtaaatatgcagttattcattatactagctacattttaagtgtacagtagctgtatgtgggtagcagataccattttgaacaatacagacatagacattttcaatcatcacagatagttttcttggacagtgtggttctagggtattttaaataaagggaatatttgatgtttactatttataatgatgaccgcacagaaaatgatctaagaggcttggggttcatagtctctttgcgtcttttcactacccctctcaaatcttgatgagattatttggcatgctctttgacagacaaaggctactttataataactttaatttcaatacaaattaaaaaactaagcaaagtatttactcaatgacttttagaaactggagttttgaatattgtcttaaagaaatggctaatcaatgagatcaaygctttctctgcagcaccttccaaacctttccttctgagcaccccgccattctactcggcgtgctgcggtgggtcctgtcggcgccctgcatcctccactgcttttccaagtaagtttttatccttcatcagc

SEQ ID NO: 826688 - DNA, 530 bp, Homo sapiens
atatctcctcatatctgttaggatggwtagtatcaaaaaacctaaaagatacaaatattggcaaggatatggagaaattagattccttttacactgttaatgcagatgtcaaattgtgaagcccctatggaaaacagcatggaggtttcttaaaaaattaaaaatagaactaccctataaccagcaatcttacttatagatgcttatccaaaaaaaaacctggaactagaatctcaaagagatattagcacttcaatgttcactgaagcactattcacaatagctgagatgtggaaacaatttagctgttcattgatatctggatggataaagaaaatgtgatatatacaactaatgaaatactattctgcctttaaaaggaaagaaattctgcaatgtgtgacagcatggatgaacctggaacacattacgttaagtgagataaaacacatgcaaagaaagacgagtactgcatgacaacatttacatgaagaatttaagttagtcaaattcatagaatcaaaatgtgg

SEQ ID NO: 826689 - DNA, 632 bp, Homo sapiens
ccagtcatgtaagatacttgtttaaactttttcattttcacttgattgccytgtgttggtacaagcagcatagctagcttgtagacaaaatctagacaaaactctagacaaaaatatgctgatatttcaaattacatttcttttccttctttactatgtgtcatcatcactagtaacattctgaatacagaaagtaaattactgaatataatttttaactatgattttgtggtgagatctatacagtatatttatgaaatactaaaaataattaaaaggtaactatattatatattcccttgcaattgcaaaagttggttttaattgcaaagttggaaatctcacagtaaaatacttgtcatttgcattgatgatatctaatattagtgaagataaaacggcaatacaaaggttctatgtgttaccatacgaatttataaataacattttccatgggattcctttttcttgcatgtcaatcacatagtgctttgtaatttatcaacttatctaagctggaatcacagtcccaaagaattttctttcctttatgttctgagttgactaaaaatacaattgttgagatttagagagatttagaaagatcaaacaaattttactatcagtatgtc

SEQ ID NO: 826690 - DNA, 599 bp, Homo sapiens
gtgacacaaactttgcataacaaaaaattaggctaaaaggcaaaaaaatacctgtcaaartgaaaggaaatgtttgcaacatatagttaagactatgggctaacattagtgtgtatgtatctgtatttacacatatatcttataatttgatggatgaagtacaaaggaacaaaaactgaataggaaaaacacataagataattctcaacaagtttatgaaaataccccaatcttatttttaaaactccaatttattcataattagataaatacagattaaaatcatacatatacacaatttctctcctaatcagactgcaagaatgtatgacaacacattctactggtgaggctgtagggaagtaggtattttccaaattatctgatagaaaacaggcaccatacatctggagaagaatttgatagtacctaaaaatatctatgtatgcacataaccttttagcttagtaatcttacttctaggaaagtacccccctgagaatacatttttaacaatacaagggatacttatgcacatagatatttattgcagtattgtttaatccacaacaatgaaaacaacctaggcactcatacat

SEQ ID NO: 826691 - DNA, 599 bp, Homo sapiens
gtgacacaaactttgcataacaaaaaattaggctaaaaggcaaaaaaatacctgtcaaagtgaaaggaaatgtttgcaacatatagttaagactatgggctaacattagtgtgtatgtatctgtatttacacatatatcttataatttgatggatgaagtacaaaggaacaaaaactgaataggaaaaacacataagataattctcaacaagtttatgaaaataccccaatcttatttttaaaactccaatttattcataattagataaatacagattaaaatcatacatatacacaatttctctcctaatcagactgcaagaatgtatgacaacacattctactggtgaggctgtagggaagtaggtattttccaaattatctgatagaaaacaggcaccatacatctggagaagaatttgatagtacctaaaaatatctatgtatgcacataaccttttagcttagtaatcttacttctaggaaagtaccccsctgagaatacatttttaacaatacaagggatacttatgcacatagatatttattgcagtattgtttaatccacaacaatgaaaacaacctaggcactcatacat

SEQ ID NO: 826692 - DNA, 599 bp, Homo sapiens
gtgacacaaactttgcataacaaaaaattaggctaaaaggcaaaaaaatacctgtcaaagtgaaaggaaatgtttgcaacatatagttaagactatgggctaacattagtgtgtatgtatctgtatttacacatatatcttataatttgatggatgaagtacaaaggaacaaaaactgaataggaaaaacacataagataattctcaacaagtttatgaaaataccccaatcttatttttaaaactccaatttattcataattagataaatacagattaaaatcatacatatacacaatttctctcctaatcagactgcaagaatgtatgacaacacattctactggtgaggctgtagggaagtaggtattttccaaattatctgatagaaaacaggcaccatacatctggagaagaatttgatagtacctaaaaatatctatgtatgcacataaccttttagcttagtaatcttacttctaggaaagtacccccctgagaayacatttttaacaatacaagggatacttatgcacatagatatttattgcagtattgtttaatccacaacaatgaaaacaacctaggcactcatacat

SEQ ID NO: 826693 - DNA, 619 bp, Homo sapiens
gaggaaggcccattattaggatcgttgtgtcttccaaagtcttggcaactaaaattgtacttttttcctgagtttcctaacattaatgagtgattctcaacaggtggttcctagaccaacagtacatattggagttacctgtggacttgttagaaatgtaaattttcaaccgagacctattagtcagaaactataggacgggctcagcaatttgtagtttaacaagatctccaggtgattctgatatctgctaatattgcagaacactgtctgatgatggatctgacaattaaaattgagtggatgcacctaggcacagctggctcacacctgtaatcccagcactttgggaggctgaggcaggtggatcacttgaggttaggaattagagaccagtctgaccaatgcggtgcaaccccatctctactaaaaatacaaaaattagccacgctttgtggcaggcacctgtaatcctaatcccagctactcaggaggctgaggcaggagaatcacttgaaactgtgaggcggagkttgcagtgagccgagatcacaccgctgcactctaggatgggtgacagagcgagactccctctcaagcaacaacaacaaaattgagt

SEQ ID NO: 826694 - DNA, 563 bp, Homo sapiens
cactcccttctattcttgtgattttatgcttctgtatctgaagaaagacgatctaatcaagcccaagtgcttaattaacattttctctgcagtaacaaaaataaaatctacactaaagctaattacttagcgatttaacaataacttctgcagactctaaactacattcacagtggctcacaagacagtgctcaatagatacaatttgtagcttaataaaacatcataccatttgatagattttaaaaaatcataaagcacctaacttgctaattaaattcttaatgaaacacttaataatcttaattaaggtacctagtgattttaattatgtgcagctatagcatgagacttacaatgatcatttgccatctttgctcttaatcacacaattgagaaatctcctattactaccagacagtcacagctgtctagtattgtgacctgtagaacaggacacagtcagttacaccacttcatcagatatctgctgcrctattttcttcaatctaccccaagattgtaggctgatattctttacgaacaaagcagccaaatctgcc

SEQ ID NO: 826695 - DNA, 550 bp, Homo sapiens
tgaaagcagaaacagtaagagaaaacaaggtaaaatataaattttgagatttaaatatactggacattattaaaatatgakaagtcactgtaaatagagtattataactgaaaggagacaagcattcgaaaagtaaaaactgtacattattaattcagttttaaggttttagaatttttcacatcatatttaccattaaggaggaatgattattttattcataatccccacaactcccagagatgtacaaatccataagtttttacctatatatttactaggcttttatatatatcctagggaactatatgaaaagttcatgggacataaggtatgataaagtgaaggagggcttttatgctaggcattgccaaactacaactgtaaacaaagtaaggatctttgccctcctacagtaagtgtaagtttagcagttgcccaatttttgccagtattcctattatgtttcctgtgcttcatgcaatttcttaaagactttgctgtggtctttactcagtcagtcttggatccttcattttaccttctagga

SEQ ID NO: 826696 - DNA, 633 bp, Homo sapiens
gtaaatgttaacattggtttgggaatttttcagtaatatttgtgtgtgctcaattatgatataaagtaaatttcttacttgggtaaaaatggttggtaaatctcatctagacaatttttcagtagcaaatgcaaaaccaggctgaagaagtctactcaatttctggcatctcttgtcaatcctgccttcatttctccctagaaatcttaatcatcatcatgcctcataactttgtgagaaagaaaaggtggaactgtgattcattcaagtgagattcacacaaaacccatcagagtacagataaaagtactacccattggtctaaagtagaatttctaagtcttttctgagaattattcctcagagaataaggatatataactcaagccttttccctgtaattttggagtttctttgaaaccactttattttcctttaaaatttatgcaaagtcatatgaaagaacttttacaaatcaataagaaaaagacaatcctatagaaaaatagcaaaaagtctcaaagtgttatattgtataagaaaatatgcaaatagtcaaataacatataaaaggagctcaaaaccattagttttcagagaaatgaraaaggcaaatcaaaactacaatgcaat

SEQ ID NO: 826697 - DNA, 618 bp, Homo sapiens
aagaagagctcagaaagccttttgtctatggaatttaaytttttcaggtccctactaaagagataaatgtatcttattgattgactgagatagagtcttgctctgttgtccaggctggagtgaaatgtatcttactgattgattgattgattgattggagacagagtcttgctctgttgcccaggctggagcacagtggcacaatctaggctcactgcaacctccgcctcccaggttcaagcaattatcgtgcctcagcctcccgagcaactgagattacaggtgccagctaccacacctggctaattttcgtagttttagtggagataagatttcaccatgttgggcatgctggtctcaaactcctgacctcaagtgatctgcccacctcggcctcccaaagtgttgggattacaggcatgagccaccatgcccggcctcagatgcatttaaagactgatttattcaagtccccttatcctgattctgcagtcgccattacattccaatgcaagtttgcctaaagaaacagatatgcggattaagcagacacaaacatttgggccgatgtgataactacatttcctactataaataaataaggcaatctattggttt

SEQ ID NO: 826698 - DNA, 621 bp, Homo sapiens
tggttggcaagcacctatgcataatgtatccaaaaataggtagacctgaagataaataatacaaattatgttrcccatagaaagataatgatttctgttctattttcacaatagtgaatctaacatatgctttgagagagataaataatttgcagggtaaataaaagataattattttaaaatatatatcagacaacaactataatccatcatgtaaatatgtactagagatttgaattaggtaagtacttactgctatataacaaactcttgctttttctaccaacatccagtttttctccagatcaagatgtttttcctttttataacaattggcagcagcaagattagctatgagggacctaaaacaaccaaagaataagcaagtaatattatagtcaaacttagcatatgtttcaatagataattaccaatattttttgcaaagtttaaaatttacattttaattaattcttcaaaactaatgttattgatttttaaataaatataaataataattttgttttgagaactttctgaggcatctatgataatttttgttctaaacaacacctggtattttgagaaagaaattggcatttaagttgccttttgatagta

SEQ ID NO: 826699 - DNA, 620 bp, Homo sapiens
tcctataataaaggggctatttaagacattcccagataaacacaagctaagacagtttgttaacaatagacctgccctacacaaaatgctaaagagagtccttcaggctgaaatgaaaggacatttgatagtaaccagaagccatatgaagaagtaaagaactctggtaaaagtagctacatagtaaatataaatgccactatcactgaacttttggtttgtaattccttttatttttatatgatttaaaagacaaatgaataaaagaatagttacaaatctatgttaatgggcatgcaatatataaagacgtaatcaatgagcgtaataatatataagaagaggatggagatgtaaaggagcagagtgtttgtatattattgaaactacattggtattattcaaattaggttgttatgagtttagaatgttcattgtaattcaaatggtaaataataaaagtaactaaaacatatacaggaaagaaaaggaagaaggtatcaaaaaagaacactaccaaaaattaacttattcatgttttattacttagacacaaaaatttaaaaacacatagttgttatcrgctgaattataaacacccctccacagaccctcctgcc

SEQ ID NO: 826700 - DNA, 568 bp, Homo sapiens
catgcttatgccctagctgtgacgtatttagtctctagagtgagaggtgaactttgccggcaggggaggagtggggtaatgtagccaatagacaactaaatgtctgaagcatggggcaagaatcttaatatctctgtcctcagttttctttacccataaattggtgtttcagaattatgttcttaacagaatgcctgatacacaagacaaagtcaatcaaagcatgttctttcatttccagcatccatagttcaagaatttcaggaagctgttgctccaatagtcatgtgttctttggttatgaaggccaaacagaacaaatgataggagcaagtgatcttgacttagatagggtcagccccttcctactagatctcatggcaacatgaaggtgaagcagtgatggggaacagagagtggggaacaataaaacatacaaggaaraaaaagaccagtttttgaatgctttctattaatatgtgcaaaacactacaaaagcatgtgtatttccaaaatccaaatcatgatcccacttaggaagttaatgcccctatctcagttgccctta

SEQ ID NO: 826701 - DNA, 626 bp, Homo sapiens
atttccacctaaaggaatgatttttttcagttccatagctgctccctacctccttataaaggtctttaaggagaacatggaggtctagagataaaagcactaactgtctttggtcccctaaggactggggagtgcgtgcgtgagaagacagtgtataagcaaggaagtggtaagaactgaggggttgggggggcaccaactgtgttgttcacagactcactagcttggaacaatttgggcatagtcttacccaatggtatcagggagttcaatgaatttgtgcatcagctacctgcaggatttatttttccctataacccctgtttataaactgatcacggctaggacttgttttttccttccaaattaaaacacaaagctcattaataagaatcattataaaagcaacacatacaatcattgagaaaacactataatacaaggcatgagctcagaaccatagaaacatggaagagaaatttattatcatgatgagcgatttgacagatggaaaggggcagaaaccttcatcgtctgctgtttcccttktctctggtctcatccacagcactggaacatccccatgagatagataagatgtgaatatcattctcgttttatcagaa

SEQ ID NO: 826702 - DNA, 661 bp, Homo sapiens
atgaaaagtctcatgcagctgctgttaattttctaagtcaggccatatatttggtcattgtaactgtgtgtttatagcatacatcttttaaaaagtaaatttgttgtgttataacctacatccagtaaaattcaacaattataagcatacagtatgatgagttttgacaaattcacatagggtttacattaatttttttggtaacagatttattaaattataaattacatataattcacttatttaaagtgtataattccttgatggctttagtatattcagagtagtacaaccatcactaccatcaattttagagcattttcatcacccccgaagaaacctcatatgcattagcagtcactccccatttctccctaccccaaaacctcccagccctaggcagccactaatctactttctgtttctacagatgtgcctgttctggacatttcacataagtggaatcatacaatgtgtggtctctttcaattacattttctcacttagcttaaggtttttaaggttatwcatgttgttgcatgtataagcattccatccctttttattgctgaataatagtccattgtgtagatatatatcatactttatccattcatcagttgatgggcatttggatccattatctatatatgtttatcag

SEQ ID NO: 826703 - DNA, 611 bp, Homo sapiens
tgcagtttttgtcccaagacctagtctttgctcagctaattttcttgtccttctcaggcatactggaaaagtgcacctgttcttccacacaactctgtgggcaatcagaaaacccagaagagagttgtgaggagtcaagctagctctgcatggtcacatcatgacatcattttccctttctacctcaacagaactagcttggaagcgagaggtgaagctggggagtgggaagtagaagcctgaggtttatcaccacttctcaggggttgggtttcaccaatggggggcgctagctggagacgagaggatatgtggaaactttggtcagataccccagatttccttctttctagaatacagatttgcccccttggtctaccaaaagccacagctactacaatgcagctctctcctcagctacagccatgttctccaggaactggaggcagttccctcccgtgacaccttcaggactttgctgtccctcccccatcactcccaattagatttcactttstaagttttcttttagtaaactcagttcagtttctctaactgaaatgtgtcacctgatctccaccaggactctaattgatacacagcagaattcc

SEQ ID NO: 826704 - DNA, 629 bp, Homo sapiens
ccaggggatatttctcagtcttcactttcctttgtgtctctgaagccatggtccctgtggcagccacatggtcactagtaccacgttcaacatttgcttgtcccctaaccaagaagattttgaacagaaaactttgggtggcttggttgtgaaaacagtaggtacttagaaggattttttctttaagtgtttttcgaaactacactctcttcccctagattatgacattctatccgagttggggcagagaggtggagaagttgtgtctcctatctgttgatgatcactggtctacagaaacaaactcctggagcctgaagacctctattctaatcttagctttacaatctgccttttcatgcaaccttggcaaatcactcagcagtttcattttaaagacagaggtgatcacatgtggacagtggcaagaaaaagaaaaaactgatagatcacaaacaaagctgatactccagtgcgctgcactgatctgggttcggaggaggctacatagtcatttccaggacaaggccactcyagccaagaatgaaccatcacagaatgcacctcagggccttaggagatgctgcaacttttctctcagtgcaactcctgcatccaggacaaggact

SEQ ID NO: 826705 - DNA, 629 bp, Homo sapiens
ccaggggatatttctcagtcttcactttcctttgtgtctctgaagccatggtccctgtggcagccacatggtcactagtaccacgttcaacatttgcttgtcccctaaccaagaagattttgaacagaaaactttgggtggcttggttgtgaaaacagtaggtacttagaaggattttttctttaagtgtttttcgaaactacactctcttcccctagattatgacattctatccgagttggggcagagaggtggagaagttgtgtctcctatctgttgatgatcactggtctacagaaacaaactcctggagcctgaagacctctattctaatcttagctttacaatctgccttttcatgcaaccttggcaaatcactcagcagtttcattttaaagacagaggtgatcacatgtggacagtggcaagaaaaagaaaaaactgatagatcacaaacaaagctgatactccagtgcgctgcactgatctgggttcggaggaggctacatagtcatttccaggacaaggccactctagccaagaatgaaccatcacagartgcacctcagggccttaggagatgctgcaacttttctctcagtgcaactcctgcatccaggacaaggact

SEQ ID NO: 826706 - DNA, 637 bp, Homo sapiens
atgaataagacaggcacaatccctgctctcacaagcttaaagtatggcataaaagaaaagtgaccatgtataaaaatattatgacaacttgtaagtgccatcacaggaaaaggcagagctgttatgagagagcaggatgaacaagatggcaggccactctgggaaagtggcatgtagagaaggcctgggtaagcacaacttggacaggtgaagaagggaggcatccacccatgataagagtgtaatcaggcagggtaggcaggcagaccggatctccaggacaaagctcagagccaggcctaggactccagttggcgccctttccctgatggcagggcatctccatatcctcctcatctcacagtttctttccatcgtgagcatgccctacaggcctttactgtgctggatctagtgaaaaagtattgatgtggcttggctgagtccccacccaaatctcatcttgaattgtagctcccataattcccacatgttgtaggagggaccaagtgggagaaaattgaatcatggrggaagtttcccccatactgttctcatgttggtaaataagtctcacaagatctgatggttttataaagggcagtgtccctgcacacacctcttacctgctgccatg

SEQ ID NO: 826707 - DNA, 485 bp, Homo sapiens
tttcagaatgctgaaagaagtgtgattgagttagactgtaacagctcaaatcattataaaacagagcaagagcaacaaatrgaaaaaagtgaagaaatccctatcgacagtgttaaggatggattctgcaagcctcggtcattctggcaactaaccgactttcccagccagtctagatgccccagagaccctgttagcttcaaggaaaggtgaaaatcagaaactcagccaggatagtccttgtgttacatcagggcctgaggggcctcatgagctcactcacaggaggatagggtggtggtggtcctgtgaaggcttggcagctctgaggggcaaaaacacagtgctgagccaaggccaaaatgggggtgggggcagggggcactggttgattccacatcagccttggcatccctggaagccatgtacagtggccaggacaacaaaagtagtgcctacagcactcagacaatggccttgctctc

SEQ ID NO: 826708 - DNA, 485 bp, Homo sapiens
tttcagaatgctgaaagaagtgtgattgagttagactgtaacagctcaaatcattataaaacagagcaagagcaacaaatagaaaaaagtgaagaaatccctatcgacagtgttaaggatggattctgcaagcctcggtcattctggcaactaaccgactttcccagccagtctagatgccccagagaccctgttagcttcaaggaaaggtgaaaatcagaaactcagccaggatagtccttgtgttacatcagggcctgaggggcctcatgagctcactcacaggaggatagggtggtggtggtcctgtgaaggcttggcagctctgaggggcaaaaacacagtgctgagccaaggccaaaatgggggtgggggcagggggcactggttgattccacatcagccttggcatccctggaagccatgtacagkggccaggacaacaaaagtagtgcctacagcactcagacaatggccttgctctc

SEQ ID NO: 826709 - DNA, 601 bp, Homo sapiens
ctcatttttattctgtttttttcattcattggctggccagttaggctctgtgcagtttatccaatatgttgtgatgctttatagtgtcttttgtccaaacctagagcttgtctccttctgggtttagrttgtctgttggcttaacagctgtgttcattgtactgtgtttgccctctgagtttcccaaaacctgctgtgccagctgctgtttgtataggctcagtgggagaaaaaaagccatcacactgaagattagacagatgtgggagctctatccagattcaaatatctagtgctgtttggtatatttctgctttacctgttggtgtcatcagttgatggggacatgttgaggctatctaaaatggactcctcttttgcttccatacacatttcctctgacggatgatgaattactgattgttatatatgtccacataagggtgtcgctaaattttcttggtttgctttagtgtttatctcccttagtcagtaagttcttatcaatatctaacccagtttcttcctattgccacctaagggaatcaattttccttgaatttttgctctaataattacctttctaaaagtatttgagatt

SEQ ID NO: 826710 - DNA, 592 bp, Homo sapiens
tatagtcctaatgcaagataaagtcatggggtctgaggcacctctagaccctgagcctttaccataaggaagggcatcctcccattcctaatgaggcatagtatacaggtaggtatagccagagtactgctgctgcctggattgctgctacagtccagcctagtactgacacaatatggtttaaaaccaggtgtaaataaagtagctaataagttgaactcaaggcaatatggactgtgatcaccaaggagatgacacctgtggtaatctgtactagtagctaggcaatttatcaaggcttaactttgtggttaattacctagaagttacagaattagctagttagtcatcgacccatgtagggccaggccatgtggccagatctatgagaggaagaacaaccttctccaaccaggtacagggttgaacagtaatctgttattgcctgccccagtacccmtaaaggcaggggaacagaaaaacctggtgttagccatggaccctccaagcacctcattgcagatggttggctatcatagccccctggggggaggggctgcagtataacttacatgttactccttgggtattt

SEQ ID NO: 826711 - DNA, 533 bp, Homo sapiens
ttgacatttggaaaatctgcataacttggtgaaccaatgttttccaaataaccaatgcatgaaggytcagaagcatacatgggttataaagctccatccaaagtgagagaacccattggatttgaatgttatggagtataaaacgatattggcagggtttcagacttcacgctgcaattagcctttaagaaactgtcactggtccaatctggtatagtatcaaagacaaatatccacaattttctgaaaagccttttgatattaatatatccattttctaactacatatatgtgtgagactgggttttctttatatacttcaatcaaaacaacacatttgtagcagactaaatgcagaaatagatatgagaatccaactgctttcctattatgccagacattaattagcaaaagtgtaacacaaccacaaaaaagtaacacatgtcactttttccttctttttttttttttggttttgttttgtttgagaaattatagggtttgtttttgtttttgtttttgtttcttgagac

SEQ ID NO: 826712 - DNA, 457 bp, Homo sapiens
aggatccacatgatagcgtgcgtagcttacatacatgggaaacctagtatcacatgcatataagcacgcacaacatgcactaattatatctgggatcaacattgggttcacatggtataaaaacactgaacttgcataattcaatgacgctgtgttcctgaacttgcataattcaatgctggtttctcctcatgctctgaatccagtctctggccagacactaggccctcactcagacactcgctcttgcatgggattcatttgacaatgatggtacccgcggtcatcaagagaggaagtctctacacccagagggtgcctcagggcccatcgagggagactcatacctagatgttagggccacggccttccatgcctctcccataggactctgtgtrtgaccaacaagcacatgaaaagtgctcaacatcattaatcatcagagagatgcaaatta

SEQ ID NO: 826713 - DNA, 568 bp, Homo sapiens
cagacagtcttaataaaagtaacatttaactgtctttgactcaaaatttttgggatgaaaaakgcacagttacagctaaaacatcccttttctaccttttcctcttcctctccagaggtaaccactgtcctgaagttgatatgtgttccttatatgtacatttttacttctctacataaatacacacctgccaattttactaacattttctatggtcacttactaatgccaatgaacagtctgtttctttctttctttcctttttctctttctctctttctttccttcttttttgagacagggtcttgctctgtttcccaggctgcagtgcagtggtgtggtcacagctcactgcagcctcagcttcctgggctcaagtgatcctcccacctcagcctcccaagtacctaggacaactggtgcacgcaaccatgcctggctttattttttaataaaactttcattttaggttcaggagtacatatgcaggtttttttatacaggtaaactcatgtcatgggggcttggtgtacagattattttatcattcaggtacaaagcatagcac

SEQ ID NO: 826714 - DNA, 627 bp, Homo sapiens
cattattttacaataaatgcaattaatttctattttgagtccctactcccaccaaacaagcaaaagaaattaacctcagtcatgtggggagttttttttccatccttctgcaggctcatgtcctaaaagaatcttttaagtccaggaaaacccttcccccttcatatttttacctcagccacttgtctataccatggaactctctccaacatgtttacttcttttgcaggccctccacattcacatcaagagttatggttttggaaaataaaaggcataggatcttacaggttatttctgattttcactttaccaaataacttccctcaggcaacaaagtacagagctggctgcacacttaaccctagagaaacggataagaaaatagttggagaaaaaaatagtatgcaaaacagtatcctcgcatgttctccaactagtaaatctttgattcttcactaagaaaaaattacttctaatacagatctcttccccaattgaaggactctgactacgatgttttagcctaagaattaccctgtctttatttaaaatgttgtattttgaagatcatgggcttttttggcattgayttattttaaacttcgcattgaaacaggatttgtc

SEQ ID NO: 826715 - DNA, 591 bp, Homo sapiens
aggaaaaaggctgaagaataatgaacagagactcggagacctatggataacatcaaattcatcaatatatacgtaattggtgtcccrggaggagaggagggacagtaaggagcagaaaagtacttgaagaattaagaattgaaagtacccaaaattaatgagaaacattaacagaaaaatctaagaagctcaacaaaccagaagcaagatatacacaaacacaaatagaatcactcctaatcacatccaatgaagctggtgaaagtccaaagaaaattctgacagtaagtaattacatataaggtaaatacaatatgattaacagttgacttcttgtcagaaacagtgggaccaaaaggcagtgaaatgacatattcaaagtgtggaaagaatgtcaataagtaattccagatccagtacaactatttttcaaaataaaggtgaaataaaggaatccgaagataaacaaaaaatgagagaatccattgcaagtagaccttccatacaaaatatattaaagtaagtccttcagacagcaagaaaatgttactagacaggaacttggctgcagtttaccaccagaaatcctaa

SEQ ID NO: 826716 - DNA, 577 bp, Homo sapiens
gtcttttcaaagaaatctctaaagttgtctaacttcttaaagcatgcttaagttaaawaaatatatatatatatatatatatatatataaagttgtctaacttgtgactctaaggttacctttcctctccgttgttgagtattaaaatatcttctcatccctgtttgctccttcctcaaccacaaggtaatttgcaaagagacttaagcaagagtatttgtaattttgacagattaaggaaccaagatgcgatgacatttctcccctgttctttaatgttttaattggctgttagtaaacaacagtagtttttaattctgaatcagcagtcttattctccacgacaaagagagtgtgtgtgaaaggcatcagtccttggtactattctttcagacccacctcattaaatccccttcactgcttggggctgatgtggttggctttggctccatttctgagctgttttagttcagaaagacttgcgaatttacataaagatcattaactgagtctactttttctctgagtcgctctagccttagcataaccttccccaccaacttttctatctttcttt

SEQ ID NO: 826717 - DNA, 577 bp, Homo sapiens
gtcttttcaaagaaatctctaaagttgtctaacttcttaaagcatgcttaagttaaaaawatatatatatatatatatatatatatataaagttgtctaacttgtgactctaaggttacctttcctctccgttgttgagtattaaaatatcttctcatccctgtttgctccttcctcaaccacaaggtaatttgcaaagagacttaagcaagagtatttgtaattttgacagattaaggaaccaagatgcgatgacatttctcccctgttctttaatgttttaattggctgttagtaaacaacagtagtttttaattctgaatcagcagtcttattctccacgacaaagagagtgtgtgtgaaaggcatcagtccttggtactattctttcagacccacctcattaaatccccttcactgcttggggctgatgtggttggctttggctccatttctgagctgttttagttcagaaagacttgcgaatttacataaagatcattaactgagtctactttttctctgagtcgctctagccttagcataaccttccccaccaacttttctatctttcttt

SEQ ID NO: 826718 - DNA, 637 bp, Homo sapiens
ttccatacaaataccaacacacaaattaatttgtaaaggtataccatatgtaacaatacatatacccaattctttattcaacagtttaatttaggtatattgagaatatagtaagtagaatttttgctttaaaaagtgctgaaaatatgcagcttaatttgtaaattaataaagttccatggctgtatataattacccatttttattctcagatacgcttttctggtgtaaataatcttatataatattttatgtgcatgacattaaatcctctcactttttttcatctgcttttatatagttacagatcataaatcacctccttatgacccatctatttaatcaactgaatgggtttcattactttaactaacttacaaaataagcctttaatcattgggaaaaaaagactatataatattttaaaagatgaatattaaggctatcttattaatagaccttataattttaaacttaatattaacttttaattgtagagaaaaaacattttaacaagtgttatatagagatgtcaaaccacttcactcttcattgtaacacttgtaataatatagactcatggttgtaattakttttgttagcattggtatatgtccagtcatgtttcaattattgc

SEQ ID NO: 826719 - DNA, 202 bp, Homo sapiens
ttttcctccttttcctagaaattggagtaaagaaaatactcattctgttttcttaaagcaaaacataaattttgctgctttaaggagtttagagaaagccttttatacttctcactctacagaaaattaattccattttttctcattttttcctactaataaaaggcaccrctatcctttcagttggtgtaagccaaagatt

SEQ ID NO: 826720 - DNA, 635 bp, Homo sapiens
agccatcatgtgaggctgagcaaagtagttgtctgtgccaagggagaaaagaaagctattgtgacccaaggaaaggtgttggagtccaaggagggtgagaaaggcatgcctgaagaacaagggatggtagcatggctagcatgttagagtccctgcatggttaagagagcttctacatggtgacatggcccagctacacgatgaaaagtgtccctgctttatggcagcctgaaggaggtagtggtgagggatctgagctcagactaagtgaggagagagtctgcatgtgtacacacatgcacacatacgcacacacatttcataacttttattccactgagtgaacctagaagcagccaaaactcaattgcaatgaatatgtccagtgtcagatctcagtttctaaataccaaggtctacaaacaggaaccagatatacttgaagaaattatagattccagaaccagaacaataagagcagcaaaagaccacactggtttatcttataccaaaaagtaagaaagtgttcaaaatgtaataggaacatgttgtagagtgcaaaattcaggttgacaggcccctactggccaaaatctagaayatttgaccaccataataaattattatagtgtggt

SEQ ID NO: 826721 - DNA, 626 bp, Homo sapiens
atgagtaataagatagcatttgcaagcctcatgataacctcaaactaaaaaaaaatacgactgatacacaaaagataaaaagaaaaaaactaaattatattaccagagaaaatcaccttcagtggggaaagataaaaaggaaataaaaaaggaagagatgaacacaaaacaatcagaaaacaaataacaaaattgcaggattggctgagtggattaaaaaagaaaagtgagacatattgacctgttgcctacaagaaacacaggtaacctataaaggcacacataaactgaaaatatagggatgaaaaaaatatatcccatgccaatgcaaatcaaaacagaataggagttgctatacatatatcagaaaaaatagaggtcaaaacaaaaactataagacacaaagaaagtccatatataatgttaaatagtcaattcaacaagaggatataacaattttaaatatacctgcacccaacattgcagcacccagttatataaggaaaayattagagctaaagagagagactccaatacaaaaatatagatttcaacacccactttcaacactggacacatctttcagacagaatctcaacaaagaaacattggacttagtctgcact

SEQ ID NO: 826722 - DNA, 503 bp, Homo sapiens
aacatatgaatttggtggtgggggggtgcataattattcagaccaycatgattttcttaataaaatattggtacattaaatccagtctcagtatttgattctcagagaactcagactaagacaagaggtaatctggaacaccctcaaaaaactactctcagttaccctctgggaaatcattgctgacaaaattatagccatttctattaccacaattaaccccatcatgttcaataaaattatgcaatgttgtttctagtgtatagtaaaccctcaaatatactatgtttaaattttagagtggtcagatgtgaaaaaattcttatcatttgtataagaaaaggtaaggacttggagatattaagtaaattgacatatcaaaaatggttaatagatggcagatgagtcatttaatcttgttctgcctgacacaaaaccaaagtttctgagagttgtgagatgctacctcctggatgtcatctaacaattgccatctgtgtaac

SEQ ID NO: 826723 - DNA, 246 bp, Homo sapiens
tacagtatcattacaagcttgacaaacatcagcacagtcactaaatattgtaaacagaaagaatgtaattaagttgtccaaagtacacagtcaaatgtttgtagctctcctcttactgaatttaaatatagccacaatgtaaccacaagattatttgctcatacagsggcatttttgtcatttttgactcttctagatttttaatatatttattgttcatgtgattgtatttttaccaagaattaa

SEQ ID NO: 826724 - DNA, 331 bp, Homo sapiens
ttaccaaaactttttcagggtttaaaaaaaaaaaaaaaaaaaaaaaaagggcagcaaaaatgggaaaatttaatttagcactcatccttttagagakttttaagagtgtacttgttagtagatcttcagtgttcattttcattttgatataattattaattaaattacagagaaagcaaaaactacattacttcttaaaaacttaaatgccaatttttatatgcctatttttttcaatagaaaaaagttagttattattttaacagaaataactcacctggttatttaacagaaataggtcttccattgccagaatatgtacttgcaaatg

SEQ ID NO: 826725 - DNA, 636 bp, Homo sapiens
atttgacataaatggtctaatgtctagtctaagtcccttctgtacaattttagttccagtcctctattttacttgtcaaaaacagttatcatcctagataatacctaattaaaggtggtaaaacatgtatttagagattccggggcttataaacaaaccactgaatatagttttcaatgttaagttaaatatcaagttttatttattggtgtataatttctcctcagcttttttttttttttttttgagatggagtcttgctgtgtcgcccagactggagtggagcgcagtggcgtgatcttagtcactgcaacctctgactcctgctcccgggttcaagtgattttcatgcctcggcctcccgagtagctgggattacaggtgtgcaccaccatgcccggctaattttttgtatttttaatagagatggggtttcaccacattggccaggctggtctcgaactcctgacctcaggtgatccgcccgcctcggcattccaaagcactgaaattayaggcgtgagccactgcactcagccaacttcgcctcagcttctatttctataaggctttgatagaagctaagtgctttctgttacttcacttcacttccctgagattcctcaaaagtgattg

SEQ ID NO: 826726 - DNA, 621 bp, Homo sapiens
tcagagcgccggtcataagtcagcattttcctattcgaattcaaagaaaaaaaccacacccaaatactgttatggaagccatctttctcacaaattaagtcagaattaaacaataataaaacaatgaaaaaactacaaaagacaatttcaaaacagaattactatttctttgagaataatatatatacattttgcttagttgacaccaagtgtagatatcctacaagagtttaaaaattactctgtaaatcactgttacctggaaaataatgagttggcagatatcaactagcttaagatgtattttaggtgggagtggtggctcatgcctgtaattccagcactttgggaggccaaggatcacctgagcccaggagtttgagaccagcttgggcaacatagcgagacccccatctccacaaaaaaattagccaccataatggtgcacacctgttatcccagctacttgggaggctgatgtgggaggttcgcttgagcctgggaggtcaaggctgcagtgagctgtgattgcaccactgctttccagtctgggcgacagagtgagaccctgcctccaggggcaggaaaaaratgtattttatcccctaagaatgagaacta

SEQ ID NO: 826727 - DNA, 560 bp, Homo sapiens
aatgtaaaaactcaaaaccataaaaaccctggaagacagcctaggcaatgtcattcaggacataggcatggacaaagatttcatgacaagatgccaaaagygattgcaaccaaaagttgacaaatgggatccaattaaactaaagagcttctgcatagcacagcacagcaaaagaaactatcaacagagtacacagaaaacctatagagtgggagaaaattttttgcaaactgtccatctgacaaaggtctaatatctagcatctataaggaacttaaatttacaagaaaaaaatcccattaaaaatgggtaaaggacatgaacagatacttctcaaaagaagacatacacgtggctgacaagcgtatgaaaaaaatctcaacatcactgattattagagaagtgcaaacccaaacccaaaccacaatgagataccatctcacaccagtcagaatgactattattaaaaagtcaaaaaataacagatgctggcgaggttgtggaaaaaaagaaaaggaatgcttatacactgttggtgggagtgtaaattagttctacca

SEQ ID NO: 826728 - DNA, 646 bp, Homo sapiens
gagtttgagatctgagaatggacagactgcctcctcaagtgggtccccgacccctcagtagtctaaatgggaaacacttcccagaagggccgactgacacctcatacagcaggtgcccctctgagacgaagcttacagaggaaggattaggcagcaacatttgtcgttctgcaatatttgctgttctgcagcctctactggtgataccaaggcaaacagggactggggtggacctccactaaactccaacagacctgcagctatgggtcctgactgttagaaggaaaaccaacaaacagaaagaaagagcatcagcatcaacaaaaaggacatccacaccaaaacctcatctattggtcaccatcattaaagaccaaaggtaggtagataaaactacaaagatggggagaaaccagagcagaaaagctgaaaatttaaaaaaccagagcacctcttctcctccaaagatcgcagctcctcgcaagcaacggaacaaagatgggcggagaatgactttgtcaagttgacagaagtaggyttcagaagatcagtaataacaaactcctccgagctaaaggaggatgttcaaacccatcacaaagaagctaaaaaccttgaaaaaatgttagatgaatggctaactaga

SEQ ID NO: 826729 - DNA, 555 bp, Homo sapiens
agtaggccatagcctacacattaaacctaaaccaggtggcgtgactgataaaatagaagatttcaataggatcaagagtctcttaagaaaatatccacaatgtccaagatgcaatttaaaatttgaaaattactcatcatagcaagaagaagggaaatcacaacttggaagagaaaagacaaacaactgaagccaacattgagatgaattagatgtaggaatgaaggacaagaatttttaaaaagcaataatgaaactgtttcaataagcaactacaaatttttctaaaacatattaaaatagaaaatctaggcaaaaaatagagtttatttaaaaataccaaatgaaacttatcaaactaaaaaaatataataatggaaataaaaacaaaatgattctggatgggattaatagtagaatggaaataacaggagatgtaatcaatgagcatcaagacagatcaataggattactcagtacaacaaaaaagaaaactaaaaaagtaaatggattctcagggactgtgggacracagcaaaagatataatatttgtg

SEQ ID NO: 826730 - DNA, 555 bp, Homo sapiens
agtaggccatagcctacacattaaacctaaaccaggtggcgtgactgataaaatagaagatttcaataggatcaagagtctcttaagaaaatatccacaatgtccaagatgcaatttaaaatttgaaaattactcatcatagcaagaagaagggaaatcacaacttggaagagaaaagacaaacaactgaagccaacattgagatgaattagatgtaggaatgaaggacaagaatttttaaaaagcaataatgaaactgtttcaataagcaactacaaatttttctaaaacatattaaaatagaaaatctaggcaaaaaatagagtttatttaaaaataccaaatgaaacttatcaaactaaaaaaatataataatggaaataaaaacaaaatgattctggatgggattaatagtagaatggaaataacaggagatgtaatcaatgagcatcaagacagatcaataggattactcagtacaacaaaaaagaaaactaaaaaagtaaatggattctcagggactgtgggacaayagcaaaagatataatatttgtg

SEQ ID NO: 826731 - DNA, 622 bp, Homo sapiens
agtaaagagagaaatgcaaatcaaaaccaccataatttatcacttcatacctgtcaggatggctaatatcaaaaagacgagtcattacaggtgttgacgaggatgtgacgaaaagggaatccttgtacacttttggtgggaatgtagattgatgtaaccagtgtggaacaagtaaggatattcttaaataaattagccgggtgtggtggctcatgcctgtaatcccagcactttgggagtccgaggcgggtggatcacaaggtcaggagattgagaccatcctggctaacacagtgaaacgccgtctctactaaaaatataaaaaattagccgggcgtggtggagggcacctgtagtcccagctacttgggaggctgaggcaggagaatggtgtgaacctgggaggtggaggttgtagtgagccgagatcgcgtcactgcactccagcctgggcgacagagcgagactccatctcaaaaaaacaaaaaaagaaattaaragaagatttatatgtcatccaacaatccctcttctgtgtacatatccaaaggaaattaattctccacctcataaagatatctgcacttgcatgtccattgcaccagtattcactattgaattg

SEQ ID NO: 826732 - DNA, 602 bp, Homo sapiens
ttgaaaagaaacttaaatgttataaagtctaattaaaaaacaaaattactaccccttagtcaatattagacgatagagacataatgataaaaaattttattgctataccaatcataagtgttgtggtgctatattttataagatactaaatcttcatgctctaatgtattctggtatagttttaagttagaggggcacttttgttaaacaaaatttgctctagtaatatcaggtaaactgatccaaaatcatgaaagattaagcccacatatggaaaaaccatagtttaaggtacttctcttcttaaacactgctttcctttatttggaaaatatctgtttttagtccaaaactatgctagatacttttaaataatgtacttttgaggacccatagcttgactgtgatgcctctagtgaggaagtagcattgataacataatcaaacaatccgtgtaggtttggctttatcagctctgtacagtgtttagtagttccaatatataataatcttctttgatacagaaactttatatcttattcatttcmatacatttatcatttagcctaataatgcctgaaatatagtggatgtttaataaa

SEQ ID NO: 826733 - DNA, 566 bp, Homo sapiens
ttaatttctctgaaacacagttttcttgtctataaaacttggattagttgaacttaattcaaaaatttttgagattataattttaaaagtaaccaattaattcattgtacaataaacaatatatgcttaattcgtgttagtttatttacttttatctttgaagagcatactaccaagtaaagttgttatccagaactcagataacttccataacccagattattccattgggtactttgaattacataatggaccataatttgtcaaatgcgtgacaacttgccacctcagttgccaccttccttattcctttcatttcagtacatagctccatatgttatacttctatattagaataaaaaatatgatagcacaggattaaatacattaaaactgtaaaggatactaaagtaacattgatgcatctaaaaaatatttggcattcackccccttattttaccatcaggaaacaggcccagtgttgagctgaaaggccttgagatcatctgactgaaaaaatagaacagatgtgcgagtgagtcaatcattccagaactttgacact

SEQ ID NO: 826734 - DNA, 623 bp, Homo sapiens
atattgtaattcaaaaagaccataataaaccaaaacaggcctcattaactgtatatcagatgtcccrataacacgaccatatgctaacctgataatctggttttaggcaaattttcctgcttattcagtaggtgtcttaactccctttgtacccttcattctcatactggcttgactccaggcagtattattttttctgtatttatttggtgaagttcctcctattgctgaccataaagccagtaccccgagtagcaatttaaaactcaaggattagtccccctacacatctttgctgacctgctccccgaaatacagtagtttgatgaccagtaaaattgtgaatggtttcattactattttcttaatgggattattagtctggcttgccattcatttttattgcatatgtcacttatttctgtgatagaggctcacaataaccttaggagttattctagcaaagatgactacgttggcttagcattattgcaaatcaataacggcaaaaattttactcagaaataccctgcttgaaagacattgccttgttctttgtccaggttacttttaggaatcagtttcaacttgcattggaaggtgaaagaatgttggagctggac

SEQ ID NO: 826735 - DNA, 641 bp, Homo sapiens
ctgttttacgttaaagggccaagtcagctttgcacttgaattgctgtctgtgttctatcctggggcattggggaagagatgtrtttcagggcactcttatgttctctgtgcagcggtcacaggcaactttcaaatcagaaatgcagggcttcagccatctcaaagtaagtttgaccaatctttacatattagtagataaaatagattatactttcaatagattatcaaagggttattataccatttagtaaatttgaacccaataattttggaaactcactcaattctctctgcttctactctatattggagctcagtcatcactaagaaaaactggataccaaaaataattatttattttctactgatgtgttcttctgctctataagcccagttttaaacggactatatgctccctgatttaaataatgtccatgagtatatgtccattcatgataaagaacatattagcaaaactttaaactattagataagtcatatttattattttagagaatgtcaataaaacatatagacacatattttcatcttgaacagtaagatactgaaacttggacaatgtctagtttctcagggttataagtgagtgccccatatttcctaagcatgaccagactttg

SEQ ID NO: 826736 - DNA, 597 bp, Homo sapiens
ttgagttccttgaagattctgcatattagccctttgcttgatacatagataacaaatattttttccagtctataggttgtctgtttgctctgtggattgttttactrtgcagtagcttttaagtttaattaagtgctatttgtatattattgtttttttgttatgtttacttttgaggagttggtcataaattctttgcctaggccaatacccagaagaatttttcctctaaaattttgtagtttgaggtcttatatttatgtcttcaatctatcttggttaatttttgtatgtaataagaattatggttcctgtttcatctttctacatagggatatccaattttcccagcaccatttatttaatatgataccctatccccagtgcatatttttgttaactttgttgaatatcagttggtggtagtatgtagcttcatttctgggttctctactctgttccattgatctatttttacattaataacatgacgttttgttactatagccttgtagtataatttgaagtcaggtaatgtgacacctcatgttttattctttttgcttaggtttgctttggctactctggctctttttg

SEQ ID NO: 826737 - DNA, 652 bp, Homo sapiens
aataacataataatgatacagcctgtcaacatacactaagcactatttacatgagcgaagaccatttttagaatttttaaatttgcataataaaaatgtrtatgccaataaaagactaaagcaatacaaccattaaaagcaatttttttttcctgccaagaacacattaactagatccacacttttgtgctcacaaaagatgcaggtgcaaaacaattatgtcatggttccatgttattaaagttatattgatcaacttgtaatttctataactaaatgaataaaactgtatttcaatcatttaaacaaaatgccacagtaatactatgcacttaactggccaacaatttgggaaaatgccaatgcatatatttgaactagtttcaacaaagaacttcctttagccaaatagtggaaagaaatattcattgcatatttggatgattgctaaaatgcaaccaaaattattctacataaactgcttggctgattaacctaattttcatccctgcagatacagtcaccatatttctgttatatttctggaaaattcattaagaagtttttgagtcaaagtctttcagtgaaaaatgaacaaaaatattactatagcaaacatatttccacctatgcatcattatggtagattgcc

SEQ ID NO: 826738 - DNA, 570 bp, Homo sapiens
agagctccaggggagcagggaccttgtgggctctgctccctgctatatcccctgtgcctggtgcatagtaggcatacagatacaaatggactgtcattgcatatgctcttttgaacttttaraaatatgagtggttaactatagggtacatttttgggtaaataatcataacaattctgtgtgaaaagggtaatttaaaatagtagtatcaaaaatacatttagctgtcttgtcccctccatatatactacatatatatatatatatatatatatatatatatatatgtatatgtatgtgtgtgtgtgtgtgtgtgtgtatgcgcgtatatatatagagaggaagaaaactagaagtatattattgcaaaacattaagagtggttatctctgggttatgagattatggctggctttaattttttttgagatggagttttgctcttgttgcccaggctggagtgcaatggcgctactcagctcaccgcaacctgcacctacccagttcaagtgattctcctgcctcagcctccctagtagctgggattacaggcatgcgccaccacgcctg

SEQ ID NO: 826739 - DNA, 360 bp, Homo sapiens
caattggaaagattatatatatataatatatattttgatgtgtgtgtatatatatgtgtgtgcgtgtatatatatatgtgtgtgtgtgtgtatrtatatatatatatatatatatatcaaaaaagttaacaaacaactaataggtggggcaaaataaatgtttacccagccccaagtgcctggaaaaaggatattctgaagggaagatttcagcttccactaaatgatgaggtttttccccttagcatcgcaacctctcccagggaggtgaattattcttcttaggtcactgagggacctctaagtgcttagctcttatgtaactttgaaaaactgagtaggcattaaagataatcttca

SEQ ID NO: 826740 - DNA, 634 bp, Homo sapiens
gacctatatgtagaaaaaaactgggaatacctataaatattgtaagttttcaaactgtcagtcctggttcttccacttttaggaatctatcttatgaaataactttttaaaatgcatgaatccatatgtataaggattctaggacaccattattcatatcagtgaaaaaataaaaaccatagagaaaagccaagtaaagtacagtatatcaatcctatggaataccacacagctgttaaacactcacatgtaacgatctggggaagtgtcaatgtcaaattcacattgtaggacaacacctattatgtgattctatgcttgcaaaaaaaaaatgaacaatccatgagcaacaacaaaaaccttatgtgtaccttatttatgtatttgagtatgtacacagaaaaggcttcaaaatgaactattaacaatgatttcttccagagggtgagtatgatagggaagagaaaaagacattccatttactttatatacttcaggatggaattttatgagatgatcatttaactattaaaatcaaggaaaaaagtgatcttttaaatgacttttaccttcactcagttgctccagggatccwctagaaagaagacttgagaaagattctacaactgtgtat

SEQ ID NO: 826741 - DNA, 592 bp, Homo sapiens
ataaataacaatttcttattgctatayattaaaactgcacacttctgaatggagagatcagttatcagtgaattgcttttctatgacactggatggctgcataggagcagcgctgacctgaatttatacaaactctcaggagatgtgaactcaatgtgacgagtgacggcagcagtggtcaatacaggaatgcaaaccaggtgtcccgtcccctttctaggaagggcataaaatatgacatgatccctcttacagctccaatttaaacaaaacagccacaacaccttccctcacccctgtctgggatgaggttatttatgaaaatgagccaatgcccaacctggggtcctgggagggtaagggaagtagggggaagctagtgatgggtggggtacagagaggctcccattcatacatgttttttaaaaaaattatgtgtaatcgtaataaccaaaagtatatacacctatttttttctttcagttttaaaatagtaaacaaaaaatccagaacagtaatacttgtataacaagttacactatcttacgtttaagaaggttcactggaagcatgtattcaataactgactttt

SEQ ID NO: 826742 - DNA, 592 bp, Homo sapiens
ataaataacaatttcttattgctatatattaaaactgcacacttctgaatggagagatcagttatcagtgaattgcttttctatgacactggatggctgcataggagcagcgctgacctgaatttatacaaactctcaggagatgtgaactcaatgtgacgagtgacggcagcagtggtcaatacaggaatgcaaaccaggtgtcccgtcccctttctaggaagggcataaaatatgacatgatccctcttacagctccaatttaaacaaaacagccacaacaccttccctcacccctgtctgggatgaggttatttatgaaaatgagccaatgcccaacctggggtcctgggagggtaagggaagtagggggaagctagtgatgggtggggtacagagaggctcccattcatacatgttttttaaaaaaattatgtgtaatcgtaataaccaaaagtatatacacctatttttttctttcagttttaaaatagtaaacaaaaaatccagaacagtaatacttgtataacaagttacactatyttacgtttaagaaggttcactggaagcatgtattcaataactgactttt

SEQ ID NO: 826743 - DNA, 570 bp, Homo sapiens
ctcccataattcccaagtgtcatgggagggacccagtgggagataattgaatcatgggggattgaggggagtctttaccatgctattctcatgatcrtgaataagtctcacggaatctgatggttttataaaggggagttcctctgcacatgctctctcttgcctgccaccacagtaagaagtgactttgctcctcatttgccttccaccatgattgtgaggcctccctagccatgtggaactgtgagtccattaaacctcttttttttttttttttttttttttttgcaaattacccagttttgggtatgtctttattagcaatgtgaaaacagactaatacaggttgcaaaagttcacaggacgtttaagccatgaccaagggcatggagtttatactaaatgaaatggaaagccgttggagggtttgtagcagggaagtaacatgacttgatttatggttttaaatgatcctcctggcagccatctggaggactaatagcaagggaataagaatggaagcatcagcccaaagcttctgcagaaatgagaaaagattttggtttaaac

SEQ ID NO: 826744 - DNA, 491 bp, Homo sapiens
catatagtaccttttatatttctttattttaaatgttataacttttcaaaagaatgtattttctcatacaattatgttgtcagcttattgaaagtatccatagacttaagaatacatattagccaatgtggttgtaaaatatcttccatgagaattttttctaaatttttatgagtactagaaattgaacttaattcttcttaactgaataaacataagcaaattgttgcttcattttgagtcgaacatataatctgaaagcagaaaattcgattctaacttgctcctaaaggatatttgagattaggaagaagtcataaaagcttatcttatttaattattgagaaaaacttttaacattttactatttttgtttagcctatgtaaatatctgcaaactaccttttgaggaagaattgatgcatttaaaaaattcrttaggcctaatgatctcaaattaacaattactcaaggactatagattaataaat

SEQ ID NO: 826745 - DNA, 512 bp, Homo sapiens
attaaaatgaaaggggtaaatcagattgtcactaaagttatattcatttccaaaatgttattgtttttagttttcataggcagcaagagaacacttattatttcagagagaactctcttctttcacacaataggaatcagaaaaccatacacagatagatgaacaggtaaagagcattcagtcagttgataactctattcaagaaggtgagaagatgcaacaagaagaagaaatacatgaatcatgaataaacatcaacatctatctgtctatatatcaatatctgtaatcaactatctatctatatcatcttcttagcatattatggcctcgttaagtgtaagcatattaggaaactttaacttttctttccagaactgttggataacactcttttctagtgttttgcaattgcctttcctaaaactccctttcctttgcgctcttacatatgtagccttctggtaaatgatcatmataataataaattatacttgtttagatctttataa

SEQ ID NO: 826746 - DNA, 639 bp, Homo sapiens
gggggcaaaactcacaagtcctgagggacagctgactggactggagaaacagaatcaagaggagagcaccccagctggggcaaacagtccaagaaaagagacttccaccagatgcatcagagaataaacacacagcctcagactcaagtggacacacatttattgaacacttaatgcatactgaacactggcaaatctaagatggagagcgctgttcctccaaagaacagagatccctcagccccaatggctcgcagacttgattccttggggaacttggacagagagaaattggttccaggagaatttagacgggaagcacctttacaaagtgggaagagaggagaggaggctgagtagaggccatacagagagacaagcagagactcattaacatccaccacaaatctgctgtgttggagaaggaaagaacatggaacagggaaaaatgacatgggagctaattagtcccagagaggggcaatgccttacccagggtctggcaggacgggtgctaggcccccagacccaggtgaaatgttttttcttgttttgaggcactttcaactcactttatcataamagccctgagaggaataggaagaacaggaatttaaagcctatctaccttatagaaga

SEQ ID NO: 826747 - DNA, 591 bp, Homo sapiens
taagctatgatcacaccactgccctccagcaatggactgatggaaggagaccctgactgtaaaaagagaggtggsggggaaacaccactgttgagggtctttttatgtagccaaagtggagtgcttttataaaacactgattcaacagtttaaagcgaaaatttagtcttggttgagaaggtagtcctatcacagaaggtgagaatgatgccacttttggcttccaggcagactggaataacttcagtatttttctctaagtcttctaacttggatttggtgaacactgtctttgtaaaacaaatgcagagatctcagtcataggccagtgtttgcccaagtaaattggttttagattcaggacggcaaaaattcatgcctggagtatttcttcctttcattcccatactcatccattgagtaagtatttgttgaatatctacgtgcgccgacactgcgctaggggctcaggagacagcagtgaatgggagaggacacttaccttctagctggaaagcaaacagcagacaggtaaacaaactaacacagaaattgcaaactgagaagtggtttgaaggaaagaaacgccgt

SEQ ID NO: 826748 - DNA, 485 bp, Homo sapiens
ttggtttcaaattttgtcttgaaaaggattttgtttgggaaacagcttaagatccaaaatatgggatggagactacaataaagagtagagaggggactccaragaaaactctgtctcccatcacaatttgggttaggatcagcattgtagaaaacactaccaacaaatctggaaaagcaggtaaatctgtagtctttctgcaacaacatggaacaacatgacattctatgagatgactatataaatagggaagaaagtgaattaatctccaggagaaatatctagacactctatttttattttttgatacagagtttcgctcttattgcccatgctggagtgcaatggcatgatctcagctcactgcaaccttcgcctcccaggttcaagtgcctctcctccctcagcctcttgagtagctgggattataggcatgcactaccatgcccagctaattttttgtatttagtagagacggggtttca

SEQ ID NO: 826749 - DNA, 485 bp, Homo sapiens
ttggtttcaaattttgtcttgaaaaggattttgtttgggaaacagcttaagatccaaaatatgggatggagactacaataaagagtagagaggggactccagaraaaactctgtctcccatcacaatttgggttaggatcagcattgtagaaaacactaccaacaaatctggaaaagcaggtaaatctgtagtctttctgcaacaacatggaacaacatgacattctatgagatgactatataaatagggaagaaagtgaattaatctccaggagaaatatctagacactctatttttattttttgatacagagtttcgctcttattgcccatgctggagtgcaatggcatgatctcagctcactgcaaccttcgcctcccaggttcaagtgcctctcctccctcagcctcttgagtagctgggattataggcatgcactaccatgcccagctaattttttgtatttagtagagacggggtttca

SEQ ID NO: 826750 - DNA, 611 bp, Homo sapiens
ttattaactactctggttttacttctggtgcacttctcattcaggttttgcctacttaaaacttttttcttgcaattgcaagtgtcccttagattttttacattttaatcttcagtcctggttctgcaaaatattttcttccagcccatctcctgtctgttacctttcatctagggtgtttacttttgatgttgttaaatccattaatttttcctttgagatttacactttttgtgccctgcttgaatcagttagcttttgctatgtaacaaaccacaccaaagcatagtggcttaagccaacaaggattcattgctgtgggattaattgcttctgaacggggcctgatgggcgggggctggatgatctggggggcctcactcacatcatggccccagctgggatggctgggcctcttactccacacggcctttcaccctccaacagggcagcccagggttccgcacacggcggctccgggattccagcgcaggaragggcaagcctggtggacctgagctttccaggcctctccttcttcacatttgttaatgcccagtggaccaaaacaagccacatggccacacccaaactcaaggagtcaaataaaa

SEQ ID NO: 826751 - DNA, 603 bp, Homo sapiens
tttggattatttgtcagctaaaactcattcccctcttccccaatactaccgtgcagaatttccttccctacttcctgaggttgggcttggccatgtggcttcacctaaccactggagtgcctgtggacatgatgcaatcagagaccttagatgtgcttgctcttctctgcatttaggctataacatgtctgaggtagctgtcaccccttaagctgggatcccagaacaaatacacattgagtggatgagaacccaatctatagcttaaaaccatgctcaggagacatgcagtctgcagcagagctgatcagctgagacaagtctagctcaacagaaccacagtaaacctagaaaccaatgagcgtgagaagaaatacttagtctttcaagcatctgagctgggatgatttgttatacagcattattgttgcaattgctgactcaggcaggattgtgaagctcagggtatggcctttgaaactgcataattccaatctttggctccctcaagtttagtctccccaagtgtaatgcagcyacatttatgttttcttgcaagactttcgctttaaccaagagtttcaaacctgattgtcatgacca

SEQ ID NO: 826752 - DNA, 635 bp, Homo sapiens
aatggccactcttagaaaatattaagccacttccctggataataaaggarcaacagagaagtgaacacattcatggtagattctcatcctaagagagtagcactaaaccctctccctcctgttgtcaatgcctcttcaatttaaagaatgaactgcacctcataagaattgaatttgcttattgattaatccatatatatgcagcacttgataccataagccatcatgctggaatacaatgtgctctgaactacaggtgtctagtcattttaagtataaaaattaggtaattatagccagaagtattcattaaaatttgaaagtagataaataaaagagaacattgatatctagtcattaaacttctacaaataaaatgtgaaatgagaaaaaaatgaaacaaaacaaaatccttcctattatcttcccctcaaatccctttttttttccttatgaatcagatgcggcatctccagggaatagttatttcttccctctatgcatgaagcagagcaggttgcggggggggcggtgtccacccgggaatgggggaggtccctaaagcagaaggtggctccatcatctgcaattcccatcagaaacctacctcaaaggctataggtcagacattgttt

SEQ ID NO: 826753 - DNA, 636 bp, Homo sapiens
gcatcagaatcatattaaaacctcaatatattgaatggattttcaatctagcaaaatcaattttgttcttcctaatttaattttacatgactgttagaaataacagaaaaataaataatagtcacttcaacctttttaaagcagtaactaccctcttgtcttctccatatcattccctcagttcctgttttttcccatgaaggaagaagagacagggggaaaaaaaaaaaaaaggcaagcgcagtggttcatacctgtaaacccagcaatttgggaggcagaggcgggtggatcacttgaggtcaggagtttgaggccagcctggccaacatggtgaaaccccgtctctactaaaaatagaaaaattagctgggcgtggtggtgggcacctgtagtcccagctattcgggaggctgagacaggagaatcacttttacctgggaggtggaggttgcagtgagccaagattgcaccactgcactgcagcctgggtgacagagcaagactccatcatatatatatatatatatrtgtgtgtgtgtgtgtgtgtgtgtgtgtgtatgtgtgtgtgtgtatacgtgtgtatacatatatatgcatgtatatacatatgcatgtatatatacacatatatac

SEQ ID NO: 826754 - DNA, 632 bp, Homo sapiens
ccctacttaaagtcacagagctagaaagtgactggaaggtgcctacatttatgttgtctaaattcacaacccaagctgtttcaaatatttcaaagtgcttctaaaattagaaattccaggtgacttacaaattgtgagttggggtatttatatatgtggaggtgaaaacaaatccctgtcgatgtgacgtggaattgaaatcaaccataacttggctcagagatggggctctgtgcaggtggtaatccaagctgtcctcgaaggtgagagctgttactaccattcccgatgttaacagtggcctgagcttatacactagaagagtctccatcagaaagagaagaagatgttggaagcttcagcagatgggctgtttgcctctcactgaaaagaacagcatcgtatcagggtctgctggggttttacaaagcccagatagagacaagagttgccgcacaacccataggagaaaaattaagcaaactaaaacctttcttggagagcagagcttccatataaagattgccacttggttgcttgctggcatctctccgcgatggcagattttcacccgaaaccaccagagcccgccycaccccttatctctgcgctggccctggtggagactccaa

SEQ ID NO: 826755 - DNA, 598 bp, Homo sapiens
atgttcattttctcaacattttgtagaacaaaatctgatgaccttaatatggtttataaggtccttaagggtttggttcctgcttaatgttctagactcatctttcactttgcctactccttcatacatccactttgctctagtcatattgaagtttattcttttccttgaaaagaataacaaacttcaaatgttatgttactttgcctttagcatggttcattcttcctcctcatttggctaatgtgtacttacctcttacctaagaaagttctttttctatgaagccttcaaggataccctacaatgggctagaaacccctcctgcatactattactaaagcatatatccctctgaccacacaacatcatgacattcaacacctgtatctcaatttcctgcctactggttgcattcctcactagcctgaaagaaatggtaatgtagtcatcttgttcttatttatgtctagtgagtcctgctcatggcattcataagtcacacaaaaaatttgttaaaaaaaatgaaaagctagttttatttcctctgatgccatgatctcaccccactacaygctcttctcctccctgcctgagg

SEQ ID NO: 826756 - DNA, 586 bp, Homo sapiens
taggtaactaaagaaaaattcagaggactgtgaacttaggagagtatctattactgccccaccatttgataaatgagaatatactggcccaaaacaatgagatamccagcccaaggactttgagctggagagaagaaagttctggacctgaacccaaattttctaaatccttagtctatgctcctgccactataccaagcttcttaccaatgatcaggatttctcaactccctgaactcggttcttgtgctgaatactgatggagtaggtagtttatttcattaatgccccccatcaatgtgcttatggaataacatgtcaaagtaaaattaagaaggaaacttaagtcagtaatatcttctgtcaaaacctgaacacattaattacatttactttcctattgcttgaacctgacttactttcctattccataaactttttcaaaatgtaaaaaccaagaccattttgtttttgttgttgctgacattgtagttattaggagtttagaaaatattttagatacggggcttctttgccaaaacattattctgattctaagtgcccgtaagttggaagacaaagtaag

SEQ ID NO: 826757 - DNA, 591 bp, Homo sapiens
ttgattgtttatattggcttgtaaacctgacagctattctagttgcatgctacagcataagttctagctaaaggtattcatcaattatgctccaatggatttttttaatagggaaaggaaacaaaaaaaaaggatgaagtttattatggtgacagagacatcttgatctatgattttgagaaagctgtccacatctaggatgccgtctgcttctgggaggaaatttttggtatattttatcttaaagtctcaaacaggtatatagttttaggagtctgaagggccctttggagttgtgagaggtagacccaaggcttaaggctctgaagagttactgtagtgtggttggtcagaagaacttgatgtggttcattttaatacagtttaagggcagcctttttctgatgttatttttagataacccaatctccaggtttcagaccttagaggatttgaatgtctytagtgtatttcgatttttttttccttgtgaaagtatagtttggcaaaatgtagcaaaggattgtagtacattagggtttaggagattgggagataaataaggttctattattagaggtgcagcctttt

SEQ ID NO: 826758 - DNA, 614 bp, Homo sapiens
gagaagattatcccaacaatgagagagctgcagatagaaagatgctactgaagccaactcccctgccatctgccactaggtggatcaggatttgccrtgagtgcctctatcctctaatgtttaaggcacttactatacggatgatgtactgtcaattggttcatcagaaactttagtgttgaaggccctaactgtagtgcaatcacccttcttcagcataggctaccaaattttaaataccaaacagccttgctatttaaaagttgagaagatgtgagtggattcacaacgatgagtttgatattcaggggaaatctttcctctttttggctccagcatcaaaagggatgcccagcaacctattaaatactttgagtgttacagatagtacaaatctctacaacttataatttttcaaatgtcagcctctggtaaagggagacaacctccacctccgagaggtgccttttggagttttagacttttggcctccttaacatagctaccaggtgcactgcttttagaaaacaactattagcttgctactgggctcttgctgaaactgaacacctgacctataaagggctttttgctctctggcctgaaattctcat

SEQ ID NO: 826759 - DNA, 564 bp, Homo sapiens
ccttgatttcatggaaacagaaaattcaggatccattttcataagtaagcataaaaaggatttttgaaataaaagaartttatgagtagcaacctatttaagaaaaatgcttataataacagtgactaacaaaatatttagcaaagaggatagaatgctgtcatagcaaaaacatagcaacaaaaggcaggtactctttgggttagtggcagtaagttacttaatttataaatttcttagatgacataggtaagttcaaaagaggttaatattcttagccttctgtgtagctagtttatttttcttataaaattagatgctttgtcatactcctctaataatgaatgcacatatatttttagattgatataaccagattcaaagaacagaagtgattatgtcagatttatattgttctttgcaatatggtgttgacatgttaatgattcctatcaggtgctagatgtattttttctctaatacttctattcttcacatattctcaagtgggtgttactagaataaacttgcactggcgccctagatcctctgattatgttgtca

SEQ ID NO: 826760 - DNA, 635 bp, Homo sapiens
aagagacaaaaagcaggagaggaacagggctggggctgggggaggtggtggcggaaaggtagccgggaaaggtcagggctttctagccatcaagtggtaaaataaacagggagctgcgcggccgggcctgcacatcctcaaatcgtcttattcagtggagccgatcagagcagacggacgcgctgaaaggggcctcggtttatctgaactcttgcaagcggcctctgaggccacagagcccgactccgctcctccacccagccacagcacagcttttatagaaacccagcgtcttatgccatcctgggggacctgctggggaaggagggaaagccagggctgaaaaaattcaagtcaagcctcattacttcctcattacctttgcaaaagtggagggagagaaatttttatctggggagcgaggctgggatgtcattgtgctctgcctggttactgcacagccgaccgtggcatgcagccgccgggggactggagggttctcccgttcctctgcagcaatgatccactcgttagggtttttaaggcaaattgccattgctcatcactgtgtcagcccrggggcgggctcaccccacttcccaccctgcagatggatgggggagatgaaggaaatg

SEQ ID NO: 826761 - DNA, 585 bp, Homo sapiens
agacacacgcatatgcataggattaaacgcaagtggggaagtgcaaactaggttctatgagatcagagaggacggcatctatcayatatgttagcatgtgtgagagtgtgtgtgagtagagattggttgtgtgagagagaggttgtgtgtatatgtgtgtgtgtgaaagggtaacttagggagttaaccctttctgaatcctaaagggttgacgggattagagcagaagcacatttcagatcaaaagaacacagaaatgccataggaatgtaatatatcatgatgtgcttcagggaccatgaaaagttgacagttgctggaataaaaaacagagaggtaaggctggagaataagcagaggtttgggtggggtcttctggataaggaacgtctttaataatactgtaaagaacttgaactttttattggagttcatgggaaacaaatgaaatggtctaaacatggatacgtttaagggtaacatggagaatggatttgatgggtaccagactgtgtccaggcattctaattaaaagactgttgtaaatatctggacaaaagatggtaaaagacttaacttggcaat

SEQ ID NO: 826762 - DNA, 585 bp, Homo sapiens
agacacacgcatatgcataggattaaacgcaagtggggaagtgcaaactaggttctatgagatcagagaggacggcatctatcacatatgttagcatgtgtgagagtgtgtgtgagtagagattggttgtgtgagagagaggttgtgtgtatatgtgtgtgtgtgaaagggtaacttagggagttaaccctttctgaatcctaaagggttgacgggattagagcagaagcacatttcagatcaaaagaacacagaaatgccataggaatgtaatatatcatgatgtgcttcagggaccatgaaaagttgacagttgctggaataaaaaacagagaggtaaggctggagaataagcagaggtttgggtggggtcttctggataaggaacgtctttaataatactgtaaagaacttgaactttttattggagttcatgggaaacaaatgaaatggtctaaacatggatacgtttaagggtaacatggagartggatttgatgggtaccagactgtgtccaggcattctaattaaaagactgttgtaaatatctggacaaaagatggtaaaagacttaacttggcaat

SEQ ID NO: 826763 - DNA, 595 bp, Homo sapiens
ctctgcagcaattttctttgttaaaaatgaagcactctgacaggtatctgatttgcaagyactttaaggtaagcatcagactaaaaccaaaatccttctatagtgtcacaaaactgaaaaattgttatggttaacttcgataatttttagaagtagaaaatttattgaaagttctttaaaaaataatgcaactgaccagaatttttttttgaggcatgtgtgtgaaataaagtcaatccaaaatagttttagacaaaatacctataaacataataatcaactatattttcaaattaaagtgaatattacatctaacttataaaaatgaatatattcttaacagagaaaaacatcttcaaatacaatgtctaacaattatgagacacattatgaatatctatagctagaatatataaagaatacttcaatatttccaaacaaagagatttagtaagtttgaagtaggtcctaaatatctatatatttttttaaatgacacaggtaagtaacccgaatacccagttgaaaactattagcccagaatacactggtttcaaattgaagaagtgaaactaagaccaaattaacataaata

SEQ ID NO: 826764 - DNA, 595 bp, Homo sapiens
ctctgcagcaattttctttgttaaaaatgaagcactctgacaggtatctgatttgcaagcactttaaggtaagcatcagactaaaaccaaaatccttctatagtgtcacaaaactgaaaaattgttatggttaacttcgataatttttagaagtagaaaatttattgaaagttctttaaaaaataatgcaactgaccagaatttttttttgaggcatgtgtgtgaaataaagtcaatccaaaatagttttagacaaaatacctataaacataataatcaactatattttcaaattaaagtgaatattacatctaacttataaaaatgaatatattcttaacagagaaaaacatcttcaaatacaatgtctaacaattatgagacacattatgaatatctatagctagaatatataaagaatacttcaatatttccaaacaaagagatttagtaagtttgaagtaggtcctaaatatctatatatttttttaaatgacacaggtaagtaacccsaatacccagttgaaaactattagcccagaatacactggtttcaaattgaagaagtgaaactaagaccaaattaacataaata

SEQ ID NO: 826765 - DNA, 595 bp, Homo sapiens
ctctgcagcaattttctttgttaaaaatgaagcactctgacaggtatctgatttgcaagcactttaaggtaagcatcagactaaaaccaaaatccttctatagtgtcacaaaactgaaaaattgttatggttaacttcgataatttttagaagtagaaaatttattgaaagttctttaaaaaataatgcaactgaccagaatttttttttgaggcatgtgtgtgaaataaagtcaatccaaaatagttttagacaaaatacctataaacataataatcaactatattttcaaattaaagtgaatattacatctaacttataaaaatgaatatattcttaacagagaaaaacatcttcaaatacaatgtctaacaattatgagacacattatgaatatctatagctagaatatataaagaatacttcaatatttccaaacaaagagatttagtaagtttgaagtaggtcctaaatatctatatatttttttaaatgacacaggtaagtaacccgaatacccagktgaaaactattagcccagaatacactggtttcaaattgaagaagtgaaactaagaccaaattaacataaata

SEQ ID NO: 826766 - DNA, 613 bp, Homo sapiens
tttagctaatgaaagtttgtctttcggagtctgttctactctaggtgaactaatataactgaaattacagatagacttaaattataggaaacaaaataccctaatctaattaggatgttgaaagtggtgtgaatttatcttactttgtgccaatccattgtgggagattaaaatatgtcacctcaaagtgtgtttctttggtatattttgagatggctatcgggaggggttgtagacacaggaatagctctgagaaactgtccttttgtgggagagatttgcatgcacaaaggaatgcattttcattagtaaatagccaatgtaaacaggttttctctaaggctcccttattcgcattatctggatttagaaaagatcgtgttaacacccttgttcagagattgccacaggatgtcacatattcttctgagagctattacctgagagtcttattatctgcttaataagaggacaatgtttatttgtagtaaatttcctctccttaccctccaatggtttgtcaccatcatcttccatgaactcctagcccctatacttttctgtatggtacagaaatttctgtcatctstcccatttacaagtctcatatttt

SEQ ID NO: 826767 - DNA, 622 bp, Homo sapiens
aagatcgtgttaacacccttgttcagagattgccacaggatgtcacatattcttctgagagctattacctgagagtcttattatctgcttaataagaggacaatgtttatttgtagtaaatttcctctccttaccctccaatggtttgtcaccatcatcttccatgaactcctagcccctatacttttctgtatggtacagaaatttctgtcatctgtcccatttacaagtctcatattttatgtggcttccatatatatgtgcacatactacgcttctatgccttttctcttgttaatctgtctattgtcagtttgttttatagactcaaattattgagccttcaaagcgagagaagaaaatttcctcttcctgtacaccacaactgcttcctagatgagtttctagtatttagtctgataatgctacaaaccatttttaaaaccctacttgtcagaattgtgcttctaaaactgttttcaaagcttcaaagtcattctggagtttattaatgacttaaagagaaaatgaagcacaatgacatgatcaatacggatataaccccctttttattgcctgctcctcytctccttacatgaatggttatgctctcatgccctat

SEQ ID NO: 826768 - DNA, 530 bp, Homo sapiens
tttcttcccccatatttatttttttacacagaaataggagaaattgatactaaagaccaagtaaaatgcatgacaatagtagagtagaacttaaggtgrtgcttcaaagaaactacaaagtaataagtactactgccaactcttctctagctaccaggaaatatgttgctgttacaatgggtaaataggtaatagtatctattaatcaatgtaatttaaggtgtacatgtgtttagtgtgaaaatcaaaatagaaaaatctataaccaatttagttttcactgttgctttcaaaaaaaagataattataataataagatttactaacatttaactaagtatgaggattaatacacattgtctagacatatccctttagcacaggctttattatttcaataattttctacttgaaaacgaatataaaaatatgacttaagaaattatgttgttttgttttctcatcagtattttaaataatttatggatttagttatatatgttttgaaagtgaaatccactgcccagtgt

SEQ ID NO: 826769 - DNA, 486 bp, Homo sapiens
attctgtccattttcaagatattgattcttcctatccatgagcatgaaattttttatgaggccagcatcatcctgataccaaaacatggcagagacacaataaagaaaagaaaatttcaggtcaatatccctgatgaacacagatgcaaaaatcctcaataaaatattggcaaacctaatccagcagcacatcaaaaagcttatccaccacgatcaagttggcttcatccctgggatgcaaggctggttcaacattcgcaaatcaataaacataatccatcacataaacagaaacaatgacaaaaaacaaatgattatctcaatagatgcagaaaaggccttcaataaaattcaacatcccttcatgttaaaaactctcaataagctaggtrttgatggaacatatctcaaaataataagagttgtttatgacaaacccatagccaatatcatactgaatgggcaaaagctggaagcattcccttt

SEQ ID NO: 826770 - DNA, 617 bp, Homo sapiens
taatgctctcccttcccttgcccccgacccccggacaggtcccattgtgtgttgttctcctccctgtgtccatgtgttctcattgttcaactcccacttatgagtgagaacatatggtgtttggttttctgttcccgtgttactttgctgagaatgatggtttccagcttcatgcatgtccctgtaaaggacatgaactcatccttttttatggctgcaaagtattccatggtgtgtatgtgccacattttctttatccagtctaacattgatgtgcatttgggttggttccaagtctttgctattatgaacagtgctgcaataagcatacatgcgcatgtgtctttatagtagaatgatttataatcctttgggtaaatacccagtaatgggatcattgggtcaaatggtatttctgattctacttccttgaggaatcaccacactgtcttccacaatggttgaactaatttacactcccaccaacagtgtaaaagcattcctatttctccacagcctcrtgagaaatgagagaatcacttgagctcaggaattcgagaccagcctggtcaacatagtgagaccccatctctatttttaaaaaaaaaaaaacgggc

SEQ ID NO: 826771 - DNA, 521 bp, Homo sapiens
aaatttttttgtagagatgtggtctcgctatgttgcccaggctggtttcaaactcccrgcctcaagcaatcctcccaccttggcctcccaaagtgctgggattatagacatgagccaccatatctggctaggggatgcattcagactgtggcaaaaccaaattatttatttgttaatttttttttttacagagaagttaaattatgtcctgtattttacatttgaattttattatactgaaataagtttcaccagtgtaaatacttcttacataaattttacagggaagaattgtttttctttttgcattttgatatcagtttaaaaaagaaatcaatgttgattttattagaaataatcttggaacagaagaccagttaatttaattatttcaggtcacagctgaaataatttctgtataattaaaaaatttgctatgatttatactatttactttgtgttacatagtggagtactttacaacgtagtgacatttagtacgttcacaatattgtgaacct

SEQ ID NO: 826772 - DNA, 631 bp, Homo sapiens
taaatatcaagatttgagtgaaagtcaaatatttgagtagagtttcaattatatgttcgtacatagtccaaaatatgtataaattatgcataaaatatatataatgatttctaatattaaagatttatggtaggccataaatatgccacgtccttgccctaatccacagaaactagtgttaatttatatgggaaaagagactgccagtgtgattaaggaccttgggacagaaaggttatcttggattatgtgggtggttctgatttaatcaaaggagtccttataagagagaagtaattagaaagacagaagagatgttaagagggaggtagtgatttaaagatgttatactgctggctttgaagttggaagaagggtaagcccagaaatgtgagaaaagaaactttagaagctaggaaaggccaataaaaggattttcacctcagagcctctacaaggaataagtcttgccattaactcagtgaaactgatttagaacttctgatttccagaactgtgagagaattcattcgtttatgtcactaaatttgttgtaatttcttacacgagcrgtagagaatttttaaactctctcgtgtgtatgagcttcaaagtttcaccgaaatagtta

SEQ ID NO: 826773 - DNA, 624 bp, Homo sapiens
aaaggcagcaagataaatgaaaccaataacatgtagtggagcttcaatatgtctgggagcagactttttattggaaactttataggatgggagagagtgtaataacatatataaagagctggagggtgaaaaaaacttttactatagactagtatatacagtgaaaatattcttcaaacatgaagaagaaataacgacattctgagacaaacaaaagctgagaaatttcattaataccaagacctttctacaagacatgctaaaaagagtacttgaattagaaagaaaattgtattattaatcaataaatcattacctgagggtacaaaactcactagtaatagtaagcacacagaaaaacacagaatattataacactgtactgtagtgtgtaaactactcttatcctaagtaaaaagactaaatgatgaaaaaattttaaaaaatacaactttttaaatcatagtcaacacagtaagatataaatagaaacaataaaagttaaaaagcaggggaactaagttaaggcatagatttttttattakttttctttttgcttgtttatgtatttgttaatgcaaataatgttgttatttgtttaaaatatcagttataagatagta

SEQ ID NO: 826774 - DNA, 561 bp, Homo sapiens
ctaaaagtcttttgcagaagtctttagagtttactaggtataagagtatatcaacagcggacagagataatttgactttctcttttccaatttaaatgtttttcatcttttccytttgcttgattgccatagctagaacttccagtactatgttgaatagcagtggtgaaagtaggtatccttgtcttgttccatttcttaggggaagtgcttttccccattctgtttaatgttgcctgtgggtttgttatacatggcttttattattttaagtatgttctttctattcctagtttggcaagggtttttgtcatgaaaaaaatgacaaattttattaaatgtttttttctcaatcttttgagatgattctgtggtttttgtttttaattcttttatatggtaaatcactgatatggtttgaatcctgtgtccccacccaaatctcatgttgaaatgtaatccccaatccccaacaggaggttgggaggtgattggatcacgagggtagtttctcataaatcatttagcaccatcttctttggtcaccatagtaagtgagtt

SEQ ID NO: 826775 - DNA, 620 bp, Homo sapiens
ctcattcgctttcttttggtccaagtcaatttacattaattcaacagaactcaatccrgaatcttaataattcagtaactatctgaattagattaacagtatcctaacaaaaccactcttacatagtaaggtaagcaatatgtactttcacagaaaatatttaaaacattaaagaggtcaaattgccttcaatccctctcagaccctggaaaatatcattcacattaaaacaaattaaatttttttccattttatttttttccattttatttttttcaataagtgggtcttctaagaatctttataaggggaaatttatttgacttgttaaaaatatattttattttttaaagtattttataagtcatcagatgtttaacagttattctaagagaatgatttttatttagacaaatttgtaaattcatttttgttaattaacattaatacattgaaattattcatcattaattttgatttttcttatttttgttcaacaattttatacagtttataggcacttttagttgtttataataaaaattatagtaatgttttaaaatatatttttaataatactagtacagtttcttgtacccaggtgctaatgggctaaattg

SEQ ID NO: 826776 - DNA, 359 bp, Homo sapiens
tcattagatcacattttttttttttttttttgagacagagtctcgctctgttgcccaggctggagtgcagtggcttgatcttggctcactgaaagttccgcctcccaggttcacgccattctcctgcctcagcctcccaagtagctgggactacaggcgcccgccaccacactgggcaaattttttttttttttttttttgtatttttagtggagatggggtttcatcatgttagctaggatggtctcgatctccagacctcatgatccgcccrcctcggcctccctagatcactttttaaaactcccatatatggtaagaacatgtgatatttgtccttctgtgtctggcttatttta

SEQ ID NO: 826777 - DNA, 587 bp, Homo sapiens
aaaattaaaaacacacttatatagggccagaatctcggcctatgtgtccaaataacatagctttcttagaaaattaatctgctgtttaatgaaaaattgtaaagggttctaaaaagttcatacaaatcttatgctatggtcaaagtaaattaaagctgaatagattaataaattttattaaaaactagcttcagcatttgacaagatttggctctgtgtccccacccaaatctcatcttgaattgtaacctccatctgtcaggggagggacctggtaggagtgattggatcatgagggcggtttcctccatgctgttttcctgatagtgagtaagttctcagaagatctgatggtgtttaaaagtgtttggcagttccctccttgcttgcttgctctcctgccaccttgtaaagaaggtgcttgcttctccttcacattccaccatgagtgcatgttttctgaggcctytctagccatgcagaactgtgagccaattaaacctttccatataaattacccagtctcaggtagttctttatatcagtattaaaatggactaatacagcattaaagatgcactaatgca

SEQ ID NO: 826778 - DNA, 605 bp, Homo sapiens
ttactgttctcattagagcgaatgagctctcacgagatctggttgtttaaatgtgtgtaacacctcccccttcactctctctcctgctctggccatgtgaatactgtgcttgcctccccttcaccttctgccatgattgtaagtttcctgaggccatccaagccatgtgtcctgaacagcctgtggaactttgagccaatgaaacctcttttcttcatgtactactcagtctcaggtagttctttatagtaatgcgagactggaccaatacacaggttaaattgctgacagggcatatggaaatgttctcctctatcacttaaagataaatgaaaacaagagaaggaagcaactcccaaatagtaaggagaatgtgaggaaagtgaacagcaaaattgagatgttgcgttaccagtaacaacaataaagaatagccacaggctcagaagagacttgaatcagaaattagaggtgatctttctgcagagatctgaagggactacaaattaggaatcagtgagaagagatggtaggttaaaagtatgggacagaaatgtgyagcaattcctctctagggaatgtctatagattagctttgccgcctg

SEQ ID NO: 826779 - DNA, 559 bp, Homo sapiens
ttttctttttcaccacatggttgagctgcaaattttccaaacttttatgccctgcttcctttttaaatacaagttctctttgtttatgcaaacgagcataggcttttakaagcagccatgccacatcttgaatgctttgctgcttaggaatttcttctgccaaataccttaaataatctctctgaagtttaaagttccacaaatctctagagcagggacacattgtcaccagtctctttgctaaagcatagcaagagtgatcattactccagttcccaataagttcctaatcttcatctgacacctcctcatcccggactttattgtccatatcactatcagcattttgttcaaaaccattcaacaattgtctaggaagttccaaagtttccctcatcttcttgtattcttctgagtcttccaaattcttccaacctctgtccattacctagttctaaagttgcttccacattttcaggtgtctttataacaatgccctactttctcagttccaattttctgtattagtccattttcacactgctataaaaacatatct

SEQ ID NO: 826780 - DNA, 559 bp, Homo sapiens
ttttctttttcaccacatggttgagctgcaaattttccaaacttttatgccctgcttcctttttaaatacaagttctctttgtttatgcaaacgagcataggcttttataagcagccatgccacatcttgaatgctttgctgcttaggaatttcttctgccaaataccttaaataatctctctgaagtttaaagttccacaaatctctagagcagggacacattgtcaccagtctctttgctaaagcatagcaagagtgatcattactccagttcccaataagttcctaatcttcatctgacacctcctcatcccggactttattgtccatatcactatcagcattttgttcaaaaccattcaacaattgtctaggaagttccaaagtttccctcatcttcttgtattcttctgagtcttccaaattcttccaacctctgtccattacctagttctaaagttgcttccacattttcaggtgtctttataacaatgccctactttctcagttcyaattttctgtattagtccattttcacactgctataaaaacatatct

SEQ ID NO: 826781 - DNA, 634 bp, Homo sapiens
ccatcccctcagttacgtaagccaatttcttgaaagaaatctctgtcagccgggcacggtggctcacgcctgtaatcccagcactttgggaggctgaggcgggtggatcacgaggtcaggagattgagaccatcctggccaacatggtgaaaccacgtctctattaaaaatacaaaaattagccatacgtaagccaatttcttgaaaaaaatctctatcagccgggcatggtggctcacgcctgtaatcccagcactttgggaggctgaggcgggtggatcatgaggtcaggagattgagaccatcctggcccacatggtgaaaccgcgtctctattaaaaatacaaaaattagccaggtgtggtagcatgcgcctgtggtccccagctactgggaaggctgaggcaagagaatcgcttgaacccgggaggtggagtttgcagtgagcggagattatgccacggcactccagcctggcgacagagcaagactccgtcaaaaaaaaagaaagaaagaaagagaagaagaaaggatgaaagagagagagagaaagaaagaaaagaaatctctatcatctacctatttgtctaatccatctaccagctatcaatyaatcaatatatgtctatctatc

SEQ ID NO: 826782 - DNA, 638 bp, Homo sapiens
ataatttttaagcatttgaatagaaaacattaacaaaaccaccactgagaagcacaatatctcttctatcctcccacttcactgcaaacaggaaaatggcttccaaggtcagctgtaagggtaaggtaagattgaacagcagccagaaggaaaagagggaatctgcctctttcaacatattctatggaaatgcactcccagagcatctgaaaaacaaaaacaaaaacaaaacaaagaaacaaaaaaaacagtgtgctaagtgtctaggaacagcaggctgatgaggacaggctgccctgacttcctgctctgctttctgcatctgagccacactttcccttgggcatgtcaacagcacttatgtctctgcagatgagcagctagtacagatgtttaaagtaaaagcatagcctcagtttaaaagcaagaagagagagaagataaagttcttcctttaaaaataagaagaaaatcattcctgcctaccttccttccttctttttttttttttgtktgttgtttgtacgtttgagaggtagtctgttttacgctaagttctgggatacaggtgcagaacttgcaggttcatttcataggtatacatgtgccatggtggtttattgcacctatcaccccat

SEQ ID NO: 826783 - DNA, 474 bp, Homo sapiens
ggggggtgggtgtcagtgaagagttggttcttcagggacagtatgtgtgaccagtgtgaaatcagacgttgagttaaaggacagctcttgtggagctataggctgcctaaacttaacaccagcaactagccagtactccttggctgaagttgccactctgttatcaggaaggcgtggcaaagccagaagaaaagatgaaagcagatgcaagacaggcagcatccattgtccccacactcaaaagtaatcagatgtattaagtcacacgggagctttacaatcagtgctggggctttggaagtgccagttggcagaataaaagattgcgtgcagttggctgtgctgaaacagattcacctctcaggagggccttcccagggaaacggggrtggcagaatggagtggaaagatgcgaagaacgaggtggggaggcaggggccctcctgccatctgaactgcctacacatcacatca

SEQ ID NO: 826784 - DNA, 474 bp, Homo sapiens
ggggggtgggtgtcagtgaagagttggttcttcagggacagtatgtgtgaccagtgtgaaatcagacgttgagttaaaggacagctcttgtggagctataggctgcctaaacttaacaccagcaactagccagtactccttggctgaagttgccactctgttatcaggaaggcgtggcaaagccagaagaaaagatgaaagcagatgcaagacaggcagcatccattgtccccacactcaaaagtaatcagatgtattaagtcacacgggagctttacaatcagtgctggggctttggaagtgccagttggcagaataaaagattgcgtgcagttggctgtgctgaaacagattcacctctcaggagggccttcccagggaaacgggggtggcagaatggagtggaaagatgcgaagaacgaggtggggaggcaggggccctmctgccatctgaactgcctacacatcacatca

SEQ ID NO: 826785 - DNA, 597 bp, Homo sapiens
cattcccatgtttattgcagcactatttacartagccaaaatatggaatcaacctaagtgcccatcaaaggatgaacagataaaaacaatgtgatatatacacagtaaattattcagccataaaaaagaatgaaatcctgtcatttacagcaacgtggatggaactggaggtgattatgttagtggcacaagtgagacacagaaagacaaatatttcacattctcgcctatatgtgggagctaaaaatgttgctctcatggaggtagaaggaagaatggtggttaccaaaggctgtgagggcaagcagggtggaagtaggaagagaggttgcttaatggatacataaatgcagttacgtggaaggaataagttctagtattcgacagtacagtaattatagttaataataatcgattgtatatttgaaaagagctacaagaactgtaatgctcccaacacaaagaaaagataaatgtttgagataatggatatcccaattaccctgattagagcattatacatagcataagggtatcaaactatcatgtggatccccaaaatacgtacgactactatataccaatataaaatacttt

SEQ ID NO: 826786 - DNA, 537 bp, Homo sapiens
ctcaggcaggtcattcaggaggtataccagaggagggtattgttatcgtaggagatgacagttctatgcctgttattgttccaaaagaccttccagtagaacaggatgtggaggtggaaggcagtgatattgatgatcctgatctcatataggcctaggctaatgtatgtgtttgtgttttagttttgttgttgttgttgttttgttttttgtttttttgagacagagtttcactcttgtcacccaggctggagtgcagtggtgctatctagactcactgcaacctccgcctcccaggttcaggcgattctcctgcctcagcctcccaagtagctgggattacaggcatgcaccaccatgtctggctaattttttattttttagtagagacggggtttctccatgttggtcaggctggtctcaaactcccgacctcaggtgatctgcctgccttggcttctcaaagtgctaggattacaggycaccgcctctggcctgtgtcttagtttttaacagaaaaatttaaaaagtaaaaaa

SEQ ID NO: 826787 - DNA, 557 bp, Homo sapiens
cttttgggttggatccaagtctttactattgtgaatagtgccacaataaatatatgtgtgcatgtgtcttgatagcagtatgatttataatcctttggktatatactcagtaatgggatggctgggtcaaatggtatttctagtcctagatccttgaggaatcaccacattctcttccacaatggttggactagtttacagtcccactagcaatgtaaaagtgttcctatttctccacatcctctccagcacctgtttcctgactttttaatgatcaccattctaactggtgtgagatggtatatcattgtggttttgatttgcatttctctgatggccagtgatgatgagcatttttgcatgtgtctgttggctgcataaatgtcttcttttgagaagtgtctgttcataaccttcacccactttttgatgggttgtttgatttttttcttgtaaatttgtttaagttcttcgtagattctggatattagccctttgtcagatgggtagattgtgaaaattttctcgcattctgtaggttgcctgttcactctgat

SEQ ID NO: 826788 - DNA, 619 bp, Homo sapiens
tgtagtgtgacttttatggacacatttcaataatttttgaattatctaatcagctttcatgaatcaaccagattaaggattctttaacacctggcacttaaaaagcacaaggaaaatctttatgttgggtgctagattaaaagaatattgaaatggaaatcattgtccagttttctttactcattactgctggcctctgaaaacaatagcttcttctcagaaggaatgtgcctacggcacattgatggcaatggtgtctgctccagaacaaggttgagttctgagagtgcctggcaagcaggagaaggacttctctggatttcattctctggggtagatgcagtactacccataataaccctgctctacgattatatagcagcaatctgagttatgtgcacctgttagagttttattgctgattataaaaccaccttctaaggaggaccaaaacaagacaacaatcgtccatgaatgacaaaagtttcagggcagccatagccaaagacacaattgacaaggaaacttgttacytccgtggcacacaataatttaatataaacaattataattattactgataacggacactgaaccatatcagaattttagtagtttc

SEQ ID NO: 826789 - DNA, 656 bp, Homo sapiens
aacttgaaatgagactgttttgtacttttgtgaatcaattctacttaaaakgtaggcagtagcttttccaatagcagttacaaggtaatttgtgctttcaggacacaggtgtctaagtggccagtggtctaaacgaggtttccacataccaggtattgctcatcagtgtgcaatttgtatcctcataaaagtgtacatcagtagtgttcagggatactcattggattgggtgtcacactatttatttggctcataatgtgtgtcaagggaccctacagtgaaagtcatttgtagaattccatctgctcttctacaggcaggtagccaggtcccattgttgaacaaattatatctgatcactccctgatgctatgtataattgttttctcttctttgatgtgaatgttaggaaataaactatgaaaaataatatatgttcttaaaagaaaattaggtgaaagtttgtagttaacagttgatcatagaaatagtggctataataacaattaaactaggccagatttttttcatctacatctagatatgtatcaggtacataatttttaaacttgcatttttacattcatgttgtaaaaatgcaagttaaaaattcagttagcagttagttattttcaaatataatttatctactactt

SEQ ID NO: 826790 - DNA, 494 bp, Homo sapiens
agttgatcctaccaggactaagcctgcctatcaatatagcagatttccttccggagcaaggtgaatctaggaatgccatccaagtgcaaaggcctaaaactgggactttcrggaatctgttggtgctttacaactgagctcatacccaagttgcaagacaaagccctctgttttcttctcttgccttttcccaagtggaaggagtctctccctgtactggactttctggacccgggggaagggtgatgcaggcaatcctttggccaccacagctagcatctcactgagttgcatccctagcccactgcctctgagatcagcacagcaccaggactcgcccaaggactgccgtctctatggcctgactgccactcaaatttatttgagggggtcccaggccatttgtgtcagctgatagtgaagctggcctggactcagatttcttcttctgggatggaggatgttcctctggcccaagactggtctaaatactc

SEQ ID NO: 826791 - DNA, 532 bp, Homo sapiens
taagggaaatagattgtaacagtaacgtttaactttcattttagatgctgcaactacaaagaaaaacggactttcactggctgactgattgtctggaaaccgttttgggatttctttcctaagcttcttaattagaatctttacattatagagaaaatgattttgagagttgagtgtggtctgtggagtgtcctattagtaacgacttctgagtaggtttaagtcacctcttttattgaaatgtgaaaaggtgtgacatttataatagaaaactctttgaaagtcgcaccgttcattttagaggaattttaaatgtcaccccaaattttacgattttaattaattttaattaatttccaaattttaaccaataggcataatattcaagatcttatctaaaaattattacatggcaatattttgtccttgttaattaaaaaataacactgaaaacacagtcgtcttcctttamggtaaaaacctgtccaatagtaacaatctcaatgatggcagaatgaaatcagaatctgat

SEQ ID NO: 826792 - DNA, 457 bp, Homo sapiens
atcaatccatccgctgccagtgccccagtttcttctgagggaaagtaaataaacatttgaacataatcatctttaggaagtttcagtgcycccatagccatagctaagaacttttccgctagatacacataggtacaaagggacagaagggaaagagccatcactctgtaaaccatgaacagaaagcaattatattaatgaggggaaaattacattgtacttaaagtttgtcatgttgttttctttggggcttatgtttatatttctgttcaataaatattttgaaaattcagattcatttgccaatcttttctattttctgcaagattagtttactatgtgttatggaagttatgaacgaaataataatttgaatgtgacccaacacagtaactgaatttcaaatgataaggacctatgaatacggcaaaattatatatgttcatgtattcagttt

SEQ ID NO: 826793 - DNA, 568 bp, Homo sapiens
gtcatgttgttttctttggggcttatgtttatatttctgttcaataaatattttgaaaattcagattcatttgccaatcttttctattttctgcaagattagtktactatgtgttatggaagttatgaacgaaataataatttgaatgtgacccaacacagtaactgaatttcaaatgataaggacctatgaatacggcaaaattatatatgttcatgtattcagtttaacccaataactgaacactgacattcatttcaagtgcacactgagtgtttgccacgaatatgtgtggtcttagagagaactcgttagctttaaaattgaaatacaatacaccctctcctatgacggcaacagagtcaaattggaaatcaataacaggaagaaatccataaattctccacatatatgcaaattaaataaccacttctaaataaaatgatcaaatatgaaattacaatggaaattacagctatcctgagttgaatgaaaagcacacatttacaaaatttctagatgcggttgaagctcagtgagaaactcataataggaagaaaatatcgta

SEQ ID NO: 826794 - DNA, 568 bp, Homo sapiens
gtcatgttgttttctttggggcttatgtttatatttctgttcaataaatattttgaaaattcagattcatttgccaatcttttctattttctgcaagattagtttactrtgtgttatggaagttatgaacgaaataataatttgaatgtgacccaacacagtaactgaatttcaaatgataaggacctatgaatacggcaaaattatatatgttcatgtattcagtttaacccaataactgaacactgacattcatttcaagtgcacactgagtgtttgccacgaatatgtgtggtcttagagagaactcgttagctttaaaattgaaatacaatacaccctctcctatgacggcaacagagtcaaattggaaatcaataacaggaagaaatccataaattctccacatatatgcaaattaaataaccacttctaaataaaatgatcaaatatgaaattacaatggaaattacagctatcctgagttgaatgaaaagcacacatttacaaaatttctagatgcggttgaagctcagtgagaaactcataataggaagaaaatatcgta

SEQ ID NO: 826795 - DNA, 538 bp, Homo sapiens
tattttggatattaatccattgtcatatatatggctgcttgtttggtttcttttagttctgttttttkgtttttttttttttttccgctatgcagaagattcagttttacctggtacgacttatttgtattttgtgtcttgtccttttgttgcactatcagggttttcaccacatgcagtttgcacagttggggaagtagaaggacttcaaatggactccagcactgtccaatagaatcttaagataacccatatatgtaattgtaaattcattttctggtagtcacataaaatagaacaaaacaagcctaatgaattttaactcagaatataatcatttaagatgtgagcaacttgaaaccttctcaagcagatagtttacattctcttttccccattacgtcttcacaaagaggagtgtattcggctcacagcacatctccattcagatacgccccatttcaggtctcaatagccatttgtcactggtggctaccatatgaaacagttcaggtgtagactcctttactatttcatc

SEQ ID NO: 826796 - DNA, 538 bp, Homo sapiens
tattttggatattaatccattgtcatatatatggctgcttgtttggtttcttttagttctgttttttgktttttttttttttttccgctatgcagaagattcagttttacctggtacgacttatttgtattttgtgtcttgtccttttgttgcactatcagggttttcaccacatgcagtttgcacagttggggaagtagaaggacttcaaatggactccagcactgtccaatagaatcttaagataacccatatatgtaattgtaaattcattttctggtagtcacataaaatagaacaaaacaagcctaatgaattttaactcagaatataatcatttaagatgtgagcaacttgaaaccttctcaagcagatagtttacattctcttttccccattacgtcttcacaaagaggagtgtattcggctcacagcacatctccattcagatacgccccatttcaggtctcaatagccatttgtcactggtggctaccatatgaaacagttcaggtgtagactcctttactatttcatc

SEQ ID NO: 826797 - DNA, 450 bp, Homo sapiens
catccactgccagtgccccagtttcttctgagggaaagtaaataaacatttgaacataatcatctttaggaagtttcagtgcccccatagccatagctaagaacttttccgctagatacacataggtacaaagggacagaagggaaagagccatcactctgtaaaccatgaacagaaagcaattatattaatgaggggaaaattacattgtacttaaagtttgtcatgttgttttctttggggcttatgtttatatttctgttcaataaatattttgaaaattcagattcatttgccaatcttttctattttctgcaagattagtgtactgtgtgttatggaagttatgaacgaaataataatttgaatgtkacccaacacagtaactgaatttcaaatgataaggacctatgaatacggcaaaattatatatgttcatgtattcagttt

SEQ ID NO: 826798 - DNA, 607 bp, Homo sapiens
aagtggtttttcaacagcattctgtgttcatatgtgaattttttttaaacctgactttatactacatagaaacacttactcaaagtaggtcatagccccacttgtgcatggtacaataagactttgagagaaaaatgcacaggaagttattcttatgactttgggcttggaaacaattattttcttttgagacgtggtctcaccctgtcactcaggttacagtgcagtgacgtgatgacagctcactgcagcaaccttggacctttgggctcaagagatcctcctgcatcagcctgatgagtaagccgtgactacaggcatccaccaccatacctagataatttttttgttttgtttttagagacgggagtctcactatgttgcccaggctggtctccaactcctggcctcaaacaatcctcctgcctcagcctcccaaactgctgggatcacaggcatgagccaccaagcctggcaatgattccctaaacacacacaaaaagcagctgaacacgaaaagacacattcagttttgataaagaatctctcttaattcaaagatgatattaaraatgtggaaaaccaaaccacatagaagatatttgca

SEQ ID NO: 826799 - DNA, 500 bp, Homo sapiens
gagtggagtctatcttctgcctgttttgctgccagcttccatgaacacacagacgctggactcttctgtaacagaaggcttgtctccagttgctgtagttggctgggcgcagtggctcacgcctataatcccagcactttgggaggctgaggcaggcagatcacttcaggctaggagatcgagaccagcctggtcaacatggtgaaaccccatctctactaaaaatacaaaaattagctgggcgtggtggtacaggcctataatcccagctactcgggaggccagggcagaagaaatcgcttgaacctgggaggtggaggttgcagtgagcagagattgcaccactgtaatctagccctggcaatagagcgagactgtctcgaaaactaaaaccagttgcygtggtcattgattttaagcagctgctacactggtgagcttcccgatttctgaatcatagctgtcgtggtgtatttctaaagccacagttctaacagtga

SEQ ID NO: 826800 - DNA, 458 bp, Homo sapiens
caatcctaattattttggcactgaacgtgctctatatagtgctatgtatagaccaaggcccagattgaaaagagtgaatctttttaaaaataaccctgaatatttcctgctgtgacaaaatattgaaaataccaattaatgatgccatttttggggttctatttaaaatgttttctattattgaagatgtaatttcaataccatgaggtattgaatgatcacgaggtcaggagttcaagaccaacctggccaaggtgctgaaaccttgtctctactaaaaatacaaaaaaaaaaaaaaatattagccgggcatggtggcgtgcacctgtaggcccagctactcaggarcctgaggcaggagaatcacttgaacccaggaggcagaggttgtagcgagtcgagattgcatgactgcattccagcctgggtgaaagagtgaaactccatctcaaaaatta

SEQ ID NO: 826801 - DNA, 628 bp, Homo sapiens
aaaattttaatattaggtgtttatatattttagtggttctctttttaaaaatgctcatttgcttaagtaatttggtcctcattacatgatataagggacgtatttaggggagtttagtttggagactataaattcctgagggtaagaagcatttcagtcttgttaccaattgaacgtatattgcacagcagagtgctgccatgtagcaggttctcagcgactatttactaggtgaaataaataatctcccaatctttagcttatttggagctcttcatgtctttattcagctctgttactgataccatttaacacatgtccttcctattccaaataaaattcaaagacccatgtatgttagagaatcttaactagttaatattgcttaagtggataatgcttccacattgttttacatatttctatttgtgatcgtatttcagtagatgctcaattaatatttctaaatgtctgctgaaaaaaaaaataaccagatgtctgctgccacctaaaaaactcaaactcctttagttcaaaacacctcgaaacaaaaagctggcatctactgagatkaataaaagaggggaaggggagaattattggagggagaaagaaggaatttgtcttt

SEQ ID NO: 826802 - DNA, 486 bp, Homo sapiens
aatcctgggtctgcggcactgtcccaaaatgctctccataagtgaggaattayatttatttagcataggtttttctttgtgataatggtatatgaattacctgtctatatttagagtagctacctcaatgatttacaattcacacaaaataatatctttggttcgtggtagcaaaaattagccattttcataggagcaactctaacaatattattctcaattttgaaaatgaccagtctctggaccttgtcagatattattttacataatgcttttctcaggtcatggtttaatgataattatactaattagtgtatgaagctagggttcttgttcactgaaatcttgtagaatttcttcattaacttccaaggagtaaaaaacataaaacacccataagaaagtatgtttttctaatttagtagtctcagacattaaagttgaactgaattttttcaccataattctaatggctcagtatgtata

SEQ ID NO: 826803 - DNA, 502 bp, Homo sapiens
tgagcatctctgaaaaaattttaagttcaagggtacatgtgcagaatgtgcagatttgttamacaggtaaatgtgtggcatgctggtttgctgcacctatcaacccatcacctaggtattaagcccagcatgcactaggatttttttcctaatgctctccctttccccgaaccatccccctgtcaggtccccatgtgtgttgttcccctccctacgtccatgtgttctcattgctcaactcccacttataagtgagaatatgtggtgtttggttttcggttgctgcattagcttgctgagaataatggcttccagctctatccatgttcctgaaaaagacaagatctcattcatttttatggctgcatagtattccatagtacatatgtaccagtttctttatccagtgtgtcactgatggacatttgggttgattccatgtgtttgctattgtgaatagtactgcaatgaatataggcatgcatgtgtatttataatagca

SEQ ID NO: 826804 - DNA, 600 bp, Homo sapiens
agaaatgggcatataaacaagccaatcattatcttcactcttggaaggtttacattttagtgtagaaagagatcatcaatgcgtaagcaagtaaataggatatttcacaaagttataaatgctataagggaatacaatagtgtaggcgccaggcatggtggctcacacctgtaattccagtactttgggaggctgaggcgaggccatcacctgaggtcagaggttcctgcccagcctgggcaacacggtgaacaaccctgtctctactaaaaatagaaatattagtcaggtgtggtggcgcgtgcctgtaatcccagctactctggaggttgaggcgggaggatcacttgaacctgggaggtggaggctgcagtgagctaagatagcgccgctgcactctagcctggtgacagagagagactctgtctcaaaaaaaaatagggcaaagggtagcatgtaatgttggaagaatgttgctgattgagatatgagtgtctggaaagagtatactgcattgagtgagacctgcatgaggcctcaatgaaaaaatctgsgcaaagctcatttcgggtagctggacccacatgttcaaagggcctg

SEQ ID NO: 826805 - DNA, 406 bp, Homo sapiens
atcatacatacattgctggttggaatgcaaaatggcacagccaccccgggaaacagttggcagtttctttataaaacacaacctgcaactatcatacaacctaccaattgtactactaggcatttatcctagaaatgtgacaacattcacacaaaaacctgcacatgaaattttatagcagcgttatctggaataagcaaaaactgaaacagcccagatgtcctttaatgagtgaatggctaaataaattgtgttacatccataacatctaayaccactcagcaataaaacaacgacaataacaacaaataaaaacagactgctgactgatacatgccatatactggatacatctttagagaactaggctgagtatacaaagccaatcctcaaacgttgtatgcta

SEQ ID NO: 826806 - DNA, 569 bp, Homo sapiens
caatcaaagtgataaacaagtctttcactctcaaaagatttgtgtaagacctttaaagagggaaagtctggcctgcawtgcactggaaagaatggagcaaagtagagcctggaaatggagaaaccagttcagaggctattgccatgctgcaggtgagcaggaaagaatgaatgaggtcaggtgataggtttaatggccatttgagattggctgctggaggacagggttaggtcttcatcattacattatctccagtacctaacccagtgaccagagggtagtgggctctgacatgctagaattgacaggctttccctttatgaaagatttttatttcaaattgcttttccttttattatttttagggcttaaaagacaaccttcttgcttctgggacatccagcctgacagccaccaaacagttgcatcgtccaagaatcacgagaatctgcctcagggacttgatattttgtatggaacaggaacgggagatgaagtattctcgagctctatacctggcccttctgaagtgaccactccactcttccatccagatccttgctatttac

SEQ ID NO: 826807 - DNA, 576 bp, Homo sapiens
tgtcctgctgctggtgatgccaaccttgatcactgggtcaaggtgttggcctccagatctctacattataaaggtatyttccccctactttgtaataagtatgatctgtgaaatgatactcgaagtgtcaagatgatactctgagacgaccgtgtgcatgtagtgcccaacatgtttcacccaatggttttagcatccagtgatgatttttgcccaaattaattgttccactggggttgcaaaacggtgactttctaattatgtcatttcttctctgtgtatcagcaggcattcttttgtaaagaagagctgtcttcctgtcccccactctcaccctttattaacatttatacgaacttgtttttgtaatttttaactgaattgtgattacccattaccatcactattttttagaatacttaaattgtcccaaatttggccagggagcatactttcttgtgtccttttaatgtgacctccattgagcacttccttgttttctggaccaaaaaaaatccccaattactttttactttccttgatccagatcttgaatcaaacatttctccagcgggc

SEQ ID NO: 826808 - DNA, 568 bp, Homo sapiens
aaatatggtgtctcatatcgagacaccaaratctaggtattaggtgtgctcattgctacagaagagtcataaagaccttccagatcctttcagtggatagaactagaattttttttcatgagttcatactgatgtttcttattcatacaataaggttttcattaccttcacttattttgtatttgtacatttttttcttaccataaaaatattggttctgaataatattagtaataattacattcatctgctttatcctataatacacaatcaatggtgtaacagttttaatagcaatattaccactaacaataaacctgctacacacaacttgagatttctttccagggcttttgtttatgttattgtttagtatttttatcttcaaaatgtatcccactcaagagatatatggtcagaagacagaaagtagatcagtggttgcctagggctggtggccagggtatggaggatattgggagggacttgcaaatgggtacaagattccttttggggaggatgaaaaagttctgaagtaacgttatgatgatgattgcctaactctgta

SEQ ID NO: 826809 - DNA, 635 bp, Homo sapiens
tggcagcttggcctataccctaacaatgacagcacatgttctattttaaataaaatttatatttttaaaattcaagatcaagaaaacacatatatttaaagtaagataatcaatgtataaatcccattacttattcattcactgctgatatttcaatagcatttaaaactttcattttagaaaggtgcagtaatttaccagttgatatttctaacttttaatctataaatcccaaatatttcttaacattcttgtgtaaaataaaatgacccattgttatgtccaaaggaaaaagccagttcttttcatcttgtttcagagatttcttttatattcacttttcttcattttcctagacaaccctctcacaagactatatttcattttgacagctatgatactgtcacttgtttacttctcatcagataatggactttggtatctgattagctttactttattcttgaaagaaaaatgtcatcctgaggctaacatatcttactkatagctgtcagtacagtaacctttaacaccttccccaaaatactctaacaactttcacaaagcatactgcaaacaaaactagctgtattcaaaaactgacatttataatttgaaaaaggtttctaataatt

SEQ ID NO: 826810 - DNA, 438 bp, Homo sapiens
ctaacctgggtgacagagtgagactctgtctcaaataaataaataaatcaaggccagtcacagtggctcatgcctataatcccagcactttgggagactgaggagggaggatggcttgaacccaggagtttgagagcagcctgggcaacataacaagaccttatctctacaaaagtaaaattagctgggcatagtggcacacacctgtggtcccagcaacttgggagggtaaagtgggagaataacttgagccctgaagttgaggcttcagtgggttatgaatcgagccactgcactccagcctgggtgacagagtgaaactctcttcagattaaataataataatgataaatttaagaatytaagaattctttatacaacagggaggctcaccttagcctgaaatataagttgatgttttttctccaagttgttgtc

SEQ ID NO: 826811 - DNA, 495 bp, Homo sapiens
gatgcattgaatgacataaggaatcagaagtccaatacaaatattaattaaaagtttaattaggaatgagagatttacacagcttcgaaataactgcctcaatacttgttaataacaaagagtaaaaagaataactttatagtggagaagccaaaaagtcttggccttaatcaagagatcaaaataaacatcatcattaatgaaaaaaatagaaaacctttaccacctgattaaaatgcaatgaaaagaacacagcaccacttctgtgatatatctgccaaagatgtgtgaactaaatctaattatgaagaagcgtaagacaaacccgcattgagggacatacatcaaaataaatatagtcttcaaaaataccaaagtcagaaaagccaaaaaagcccatgaactcttccaaattgaaggactctaaagsgatgtgacaactaaatgtaatatgtaattctgaactggatcctttggtttaaaaatcactatttg

SEQ ID NO: 826812 - DNA, 650 bp, Homo sapiens
ggttagttgtaggaagaattatttcataagatagatgttaaaagtgttctttgaatacacatactattttgaatagtcaatttgtacaattttatgtctgatgggtaaataatttttaatgtcccacccctcctaatggtgaagtggttaggactgtataaataaaagacaatgcttttggaaaaaattttcaataaatcagatgtaagcactacctagtaagtctactttcaaatcaaatcataattaatgacaggtgcctattataatgccatacagatattttaatgctcacaagttatttttcgacggagatcaacattacattaacttgaatttagtttcattattaaattatgaaacaagatacagataaatcttataagcagagttctgattacttaacacagtgaaattgcaattccaagttacagagacattcacataaagatattcttgagctactaaataatggctaaatactgatgacaataagaattaatactttccacttatgacatttgtcaataacaactctgattaggtaaaaaataattaacatgatggtcatattataattctaaataaatacattattatgtttgccacaggagtakgtgtgtatgcgtgtgtgggtatatgtgcatgtg

SEQ ID NO: 826813 - DNA, 585 bp, Homo sapiens
actgagttattctagaaaaatggacacataacatttttaaaacacaatttattgtaatcactcctataactatagcagatataaagtgtctcgagaatacagataaggaaacaaccgttcctgtctggagtagaggaatgtgtgttagggaaaggtgcaaggaaataacgacttttaggttggaacccagaagaattgttagaataacagataagagtatttcagaagagatgataacatcaggaaggacacagaggtatgtaagtgttacgtatgtttaggaaataaggtacttttccattcctggaaaattgtttcactgatgcaaaacacttttaaaacacggatcagcaaggcattcttcatttagaacgtccaatttcaatgaaccttccagcctcagtcttcccaaggccaagggaagcatgaactattgccagctgcatgacccatccctcyttttcccactttccctcatccctcccttctgtctgcatgtattgtacgtaacatgtgccaggcagcagacagatcctcagaaaaagacctatagatttagataaaagtgtgacacaaaatgttctg

SEQ ID NO: 826814 - DNA, 593 bp, Homo sapiens
gtaaaattttatgagattaataaaatacatattgaaatatattaacacaagaggtaaggatctagcctttctagaaataaggctactgggaggggggagggatagcattaggagatatacctaatgttaaatgacgagttaatgggtgcagcacaccaacatggcacatgtatacatatgtaacaaacctgcacgttgtgcacatgtaccctaaaacttaaagtataataagaaaaaaaagaaaccaaagtgtaaaatcaagaaagtaataaatgctggaattattatgtaactcaaaaacaaaaaaaagaaataaggctgtaagtgatttcacatgacacttttataaagtaaatgtatcaaaataaaagaaaggaacctaataataaagtcatatgcaaatatgtacaaataatatataataaagtcatatgcacctgtgtacaaataatgtgtgcatatatatgtgtgtacatatatatgtgtgtgcatatatataaaataagatacagtaggctcttcaaaatgacagatatctaayaataggtatgaaaaaataatttttttaagaatataaaaactaaaaaataatt

SEQ ID NO: 826815 - DNA, 655 bp, Homo sapiens
agggatggctagtataattatccacatcacagggatgcttagaggcttaattaatgttcataacccactttgaagtattcagatgaagagacagttgacagaaatggtggtgttctaagttctacttacaaactctggcaagttacaaagcaaattttgaagttgttttttggtactctacttccaaatatactggcatggcaactccaagatcctccctcatttagttagaatcactgccacccagacaatttagaggactctatttctacattttattcactttaattttttaaaattttaaaattttttattttttattttttttgagatggagtcttgctctgtggcccacgctggagtgcagtagtgcaatctcggcttactacaacctctgcctcccaggttcaagtgattctcccacctcagcttcccgagtagccaagattacaggcatgcgccaccatgcctggctaatttttttgtatttttagtagagatggggtttcgccatgttgcccaggctagtctcgaactcctgacctcaggagattcgcccaccttggcctcccaaagtactgggattataggcgtaaaccactgtgccyagccattttgttcatttttaaaaggaaagtataaatatgaggtgatt

SEQ ID NO: 826816 - DNA, 598 bp, Homo sapiens
catgttggtgacttggcgtatactgtctcatgccattatgggtctttgaagattatgtcctcagctaaacccacagcccctggagggccaggggtggttttgtcttgtgtttctccatgggtttttctctcggcatttagttctgtgcatattatacaacagaccttcactaaagtcatattgggttttaaataacccacagggtgtacaggtcagaagttaccctgccccgggccaggtgcagtgactcatgcctgttatcccagcattctgggaggccaaggagggtggatcacctgaggtcaagagttcaagaccagcctggccaacatggtaaaatcccatctctaataaacatacaaaaaaattagctgggcatggtggcacatgcctgtaatcctagctactcaggaggctgaggtgggagaataaattgaacccaggaagcagaggttgcggtgagctgagatcgtgctagtgcactccmacttgggtaacagagcaagaccctgtctcaaaagaaaaaaaaaaaaaaagaagacggtcccctgcctgtgtttttaggcctgtcatttacatctgtgccagacaaccagga

SEQ ID NO: 826817 - DNA, 598 bp, Homo sapiens
catgttggtgacttggcgtatactgtctcatgccattatgggtctttgaagattatgtcctcagctaaacccacagcccctggagggccaggggtggttttgtcttgtgtttctccatgggtttttctctcggcatttagttctgtgcatattatacaacagaccttcactaaagtcatattgggttttaaataacccacagggtgtacaggtcagaagttaccctgccccgggccaggtgcagtgactcatgcctgttatcccagcattctgggaggccaaggagggtggatcacctgaggtcaagagttcaagaccagcctggccaacatggtaaaatcccatctctaataaacatacaaaaaaattagctgggcatggtggcacatgcctgtaatcctagctactcaggaggctgaggtgggagaataaattgaacccaggaagcagaggttgcggtgagctgagatcgtgctagtgcactcccacttgggtaacagagcaagaccctrtctcaaaagaaaaaaaaaaaaaaagaagacggtcccctgcctgtgtttttaggcctgtcatttacatctgtgccagacaaccagga

SEQ ID NO: 826818 - DNA, 650 bp, Homo sapiens
aaaagtcaaaaaataacagatgctggtacggttgcgcagaaaagggaacccttacacactgttggtgggagtgtaaatttattcaaccattgtggaaagcastatggtgattcctcaaagagttaaaagcagactccagcaatcccattactgagtgtatacccagaggaatataaagcattctaccataaagacacttgcatgtgaatgtttattgcagcactgttcacaatagcaaagacatggaatcaacctaaatgcccatcaatgacagactggataaagaaaatgtggtacatataccccatggaatattatgcagccataaaagaagaagatcaagccaggtgtggtggttcacgcctgtaatcccaacactttgggaggccaaggcaagtggatcatcttaaatcaggagttcgagaccagcctggccaacatggcaaaaccttgtctctactaaaaacacaaaaattagccgggcgtggtggcggatgcctgtaatcccagctactcaggaggctgaggcaggagaatcacttgaacccaggaggtggggatcgcagcgggccgagatcatggcactacactccagcctaagcaacagaaggagactctgtctcaaaaacaaactaacaactacaacaaaa

SEQ ID NO: 826819 - DNA, 601 bp, Homo sapiens
tcccttaataattactaaatgattatgactctatcaagttgcaagtgactgttttggaatagtatgacctcatatctaatatgaggcatttaaactaaataatacaactgctaactctcttcaaacccttagaattttctaaactaatttgttaaactaaattgttaagctaatgattagtttttactttggaacacaggtttgtgaaactgtgcattaataaaacctgatcttttttttaagttaggaggaaagctacattttcagtggaacactgccttagtaagcaaaccatgataaggttgcaactgaggctgagccattacaggcaagtttcacatgcaccactcaatttagaccgggtggatttcaagctgttctaggaaaattcttcaggctaagaagagggctctttcttatagtccagggcagtgctctttaaacattttggtccacttactccgtaagtttattttgaaatcccgtgaacgccttctcacatttatattggcacctaaaatttttcgttgtaaatgctcagtatttacaaagagtataatttcccatatrttgttgatgttgataatttaatataaaattg

SEQ ID NO: 826820 - DNA, 619 bp, Homo sapiens
ttcatatagttgcatgcatgatgtatsctggtaacacacatgtatcgtgtgtagtatacatgtagcctgcatgcaatattcatgcatacaagttgtgcgcatgttgtgtgcatgttgaatatgttgtgcgcatgtagcatgaatgttgcacatatgttgtacacgtgtagcatgcatgttgtgcacatgtggcatgcatgcattaggcatgttgtgcgcatgttttgcatgttgtgttcatgtagtatgcatgctctctgtacgcatgttgtgtgcatgcattatttatgttatgcacatgtagttgcatgttgtatgcatgcagcaatcatgctttacgcatatagcatgtatgttgtgtgcatgctgcacacttgtacggatgtagtgtgaatgtggtgctcatgtagcatgtatgttgaaagcatgtgcacatgtagcatgcatgtagcatgaatgcatgatgtatacacgtagtgtgcatgtttcatgtagtatgcatgcagcatgcatatattttgggcgcatgttgtgtgcatgttgaatatatgtttacacatgcatcctgaatgttttacgaatgtagacatgtagtatggatgttgttcccatgtgctat

SEQ ID NO: 826821 - DNA, 591 bp, Homo sapiens
acttatgtttgacacattttgcatgcatgtactatggatgctatatgcatgcagcattcatatagttgcatgcatgatgtatgctggtaacacacatgtatcgtgtgtagtatacatgtagcctgcatscaatattcatgcatacaagttgtgcgcatgttgtgtgcatgttgaatatgttgtgcgcatgtagcatgaatgttgcacatatgttgtacacgtgtagcatgcatgttgtgcacatgtggcatgcatgcattaggcatgttgtgcgcatgttttgcatgttgtgttcatgtagtatgcatgctctctgtacgcatgttgtgtgcatgcattatttatgttatgcacatgtagttgcatgttgtatgcatgcagcaatcatgctttacgcatatagcatgtatgttgtgtgcatgctgcacacttgtacggatgtagtgtgaatgtggtgctcatgtagcatgtatgttgaaagcatgtgcacatgtagcatgcatgtagcatgaatgcatgatgtatacacgtagtgtgcatgtttcatgtagtatgcatgcagcatgcatatattttgggcgcatgttgtgt

SEQ ID NO: 826822 - DNA, 628 bp, Homo sapiens
tccccccacactgttttcattttatcttatctccttctagtactcaaataaatacatatatattttaattctacatgcaattataagttctttttcatttattatatagtctatagttctaagtaacagcctttatcattgtacccttcataattgtattatttacctgtgtgttacatcccatcaatatgacaacaatttttctggatgtaaagtccaaaaagaggaagtttcagcatgagtttatgttggatacactttattatatttcctagcatataatattccatattacatagttaatagcacaatgatgacttcacacattaacatttttcttcttttaatttaataccttaatatgaactcccagatatagaatgattagctcaaagagtatgaacactgcttgacagggtttactgcatcactttccacaggagctatactaattaatgccatcacatgcaatttttaaaaaatctttatacataaacacataaatgttaattttaactttaaagcataaattagtagtcatgtttccctacctcaaataccctctccaacttccctcccacaacatgacagctccayccatttgcccattaaaatggtccaagttaac

SEQ ID NO: 826823 - DNA, 599 bp, Homo sapiens
aaatctaatttctccaagtaatatgttcaggcatagcacacagtgtttaataatattcagtataatcattttggcaattcaattgaatttttagccataattcacaagcctaaactgaagatttcctctattcaaaactgactcaaattatttaagaacaaaattacataatggctaataatgttctatgtctgcaccatactacttattattaataaaagtagcttacgttctaccttatcagatctctttcactcatataatcaacaattcaactttttctacatgtataaattcctaactatactgcagacacctccctaaatttaggaacagattgtaattttcatcctgcagaattttcacagcactaagcagatgcctaatattgttaaatggtttgctacatatgggaaatttttacatatctgaattagaataatccctaaatgatctcttatatgmagctgtataccacagatgataaacatgaagcaaagtggtggaatataagtataattgggataaggtgacattaagaagaacttgggctattaaaatactacacagtgacatcagcaggaatagtggagttaagg

SEQ ID NO: 826824 - DNA, 623 bp, Homo sapiens
cagtgataataaacactgaaataaaggttattgctaaaaggtggagaaagaacacctcactcagcctaggttaaacaggaagtacttctcatagaatgtatcaaagctcaggattagtcytgaagaatctattggaattgaccaagctaaggaaagacatgagtatgctccagaaaaaggaacatatacctttgtatatatttccttgtctatgaactgtggaggtaagtatattttgcaggtaagcataccatagaagcaaacattgtggtatgcaggtatgcagcaggagaaatgggaaatgtagatgtaagatgatgaagagttttgtaaactgtgttaaggagtttgaactgtatcctgaaggtaatgggaaattgctgaattagttaagcaaggttggagaagaattacttcagcagcagtatagaggaaggattattgggtaggagagacggggccaagactagaaaaacaaacaaaccagatagaagacataaaataactaaaatgaggaattaatgactgcctgagccgagatggtacccatgaaattggcagaaaggattttaaaggcacatggccaacaaaaaaggaggaaagaagccagtcacggtggctta

SEQ ID NO: 826825 - DNA, 610 bp, Homo sapiens
gaacatggcaatggcatcctactggtctctccccaccctatacagtgtattttccccacagaggtcagagtgatttttttttttaattcatgacaatcatggcactcttgtttaaaatagctttctacgtcaataagagtaaaatccaaaatccttaccttggcctacagggccttatgtagggtggccccctggtatctctctattatttgcatgattaccccttccagcacccaaacatctttgtactttctgaaagcacatcaagcacaatcttatctcagggcattcacactgttttctctacccacacacacactcaagattcacgggtgaagcacacctacatggcacatgtatacatatgtaacaaacctgcacattgtgcacatgtaccctagaacttaaagtataataataaaaaaaaaaaacactatgggggtgagtttaggggaaagtctgtgataagtacataagaaaaaaaaaaaagatccataagggccaatacctgtacttgctaatastctctactcaaatataatcttgccagaggggccttccattaccaccctatataaaagaccatatcctaccattttccagcttgctt

SEQ ID NO: 826826 - DNA, 644 bp, Homo sapiens
ttaaagaagccctaaataaatgaaaagatatctatgttcatggattagaagacttgatattgttaagatggcaatacttctcaaattaatctggagattcaacaaaatcttatcaaaattataactgaattttttatagaaatggggaaattagtcctaagatttatatggaattgtaagggacccagaatagccaggcaatcctgaaaaagaaaacgaacttggaatactcacacttctgaatttcaaatgctgctcaaaagctacaataatcaagtgtgttttgctagcataaggatagataaataataaaatgtaattgaaagttcaaaaataaattatatatcaataagtgtgccaagagcattcaacaggaaaagaaaagtctttcaaacaaatattgttgggagaactgattatccacatgaaagaaataaaattggactcctcttttgcataatattaaaaaactgactcaaagtgcatcaaagacctaaatataaaagctaaacctatacaatctttataataaaacagaagtayaaatcttcatgattttggcttaggcaatggtttcttatgtatgacactaaacgcaataggtgtaaacagagaaaaaaatatgtgaatttgacttcatcaga

SEQ ID NO: 826827 - DNA, 460 bp, Homo sapiens
caaccagggacgccagtgccccaagggagcccctgccacctcctgcacctgagcccagcccccacagcgggaccccacagcccgccttgggtcarcctgctcccctgcttcctgccgcagtgggggccgtcagcctggccacctcccagctcccaagcccacccctggggcccaccgtccccccacagccaccctcggccctggagtcggatggggaagggccgccccccagggtgggctttgtggacagcaccatcaagagcctggacgagaagctgcggactctgctctaccaggagcacgtgcccacctcctcagcctcagctgggacccctgtggaggtgggcgacagagacttcaccctggagcccctgagaggggaccagccccgctcagaggtctgcgggggggacctggccctgcccccagtgcctaaggaggcggtctcagggcgtgtcca

SEQ ID NO: 826828 - DNA, 585 bp, Homo sapiens
cagagtgagtcaatttataagtataaaaatagatggtttagaaaccaaaaataagcaccacacaaaagcagattatacatacaccatcaggcctttggaatrttaaggcaacataaatatctcaagcaattttagaagaatgctttacttatataacagatgttattaaaacatctcaaaagaggcagggctcacaatttttttcagtatgaggtcttcccttccatttttgttaatatattaatgattcttcttaaatactgtaccataattagtctagattaacaaatgggctatcaaagccactatcttgttggctagatagcggaacaattaattttcttgaaggctgctgacacactgaagatggtaatgtactgctcagttttttgaaatctgactttaatctatcagccttatgacgagatgggtgtccacaattcacactgatctttcctggctccaaatacgtggtttcttctgacaggtatggagtttgataacgctgacatttcattgtttgacaaatcatattactttcctctgtatctgaaagataaccggatggtgaaaactgtttggatt

SEQ ID NO: 826829 - DNA, 560 bp, Homo sapiens
gaattccctcagtttttgttttcctgagaaagtctttactgctccttcacttgtgaaggataatttcgctagatataaaactctaaatagaggtagagcaagatggctgaatagaagcctccaccaatcatcctccccacaggaacaccaaatttaacaactttctacgcaaaaaagaaccttcataagaaccaaaaatcaggtgagtgatcacagtacctggttttaacttcatatcactgaaagaggcactgaagagggtaggaaagaccatcttgaattgccaacgccacccctcctcagttcttcagtaatggccacatggcacagaagacagaatctgtacatttgcgagaagagcacagtgcttgtggaattttgcattggacctcagtgctgccaacaccaggcagaactcagctgagacccacagagagaacatttagatcacccctaatcagaaggsaatcacccatcccagcagttggaacttgaggttcagcaaccctcaccacaggctaaagtgctatgggatcctaggtaaacttgaaaggcaacat

SEQ ID NO: 826830 - DNA, 592 bp, Homo sapiens
ctgatagtgatatgggcaataaagttcaggctgaggtggtctcagatggagatgaataaactgttggaaactggagttaaaggtcactctctacacaaagagactggtggcatttacccctgccctagagatctgtggaaccttgaattttagagagatgatttagggtatctggcagaagaaatttctgagtggcaaagcgttcaagaggaagcagaccataaatgttcagaaaatttacagcctgacaatatgatagaaaagaaaaacccattttctgaggagaaattcaagctggctgcagaaatttgcataagtaatgaggaaccaaatgttaatcgccaagacaacggggaaaatgtcttcagggcacgtcagagtcttcaaagcagcccctcccatcacaagcccagaggcataggaggaaaaaatggtttcatgggctgggtccagggccttgctkctttgtgcagtctcgggagtggtgccttgcattccagccatggctgaaaggggccaatgtacagcccaggtgattgcttcagagggtgcaagtcccaagtcttggcagcttacatgtactgggccaacc

SEQ ID NO: 826831 - DNA, 650 bp, Homo sapiens
gctttttattttacaggctcttagacagaagggacttgccttgtatcagatgaaactttggtatgtggacttttgagttaatgctgaaatgagttaagattttgggggactgttgggaaggcatgattggttttgaaatgtgaagatatgagatttaggaggtgccggggcagaatgatatgatttggctgtgtccttgcccaaatctcatcttgaattgtggttcccataatccccacgtgatgtgggagggaacaagtgggaggtaactaaatcatggggatgggtttttcctgtgctgttctcatgatagtgaagaagcctcacaagaactgatggctttataaaaggtggttcccctcacatgctctgttgccaaacgccatgtgaagaagtatatgtttgcttccccttctaccatgattgtaagtttcccgaggcctccccagccatgctgaactgtaagtcaattaaactacccagtcttgggtatgtctctattagcagtgtgtgaacggamtaatacaaaaggcttactctatgcttttcattttattcagtctttcagctttgtttgattacacatagagcaccaagtttcctatttttaataaggaagaaaaaaccttatcaataaaattgcagttttg

SEQ ID NO: 826832 - DNA, 681 bp, Homo sapiens
actcccatatgaagaagctaaaaagtcattactctcatccttataagaaaaagatggaaaaaatgaaaatcaatgtattttcttggagctatagaaagctgtgcatgcagagcaaactgtcaccctgaaatcaagcaaaacaggcaaatccagagtcacagctgaaatctgcttatttgtaccagttgcaaccagagccatgaactggtaagaacacataaatagtaattttgatgaataactggaggcttgagtgtagaccagcttgagaattggatactcttgtgggcccactatttcatatgttttacatccaggaaacctgttaggttctcaaggtggagatccaaaaaattatttctgtgatctggcagagatgggaaagataattcttctgaaatacactcaaagatttctccacagcaaatccttctctactggagggaaggctttactagagcctgtctcagagccatcagggagatacatttctcccatttccaatgccatctagacttcctatttcacccaagatggggagattctctacaagaaaaaatactggtgaagggcacaggccagataggcagacccactaaaacactgagatttaattcaaatattataaaatgcacactctccctcatatcttatggacaacmaacagggatccagtttaat

SEQ ID NO: 826833 - DNA, 488 bp, Homo sapiens
aaaaactatacctaagcatatcatattcaaattgcagaaaactaaaaacaaataaaaatktttaaagaggccaggaaatatatattgataggaacaagaaaaacacttcacaaaaaacttcatgagaaatcatgcgacattctataaaactgctaaccagtgcttcttaaaatatggactgcctcctcaaggccaccaagatctgggatgtgggtgacggtaggggaagaatttaaaacgccacaatactctctcattgtaaggcagcatcttgtttttcaacaagccttctcttagttgtgtttgactagatttcagggttctacaaaagctgattttgacggttttgccagttcatttgctgcttttgtagaggcagaaccctggagtttcctatttctccattttggttggtattcctgttacaggaaaggggtctggatccagactccaagagagggttcttgaatctcatgcaagaaagaatt

SEQ ID NO: 826834 - DNA, 569 bp, Homo sapiens
tatctagccctcctttgtcacctccaaatagtgaaaaaataaaagtaagatggatacacaaataatgataatggacaaaggttaaatataatcacaaaatgaaatctccctaagaaaatatagtttgttttagttcaatgaagaaaatagtagtttcttcatgtggccagtaatcctcattgctttattaatatattcaaaaatggttagtgagcttgtatcatatgaatagcaaactatgccacctggattaaccagcaaaattaaatcttaaatgattagagatgatctctccatgtttatccttttagccaccagttatctcctctctctcaagtctccattgtagctgaaaagacataaataggtgtgagtttagtaggtgttttataagagaggaggaaatttaaaaatgtagatagttattaaaacctttaaatatttgagtgcactaaagtgtattgctatgcatcaaatttatgtttgctctcttttagttacagccttaattgcttcctttttgtgtaycatctcacataaactattgttttatgtattaaatcaaagaa

SEQ ID NO: 826835 - DNA, 549 bp, Homo sapiens
ttctgatgaatcaggatccagattctaaatgtcttcaagacctggatcagtcagtagagagggcccactgtgtcagggggcctggggctgcyggaggcaaagcaggatacatatatggaacatgaccattcatgttccagggctcccatccgggtacctgaggattttccacatagatcacaggtgttggggcccacatcggctcctgaaagactatgggaacgccataggcctggggcgggtgctcgggaggtgcgaggttaaccacatctgcacagggaggacctgagagagagaagacacatggagggctcatgaagccatcacccaccctgtacctgaatccttgcttgtgacctcacccagccccagggccatgtccattctgaacaagtccacgaacaaagtcctcagaattattactttggggaagaataaaaaggaaaaatagaggcaggcagcccatcagagcagcaagtcccctgtgctgtgtgtcgagggactctgggcaggggcctgtcccatcattctttgctctactcagggcac

SEQ ID NO: 826836 - DNA, 549 bp, Homo sapiens
ttctgatgaatcaggatccagattctaaatgtcttcaagacctggatcagtcagtagagagggcccactgtgtcagggggcctggggctgccggrggcaaagcaggatacatatatggaacatgaccattcatgttccagggctcccatccgggtacctgaggattttccacatagatcacaggtgttggggcccacatcggctcctgaaagactatgggaacgccataggcctggggcgggtgctcgggaggtgcgaggttaaccacatctgcacagggaggacctgagagagagaagacacatggagggctcatgaagccatcacccaccctgtacctgaatccttgcttgtgacctcacccagccccagggccatgtccattctgaacaagtccacgaacaaagtcctcagaattattactttggggaagaataaaaaggaaaaatagaggcaggcagcccatcagagcagcaagtcccctgtgctgtgtgtcgagggactctgggcaggggcctgtcccatcattctttgctctactcagggcac

SEQ ID NO: 826837 - DNA, 552 bp, Homo sapiens
actcatttctggtcaccagtcatcgcttcagagttggtcttaataatcaccctcaccttcccagggttactcttttcaatacagcgcccaataatatcccgctcttacacatgctgatcctatgccaccaagataactatatcccaacccagccaggggctagacaatacagtatggaatcccttgaaaatgaaagtgcttgtgctagacgtgaagcattaatcaggtgaagatccaggatttgtgatgctcttgatgacagaatcattctgattccttctcatggcttacaggagggaaggacaaagtgagtcaccagtcccaacagtagatactttttgatgatggtttgtacttcatcttccagggaccaaaagatcagttttaatattccagtttaattttgaaggcagaagcaaaaaattcttctgagaatcctaagtgcaaagaaccaactgactctgtttctgtgytacttgattttcttgctgccttagcagcccctttagcatcttcctctgcttaggccatttgttagaaaggtagagtgag

SEQ ID NO: 826838 - DNA, 640 bp, Homo sapiens
cccagctgtcacggatgagaggcactttctcttctgctgaccttctrgctcctggtgatactgtctactgcacagatggaaagtacccaggaaacagcataacaacaacaacaaaaaatcacattttttagcttcaaagcaaacaccaaagttaaaagcccaacgcctgaaggaatttaaggaccaaagttatttagggcagaagctaaaaggaggtggcctaccccctacccacggaccccaggcttcaaataggtgaaggttggaggctgccaggccctgagcaagcatcatcaaagaagagcacatccaagagtaccccagtgctcactctgctttgaagacaaacagccctcctaattagaaacagcttcattcacatgccagatgtccatgcttcccttccaattattttcagaaacatcataaagaaccattagcgtcagtgcaaatatctgggttgttttttaaaagaatttgtccattttatgagttcagttgatatgaagaagattgcaatccgcctattcctaagaggtttttggagccaggagagggactcaagataagatgtgtaaggatttgatcaccagaaatactaccacatatttggtttaagcataaagaacaagcatcttac

SEQ ID NO: 826839 - DNA, 640 bp, Homo sapiens
cccagctgtcacggatgagaggcactttctcttctgctgaccttctagctcctggtgatactgtctacwgcacagatggaaagtacccaggaaacagcataacaacaacaacaaaaaatcacattttttagcttcaaagcaaacaccaaagttaaaagcccaacgcctgaaggaatttaaggaccaaagttatttagggcagaagctaaaaggaggtggcctaccccctacccacggaccccaggcttcaaataggtgaaggttggaggctgccaggccctgagcaagcatcatcaaagaagagcacatccaagagtaccccagtgctcactctgctttgaagacaaacagccctcctaattagaaacagcttcattcacatgccagatgtccatgcttcccttccaattattttcagaaacatcataaagaaccattagcgtcagtgcaaatatctgggttgttttttaaaagaatttgtccattttatgagttcagttgatatgaagaagattgcaatccgcctattcctaagaggtttttggagccaggagagggactcaagataagatgtgtaaggatttgatcaccagaaatactaccacatatttggtttaagcataaagaacaagcatcttac

SEQ ID NO: 826840 - DNA, 591 bp, Homo sapiens
ggcgggcgcctgtaatcccagctactcaggaggctgaggcaggagaatggcgtgaaccccggaggcggagcttgcagtgagccgagagagcgccactgcagtccggcctgggcgaaagagcgagactccgtctcaaaaaaaaaaaaaaagtgtgttttttgtttttgtgtgtgtgtgtgtgtgtgtgtgtgaatgtctcttcatccaagaaaaatctaaatgggctattgtcttggcgtaggaagtaggtgagggtgcggtggatttcagaaaaaataatgtcccagttactgattttaagagaatagccctgagacaagtgtgggcgcattgaaacaccactgcaaccctctaaactattgcagagttgccaccaccaggtgtctggctagaaagatgtcatcttcccaagacagctacctgcccagatgatgtaccttagccccaggaaggaggaggaagaagaggcagrcagaatgatgcccaaacccctgcggcccggagacgaggtggtgcctgagtcaggaagctgggagagcccagctcagtggaagaggcatgtggatcctggttaggtgtgaagccaggagg

SEQ ID NO: 826841 - DNA, 591 bp, Homo sapiens
ggcgggcgcctgtaatcccagctactcaggaggctgaggcaggagaatggcgtgaaccccggaggcggagcttgcagtgagccgagagagcgccactgcagtccggcctgggcgaaagagcgagactccgtctcaaaaaaaaaaaaaaagtgtgttttttgtttttgtgtgtgtgtgtgtgtgtgtgtgtgaatgtctcttcatccaagaaaaatctaaatgggctattgtcttggcgtaggaagtaggtgagggtgcggtggatttcagaaaaaataatgtcccagttactgattttaagagaatagccctgagacaagtgtgggcgcattgaaacaccactgcaaccctctaaactattgcagagttgccaccaccaggtgtctggctagaaagatgtcatcttcccaagacagctacctgcccagatgatgtaccttagccccaggaaggaggaggaagaagaggcagacagaatgatgcccaaacccctgcggcccggagacgaggtrgtgcctgagtcaggaagctgggagagcccagctcagtggaagaggcatgtggatcctggttaggtgtgaagccaggagg

SEQ ID NO: 826842 - DNA, 610 bp, Homo sapiens
gggcaagatggcaagaccctgtctcaacaacaaagaaattcgccaggcgtgatggctggcacctgtagtcccagctacttgggaggcttaggcaggaggagcacttgagcccaggaatcaaggctayggtgagctgtgattgtgccactgcactccaccctgagtggaagcaataatctgtctcttaaaaaaaaaaaaaagtgaaccaggaaactaaaggcttttgaaaggctacctctattttcttaaaacccaccctcccaccaaaataaaagttctcatcttaaaagtaggctggcagggagaaaaggccttggagtcacattcctacctgagaacttcagggcaacttctgatgagttcccacctcaactccaaaattaaagccctcaacagaagtagctaggaagctgatcacttctaattacagctccctcccctcctagctactttctgtgctatcgagatacttgggaagacacaggccagagtccagccaattcgtgcccacagatccagaagctgtggtccatcggccgatgggtgcccctaggaccagccgaggatgacctttattcatggtaggagctagggcaatagcaacgtgggc

SEQ ID NO: 826843 - DNA, 640 bp, Homo sapiens
agagacattgggtaaaagcaacctggatcccgcatgaggaagagaaccccatccactgctattcagagtgggtgttggtctgatatttttggaggaaaatttggcaacattcatyaaagctttacaagtattcctctcctttgacctaatacattcatttctgggaggttatccaaaggaaataattggataagtgtacaaagatgtacattgtaaagaaactcaatgaatccttatttacgacaattaaaaatttgaaataaccaagacagtcaataataagggattgttgaagcaaattgtagtctagctggactggtagcacatgtctatagtcccggatatggcaggaagatccctcgagcccaggaattggggttcagcctgggcaacatagtaagaccctgtctcaaataaaaaataaaaaattgcagtatatctataaagtgccataaaataatttttgccctttataccattaacatggaaagatgttcatgatatgataagttaaaaaaattggttcaaaaaattgtgtgggatagtaccaaaaagagcagaatacgtaagaataaatttacccaagaaggtgtaagacttctttacggaaactttaaaacactgccaaaagagatgaaag

SEQ ID NO: 826844 - DNA, 590 bp, Homo sapiens
agggattgaaatgggtatatttggtaaatattttgmtacagttctccatatctagaagggataccagattgcatagcaatatactcattttatagatgatgcttgaaataagacccactcaatgtcacatgtatagttagtggcctaacagggattaaatcccaagtctcttctctgaattcacttatctactcaccacaagaaatgcaatgaaagtttctcagtgagtagagactctacatatttcaggtgataataactaggtctgtaactgccaaattttttaaaatactttggtctataacttctaattttttaaaaattccattaaaatatatattttatatactataattggcaaaaactacagttacttttgcacaaagctaaacacacacacacagaaagagagagaaatagaaaaatatccaaggtaacaatatcttctataaaatgatatcaaagctcatagacaatgatttttaaaattattcttcaaataaaatattttggttagcaattgatcttttgactgagtggaagaaagtacaacagtaagtgacatagtgttattatataccatttagaat

SEQ ID NO: 826845 - DNA, 638 bp, Homo sapiens
gtaaatgttagcacaaaatgctgytttttccagaaagatgatttgaagatggcttgttctgcatcaaagagacttcgctcagttttctcaaactgtggtcatgttagaatcacccacatacattttaatgtagttatgttggggggggagagagcatattaagtgtatttgtgtttatgtatatgtcttgggggtggtgtattaatttttctcaaattatctatgccatgtgccaatgtcccacaccatgtattttatgattcaacaggtctgcaataaacccaacagctacttcatttttttaagtcccatagttgattttaataaacaacatatattgaggaccaaaacgttattttataagaataaattagaagttcccctgcacctcttgttttacgacagtggttctcaacttttaatataaataagaatggctgagatcttcctaaaatgtggattatatttcagcaggtttgaaatgggaccggagatgctgtatttctggagctggactcaacccttctgagctcccttgattttaatgtttttctttgcatcacaaatggcaagattccactgatgagattcacctcctcaagataattctcactagaagttaactttgccacctctaa

SEQ ID NO: 826846 - DNA, 631 bp, Homo sapiens
ggggagtacattctggggaaccctaatctaggatcatccagttgagtgattttgttttcccattaccattttaaactcattattatacttaaaaattaagggagggtaaggcaggtggatcayttgaggtctggagtttgagaccaagcctggacaacatggtgaaacctcatctctactaaaaatacaaaaattaactaggcatggtggcccacacctataatcccagctactcaggaggctgaggcgcgagagttgcttgaacccaggaggcagaggttgcagtgagccaagattgtgccactgcactccagcctaggtgacagagtgagactccatctcaaaaaataataataaaacaaataaaaattaagatgtaattgaactatcataaaattaaccatttcaaagtgtacaagcccgtggtttttttttttttactatatttatgagttgtgcaaccatcactactatcaaattccaggacattttcatttccttaaaaggaaatccatatctatcagtcactcctcatttctcctccctgtatccccgatctacccattgtttgtatagactaatctaatctggatatttcatattaatggaattagagaatatgtgaactttt

SEQ ID NO: 826847 - DNA, 631 bp, Homo sapiens
ggggagtacattctggggaaccctaatctaggatcatccagttgagtgattttgttttcccattaccattttaaactcattattatacttaaaaattaagggagggtaaggcaggtggatcatttgaggtctggagtttgagaccaagcctggacaacatggtgaaacctcatctctactaaaaatacaaaaattaactaggcatggtggcccacacctataatcccagctactcaggaggctgaggcgcgagagttgcttgaacccaggaggcagaggttgcagtgagccaagattgtgccactgcactccagcctaggtgacagagtgagactccatctcaaaaaataataataaaacaaataaaaattaagatgtaattgaactatcataaaattaaccatttcaaagtgtacaagcccgtggtttttttttttttactatatttatgagttgtgcaaccatcactactatcaaattccaggacattttcatttccttaaaaggaaatccatatctatcagtcactcctcattyctcctccctgtatccccgatctacccattgtttgtatagactaatctaatctggatatttcatattaatggaattagagaatatgtgaactttt

SEQ ID NO: 826848 - DNA, 631 bp, Homo sapiens
ggggagtacattctggggaaccctaatctaggatcatccagttgagtgattttgttttcccattaccattttaaactcattattatacttaaaaattaagggagggtaaggcaggtggatcatttgaggtctggagtttgagaccaagcctggacaacatggtgaaacctcatctctactaaaaatacaaaaattaactaggcatggtggcccacacctataatcccagctactcaggaggctgaggcgcgagagttgcttgaacccaggaggcagaggttgcagtgagccaagattgtgccactgcactccagcctaggtgacagagtgagactccatctcaaaaaataataataaaacaaataaaaattaagatgtaattgaactatcataaaattaaccatttcaaagtgtacaagcccgtggtttttttttttttactatatttatgagttgtgcaaccatcactactatcaaattccaggacattttcatttccttaaaaggaaatccatatctatcagtcactcctcatttctcctccctgtatccccgatctaccyattgtttgtatagactaatctaatctggatatttcatattaatggaattagagaatatgtgaactttt

SEQ ID NO: 826849 - DNA, 389 bp, Homo sapiens
tcatcctatgatgtgtcatgaggtcagagcagaggcagaactgctgcctccagaccccacagtaccagcgggcagccctgccccagtcctggccatctgaccagtgccccagagaatagaggtggcctttcctgaaggctactgacctctgctgcccttatggattctgtgttcacatcacctcagggtctccctttccactgctgtagaacagaactaacaacaataattactactattgctgctacttcaaagagccatagagaagattaaaagaaccagtgtctgtgagccaattggcatattggygactatgtattataatatacactactaaggaacagcttagctggttagttcttcattatccttaaacacttgttgcatat

SEQ ID NO: 826850 - DNA, 629 bp, Homo sapiens
aactcgagggcttagctgcacagatgagaagattaatagcagagtggccttggagtcacggatacctgcatttgacttccagctttctcattcacatgccaggtaaccttgggaactttccttttctctctgaatccccatgtttacgtatgaaaagaagacacaaatacttacactaaaggtggtttaaggatttaacgaagcaccttagtacagtatctgccccatggtgggacaaaagaagccgcagctgctattaatgctgtattgttagccaaagggaagagaagggcagatgtggtgcagaattcttacgttcaaaagaaggaaggaaaatccattaaaaacaagcgcatgcaaatcgtcatttactgcagtgactgggagaatggattgtcttgttcattttatgttctggttctggaggtaaactgcaaggtcctttttattgaaagttcattctgtcttccacaaatgttattgagtccatgctatttgctaggcacgtaggagaaatgaggataaatgagctgctgatcctgcattcacctcgggagttggagaagggagaatacrgattttctataaatgtgtgggaaggcacttttctgcttaaatacagaatgcta

SEQ ID NO: 826851 - DNA, 634 bp, Homo sapiens
tatatcaaaacatctcgtataccccataaatacatatacctactatgtrcccacaaaaattaaaatcaaaaattaaaaaaaaaaacaggaaattgacattggtgcaatccatagaccttactcagattttaccaattttacatacgatcgtgtgtgtgtgtatgtatgtatgtatgcatgtaggtctatgaaattttgtcatgtgtagatttgtgtaaccatcattacaagcaagatatagaactgatgcatcaccacaatgatctctttcatgttgtactcatgcacctttcccccaaaccccctactcattcttaaccctgtaaatcatttttgaaaaataactaaaaacttgttaaatttaaattatgatgaacatttatccaacattttgccacctaagcactcctattcatcctaagtgattcaagtattatccttttgttaaatgagttaccaatctacaattccaaactgttagaactatatagtgtttctgttttaccaaattaaacacttccttgctgggtcctacttgcagaccctggctgaacaacaaatgcactcagacacaggtatttagtgaaggagtgggctagggaaccaggccgcttacagaccctaaggagggtgc

SEQ ID NO: 826852 - DNA, 502 bp, Homo sapiens
aaaaacttggagatgccagcaaccgcagagccccaagggatgttacagctttttattcatttaacatagcaccacatcagtgcatgtagatacatctcattttttttggtcattttgttctattccttggtatggatgttacatgaattattgatccattttcctattgatggtatttgcattgtctcccattttttgcacttataacagtgttacaatatacacatacagacacacacacacacacacacactcacacatgtccctttcccagtagacccagtacttttctaaaataaattctgtaagtggtacttctgggttgtagaatgtctttattttaaatttgaaaaattctgccaaacggtctttcaaaaatgtcatacgaatttacacatkacagaaattacacattaacagaatttgaaggggtttacctccttatccgcttaaaaacactatatgtcatcaaaattttataaattttgccaatttaataaaa

SEQ ID NO: 826853 - DNA, 502 bp, Homo sapiens
aaaaacttggagatgccagcaaccgcagagccccaagggatgttacagctttttattcatttaacatagcaccacatcagtgcatgtagatacatctcattttttttggtcattttgttctattccttggtatggatgttacatgaattattgatccattttcctattgatggtatttgcattgtctcccattttttgcacttataacagtgttacaatatacacatacagacacacacacacacacacacactcacacatgtccctttcccagtagacccagtacttttctaaaataaattctgtaagtggtacttctgggttgtagaatgtctttattttaaatttgaaaaattctgccaaacggtctttcaaaaatgtcatacgaatttacacatgacagaaattacacattaacagaatttgaaggggtttacctccttatccgcttaaaaacaytatatgtcatcaaaattttataaattttgccaatttaataaaa

SEQ ID NO: 826854 - DNA, 612 bp, Homo sapiens
gcaatatttaaaaatccatctgaataaaatttgaatgaaggagtcattctccccatccaaaaaggttggtggaacagtagttttatatactattaaaagtaagacatcaggttttaaaatttaagtaggaaaggaacattggccatagttgattgtgtgtgagggtttcatatcttactgcccacattgtaccaagtgtctaaatatcagataattcatcacaaatcatcagtccctgttggaaattccacgatcatgtcaaacagtaagtcaaagagggatctgatcactcttccacttactttgttctccttttctttgttatctcactgaatggtaacctatttacccagatgccccaagtgaaattctaccatctctaatcagttatcaagtcttctttctatttctatttcaaacccatcttttcttctcaactgctaatgtcttcattttgttcctcaaaatttcatatctgagtaagcaaaacattcctctaattagtctccctgactccatactgtttatctttcaattaaytcttcatgtgtaggtcaaattggttttttgaaaatcaaatatgatccttggtttaaacatctcccagtagct

SEQ ID NO: 826855 - DNA, 638 bp, Homo sapiens
gtcacccaattcaggtctcctcagctcattaggttgatttgcctgcataaaggagctgtccactcagtccactcagtggagagtgtcttctctccactgagagctggacacttattgggacaacctgcttgcaraaaggaactacccactctgggtctcctctccactgagggctgcgctcatcaggatgacctgcctgcagtaaggagctaaccacttcaagtctcccaagagctgttctgtcgctcaataaagcacctctctgccttgctcaccctccagttatctatgtacctcattcttccaggacggaagacaaaaactcgggacctgccaaatggtgggactgaaagaggtgtaacacaaacagggctgatacatactcccatctcccgccacacaccctacttgccacattgtaggcaacaagaaggagagaagagctgcagcctttcagacagcccagacctaggggcttcctgagccagggctgtgacaccctctttggggctctgtggttcctggcatctccaagcttccaggcagcaccacattccccttgtacaaacacaggtgcccacagcagaagatacttgtgcatcagatccaaccgcaggcttgcatggagctggcgcctg

SEQ ID NO: 826856 - DNA, 613 bp, Homo sapiens
ctcatttaaggtcaggaagtgggctacatgtatgctacactttctttgatttgttataatgcacgtttctcaaactatgtccagcagagcattactgttttrcactattgatagtttttgagaagtaggttagcatggccaaagatgttgaagaaatattatttcaaacatattttaacaagtttatttttcttcgggacttctcaacgtccttagtatattaatatgcatttttgactctccaagaatgaacagaatgtaaggcatttccaaaccttatttggctgcaaattacctagagcactataggactcagtttgagagattttaggaatatggatatttaaaaacagcatttaattaaaaagttatacttttcaaggttcccaatcatcactcatttcacttatttttataaagaaagtatgatgattctatctgggaaagaaattactttctacaaagtcaggctgggtgtgcttgagcaggggggagctgctctagccaagggaaggcttatgttcccagggctcctgtggtgccatccttaggcctggagttatagagtcattgactatcttgcctagggagaacattaaagatgtgtatgaac

SEQ ID NO: 826857 - DNA, 604 bp, Homo sapiens
tcactcaagctctagaacccatgggggtgtgaattctcaccataatcaccttggggctccctttgggacctctgttggttaccacagaaagttcttcttcattcctgagcatcccttgatraagggttaagccaggagactactaggttggtctgcctttggacatatttccttcctacttaaaatatggcatttctcctgggagatggagaaggatgggggtggtcattaggctcttggtctaagcagttaggagaattttaaatcattaagagttttaagttcatattatcagccgggcgtggtggctcacgcctgtaatcccagcactttgggaggccgaggcgggtggatcacgaggtcaggagatcaagaccatcctggctaacacagtgaaaccctgtctctactaaaatacaaaaaattagctgggtgtggtggcgggtgcctgtagttccagctactcaggaggctgaggcaggagaatggcgtgaacccgggaggcggagcttgcagtgagcctaggtagcgccactgcactccagcctgggcgagagagagactccgtctcaaaaaaaaaaaaagttcatattatcaactgcta

SEQ ID NO: 826858 - DNA, 610 bp, Homo sapiens
gggtctggaacttaataaggtagtagcataattaagaagacagtgacagaaggagatgagtcaggcccaaggttttaattttgtttaacaaatacatgtcagttactgtgagtccgacactgttctaacatttctacatatcttaatccattataatcatcaatatcagaatattagaaatattcaatatttctaattctatttctaattgaatattagaaagggactgttatcacccccgtggtggttctgtgatgcacaccgccaggtcccccttacggaatgaagggcttactcctccagctgcaggagtgctgcagaggatgccacacagctgttagtcctttttgggtaccatctttgctacagacaactaacactcacagtgtctcacttcctcctagggtgagccaatgactgatcagcacaggggtgcgaaagactggcctcctcgtggcaatttgggacaactctgcaaggtgtgggctgaggcctttgttgcgcctgcatcacagctcagcttctccctcatccagtgctgcttcctttaccttcccccgccrggtgatgattccaagagcatcccctgttaaatttgtcgacctcagaa

SEQ ID NO: 826859 - DNA, 614 bp, Homo sapiens
gtttatgaaaattaagtcaaatgcattggagagagtaagagtaagttgctaatactacttttttttttaagtgtggacaaaactaaaaargtttggggggatgagcagaaaaatttagaatgatcctttacttgggtttgacttctgtcattaaatccttgctccttttttaaataaataaaactagaaatcatgcctaatacatcaatttatttgaagccctaaatcaattggcaatttgataaccccctcagtccccgcacctaagtgaagatttattggattgaatcgaataccacaggggtggactgctaggtttgttagtccccagtcagcactcaacttataccctgagtctaagaatattcatactcatctattttttttttttgagacagagtctcgctctgtcgcccaggctggagtgcagtggtgcaatctcggctcactgcaagctctgcctcctgggttcatgccattctcctgcctcagcctcccgagtagctgggactacaggcacctgccaccatgcctggccaattttttgtatttttagtaggggtggggttaacaccacatggaagccaccaaggcttatggcttgcaccctctga

SEQ ID NO: 826860 - DNA, 542 bp, Homo sapiens
ttcagaagggttgtgggtgcaagaaagaaggggagaaaataccttgaccagtcaaactgagtctcagtaaatctgaaagaaccctgagtcaaagagcatggagtgctttttcaaatccactgaaattaccctagctcagcttgtctaatctttccccaaccacagttagagagaaagcctcgatttccttgcctgacaaatgaggtaacccaggcatacaaagcttaagacactgccgggcacagtggctcatgcctgtaatcccagcactttgggatgccaaaggcaggcagatcacctgaggtcgggagttcgagatcagcctaaccaacatggagaaaccccatctctagtaaaaatacaaaattagccaggcgtggtggcacatgcttataatcccagctactcgggaggctgaggcaggagaatggcttgaacccaggaggcggagkttgcagtgagctgagatcgcgccattgcactccagcctgggcaacaagagtgaaactctgtctcaaaaaaaagaaaaagaaagaaagaaa

SEQ ID NO: 826861 - DNA, 666 bp, Homo sapiens
  misc_feature 531, 532: n = A,T,C or G
taaatataatgaatagtagtatatggcttttggaaaccatttaatggatccttatcagcagcctacagacaggatctgaatgttcacagctttggataatgggacacaatttaggaattgagggaaaaaccaactttgctaatctttagaacaatcaagaaaatgttgtggaatttataaaaaaccaatggaagggaaagccatgagctcgcccaagaaagctgctattcctctgcttggcttttagcagaggctgaggaatttgcttgggttgtttgggaaattcttgtgatacttataatataatcaggcagaggttttctttttttaatatatttctgcttgcctgccaaatgctaatgattgctggatgctaattgtctacagcagttgttaaatgagtttcccttcacatctcctctgggggtatttataaaagggtaaggaatctatcaagaagtatgctgtagaaagcaacaaatccccaatctcctttctactctggaggtactgagttgaaaagaggccagnngatcttcaggctccacttattcctgacatcacccagaaccttggcgaggttccaaagtcttcagggttggaggttccaacractctgggctggaggttgactaggtccgggaaagcttttgcagcccgaagact

SEQ ID NO: 826862 - DNA, 566 bp, Homo sapiens
aaaaaaattctttgaaattcctgactacaaagaacaactctttttaccaaacctgtagactatgactgattttcagtcatggtgagcacgaattctgaatgcacagcacgggtcaattttaaygagttcagaatttcttctaaaaagtcatttgcaaacatacacacacatgcacatccaaacggtagctcttacaattttatctaagaaaaattatgggtttcaaaataagatacaaaatacaaattttgagcacaatgatgtaaaaaagatgaagaaaatttcatccatggactaaatggacttttcccctaacccccatcttgatgaaaagatgcaatagccagctagccctaaacaatgtgaactatgtttgtttgttttttttaagtggacaatgaatatagaagcaattttaattcaagacctactccaattcttattaaacctaaaagtcagactaattctctgcccttcaaaatatagttgaaaattagctttgtttgcctcccccaaaatattgctctcttcgatggcaggattctataattcatctttatatacct

SEQ ID NO: 826863 - DNA, 529 bp, Homo sapiens
ttaaggaaccacaaattttaacattattaagatccaattcatatttgcttgatattttatgattgcccttctagatccactcttcattcctttccatccttatgtgtgtcctragagggtatcctgttgggtatattctacctcaacagactctcttgttgtataaatttcctttgcatttggatttgggtttgaagattcctggtagaaaatctgagggagggcaaaaagtaaggtagaggtatttgttcccttagctacctccatccagggttgcctaggcctgggagcagaacctcttgcccaaatatcttatctcctatcatgtgacttcctaaactaggttcccataattgctccttctctttgccttttggaaattctactatttacagtcccagagtattgcactatttctcatggtttgtcctactctgattgcacttttataaatagtcccttcaaattacccaatttgactgcaccatctttttcccactgggaacttaattggcacagtaattgatac

SEQ ID NO: 826864 - DNA, 573 bp, Homo sapiens
aaaatagtcttcacccatctctctccttgctttatcctcttcttctcctcccctcctccacaaccttggagtttggcccacacttttcacctcgtgctagctggtcttcatcttgtttctcctcttgattctcttctctgtttttggttttcttctctcctctgtttagaacaaaaaaccagctcatctgattctctcaggggaagagctttgatatttttctgaagatatgtcacctgtgaatgaatactcaggaccttgggggtctcaccttcactttattccctggaatgtttccctggaaaattaactgtgactagcatacaggattatataagaccatggcagaggacacagccacttggtcattacaggtggcattttctaagaaatgcagagattttcccagaaaaaaaaggtggagaaaatgtggtgtggaacaaaaattgattgtttactaaatatttactgtggaagaatgagttagtggaacaggcaagtcatgaggaaaagagagaatgatcaataaagctacctcaggtggggtagggggmcaggatcaaaactaaagtg

SEQ ID NO: 826865 - DNA, 622 bp, Homo sapiens
ttgagagcatgtatagccttgggaagaaacttgacccagccctgcaaagtattgcaacttagctagcactgtaactgagtcttcaaaaggccattccatcattctaccaagccagctgtttcaggatgatggggaatatggtaagcccagtgaattccatgagcatgggaccattgcctcacttcatttgctatgaaatcagttccatggcagtggatacagtatcctgtaagtccagggatgatagttctggcagaagcattgtgtgcagggaaggcaagtctgtatccagagtaaatgtgtattccagtaaggacaaaactctgcccctttcatgatggaagcaatccattgtagtcaacctgctgtcaggtgtctggctgatcattcccaatatggaatggtgccatattggggcctcagtgttgatctctgctcctggcagattgggtgctctgcagtggctgtagccaggttggctttggtgagtggaagtccatatttctgagcctgtgcataacctccattcctgccaccatggctactttatkagcccatttgtgtgatgacagtggtgactggggaaagaggctgacttgtaggcacagaaggagtcatttta

SEQ ID NO: 826866 - DNA, 603 bp, Homo sapiens
tagtttaaatatagcctgagtgggttttgttgttgtcgttgctgtttgagacagggtctcactctgttgcctggggcaatcacagctcactacagccttgatctcctggactcaagmaatcctcccacctcagcctcctgagtaactggaactacagatgtgcaccaacatgaccagctaattttagttttgttagagacagggtctcactatgttgcccaggctggtctcaaactcctgggctcaagcaattctcttgtctcagcctcccaaagtgctgggattataggcatgagccaccatacccaggccttatagcctgagtcttaatccccttatgtaagtaacaaaaaatattcctattgcaactgggctaaagataactttctaaaaatgttacattgaataacaataagtaaataatcaccttaagtatatgagatgtggatgggcataatttctgagttatctaattatgtttgtagtttgatttataaaatctttctaatctgttcactgttaatgctagagtgtgtgtatttttgtatatttcttaaagaactttacatttttaaaaagtcttgcaaaaagagttgatctaaa

SEQ ID NO: 826867 - DNA, 435 bp, Homo sapiens
ataggcaaagtgctgccctgtaactcctttagccagaaagccaggaaagagagggcttatgtgaccttttgagaataagttgttcactccaagaagcccagagtaattaaaacaagagagttagcacttcttacaggggggatcaatttactgtgaatagcccaaagctttttttcacttgttatggtattcttgctctggacaaggaaggaggcaggagagccagtgaggggaagttgaacaaggagcagtaatctgagaagggaaaacaaaaatagagtgggaaataaagggaggagtgaaagaagggcaggctttgggaggccccgtggcacttgtgggcaatgcctgtgttcaaaggyctcttagggggcaggtagctatttcagtgtgttcccattatagaagtggatcctggtgttgccctgaggaagg

SEQ ID NO: 826868 - DNA, 602 bp, Homo sapiens
cacccttgatttttctgtttaggatcctctgaggtccagcctctgcctttgtccttcccttgtgagctccagctgcctctccaactctctactccagccaggctgcactcctgccttcgggtcccacactcatacctctgtttccttattctatggttttccctcttcctttcctttgcacatatctaaactacctccatcctctcaggtcaagatctaatttatttcataataataacttacattgcattgaactttatgccaagcacttaaacatgcacaattatacctgagccattgtctcgtggacatttccttaattattttggctacattcatctttcctcatgttttatctcttggagcatttgttcactaacccaactctacagaatcaacctgtagggatgaaaggctgtaataatctccattgtcaataaactacccaggaaaaattggagttaggagttagggtgamctaagctggtagaattttgaccagtgatgtttatatttttctatattgtataataaattttttgccatgatgatgtacaacttttataatgaaaattagctattgtgccactgcactccagtgg

SEQ ID NO: 826869 - DNA, 575 bp, Homo sapiens
tcttctgaagaattttctgtccattattataaaatgttcttctttatctctgataatgctttttgtctttaagccatttttttctgatgttartatagccttgcagctttttatgcctactgtttgcatgacatttatcctcttagttttaacttatatatgttgttatacttaaagtagatttctttttttttttgagatggagtcttgctcttgtcacccaggctggagtgcagtggtgccatctcggctcatggcaacctccatctctggggttcaagcgattctcctgcctcagcctcctgagtagctgggattacagatgcccgccaccaggcctggctaatttttgtatttttagtagagatggggtttcaccatgttggccaggctggtctcgaactcctggcctcaggtgattcacccgcctcggcatccaaagtgctgggattacaggcatgagccaccatgcccggccagatttcttgtacacagcttatcttataactgggtcttctattaaatccaatctaaccatcactatcttttaattgaaatgtttagttaattgaaat

SEQ ID NO: 826870 - DNA, 580 bp, Homo sapiens
gcatttggccctggagctgctactgaacgtacattgcagtggtggttcaagaagttttgcaaaggagacagagccctgaagatgaggagtttrgtggcaggccatcggaagttgacaacgaccaattgagaccagtcatcaaagctgatctcttacaactacacaagaagaactcaaggtcgaccattctaggtcatttggcatttgaagcaaattggaaaggagaaaaggctcaataagtgagtgcctcatgaactgagcgaaaataaaaaaaaaaatcatcagtttgaagtgtcatctcctcttattctatgcaacaacaaaccacttcttgatcggattgtgacgtatgagaaaaagtggattttatacaacaatgaccagctcagtggttaggcagagaagaagctccaaagcacttcccaaagtcaaacttgcaccaaaaaaaaggtcatggtcacagtttggtggtctgctgctggtctgacacactacggctttctgactcacggtgaaaccattacatctgagaaatacgctcagcgaatcgatgagatgcactgaaaactgcaatgcctgc

SEQ ID NO: 826871 - DNA, 580 bp, Homo sapiens
gcatttggccctggagctgctactgaacgtacattgcagtggtggttcaagaagttttgcaaaggagacagagccctgaagatgaggagtttagtggcaggccatcggaagttgacaacgaccaattgagaccagtcatcaaagctgatctcttacaactacacaagaagaactcaaggtcgaccattctaggtcatttggcatttgaagcaaattggaaaggagaaaaggctcaataagtgagtgcctcatgaactgagcgaaaataaaaaaaaaaatcatcagtttgaagtgtcatctcctcttattctatgcaacaacaaaccacttcttgatcggattgtgacgtatgagaaaaagtggattttatacaacaatgaccagctcagtggttaggcagagaagaagctccaaagcacttcccaaagtcaaacttgcaccaaaaaaaaggtcatggtcacagtttggtggtctgctgctggtctgacacactacggctttctgactcacggtgaaaccattacatctgagaaatacgctcagmgaatcgatgagatgcactgaaaactgcaatgcctgc

SEQ ID NO: 826872 - DNA, 611 bp, Homo sapiens
ctagtcagcactgttcttttgcattgaaaccgagcctaagcattgactctttcctttcattttctttagtacacatctcttggttttccccttgtttctccactcaagtttcccacaaatgagatgagagtatagtgctgaagagattcttgttttctcatatttgttctcatcacttgaatacgggcaactgtcagtctcccaaacaaaattgtccatcttacatgccaatattatgtggccaatattagaacactgaaaatatttcaaatcaatgacctcaatgtctaccctatgaaactagaaaaaagggggcaattaaatcaaatgtaagcagaagaaaggccagaatcaaaattaaacccaaaataaatgaaatagaatgcagaaaatcaactgaaaaaaatcaagaaagtcaagtggtctttttgagatcaataaaattatcaacctctagccacactaataaaaaaaatagaatatacaaattgccaatattagcaatamgaaaagtgatatcactacagattctacagatattagtaggataacaagaaaatattataaatgacttttttctataaactttctaaaatacacaaactataaag

SEQ ID NO: 826873 - DNA, 509 bp, Homo sapiens
tttttccttttttctcactctacttgagttaacaagggaattaacatgatcagtgcataaataccacagcaaaatctatgagaggctgaaatcaaagttgagtcattcaaatgcttgcccccatccccaaagaaagagaggtaataattaaatatcttagataacagtatgtaacagaataccccctgacttgtttaaaaaatgaagcttctttaagttttaattccagaaaccatgatttgatgaataagaaatgggacaaacccaggtgattcagatgcaagcgactcaccagcatgtaaattttgaaaaagtcttgtctagggactcaggtattaacttgattctcatttgatgtggtctcatgactaagtagaagattggtaattatagtttataattgctagattatattagaaaggaagtagtggartgatagcagactggattaagtaccaaggatcaatagagttcttttatgactgtggaatgtcttctaaaataatttt

SEQ ID NO: 826874 - DNA, 509 bp, Homo sapiens
tttttccttttttctcactctacttgagttaacaagggaattaacatgatcagtgcataaataccacagcaaaatctatgagaggctgaaatcaaagttgagtcattcaaatgcttgcccccatccccaaagaaagagaggtaataattaaatatcttagataacagtatgtaacagaataccccctgacttgtttaaaaaatgaagcttctttaagttttaattccagaaaccatgatttgatgaataagaaatgggacaaacccaggtgattcagatgcaagcgactcaccagcatgtaaattttgaaaaagtcttgtctagggactcaggtattaacttgattctcatttgatgtggtctcatgactaagtagaagattggtaattatagtttataattgctagattatattagaaaggaagtagtggaakgatagcagactggattaagtaccaaggatcaatagagttcttttatgactgtggaatgtcttctaaaataatttt

SEQ ID NO: 826875 - DNA, 620 bp, Homo sapiens
aaatcaaaagcagaaaggaagaaataataaattgtggaaactcatgaaattaaaaacacacacacacacamaaatcaatgaaaccaggagcaggttctttgaaaagatgaataaaagaggaagaaacacttctcaactcatttcatgaggcaaacattatcaaatcaaggccattacaagaaaagaaaactatggactgatacctcgtagaaacaaacaaaatcagcccaggttgaatactcttactttatagaaatatctttaaaattgcaaaatcacctgttttgcacaatttctcattcttgggagcatataaatttcttcaagttccttttgtctttcttcttcttctaatcgtcttctttgatcttctggaataatttcctcccaattctttgaatttctttcaggttccaactcaatgtcatcctcatccatatttgagaagttggcaacctgataaatttcagaattttaagagtaactgttacagaaaaattgatccctaaaagttttttttaaggggaagaactggcatgctccttaggataatgaacatggctgtggactaaaccaaatataacttctaaacaacctagattcatttcttcattagggca

SEQ ID NO: 826876 - DNA, 619 bp, Homo sapiens
ttaaataattatttatgcataattttaaaaggaaataatctaaaattaaaatacaaaagcattctaggatagtaacagggaggaagagagtaagtgtgctacagatcttatctagsggaggaatagatatactacaaaattctaagacattgttagaaaagagtattgaaattcggtaagagaaaaggttttggatgtattcaaactgtaatttttattctttatacaagtagatgtccatgaatggaaaagaaatccaatttatatgcctttaaattcaatatgaatttgcttttcttcaaatatactcatatttgtagatctgtattgatatggaaacatcattcaccattataccattcctggagctgctgaaccctctttaaaacaaattggacaaaaatgattatagttagccttgaacattctatatcgcacagaaccaaataatgaaatggggtatacaaaactgtgattcaaaaagcttaagtattaattcttggaaaattacttctcccaaaattcagatgaccacaaaatctttactgtaggcacattatacaaagtggtccacatataagaatcttaaaattttctgttgcttatgtttcaattaaaa

SEQ ID NO: 826877 - DNA, 644 bp, Homo sapiens
attttaatgcctgacacacaaaaagtcttgaataagttctgattaattgagcacaatttaagttaattttaacacccctatttgttgagatgtaataacagcctactgagaggtccagcatgctgagaggaaagagtcaaaaatttgttcatgtatgtgatcacttatttgttcagtaatgttgatcaataatgttgactgggataagcagcactggctccaactgcaggtcaaacagcagaattggccccaactgggaggcggagtgaatgattgctgttagaggacaagcaaagggaacattcagaaggaaagaatgaaaacaacacagaaagacccagaaagaaccagggaaatacagagtactctaatcacttctgaggctcagaggggacaaatgacctgtcccatgtcatgtagccctcttcttggcagagccaagagtagagagcagattctataatcctcagtctaaactcttgacattacatattgcattgcttctccaagtggggcaggaaggggtggtaatgcaaactgcsatttcgggaagtggttaaaaaaaataccttaaaatgtggttatcctttacctagtagttctaaaggagtccatgtttgggatccaagaaattcccctgccaa

SEQ ID NO: 826878 - DNA, 562 bp, Homo sapiens
ggaattgctgccagtgtttgtggtggtgatggggaactgccaaggatctcctgcttaccatctccccataagaagtccccttggctccaggacaagcatggcagggtagacagtattggagaggtaggatgccttgctcccctctctgtggtgttacgctacacttccatgctccacagggatctgactgctcccctggtgctccccggtatacagtctcagactctccaattgagatatagttgtttatttgttgttttggtccctttttgatggcagtcgtggggcacaaaccaagcaccaggcaagtctagttgccatcttgacgatgtccctttgttctcatatactttaacagctgattggcattccattgtgtaaaatgttctacaatttttcaaaccaatcttctattgacaaacatttgtgctattgcaaaatgtattattatacatatatacaaaaatattaaggtcgcatccctaraagtagatttgttactgcaaaagatgtgtgtagtcagtaactttgttaggtattaacaaaatgctgagtggagatt

SEQ ID NO: 826879 - DNA, 587 bp, Homo sapiens
tgcatttttaattgctttgtaaattatttgtataaagacatctgagggtcaagattctggagagaaactgaaggaagagaaggaaattgattccctgtagctgctttttctctggaggcatttgttgatttgggccaaaggccaagagcctgagaatcaagctttgactgcacagaggcagagaaaccaacagaactttttggaagtattgcagagctggagaccaaagggctctcaacatacttccagtttttccctaaacacatttgccaaattctgaagctacatttagttgggggcctaaaaagcttaagcagaacaccttataaaagcagaattgacactggggaagtctcactgtgttaaggaaacaaagaaagagttcacgatttaccaaaatgggggtcaccatggccataccaggttctcaacggaaaaatttgaagggctataccctaagagcasgaacaaacactaggtagattgagacttataaaaactgcaaccaaacattttcttagctcggctcttgatcagattaaataatcaattctcactttttatgtctaataaaggatgagtcaact

SEQ ID NO: 826880 - DNA, 553 bp, Homo sapiens
aaggattcttctagaacccttctctcaacattttgaggtttgattttctatgcaaattcctcaaatagcttcccatctgaaaacgagagctaaaatcctaacaatggctttacatcatctgtcctaccacacccctctcacctctcctcttccaatctccctcttgcttactgtgcttcattaaaactctctccttgttcatgaagataccaagctcactttcttctcagggactttgtccttgctgatttctttacctggaatgttctgcttccagaacatttctcgtggtttatcctctcacatctttcaaatctttactcaaatgtcaccttatcagtgaggccttccttgaccaccttatgaaattacagtccccttcatagcttctatataaatattttattagacaacctagttgttttacttttttgtttattgtctgtagacctctactagaatacagacttcacaagggtcaaggactttcataaactgttatgtatagttccccyttatctgtgggagatatatttcaagtcctccaaaggat

SEQ ID NO: 826881 - DNA, 658 bp, Homo sapiens
gagttcccttccactgggccctatcctaacccaaccagtttaaggtttgggaaattaactctttccagtttggaggatgcatctgaggggagtgtcgcatagtatggagacacaattacctattagtgaagagaaaaccaagtagaagaaaggaaaaagaaggcatttttaaaaggcgtcccaagggttcaggatgcattcgaaaggggtacaaactgaagatgaatggctacccatttagaaagagggaagcaggcgtccctggttcccttctcttcccagcagatacacagtggtaagtgagggagagagagagaagagtgtctattttccctcttccatccttgcatccccaagttctggtgaccttggcacgtgccaccgtgggtgtcaaagcaacttgcacccatgaaacagggggccctagagaataggaattatccattctcacctgtgtctctttccttcctactgtcagtggccttcgaattccctagacctcatttatgccatgaatattaacgtggtctttatccatgaaacaggaagcttagtgttggcttatttggcaggaatcagccatgctcacttgccctgtgccttttaacctctgttgttatttgcctctgsatccctcagatccaattttgtttcctag

SEQ ID NO: 826882 - DNA, 592 bp, Homo sapiens
aattaatcatatcaattctaaattacagtttagttaacattttttaacctgttcttcagttattacactgtatttttagtccaaaaaaagatgaaaggatttatcaggatrttttgaggggatagatttttaaataggtcattttgaagatacttttgagtagacatagtcattacatagtcattaaaaaaccagagctttacatatttttataaaataatttttaaattctaaaagtaataaatgaccttagggaagatttggaaaatacaaacaagtatgaagaagaaaaaaaaaagtccccgcaatcccactgtgcaaatcaaccactcttttttttttttccaagccaaactgtatccagctttattaaagatactttccataaacagtcgtggtatttcaggcagaacatgggcagacagtcattaacagtacacaacaactttcaaacttaactaccttcttcaatggactaccgaaaatcagaaagccactataaaacccaatgaagtcttcatctgatgctctgaacaggcaaagtttagagtgagggttgacatgtcacatttagcatgttgtttaacaactt

SEQ ID NO: 826883 - DNA, 582 bp, Homo sapiens
gttcattgggtatcatttaaggaatttgtacaggtagtaaactacacacattgaagtgacttagaggtttaattttatttaaaagatagataataacacaaacagttattcattaattcactcaacaaatattgattgaaggcttaccatatgccaagccaggtgcttggtaccaagcacactaaaatgagcatgactggcacagtccttgccaggactttcactttaatggggaagagttcagttgtggttttagaaaaatcactggtgatggtagaggatcatctggatgtaggggcaccattccagagccttttgtactgggagtctaggttaggccaatagcaagaaatatagagataaaggagtatcagaagaacattttttttaacttaacaccagttaataaacaaagataattgctttgagtaaattagctcattatcttgaacacgccctaatgaagggtagaggaaacctatattgattckggtccttgactagtttaattcaaggctagttagtgaaaacatcagcagcttgtagattccttatgtcaaactctgctagttttatttatca

SEQ ID NO: 826884 - DNA, 643 bp, Homo sapiens
tggctctccctgccttaaagggatcctgattgatcttctctggtggcaagaaagctcagcctcctccttcctgcaggataaaggagtggcttggaaaagtggtcagatcggaaggccctcgagrccagctccctttcccacagcccttcagtgtctgactcagagggaaactggcgctgttctctggtatcctctctcctttcgtctccacacctagtgtgccagcgttgttctccaaacaaagaacagaccatgtaaattctgtgaccgaagcttcattgatatgaaggagaaacaattgccagacctattctggccttctgtaaacaaaacttttttttagagaaagcttgcatgccatttttagagaaagttattgtatgccagaaattagacagtgagggaaaggccaaattcctggtgatatttatcttgctattctgttcccttcaggaactatctctctatctcaggataatttttttgtttgttctaagaattatattgtgtatgaaactctgtgcatgcacaaagataaataattttcttttttattattacagatagagaaaaatttgaaatccttgacagtttcattttcacaaaattaaactgaagtaaatcatacattatataaataatg

SEQ ID NO: 826885 - DNA, 514 bp, Homo sapiens; identical to SEQ ID NO: 814694

SEQ ID NO: 826886 - DNA, 518 bp, Homo sapiens; identical to SEQ ID NO: 816767

SEQ ID NO: 826887 - DNA, 505 bp, Homo sapiens
tggcaggactgctactgggccacctgggtccctgtcaatgacttgtgcttcagccttggaggcagcagcaccccgmtttcagcagaggatgtctgtggggctccaggtatgcggagttgcaggggttgctgggcctcagggcaggatgtagtctgctggggactgggctctcaaaatggcgtcttgctgtggctgcttagggctcaggggatgtgtgggacctagcgtgagtttccccctggagcaatgccatctgtgatctccaggacgctccctatgttagtcacagggcttgtgtgggtcgaggggctctcgtagggctgggattgcagtagtccatgatgggaatgcagaccgctgtgggtaagtcatttactctttcctcacactggggagcctctccaggctcccagccagtcctggcagactgtctctcttaccgcttgcgctccttcctcacctcaggtgttttctgtcacttctccgttaaatccagtgttctctt

SEQ ID NO: 826888 - DNA, 538 bp, Homo sapiens
ctgttctgtctcaggaggcaggagccccgtgcgagcacaggctctcacttttcaaaatagatggcttggggcaattttccgtttccccatgctaaccctggtggcttttcttgtctgtgaataattgacttggcttcaacaggcgataaatggaccacaacggactcttattctagcagctgtacttcagagacgctttcatatgtacatctcatgcacgtgtaaagtgtcccgtgacagtgacacgttggggtttctgtcacctctgcttcatgagatctttgggcatctgggtctgtggagactcactgtgtatcattctgtgtatgtgtgcagagagggtgtgtgtgtatgtgtgtacatatgcgcatgtgagtgtgcatacatatgtatgtgcatgcacgggagtaggtacaygtgcataggcatgtggttgcattactgtgtgtatgtgagccaccagtgcaagtatgtatatgagtgtgtacatgtgtatatgtgtgtgctgtgtacctgtgtgtgttgcatgtgtgtacat

SEQ ID NO: 826889 - DNA, 525 bp, Homo sapiens
cctctcagcctcctgagatggaggcaggaagtgcgggccgttttgctttcggctgtaggcgcccacacctgtgccgagttctcaggacgcgcacgcgtgcgcgygcgcacacacacacacacacacacacacacacacgactcgtaaagccctgggcaggtggtttcatttttagtacttctgagctaaaattagtttattgaagcagctttataaaggtatttgaataggttctagagacccagaatataatatgtatgtagtggaaatgattgttctgtttcaggacagttaatgtttctgtaccaaagaaaacgagaaacaatgggacgctgtatgcctacatcttcctccatcacgctggggtcctgccgtggcacgacgggaagcaggtgcacctggtcagtcctctgaccacctacatggtccccaagccagaagaaatcaacctgctcaccggggagtctgatacacaggtgagggtcttcatgggttactgataacaggctgtgcctctccgtcaga

SEQ ID NO: 826890 - DNA, 525 bp, Homo sapiens
cctctcagcctcctgagatggaggcaggaagtgcgggccgttttgctttcggctgtaggcgcccacacctgtgccgagttctcaggacgcgcacgcgtgcgcgcgcrcacacacacacacacacacacacacacacacgactcgtaaagccctgggcaggtggtttcatttttagtacttctgagctaaaattagtttattgaagcagctttataaaggtatttgaataggttctagagacccagaatataatatgtatgtagtggaaatgattgttctgtttcaggacagttaatgtttctgtaccaaagaaaacgagaaacaatgggacgctgtatgcctacatcttcctccatcacgctggggtcctgccgtggcacgacgggaagcaggtgcacctggtcagtcctctgaccacctacatggtccccaagccagaagaaatcaacctgctcaccggggagtctgatacacaggtgagggtcttcatgggttactgataacaggctgtgcctctccgtcaga

SEQ ID NO: 826891 - DNA, 583 bp, Homo sapiens
caccgtcctcaaaaaggaagctccactcrgggatagtttcattttaaagtcttcagagttttctcttctaagaagtatgtttccacgttcaatcctcttgcataaagacaggtgccgtggccacgttgccttggctgagcaccagccttcatggcggggtgtcccttgtaccccaaccccgcaacttccaggaggctgtggggtgccatggttaaactggggctgtgctacaaagcaccacaaagctggtggcttagaacaacaggagcatattctcccgccgtctaaaagcagaagtgccagaacaaagtgctggccgcattgggctcttctgaaagctccctcggccctcccggctcgtggtgggggctgtggccacatcctcctatggcctccttcatcattggccttctctccccctcttcgtctcctcttcccatagggaccctcatctgggattttagcttgagcatctgctttgtctcctcttcccatagggaccctcatccgggaccttgagcatctgctaccacctgtttcgaaatgaggtcccattcccggtaccaggagtgaggacttcagc

SEQ ID NO: 826892 - DNA, 588 bp, Homo sapiens
ctccttgttgtcattggggctttctggaagctggtggttgcatctagacccagagagggtcagttcccactggtctgctgtgctgctcctgcaccaggctcggcattggctgttgctggatccctgtcacgtgagtgtgagctgggtaggcctcgagccagccctcaggacatgagcctctgccagcttccttgatttgggccgcgccgtgctcctgggactgcaggcgtgagcgctcgcgcccggcccctgccagcttccctgatgtgggctgcgccgtgctgtcccatcttcatctctgcatttcccacctgtgacctggagcaagcccggctgaggagccctgggccttctgctgggaagtggtatttagcggccgcagtccgcaccaaagctctccctgcatgtgggcaggtcactgcctggacgccttggtttatcgtagccaactttcaaatagttgaagtaactcagcstcagacttcagacaaagttcctcattaggattatgctataaaccctcacttatggctcacacagggtgaccatattgcttcctccaactggcatttctcagggtgatcaggg

SEQ ID NO: 826893 - DNA, 584 bp, Homo sapiens
agtccagttggctatccctttcaccttggcattttatcaaccagaggaaggaaaaataagacatcataaagcgagagaagccccttatgggtctttcractctcacgtctatttagatgcagttggagtcccacagggaatacgagatcaatttaaagcccgaaatcaaatagctgcaggatttgagtcaatattttggtgggtgacaattaataaaaatgcagattggttaaacgacatctattacaaccaacagtgatgtattaactacactagagatgctgttaaaggaatagctgagcaattaggggctattagccagatggcttgggaaaataggatagccttagacatgatattagcagaaagaagatgagtttgcgttatgattaaaactcaatgttgcaccttcatcccaaacaacgccacccctaatggaagtataacaaaggcattgtgaggtctgactgctctatccaatgagttagccagcaactcacgggtaaatgatccctttacaggatggctagaaaagtggttcggtaaatggaaaggaataatagccccaattcttacctccctca

SEQ ID NO: 826894 - DNA, 512 bp, Homo sapiens
cccacaagtttatttcacatattgtatttttcagttctcctttttttgaattttctatttgtttgtttttatgaactttttttctttacatgcataagcatacttataatagctgctttaatatccttgcctgataattccaacatctggaatatctcaacatcactttccatttattacctttccttgaggttgcatcacattttcctgtcttgtcttgtaattttggatcataacctggattatatttttgaattacaggtgtggagattctagattctgttatatgcctgtgaatagtcttaactttttttattagcaggaaatttacttggctcaactcaatttccaagcattgactttcttgcaatgacaagtagttaaaatctctattcaggttttatttcagctgggctatttgaaatatactctgcgcatttaytattcaagtcatctagttatttggataaaatatatatgcatattatagaactgttgttttgtggctcttt

SEQ ID NO: 826895 - DNA, 222 bp, Homo sapiens
cttaatgcactacactataaaaacaaaagaatttaaaggagtttgaatgtaattgtctgctctcaagtaatcatagttggttagatattgaacaactacttacaaataaaacagaattcactaccttctagcttatataatttgaaaagaaatyagaatattaattatttcattttctatttgagtgttctctttggttctgtagtcaacagagctctcaaa

SEQ ID NO: 826896 - DNA, 560 bp, Homo sapiens
gttaaggagattagctactcacagtgaaacagacaacactgtggwttcggggtagcaggtgggactgcatgggactgacagcaagaactgacagtgttatctccagtgttccctgcctgtagagccctggctcctggttccacctagactttctgacttgatttgtctggggtgggcccctgccattgtaatttgtaaatgctgcctgggtgattcaaacagcgcagactcagaaccactgctatagaagattttcaaagggaggagagctgaaatgagttggcagcctgttgcctctgagcactgggttcccattttacagaagttattatatttagtatcttgacatctatagggaggtgtgttcatctccatttttattaatggaggaggacagaagcacaggtgatgtaggtgaccttcccaccactgtgtagtgcagaggccacgagaccctggatttggcctggactttccaggtacgaaagtgactgttcttccttccctgatcttatattgagtaaacaggaagagttggggaatgatctatggatcagatg

SEQ ID NO: 826897 - DNA, 644 bp, Homo sapiens
tttttacataaataggacaggggaagcaatcagataggcattcatctcaggtgtgcagagggatgggttctgtcccacacctgtgaagataagctattagtttacattggcagtgggaaattcaaaagaactattttagggtggagatctcgaggtccccagtttgtgaggggagtctatagctttgttttgttttgacatggaatttcactcttgttgcccaggctggagtgcaatagcgcaatctcggctcaccacaacctctgcctcctgggttcaagcgattctcctgcctcagcctcctgagtagctgggattacaggcatgcgccaccatgcccggctaattttgcagttttagtagagacagggtttctccatattagtcaggctggtctggaactcctgacgtactgtggtttgcccacctcggcctcccaaagtgctaggattagaggcatgagccactgcgcccagtctgtatgtagctttcttttagtctttgtagctatctcgtttagaaacaaaatgggaggtaggtttatctgatacagttcccagcttsacttttctctctggcttagtcatttttattttcctttcatgagcttgtgacagacataatgctttgacacactgatattg

SEQ ID NO: 826898 - DNA, 536 bp, Homo sapiens
aatccatctcaaaaacaacaacaacaacraaaaaaagtaaagggcctgaatagactaatcatctggaaaatgccaatcaaaatcacagtgaggtatcacttcacatgtcttaggattgctattattaaaaagacaaaaggtaacaagtggtgaggatgcggaggaaaaaaaatacccctgtacgttgttgttgggacagtcaattggtagagcaattatatttttaaaaattctaaaaaacatggagttgccttacaagttataatttaattttactcaaaacaatatgagaattaaaattctttttaattttaaaaatcaaaatgaccaaacaatccagcaatcctacctctgagtatgcgtctgaaggaaatgggtatttccaagagctatctgcactcccacgcttgctgcagtgttattcgcatcagccaaggcacgtcagccgtatgagggtccttcatgatgcacggataaacacactgtgagacagacagacagatttctcagcggctgagagggttttagagatcctg

SEQ ID NO: 826899 - DNA, 637 bp, Homo sapiens
ccagagcatcatcctttagctaaaaacctgtttgcttggttagctgaaaacattgattgctagcagcttaagcatttcctcatgttgtttgtagaaggacgaacatagkagaccaatggccttaagaagcaaaagagttaatgccacaagataatttaactctaactgactcttcccccgaaccgatgcccacaagttcaagcacctagctcttaaaaacttctattatcaggagatactgggttgctcactaaggaaaagcttttacagactcactggaagaattaacttgtttaagacagcaatattataataaaacactaaagaaaactttgtggcaaggcaaagatgactccagatcacctcatccaaacccattctcctgtttctcttctctaaaccacacctagtatcagcttgaagctccaaatacctggcaagcaccctctggtctctattggatctgtgggccacaggcctaccgacagttgccaggaaaatggacaagggctagtgtacttgaaacaattagaccatctttcttcttactcccactgcaacagggagaaacttgaaggtatcctgtctacaataaaattaaagaaaaaaacaaaagatatatagacataaggaaata

SEQ ID NO: 826900 - DNA, 637 bp, Homo sapiens
ccagagcatcatcctttagctaaaaacctgtttgcttggttagctgaaaacattgattgctagcagcttaagcatttcctcatgttgtttgtagaaggacgaacatagtagaccaatggccttaagaagcaaaagagttaatgccacaagataatttaactctaactgactcttcccccgaaccgatgcccacaagttcaagcacctagctcttaaaaacttctattatcaggagatactgggttgctcactaaggaaaagcttttacagactcactggaagaattaacttgtttaagacagcaatattataataaaacactaaagaaaactttgtggcaaggcaaagatgactccagatcacctcatccaaacccattctcctgtttctcttctctaaaccacacctagtatcagcttgaagctccaaatacctggcaagcaccctctggtctctattggatctgtgggccacaggcctaccgacagttgccaggaaaatggacaagggctwgtgtacttgaaacaattagaccatctttcttcttactcccactgcaacagggagaaacttgaaggtatcctgtctacaataaaattaaagaaaaaaacaaaagatatatagacataaggaaata

SEQ ID NO: 826901 - DNA, 530 bp, Homo sapiens
aatccatctcaaaaacaacaacaacaacraaaaaaagtaaagggcctgaatagactaatcatctggaaaatgccaatcaaaatcacagtgaggtatcacttcacatgtcttaggattgctattattaaaaagacaaaaggtaacaagtggtgaggatgcggaggaaaaaaaatacccctgtacgttgttgttgggacagtcaattggtagagcaattatttttcttaaaaattctaaaaaacatggagttgccttacaagttataatttaattttactcaaaacaatatgagaattaaaattctttttaattttaaaaatcaaaatgaccaaacaatccagcaatcctacctctgagtatgcgtctgaaggaaatgggtatttccaagagctatctgcactgccacgcttgctgcagtgttattcgcatcagccaaggcacgtcagccgtatgagggtccttcatgatgcacggataaacacactgtgagacagacagacagacttctcagcggctgagagggttttaga

SEQ ID NO: 826902 - DNA, 530 bp, Homo sapiens
aatccatctcaaaaacaacaacaacaacaaaaaaaagtaaagggcctgaatagactaatcatctggaaaatgccaatcaaaatcacagtgaggtatcacttcacatgtcttaggattgctattattaaaaagacaaaaggtaacaagtggtgaggatgcggaggaaaaaaaatacccctgtacgttgttgttgggacagtcaattggtagagcaattatttttcttaaaaattctaaaaaacatggagttgccttacaagttataatttaattttactcaaaacaatatgagaattaaaattctttttaattttaaaaatcaaaatgaccaaacaatccagcaatcctacctctgagtatgcgtctgaaggaaatgggtatttccaagagctatctgcactsccacgcttgctgcagtgttattcgcatcagccaaggcacgtcagccgtatgagggtccttcatgatgcacggataaacacactgtgagacagacagacagacttctcagcggctgagagggttttaga

SEQ ID NO: 826903 - DNA, 530 bp, Homo sapiens
aatccatctcaaaaacaacaacaacaacaaaaaaaagtaaagggcctgaatagactaatcatctggaaaatgccaatcaaaatcacagtgaggtatcacttcacatgtcttaggattgctattattaaaaagacaaaaggtaacaagtggtgaggatgcggaggaaaaaaaatacccctgtacgttgttgttgggacagtcaattggtagagcaattatttttcttaaaaattctaaaaaacatggagttgccttacaagttataatttaattttactcaaaacaatatgagaattaaaattctttttaattttaaaaatcaaaatgaccaaacaatccagcaatcctacctctgagtatgcgtctgaaggaaatgggtatttccaagagctatctgcactgccacgcttgctgcagtgttattcgcatcagccaaggcacgtcagccgtatgagggtccttcatgatgcacggataaacacactgtgagacagacagacagayttctcagcggctgagagggttttaga

SEQ ID NO: 826904 - DNA, 544 bp, Homo sapiens
tatatttaataagtcacttttcttattaatacccagagatgtaaaaatcaatcacagttgattcaaatggcaaatactactttctgtagcctcactaaatgctttctccgatgagataaatggacataatcctcaaatgacaagaaacatggaatatacaacagatttaacagtcatgtttaagggtgagtgaactttaggtcgcagttgtagaggacaatgcggaaatgaagatgcagacttaagttttctccccagatagtgataaattcacattgatccaatttgtccctgtttccctgtctctatggctcttaatagcacaaccaaaagatgtctgatttctaagatggaagagtgctgcctgcagccttcacctagttgttttttgtttgtttgtttgttttgttttgttttaaactgccccattcatagactgaaaccytcacagaatcaggctgtaattagtgacatgtagagacatggcaagactgggaaaacttatgtctgtggatgtgcctgactccttagaggtgtaggagtt

SEQ ID NO: 826905 - DNA, 549 bp, Homo sapiens
aatcaagtttgttaatcaacagatccctcagaactttaataggctcatgtgtattataaatctctcagagcaaaaaccagtatgcagcatcccccaaactcagggagccttttctcacagtgtacccgacagcgttgtgttccatgtaacatagctggagaatagttcattcaagaattagaagtctattaaagattaagaaagagacaataaatggtcaagatgccagaacaaatcaggagtgagaaggtggaaataggtgagcttttccaaattcagaagcttctaaattctgcatgtaacatctatattacacccaggcaataattatcaatggctattaaaatcattaggaaaaaagctgatgtgaaactttacaacagatcaagctgacaacatctggacccaaggatcaattttaataacacaaaaagagaaacagacattgtgtgccacgtgatgagatgcaatttacaacaccatctatgtatattattttcatgtcaaaaaataaagcctkcatctaatcaaatctgtattcccagttac

SEQ ID NO: 826906 - DNA, 591 bp, Homo sapiens
tgcatatttagtaggcttaatgttgtgtcttcttgaatcactctgctgtgtaatgtgggtggggtgtgattaggttgtaataaggccarttcacaatggtgcatccacaatgagagtccagatgactgatcagttcaaatgggaccctgctgaagaaaaatgtgatagcagcagaaaagactgtctgcacttgaatccttagatgtgggagttatttctgaaatgagcctgtcttgtttgggtgtaaatttattttcttaggaagaatgtaatgggatattacaatgagattttccccctttttcagaatagtgtgaaaaagaaaaggatattatgagaccatttatttaaacaattttaaaccatggttttactggcttagatatctatgaacagcatttaaaatcccaacaactttttctcagtaattcaaatatggaaatttaatgtaatgcaaattgatatacaaagatgttcattctagcaatatttatagtagtaatatattcaaaacagatattaatttgtggattaagagctaactaaactatgatacattaaaatagttaaatattatatactctctaattg

SEQ ID NO: 826907 - DNA, 628 bp, Homo sapiens
taacctcctgtggtatatatcaatatgattaagtaatttccactattaaatgttattggtatttttaaatggcacattataatatatagaaatatatagaagtgagctagaaggaatttataatctaagaagagaacagtggttatctgcaggtggtagaggcagctttctgttttattcttatctctatattcttaatgttatttaaaaatatgatacttttgtaatcataaaatcttattccgatgaaaacaggctttaaagaactactgggtctgggcatggtggatcacacttgtaatcccagtgctttgggaggctgaggtagtgggaatgcttgaggccaggagtttgagaccagcctgggcaacaacatagcaagtctctctctctaaaacaaacaaacaaacaaataaacaaaaagctgctgggtctacatcttgattaaagtcttaaagtatggcatcttagaaaagcactcctggacttttctrtcagggccacccaccaatgtctcctttcttttcaaccttttttccttttgcttaactcctgttacatacattttggctggtggtcataataaaaaaagactaagaaaaatggcttaattaagagtgaaaatcaa

SEQ ID NO: 826908 - DNA, 519 bp, Homo sapiens
tacgtctataaccttggacaaattacttaacctgtccgttacttgattttcccatatgtagaatgggtatwacaaccttacgtagttttgtgatggtttaacagagaatttaagtgaacacaggaaacacctaattactattactactagtattgtaagaaatatacagtatttgcttataaacatttgatatagttaggctttgtgtcctcacccaaagctcaccttgaattgcaatccccataatccctacgagtcaagggtgagatcaggtggagataattgaatcacaggggcagttttccccatgctcttctcgtgacagtgagtgaattctcgcaagatctgatagtttaaaaggggcttttctccccttcgcttggcacttctccttcctgctgccttgtgaaaaaggtaccttgcttccccttcaccttcttcctagatagtaagtttcctgaggtatccccagccatgctgaatgtgagtcatttaaacctctttcctttataaattacc

SEQ ID NO: 826909 - DNA, 519 bp, Homo sapiens
tacgtctataaccttggacaaattacttaacctgtccgttacttgattttcccatatgtagaatgggtattacaaccttacgtagttttgtgatggttwaacagagaatttaagtgaacacaggaaacacctaattactattactactagtattgtaagaaatatacagtatttgcttataaacatttgatatagttaggctttgtgtcctcacccaaagctcaccttgaattgcaatccccataatccctacgagtcaagggtgagatcaggtggagataattgaatcacaggggcagttttccccatgctcttctcgtgacagtgagtgaattctcgcaagatctgatagtttaaaaggggcttttctccccttcgcttggcacttctccttcctgctgccttgtgaaaaaggtaccttgcttccccttcaccttcttcctagatagtaagtttcctgaggtatccccagccatgctgaatgtgagtcatttaaacctctttcctttataaattacc

SEQ ID NO: 826910 - DNA, 587 bp, Homo sapiens
tgccctctaaagcttgttagtggtattgtgacttgtaataatggtagaccagcttattctagaccacatttcctactgaaaacctatacctaattaggcagtcyattcaaaagcaaaaaccaaaacccaaaactgtttgaaggcatcacagatttaccaaggcaggaagaatgtgtgggacgagatcaggaggaaaaggggaggcacaaggaagtaaacacagcctctggccccacttttcctcatgaggcatctggtaattctaaaattcatcggtaagaaactgagaagccaaaggggacgttagataaatttacatgctgtaccagacaaaacggtggttcagggatcacaaaggaagagaggctccaaataagacataaaggtttcacttaaaataccgaaattaaatacttttgacagtgaaagaaccagaaacaatagccaagtgatccaattacagcttccaatcattctattgctgtcagcagaaccaccctcctgaacaaaagtggactctctccagaggaagagaacaacctacacccttatgtgatctctgtgatttttcacatactacatttgtc

SEQ ID NO: 826911 - DNA, 625 bp, Homo sapiens
tctgagatctggggaaatgcacatttatcacactccctgcttaaatctcactcagctcttcttagtttccaaaaggagcatggcttccttcttttcttgattttcatgacactatatgctcctgattttcctcctacttctgcatctacttctgattgccttctatggaatccattttcctgcccatcccttaaatgcttctgattttttctcttttcttcctcctcctcaaaatctaagtgatcttatccacgttcacagctccaactattctctgtttgtgatgacttctgagcagctctctgtcctgcatataagacctgtacttacctgccacttgagatctcaactcatgtgttccaaagtcacctcaaaatcaacatatatcagactgaacttatcatgcttgctggaaaggcttcgctcctgtctttccaagatgagtgaatgatgtccacgtgccagaatacttctagaaatctaggcataattcatggyccctttcttcctctccttctacatccagtttcatatcagatgtcattttagatgacatctagatttcaggtgtctttcatatatatatacactgctgctactgcaattcaagcaaccactatctctg

SEQ ID NO: 826912 - DNA, 556 bp, Homo sapiens
ttttggtttggtttggttattggacatactccagccttctgcatggagcctataggaaaagcttattgtcagctctggggtcatgccttgcaaaagcaatttattaatacttatcacttattcagtgaaggagcacttgactccccagaacttgttggctttctcttcttaccaagtgatgaagcctatgaagtgaactgattctgacattgtcctcgcttttgtgcaaaagccattcattcataaagtcctgtgatggcaccaaaaggtgtagtaagttcttctgtgccatgaaaggaaagttaccaggcaattataagactgctctgggccttacatattttcatctgcacagtttggagtttgagctagattacctccaagatccatttgagttgtaaatcctacagttccaagatcctccatttgactagctagtttctctacaatttttaaaatcatgcctaatatttggattaacaaaactctgagcacatgcatttaraaaacagcgtttgaagttgtgggtggctttcagggaaactaaatctagcct

SEQ ID NO: 826913 - DNA, 578 bp, Homo sapiens
ccacacctcattgctgcccttttccccagttcaaagcctccttcacatcttcsccttgtatctccgcaccttaatccacaagtataggacacctctactgcctccttggtgactgatcatgcaccccttaccatcccattaaaacctaatcacccttaccccactcaatgccaatatcccatcccacagcatgctttgaaaggattaaacctgttatcactcacctgctacagcatagccttttaaagcttataaactctccttacaattcccccattttacctgtccaaaaactggaaaagccttacaggttagttcaggatctgcaccttattaaccaaattgtcttgcctatccaccccatggtgccaaagccatatactcttctattctcaatacctccctccccaacccctccataacccattattctgttccggatctcaaacacgctttctttactattcctttgcacacttcatcccagcctctctttgctttcacttggactgaccctgacaaccatcagcctcagcaaattacctgggctgtactactgcaagccttcacagacagcc

SEQ ID NO: 826914 - DNA, 380 bp, Homo sapiens
aggcttcaccttctcagcagtggcatcacatccagccagctgctccagcccaaatgtgatgagatcattttgattccccttctctccacatcctctccccatattcaattcaacagcaggtgctgtcartgctgccccagcctctgtctccctcgtgtctctccagggctgcactgtgacaaggccacggtgtctacctggacggccacagggactcccagttggtcttcctgcctctactgccgcccccgttgctctattccaacagggaaagtgtgacctcgtaagtcctgctcatcccctcccaggatttttcactgcacatggaaaggatccacctttctgcaaggtcctgcgtgacctggcacttgcctcgtttt

SEQ ID NO: 826915 - DNA, 603 bp, Homo sapiens
ggttatggctctggatacattatcacctttctataactctgaagatgcttgttcacacttacgtattctgccatcagattctatttatacctggtggccctcasataactgtagcaggtcactggacaagatctgagaagctgaaagaatcacattctcaaagaggaactttaagatgtctatgttgacatctgacaatgcataaaatgtctagttagttttctctacattctcaattcaaagtctggccttatcttgtaaattccaggaagagaacagaccttatttgcagattctaggtgggatcaacctggctcttcattcttgggtgttacagcaagcagagtacaatcaaaggaaagatcaccttatagaggctgctttagcacattctgaaagatatgtctacctaaaagaaaaaaagctaaggcaacatgaatgtaagtagaccgtttatttgggcaaagcttgaggattgtaacctgggagcaaaccttcaagttgcctgtcatctacactttgattaggagcagttacaagttgatctgaaaaggcaaaaagagagggagagagagatggctgatacaaagttgtttaccagaa

SEQ ID NO: 826916 - DNA, 579 bp, Homo sapiens
cagagtctagaatagagcctgccacgtaattggcactcaataaatgttacatgaattaatggaaaccatcctggcacaagtggtagctctctttccacaaaaagaaygagcttgccaagagagagacaacatcacgaaagagagacagaaaagccacactcagacccaacattgagttctggatcaagtcttttttttttttttttttttttttgagacaaagttttgctcttgtttcccaggctggaatgcaatggcgcgatctcggctcactacaacctctgcctcgcgggttcaagcaattctcctgcctcagcctcccgagtagctgggattacaggcatgcaccaccaagctcggctaattttgtatttttagtagagatggggtttctccatgttggtcaggctagtctggaacttggcctcccaaagtgctgggtttacaggcgtgagccacagcgcctggctcctatgttattttttaggagctttattgttttacctttcctatttagatctatagtctgtcaggaattaatttttgtgtgtgctgtgaggtaggggtgtgaggtatggt

SEQ ID NO: 826917 - DNA, 652 bp, Homo sapiens
ttctcctggacagtgtctttaacctggcctgcccaggcactcacagctccatctctcaacagtaactcacacttagctgcagggccttctgtagatgttgtgaccaaggtcctgtggctctaagggctggcaggagctagagagccctcccgtccagcaaggtggcaggatccaaaggtctgcagggcacccagagaacctgaagataagcagatcccatggtgagtcatccaatcgtccttccccaaacactgcctggggcctcagggggaaaagcctgcagaggctgtgcaggagacagctgagtgatggctctgttctgggactgggacagggggaactcccacaaagacccttgtgtctgagtcactccctgagccaaggaatgactcagatacaagtttgaagctaagtaattcctctgactgactgagagaatctgggctagacactttacctctctaggcctgtttcctcacctgtgaaaacagaaagaggctgtcaaacagactcgggagccagacaacctgggttcaaatgcaggctctgccatttactgatgtgtgatgttgaatgagttacttagtctatctgtgtctcagtatccctatcatttatttattattttayccttctttgatttccaatggag

SEQ ID NO: 826918 - DNA, 626 bp, Homo sapiens
cccaaagtcctagcattacagttgtgaaccactgcaccccactgtrttttattttcaattagtagataaaagtgtattaataagaaaattcttgttacagctattgtgctgaaatgaagtaaggctaaaactagtgttgagccctctgtcactgatggcagttatgggtgaaaaccaaattgggcagattcaccagttgctgctgccaggagaagcctaattagacagtgtcagggttggggttgagtgtggaaattttttggaattctcaaatgcttgagtataacaatcatgccgttaataataggaatccagtatctccaatacttttatatagaattgcctggaggctgctatgtttgtgtttgttaggctgtgttatcatccattaagtaaaaatgatataatttctgttgtttttcatccaataaagagttggaagaaaaaaaaaagagttggaagaggttggtggcattagctaagattagtgtggtggtgaggaatataagtatgtacttaagtaactgattaatatttagatctgaaagtatgtatcacattgaagattctataatcaatcatgtgatgaaagaagctactagtacaaatattattgagacgtagtc

SEQ ID NO: 826919 - DNA, 545 bp, Homo sapiens
ttagctgcattgttgatctccacgattcactcctttgtagttgtattacactctgtcttagtctcttggtgggttgagtgttcttttcycattgactttgggcttgggtgtgtgactttctttggctaatgggatattagtagaggaagaatcacaggcttgagtgaccttgcccagtagggtctgcctctttgtgatttcagcattgttaggagaagaatatttgctggggagttgctcccccttctgcttaagcctcaggatgagtcacaaggagcaggcctaaatctgatctgcatcctggagcaaaggcaagctgagctcagctaagatcaggtgaaccccaatagacctgtagaccccagaataagaaaagcaaatatttgtgtttaaaccaatgagattttttgaggttgtttgttacacagcattagctgactattacgagtgggaaaactgagaaaaaggcatgatttttttttgacatagcaattatttatattctgaaatgtgttaataaatgatgtatcttaacaactagtagc

SEQ ID NO: 826920 - DNA, 656 bp, Homo sapiens
tcctatattacctccttcccatggatgggatattgacaagggcaacatccttctagaggatggtggagcaacaaagtagaaagcacctgagaccctggaacactgtgtggagcagagcttctttattagccctgaactggtcacttctgggttgcaacatgagactgaaataaacttctattttattcttttttttttttgagattttttctttatcacagcagcttagcttgtattctagctaactcaggttctcattaactgtgatggtggaagattacagtggtcttgctagtcctgggagcatggctgttgaatgtacgtgtgtatggatatgtaggaaggactggcagaaggaaagggaataggaagtaccatttgtcacatcctaccttgtgttctggatggttgacacttcactattgagggaggaaagttttcttttcaaaatccaaaagaccaagataaacaatactaaattcgcctgcaggaccaacacaaacaaggcagagtgcaagttaaagtaatgtatggtgtccactttaaattgcacacaggagtyctaccctcttgtacatgggactgaattggtagcaggtggaaaatcaaaccacccaacagtggaaatgcaagccccttgtaccatcttgtaccca

SEQ ID NO: 826921 - DNA, 581 bp, Homo sapiens
ggccaaaatggtgaaaccccatctctactaaaaatacaaaaaaaattagttgggggtggtggcactggactataatccccaactttttgggaggctaaaacaggagaattgcctgggaggcagagtttgcagtgatctgagatcatgccactgaactccagcctggataacagagactttgtctcaaaaaaaaaaaaaaaaggccagaagaggtggctcacgcctgtaatcccagcactttaaaacgctgaggcggacggatcacgaggttatgaaatccagactgtcatgactaacaaggtgaaataccatctctactgaaaataccaaaaaattatccgggcgtggtggcactcacgtgtagtcccacatacttgggagcctgaggtaggagaatcacttgaacccaggaggcagagtttgcagtgagccgagatcacgccacagcactccagcctggctaccgrgtgagactccatctcaaaaaaaaaaaaaaaaaaaaattaaccggccatggtggaactcacctgtggtcccagctacttgggaggctgaggttgggaaatggcttgagcctgaag

SEQ ID NO: 826922 - DNA, 477 bp, Homo sapiens
tgactcagcacatgatccatgagggatggcttcagaaccactgtcagcagcgcagctcagcgcttgtgtcccagctcagccyttgtatcccccttgatgtacttctatctgttctccttgtattttctggtctggtcattttctgtactgcctgtgctgactattgtgcctaagaacatgtcgtgggatccttcatgcccaggattaagtcttgtccctcacttaccttatgtgcaaactggggtcatgtccatgaacactgtgggcctcctgtcattatttgagaaataatgataatttgcctccagggttggttttttttttttgtttttgagatggagttttgctcccgttgcccaggctgaagttcaattgcacaatctcagttcaccacaacctccacctcctggatttaagcgattctccttcctcagccttctgagtagctgggattagaggcatgcaccaccacacctg

SEQ ID NO: 826923 - DNA, 477 bp, Homo sapiens
tgactcagcacatgatccatgagggatggcttcagaaccactgtcagcagcgcagctcagcgcttgtgtcccagctcagcctttgtatcccccttgatgtacttctwtctgttctccttgtattttctggtctggtcattttctgtactgcctgtgctgactattgtgcctaagaacatgtcgtgggatccttcatgcccaggattaagtcttgtccctcacttaccttatgtgcaaactggggtcatgtccatgaacactgtgggcctcctgtcattatttgagaaataatgataatttgcctccagggttggttttttttttttgtttttgagatggagttttgctcccgttgcccaggctgaagttcaattgcacaatctcagttcaccacaacctccacctcctggatttaagcgattctccttcctcagccttctgagtagctgggattagaggcatgcaccaccacacctg

SEQ ID NO: 826924 - DNA, 665 bp, Homo sapiens
aagatatgaatggcaaatgaactccatcagcttttgtttaaaatgattgccagtgacgagcagctccgatggtaaaagtaggcaggtagaacccttcaacacctgaaaatgagcggtctgcttctagtggcttcatgagttattacagtcccatgttttaatagtaatactgcatttattttaaatgtgtctgcagcaatattgggggaaaagaaaaatagaaaagaaacagaaaattatgtctgaaatctaaaaatttaaactattgttttaaaacccttacatagttcacagctattagtccacacacagaaaaagatatctatgtatgggcaagaagtcttcactttggagtagtttttatacctgtttacgtttaaaaagacagaagagtgtacgagagttgttgcactgcaacgatcccatttttttcctgtggagtgcaatcctagttgcccacaagcctctcaactttgagatttttcttcttttgaaaatactaacttttctagttgttgagcatgagaggtaatattttccgaacttttttgatgaggggttcacatgatatagcccctcatttcttccttcaagagttaatggctttagagcgctgaagattratgaaattatcagcgctgaaggaccttcactataaaagattt

SEQ ID NO: 826925 - DNA, 647 bp, Homo sapiens
agatggtacaaggggcttgcatttccactgttgggtggtttgattttccacctgctaccaattcagtcccatgtacaagagggtagractcctgtgtgcaatttaaagtggacaccatacattactttaacttgcactctgccttgtttgtgttggtcctgcaggcgaatttagtattgtttatcttggtcttttggattttgaaaagaaaactttcctccctcaatagtgaagtgtcaaccatccagaacacaaggtaggatgtgacaaatggtacttcctattccctttccttctgccagtccttcctacatatccatacacacgtacattcaacagccatgctcccaggactagcaagaccactgtaatcttccaccatcacagttaatgagaacctgagttagctagaatacaagctaagctgctgtgataaagaaaaaatctcaaaaaaaaaaaagaataaaatagaagtttatttcagtctcatgttgcaacccagaagtgaccagttcagggctaataaagaagctctgctccacacagtgttccagggtctcaggtgctttctactttgttgctccaccatcctctagaaggatgttgcccttgtcaatatcccatccatgggaaggaggtaatatagg

SEQ ID NO: 826926 - DNA, 542 bp, Homo sapiens
tgctactagttgttaagatacatcatttattaacacatttcagaatataaataattgctatgtcaaaaaaaaatcatgcctttttctcagttttcccactcgtaatagtcagctaatgctgtgtaacaaacaacctcaaaaaatctcattggtttaaacacaaatatttgcttttcttattctggggtctacaggtctattggggttcacctgatcttagctgagctcagcttgcctttgctccaggatgcagatcagatttaggcctgctccttgtgactcatcctgaggcttaagcagaagggggagcaactccccagcaaatattcttctcctaacaatgctgaaatcacaaagaggcagaccctactgggcaaggtcactcaagcctgtgattcttcctctactaatatcccattagccaaagaaagtcacacacccaagcccaaagtcaatgrgaaaagaacactcaacccaccaagagactaagacagagtgtaatacaactacaaaggagtgaatcgtggagatcaacaatgcag

SEQ ID NO: 826927 - DNA, 640 bp, Homo sapiens
ttaggttcacatctgaaattcacagactggctttgacactgcttgtgcattttggaaactcttctagcttctcagaatcttggtttcaaaactgaaaagattggcctgacaattttaaaactgtcttcaagctatgaaagtttatgattcaggaaacagctttcaaaaactactgagaggaccctgaaactcttctgctagatcgattccaaatatctagtgtaaaaaacatccagtgttttccaacatgactcagtgggtgagactgggttttttaagaccaagcaaaaccgataaaggaagcttagaaggtttgtcttccatgaaaaagaaaattgctattgtcttaaataaacagaaggtatgttttcctttgaattgcacttagctttttaatagctaatttcagctacagaaaaccttttttttttctattttaattaagttttcaatctggaactttcttgagaaaggcactttagcaactctgaagaacagtagagggcgccacggtcacaagcaaagcaaacaaacaaaaacgttggcatcacagactgggccgggaagtgccgaggagtacatctgagaaaataagccacagtcaggkaggaacaacacattttcaaaatgcatttgggaa

SEQ ID NO: 826928 - DNA, 427 bp, Homo sapiens
aactgactacttggccaccatctcagagccagtaagcagcagagctgggagctaaaacagaaccccactcataatctccacctcarcaagcctggtagtggctctgtttcacagtaatggtgggaagtataagaatcagagtgattggctggcctgcagtcacgtagcagaggtctcaaactggccatctgcagcctggatttgggccagggagatgtattttgtttggcctgcagtagttttgagtttttcttttctttttatttttttcctttaagcaaacatttataaatcagaagaattgtcacaaaaggacactgatttctggttctcctgaagaatcggacatgctggtctgcctccttaggtgaggcctgagtttggctgcctgccgtgggctaggctggtgctctcgtgatccacacgc

SEQ ID NO: 826929 - DNA, 602 bp, Homo sapiens
atactttgttttcttacagtaacatttcacagtggactaaattaaatccttttgatttttcctgtggacaaaatcacaaagaaaacctaatcgccttaaattcaggctttctggactcggggaaaaagaaaacatacagaaaaataagagaaataatggaaaacattaactttaattgtcacttctgatagttgacatttgtttgtgggtgtgtcactttttagtaaggtatagtaaaagtagaagtaatgctaatatttgctgaacgtcttctatttgccaggcactatgcttggtgcttgcaataccgtgacaaatgagagagctcctgtccctgctctcacagaatttcaccacacaaaaatgaataatatatgatttcttactttccagaaagatttttatcatcaattttaagcaattttgagaaatctattttctctgtccaattcagacattcatattaataatgtaaaacctaaagcgcttttctgstaatgaccccacaaccaaatagccactgggaaaggtaagtatgagatcatacaaactgtccatttgccaatgcatgacctgggcttattacttgttttttccctgac

SEQ ID NO: 826930 - DNA, 604 bp, Homo sapiens
aagaagacatacaaatggccaaaagttatatgaagaaatgctcaacttaattaatcaccaggaaaataaaattaaaaccacaatgatacattgcctcacacctgttgggatkgctattatcaaaaagacaaaagataagttttggcaaggatatggagcaaagggaaaccttgtatagtgttggtgagaatctaaattagtacagacatcattgaaaacagtatggcggttcctcgaaaaataaaaaattgtagaggaatagtttttgatttcccccaatatgttgacttatttcaggggtctggcctatcagtttttggtcaaagactgcccctcatgtttgaattagtagatggttctatttgtcttacctggattgttatggctccatctgtactttcctgggatttttagccttgatccttgatttattattaaatctggctttcatacatcagactggaaaacaaagacctcaacattttctaataatattttaatggaaaaataatatacatactcattttgaccacttaaatcacataaagttacacaaaaaaacagtatcactccctcttttcttctttcatacgacttccctccc

SEQ ID NO: 826931 - DNA, 565 bp, Homo sapiens
ggaagatatgaaagtgaagattggtaaagtaaagcagaaatatgtatttgtaagaaagagccaaaaggaagcatggggaatgacaaatataatagtaaaaataaagaatgcaaaggatataataaatagcagaatgaatataactgaggaactcttagaaaacatttgggggaaattagatatgtaatatattaaaggaatgctaagagaatagaagattgattgaaaatatctcaaagagtgtaaagcaggaaagataaaggaaaagctacagctgaacacactattcatttaagtagaaaaatttaagaacacagaaacacacaagaacatactacacctttccagaaggaaagtgcagaccgcctcaaaaaatataagaattagggcaacagctgacttctcaacagtgatggcaagacagcgtagagtaataattttaaaatgttgaagaaaaatttgaatctagaattttatattcagcaaaawtaattaaaatttgatggcacaataaatatattcactggtatataaggcctcagaagacctaccatgctaaatagct

SEQ ID NO: 826932 - DNA, 606 bp, Homo sapiens
atatttgaagcacaataaaatgaagtgcaataaaacgtggtatgcctttatcttttccattattagagagagttattgtcagggccataatgaaaacatttgccttcttgargcaggaaactggaaattttaatctgaatgatattaacataattgaggcttatcaatgcatcaaaatatgaaggagctcttctgtttgtttccttttgactaatgtctctgatcctggaaatttaagatgaagaatttgctttctcattcccctctcttataaatttctaggatatcaagaaaatatccaaaggtaatatttttgcccaagttattgacttgtccatttgctgctgtttgagtttatcaggagaagatgaatacatgtctattagatgtctatatttctaatttcatcatttggctatgcatggatatttgttcccatgaacattatttttgtatagatcaccatcagtcaagtagaccctgccagcctggtaagatgataactttgaagctttagtcataccttgtcctttcacctatgcctgatgttgtcatttcacactttgaccatagcttgcctgcaagtgcaacatgtaatatctctgt

SEQ ID NO: 826933 - DNA, 555 bp, Homo sapiens
atgcatacatgcactcatatatttacttaatttatttgtttgtttgtgtatttatttattgagacagggtcttgctctatcacccaggctggagtgcagtggcacagtcacggctcrctgcagcctcaaccttcttgggctcaagtgattctcccacctcagcctcctgcatagctgggactgcaggtatatgccaccatgcccagctaatttttttttttttttttttggtagtgacagggtctcactacattgcccaagctggtcccagactcctgggctcaagcaatcctcccaccttggcattccatgtgctgggattacagacatgagccaccgtgcttcaatcttttcatttttatagccatgtcttccacagagaaaacagttttaactgtgatggagctcaattataaatgttctttctttaataaattgtgcttttgatatcttgtctaagaactcttttcctgtctccaggtgacaagtattttctaaaattataaaagtttttttctaaaagttttaatattcccattctacttttagacctgt

SEQ ID NO: 826934 - DNA, 555 bp, Homo sapiens
atgcatacatgcactcatatatttacttaatttatttgtttgtttgtgtatttatttattgagacagggtcttgctctatcacccaggctggagtgcagtggcacagtcacggctcactgcagcctcamccttcttgggctcaagtgattctcccacctcagcctcctgcatagctgggactgcaggtatatgccaccatgcccagctaatttttttttttttttttttggtagtgacagggtctcactacattgcccaagctggtcccagactcctgggctcaagcaatcctcccaccttggcattccatgtgctgggattacagacatgagccaccgtgcttcaatcttttcatttttatagccatgtcttccacagagaaaacagttttaactgtgatggagctcaattataaatgttctttctttaataaattgtgcttttgatatcttgtctaagaactcttttcctgtctccaggtgacaagtattttctaaaattataaaagtttttttctaaaagttttaatattcccattctacttttagacctgt

SEQ ID NO: 826935 - DNA, 628 bp, Homo sapiens
gcaatccatacatatatccaaacattactataaatatacactattttatttgtcaattagaccttaataaagctgggggaaataatgctggaaattgaaattttaaaatttaatttcaaaataggaaatacataggaacaaatctgacaaagatataaaagatgtgtaccctaacatgtgtaaaacattgctgcacaacttaaagacctaaatgaatgggaagatatactatactgtgttcatgggtcagaagcttcaatatgattaagctgtcagttctcccatatcaaaatcctagtgtggtttctttaatagaaattgaacaatctcattttaaaagctataaggaaatgcaaaggacctaaattagctaatacaacttttaaaaagaataaggctggagagctaacactcccagatttcaagacttataataaaattccaataatcaagatacaagcaattgattttttacaaggtgcaaaggcaattagctgggcaaaggatgtctctattttaaatggtactggaacaactggatatctacatccaaaaatattaactttaatgtataccttgaacartatagccctggatttattaattttttatatttcattgattttat

SEQ ID NO: 826936 - DNA, 581 bp, Homo sapiens
gtttttctgttattattcgttcacaattttgttttcttaaacattttattttacagtagttttagatttatgaaaaagttgcaaggaaactacagatcgtctcyataccttgcactcattttccgtttttaacattttgcattaatgtgggccctttgtcacaactgatgaatcaatattgatacattatgattcactgatctctccactttccttggattttcttagttcttagtatccttttcccacctaggatctcacattacatttagtcatcattgtctccttcagctcctgttggctgtgacagcttctctgactttgtttgtgatgacttcgagagtcttaaggagaaatcatcggctattttgtagaatggccctcaagtgtggttttggcaggtgattttctcatgattggactggggttgtgggtttttggaaggaagaatacagacatagtcatttccataacatccattcacttcaaaggtatgtattagcaacatgacttatttttatttattttttattgttatataatagttgtatattatttgggagtacatgtgataatgtttt

SEQ ID NO: 826937 - DNA, 589 bp, Homo sapiens
aggtcacagagctaatatgtggcacagtagatatttgaaactcagaactttaattctggacacctcacagttagttattatatatatatattgtcagcttgggatatggagtgtgagatctcttcccttgaatatttgaagggctgccaaatagaaaaggattagatctattctatgtggcttcaaggacactgagacaacccttcccatttgcataatacattcccataattcacgcatttaatcctcaaaacaaccctgtgtggttgccataaaatcagaggaatctgtgattgggagaggagaactgccttgcccaattcacacagttcagaagtagcatgatcaaacctcaaacccaattctctttactaaatgtcttgggcttgttccattatgcttaattacctgtagcattcattcaaccaaagtggactctgcctgtgctatagatcttgcactctgctcggctctgagaattcaaagacaaaacaaatctgcttttaggaaatttatagtctagtggtagaratgcaaaaatagccccttgaaatctgacattatagaagctataggagagatgtgagat

SEQ ID NO: 826938 - DNA, 520 bp, Homo sapiens
ttgggtttccccggtggctcttcatctcatacagggcaaacaacaaaaatatttacagtggtctgtaactgcactgtcccaaactgcagccactagccaagtgtggctttttcaattaaaattatttaaaattaaataaaatgaaaaatttatttccttaattgctctagccacatttcaaatgccccacagtcacctgtggttagtagctaccatcgtgtgtacacccacatagatcattttcatccttgcagaaagttctgttggttacagaatgccctataaaatcctaccccattgctgctattatctcatcctctgtggctgatgccctttatccctctgctccaaacacagtggtctctgtggattcctcaaacactctagtcacggtcccacccatcggtcccytttccctctctctgggatgctccttcccattatggccactgggctcacttcctcatctcttgcagttttctccaatgtaacattctaaaggatgtcctcatggttaccc

SEQ ID NO: 826939 - DNA, 605 bp, Homo sapiens
acatttagtttttgtccatgtggacaaaattaattgacttggcatcatttattgaaaagcccatttttttccgcttcactctagggtcatctatgccataaagtgagtgacacrtgcatgtttctgaactccctgataatagtttggatatttgtcccttccaaacctcatgttggaatttaattccccatgttggaagtggggtcccataggaggtgtttggatcatgggggtggatccctcatgaacagcttggggtggtcctgtggtaaagtgtgagttcttgcactattacttcatgggagatctggtttttttaaagggggtagcacccctccccttgctgtctcttgtttctctgtctccatgggatctgtacattctcagtctccttcccctcccaccatgattggaagctttctgagggcctcaccaaaagtaggcactggtcccatgcttcctgtacagcctacagatccgtgagctaaataaacgtattttctttataaattacccagcctcaggtattccttcatagcgacacaagatgaactgagacaccctcttttctttgcatcactttgttattctaaccttgcttcaat

SEQ ID NO: 826940 - DNA, 556 bp, Homo sapiens
acacactctctgaaggagctcacacattttgcagtggggaacttgaagcaattatctggacragtcaagtcaaagctactgtcaatgagaatcgtggcttactggagcacatgcattggtttttgcttcacttatttgcataattgcctagattctcagcttagtgtgtgtagacctgatgaagaacaattaatgatctaacatgagggggacccatttctgtggcttctggccaagagggagacatatcactgtcaaagacagccatctggggagaatctctcagggggagaattttccctttcaattaggagcaaactaaaaaccatgatgaaaactgctttttatgaaatcaagccatggaaattaaactttcaggaaaatagtttaaattttagccttggagccctctctgttgttccattggagaattttccagaacgtgtcagactttgctataagcttctataacaggcttgcttttgacgtttcagtgaattcggtgaatgtttgtctgaagaagtagtgtagctttgggaagaaaattgcgtttaaa

SEQ ID NO: 826941 - DNA, 526 bp, Homo sapiens
agcaccaacagacacttaacggagacctgcatgctcacacccaacatgcctcatggtagagtttggttacataattacacttatcacacgcaaggtcagcacaacgtggaaaaagctgaaactcatcttttctgtagacacacacacaagaagaaacagaagtgtgtattcaccaagtttcacctcagacttctaaactcccagagctttttttattttgtgattttggtggttgtttgggagcaagataagattctcagaattaactgtgtctcgtaccttcccacccccaccccaagtagtaaaaggaagccacagagaacggtgccagaaagcaaagcaatcctcccacctccacgcccatctccctctgtacacaatgccacgacctgaacacacgaccgtcaccaagcgggaccagtgctgggggagacacctactgcrcagtaccattcaccagcaccttgccactccaggggttagctcccagccttggaaacactcaaatacacctaacggccttgtc

SEQ ID NO: 826942 - DNA, 515 bp, Homo sapiens
aggggaaatgaggcttagagtgaagtcacagtcagtaagtggtgaagctgggctctgacccagrttgtctgaaccttcaacttgagctctttaactactacatgatgctgagccctctctctgattctgaaagtctgagagagccctctaaaaagcatagcctgatagccacatcaaaatcacatggtcaagaagtcaggaaagtggttattcctggtgtatgatggctgggagggtgagtcagtagtgactgaaaggagcaaggagggattggcaaagggggaaatagtactgaggagttgtaatattccatttcctgatctaggtacaggttacttacttcatgattgacctgtgtttgtgaaaacatcagtttgtgaaaattcattgttatacataaaagcacaagataagtacacttttctgtatgtatattttacttcagtaaaagtataaaacacaaagtataaagtgatctttaattattttttctttactctagctccctagcaatg

SEQ ID NO: 826943 - DNA, 580 bp, Homo sapiens
aatttactctttaacacaattctcacaggatttgttttttggtgttttgttttgtttttttttgagatacagtctcaccctgtcgcccaggctggagtgcagtggtgagatcttcgctcatggcaacctctgcctcccgggttcaagcaattctcctacctcagcctccggagtagctgggactacaggtgcgtgacaccatggctggctactttttttgtatttttagtagagatggggtttcaccatgctggccaggctggtctcgaactcctgacctcgtgatccatctgcctcagcctctcaaagtgctgggattacaggcgtgagccaccctgcctggcttgtttcgtggtttctaaacccacagcaaacctgagggcagcaaatgagaaagggcaaaaagctcttttgagagggttctcagcagtgacgagagaaccactgggctaagtgtactcatgtatcaaggtactccctcccccaaatacaaaatcttttgagtcagycttcactcaggaccctaaatctgaattgtttagctgctcccactagttattgctatgtaccacagggaaat

SEQ ID NO: 826944 - DNA, 543 bp, Homo sapiens
atgataataattccctcatgaccatttttagcagttctcaaagacttcaagacaagttatccttagttgggtaaccctgtctcccatggggctgggctgaggaggggktcaaagggacagtgtcatgtctctttagggaacagtagtcaactttgtgatggctgctctcaatgatagccccagattggggttatctgaaccaagtcactgccaactcagtggtctgatggttcttgggcttcactgtacattagactcacctaggagcatttaaaaacttgatattgctgtttctggaagataagagtagatataattttccctaatcctcccactaagtacagctaaaagccctggacattctgtgtaaaacaaatacaagaagtctgaaaagtggagaaaagaagacagaccaactagggacctcgataccttaggatggtgatggtggtaagttccctgggttttcttttgcctcataaattccagacatggggcagaaaagtccaaaaatctggaaataatagcaaccacagacaaaaa

SEQ ID NO: 826945 - DNA, 630 bp, Homo sapiens
aacaataaatagtaaatacataaaccagtaacatggttgtttatgatcaagtattatgtactctacatagctgtgtgtgctattcttttaygtaactggcagcacaggtttgtttacgtcagcatcaccacaaacatgtgagtaatgtgttctgctacaatattatgacagctatgatgtcacaaagtgacaggaaattttcagctccattataatctgttttctttttatattctttttttctttgctccattataatattatgggaccaccatcatatatacggtctaccattgtcttaaacatcattatacagtgcatggcggtatattaaaagggattatacgccatgactaagtgagattaattcttgcaatgcaaggacggttcaacatttttaaaaactggtgtaatataccattttaacaaaatgaaggacaaaacccacacgattatttcaattgacaaagaaaaagcactgaacaagattcaacgccctttcatgataaaaatactcaacaaacttaatagagggaaaccacctcgatataataaaggctatatataaaaagcccacagattacactctgaaggtaaaagaatgaaagcctttcctccaaaatcaggaac

SEQ ID NO: 826946 - DNA, 624 bp, Homo sapiens
agcatgaattaactgtaagataacttcaagtgctctagtttatatgtaactggaagacttaaaaggaagaaggagaaagtatatttgaagagattatagrcatttatttttccaagtatgataaaagttataaatccacatatccaaggagctgaatatctctaaacatgagaaacatgaaggaagcataccaagtcacatcataatcaaattgcttaagataagagataaaaataagttttttaaaaatggcacatatctacaaagaaacaaagatgacaatgaaagcagccttctgattggaaatggtggaagccaggaaacagtggtacaccatccataaagtacttaaagaaaaaaaatagccacactaaaattctgtactcagcaaagatatttttcaaaagcgaaattgaagtaaagactctttagatataaaaatgccgagagttgcaccaaaagccttgcactagaaaaatgtaaaataatttctccaggaagtacaaaaagacaccagtggaaatattggtttacacaaagtaatgaagaacagtggaaatggtagctatatgggtaaatataacatattttaattgtttaagtaccttcagtatataactgttt

SEQ ID NO: 826947 - DNA, 624 bp, Homo sapiens
agcatgaattaactgtaagataacttcaagtgctctagtttatatgtaactggaagacttaaaaggaagaaggagaaagtatatttgaagagattatagacatttatttttccaagtatgataaaagttataaatccacatatccaaggagctgaatatctctaaacatgagaaacatgaaggaagcataccaagtcacatcataatcaaattgcttaagataagagataaaaataagttttttaaaaatggcacatatctacaaagaaacaaagatgacaatgaaagcagccttctgattggaaatggtggaagccaggaaacagtggtacaccatccataaagtacttaaagaaaaaaaatagccacactaaaattctgtactcagcaaagatatttttcaaaagcgaaattgaagtaaagactctttagatataaaaatgccgagagttgcaccaaaagccttgcactagaaaaatgtaaaataatttctccaggaagtacaaaaagacaccagtggaaatattggtttacacaaagtaatgaagaacagtggaaatggtagctatatgggtaaatataacatattttaattgtytaagtaccttcagtatataactgttt

SEQ ID NO: 826948 - DNA, 563 bp, Homo sapiens
ttacacctccagcccagatctttcccctaaattccagacccctctgtctcacaacccatttagtcaacatctcatctgcaagtcttggactttggctcctgggagctcaaagctgktccccatgcagtcttcctcacttcttttactgccaagatgattctgacagttgcttagatctttcaaaattgatctccaacctgatcacttcccatcaccccactgccactgccacctgtctgattgaaaccaccattatcttttgcttttgttactgaaatgagtttttacaagaggtttccctgctgctgcccttggttctttctgtcttttctcaacaggactgctcacagcgatttgttcaaatgaatgttggatgctatcattcttcttcttactctcccttggtttctacatgatctggcttctgttattctcaggccccatctcttccctcccttcctctctttccctgtactccagccatctggacctcctcctcttcctagaatgcaccagggatgcttctgcctcagtctttgaacttgcagttctgtgtttgctca

SEQ ID NO: 826949 - DNA, 563 bp, Homo sapiens
ttacacctccagcccagatctttcccctaaattccagacccctctgtctcacaacccatttagtcaacatctcatctgcaagtcttggactttggctcctgggagctcaaagctgtkccccatgcagtcttcctcacttcttttactgccaagatgattctgacagttgcttagatctttcaaaattgatctccaacctgatcacttcccatcaccccactgccactgccacctgtctgattgaaaccaccattatcttttgcttttgttactgaaatgagtttttacaagaggtttccctgctgctgcccttggttctttctgtcttttctcaacaggactgctcacagcgatttgttcaaatgaatgttggatgctatcattcttcttcttactctcccttggtttctacatgatctggcttctgttattctcaggccccatctcttccctcccttcctctctttccctgtactccagccatctggacctcctcctcttcctagaatgcaccagggatgcttctgcctcagtctttgaacttgcagttctgtgtttgctca

SEQ ID NO: 826950 - DNA, 534 bp, Homo sapiens
tatttgtttgtttttgttcacaaaatgtgaaggcattgatgaaaactctgtctgtggagttaggcagccttctttcatacccaattccaccacttcgtgactgtgaattttggcaagtcactcaatttttctaagggtattttctcatctgttgaaacaggaaaattaaaaaattatgaagtttaaaatttttacatattaagtgcaccacattttaagtgtgagctgtttgtcaataataattttattgctatctttactattgttattacctcatttcaccaaattgtgattcaacactagaagttggctgtaagtcttacaatttgatatatgtatatattttttaactctgaggtacgttcatgttccaaattattctgccttattttctgtgcaaattttctgaaatttacacagagtattgaaatgagcatgtcttcawaagtgcatcagagcaaaacaaaaaagacctagagaaagactacagttttacgtgagccagagaataatataggatgtattcattttcta

SEQ ID NO: 826951 - DNA, 480 bp, Homo sapiens
gaacttttaagtccaattaagtctctttcctttgtaaattgtccagtcttgtccttatcagcagcaggaaaaaggactaatacagtctccaatatacaatatattattatgaackgcatgttattaactgtattattataaacttattccttctaactgaaaatttgttcccttggaccaacagctctccattccacatcctcagtccctggtaactaccattctactctctacttttatgagtacaacatttttagattccacatgtaagtgagagcatacagtatttgtctttctatgtctggcttatttcacttgcatcatgtcctcaggttcattcatgttgtcacaaatgacatgcctttttctttttttaatgccaaataagattccattgagtatacacatcaaattttctttattcatgtatccttaggttgcatctatatcttgtttattacataatgctgcaatggatat

SEQ ID NO: 826952 - DNA, 584 bp, Homo sapiens
acagctgttaaaaaaaagaaaaaaggccaggcaatttccttattttagtgaagcaaatttcctagtggaaaaaagaagtgttatatgaatrgataaataaataagcaatataacttcagattattatatgaaccccaatggctacaaagagcatgacagcagtggcccatagatgagaaatgagtggtcagaggcctgcagtggatgggctggtcaaagacagtttctctcagcaggtaaaacaaaggttaatacatgaagaatgtggagatgcaagttatggaagaaacaaacaaataacattccaggtccaatggggcagaaagtacaaaggctttcatatgaccttcgtagtcttgaagagatttggagattaggaagccaatgtgccaaaccacagccagccagatggagaatagtttaggatgagatagagatcctagaaattttttccaatactcaatagttggaaggtatgtaacattcctttgtgaaatctagattgacagtgtgtctcttgtgatataaacattaatacatataaaatgcattaatttcattaggagagttaattagtgtctagc

SEQ ID NO: 826953 - DNA, 602 bp, Homo sapiens; identical to SEQ ID NO: 813498

SEQ ID NO: 826954 - DNA, 648 bp, Homo sapiens
atccttacatagaaattatttcgtgtttttcataaataaatgtgcttcccttaaatacctgggtaaatgccagcaggacaaattctgtaaactactctacagattttcttttctaaggctataaartagattctaaatgcagggttataaaaatggtaaagtgttttatttttatctactattttcatgcttatattttgttccatatattttcttatagctactatataggcaatagactatctgataatctggcttctaatcttaactgactgaagaagtaacaattgcccagttatgacattaggaacacccactgaaagttccttaaggatcaaaatgcctgaaattggaaaaatcattatgatgtcttccaagaggcaagaatatggttgtgtttcataaaacaacaacaaagacaacaaaaatactctcaagcagctgaaacacattcgttttcaatttttttctagtttcaaacatatactatggtcatatataaaagtaggttcttcaccagcaagttctcactcatgacttatacctggaaaatatacaaaagcttaacaaaagggtgtactgcactcacattaactcagccttgaaaaattactttttaatgtggtagattaaaagcattatgtgcca

SEQ ID NO: 826955 - DNA, 551 bp, Homo sapiens
ctcctgggttcaagtgattctccttcctcagcttcctgagtacctgggactacagtcacccaccaccacacccggctaatttttgtattgttagtagagacagggtttcaccatgttggccaggttggtctsgaactcctgacctcaggtgatccacccacgttggcctcccaaagtactgggattacaggcatgagccaccgcgcccggtgtagtgaaagttgtaacgattcaactgtaattcccaccattgatggcgctcttactgcaagctggttggggattaatgcagctctaaaactccatcttatgaccagtttgctcagaccacttccaacagtactttcactggcagccatactccaacatagaggttaatgggcagtacttattaaggagtgcttttgagagggaaacctatggaaggaatggaaagaaagtaggacggggtagagaaataagtagagctgtaatccaggacagggataagactcagctaatcacatagaaagcagagagctcttgggctaaaaccaccaatcagaatatca

SEQ ID NO: 826956 - DNA, 499 bp, Homo sapiens
cagcgtctgacgggccatggggaggaatatgggtttatcccattcagtgaggcgccatgaggagttttaagcaaaagagtaacagaatctcatttatgatgataacaacaaataacaaactcacctattcatgtagatttataatttacaaagcacttctacatatttacctcacataagccccatgaaccctgtgaactttgtattcttatccccattgtacagatgcaggaactgaggctgagataattacatggactgctctcatttgctcagctgggattaaaagccactcttcttgcttttgtctattttccagtagccatagcatctcagaggaggaccatgagctctgaagctcagccccttaaagctgtgaagccactttggaactgtgctggctcctctcagagcttggagaaactcttttaagtacttcacaccctakcagctgccctctggaaccaggttggcctggatcctactcagtcttcggcat

SEQ ID NO: 826957 - DNA, 615 bp, Homo sapiens
gtcttgttacagagtttagacaagatgacataaagttcttagcacgagttcttctcaaaagacgmtaggttgtttttgtttgtttgtttttgccttctccatttcctgtagccctatctatttctgattataaaaagaggactgtttcaaaaaattaaacataagcttaccatatgatccagcaattccacttctggtggtatacacacccaaaagaattgaaagaattgaaggcaggactccaacaggtattcatatgcccatactcatagcagcattattcacagtagccaaaaggtgggaacaacccagtgttcatccgtggattaatggacaagcaaactgtggtctatccttacagtggaatattattcagcctaaaaaggaaggaaattctgacacatgctacaacatagatgaaccttgaagacactgtggtaagaaaaataagccagacacaaaggacaaatactgtatgagtctacttatatgaagtatttagagtagtcaaattcatagagagagaaagtggaattatggttaccggcggggcaagaagagagggtatggagtttcagtttgggaagatgaaaagagctctggagatggatggtg

SEQ ID NO: 826958 - DNA, 615 bp, Homo sapiens
gtcttgttacagagtttagacaagatgacataaagttcttagcacgagttcttctcaaaagacgataggttgtttttgtttgtttgtttttgccttctccatttcctgtagccctatctatttctgattataaaaagaggactgtttcaaaaaattaaacataagcttaccatatgatccagcaattccacttctggtggtatacacacccaaaagaattgaaagaattgaaggcaggactccaacaggtattcatatgcccatactcatagcagcattattcacagtagccaaaaggtgggaacaacccagtgttcatccgtggattaatggacaagcaaactgtggtctatccttacagtggaatattattcagcctaaaaaggaaggaaattctgacacatgctacaacatagatgaaccttgaagacactgtggtaagaaaaataagccagacacaaaggacaaatactgtatgagtctacttatatgaagtatttagagtagtcaaattcatagagagagaaagtggaattayggttaccggcggggcaagaagagagggtatggagtttcagtttgggaagatgaaaagagctctggagatggatggtg

SEQ ID NO: 826959 - DNA, 657 bp, Homo sapiens
actgcctgttttggccacacggatcctggcaaggcgggccttctgtgattggcagagataataaaagaatgaggcagaccatgatacaaaaagacagcaaggctggtgaagctgtgaggctggcttcccaggtgacacctgatgaaggggatgaggctgtttctctccaacctcatgcatctccagttgtgtacccactttgtatagcttggttgggtcagaattcccaggagtctccactcatctctccagcccgggtataatcctggcaggagaaatatcactcatccaagctctcttctcccaaaggtttcatgacctttatctactcagtattgcaaaatgccatgtgctattcagttgtgctcctcagttttcttatctctaactaaattgcaaactccttagaggagtgtatgtgatagctgccctgattctcctctagggtccagtacaattttctgcatatagtaggtccccaagtattagttaattatgagaaaagcaaggagtgggcctatgtgctcttcaatgcttcttaactcctctgcaatttttttctttgcacgtattactaaggaaatatatgttttatatatttwtcttgatactttctctttctcttccactaaaatgtaaattccttgagggcaggag

SEQ ID NO: 826960 - DNA, 650 bp, Homo sapiens
acatctaattcatctttgaatccccaatgcctggcacactgtttatacgtaatagggactcaacaaacctttgttggagaaatgatccccaaactcaaatttcctgctaatttgggtaaggcaatcttagaaacactctaagacaacctggaagatgggagatcaatatgatacatttacagagctttaagaaccacctgcataccggctgtggtggctcatgcctgtaatcccagtactttgggaggcaaaggtgggaggattgcttgaacccacgagttcaaggctggtctgtgcaacactggagaccccatctctacaaaaaatacaagaactagccaggtgtggtggcacacacctgtagtcccaaatacttatgaagatgggtgggaggatcactggagcccacaagttcaaggttgcagtgagcaatgatccgccactgcactccagcctatgtgacaaagcgacaccgtctcaaaaaaaaaaaaacaaactctgcagttaccaacaatagccagagcactacattaccatgaatcaagtcaaatgtkaagtctcacattaatctagtcagtaagtaaaagaagaatccctgtctgtattaccaagtagtgacaaaattgacatatatggtagctttattctat

SEQ ID NO: 826961 - DNA, 516 bp, Homo sapiens
catctgcagaactgacttctcaaataaagatgctaaaaataaaaaaaaaaaaaaaaaaaagaaagaagccagacttaaagggctgtatgctggatgattgcatctgtatgacattctggaaatggcaaaattataggaacaaaactcagatcagtctttgccaggggctgagagtagagtgggagatttaatacaaggggggatgaagagaccttcttgggtaatagaagtattagatagcttattaataatagcaattacatgactgtatgaatttgttaaaatttatagaaatgtgtatcttaaaagggtgaatattacaatttataagttaaacttcaacaaacctaaaacaaaacaaaaacaaaataggagtgttatggtagtgcagtggttctcaaactttagtgtgcatcakagtcacctgaagagcttgatgaaacagactgctgagtctgactgggaatcattgtgattcagtgactttgggtgaagacctgacaactttcatttgta

SEQ ID NO: 826962 - DNA, 554 bp, Homo sapiens
agctgggattacaggcacgaaccaccacgcctggctaattttgtatttttagtagagatgaggtttctccatgttagtcaggctgggcttgaactcccaacctcaggtggkttccgcccaccttggcctcccaaagtgctgggattacaggcatgagccactgcacccggccagataagcaaactttatagagcacccaggagtccactatcgctggtctgaagtttgttgagtaatggaaggggaatccagaaaaggtgtttgaggtcatacttgggcagtcttgaaggacagtctgcaattaacgtgaatggcaatggagagcctttgcagggtggtagtatgcctgcagccacacaaagaccactctcagctaggaattcataatagtgcaatgtatttttactattgtagagatcatgtcttaaatatacacgatagcctgtcccagaagagatctactcaaaactttttcagggcatgagaatgtacactcagtctttgagagtgatattaagtcaattgcaataaaccagcaacttgcacttgtcata

SEQ ID NO: 826963 - DNA, 554 bp, Homo sapiens
agctgggattacaggcacgaaccaccacgcctggctaattttgtatttttagtagagatgaggtttctccatgttagtcaggctgggcttgaactcccaacctcaggtgggttccgcccaccttggcctcccaaagtgctgggattacaggcatgagccactgcacccggccagataagcaaactttatagagcacccaggagtccactatcgctggtctgaagtttgttgagtaatggaaggggaatccagaaaaggtgtttgaggtcatacttgggcagtcttgaaggacagtctgcaattaacgtgaatggcaatggagagcctttgcagggtggtagtatgcctgcagccacacaaagaccactctcagctaggaattcataatagtgcaatgtatttttactattgtagagatcatgtcttaaatatacacgatagcctgtcccagaagagatctactcaaaactttttcagggcatgagaatgtacactcagtctttgagagtgatattaagtcmattgcaataaaccagcaacttgcacttgtcata

SEQ ID NO: 826964 - DNA, 596 bp, Homo sapiens
ccagtgtcttacagaaaaattactctgcctgaaaaataaacatcattcacaagggcctgagcagacatggctacaggcacgagacagagcagatgagctcttaagaactcagccagtatacccaacttggttccaagagctgcggtgccaccaccaaaaaccatcaagaccaaagacaggaatggcctcattgtctcttccacggcaatcctggagccaggattcagtttggtgcatgctcgtcaccatgcttagaaaagcacgtatggctccttttggtagctgctttccttgctttatttttaaacatttaaaaattataagcagatgactatacataaatacggaacccaatgtacatgaaattctagccattcatgtcaaattcacttttgatgtttccaacagcaacaattgatacagatatatattcagcatcccaaattcaaaaatccgaaatctgaaatgctccagtgagcatttttttktgtgtgtgtgtggggcggggggagggtcatgtcagcactcaaaaagtttgggattttgaagcatttcagagtttgggttttcagatttgggaaacaaccagttaagta

SEQ ID NO: 826965 - DNA, 612 bp, Homo sapiens
ctgacaattaatgccaaggtattcacaaccttaatggtggactgcatagagctgtgggaattattctggtggtttttggatcaagtgtcctgtgagttttaggactaattggacccttttcaccaatgrcatcatcaaggatatctacaggtggacagcagaactttataaattagaacttctaaaatagcgtctgccttctttacagtgtttactgtttccaattttacaacctcagacttcgcaggttctgagttcatggacaagacatttaaaaccaaagaaaatcctgctacttcacttttagagtcctcagcccatatacattggtaataccatcagcaataaataaaacaagcctaatctcttaaaaatcaacaggggtcaactccaagaatataatcctcaaagttgaatcatgaaagtttcttgttgcaataaaggctgactgccaaggcacttttttttcttggagatccattcagcagggttggaagaggagttggaaatgacagtggctacatgcatataaagcatttttgcagcttatccttgggtgactttgaggaagctactgtccgtggacttctacgagctttttcatcaagtcct

SEQ ID NO: 826966 - DNA, 577 bp, Homo sapiens
accaacaacaggcagagagccaaatcatgaatgaactcccattcacaattgctacaaagagaataaaatacctaggaatttagctaacaagggaagtaaaggatcctttaaagagaactataaaccattgctcaaagaaatcacagaaaacacaagcaaatggaaaaacatttcatgctcataaataggaagaatcaatatcatgaaaatggccaaactgcccaaagtaattgatagattcaatgtcattcctattcaactaccattggcattctttatagaattagaaagaagagttttaaattcatatggaagcaagagcccaaatagccaagataatcctaagcaaaaagaacgaggcatcatgctactcaacttcaaactatactacaaggctacagtaaccaaaacagcatgatactggtacaaggacaggcatacagacyagtggaacagaatagagaactcagaaataagaccacagacctacaaccatttgatccttgacaaagctcacaaaaacaagcaatgaggaaaggattccttatttaataaatgatgctgggataactggcta

SEQ ID NO: 826967 - DNA, 577 bp, Homo sapiens
accaacaacaggcagagagccaaatcatgaatgaactcccattcacaattgctacaaagagaataaaatacctaggaatttagctaacaagggaagtaaaggatcctttaaagagaactataaaccattgctcaaagaaatcacagaaaacacaagcaaatggaaaaacatttcatgctcataaataggaagaatcaatatcatgaaaatggccaaactgcccaaagtaattgatagattcaatgtcattcctattcaactaccattggcattctttatagaattagaaagaagagttttaaattcatatggaagcaagagcccaaatagccaagataatcctaagcaaaaagaacgaggcatcatgctactcaacttcaaactatactacaaggctacagtaaccaaaacagcatgatactggtacaaggacaggcatacagaccagtggaacagaatagagaactcagaaataagaccacagacctacaaccatttgrtccttgacaaagctcacaaaaacaagcaatgaggaaaggattccttatttaataaatgatgctgggataactggcta

SEQ ID NO: 826968 - DNA, 619 bp, Homo sapiens
tggggtgggggttatgaatctgaaaaaattatagcgaaaacatattctttctaggctaaggaatatacatgtaaatcaagtktggaggaatgggtaggggaagaacgctgtaaattattttgttcaaatgtattgaaaaacatccagctgttacagtctatttctttagtttctgtacttccttaagctagtgagttataaagaatcaccactaaaagaaaaaaaaaaagtttttctctcaggaattcacaggagtgctgttttctcagcctctggggtgtgatcctgtctgcattttgtaaatctttagtaaatggaaaaatgatacccatctcaatctgcctgtggtctgtaagtagaatgggctctgcagaggagtcagactttctggtttatcaacagaaagataagtgacatgccacagaagattggagaattgcaagtaatcaagttttatttgtccctagacatcaagcctggatctttaagaaggtgagtttgcaaaaaggtcttagaaatgtcagtcatggtttctactccatataaaactcccctctttatatgaagcagcaaaccaacagcctctgcaggggatgcaggagcgattctgccctgtgat

SEQ ID NO: 826969 - DNA, 623 bp, Homo sapiens
tctctaaaggtctacacaatttctacctccaatattgaagatgatgcaaagatgaaatacatagcatagcaaatagatgctatgcgtgaagggtcagaagtcacacatgattgactaatttggcatkggagatttcttgtatttttcgcctgcattttcagttcatgtatgatcttcagaacactcactgcacttgtatttggagagtgattgtggtttacaaattttgtaaagatgtgttgtccattagaaagtctggttattgcttgaccattgccattaagcaattttctgcttttgcagcaccagtaattattagtctttaaacttttatgtttcaccattaagtagccttgtcacttaacttatcacagcctttttctgagggaaaaattttacagatctcttctgttgtgttgtaaggaatacagtaagaagaaataatattcagcttccccaagaccaaatttatattaatcagggttctccagagagacagaaccaataggatatgtatatagacatatgagaggtgatttactaggggaattggctcacaaaactatggtggctgataagtcccttggcagtctgtctacaagctaaagaccctgggatgtcag

SEQ ID NO: 826970 - DNA, 634 bp, Homo sapiens
ttctgttgtgttgtaaggaatacagtaagaagaaataatattcagcttccccaagaccaaatttatattaatcagggttctccagagagacagaaccaataggatatgtatatagacatatgagaggtgatttactaggggaattggctcacaaaactatggtggctgataagtcccttggcagtctgtctacaagctaaagaccctgggatgtcagtagcatggctcagcctatgtccaaagacctcagaaccagggaagcagatggggtaactctcagtccaaggcagaaagcctcaggacttgggaggccgctggtgtcaatcttggtgggcctggagtcaaaggctggtgggcctggagttctgatgtccaaggcagcagaagaaaagcctgtcccagctctcagagagcggagtccaccctctgtatgtgttctctttgggcccctgggcaagaggatggtgcctgctaacactgagggcagatcttttccacctagtccactgaactcacacactaatctcctctggaaacaccccrcagacacacccaaaacaatgctttaccaggtttctaggttttccttaatctggtcaaattgacacctaaaattaactccccaagtctaccc

SEQ ID NO: 826971 - DNA, 576 bp, Homo sapiens
ttttttttcaagtcagagtcttgctctgtcactcaggctggagtgcagtggcaccatctcagctcacygcaaactccacctcccgggttcatgccattctcctgcctcagcctcctgagtagctgggattacaggtgcccaggaccacgccgagctaatttttgtatttttagtagagatggaatgtcaccatgttggctatgctgatctcgaactcgtgacctcgtgatctgccagcctcagcctcccaaagtgctgggattacaggagtgagccacagcacccggccaccctccccttcttcttaagtggaacagaaaagcttgagcagctggggttgggactctccccttgcccacctcacttaggctctaagaaaatcccagcaggtttggctctgttagtttctcttgaggggaaatcttttccaaaactgaatgttctgccctgtttcctatttcaacctggggttccttttccccaccccctgctggaagtacaaggggatttttccctaatcttcaatatcaggtcctggtgaaactcctggagatacaagatgtaaatgtacggctg

SEQ ID NO: 826972 - DNA, 569 bp, Homo sapiens
ctatggaaatgcagcttcatgacaaaaaccttgctttctactatctgccatctctcagaaacttttaaaaagacatgtgaaatcactctatttcctccaaataaactgaattatcaatgttaatgggagacagggataaggtaaaataaagctcaagtaattaaactattttattgtaaatattcatattacctccgagctaatttttactagaggtgctggcaaattcaaaacaaaataaaaattagtttcagattacttcttactcactagctaggtgacttcctaaccaatcaacttactcattctcacatcaaattcagaattcaagcttgtgtctcagcaaaattacaaatttaatggacctctagaatgctttaaatatagtggaaccacaaatgttacatccacatatgccaagagtttattttaaggscttcatcacttaatgatgaagtcattggtttgactctcagacaactgataggataataaatatgtagttaacattagttcaattcacacctcatctgaaagatcttttgtttcactcccattttagaagtcct

SEQ ID NO: 826973 - DNA, 621 bp, Homo sapiens
catgtgatgcctagcacacatgcccaggcccactgaaaatagaagctgtcctgatcaactatccaggcagaactttcctttggtctcaaaattwttctggcgttgttactaggctatgactgctgtatatctgtttagatagagaaattttaaaaaaaagtagtttaagtttaatagatttaaacctgccacaggatctacacaaacatatatacatattttttactgccttggctaataatcagcaacttaatgaaaaactgaagtatttaacactaggatagtaatagcactgaattagagattttatggattttttttttcatgtaccatctatacatcctgtgtcatcttcccatagactgcacaggggtagaagtttttgtaaagtgcctaaaacaatgttaagcttatagcagtgaccaataaatgtttgtggtacgaatggaataaatcttgaggtaccttgaaatttagcctaatgcaatcaatcattagaaagatgattagaaaactgtgtaaagatatttaaaaatccctttgagcaaaattaattgaaaaaatcagaatacagaattaaatacatactttgactacaatcaagtgtgaaagtaaaacatg

SEQ ID NO: 826974 - DNA, 650 bp, Homo sapiens
accagatgttcaaagaagaactggtactaatcttactgaaagtattgcaaaaaatcaagtcagacgtattcttctctaackcattctgtaaagccagtatcatcctgataccaaaatctggcaaggacaaaacaaaaaggaaactacaagccaatatccttgataaacacaaacacaaaaatcctcagcaaactactagcaaaccaaatccagcagtgcatcaaaaagataatttatcacaatcaagagggttttattcctgggatgcaaggatgtttcaacatatgcaaatcaataaatgtgattcatcacataaacaaaattaaaaaccaaaattatatgatcatctcaatagacagaaaaagcatttgataaaaaaatccaatgtctcttcatgataaaaaccctcaacaaactaggcattaacaaactaggcactgaaggaacatatctcaaaataataagagccatttattgcaaacccacagctgacatgatattcaatgggcaaaagcttgaagcaagcattccccctaagaactggcacaaaacatggatgcccacttgtaccactcctatacaacatattactgaaagtgctagctacacaattcagaaaaaatatagaaatataaggcgtccacatatga

SEQ ID NO: 826975 - DNA, 512 bp, Homo sapiens
gtacattttaacacagaaaatggggaagacacggtgaaatgtcatcctttagccatttatttcctaaaaggcctcaaaagatcatgtttccatgtgtttaacaatctgctaaaataacaacaagcctcccactcataagtgctgccatcagccccactcttagtataccaattccaggatgtcatccacatccttacatactgacagatgaaagccactcctcattgtcaaagttctcactgcaaacacacccttgcatgtgccgtgaactttactgactcagagtattttctttcacctttatataatttaaatattattgaagttttaagctggagtgggcttcaactaactagagtaagcttcatttaattttgaggcaagttaagtatgattttattcyacttcttactcaacgaatctgctcagcaggttcttaagtgagagaaattaacaacaaaagaactaaactaaaacctgaattaaaaacaagaactaggcattcctatgca

SEQ ID NO: 826976 - DNA, 720 bp, Homo sapiens
taaaaaggatcttgaatcttttattataattgagccttttctattgtgaatatagattttatccatccagctaccaaaatagtgtatgtcagaatcaaaacatattaggactgaaagtttatttagaaagcacttacattttatgaaagaggcattttatgagagacgaggacataggggcttggagaagttattgccctcctgaaggcacaggcaaggaggggttcctccagcctactgctccctggtcgctgttgcagacactctcatggttctgtgtgcccatagagcagtattccgaagttttctaagaaagtgagggggaaattttacaggcgtgaggaccctacatttttaaaaaactgactgagactaagagtaaagggaatacctgaagtgttgaaaaaaaatttgtgaagacatctgccagactactgctttcttttaggcccagtagttgaacaagtttaagaggccagtgcagcagagtggaggtggctgcgctgagatggtctcctctgtccacatttaccagggcaaaggatataagagtcttctgggaccagatgacagccatgttgaggagaggggaaaaaagagccaaatgagatggactggagcagtttcaagtcctgtcctagaggaccttccacacagggtctctgtttggktggatagctagagaaccaggatccaaggactgagtgacaactacaggaa

SEQ ID NO: 826977 - DNA, 643 bp, Homo sapiens
tactgaaaaatggggtatatgaatatatgaatgatggttatgtgtgttaaaaaattgatttataaaacaaacataacatttacccatataagttacatatgytaaaaatttgtggctgggcacggtggctcacgcctgtaatcccaacactttgggaggctgaagtgggcagatcacctgaggtcaggagttccagaccagcctggccaacatggtgaaaccctgtctctaccaaaagtacaaaattagccgggagtggtgacatgtgcctgtagtcccagctactcgggaggctgaggcacgagaatctcttgaaccagggaggtgaaggttgcagtgggctatgattgtgccactttactctaaagcctgggcagccaagtgagattctttttttatttttatttttatttttaaggaaaaaaaaacagctattttggcagaaatttagttagaattcccaaggatgtaatattggaatggattctagattttttttaaaataagagtggatggaatctaatttttttaaaataatagccttattgagatataattcacataacatttatccatttaaagtgcaaaattcacttgtttttagtgtattcacaaagttgtacgaccatcaccactatctgat

SEQ ID NO: 826978 - DNA, 618 bp, Homo sapiens
tatcattaagaaataaatgaggctgggcgcagtggtgcacrcctgtaatcccagcactttgggaggctgaggtgggtggatcacctgaggtcagaagttctcgaccagcctgactaacatagtgaaaccctgtctctactaaatacaaaaaaattagccgggcttggtggcacatgcctgtaatctgagctacttgggaggctgagacaggagaatcacttgtacctgggaggcagaggttgcagtgagccaagatcgggccattgcactccagcctgggcaacaagagtgaaactccatctcaaaaaaaaaaaaaaaaagatttctgtgatttctgtgatgtgtaggtaaacacacttctaaatgattcaaagaaaattccagttccagctttaccaccatacaggtcagtctgtgatggttgcccaacgccaacaatccataacaattaggagaaatatcccattggtaggtgatttttcccatccataggggaaccatccaccaatgaatataattagaaattaaactgatgacattacactcaccagacctcacttgaaatgtccttgtttcccacagagccccttaattttttttttttttttgagcttcatg

SEQ ID NO: 826979 - DNA, 618 bp, Homo sapiens
tatcattaagaaataaatgaggctgggcgcagtggtgcacacctgtaatcccagcactttgggaggctgaggtgggtggatcacctgaggtcagaagttctcgaccagcctgactaacakagtgaaaccctgtctctactaaatacaaaaaaattagccgggcttggtggcacatgcctgtaatctgagctacttgggaggctgagacaggagaatcacttgtacctgggaggcagaggttgcagtgagccaagatcgggccattgcactccagcctgggcaacaagagtgaaactccatctcaaaaaaaaaaaaaaaaagatttctgtgatttctgtgatgtgtaggtaaacacacttctaaatgattcaaagaaaattccagttccagctttaccaccatacaggtcagtctgtgatggttgcccaacgccaacaatccataacaattaggagaaatatcccattggtaggtgatttttcccatccataggggaaccatccaccaatgaatataattagaaattaaactgatgacattacactcaccagacctcacttgaaatgtccttgtttcccacagagccccttaattttttttttttttttgagcttcatg

SEQ ID NO: 826980 - DNA, 486 bp, Homo sapiens
gcctaaaatgctcttgtatcagctctttacctggctgatttcccttcacccttctggtcatagattaaatatcatctcctccaacaggccttctcttatggccgcatctaaagcaaagacaattccctatgagattctatcccattactctgtttgtttacataatagcaattaacacattatcaaattttaataattatctgattatcaaagaggaactcaaaagggaaattagaaaatattttgaactaaatgaaaataaaaatttgtggtatggcactgaagtagtactttgggaaaaatatattgccaaatgcttagattagaaaaagatacacatctcaaatcaattacttcagcttctgcctaaagaaaatgaaaaaaaaagatgcttaccaggggagataccataatcaycaagaaagtgcaaaaagaagagtaaattaaatccaaagtaaacaaaaaagaaatgataaaaatcaaaac

SEQ ID NO: 826981 - DNA, 432 bp, Homo sapiens
ccaacaggtggtgtcagccaaagtgttttctatgacagtggcagcaggatccatcatcacttgcacatgccagcagcagcagcagtgtggcaaggtgcatgctagtctgctgcagcaaggtgctagcagacactggagtgtcagcctttttgcaggtgttcacagcagcaacagaggcagcatgacttgatggtgtgcatggtgactgtgcatacagtcacactggtggtattcttagcatagatgtgggattctggcagctgcaggtctgtgtgtgccttctttgcatgttcatgcaggcaaagggggccactcagggcagcagagagtcctctgttctgagtgcctagtttcacttgtcagcagcattgatgcagkggcggggctctgtaggggcagggctgatgggttctgtgcccaccaaggctcaga

SEQ ID NO: 826982 - DNA, 605 bp, Homo sapiens
ccggccgcttgggggcggtgtgcgtattctcatcaaggggcccggggaggacagctgctttctactcgaattttaaggaaacttactcgtatccagtttccacaagccaaattgaaattgtgtcttgaaaaacagtttttgtgcccactcgtgcttcttaacgtgactcctgtttggagaatttgcagaaccatctggctccagagtcttcagctatttacagagcagacccatagagtaataaattactctctgcctattattgtatttccctttttcctccctaaacgttcttttcatttttcggctcctgaacccgaggtgtgggttacatttctgtgggtgcacacattgccatgagtgccgctgcctagtgcttctgtcattgaagtctggtctccaagccactgtcccaagccagcatgactctagcttcctggaattccattcatctcttcgggatgggacgtcagccgcctcgctccctctgctgtgrtccagcgctatcgggctcgctccgaggccagggcataggtagaagcttgaccaaataaggatctcagcacgggcagggggaaacccctggggttcacctcccatcttag

SEQ ID NO: 826983 - DNA, 562 bp, Homo sapiens
ggtgtgccctcaacactggcagccccctgcctcacgcasaaacccaggccgaggagagaagaggctggacctgccactgccctctatcctgccctcagccccatttgggcccaaggatagcatcctccccagcaccagagttgggtgtgatcctcccaccttggcctcccaaagtgttgggattatgggtatgaaccactgcacccgacccagagcgttttctatgcatgcacaagggctgcattcactcacacacgtatggaacaggacggaatgtgggttttgtgctgctactggccctgctcacctccctggctgagtggctgggccgtcattcatactggatcagtgaggtagaccctgctgatggaggagtgtccagtccagtcttttgaggaggtctttgtgttgggtacttgtgggtactcgggggggaggactcccgtcccccttcgtcaggcctcagtcgttcccacctgccaccacagtgtttgtggggccccgggaacccggagacactcagagcacacactgtcaccaggggcagtggatccatcgctac

SEQ ID NO: 826984 - DNA, 557 bp, Homo sapiens
gccagggcaggtgtatcagtcggcttttgccacaacagtgctgcataacgacgaccttaaagcttggtggccgrgtctcacgctcacagggctagggccgacctccacctggccaagcccctggcctccgggttctgggatgtgggctgggctgaggtccgcccaggtttctcgcttcttggagcccccgtcagttatctgcgttctccattcttctctggggcacagcctgcttgtagtgggtccctggcaagcaggaagaccaggctgcccttgctggcacattccaaacctttgcccatttcaaatctgctaccttcccactagccagagcacgtcactcgccaagcccaaagtcaagggaggagagcccacccaccacctagagaccacagcaagcagacggatgtaaaattctgctacgggggagtgaaaaaccaatgattaaattgctaattgaattgtaagttaaactgctctgaggcatagacgctggtgtaaatgcctaaacaaaagagaagtggatttctctcttgacaaccatggcagggtttccg

SEQ ID NO: 826985 - DNA, 498 bp, Homo sapiens
aaatgtcatctgggagctaggacctggaaaaggggcttcatgattctgaccagtgccctacccttctgtggctgagctrgtatcaaagatgcaaaataaagtcctccccacttttccctctcctcttctcaaacaggagaatgtctcttggagctctgagctgtgcagactggacttaggggaggagtaatgccagcactcctttggctgccccagctagtgtctcagtatgtcacatgtaaccccagtccactgtctctgggccaagtgctctaggacttgcctaagagctgcagtccttatggtctagactgcctttcaggtttacttagagagtgggggcactttggccctcagtggcaaggtttgtgggaactcaagtccagagggatctgtgatgtccctctggctacagctggtttaaatgctctgtctgtgggtagacatcaagtgagtttggtctaacaggacagcactgagttcaatgccttacaattg

SEQ ID NO: 826986 - DNA, 446 bp, Homo sapiens
cagaaaaacacagaacattataaatttgtatttgtggtgtataaactactctaatcttaagtagaaagactaagttgataaaccaatcaaaaataataactacaacaacttttcaagacatagagaatacaataagacatgaagagacaaaaaacaagaagttgaaaagtggactaacagagttaaattgtaaagtttttattaattttcttttagctggtttgtttttgcaaccagtgttaagctgtcatcagttcaaaataatggttgtaagttagtatttgcaagcctcatgataacctcaaatcgagaaacatacagtgratacacaaaaaataaaatcatactgccagaaaaaaatcaccttcattaaaaggaagacaggaagaaaggaaagaaggaagagaagaccacaaaacaatcagaaaataaataacaaactggag

SEQ ID NO: 826987 - DNA, 546 bp, Homo sapiens
ccccctcatgctaaaatacgaattgattacattattatttttcagttcaatttcattttaattatatagacctaatagcattatgatataatcttgttgtcccaaatagcttgatctttacaatggccaatgatttttcattttataatattattttaaaaatttaattataacatatgtatattttaaccttttttatttttgaatacatcatacatacagaagagtctaaagcacacacacacatatatatatgtagtttacatacatatagagagttatatacaatttaaggggtaattataaagcagaatccactaaccatcagcataattaagaatacgtgatagtcagttccctagaagtcattcctgtgggtcacaaacccaatcttgttgcctctccccagagttaaaataatactttttgatttttgtgataatcatctattttcttcttcttctcctccttctcctccttctcctcctcctcctcctccttcttmttcatcgttgtcctcttcgtcttcttcttctttctaatttc

SEQ ID NO: 826988 - DNA, 525 bp, Homo sapiens
ggatccttgctgacattgctgagccactgaggaagccaacactggagccgtgttcctctggagttgttataggaactaaattcccctattgtttaaagttattttaaattggggtttctatttcttacagctgaaaatattaaaattcatatagaggtcaggaaagagatgccctacacagaatcccgtatcgggcacatcgtgggttcctagttgatcgactgaaggaacaattttaaatacatgaatccaattgtagtttagcaaagagactttttataaagaagtccctttgtaagaggactgccttcttccaacatctctggcagggtagccatctccagtttattttacttgaaatctcagtgacaaataagtggggaaacccagagcccctttcagctgaagagcatatagcccactaattgaacctatcccacccgggttggtaaccaagyctttactagtgaatccagcatctcctgataatcccataactctgatagaaggaccaatcaaatcaac

SEQ ID NO: 826989 - DNA, 622 bp, Homo sapiens
tgctatcaaaacaataaggtgccatgctggggcaggaacactgccagctgcacaagccccaggcaaaaatggtatttggtaatgggggctgtctctcctttgctctaagggagtcagctcatcctagcccaagttgcttactttttctcccttgaatttcctgttgccaggggtttgtctcaattgggctctgttaattcagggggctaagtaggcaatgctaggtgtaggctttcattccatatgttctaataaaaccaggttttcccaaatccagtacttcatttactctgttgtaatcaagtagccaactgctcctcttttactgttcattcctagatactagtatatatcacaatcaaaacccccttctcttcaaggggaaagtgttactgcaagattgtcctgtcattttgttacacacagcctcaggggccatcagccagtaattctgcttcccataattagtgtgtcatcacctctcatgtttctgcacagtctccaggctgaaagatgcagcatgtaataattttaagaaatgtacatccacatcttgatgaccagaaatggggatccacwaggaacatttcaaagttcttatccaaactagtctacctcccag

SEQ ID NO: 826990 - DNA, 626 bp, Homo sapiens
tcaaaggcagcaaaagcaatcacttcattgttcacatataattcagtgatgtccatgttgaaaayacaacataatttcctatataaaggcaaaatgccttagtacacaaagccctgtatgttgggccctcctctctctctgagcttacctcccccatgctctgcctggcactctgtgttaaacatgtgtactggcctttttatttcttcatgtgcaccaggcttccaggaccacaaaggctttgcatacgctctttcctccacctgcaactcttccctccctttttgacttagtgccttctctcctttcagatctaagtttactcattgcttccttcaggaacctttccttacctctgtaatcagtcaaatcctccctactcctgggctactcaaactatgaagcatcctggtaaggtgcagattctggttcagaaggtctggagatgctgtgtttctaacaagctcccaggtggagcccaggctgctggtgcatggaccacagattaagtattgtaatccttttcttcccagcaccagttgtggtgtacttttattttttatttatttatttttttgagatggagtttcccttttgttgcccgggctggagtgcaatggtgcgat

SEQ ID NO: 826991 - DNA, 626 bp, Homo sapiens
tcaaaggcagcaaaagcaatcacttcattgttcacatataattcagtgatgtccatgttgaaaacacaacatartttcctatataaaggcaaaatgccttagtacacaaagccctgtatgttgggccctcctctctctctgagcttacctcccccatgctctgcctggcactctgtgttaaacatgtgtactggcctttttatttcttcatgtgcaccaggcttccaggaccacaaaggctttgcatacgctctttcctccacctgcaactcttccctccctttttgacttagtgccttctctcctttcagatctaagtttactcattgcttccttcaggaacctttccttacctctgtaatcagtcaaatcctccctactcctgggctactcaaactatgaagcatcctggtaaggtgcagattctggttcagaaggtctggagatgctgtgtttctaacaagctcccaggtggagcccaggctgctggtgcatggaccacagattaagtattgtaatccttttcttcccagcaccagttgtggtgtacttttattttttatttatttatttttttgagatggagtttcccttttgttgcccgggctggagtgcaatggtgcgat

SEQ ID NO: 826992 - DNA, 626 bp, Homo sapiens
tcaaaggcagcaaaagcaatcacttcattgttcacatataattcagtgatgtccatgttgaaaacacaacataatttcctatataaaggcaaaaygccttagtacacaaagccctgtatgttgggccctcctctctctctgagcttacctcccccatgctctgcctggcactctgtgttaaacatgtgtactggcctttttatttcttcatgtgcaccaggcttccaggaccacaaaggctttgcatacgctctttcctccacctgcaactcttccctccctttttgacttagtgccttctctcctttcagatctaagtttactcattgcttccttcaggaacctttccttacctctgtaatcagtcaaatcctccctactcctgggctactcaaactatgaagcatcctggtaaggtgcagattctggttcagaaggtctggagatgctgtgtttctaacaagctcccaggtggagcccaggctgctggtgcatggaccacagattaagtattgtaatccttttcttcccagcaccagttgtggtgtacttttattttttatttatttatttttttgagatggagtttcccttttgttgcccgggctggagtgcaatggtgcgat

SEQ ID NO: 826993 - DNA, 626 bp, Homo sapiens
tcaaaggcagcaaaagcaatcacttcattgttcacatataattcagtgatgtccatgttgaaaacacaacataatttcctatataaaggcaaaatgccttagtacacaaagccctgtatgttgggccctcctctctctctgagcttacctcccccatgctctgcctggcactctgtgttaaacatgtgtactggcctttttatttcttcatgtgcaccaggcttccaggaccacaaaggctttgcatacgctctttcctccacctgcaactcttccctccctttttgacttagtgccttctctcctttcagatctaagtttactcattgcttccttcaggaacctttccttacctctgtaatcagtcaaatcctccctactcctgggctactcaaactatgaagcatcctggtaaggtgcagattctggttcagaaggtctggagatgctgtgtttctaacaagctcccaggtggagcccaggctgctggtgcatggaccacagattaagtattgtaatccttttcttcccagcaccagttgtggtgtacttttattttttatttatttakttttttgagatggagtttcccttttgttgcccgggctggagtgcaatggtgcgat

SEQ ID NO: 826994 - DNA, 492 bp, Homo sapiens
tttaccacagaaacagagtcaacaagatgtgtatatatggaaagattataaggaattggttcatatgattatgaaggmtggcaagttcaaaatctgccaagccaatgtcccagttcaagtctgaagaccagtaggctgctgtagaaccaggaagagctgatggtcctgtttgaagatctgtcagataggagaaggcactcttgcttgggagagggtcagccttttagtctattcagaccttctactgattgggtaaggcccactcacattatggaagagtggggggatctgctttactcagtctactgatttaaatgttaatcacatccgaaaacaccctcacagaaacagccagagtaatgtttggccaaatatctgggcatcctatggtccagtcaagttggtacatattaatcattatatcaggtatgatttgattttttccatttagcttaataattctggaattgattttgatatatgttatatctg

SEQ ID NO: 826995 - DNA, 545 bp, Homo sapiens
gccaaactgttttctatagtggctgctttattttacatacccaccagtaatgcatgagagttctaattcctccacatcckcatcaatacttatcttctgttttttaaaaaaaagttattatagccatcctcataggtattaagtggtatgtcattgcagttttgatttacatttcctaatgaccaattaatttttgcatatggtgtgagggaaggatccaacttcattgttttgcctgtgtctactcagtgctgtttgttgaaaagactcttctttccccacatagcaatcttggtacccccgtagaaaatcagttgatcatagatgtatgggtttcttcctgggctgttaatcttactccattaatcgacatgtctattcctgtgctagtattacactgtcttgattgctttatagtaaccaggaacctctgtagtaagttttgaaatcaggaagtgtagtcctcctactttgttatttttcagtactgttttggctagtctgggtcccttgaaactccatatgaattttacaatcgttattga

SEQ ID NO: 826996 - DNA, 619 bp, Homo sapiens
acagtgtcatatactaaagaactacatgacccagtcctagactccagggagcttacagttttcccaggaagacaagatacttacatgaaatagtctgagaatagtcaagacaaaaaagccatggcctctgttgggctgaacagaggctcaagtgctcaaatggatgatacagtcagtaaatttcaagactggtgaggtgggagagagatcagagatggctgcaattttcaagaaagacttcaaggagaggacatgggccttgctttgttcttggcattttaaaatgggaccagtgatactaagtttatgcagcaattcaggctcttaaaggatcaggaagaattccttagactcttttagaagtgggacattgggttaagggagaaaggttttaggagaggtaataattagtagagagaggggcagaaatggaaagtagacttgagcaaacagcctgtttaatttggactgtgtgagatggtttcccaacaaacatcccttttctttctccctcccgtgccttcttcartttctagaccctgacgtcatgacacggtgcagctgcagttatgtatcttttcctttctgcttgaccccccagcttaagtaccactttctt

SEQ ID NO: 826997 - DNA, 406 bp, Homo sapiens
tcttcagttgaacaaagcatgctaccctcataatatggcagaaactcattttacccattrgaggctttaagaggaaatattgagttctcccaaggaaaaatatcctacttacataatagctttagacttgagactaaaacatcaacacttccctaagtatccagtgccactttattcttcagatttagcattgtcagcctcaataattgagtgagtcaatttttaaaaataagtccttttttttctaaggaggtaatgtcagaaagacggcatactaggaagtttcaggccctcagttccctgtggaaataagaaattaacaacaacatatgcacaaaatatctttgtggcaactctagcaatcaattgagaaactgtagcaaccaaccgaatgcttagttatgaa

SEQ ID NO: 826998 - DNA, 406 bp, Homo sapiens
tcttcagttgaacaaagcatgctaccctcataatatggcagaaactcattttacccattggaggctttaagaggaaatattgagttctcccaaggaaaaatatcctacttacataatagctttagacttgagactaaaacatcaacacttccctaagtatccagtgccactttattcttcagatttagcattgtcagcctcaataattgagtgagtcaatttttaaaaataagtccttttttttctaaggaggtaatgtcagaaagacggcatactaggaagtttcaggccctcagttccctgtggaaataagaaattaacaacaamatatgcacaaaatatctttgtggcaactctagcaatcaattgagaaactgtagcaaccaaccgaatgcttagttatgaa

SEQ ID NO: 826999 - DNA, 589 bp, Homo sapiens
ctttgcctaaggttattgttttgaaatgcctttgttcatgaagaaattaactgctacaaataccctttggacaccatgtttkctgcatcttgcatgttttgttgagtaaacctttttattcatctgaaatattttccaatttttaaattttttctttgacactttggctatttagaatttcattgcttaattttcacatacctgtgacttacccagatttcctgatgtaattaatttttaattttattccattgcagtgagagaaaatactttgcatttacacaattcttttaatttttgtttgtttgttttttgagacagagtttcactcttgctgcccaggctggagtgcaacggcacgatcttggctcaccgcaacctctgcttccctgattcaagctattctcctgcctcagcctcccgagtagctgggattacaggtgcctgccaccacgtgtggctaattttgtatttttagtagagacggggcttctccatgttgcccaggctggtcttgaactcctgacctcaggtgatctgcccacctcatcctcccaaaatggtgggattacaggtgtggccaccacgc

SEQ ID NO: 827000 - DNA, 485 bp, Homo sapiens
atttgcccaggagttgcagtcccagtggcttagactgcctttcaagtttatttagaaccccagagtgctttagcctatggtggtggggctacctgaaactcaggttttgattactgaaatggacaattcctctctgactagggctagtctgagtgctccctctgtaggctctggctgaattctgccccatgctgctttctgctatgacaggcagcactgagttttactgcacagtctcacaatcaccgcactctcccttctgtaagcacatggattttctctctctgctgagctgcactcccagggaatggaggagggctgctgttggcaattaacagctttcttttttaccctcttcactgcctctttgatttgatgctaaaactaggtcctgygatcactccccagagttttttgctcttatgaagatgcttcttatttggatagtcattctatttggtgttttatctgggggatgattgctg

SEQ ID NO: 827001 - DNA, 600 bp, Homo sapiens
tctgctacccatcccctcccttcaaagttaaagggaaattatgctactgagtatcattgtatttctgattctattaaaaatatgtctgaaatattacctgtaaattaaatgacactttgagtttgtttattgttatgtttgcttcatttccttaatcaattaaagattaatttttaacctgttttgctaaagcaaaattttttaccttactttttgctaaggtaaatttttcttttgatcacaaatgagtttttattaggagtatttttttctaagttttaaaatatgatcatatgctttttctttaaatatatcaatttacattgtgatgaatattgtgttaaattaatcactttttttacattaatacactttacattcttgcaatggagttttattgtcttatgcatagatatattgataaataggattgagcaaaatgtaaaaataattgtgagaagaaaatgagtttaggatagctggctttttagaatattgtgttctatacaaattctctcacaactcagtctccctccgttgttgcattaaatatgtatctttkactttaaaaatatatatttatttcaaatgcataaaacc

SEQ ID NO: 827002 - DNA, 542 bp, Homo sapiens
agcttcctgattattttcccttttctgcaacttttctyatttcatttctactccctcactctcctaacaggaaagaactacgtggctaaagtgtcgaatgccagggcaaacattttatttctcgacatatgctggaagcatattttcttaaggaaaggtggggaggaactctaaacatgggaacatcagtccactggtccacagtagtatctcaacacacgctgtgttgtgcacatgatcacacagaattaaaacaagtctagcaggatttcaaaggggacaccgtttacctcaaggcaactcccacttactctgtttgctacaacagccccagaagcaaagagagcaaagacagagaatggagagaaagagaaagggcagaggagaagcaaaaagtaatcctctagatttccgctttcccactggatttggaaccattccaggaagcggcatacaagtggctcagtgtgcaatgtctctatgaatctcttttgtgtgcatttattattcataaagaccatggattgacattaggggctcct

SEQ ID NO: 827003 - DNA, 583 bp, Homo sapiens
tcactaggtaggcatcaaaaaatatttgtcaaataaatgatgggacatgtgattttcattatgcacatggttataatgctayaactaacatatcagacaaaggggaaaaaacttgctctcagcttttttgagtggctttgtgatatgtttatccaacaatgggtgataaatgtgataaaaacgactaaaaagctttgtgccaatgatagtcttgggaggatagggaaaaaaaggccattcctcttcatcaaaagcaagatgtaatcaaggctggatttgcccagggatatttagctttatatctatagacttaaagctatgaaaacaccagtattattgaaatgcctgcaggcaaaattattattgtgatttgaaatggcccagcctcaaatcccctatttactctttgaaataattatttttaaagtgatttatataaaaagacttctcaggaatgcaagtataacactatagcacagattatactcctgcctcaatgaatgagagaaaatctgaatctaatctacaagaaaatttttcttgatatacaaaggagagtattaaaaagagtaaattatggcaa

SEQ ID NO: 827004 - DNA, 581 bp, Homo sapiens
tgctgccccatgacccccaccaaagcccatgtaaggagctgagtccttcaagactgaagacacacgatactctggagaaaaataaaatggaaattgtacttaatattgcatgttaagtgtatctgtgccagacagggtggggattttgtgtgggttagaccaagggagaagtgacacagttattttcatggggaagaaagctcattcatgtaaacttttttattttttattcttttggtggggggagatggagtccggctctgtcgcccatgctgcagtgcaatggtgcgatctcagctcactgcaacctccgcctcccaggttcaagtgattctcctgcctcagcctcccgagcagctgggattacgggtgtgtgccaccacgcacaggtaatttttgtatttttagtagagatggagttttgccatgttggccaggatggtcttgaactcctgacctcaggtaatccacccaccgcagcctcccaaagtgctgggattacaggtgtgaggcacttcgcctggctattcatgtaaattaaaccttaatygtttgcagtcatatccttggcctcacaattt

SEQ ID NO: 827005 - DNA, 656 bp, Homo sapiens
ccttgagctaaggcaatctcaatagacatcaaggtaacgtaccatgtttgtcaaaacaartgaatatagacctgggttcaattcccagctccacaattagctatggttctaactcttaacctccctttttctctaagtgtgaattaaagagaatctctggactaatatgtgcattgcttagcatttgtttgtgcctaatgactataggctttaagattctcatgcaaatactatcaaaacactctgaagtgacttagatgtttgcaaaacttttttcccccttggagtgaattaaaccatttcaattggtaatagtttttttttgttgttatttatttgttattctctgggtatagggttttacacaagttactgtgggggaaaaacacataaggatcagggccttacacagaaagacatgtaccccatgaactcacttccatgtagcgtctaaaaaaattaaactcataaaagcaagagtagaatggtgattaccagaggcttggaggctggaggatttaggagatattggtcaaataatacaaactttcacttagacaggaggaatgagttcatcagatctactgtgcaacatggcggctacaggtaatcacagcgtattatattccccaaaactgctgagagcgtaaatttta

SEQ ID NO: 827006 - DNA, 629 bp, Homo sapiens
cttcaaatatcacaaggatttgccagactcacaaaagcacaatgacgacamtgaaggaaccagggggcctactgacctctgacttgtgccatgtgaagtggcaccacattatcatattcctattgcagacaatgcaaaatccaacagtagccaaggaaatagccatgctgtccttcaaatgaagccaaataaggaaaatgagatttgggaataagaaaaaggatatttcaagtaatctctatagtagacatgtttgtttttgttgtgtttatttttccctgcacagcatcccatattattttgcttatattctagtgacaatatcctgcttctttttttgggtcatgcacctgttccatttcataaattattagtaaactggttgccaccaccaccaccatactccacctactgccaacccctttgtttggaagtgggagtccctggccaatttgagtcaatccagtgacatacacatctcatgagttaggtggccagtgacctcccctcctttaagtagggatcatcgaatgcagatccatgctttcctcacatcttccgtgaagaaagagctgtccattgcacaaaacggcagaatcccatcatgagttgtgtgtttcggctgcaac

SEQ ID NO: 827007 - DNA, 629 bp, Homo sapiens
cttcaaatatcacaaggatttgccagactcacaaaagcacaatgacgacactgaaggaaccaggkggcctactgacctctgacttgtgccatgtgaagtggcaccacattatcatattcctattgcagacaatgcaaaatccaacagtagccaaggaaatagccatgctgtccttcaaatgaagccaaataaggaaaatgagatttgggaataagaaaaaggatatttcaagtaatctctatagtagacatgtttgtttttgttgtgtttatttttccctgcacagcatcccatattattttgcttatattctagtgacaatatcctgcttctttttttgggtcatgcacctgttccatttcataaattattagtaaactggttgccaccaccaccaccatactccacctactgccaacccctttgtttggaagtgggagtccctggccaatttgagtcaatccagtgacatacacatctcatgagttaggtggccagtgacctcccctcctttaagtagggatcatcgaatgcagatccatgctttcctcacatcttccgtgaagaaagagctgtccattgcacaaaacggcagaatcccatcatgagttgtgtgtttcggctgcaac

SEQ ID NO: 827008 - DNA, 526 bp, Homo sapiens
atacgataaaataggaggtcagcacaaaatacaggtcataaggaccttgctgataaaaacagtttgcaktaaagaagccagccaaaacccatcaaaacccagatggccctgagagggacctctggtcgtcctcactgctatactcacgagcgccatgatagtttccaaacaccatggcaacatcacagagttaccctatatggtctaaaaaggggagacatgagtaattcaccccttgtttagcatatcatcaagaaataaccataaaaatgggcaggcagcagccttcagggctgttctgtctatggagtggacattcttttattcctctacattcttaataaacatactttcgcttcactctacagacacgccctcaactcttgtcttgcgggagatctgagaacgctctcttggggtcgggatccagccccttgcctgtaacagtttcatctctgcttcttgcctggtgtgtggcctgtgaatgtcctgttcctctctgggcctcagtgtcctcctctataaa

SEQ ID NO: 827009 - DNA, 543 bp, Homo sapiens
tctggtcaccttcacctcttagcacagtagtagctagctacctatctcctattccctcagtcccatggcaggcagctatgcatgtgttcctggagcaacatacacacagtttgcaggagccaaagtasgcaaaaagaactctgctccaaatagccaagatctgtgctctaattactaaaagcagcttctgatcacaggcacagacaaagaaacatggccactgttgttgcacttcccttacttgtggcaagctcctcctttctgcataaagtgacttccggaagagtggaagaaccagcatcctttctcttttcattctgtagtcgattttctgtttttttctcttttgggggccagatcaggataactataacattccaaagcaacagcatacatgagggaaattaaaaagtcaccacagatgttcagggtgaggtgcaggctcaataaaaatctgagaaaaccttaattttacacctcaggctaatccttggcaccaagacaacataaaacaatcaaaaaagcaaaaacaaaataaaacat

SEQ ID NO: 827010 - DNA, 606 bp, Homo sapiens
agcattaaaggagccagaaaacttcaaatgttgataatagttatcagaaatttgaagagaattcagcactatagaaattttgctgaaaaaaattcttttgaacaccacatcatgtgataacttttcattyaatgggacaacttttgtaatggtttggtctagtctagttgtttcacatcaaactgtggctcagacagtatttagtggtaagatgtaaatccaaagattcccccaataatttgtaaaaatcaatagatttgctaaaaattttatcattcattaagcagtttactaagatcataaaagggactttttattgatttacgtattgatatataagcatttgtatatatcaattactgaacagctgttaaatattttgattataaccccttctgttaaccactaaaatcattcctcaaaactcttcccataaaaaacacttgtccagatggcatcttgtcagtttttgcaaaccttcaaggagcagaaaatttcaaccacctctttagaataaaaagaagaaaaacttcaccttttaatgatgtaatacaagcttgagtccaaaaggtgccatggttattatgaggaaaataaataatgttc

SEQ ID NO: 827011 - DNA, 629 bp, Homo sapiens
ttccaggagcatgagcttcttctctatttcggtgagattctctgcctgagatgggtgttctgaggagcattcagaaattgtttgttctgaatttctaaaacatgaactattagaaaaggacaaaaagaaatctacagactgtgggaaaagttagtgtcaaacaaatacaaaaaggaaaagttgagaacagcaaagggtggctgtgttatgcggaagtgacagagttgaaaaatgatgcattgataaagggacaaaaaaaatccttaggaggaggaggagcaggaggagaaggagaaggaggagaaggaagctgaaataaccattcttggttatatatggatttacatttcttcttcattagggttgtttattgcagcatttctgccatttttccctatcagtttcttcttatccagagaccctggagtctttgcccaggggccactgcctggtgatgaaagtcatattgttcagcttccataaacaacatccactctcatgattagctttggaaaatcagctgaatcttagcctttagcttcacagtgtatgtatgtctgtctgtctrtttaatttttacaaaaagctgggaaaatcaaatacttaaaaataacaattgagtaatttca

SEQ ID NO: 827012 - DNA, 630 bp, Homo sapiens
agaattctatgtattgaaaccagatttccacagctttattcactagcttgaagctgtagctgaaaattttatctgcttttaaagcagaaagaaaagcatataggagcagaaacgtcaattgtttcttgtaatagggaaagaagaacatttcctgaaacctttataaaacccttctacattccagaactgcatcagatgtccacacttaggggccgagaagtagaattccaggagtcataaggaaatattcaagttggtaattttatatagattttaaaaccgcaatctgcatctctcacctcacttccacactagactggaattccgcgttctctctctgacaccctccagccacagttcccacagttatacgaggcctcctagccccatcccagccctcggttacctctgcgggtggaggagatggggaggaaggtctgtggctgaggggatgagactcagtgagacaagagacctgtgcttcctcctgggtcgaccggggctgagttcacaagctggtcagggctgagctctaagaccacgttctggycacaggccaccttctgggtcggggagcagcagggaccgccccgctggagcagccaggcccagccacactcagctttgccc

SEQ ID NO: 827013 - DNA, 644 bp, Homo sapiens
atcatgtggtgtttgaatgacaggatttattgtcgaggcaatgggtaagtacacaaargtctggataggatgtggccatatcagagatctgccccaggaagactgctctggcatcgatgccaagatagagtcagtggaccaggggaagcagagaccagctcagagcaggattcccagtgaaggaaaggacgaagaggcaaacgggagtctgtgagggggtggtgatatttgtgctggaagaggtgtctgagttgcttatctgggaatcactgtagagaattgtcaggccaagttttgaattaagcataaggagaaataatttatgtagctataaaagcccagagtgggtgactgagttggtggcttacatggtctctaaattgagtaatgctatgtcagagacaggaaggcaaaggcatctcagccgtgggattcatctgcaatgtcttcttcaaggcgtaaatatgtttttattagctttatgcatataaccataaggaattagaacatcagagagaagaagaccctcataaaattgggatcttttttagcacaggtgccaggatgtcaggtatcaggtcactttcagatgattcaccacagcgtccctttccttgctgctggtggtcactctacacaaggcc

SEQ ID NO: 827014 - DNA, 617 bp, Homo sapiens
gttgggaactggagcaaaggtgactctcgatatgttttagcaaagagactagcagcattttgtcccttcccaagagctttgtggaactttgaacttgaaagagatgatttaggttatctggtgaaagaaatttctaagcagcaaagcattcaaaggtgactcgggtactgttaaaaacattctgttttataagggaagcagagcataaaaggttggaaaatttgcagcgtgaaggtgcagtagaagagcaaaacccattttttttttaggagaaatcaagcctgctgcagaaatttgcataagtagcaaggagcctaatgttaattccccagaccatgggggaaatgtctccaggccatcagagaccttgtcagcagcccctcccatcataggctaggaggcccaggaggaaaaagtagtttcgtgggccgggctcagagtccatgtgttgtgtatgtcacgcgcatctgtgtgaagcgaccacgaagcaggctttgtgtaagcaacaaggctgtttatttcacctgggtgtaggcgggctgagtccaaaaayggagtcagcaaagggtggtgggattatcattagttctcataggtttgggataggtgtacaaagt

SEQ ID NO: 827015 - DNA, 474 bp, Homo sapiens
ttgcgaatgaaagttaaaaaacaaataagtaaaactgaaaaaaaagaaactaaattgaaaaattaagctgcctgggtctcttttctctgggcaatgccataaatttatttcttttagcagctactacaacaacaaaaaatacttgatttctaacttggattctctaaaatcaataaaaatgagacagatgtttgagaaagtctcttggaaagtgggatggcacagaaagcacagattccaggtgataaacacagatgctgaaatatgaatgatgctgaataattattttttacatttaaagatatggagcctgggaaaagtacctagactacatcagatttataaaagaaccaagaccttcctgtacatagaaataataaaaacaatgaaataagttattcaagaggtaaaaataaatgtttcattgaatgttggaataatrttaaacactaacacacaaagagagatatatcc

SEQ ID NO: 827016 - DNA, 532 bp, Homo sapiens
aatattgaaaaagaacaaagttggaagactcactcttcttgatttcaaagcttactatgaagctacagaaatcaagacagtgtagtactggcwtaaagacagacatgtaggcttggcatggtggctcacgcctgcaatctcagcactttgggaggctgaggcaggcagatcactttgagctcaggagtttgataccagtttgggcaatgtggaaaaaccccatctccacaaaaaatttaaaaatcagctaggcgtggtggcttccacctgtgatcccaattacttggaaggctgagggtggaggattgcttgagcctgggaagcggaggctgcagtgagccaagatcgcaccactgcactccagcctgggtgaaagtgagactctgtgtcaaaaaacaaacaaaaacaccaggcatatagatcaatgtgaatagactgagagtctagaaataaaccctcatttatagtcaacctatttttaacaagagtgccaagacaatgcattgggtaaagaatagtctttccaacaaaa

SEQ ID NO: 827017 - DNA, 528 bp, Homo sapiens
ttctgatggtggcccttgcacactctctgcctctgctttctccctctagtaccttctggtactgctgtttcasagtaccactgcagtagataccactaccagtgctcagcaaggctgactggctcctgagaacctgctgcatctgactgtacagcctacttagtggcctgttatgatccagactgtcttgtgtccataaggctgtactcattaagagaggtgtaaacttttgtccccgcatcctcatctaagtaaggtacagtgaaatgccttcttccaagtggagggtccacctcgcttatagggaatcgatgactgccttgcagacactttcaggccagcaaaaactctttatcattaaaactcattaacagtttgttttcttgctcactgttgctttatcccaggctttttatagcactcttataccactctttcatggaatatacagtctatcactaaaataaactaattttcactgacagaaaaaaaatcaaatgaagaaaatttctcaattttgaattttgc

SEQ ID NO: 827018 - DNA, 468 bp, Homo sapiens
aagcactaatgtgccaattgtatgatgaagccatattggcagtggatcctccagtctcaatcaggccttcagatgaatgcagccctggctgctgacatgctgactgcaactcaatgaaaaaccatgacccagaaatgcccaaccaagctgtttctagattcctgatccacagaaactgtataaggtaataaatgttaattcagagttttagggtaatatattacatagcaatacataacaaatatatccactatctgcatccatacggtatttgtttttgtttctttgctattttgtcgctatgttcactcaagtgtagcttatatttggagctcagaactttaacaacaaaattgttttctagctctatggtgtctcaggaaactagattctgttttactgatcatctgtacttcctttgatggtaggtagaccccgccttgtyacacgccttataaaaggcacact

SEQ ID NO: 827019 - DNA, 491 bp, Homo sapiens
aaacaattaatattgtaatcatccccattttatagataagtaaatcaaggaccagagaggttaaacaacttgcccaagatcacagaaccaataagtggcagtgctgggatttaaatcttggtggctcttaactccccgtattatagtgtctccagtgtatgaaatgaatgcacagaaatggcaatactctggtggccctagggacagaaacatggctaagagagtgcttgagtcattctctaaagctggcagcctcaaggacataggaggatgaggaacaagggaaggaaagttcacttcttcattatagaagtaaaaaggggataattatgtcccacacagcacaataaagtatcaagwctacagactacagtagagtaggtgaaatgtagggtgtggattagcaatcagaagccctgggttctttgccaggtcaaccactaactcgtagtgcaactgtggacaggtcacttaacctctctgtgcctcag

SEQ ID NO: 827020 - DNA, 642 bp, Homo sapiens
cccttcccctttcttctcctttccctatccaaagaaaagccatggtagcaaggcacagagggggttgaagtgcctgtgtgccagggtcatcaagagagcactggcatctaagggtggtaggtttgccaccattttgactgtgccagggctcaatagatagtcaagaataaaattattggacagcaaaattcctgggtgtaggagacatagtgcagctatactatttattcactctgcatctggaagtaattgattcaatctcttaaacagcaatttcttaaataggaagtgggctaatgagataggtgtttggtaaaagtttagtgcttgacaagttggtttttgttgttgatgctatcaacagcattcttcaaatgatgaagaattagatgttatcatcttcagtgcctttcaagattccaaatgaaaattggctgactcaaggttgatttgtactaaacacttcctcattatgctaaacagacgtctcatggccaagttggtttgccctttcttcattctcaatattttaggaaygcatgtttacaattttttaactctcttggaaagaagtttggtaatatgtattaataggctttaaatgtctcttcctcagaccaaggaaatttttagacagctatt

SEQ ID NO: 827021 - DNA, 656 bp, Homo sapiens
aattttgttgggatgaatttttagaatttagaataataaatctttcatttcatctgtctgagttatgagctcacactcagaaatktacagacttctttctagtcctttgctttctgggattttccagcactagacaatgacacagtgggaagaaacactagctgtgagttcagtgagctgacccaataagattaaaattgctttaaacaaaatgctaagaaaaacaagcgttgtcaattttgatctaatgttcatgttctgccatcatgtagctgtgggatcttaggcgagctaccttgattttctgggatttaattttctcatctgtaagtaagatgtttgattagattaattctttcaagcctttatattttaaggtaaggaagcatattctataaaactgatgaaatcaagagttccatattgggaagattccataggttggaagatgtagaaaccagtttacttaaaatttcacttcttcaaaaaattactctgccctgtgagggatttctttagatcacagtttgaaaactattgggccagatattctccaaaccccctaccacctcaaatattctgtgattctagatgctattccagaggtatgtaaaaatttggaatttagagttcaaatagacttcagaatttattaa

SEQ ID NO: 827022 - DNA, 633 bp, Homo sapiens
ttgattgtgttggtggtttacagatgtatacacatgtcaaaatgtatcagattgcacattttgaatatgtgcaccttattgtctgtcactttaataaagctgtttttaaaatctagatgcctctgggcaagttactaaaccttgactttacaaatctgtaaaatggtaataacaacctatcaactttagaagtctattgcttggattaaacgaggtatttgtgtgtttaagaggcttaacacattacttagcacattagaagggcttggtgaatctccagacttctttgcagaggaccaaatggtatctattatccttccttctacccccccactgacagtggatagcacagtgtacataaccatgaacttttatcatgccctataaaacaagtcatcactatggcacttctgtgagtttgttggcaataaatcaatcttccggcattgctgggctgtctaaatgcttggctacagtaaattaagtcttatgtgctgttcctgccctgttgcctgtctgtgggagccaaacttctattatgccaagatttctgtyggacaaagtgacaggagcaggatggagtgggagaaagctgcaactggaataactctgacaggaattttgatattctaa

SEQ ID NO: 827023 - DNA, 568 bp, Homo sapiens
ctggcgtggctgcatctctcgcagaggttacgaatgggaacaggccagggctgttggctggctcctgtgcaaggcmcctgaagaacaggcaccagcctgcttattagttgaggtaactgagctgcttcagctctgagaagcatgtctaggtcacggagccggtgagggctgaggcggcagccgtgaacgccttgctctgaacgctgccatgctctgatgccggggacagaagtggacaggaacgccacacgtgcagcccacaggaacagccaacgtgcagcgcgtagctcatgaggacagaggctctgatggggcatgcttagagagacctggcggtggaggagactcgcataccaggaggacacaggagggtgacacatgcgtgcctttctgagccaggaaggtagaccatggaggaagaggaagggggagaatcacccgtctttagagacaaatgtcacccaccagggaagtctctgccacaagcctctcaaagggcttctccttgttctgagtcagcagtgcgtccccaaaaatcacgccaggtcttccctttttggaaaactgt

SEQ ID NO: 827024 - DNA, 645 bp, Homo sapiens
acattcaaaccgtaacaatsatcatatcttcatagttttctcagtatctggtaatgtaagtttcctattttgtttttcttttcttcattattattttttaacttttatttcaggtttgggggtacatgtgaaggttacataggtaaacacatgtcatacaggtttgctgtacatattatttcattacccaggcattaagcccagtacacaattgttaacttttctgctcctcttcctcctcccaccctcccccatcaaatagaccccagtatctgttgtttccttctttgtgttcataagttctcatcatttagcttccacttttaagtgagaacatgtggtatttggttttctgttcctgtgttagtttgctaaggataatagcctccagctccatccatgttcccgcaaaagacatgatctcatttgtttttatggctgcatagtattctatagtgcgaatgtaccacgttttctttatccagtctgccattgatgggcatttaagttgattccttgtctttactattgtgaatagtgctgcaatgaacatttgcgtgcatgtgtctttatggtagaatgatttctattcctctggatatatacccagtaatgggattgctgggccgaatggtagttttgctt

SEQ ID NO: 827025 - DNA, 541 bp, Homo sapiens
ttgcagaaatgctgcactgtctctaacacatgtatagtttttaaaaatgcaatccaggccagctccagggtggtctgttctctattatttatgtatgcatgattcattttacttaccaccagctgtaatcccttctccccacccctagcaggcctattatgcaagtcccttccccctcctgagagcagctagggaggcaaactcattttcccatctatctgggtgaaatttaattagaaagccaaatctggaagaacagaacacaaaataaccacattaaataaaaataagagatggctctgaacttgactttaagccaaaaaatcaaagaactgcagtaatttgctgaatcatagatctaaatactcatttttgtcttctaacctctaagcccaactgaaagaggcttctaaagaaaaaaaagaaacaaacaagtactagatgaacacaaataacatttagaagtcataaaaggacaacaaggactctggctttctattccatctaaaacaatrccaggcacatagtaggtactgtatga

SEQ ID NO: 827026 - DNA, 625 bp, Homo sapiens
ttctcattctctgactcaaaggttcttcagagaaaagttgaattgtgtgtgcgcgtgtgtgtgtgtgtgttgaattgtctctgtgtgtgtgtgtattttacgagtacacaaatgaaaagctgtataaatacattaatttggatttttactcatatgtatagaagcagcatttcaggatagctactagcagcctccactgatttaatgttcagaaagcttaaaactcaagatgtcagagactttaaatttatggaatcatactaatgcatacaggagtttaagcagagacacaagctcttcaagactgagcattccattggctagctaatttctaatgttcttaacattgtgtgtatgcaaactggagttcctagtgactgtcaccatcctcccacactctgacacttgcctaccaactccctattctcacctctcaatatatcaacattctctgaatgttcccttcttttgccacctttccctctcctcttagttttgctttcacatgactaattttttggtgtctctttccatcactttacctagtctccattcttctttacttttgccccrtttaattttatttcatctgtagagtgaaattgcatattcacagttggtcaag

SEQ ID NO: 827027 - DNA, 640 bp, Homo sapiens
agaaaagaatttttcattttgtcatagattcacatgcatgaaagtttcaagacagraaacaacagagcctggtgctaaattaacatctacccatttggaataatgaacatgcatgtatgtgtgtgcctctgaatacgtatcagtgtcaaggggaggagatacattattggaaagaatggatatgataagaaagggtggcagagagcctctaaggaaacttcaggctttgagcattttgaagttgcctatggcccttcaaatcttgaaagcagtttctcctgtacctttcttacctaaaacaggattctgaagtcaagatttaactatagctaaataaacaagtttcctgtttcattttattttatctaatataaacaagggagtagacaataaaatctatctggaagcaagagaaaacaggaaaaacacaaccatgtaaattagcatgtacctaaacactttcataatatttaaattttggaaatatggtccttatgtttgaaatttaatttcaagtctggtctaaagttctcctttatcattcaaacccaacaaatatactcaatcttctagatatgtctcagagtgaaacaaaagagtggcacaaaaatctcctaaggtatatttttttttagtagtc

SEQ ID NO: 827028 - DNA, 640 bp, Homo sapiens
agaaaagaatttttcattttgtcatagattcacatgcatgaaagtttcaagacaggaaacaacagagcctggtgctaaattaacatctacccatttggaataatgaacatgcatgtatgtgtgtgcctctgaatacgtatcagtgtcaaggggaggagatacattattggaaagaatggatatgataagaaagggtggcagagagcctctaaggaaacttcaggctttgagcattttgaagttgcctatggcccttcaaatcttgaaagcagtttctcctgtacctttcttacctaaaacaggattctgaagtcaagatttaactatagctaaataaacaagtttcctgtttcattttattttatctaatataaacaagggagtagacaataaaatctatctggaagcaagagaaaacaggaaaaacacaaccatgtaaattagcatgtacctaaacactttcataatatttaaattttggaaatatggtccttatgtttgaaatttaatttcaagtctggtctaaagttctcctttatcattcaaacccaacaaatatactcaatcttctagatatgtctcagagtgaaacaaaagagtggcacaaaaawctcctaaggtatatttttttttagtagtc

SEQ ID NO: 827029 - DNA, 558 bp, Homo sapiens
tgtctaagaaataaggcaactatttaaacgattggtagcaattcctatgtgttcagtaaagcataatttcaaaataataacctatgccttctttgtttctatgttttgtgctagatataataaatagatgttcagattaatttttgcatttgcataagtaatttaatgttatataaactagccttgctttggggaacatatagaaaaaaattccattctaaaaaagaaggaaatgcaatggagttaaagcactgtcaaggattatatactgttcctttaatttgtggcaaagtgctactgatatttagtgtacagcacactaaatgtgtactgtaccactttacctttatcctttaggccaaggatactaaatatcctctaaggccttgtatagtcctataaaagaaagacttgtcttggctacagtacyaatagcatttagggagacaatgggaaatcgctgtagcttgagggtttctcatcactgtcttagattccatggtcaattattttaatctctagttttactgtattcacttggcttaaccacaacgtcag

SEQ ID NO: 827030 - DNA, 635 bp, Homo sapiens
gaggatccagcacaccccagaggaggacagagccagaagacgcaaggagtcaaggcctctgagtacccagggggagcggagcaccccatcttctgctgggacttcatgagcagtcatcaagtcccagcataagttacactgagcaaaaaataaacgtgtgttgcattacagcactgagatctgcaggttgtttataggaattagctgacttaggctaacacaaaggaggcatctctagtccaatttcctgcccatccataaatcttctctgacagcctggatatcctggtgcttttttctgtaacgaatagatatcaagcacctaacagatgccaggcacagttctaagggctttacagaggcaaacttatttagtcctcacggcagtcaagagtcacatcctgaatccacagcaatgagctccagacaggcccaccactgtctactgtaagggacttaaaagactctgggtcaagtctcatgctcacctcttaaaacacttycctgcgccaggagaaaccttcctattcctttgaaggttactcttatgacatggttcctatagcccttcttattggctcttcttacaaagggcacagggcataatccaaagactgtggagtggggacccagat

SEQ ID NO: 827031 - DNA, 518 bp, Homo sapiens
gttcaagcaattctcctgcctcagcctcccaactagctgggactacaggcgcataccaccatgcccagctaatttttgtatttttagtagagatggggtttctccatgttggccaggttggtctcgaactcctgacctcaggtgatccacccaccttggcctcccaaagtgctgggattacaggtgtgagtcaccatgcctggccaaaaaccctccaattttaaaaagcacaaaaaatgtgaatggatatttctccaaacaagacatacaaatggccaagatcttgaaaagatgctcaaaatctctattcatcagggaaatgcaaataaaaatcacaatgaaatggcacctcatacctgttaggatggctattaccggaaaaacaaaagacatgttggcaagatgtggggagagggaatgcttgtacaccgttggtggggaggaaagatagtgcagccactatggaaaacaggargaagatttctcaacaaattaaaaatagagctaccataggatcc

SEQ ID NO: 827032 - DNA, 613 bp, Homo sapiens
caagaatgtctggtttccctttggctaagcaagggtggagcagggagagcaggacaaagggctcgaggcccaaggaattctgggaaaatctcratagtgagagcatgaatggccattgtcctgccctttggagaggagcatggacttttaaaaacagcttcgttactcaggaggctgaggcgggagaatcgcttgaacccgggagatggaggttgcagtgagccgagatcataacaccacattccagcatgggcaacagagtgagactccgtctcaaaaacaaaacaaaataaaaacaaacaaaaaaaccaacagctttgttatgggtgaccatctgtcttggtttgccagggactgtcttggttttagcatggaaattccggcatgcagggctttcggctccagcagactgggacagttggtcactccggctccatttcacagctttttaagttctagaagctaaattatagcaatagcttgaactacgtgtatcattttctagaatgttcacaataactctatcagtacggactgttatcatatccattttacacataagaaactgaggcacagagaaatgctgcaacttgcctttgcctggccgctatct

SEQ ID NO: 827033 - DNA, 613 bp, Homo sapiens
caagaatgtctggtttccctttggctaagcaagggtggagcagggagagcaggacaaagggctcgaggcccaaggaattctgggaaaatctcgatagtgagagcatgaatrgccattgtcctgccctttggagaggagcatggacttttaaaaacagcttcgttactcaggaggctgaggcgggagaatcgcttgaacccgggagatggaggttgcagtgagccgagatcataacaccacattccagcatgggcaacagagtgagactccgtctcaaaaacaaaacaaaataaaaacaaacaaaaaaaccaacagctttgttatgggtgaccatctgtcttggtttgccagggactgtcttggttttagcatggaaattccggcatgcagggctttcggctccagcagactgggacagttggtcactccggctccatttcacagctttttaagttctagaagctaaattatagcaatagcttgaactacgtgtatcattttctagaatgttcacaataactctatcagtacggactgttatcatatccattttacacataagaaactgaggcacagagaaatgctgcaacttgcctttgcctggccgctatct

SEQ ID NO: 827034 - DNA, 613 bp, Homo sapiens
caagaatgtctggtttccctttggctaagcaagggtggagcagggagagcaggacaaagggctcgaggcccaaggaattctgggaaaatctcgatagtgagagcatgaatggccattgtcctgccctttggagaggagcatggacttttaaaaacagcttcgttactcaggaggctgaggcgggagaatcgcttgaacccgggagatggaggttgcagtgagccgagatcataacaccacattccagcatgggcaacagagtgagactccgtctcaaaaacaaaacaaaataaaaacaaacaaaaaaaccaacagctttgttatgggtgaccatctgtcttggtttgccagggactgtcttggttttagcatggaaattccggcatgcagggctttcggctccagcagactgggacagttggtcactccggctccatttcacagctttttaagttctagaagctaaattatagcaatagcttgaactacgtgtatcattttctagaatgttcacaataactctatcagtacggacygttatcatatccattttacacataagaaactgaggcacagagaaatgctgcaacttgcctttgcctggccgctatct

SEQ ID NO: 827035 - DNA, 629 bp, Homo sapiens
cgccaagagtttgcctctctcggcatgctctggctccagtraagttatgagactcccaccccttaaagagcttaaagaccttaaagagcccacccctgctgtagagggaagcgacagctgccaggctccgcccacccctccttcatgggtaaatgagaagggcccacccctccttcctggataaatgagggtgtaaagggcccagcccttctctacggaatgccggggctgctttgggatgtgtggctcggtgttcacagtcaccttgggagtcagaaccaggttcagcctccgtggcaggacacccaagctctgtcacgtctgttcctacggctcctcctgcctcccgccttactcctccacagctcccacagccgccctgcccctttgtagtgccccagccagctcgagccgcctctacagaaggattgctcatggttctaagtgttaactgagtctccttgacccctcgcatttcccgccccccgctccccgccccaccaccccaccccgcttacctagaatctttccctccctccctactcaatggaaagaggcctcagggcagaaagcaaacaggaaggactccggatttactgcataactgatgctctcggagcagcctgggc

SEQ ID NO: 827036 - DNA, 629 bp, Homo sapiens
cgccaagagtttgcctctctcggcatgctctggctccagtaaagttatgagactcccaccccttaaagagcttaaagaccttaaagagcccacccctgctgtagagrgaagcgacagctgccaggctccgcccacccctccttcatgggtaaatgagaagggcccacccctccttcctggataaatgagggtgtaaagggcccagcccttctctacggaatgccggggctgctttgggatgtgtggctcggtgttcacagtcaccttgggagtcagaaccaggttcagcctccgtggcaggacacccaagctctgtcacgtctgttcctacggctcctcctgcctcccgccttactcctccacagctcccacagccgccctgcccctttgtagtgccccagccagctcgagccgcctctacagaaggattgctcatggttctaagtgttaactgagtctccttgacccctcgcatttcccgccccccgctccccgccccaccaccccaccccgcttacctagaatctttccctccctccctactcaatggaaagaggcctcagggcagaaagcaaacaggaaggactccggatttactgcataactgatgctctcggagcagcctgggc

SEQ ID NO: 827037 - DNA, 598 bp, Homo sapiens
ttctatagaagcagtccccaacctttttgtaccagggccctattttgtggaagacratttttccagggacagtgatgggattgaatgggatgagacatggttttgggatgaaactgttccacctcagatcatcaggcattagattctcataaggagcccacaatctagatccctcactgtgctgttcacaacagggttctcgcttttatgagaatgtaatgcccagctgatctgacaggaggcaaagcacaggcagtaatgcttgctcacccgcagctcaccttctgtgtggcctggttcctaacagtctggggactagtaccagtccacagcccaggggttggggacacctgtaaagtacaagtgatcaactggatcaacatttataaaatgtaatcacaaaactcctttagaacttttttgaaaaatatttgtatttaattcaaaattaagctgacacatgactgtattgcttgccaatttatcaatttctgtattgatacttttcgtgaaaaaagttcttactcctactcaaacaatctcacattggttttaaattatacaatttaaagttataagtgggctggggagaatgacc

SEQ ID NO: 827038 - DNA, 654 bp, Homo sapiens
ctggtttcctggtagttaagtcagagtttctttttctttccgaaatgcatctattaggtgttctattgaaaaggaagtcagaatcaccttgcaaatagaaaacattagagtttctgtaccacrgtagtatatacttataaagtattttataaacaatatatcatcctgttgtagggatagatgaaaagaatctgagtctttgttaaatatttgattcttcattagatgttgtatatttgtttgctcttgtggaaagtacagattctcccatatacttttgttaaacttaaatattttatgcgcaaagtagtgtgagatcagtacgtaggaagggttatgtcgagtaaatttgttccactaattacatgaatattaaaaacatttaggagaataggtcaagcttaaaaatcagttacatttcaactgaatattacaatgaggtataacatagtaaaacatttagtgcctaacactttttccattatgatttttttgttattattacatagattttgcatagatgagtgctgcatggatattttgaaacccatagttacagttacaaagctatttggcaacaggacaagctctactatggggaaattgcgtacaaataagttgaagcataactaagtactttttaactttccttgg

SEQ ID NO: 827039 - DNA, 606 bp, Homo sapiens
tgaagaagagtgttgaattagcaaataaggagacaaagttttatagagcaaggagccttataaggcacatatttatttatttattgaatcttatgactaagggcttggaggaatgagggactcacagtcttgctgatgaggcagagggagtaatggggaaaggagatagatgggtgcagtcccagagaagaactacagtattatagacattgaagacagtatatttacaaccaagctaggggtggaggaatgacagtgaagtagagtggagacggaaagcactagggcttcctcccttccagcaggagaaatttctctctttctgatagagattactatctccatctgtgctgtgtataactcaggcaaactgcctcaatccatcatccctcctcctcctcaagctctgggctattttcctgtggcttctttagcagataagcatatacaccagttaaaaacacttctatcatggaaggaagaaaggaaacaaaaagraaatgtgatggtcaactttatgtgtcaacttggaaaatgtttttgaatgaaatttacagttatatcagtgaactttcagtaagcaaatggccctccgtaacatgtgtg

SEQ ID NO: 827040 - DNA, 525 bp, Homo sapiens
ccatggagagtcatttctctcctggctccaatacttaagtgatcaaaaaccaaataggttatttttttatatacaatgaatgggttggagctttttaatacaagattctcagtctgatgtgacattaaatgcatagtttgttaaatcagactggttagtgagggaggtgcaggacacaattcttttcattattgcaattaagttgggaactcatcatgtttaacatcaaggataaaactttctcaaatattccactacagaaaaatagaaaatgcttttggaggtagtgtgagtgttacaactgagggtattttttgaatcagtaaatgataatgttgaaagattgtgagggctaaactcatgctttttattcagtctttgaaataatcaytgcaaaaatccctgctcatgtattacagtgacaacattctgaattaaccaaggatagttgttgttgtttgtgtgtgtatgtgtgtttgattgtctatttgctggtttaggtttccctgagtagaaccaagtaac

SEQ ID NO: 827041 - DNA, 292 bp, Homo sapiens
ttttgaacaagggaaattggggatagcctctctcttagctttgaaatgtccaaagtttgaaaaatctgacgtgatttatgtaatattcctgttcaaaatgatgatataataatgtttatcaattggtaatgtagtatggctaaaagtggccactcaaaaagcttcctagctgcagtgacttatcaygcagcttcggaagcttatgctttatctgcaattaagtctgcataagcagatgagttaataccagttagtagaactgcaattcttagttctggactaaaaataaaca

SEQ ID NO: 827042 - DNA, 564 bp, Homo sapiens
ctctttgttcttgataaggatgtcagaacaactgtaaggcaaaagttagatggtgctatttgatcttttgtgaggattctatttgtccttttgtctggccttgccatctgcgcagaggtgttgattattaaaatttgtacctgcacatgtagttgttgcttctggggcataatctttccagccatgtgcctctggttaaacaccctttaaatcctgaattggtctatgcgtatacagttctgtagggaaaatatacaatatgaaaaattgtgcttccaaggaaatttaccttggaaatagggataccagactaatacacagatgacatttggaaacagtgtaattcagtgtaaaatcacagcttcaaaaatctgttcattcctttgtgatattcacgtatagaagcatttgaggacttcacagtaaggagaaaaccactggggtccaaaaagtccgagtgctyagtgaagaagtttagacccgtgggaagccatgaagaaagagatgatagctaagctgaggcaggcacaacttcagggtgccattcccagctccctggagtta

SEQ ID NO: 827043 - DNA, 564 bp, Homo sapiens
ctctttgttcttgataaggatgtcagaacaactgtaaggcaaaagttagatggtgctatttgatcttttgtgaggattctatttgtccttttgtctggccttgccatctgcgcagaggtgttgattattaaaatttgtacctgcacatgtagttgttgcttctggggcataatctttccagccatgtgcctctggttaaacaccctttaaatcctgaattggtctatgcgtatacagttctgtagggaaaatatacaatatgaaaaattgtgcttccaaggaaatttaccttggaaatagggataccagactaatacacagatgacatttggaaacagtgtaattcagtgtaaaatcacagcttcaaaaatctgttcattcctttgtgatattcacgtatagaagcatttgaggacttcacagtaaggagaaaaccactggggtccaaaaagtccgagtgctcagtgaagaagtttagacccgtgggargccatgaagaaagagatgatagctaagctgaggcaggcacaacttcagggtgccattcccagctccctggagtta

SEQ ID NO: 827044 - DNA, 615 bp, Homo sapiens
gagtggcagttctatgttccctcccccccaaaaaaaggaaggaaaagaggaaaactaagtttcagtgctaaaatatctygtggccctgggtatgcaggattgcatatctgaccataactagcctagcagcgagttcctacggatagctaaaatacatcattttgaggtggattagctaccccccaccccctacccctttctggcatttagcttctccagctccatttgagtagagttgtggttgggtttgtagaactcattaaggttggacactattatggtgatgtggttttgagaagatattgcaatagccctcagaaaaggaactagatgctgcagttccttgtcagaagtaaacttggagcgaaacacgcctttaggaggggtaaccaggctgctttcctctatttttaaagctgtagtatgaagccaaaactaaaagaggatgggcttgcgatattcggggtgcttgggcagccatgtgtgagtatcagcttccagaccaatgctttgttaatcttcattgtttattctctgacatgttctctggctttttgctgtaactcaacctgaagcatcattgaacttccctgaaggacttgtgttgttaggatc

SEQ ID NO: 827045 - DNA, 656 bp, Homo sapiens
cataaccataacacagttgtcaatactaagaaaccaacactggtacattactattaagtaaactccggactttatttggatttcacttgttttcccattagtgttctctttctgttccaggatcccatccaaatcaccacattgcatttagtgtgtgtgtgtgtgtgtgtgtgtgtgtgtgtgtgtgtgtgtgtgtgtgtgagagagagagagagagagagagtgtgtgtgtgttatcttgcattgtaacatccttagtgagatgtattcacatactagaacactggcccatttaacgtatataattcaatagtactagtatactcatagagttgtgtaaccatcaccactatgtaatctctaaccattttatcttgcccaaaagaaaccctatatccattagtagtcatgcctcacccccatcccctgtcccctagtgcctagagagccacgaatgtatttctatctctacaaatttgcttactcaggacatttcatacaaatagagtcacacattatttggtctttcatgctgggttctttcacttagcaaaatgtttytgaggttcacccatgttgaagcatgtaacagtactttacttcttttatttccaaataatattctactgtatggatatatccacattttacttatc

SEQ ID NO: 827046 - DNA, 656 bp, Homo sapiens
cataaccataacacagttgtcaatactaagaaaccaacactggtacattactattaagtaaactccggactttatttggatttcacttgttttcccattagtgttctctttctgttccaggatcccatccaaatcaccacattgcatttagtgtgtgtgtgtgtgtgtgtgtgtgtgtgtgtgtgtgtgtgtgtgtgtgtgagagagagagagagagagagagtgtgtgtgtgttatcttgcattgtaacatccttagtgagatgtattcacatactagaacactggcccatttaacgtatataattcaatagtactagtatactcatagagttgtgtaaccatcaccactatgtaatctctaaccattttatcttgcccaaaagaaaccctatatccattagtagtcatgcctcacccccatcccctgtcccctagtgcctagagagccacgaatgtatttctatctctacaaatttgcttactcaggacatttcatacaaatagagtcacacattatttggtctttcatgctgggttctttcacttagcaaaatgtttttgaggttcacccatgttgaagcatgtaasagtactttacttcttttatttccaaataatattctactgtatggatatatccacattttacttatc

SEQ ID NO: 827047 - DNA, 507 bp, Homo sapiens
cttgagcccaggaggtggaggttgaagtgagctgagatcatgtcaccgtagtacagcctgagcaacagaacgagaacttgtctcaaaataaacaacacaaaacagaaaagcaaagttaataagagagaataccttgcttatttcaagctactaagtttttaggcttcctcaatgtacaaaggtagtatttctgtcacagacccctccctctagcttgccagggtccctgttctagttattgaaccgaaaacattctaaatgataaatttttccactttggcatattatgcccccaatttaagagctatttatggtaagaaaagttaaattatatttctgttattactcagtagaacctataagtttaaaacaaaccccatcacatagttgctagtaaaagactttggattttgaagacaaaagaaaaaaaatkccctcactaccatgaggaaagcattaccattcaggtatctaaatagaagtagaatatgcttctaaatcatcctt

SEQ ID NO: 827048 - DNA, 597 bp, Homo sapiens
attatcctgccccagcctccggggtagctgggaatacaggtgtctgccaccacacccagctaatttttgtattttttttttttagtaaaaacggggttttggccaagctgtcttgaactgctgacctcaggtgatccacccgcctcagcctcccaaagtgctaggattacaggcgtgagccaccgtgcctggcctcgattttctaaatgatttgtctacctactacatgaaaatcctcatgggcttctctgcctagtccaaagtccaaattcgtcaatatacagtctacttcgctgaagccccagcacacctttctggtctctttcccaccacactccaggtggcagtacggagtctttccaacaaggcaccttcacgtttagcacttaatacatcatgcctttaagtccagttaggtatgcacacatctgactctcatgtgaggttgtaaactctgccagacatatatcataaccacatcttcttcctctgtacgcacagygcctagcacactgcttcatacgtaagtggtctgatcttagatccagtaaacaaaaccactggacacagccatgaattgaaacttgcagcacagac

SEQ ID NO: 827049 - DNA, 628 bp, Homo sapiens
attgatctgtttttttgttctacttttggtaagatttcctcaaatttgtctttcaacttcataactttttattgctaacatcctatttttaaatttctaacaactcttgcttggtatctgaatttyttctacagcatcattctcttgtttcatagatgtatctttcatctctctaaggctattaataagattattttgaagcttattttcttttcattattcctaagttgatattttctgcatcacattttcacgactttatttttaaaattcctccttttaagtcagaacattctcccaactttaaatctagtaagagtcttcaaaattttaaggaaaaatccctagagtttaatctaattagctctgattggctcaacttgggtcatttgctcattcttgaaccaggcactgtgtagggagaccacagtgttccagttggttgagagtggatcaacattcctcccctagaactagatagaaagtcatctccatcagaatttgtgagtcggggaagagtgggccttcagagaaaaataggcggctgttactaggaaaagagcaaagggatattggatggccagaaaagaacatacatgcttaatatagcaccttgtccaggggtttt

SEQ ID NO: 827050 - DNA, 628 bp, Homo sapiens
attgatctgtttttttgttctacttttggtaagatttcctcaaatttgtctttcaacttcataactttttattgctaacatcctatttttaaatttctaacaactcttgcttggtatctgaatttcttctacagcatcattctcttgtttcatagatgtatctttcatctctctaaggctattaataagattattttgaagcttattttcttttcattattcctaagttgatattttctgcatcacattttcacgactttatttttaaaattcctccttttaagtcagaacattctcccaactttaaatctagtaagagtcttcaaaattttaaggaaaaatccctagagtttaatctaattagctctgattggctcaacttgggtcatttgctcattcttgaaccaggcactgtgtagggagaccacagtgttccagttggttgagagtggatcaacattcctcccctagaactagatagaaagtcatctccatcagaatttgtgagtsggggaagagtgggccttcagagaaaaataggcggctgttactaggaaaagagcaaagggatattggatggccagaaaagaacatacatgcttaatatagcaccttgtccaggggtttt

SEQ ID NO: 827051 - DNA, 603 bp, Homo sapiens
gtacatggagatgaatgttgttttcatgcctgctaacacaacatccattgtgtggccacaaatcaggagtaacttggactttcaagtcttattatgtaagacacacagtttgtaaggatattgctgttayaaatagtgattcttctgatggatctaagtaacataaattgaaaaccttctcgaaagaattcactattctacattccactaggaaaaggagaggagggcaaaatctcaacattaacaggaattttgaaaagttgactcaaatcctcttagataaccctgaggggttcaagatttcagtgaacaaagtcacaagactttagtggaggaagtcactgcagatgtggaaagagaaagagaactagaatttaagatggaacctgaagatgtgacttaattgctgcaatctcataataaaacttgaataaatgaagactttctgtttatggacaagcaaataatgtggcttcctgtgatggaatctactactgatgaagagcctgtgaaaactgttgaaatgacaactaatgttttagaacattacacaaagttaggtgataaggcagcagtagggcttgcaaggattgactccaattt

SEQ ID NO: 827052 - DNA, 591 bp, Homo sapiens
ggaagtttcataccgaaaccatccctaacccttctgtggaaaaaatatcttccaggaaaccagttcctggtgcaaaagtttggggactgctgatttgggactttaaatatgtttagtgtaactgaggaactgattgtttcattttttattaatttaaattaaatagtgacacatcgctagtggctactatattcaacatcatagttctagcccctttctcttccaccctaaaatgaaagactacttatgattctggagataatactctcgactctttaccttctaactaattccattcatcaattaaacatatcaatttaattttttgtctcctggtttttcatcttacatcccacctcaagccacaccattacagtgggaaacttcaactttttatacatgtaacctatcttcaaaccctgaagctgcaatctataatattcttattttaaatgtattatactctatagtctctcacatatgaaatattaaatttgaaccatgttaccttttgaccaccatagttgagagaagtgttaaataaygtcttgtgtagtaatatgccatctatttaaagttatccccctggtg

SEQ ID NO: 827053 - DNA, 567 bp, Homo sapiens
taacttttttattataactttcattttaggttcaaagttacatgtgcaggtttgtatataggtaaactgtgtgtcactggggtttggtgtacagattattttgtcacccaggtaataagcgtaatgcctaataggtatttttttctgatcctgttcctcctcctacctccacccaaaagcgggccccagtgtcagttgtttccctctttgtgtccatgtgttcatgttgtttagctaccacttataagtgagaacaggcaggatttgtttctctgtgtctctgttagtttgctaagaataatagactccagctccattcacgttgctgcaaaggacatgatctcattcttctttatggctgtgtgtgattctatgatgtatgtgtaccacattttctttatctagtctaccattgatgggcattgaggttgattccatgtcattgctattgtcaagagtgctgcaatgaacatgcaggtgtgtgtgtctttatggtagggcaatttatattcttttgagtgtataaccagtagtgggattgttgrctcaaatggtaattctgtttca

SEQ ID NO: 827054 - DNA, 632 bp, Homo sapiens
tacaggaaggctgtttataaaatttcacagcaaatcgtgttaaaattttcagagtattctgcttaatgggttgatgtatttcctcatacatgtactggcagctcagagatttctttgtcaatcagaagtgggggcattgttaccaacgaaaagcatggctgcatcacaacaaatctgtctgtctgccagatgcaccatcattgtaaaccagaggaccttatttctcccttaaaaaataacaaaataacattcttaatcaaccagaatgtctctttccctcatgcacatcaccttactgaaaggttccctttgttcgcttaaaatctaatccaacctccataaaaacttctctatgttttatcttgcaaagtagaatatacttcctcagagacattgtgtggttgatggtttagaacattatttttaatgtccttatttacttaccatccttttcccatgcacaaattgaggatatcagcaaagattagctctttctactgtactctctcccattctatgctttctcatgttttattctggaaattargatagaatttattgttattacataaatcattactaaattctttgtattgaagaatagaaccattatgagtgatacaaatggattt

SEQ ID NO: 827055 - DNA, 632 bp, Homo sapiens
tacaggaaggctgtttataaaatttcacagcaaatcgtgttaaaattttcagagtattctgcttaatgggttgatgtatttcctcatacatgtactggcagctcagagatttctttgtcaatcagaagtgggggcattgttaccaacgaaaagcatggctgcatcacaacaaatctgtctgtctgccagatgcaccatcattgtaaaccagaggaccttatttctcccttaaaaaataacaaaataacattcttaatcaaccagaatgtctctttccctcatgcacatcaccttactgaaaggttccctttgttcgcttaaaatctaatccaacctccataaaaacttctctatgttttatcttgcaaagtagaatatacttcctcagagacattgtgtggttgatggtttagaacattatttttaatgtccttatttacttaccatccttttcccatgcacaaattgaggatatcagcaaagattagctctttctactgtactctctcccattctatgctttctcatgttttattctggaaattaggatagaatttattgttattacataaatcattactaaattctttgtattgaagaatagaaycattatgagtgatacaaatggattt

SEQ ID NO: 827056 - DNA, 631 bp, Homo sapiens
aactgtgagtcaattaaacctcttttctgtataaattaggcagtttcaggtacgtttttattagcagcgtgagaatggactwatacagtgggcttatagcaagcaggaacaagtccaatagtcacactgtaactgagcaggggccactgcagcatctacacagtccacgagaggtgagaaggccagaggggtaggttgtatctgctgtctcacagggaggtggtcaccaggagacagttgtatacggcagatatcggaggcgaccacatataggactttggaggaagtgaaaactcctttgagggtcactaagccaagcttctggtatgtgcaagttaaacctattttcaaaatggatgctgaggtaacatacaatttataagaattggctaaatattatacttacttagtgtaacaatggtggagtgtatgtctcccactgatagaatgcaagctccacaaaggtaaagaaagtggtcttttttctataaaaaatggtatgttcactgaagtatttcaaacatctggaacaggttctagtatagatactcaacaaatatttgttgaattatgttgagctgcatagctcattatctcttcccatgaagctgtttagaacaaattttccagt

SEQ ID NO: 827057 - DNA, 627 bp, Homo sapiens
caactttattttttatttaataatttaacatatttctatgtracaaaaatgtatttaatagtttaaaaatacttatctcaaattttaaattaaaactgttttattttacatacttctgaaatatcttaacactgctatatctaatatttaaacaagcccctcagatcattttgagtctgtgtggtgcatcactggtgtgaacaattaaggggatttgttggctcatctagctggacatttctggtgagatcatgtatggtaccgtaagaatcccagctttatttctttgaagaactttgaaactctcagctttgatatgatctgtgtgtcagctttattctcagactaataacagggttttcagacagtccatgtcttgctgatatacacaacatttgtgaaagcaaatcttttttcctgtggctctcatttaaggttaatgaatattctttaccggaaggctttggcaattttccctttctgtcttatagaaccgaattactaaactttctcccccttacctttctaacttaaacttaaacctttttctatgctgagaatctttcttcacatctctcctctatgccatttaggttacccaagctcagatcaaagtgatgtttcaga

SEQ ID NO: 827058 - DNA, 610 bp, Homo sapiens
gagtttttattctgggatctcgttcagtcacttggaaacagtttattcctttcaagacttgcatgagatctgctagcaccagaacagccttaagtcaagggctaattggactaattgtcactactgaggcggcagctttctaaatgctcctcctgatgccctgtgtcttacaagctgtctccactctggctagcaggaccaggttcctgatagcgtgagctctgggaattggtatgcccgttccttcaaggggctgtttccccaggctccagtagtttccttgtgtgaatgccacggtctggtccagtccatcgtctgctgaatgttcagcggggaccttctgcaggtctccagagctctctctctgtgcagctctctccagggacctgcagctgcctgtcctccccagattcccgggtccgcctctgctcgtggagaccaccaggctccacctgactctcccgtcccagtcctgcagcgtagaaactccccaggcaggccgggcggagtggctcatgcctgtaatccgagcactttgggaggccgaggcgggcgsatcacgaggtcaggagatcaagaccatcctggctaaagcggtgaaaccccatct

SEQ ID NO: 827059 - DNA, 590 bp, Homo sapiens
ttaataaaacatcattatatagacacatgtgagagatgaaaatgtttgttgtagtaatagttggaaaaacaatcccctcccccgaaaaaaaatcccaaacagaaaacaacaatgtaactgcccagcaattraagacttgttgaataaatctacactctataaatctctcatacaactactaaaaaaaatgtgctggatcttcaccagtgaggtcaagaggaatttcggtaccatgttgttacacgagaaaagtaagacccaaagaggtgcatgagggaatcccatatttgcaaacaccaaatgaaaagaaacctctattcaggcgtgtagatatgtttgcatattacacagaaagaggctggggaggatgaacaccaagttgtttactgtggttattgttagaggaagggagagtacaaaacagaggtgtggtgtaaggcaaaacaaaacaaaaaaaaaaccagcggacttaaaaaacggtgtgtgtgctaatgcaaagcaggtcccaccaaagtattttctaaatggattttggattataagacttcatgtgactttgactttctttcttttaattgtatatatttctt

SEQ ID NO: 827060 - DNA, 590 bp, Homo sapiens
ttaataaaacatcattatatagacacatgtgagagatgaaaatgtttgttgtagtaatagttggaaaaacaatcccctcccccgaaaaaaaatcccaaacagaaaacaacaatgtaactgcccagcaattgaagacttgttgaataaatctacactctataaatctctcatacaactactaaaaaaaatgtgctggatcttcaccagtgaggtcaagaggaatttcggtaccatgttgttacacgagaaaagtaagacccaaagaggtgcatgagggaatcccatatttgcaaacaccaaatgaaaagaaacctctattcaggcgtgtagatatgtttgcatattacacagaaagaggctggggaggatgaacaccaagttgtttactgtggttattgttagaggaagggagagtacaaaacagaggtgtggtgtaaggcaaaacaaaacaaaaaaaaaaccagcggacttaaaaaacggtgtgtgtgctaatgcaaagcaggtcccmccaaagtattttctaaatggattttggattataagacttcatgtgactttgactttctttcttttaattgtatatatttctt

SEQ ID NO: 827061 - DNA, 484 bp, Homo sapiens
aagaggaaaaatcgagagcttggtcttggacatattaggtctgaagccctaagttgacacccaagtggcaccaagtgacaccaagtgaagatgtgatgcagacaggcaggcacatgactggagagcgtggtgcagagctatagccaacacaggtactcacaggtggtgaggggctaccggaggcatggctgcagggctctagaactctttactgtctcctccctgctctattccctttcaaatacactcacactcctctctgcccctagcgcctcgagcctgagcctgtgctggcccttaacttcccctgcaggtggctctggggccattgccagctctctgcacaaaatccacacataagtcctgggcccagaggccggcttcagttagctgacaaataggaaagcagccagtggactttctccaagggctsagccacactgggcatcttattttctgatagggcatttctgtctttcttttt

SEQ ID NO: 827062 - DNA, 421 bp, Homo sapiens
catggctgacccctggcactacctctcagctcctggtcatcctcaaagcatcccaggaggccggcttccagacctccactctacaggtaaagaaatgaagactgacggaggtcaagcttgctcgaggtccctcagccgggagtggcacagggaggatgtaagcccagaccgcctgtacttccaggacccatcttccttctctgctgtggccacctccacccagcccaggggacagcacaccccactcgagagcttccatctcctggcaccaaccagcaaaacagggcaaaaccctgaamgttcttggtgcattgcaactgggcgtttgcagtgactgctggcctgtgtggagagactaggggaagaatctcagagcagcagcttgtcggggaatgtggaggggaggactccagaagaggtg

SEQ ID NO: 827063 - DNA, 454 bp, Homo sapiens
ggagagactaggggaagaatctcagagcagcagcttgtcggggaatgtggaggggaggactccagaagaggtgaaagtcatgtgcgtgcctcaaccctggagtgggagctccccagraaggggagggggctgaggtcagtgactcctagatttgagcaggtattgctgactggtgggttggatcagaaatgatctgggactgtaatagcttcttgggctcctgcatatgatacagaaagtatgaaacagggccaggaatctgtattttttacctctcacccccattctgatgctcagccagggctggaatggagccctcctaagcctgtagttgccctgctgcataggtatatccaccagcaacttgccaggatgggtccagaaagcaggctcacgggctactcgagcccagaggtgggggcagtgcaatcacaggggctgggtggatggagaa

SEQ ID NO: 827064 - DNA, 667 bp, Homo sapiens
gaaacagtaggtgaaatgctgctatcagatagcatcacatgctacaaaaaatctttcatgaaaggaaggatcaatagatgcagtgaagttcactgttgtcttattttaagaaattgccacaaccacccaaacttttagctaccatcaccctgatccatcagcagccatcaatatcgtggcaagtccctatacctgcaaaaagatgacaacttactgaaggcttatataattgttagcattttttggaaataaagtatttttaattaagatatgtgaatttttagacatagtcttattacacatttattagacaatagtgtaagtataatttttatatgcactacaaaaccaaaaaaaaaagtgtggctcactttattcactttattgtggtggtctggaaccaaatctacagtatctccaaggtacacctgtactatgaatcacttataatttataattatatggaattggtcatttctcctctgtactgcttatgttgagattatgagatgataatcttatctgcacttttcttctgaggggagaataaaaacttgtacaacatgagcacacatgtactatccaaataaggatagttgatattgaaattgattccatgtgtaagtgtgygtcatgactaaaactgtaactgtattaagggcacaat

SEQ ID NO: 827065 - DNA, 628 bp, Homo sapiens
tttctctttctatgcagaagttcattagtttaattacgtgctactcgtcaatttttgtttttgttggaattgctttttgggacttagtcataaattctttgccaaagcagatgtctagaagagtatttcttaggcattcttctaggacttttacagtgtgaggtcatatggttaagtctttaatccaccttaagttaatttttatgtgtggtggttggtaggggtccaggttcattcttttgcatatggctagctagttatcccagcatcatgtagtgaatagggagtccttttaccattgcttatttttgtttactttgtcaaaggtcagctagttgtaggtgtatggctttatttctgggttttctattcttttccatcagtctatgtgtctgtttttgtaccagtaccatgctgttttggttatggtaactttgtagtatagtttgaagttgggtaatgtgctgcgctcctcaactttgttctttttgcttgggattgctttggctatttgggctctttttttggttgttccatatgaattttggaacagatttttttttttctaattctgtgagaaatgatgttggtagtttgagaggaatarcagtgaatctgcaaatagctt

SEQ ID NO: 827066 - DNA, 577 bp, Homo sapiens
ggtacatatgcagaatgtgcacgtttgttacataggttaaacatgtgcagtggtgatttgctgcacctatcaacycatcacctaggtattaagcccagcatgtttaaaagtcataaattttgaaaggttactagatataagatctatcaagataccaagatccactgtatttctgcctattggctacaactaattatgaaactaagttaaagacatgataccgttcacaataattaaaatgtcatacatgagagtatgtttaaataaaaatatataaaatctatacatggaaaactataaaacttaaaacagaaatgaaagaataacaaaataaataagagatatatcattttcgtagattagatgactcaatattataaaggtaaacaattttcccaaatttatcaatattttcaatgttatcctaacaaatatcagagttatgggtgtttttttttttttttaattgacgcactgattcaaaaattcacagggaagggcaaagggccaagaatagccaagacattctggaagaacaaagctgaaagttgtttggcagataatttctgcaataaag

SEQ ID NO: 827067 - DNA, 577 bp, Homo sapiens
ggtacatatgcagaatgtgcacgtttgttacataggttaaacatgtgcagtggtgatttgctgcacctatcaactcatcacctaggtattaagcccagcatgtttaaaagtcataaattttgaaaggttactagatataagatctatcaagataccaagatccactgtatttctgcctattggctacaactaattatgaaactaagttaaagacatgataccgttcacaataattaaaatgtcatacatgagagtatgtttaaataaaaatatataaaatctatacatggaaaactataaaacttaaaacagaaatgaaagaataacaaaataaataagagatatatcattttcgtagattagatgactcaatattataaaggtaaacaattttcccaaatttatcaatattttcaatgttatcctaacaaatatcagagttatgggtgtttttttttttttttaattgacgcactgattcaaaaattcacagggaagggcaaagggccaagaatagccaagacattctggaaraacaaagctgaaagttgtttggcagataatttctgcaataaag

SEQ ID NO: 827068 - DNA, 642 bp, Homo sapiens
atttcacgttatgtctcttggtttcgttacaggaatcttctttcagttcactaattgtatcagtttatcactgctgcataacaaaccattctgaaactcagcagcttaaaacaatgagtatgtattactattgctcatgaaccaagtcagcaggctgatccttgtgatctcagttagattcacttaggtgtctgaaggaagctgtgggttggctttgcagattttggctggttttagccaaaatgtctggggtctcaactaagatgactcagctcttctctgggtactctctcctcaggctagcctaggcatattctcatggtggttatggggctgtgatagagcaggaccattgaggccaagtctcaagctcctatcaggtttcattattatttttgtgaaccctacatatgttgcctttgcaaacatcacttcattaaaaagtataaaaatcatgttttacaatggtattggtagaaagattaatatgatccaagctacacttattactgtaacttcatcttttttctcctacttaattaattgttattattayttttggagatagggtctcactctgttgcccaggctggagtgcagtggcatgatcttggctcactgcagccttgaccttctgggttc

SEQ ID NO: 827069 - DNA, 615 bp, Homo sapiens
acaatttcacttggaatttamgcattataattacagagtcaccaggatttttaacacctagaatttccatcacctaaaaacacatccagcataagtaagatttttttcccataagaacactgtaagaaaaaaaatactgcatctgtgagaatattccaatgaagataatcctctattaagaaacaaataaattctcaattctttggaaatggtggaaatagttagctattataactgtttatgagagcagagaaatgactgaatcttagcttgtaagaaatttctccatgtacttatcaagccattaattttcttaataaattagaaatttccttttacaattaataaaaactggctttagttaccaaggtttcttttaagaaaggtaaattttggtgcttcatatttgaaatcaatttcaacaaaaaaaagacaagtttttttcacaacagttctctctaaggcaccctgatattggcatcagaaagaatgaggtcatgtgcttttaataaacccaaaagctatcaaatgtagaaaattatttggttatttcctttactggatacagaaccttatatgtattagtcatttaattatgagttcagaaatgaattt

SEQ ID NO: 827070 - DNA, 369 bp, Homo sapiens
tggtggagtgtaaattagttcaaccattgtggaaagcagtatggtgattcctcayagagctaaaagcagaactaccattcgacccagcaatcccattattgggtatatacccagaggaattctaccctaaagacacatgcacacgaatgttcattgcagcactgcgcacaatagcaaagacatggaatcaaactaaatgcccatcaatgacagattggataaagaaaatgtacgtatacaccatggaatactatgcagccataaaaaagaacaagatcatgtcttttgcaggtacatggatggagctggaggctattatccttagcaaactaatgcaggaacagaaagccaaatactgcatgttctcac

SEQ ID NO: 827071 - DNA, 535 bp, Homo sapiens
agcataaccatcaccttaagcatttctttgggtagtgaacattcaaaatcctctctttggccaggtacggtggctcatgcctgtgatccaagcactttgggaggccaaggcaggcggwtcacttgaggccaggagtttgagaccagcctagccaacaaaatacagaaatacaaaaattagccaggcatggtggtgcacgcctgtggctgaggcatgacaatcgcttgaacccaggaggtggaggttgcagtgagccaagattgtgtcattgcactccagcctgggcgactgagggagacactgtctcaaaaacaaaaacaaaaacaaacaaaaaaaatcctctcttctagctttttgaaaatattcactaaattactgttaaccatattcaccctacaatgccacagacactagaacttattcttcccatctagttgtaactttgtatctgttaaccaatctctccctatccttccctcccctctacctttccctaccaccccaataaccacaattctaattctttaagctcaac

SEQ ID NO: 827072 - DNA, 624 bp, Homo sapiens
tatgatttttcttcatacaaatttcttcatacaaatgttaaaccaaccttctgttcttagtataactgtacttggtcatggtgtatcattctttttacatattgctggatataatttgttaatatgtttgaggatttgtgcatctgatatcataaaggatattgtttaataattttcctgtaatgtctctttctggttttagtctcagggttgtcattgtctggttttagtatcaaggtaatgctggcctcataaaatgaggtaggtagtgctttcttctgttttctgaaagagctgctggtatgagttcttccataaatatttgatagaattcaccagtgaagacatctgggctgaactgttttagtttttttacttcttcttacatgaactttcatagatagtgtttttcaaggaatttgttcatcccatctaagttattgaatgcatgggcataaagttctttgtaatatgcttttattatctttttgaagtatgtggggtctacagcagagtcctatcccttcattgcygatatttctaatttgtgtcttctttctttatttcataatcattttggctagaggtgtatctggtttatatatcttttcaaaagattttctg

SEQ ID NO: 827073 - DNA, 625 bp, Homo sapiens
tgactttattaaagtattaagtagatacaccatctgagaatttaaaagtctgtctttttcattcaaatagttgttcatcctattttttttgttgttrtatgtattggctagagacttcaggataatgtcgaataatattaatgataatattgactttaatggtgtattagtcatgtctcttattttctgaattcgatgctttgacatccagggctttgttgtccgtggagggactgcccctctcaggataagctaattcctggacgtaagcaacttgcctgcatgtatgtcttcatatataaaccaaccaatccagagctcataccccattctttatcctttctttatcaccctctattcttctttatctatctttatccttctttatcactctcatgtcccaggccactatccgcctgccctaattgcctcagggccaggtagcagacaactagggacagcctctcctccccaagataccatgaaattattcaaactagccaatcctaagactggttgccctgccttgcttgttccttcctgtggaaagtacagtaaagagtcttgctcgtgctttcccccgtcccctctacctcctgactgaccttgatgtttccctgttttg

SEQ ID NO: 827074 - DNA, 559 bp, Homo sapiens
gtccctctcagcaaacacacatcttctgttcctttcctctgcctgctgcgctctctccagcatttgcaactgctgctctgtattcttaatgctctgtcaggaaarctatgttttcagggcataatctccgtggccataagtggtgacctatccccatgtggctaacttccaccacctggctaacttctactcatgaccttagaataaaagtcgccatctcagagtggccactttcaacgtcccctcttttttttttaaaacagtttcactctgtcgaccaggctggagtgcaatggcatgatcacagctcacagcagtgtagacttcccaggctccagcgatcctcccacctcagcctccaaagtagctgggaccacaagcgcatgcaccacgcctggctaagttttgtatttttttggagatgagagttgccgaggctgatcgcgaactcttgggctcaagagatctacctgcctgagcttcccaaaatgctgggatttcaggcgtgagccaccgtgcctgaccagcattccctcctctttgtaatgtacagagtggg

SEQ ID NO: 827075 - DNA, 559 bp, Homo sapiens
gtccctctcagcaaacacacatcttctgttcctttcctctgcctgctgcgctctctccagcatttgcaactgctgctctgtattcttaatgctctgtcaggaaagctatgttttcarggcataatctccgtggccataagtggtgacctatccccatgtggctaacttccaccacctggctaacttctactcatgaccttagaataaaagtcgccatctcagagtggccactttcaacgtcccctcttttttttttaaaacagtttcactctgtcgaccaggctggagtgcaatggcatgatcacagctcacagcagtgtagacttcccaggctccagcgatcctcccacctcagcctccaaagtagctgggaccacaagcgcatgcaccacgcctggctaagttttgtatttttttggagatgagagttgccgaggctgatcgcgaactcttgggctcaagagatctacctgcctgagcttcccaaaatgctgggatttcaggcgtgagccaccgtgcctgaccagcattccctcctctttgtaatgtacagagtggg

SEQ ID NO: 827076 - DNA, 550 bp, Homo sapiens
attgcattttatcctgtgtgatgaaacacaatttgcaatttttgttcaattctaggtatcttcattttaagtggtaccttgactaatcatagctcycctaagaagggtataaggactttaaaagttctggaagtcatctgataactattgcagtagacttctagttcactctgaatcttcttaaatgctgcttcttctctaaatactatcaaatgcatttgtacagcgggggagattttctctaactgtgattggtagcttattcatttgcacgtgtacacagtgcttaccacttgttatcccaattatgagattctgagattatgaatgtttgcataaactggcagaagaaaataaaagaaggaaatttacagtttaaaaccaaaatgctcacatttttacaagcctatttaaagaggttctataaccaaagtaatacatttgctcatcataaaggcacagctataaaccaatgtactttattaaacccttaccttaaataaattttttaaaaaataaataaagcaaaaataagaaaacaggaaagaaa

SEQ ID NO: 827077 - DNA, 563 bp, Homo sapiens
ttatctctcccccctcctcctaccctgccaaaaggccccggtrtgtgatgttcccctccctgtgttcatgtgttctcactgttcaactcccacttatgagtgagaacatgcggtatttggttttctgttcttgtgatagtttgctgagaatgatggtttccagcttcatccatgtccctccaaaggacatgaactcatccttttttatggctgcataatattccatggtgtatatgtgccacattttctttatccagtttatcattgatggacatttgggttggttccaagtctttgctattgtgaatagtgccacaataaacatacgtgtgcatgtgtgtttatagtaaaatgatttataatcttttgggtatatacccagtaatgggattgctgagtcaagtggtatttctagttctagatccttgaggaatcgccacactgtcttccacaatggttgaactaatttacactcccaccaacagtgtaaaagtgtccctatttctccatatcctttccaacatctgttgtttcctgacttttaaatgatcgccattctaact

SEQ ID NO: 827078 - DNA, 630 bp, Homo sapiens
tttatatagtttataaacgtaaatccctctctattcctcagaagtaaaattctagtatttgcagatttagtgttgtataaaacttttttgtagttgccagaattccagtttgcatataagcaaagcttgagtcactcctattaaggataattagaaaaagaaggagctggatatagagaaggggaaaagagagaagcatgaaaacagtagaaatattttttcagtgccacattataaaaacaaataaattaaaatgtaatatttcttcccccaaacatgaagatttgtagctctaaaaactcctgagctgacttttggttctggtcatgatgaactaagaagtatcagacttaacacttccaaaataataagcacaaaactggacaaaatgcatgaagcagctgttttcagtcatagacaacagagagcaaagggttgtgatttttagaagaaaggaaacagtacacttgccatgacaggcttggaaggtacccgggggcascttccacactgtgcaagaggaaagtggaacccaaacagatagcagtggtctcactgtgctaaggaaacagcaatttggttcaaggctgttaaggcagctagaatttgggggttagaatgctatagagg

SEQ ID NO: 827079 - DNA, 616 bp, Homo sapiens
acagacagtgtatgagttcttaaagctctggtagctttaattccaaaaaaacactattattaataatttaatatgcatgaggcaatatattaggccattttaatttttaattctttaattattatggaagcyaaacattttcccaagtgtttgttcactatttgtatttttccttgtgcaaaccatctgttcatattctttaaccatctgtccagtcagacctgaaattggccatatagataatattaatttccctaatatatataatgttaaatgtttactgttatgtgtattacaatactctcgtatttttatcattttaatttttctaatttgagagtaatcattttttgttcttcatcttgtggtatgtatgtatgtacttaaatttcattcacttgaacctgtcaaccttatcatttgttcagtgctaactccttttattgcttttattgtccaaaaattatttttatttcaaaatggatgtatgcagtattgttttatttcgtgtgtgtgtgtgtgtgtgtgtttgtgtatgtgtggtagggaagtttaaactttccctctgaagtgagactgctgaaataaactgacaatagagtagcagaagaaaaag

SEQ ID NO: 827080 - DNA, 554 bp, Homo sapiens
tcttggcgggttgcggtggctcacacctgttatcccaacactgtgggaggctgaggcaggcaaatcacttgaggtcaggaattcgagaccagtctggccaacatggtgaaatcccatctctacaaaaaatacaaaaatcatcagggcctggtggcatatgcctgtaatcccagctacttgggaggctgagcaggagaactgcttgagcccgggaagcagaggatgcagtgagccgataccatgccactacattctagcctgggcaacagagcaagactctgtgtttaaaaaaagaaagaaagaaagaaactagttctcagtgctgcaatactaaacaaacaggaaagtcaaatttttactcagagttagtatttcctcaaaaaacagattaccgataaattgtttccttaaaacatgcctgtaatcttccctaaatgaatctaagagataaatatgagctataaattacacaaaaatttggagattattttcagggaagaaaraatgatcaggtagttatccttatttttaattacgttgatatttgcaaataa

SEQ ID NO: 827081 - DNA, 599 bp, Homo sapiens
gttttttgaaaagacaaaatcagtaaacctttagctagacaaagaaaragatgactcaaataaataaaatccacattgaaaagaagacattacaacctataccacagaaatacaaaggataatgagaaaatattatgaaaaattatatgccaacaaattggataacctagaagaaatggataaattcctagatgtatacaacctaccaagactgacttatgaagaaatagaaaatctgagcagattaatagtgagtgaggaaattgtatcaataatgaaaagtctctatcaaagaaaagcccaggactaaatgggggaaaagttgaaagcttttttttctaaggtctggaacaagacaaagatgcccactttcaccacttctgttcaacataatactagaagtgctagccagagaatttggcaagaaaaagaaataaaaggcatccaaattggaaaagaagtcatcaaattgtctcagtttgtagatgacatgatcctatatataaaaatacctttaaaagtttactaaaaaactgttaaaactaatacattcagtaaatttgcaggatacaaaatcagcatacaaaaatcagtatttc

SEQ ID NO: 827082 - DNA, 605 bp, Homo sapiens
tttacacggtgagctctgtgagggcattttagagtgaatcgacttgtactaaatgaattatgcagttgtttcccctttasaggtggagatgcatagagctgatctctggtttattcctgaacttgcattagactccaagcttttcttagtcatcatttttttttttttagagacagggtttcactatattgttcaggctagtcttgaacacctgagctcaagcaattctcctatctcagcctctggtgtaggctgggactccaggcacatgccaccacacctgactttagtcatctttgaatccctccacctagaacaatgctcagcctctagtaggcttgtagggagaaatggttttcaaaattacttaaattaatgagtaaataaatacatagaaatgagtaaatcgtgagtaggtgagtaaatgaatagtgaataggcacacaaaaatgaaagggtagaatcatattggtaaaggagtcagcgaatcaatgaacaggacatttcaagacctgtgtaaggacaatagactactgatatgaacaggtccatgacaatagactactaatatgaaactggtccacttcagcttccttcttaggtca

SEQ ID NO: 827083 - DNA, 557 bp, Homo sapiens
  misc_feature 413: n = A,T,C or G
aaatccattctatagacatctgccctcatgttgaaatcwcacacacacacacacacacacacacacacacacacacacacaattattttgttgtgatattgtttggggtagcccaaaactagaaaaagcctaaataataaagaactgattgactcctgtaatcccagcactttgggaggccgaggcgggtggatcatgaggtcaacagatcgagaccatcttgaccaacatggtgaaaccccatctctactaaaaatacaaaaactagctggtgtggtggcacttgcctgtagtcccagctactcgggaggctaaggcaggagaatcgcttaaacccgggaggcggaggttgccgtgagcagagatcacgccactgcactccagcctggcaacaaagcaagactccatctcanaaaaaaaaaaaaaaaaaaaaaaaaggacctgattgactaatttacagtaacttatgaaatatcatgtagccactaagaggaatgagataaatctatgtacacctacccagaaagaggtataagagacatttctaagagaaaaaa

SEQ ID NO: 827084 - DNA, 427 bp, Homo sapiens
gcaccccaccactttgctgggttcacggttaggcctgctcacccccatttcctgtaatctacctttttcccccaagttttgccagtcctggcatctctccygtgctattcgctttctctttggggttgggaaaaaccacctaatctatcacagactctatcacagcgaatcattcagggaggttaacccagctcctgggctcctgacaaaagaagcaagtcagaatcagttctgcagctccagctccacgcggtgccacctctgctttgcccatctccagaaatgatagttgtccaatagtagcgccatactccgatgctgtgcattatttctgaatttgtggtatacagagtcatacaaaaataaaggctattgactggttggcaccccttctcagaataatgactaagcaagcatgctgttagct

SEQ ID NO: 827085 - DNA, 582 bp, Homo sapiens
tttgtaattagcaaaatcaattaacaaactgctaattactcaacaaatactagatacaggacactgtacaagytacggggacaacaaggaagtaaaaaattataaaaaagaaaaatcctatcctctaggagcttacaatctacacaagggcacaaaaaatattcagcaatacttttctgtcatttttagttcacaatcatttgcagactaaaatccacttaaatgtcaatatttttttcaaaagggaaaatgaatgcgtacataaagtaactttgctgtacataatcctaatgctcctttccaaacattttcctatataaatataatcatcttgcaagaaatatgtcaactcaattgacacaattccagtttataatttgttttttgtattactttttaatcatatcgcagaactgtaatttataaaatttctaacttttggctcaatgaaatccatgtatactatgactgaactgcaaattttgagttgctgaggttcacaggggtttaactgtcttattttaataagtattgacgggtatcatttgacatctgctttcaattaaattaaaataacccaac

SEQ ID NO: 827086 - DNA, 455 bp, Homo sapiens
gatttctaaatgtagtatatattaaatatttaagtactgtctataaatgtaaccaaattctgttacacattctgcaataagttaaaaaagggaaaatttcagtaatcataggatgatgttagtttctataaygtgtcagtttctcttgagcaattccaaacaccttcaattgcaaactcatgaggatattcttgatgtttataaaacttattactaagcacaaaattaatgcatgggtttggttacttcaccatcctttcaccattcttattcttttttttcctttttttttagatggagtctcgtgctgtcgcccaggcttgcagtggcgcgactgcagcctcggctcactatagcctctgcctcccggttcaaatgattctcccacctcagcctcccaagtagctgggattacaggtggctgtcaccaatcctagctaattcttgtattttta

SEQ ID NO: 827087 - DNA, 597 bp, Homo sapiens
ataaaacattttcactacctggaaaagaaacatggtactcagccatggccgctcaatctctggatcccccactctagtcctaggaaaccactaatctactttctgtccctatagatttgctgatactggacatttcatataaatggaatcacacaatacaaggccttttgtcactggctttttcactaacatgatcttttcagggttatccaacatagcacagatcagtattttattttcattgccaaatcatcttccatcctaaggttataccacatttcctttatctatccattcattatctgctgagaatttgggttatttccactatttggctattataaatattgctgcttatgaacatgtttgtacaagtttttgtatgaacctgtgtttcctgtctctggactacacacctaggagtaagtcatttatttaaccacatgggggctgcaaacacctgcatacatggcggggctctctgtccccggcatcagtcctcactgacttgactattttaacttcatgacgggtgttgcgactctctctgctttattctccttatcaataktatcttgattatttttaaccttttac

SEQ ID NO: 827088 - DNA, 526 bp, Homo sapiens
atcgagttccagcagcagcatctttcaggacgttattcacagtgcagctgctagaaactstatttcattgatctgattcggattcctcagatatgttgtttccacaaacttggacttagccagttaggtcatcttcccaataaaaaaactctcccttgaaacaagctaactccgttgtattcctacagagtatctggagaagtgttcaaatgaactgagattatggtgagacaagtaaggttcctcgggggcaaaatttagggaactgcacgctctcactgcagctccagcattgaataccagaaagagaatactcaagttcaaaggccttgttgtagacatgaactggtgttatttctgaactatttgtggcaacgtacaggtgtgccacatgcctcgggactaggctgtagcaatccacctaaatcccatgaggatttgcacactggagaggatctttgattattaatcttgcttcagggattggatttggaacttcaaaagcactttcctcccacagaaaatc

SEQ ID NO: 827089 - DNA, 368 bp, Homo sapiens
gatccaaagtcacctgtcagaagagtcgcacatcctccasgaacaggcctactttcttagctttgccacactcagcattgactgagatcagcctggggaactgtggtgtcagtagaaatgctgtgacatgtttcagtgctcagtggctgaaggctcagtcagttatgctccctgagcttggaggtaggttttgtagtgtgtttctataggtgtcacagacaaaattgtgggtgattaaaaaatatcccattttttggtattttattaattatctatatgtaacctgcatttaatatttgagggaagaagtaaaataaataattaaaaatatttccttttgcttgggtagcattaactctttgaaactt

SEQ ID NO: 827090 - DNA, 644 bp, Homo sapiens
acctctgcctttcgggttcaagtgattctcctgcctcagtctcccaagtagctaagattacaggcacatgtcaccasgcccagctaatttttgtatttttagtagagacggggtttcgccatgttggccaggcggtctcacactcatgacctcaggtgatctgctcgccttggcctcccaaattgctgggattaccggcttgagccaccacgcccagccaatacaactaattatatttaaaattaacgattcatttggtaaatgaccccataaaagacagtttacaaacatcaagcagacatttttgagatttataaatgataaagatatggtatctacaatatgttaaaatgtttacgaatcaataataatttttaaaaaccttgcagaaactcagtatacggtggtagtggaaatagacctaggagtgagggtagaggtacttatcattggcggcggcagcaatcatttttatgtttattttgcatctcaagtgatagtagtccagagaggtctcgctcaaaatcaaacagcttgccaaatctaaagtacctgtttttgttaaatcccaaatccagtttttgctgttgttgttgtcgttttactttaagttctgggatacatgtgcagaatgtgcaagtttg

SEQ ID NO: 827091 - DNA, 647 bp, Homo sapiens
attcatgtgatgcatcagctccccctttgctttctgccataattgtaaggttgytgaggccctcaccagaagcagatgccagtaccatgcttcttgtacagcctgcagaaccatgagccacagtaaacttcttttctttataaattacccagcctctggggttcctttatatcaatgcaaatggactaatacaaaccctcatggatgactttgaggggctcaaaacttaagtgaaggaaatcactgaagatgtaataaaaatagcaggagaactagaattagaagtagagtctgaagatgtgactgaattgctgcaatctcataataaaacttcaatgaatgagaagttgcttcttatggaagagcaaagaaagtgatatactgagatgggaactactgctggtgaaaatgctatgaacattgttgaaatgatgacaaaggatttcgaatattacataaacgtatttgataaagcagtggcagggtttgacatagttcacttcagttttgaaggttctgtggataaagggctaccaaacacacactgcatgcctgtatcaaaatgtctcctgtacctcataaatactaaataccttctatgtgcccataaatttgtttaaatgctatcaaagagcatgacatgctac

SEQ ID NO: 827092 - DNA, 647 bp, Homo sapiens
attcatgtgatgcatcagctccccctttgctttctgccataattgtaaggttgttgaggccctcaccagaagcagatgccagtaccatgcttcttgtacagcctgcagaaccatgagccacagtaaacttcttttctttataaattacccagcctctggggttcctttatatcaatgcaaatggactaatacaaaccctcatggatgactttgaggggctcaaaacttaagtgaaggaaatcactgaagatgtaataaaaatagcaggagaactagaattagaagtagagtctgaagatgtgactgaattgctgcaatctcataataaaacttcaatgaatgagaagttgcttcttatggaagagcaaagaaagtgatatactgagatgggaactactgctggtgaaaatgctatgaacattgttgaaatgatgacaaaggatttcgaatattacataaacgtatttgataaagcagtggcagggtttgacatagttcacttcagttttgaaggttctgtggataaagggctaccaaacacacactgcatgcctgtatcaaaatgtctcctgtacctcayaaatactaaataccttctatgtgcccataaatttgtttaaatgctatcaaagagcatgacatgctac

SEQ ID NO: 827093 - DNA, 630 bp, Homo sapiens
tttcaaacaggttcttaaataacaatttagctgagtataaactaggttgacagttacttttccttagcccattaaatacattctttcgctactttctcctctctatttttgctattgaaaagttttttgtttttgtctaatagttgtggctttcttagttaagtaacttctgtgtttgcttttaagattttaagctccacagcttcactgtgatgtatttaggtgtagatttatttttatttatccttcttgaaaatgatgtggttcttgatttgatgaatttatacattttgccacttctggaaaattattacaagaattttcaagactatatctctcccattttttctgttctgttcttttgtactgcctattaggggtgcagggaccttctaattctaccttccatgtttcttaaatcttaatcaatttccctttctccatgtcacaatttcccagtgcaatacgctgtctaatatccccaggtagagctttcagttcatcarttatttagctgcttaatctgttctttgtcaatttaaaactttttatctgctattgtttttcctattctcctttttccaatgtgcctgcatgtttctcttttttttcatattttcttattccttt

SEQ ID NO: 827094 - DNA, 561 bp, Homo sapiens
ctccgaggagtcctgtcttaaagacttccttgagctgacttccaccggtggagggagagcttcagggtacctgctggtatctcaagacccctcttcagatccgattttggacccctctgggtgaagaaggataggctcaccacatctgctgagaaaggaagggcctcgttgcaggacagaatgatcacatgggcctcaagccatggtgtcagcagaaaaatcactgacccaagagccctcttcctccctcctcctttgaaagagcagtcacctgccccacttgtaaaagctctggggcccttgcaagctgatacctctttccaggacacatgcaaacagggacaagggcgattccaaagtggagcaaatgccaacacgcatggcactggcatatcccagagcagatggtgtgaatgtttgttaccaaaggcatatggggcaatggygaaacacaagatggtgttcaggcatgtgccagatggaaggggggcacaagtgacctttccatcaatgtcaaggaaaatcaaagaacaccaggatccaggagggggctaaaagatt

SEQ ID NO: 827095 - DNA, 566 bp, Homo sapiens
ggcgcctcgcgcatgcgcattggtggggcygactcgcgctccactcctggcaatcaggctgcgtccccttgaaacaatggctgctgcgccgctgcaggcgcgctcctgctgtaacctcggccgcggctggatccgggatccagtagcggcagcgtaggagaggggtccgccggtgacctagggccaaaccctcaggagtcctgtcttcaggacctccttgagccgacttccaccagtgaagagagagctcaagggcgcctgctggggtctcaggacgcctcttcggatccgaccttggacccctccaggtgaaaaaggatgggctcaccacatccgctgaccaggcagggcctcgctgcagcacagaatgttcccatgggcctcaagacgtagtgtcagctgaaaattcactgacccatgagccctctgcctccctcctcctttggaagagcagtggcctgccccgcttctaaaagccctggggctcctgcaagctgatactgctttccaggacacatgcaaacagggacggggcgattccgaggtggaaccaaggcgaccacgcg

SEQ ID NO: 827096 - DNA, 634 bp, Homo sapiens
tttgattcagaaggctggaaatcctctttttgtagattatatgaaaggacattacaaagctcattgaggcctatagtgaaaagctaaatatcctgcaatgaaaactagaaacaggctatgtgtaaaaaggtmctgtgatgtgtggaatcatctctcagagttaaacctttgtttttattcagcagattggaaacactctttttgtagaatatacaatgggacattttggagcccataaacaagtacattgaaacaccgatatcctgcaataaaaactaaagacaagctacctctgaaaatgttttgcattgtgtggattaatctcacagagttaaacattctttttcattcagcagattggaaattctctctttgtagaatctactaaaggccattttgaagcccatttaggcctacagtgaaagaccaaatatcccatgataaaaactagaaacaagctatctgcaaaaatgttttgtgatgtgtgaatttatctcacaaagttaaacctttgttttaatccagcagtttggaaaactctttttgtagaatctatgaagaaacattttaaagcatattgaagccaatagtgaaaaaaaagtggaaataaaaactagaaacaggctatctgtga

SEQ ID NO: 827097 - DNA, 531 bp, Homo sapiens
atgtaggaacccaggccatgggaactatctcagcctaatgctctcccattaagttattttacagcttctstctgtatcagggtaagtgggggtcttccccacaagtgttcttaccaccctgtttccctcagcaaaatgaaactgtcccttttgcctctgtaggcaatcttctgaacaaggctttcctaatatcttatatcatcttattttatctcatccttttctctgtaccttgtttacacgcttctggaacacttgtgtatcttgcaaccatcccctgcattatttaggcaatcccaagagaagacctctaggatggattggtagagaactgctggcatattgagctctctctctttgtatctggaactttcataattaccttagttctccatgccaattgtgcaattatctttgtcctccacttcaaaatacatttacctctgacagaagctgagtacataaaagggaccttgtccagtggtacttatgaggcaggagacgtaatatatttaaaattataaactaaaa

SEQ ID NO: 827098 - DNA, 452 bp, Homo sapiens
tatcttataatacaataaaaatttgccaaaactaagaaattgattttggcacattactattgactaaattccaaattttatttggatttcactagtttttccatgartgacttctttctactttatttttaatttttttttctgagacggagtctcgctctgtcgccctggctggagtggagttcagtggtgcaatctcagctcactgcaacctctgcctcctgggttcaagcaattctcctgcctcagcttcctgagtagataggattataggcgtgtgccaccatgcctggctaatttttgtatttttagtagagatggggtttcaccatgttggcccggctggtctccaactcctgaactcgtgatccgcccatcttggcctcccaaagtgctgggattacaggtgtgagccactatgctcagcctgaatgacttcttcctattccagg

SEQ ID NO: 827099 - DNA, 540 bp, Homo sapiens
acagatctccaagttattttaagagaaaacagaaatgtgtaggacaatgtgtatctaacttattaarctggatattgccaaattataattgtatatatgtatgggctataaagtggtgctatgatatatgtatacaatgtggcatgattgaatcaagctaattaacatatcatcatctcaaataccatttattcttcctgtctaactgaaactttgtaccctttgaccagcatctgcctgttagctcccctccccagcttctggtaaccaccattctgctctctgcttctatgatttggatcatgttagattccacatataagcaataatacgtggtatttgtctttctgtgcctagcttatttcatttaacataaggtcctctaatttcattcaagttgtcgcaaatgataggatttccctcttttcaaagtctgaatagactattcacaaaaccaatatgtggaaacaacctaaatattcaccaacagatgaatggacttaaaaaatgtgacatatgtatacacagtaatattattca

SEQ ID NO: 827100 - DNA, 533 bp, Homo sapiens
ggaagagcaaagggatgttttacatggcggcaggcaagagagcttgtgcagagtcactcccctgtataaaaccatcagatctcgtgagacttattcattatcaygagaacagcaggggaaaaacctgcccccatgactcacttacctcccactgggtccatggcatgacacgtggggattattacaattcaaggtgaaatttgtaggggggcacacagagccaaaccatgtcaccagcctcgggatacacccaccacataaaatgatcaaagtttgttatcatagcactgcttcatttgggggagactatttaaaagaaattggcaaaagaaagggtgtgtgagaaaagaaaaataaaaagtatggtatactgtagactgttgagattttctgaggacatgtctagagattttcttccttcccaaattgttcctttcactccagcatataattttccctaaaagaaaaatgcagtatgagtagagaataacaaaagtatattgagattcagatgttgatattaagttatgaga

SEQ ID NO: 827101 - DNA, 517 bp, Homo sapiens
gatatttggattgtttcctatgtggagcttctgtgaatattctagatgtcwttcatttttgttgggcatgttttcatttctcttgggtaaatacctaggagtgaaatggctagatcctaaggtagatgtatgcttaactttttaagcaattacccaagtgttttctaaagttgcattcccgtcagcagtatataaggtccccttttgccacatccttgccaacagttagcatatagtgtctttgtagttttagctaatgcaataggtgcttagcactatagtttaaaacatgtatctttatttatttatttatttatttatttatttatttattttttgagatggagtctcactctgtcacccaggctggagtgcagtggcgcgatctcggctcactgcaaactctgcctcctgggttcaagagattctcctgcctcagcctcccaagtagttgggattacaggtgcccgccaccaggcccagctaatttttttttgtatttttagtacagacgggg

SEQ ID NO: 827102 - DNA, 623 bp, Homo sapiens
ggggtttcaccttgttggccaggatggtctcgatctcgtgacctcatgatccacccgcctcrgcctcccaaagtgctgggattacaggcgtgagccaccgcgcccggcccaatgtttctttattgattttctgtctggatgaactgtctaatgctgaaagtagggtgctgaaaactccagctattattgcattggggtctatctctctctttagctctaataatatttgctttgcatatgtgggtgctccagtgttgtgtgcatatatatttaaactgttatatcatcttgttgaattggctcctttatcattatataatgaccttctttgtctatttttatagtttttgtttttaaatctatttcgtctaagtatagctatttctgttttgtttttgttttgtgttcgtttgtttagttgtttggtttgtttccatttccatggaataactttttccatccctttattttcagtctatatttgtctttataggtaaaatgtgtttctataggcaacaaaccactgcgtcttgttttttaaatccattcagccactatacatcttttgattgaagagtttagttcttttatattcgatgttattgataagaggtaaggactta

SEQ ID NO: 827103 - DNA, 615 bp, Homo sapiens
acacttagaagaaccaatagccgtgtaggtgtgttgtcaactgttttgttattgtctcccaactattgctaaggtttttcagaacctcacgttctcagcccagtattttggaaaattctttatgaagagtatgtatggtactggaatttacataaagtcttacattaattacgagtcttacagctgtcgatcctaatgctgtctctacagtgtgaatccctagaagtgatgaagagacacagcagttaatcaagataggagggattggtgataaccagcccagtctcagcaatttcagtaaaaatccagtaccatccccacattgtgcaaaaatgtggcgttaatgacctgttcagcaggtgttacttctctcctttcctaggatggcctgctttcttcctttgtgaaactttggctcaaaaaacatgccactttaggatgtgagggatggtaaaataactatagtcatttcctgcaacaagcttgtaaatgaaaactattaggaatattcaaaaataaatgtattgctatgctgcacactgacttttttgttacacagtttgctaggtakataggtagcaacaaatctacaatttagtatcaaccctgttcttc

SEQ ID NO: 827104 - DNA, 439 bp, Homo sapiens
gatggttccggaaacaagtgttgacagaagtkccattaggaactttgtatctatatcattctttcctggccttcgtgaattctcctcctggggaagtgaaggaaactgttctcacgcaagtttcccggaggagaaacaattatgaataaaagtagccactaaggacctcccttttaaactcagagcacctgcttacattccctactcaaagaaagggagtggcagaaagacattcaaaggtctccacaatcggtttagtctgttatttgtctttgtaatagctgatactggaagctgttataacccttcctgagggaaacttgctgttctatctctcccttggtccggtgccatcttttacctgtgccttggtggtcctgggaatggggaaaagtctccatcatctcaggatcctcctgtctccacagaaactcccccc

SEQ ID NO: 827105 - DNA, 637 bp, Homo sapiens
gtctatatttaaatctatatttatttataaatctacatttatctgtctgtctctttctcttagraaatatctctggggatggctcacaaatggcaatttttaaaaactcctcagatggttcttttgtatagccaggattaggacctatattaataaataatatattaataaataatatagatcctaagcctatatataatatcatattatgttattcataaataataaattgggatctatattaaaaatcatagaattttactcaagaatgaaacatgaagccttagaccattgaaaatatagtagccacttttccagaagacaaaattgattattgtaaaggtgtagatttttttcacaaactattttgtaatttatatagcaatccaatcaaaataccattttttgacaatttggcaaatgacaaatgattctaaagtttttaagagtaaatagttatatttctatatgctattttgaaagaatttcagtaagaagaataaacgtttacacagatacatatatgtgtacatgacaattagcataatctttacatatatgtgtgtgtatatatatctatgactatataatatcttgtgggatacattgcagtccattaactgatcaaataattatt

SEQ ID NO: 827106 - DNA, 588 bp, Homo sapiens
cagagctctttctctcttacatgtcagacacagtgataaggcagttatctgcaagtcagaaagagagctgtcaccagaacccaaattggctrtcagcttgatctgggacttcccaacctcaggaactgtgagaaataaatttctgttatttaagctactcagtatggcattttttaaaatggtaatctgaacagactaatacatcaacatagaaaggagttccattggttatttgttccattggttatttattctctatttttggcctgacccagccagttgtgttgtttcatctgcatgaatgtgtttaacccccttatgaaccaaggtgatggttccttatagaatagaaccctctgccaaattacatttggatcttcagcacttcattaaatgttccccaagagatagtttaccacttattattactctttgtttacaaaatgtcagtcatttaatttatatttaacaaataattgtttaacatggaagtttattaatattccaaattctcaactaagttttaaatattgacttaccaatatccattgatttccaattttgtagttaaaataaccaataagaaat

SEQ ID NO: 827107 - DNA, 601 bp, Homo sapiens
atcatttgtcataacatatagttaaatttatacatgagtgaccagggaataatgtcagttttctgttaaattactggtaagggactccaaaagggaaggagtggcctctcatattatctttattagcaaccaccctccagcccacccttccacacatacctagtgtcatatcctaagtgttatgtatgtatgtatggcttgtgtttgtgtggaggtgtacaagcatgaatgagtctatgcacaaatacaagccatataacgttgtgcctgtggtgggcagagagtttaagcatgctccaattttagttgttgagacgtttgaaattatgtgcaactcatggacaatttcaatttgataactcgttaaaaataatgttagtttttaaaaagatacctattctcttgcctcaattgcatttctgcccccgcccccatatagtgcaccacttatgaagagaggtgatgaaaaaccttcatacaggattattcacttkatagaattgttgtcatttaacaaagcactgctacacgctttttcttcagtaagtaactaacttcaaggagtattgcctctattaactctctgaattgtgggatcctt

SEQ ID NO: 827108 - DNA, 635 bp, Homo sapiens
tagataagaaaaatgcaaaagttataaattttctctagatatttcaagagaattaacacagattttagtccctccagaaatatcaccccaggttgtaaaatcccctcagtactatttatctttctctactcagaaatgagttcagagtagagcaaaccacaggtaaactcacagggtttcagtgtgatggtgccataaggtgaggaatagtaagggcaacgttcaggaactaggtcaagaatattagtgagggccccaccaattcaaatttagggtaacttgtatgaagtccagaagcaagaactacacaggctgcctttatgagcagtttggttatacaaggtctgggccggcgcccattctttgtggctatccaggcaagccatctcacctatttaacgtagccgggtggaccaaggaaagcactgacaactgggtgcttttcattgctaatcctggccctgactcaccactccgtgacctctcttggtgtgtttcctcagctggaaagtgaagataataataatgacctatttaacaaggggtgttgtgtggattgccagttaataacatgtttcaaaasacaaggcagcattgagcttgtaaatactaatagaaagtttctccacactaca

SEQ ID NO: 827109 - DNA, 500 bp, Homo sapiens
aacgtcccctctagagcatgggccgaggccggggtggggtctggctccagccaaccgcacacagcctacgcgccgttgctgagcaacgcttgcccgctgaatcccgaggttttagctctagtcaagtgccaaaagagcccaatgtgtgttcgggtttcaattctccagtcagcgtcagagttggaggcctcaattttaaagaaggcaaagccatggtcatcgttgcgggtaaggaacaacgcagaagcctcttccacccccaaatttaatgcaacagcaggcggaagacctgcagggtcccgttcagaaaaagggccgtcagactgtcgagcctaagaataaaaagaccctgtttctcttagatacccggttagcaaggcaacatcgctggcctcctgycctggacacttatcaccccggtgctgctgcggccgggtttagccggcccagcgaggaaggaagccgaaagagccaggtttttgatgagggggagcgatgtc

SEQ ID NO: 827110 - DNA, 560 bp, Homo sapiens
cacagcttcggagcactgccctgaatcctgtcttctccctcaggactgccctttcctggccacaccaagtttggcacctctccagaaagttggcagggagcaagtggcagwcagcacccctctctccctagcctattaacacacagagccgccaatggcagggcagcatggccagaagtcaccttatatattgtagggacagcaatagaactgtccctgcctgaagggttcagaagcccatgttggcctgggcttctcctgctgtaatggcttgtacatcagtgacatggccgatgcccttggtgacaccctcccggaacagcagtttggcgcccaccttcaggtactctgggtgtttcaggaagcggaaacgtaccactgccttctcgcctgtccgcagtttgtcctgcagcaaataagtggtcactcccctggccagtgccttctgtcccattctctgccagccgtggctctccaccctccagaggcctatcaggccgctacccaccctaagtggggttttattcccattgtgggatcaaggagttctctgccagtct

SEQ ID NO: 827111 - DNA, 632 bp, Homo sapiens
tcagaaacgtttgggaagtgctgtgtaatgytaactgttcgtgcataatgttttcccatttagtaagtgctgttgcatgcgttttctgtgattctcaccacagcccaatgcaaaaaataaaaaaaggatttacgcttttttttttttttttttttttttttgagatggagtctcactctattgcccaggctggagtgcagtggtgcaatctcggttcactgcaacttccacctcccagattcaagtgattctcctgcctcagcctcccgagtagctgggattacaggcacccaccaccacacccagctaagttttgtatttttagtggagatggggtttcaccatgttggctaggctgctcttgaactcttgacctcaagtgatccacccgcctcggcctcccaaagtgctgggattacaggcatgagtcaccgcgcctggcctttaccctttccaatggaggagaaaattgaggctcaggcaggctgtttggtctgaggtccttcttctaggtgggaagagggtgtagagagactgtttccatgaggctgtgctgcctttgttgggcagcgtgattctgcgtctgtgcctctgggtgtgcgctggatccgtaggtctcatttgagagatca

SEQ ID NO: 827112 - DNA, 678 bp, Homo sapiens
cgtatgcagtcacgtgcgtgccattattttcatgtggaggtcaaacagtcagaaacgtttgggaagtgctgtgtaatgttaactgttcgtgcataatgttttcccatttagtaagtgctgttgcatgygttttctgtgattctcaccacagcccaatgcaaaaaataaaaaaaggatttacgcttttttttttttttttttttttttttgagatggagtctcactctattgcccaggctggagtgcagtggtgcaatctcggttcactgcaacttccacctcccagattcaagtgattctcctgcctcagcctcccgagtagctgggattacaggcacccaccaccacacccagctaagttttgtatttttagtggagatggggtttcaccatgttggctaggctgctcttgaactcttgacctcaagtgatccacccgcctcggcctcccaaagtgctgggattacaggcatgagtcaccgcgcctggcctttaccctttccaatggaggagaaaattgaggctcaggcaggctgtttggtctgaggtccttcttctaggtgggaagagggtgtagagagactgtttccatgaggctgtgctgcctttgttgggcagcgtgattctgcgtctgtgcctctgggtgtgcgctggatccgtaggtctcatttgagagat

SEQ ID NO: 827113 - DNA, 314 bp, Homo sapiens
tttgtagagatgaggttttgccaagtttctcagtctggtctcaaattcctgggctcaaggagcctcctgcctcagcctcccagagttctgggattacaggcatgagccactatccccacccaagccttccttggattttcaatacagccatgccttgaatcccaactttagaaggcggtgttctgctgttgttgggtggaatgttctaagaaatgtcaattaggccatgttggttgacagtgttcaagtgttcttatctttattggctgrgcatggtggctcatgccagtagccccagcactttgggaggctga

SEQ ID NO: 827114 - DNA, 479 bp, Homo sapiens
acacattctgactagtttttagtatttggctttcatcctaatattatagtacttcaacttagttggcatatatgtctggagtgaattggataattgtacacactttactgatttggtaatcacactgaggctggggagctggcaggattgctcttgttgacaatgcgagggtagatatgtgttgtgatttgcttcctctttaggttctgggtcctattgcggaacggagtatgtgagtgaagctttgtggcttcagggggagatgtacagaaactgctttgctgcctgcaaccttagggaaaggctgctgaggaaataatgtggttgttgatatcctgctctttagagtcacactaagcagtgtgactttgggcagggtacttcaccktcccaaaactgtttcctcatctataaaataagtatagtgatattctacattttaggattgctatgaggatggcttaattgctgtcatccac

SEQ ID NO: 827115 - DNA, 544 bp, Homo sapiens
actgggtcaaaggcagctgcacacctcactggggatccctccaagcccctccaccaggaaggagtcaggttggagggtcaggcccttcttggccctggcacacccccayggaggtctcactgtgtggggcagctagccggcctggccatcaaggtcacaatcaggaaggtgtgtgcatcctgccataccctctgactcgtcgtggtctgcagccacaggcacccacagggagcaagctaatgaggcctcagaggagacgtgcactctaggactggaccccaccaccctggcaaacacgccattacccctcctcctcccaaatcctgaaatccagcctctgccctggaaactgttgccttgttatgagatccataggggtgggaacacagggcttagatttatcttttcctgccaggttgctggattcaggagccaagaagagcgataaagagggaggtagagaacttggtggaggctgtgcaggagtgggggccccatgctgggcacgtcttggagcctccaagtcttatctccagctgggtcc

SEQ ID NO: 827116 - DNA, 615 bp, Homo sapiens
  misc_feature 385: n = A,T,C or G
gtctcaaaaatataattataataaataaataaaagtaaagtattgatgtttgtgaatgatttattcttctaatgaactagaggagatttttccaggaatttcagagccagtgaggttatgttgcttrtatgtgtcatgtgtatccaggtgaaaaaacttaattaaacgctattatataataccatacataaaaactgaattttaggaatactgaagaatgacatatagaagtcaaatcattaaatagctagtagtaaacagaatagagtgtcagctgttacccaatgatgataatattttcacgattaaaattaaaccttttctgattttaaaggaaaagttcagatctgtatcatataaagaatgtaaattttcagggtaatanaataaaatgcagagagaaaaatgcaaaaatagttcttactagatgtgtgtatgtaaggaacttagactaatttaaagaacactgtcaagaccctggtagttaggtaggaaaaaagacatgaatgattcattcaacaaaaactttgagtatttctgtgctagatggtagtgttacagtggtaaacaaaataaatgtgtttctgctatcctggagcttagtctacaaaaaag

SEQ ID NO: 827117 - DNA, 556 bp, Homo sapiens
gaggcccgacgagctggggatggagagtaccgggcccctcactgcctcagagcgcgtgtgcggctctgggcgcgsacagtgacggtgacggcacccctggcccggcagcgccgaggccgcttcgccagacagccagcggccggcggcaggccgggccatgagcggcaggggccgggccgggcctcgctgaccctggctccgcgcggcagcttccccagtttccgctccggtctctcggcatgagagtccgcccgggcccggggctgcggctgccccagacccgccgcacgctggcgcgctccgggcccgcggagccgcggtgctgatacctgcgccgcactgcgccgcccgcccgtccgctgtgtgccccgggggcgcggccatggaggtggtgggtgacttcgagtacagcaagagggatctcgtgggacacggggccttcgccgtggtcttccgggggcggcaccgccaggtgagcgccggccggggcgaggccgggccccgggcggcaggcacggggctaggtggttctgaaacttggcgcagccgcgagccg

SEQ ID NO: 827118 - DNA, 617 bp, Homo sapiens
tctcaaaaatataattataataaataaataaaagtaaagtattgatgtttgtgaatgatttattcttctaatgaactagaggagatttttccaggaatttcagagccagtgaggttatgttgcttrtatgtgtcatgtgtatccaggtgaaaaaacttaattaaacgctattatataataccatacataaaaactgaattttaggaatactgaagaatgacatatagaagtcaaatcattaaatagctagtagtaaacagaatagagtgtcagctgttacccaatgatgataatattttcacgattaaaattaaaccttttctgattttaaaggaaaagttcagatctgtatcatataaagaatgtaaattttcagggtaataaaattaaaatgcagagagaaaaatgcaaaaatagttcttactagatgtgtgtatgtaaggaacttagactaattttaagaacactgtcaagaccctggtagttaggtaggaaaaaagacatgaatgattcattcaacaaaaactttgagtatttctgtgctagatggtagtgttacagtggtaaacaaaataaatgtgtttctgctatcctggagcttagtctacaaaaaaggt

SEQ ID NO: 827119 - DNA, 544 bp, Homo sapiens
tattataattccaatatgtacagatgagaaaactgagatgtagaaaggttaattcttgcacctgtttttatcagaacctagttatatcttgcttgtattaatattacaattgtcaactgattttctaacccccaatttttctccctgtagtccctattcttaactgattccagaatcatttttctgtacatatttacttattaatttctcttcttaaaaaactacaatggctccagatttcttgccatgttattatgattaaaaataagcaatagtattttagcaacaatagctatttttttcttttgtctgtgtataaagccatacatcaagtactatatatgtattatcttttattcatttttcctcatgtatactgatctctcttcaaaccctgtcagtgaaacttattatgaaagtaaacatcttagtagttctatgtttgaaaattcactatactgatatttttctattgcatttttgggtacttttctaatgcaaatggatcaaacwttatgtctggaattcacagaaattaagactc

SEQ ID NO: 827120 - DNA, 546 bp, Homo sapiens
gaaaggatttctccactgtgtttatttgtgtttatgtgggaataccattcaggaaaatttttcttagccaagactagcagattgcatcacatggcactgcagggagtaaggggctggaggtggtggtggccactgttaccttaaattcaactctgtctaaaagtcatcatctttcttgtaaaatcatgtcttcctgctgtctcccatttctgttaatcagtattctcctggccacctggtctcaagtctcagattaaaatttgattcccttcttgctctttctctatatcacattactcaacaaattttgttgacttcactgttgggaatttgtggccacatttcacctgattcttagtaccttatgttttcccacatcctaataggctctcttcttatccattctacattttggatgtgtctgatcttccttaaacttttctttcagtaacacttaggttctcaggaacatataactttctaaaactctaaaacatkaagttcttggcattcaagtttctcaacaccctgtccttgactggtttt

SEQ ID NO: 827121 - DNA, 557 bp, Homo sapiens
actatttacatttataaatgtaatatttaatataaataaatatttaatactattacatatataaatatatatatgtaaatagtctctctctctctctctctctctctctctctctctctmtatatatatatatatatatatatatatatatgtattttagacatgaggcctctctgtgttgtccaggctggactccaacttctggcctcaagtaatcctcccatcttagacttccaaagtgctgggattacagaaaagagccaccacacctggctataatggttactaatcctttatattaactgtagctattgtatttttaatggttattaatttattaagagtttctattgcttcatgagtcaatccagaaatttatatttttctagaaaaatgttcacttcatctaagttttcaataaaatcagcctaagtaatttattttatttattattttttctttctattttctctccatctttattttatttatttattttattcccataggtttttgggaaacaggtggtatttggttacatgagtaagttctttggt

SEQ ID NO: 827122 - DNA, 576 bp, Homo sapiens
cacactgatctgttgacttcactagctgggagaccagagacagaatagggtaggaaaagagagctttggggttatatacatttgcattcattggtcttcttatgacaagcmtatattgctttcttaatttgaaaccacccaatgaaatggatgatttataataaatacatatttttcccaaagttaaaaaaaaaaagaagaaacaatgtcatccccagccccagcctcagagagggctcctggagcaatcttgaccaacaggtcagatgatcaaagccaaagggtggcctagtggtgggactatttctccccctcctccacaagcttctcttgttcagttttgcttttaaagaattccctgctggttcctaagactcagactaagactgttaaggaattttatttttttctgcaggtttcagcagtagtgacttttcagacctgagtaatggagaagagcttcaggaaacctgcagctcatccctaagaagagggtcaggtaaagaagattaggatgccaagacttggcctgcagaatgtcaggaatgtgaattaaaagctgctgtttccagacgc

SEQ ID NO: 827123 - DNA, 581 bp, Homo sapiens
atgtggaatggcaagcagaagggataagaagtaaaagaagcgtgggaaagcaaaggccaagcaaggcaaakattccctctggggacaagaatggagtatcactaacccacaatgaaggttagttgaaaggcaagacaagcatggcctgtgtacaggcgaggacttgcacggattttcaaggttttccaggttttcttattagggaatttcctactgaactgattccttggtcacacactgagacctctaaagaatcccattcttttgtgcagtgatcaataatgacaaccctttagaatcaaatgatgaaaaggagggccaagaagccacttgctcacgaccccagattgtaccaggtaagaatattagagttgcaacccgagactgtagaatatccagagtacaaatccagagctctgttttcttgattaatttcattctgagtggtctccttatgccttgattccataaattctagaatatcactttctacatttaacctctctggccctgttgagaaatggaagacattaggaaggtattataaactcttgtttaactggattggttcaatcgattga

SEQ ID NO: 827124 - DNA, 634 bp, Homo sapiens
aagtaggggagttattaggttattttaggtatttgatatatggtagcatcaaagggaattgagcagagattcactgatcagaaatattctaactgtaaaaaggcarttgcagacttttatacagaggtaggttaccaatagtcattgacctctactgacttctgggcttatacagagagtgactagcttttttctatgggttgaagccatgtgtatggaccaaaactctgcatgatgctgacagtatttttctgtaagcaaaaacgataaaaaacaaaacaaaacaaaacacaaaataacccgaaactagaatgaaaggggaaaaaaaatccaaccaaaacaaaatgagagggagaatttaagaatttagatgggaaattaactttgttggtaactttgttggatggatgaataaggtaatatgtaaactcttaagcccctaaacttctaaaattagaaggctgcacgtgacaaagtaaaatacagttctgtatgtgttggctttctgatatccctaggtggtatatcaatttctataaaataaattaaacttttcttcttactcaaggcagtgttgttcatagtactttctgtgacaatggaaatgtctgacatttgcattgtccaatagtca

SEQ ID NO: 827125 - DNA, 634 bp, Homo sapiens
aagtaggggagttattaggttattttaggtatttgatatatggtagcatcaaagggaattgagcagagattcactgatcagaaatattctaactgtaaaaaggcaattgcagacttttatacagaggtaggttaccaatagtcattgacctctactgacttctgggcttatacagagagtgactagcttttttctatgggttgaagccatgtgtatggaccaaaactctgcatgatgctgacagtatttttctgtaagcaaaaacgataaaaaacaaaacaaaacaaaacacaaaataacccgaaactagaatgaaaggggaaaaaaaatccaaccaaaacaaaatgagagggagaatttaagaatttagatgggaaattaactttgttggtaactttgttggatggatgaataaggtaatatgtaaactcttaagcccctaaacttctaaaattagaaggctgcacgtgacaaagtaaaatacagttctgtatgtgttggctttctgatatccctaggtggtatatcaakttctataaaataaattaaacttttcttcttactcaaggcagtgttgttcatagtactttctgtgacaatggaaatgtctgacatttgcattgtccaatagtca

SEQ ID NO: 827126 - DNA, 549 bp, Homo sapiens
gcaacaggcagacatgagggccagagtcctgatgttaatgtaagttagctatagagtctgaacacagtctaagttctttgggcttacaaaacacttcaccatctgacccctgctttacccttctatcctaacctctcaccacttctcacccctcaaactgtaagctctaaccaaatttccatgcccgtagctccattaacattccatgttgttttttgcccctggacttgcctaagttcttccctcttcttgacatgctttttgaggaaagaaaccctctgtctgccctacttttttcatcttttagaactcagtttagatttctctttttcaactgagtggaacctacagtaggctgtactgatgagatgcttcagctatgtatccatatagcatctgtgctttgctaccattgtaacacaacttggaaaggtatttgtctgtctactagmctgtctttcccacttgattgcgggctctatgagaggaatgacagtgtctttcctgttcactgttgtatttccagtgcctagtacagcgcctggaggt

SEQ ID NO: 827127 - DNA, 607 bp, Homo sapiens
agacctcaggataagagaaatcctcactgttttgattgccacctactctgatattgcttggggagaatgacagaaatatattctggattggggttcccatgggtggttacagatttggtttgtacttaaccckcactgtcagattgaggaggtacctcaggatgcagttagaagccaaactctttttcttgagggtagaggaacatatagctctactaccaccagtgacctaatgaagtgcttcccataaagtcaccaatgaggttttcatttcaaatttaggactttaccccaaatgcccatataatgccattttcaaagagacatatagtaaacaggaagtaccctaattggatgtacagtatcctctcaggacccaggtcacatgagatttaagtagttttctcttgacttcctagggaggaatgcagtaggcatgaactgaataaggataaaagagtaaaattattcaaagaaacagccctgagggaaagtggtgacaggccaaaaaaaaaatcagtgagagattagttgtgtgtgtttgcgtgtgtgtgtgtgtgtttcaggacaaatacctacctagtctgtgagtgtaatacagacatgt

SEQ ID NO: 827128 - DNA, 579 bp, Homo sapiens
aactgatggttttataaggggcttttccaaccttcacttggcacttctccttgctgccaccatgtgaagaaggayatgtttgcttctcattccgccatgattataagttcctgaggcctccccagccatgctgaactttgtcaattaaacctctttcctttataaattactcagtctcaggtatgtccttattggcagcaagagaacggactaatacagtagtgttggtgggctatgtacttaaatgtgttttgtggtggcaggtaccagttttttgtttccatgtttaacacttccttaaggatcttttgtaaggcaggtccgatggtaatgaattcccttaggctttgcttgtctgaaaaggattttatttcctcttcacttacaaaacttgtttgtctggatatgaaactcttggttggaatttcttttttttaaggatgttaaccttgaggtgacagtgtagggagagatgttcaaatcaagcagtggcttgaagcttctgttaaactagccagacttccaaaggcccatgcgcagttcttattttctgtttccaaatttctaataattagattt

SEQ ID NO: 827129 - DNA, 645 bp, Homo sapiens
tttcagtgctctctggcggttcagtgagtctatgtacttttctatgttcttaatccgagtagatgatggcctgccacgacgtacaactccagggggtgccatttaagtcctggtttatatggatggtgcagtgtgaagctgtatgatgttcatcttaggtagtgttcaacatggtggccctgggtaatatatctggattctctgttgtgttttctttttaaatttgcaggcgtttgttgatccatttcctgacctggtaaggtaataatgataatacataaaccaacaagtgaacatcctgtgcaggtacttgccttgcattatcttatttagtacttatgataacactagaagtaaaaacaattatcattctgattttacaggaaatgaaaggtaagcaatgagctaggaatagttaacaaaatctagagtagaacctgagcatttttattctaagacccaatatgctaatttcaagtaatcaggcatcagttaatatgcatcttataattcttgcttctgatattcatttctctttatgcattttattggattgcttgagtcattcactttggctgcattggtggakttgctaggaacaacctcttttctttgtgctgaactctttttttaaaaaaaatctca

SEQ ID NO: 827130 - DNA, 633 bp, Homo sapiens
ccctaattttcagcactgtccacataggacctttgttctctagtttttacaacctcaacgtctactaatatatattaccaactctattctctggtcataggaaacttttgtctttactattgctatgatctrtctaggccctatttcccagcactggtggtttttactggaataactcttcttcttttctgctcctcttatatcaggagaaactcaagttatctgtaaagaatctccaagacagtgtgagcttttgagttgtgactaaatgcttccttacattctccttctctcccacaaaatttattgagcatctattatgttctacacataaagctgggtactgattatattagctagtaaacgttgggacccttattcccaaggagactgcagttatctttccttctcttccttcttccatattgccattgcacttggaccataccagatcaaattgaagctacttatgcccacatctatattcatgtttgattcaactccatagcttccatacctggtacaacattcagtaaagatttgttaagtttttctaaaatcagtcatgtcaagatagacaaggcatgtttcatcttgaattaataataagtaaagtaattcataagcaagata

SEQ ID NO: 827131 - DNA, 401 bp, Homo sapiens
ggattgtaaggcttggaatgaacagaatgttccatggaattgtctaccttctattcctctgagactgagaacatgaagtaaacagtttgtccttcctccataaagcgttttacaatttccaatagtataatagagtgtaaaagcaatttgggaaaaaaaaaaaacaaaactaatgaaataacccagccctgagagttgtatgacttaacataaaaatgcctttcttttccctgttgtaaacatccaacacaggtgttcttggttgtgacacagccttcttcatggggattcagggacccagactccttacatataactctgtcctctttgggggccttgaaaacctttgcattcagccagtgtttggggaaacagaatggcggrtcagtcatgggaggttt

SEQ ID NO: 827132 - DNA, 603 bp, Homo sapiens
cacttgaattccgttccaactctactgaaacagatgaagtaattgtcctgtgctacttgtctcctatctgtctktctttctttgctctgatcctggagagtcagtgttgacatcctcgaactcctccctcaacatctgggacagcgaattctgcagtttttttcttcttcctcacggtgtgcttctctatcttctttgctgccctcccagtgttgcctctgcagcacgccaaattgtggctggttagtcacctgaccttttatattttgtctcttggagatttcccttattgccacaagcttatctctgtgtaagtgcttttcagacctatttatttgaattcaaacttcttcctgagttacagataagtttttgtggaaagctacactgggaaatatttttagtatctcaaatttaaaattcccaaaaccagagcatccaaaaagttttataagcccaccatagaaagggatctttattttcatctacttgtctccttctgaatcctcctcctcttcccctcccaatgtaaacatgacaaaaagcaatctgctttcttagctaccctgtatatgtacggtgtcatggttctcctaaaactaa

SEQ ID NO: 827133 - DNA, 569 bp, Homo sapiens
tggctggttagtcacctgaccttttatattttgtctcttggagatttcccttattgccacaagcttatctctgtgtaagtgcttttcagacctatttatttgaattcaaacttcttcctgagttacagataagtttttgtggaaagctacactgggaaatatttttagtatctcaaatttaaaattcccaaaaccagagcatccaaaaagttttataagcccaccatagaaagggatctttattttcatctacttgtctccttctgaatcctcctcctcttcccctcccaatgtaaacatgacaaaaagcaatctgctttcttagctaccctgtatatgtacggtgtcatggttctcctaaaactaaaagtctaggccaaaaacctcagatgcatccttgacaactcctgcaccctctgcttcacatctagttgattaccaaattatgttaatctgggctctgtggtttcatatatactcactgcttggcatcctgktcccatcatcctaacataggccttgagcatagcttgcgtgtattcagcccaccttatcgattatttaggttg

SEQ ID NO: 827134 - DNA, 561 bp, Homo sapiens
tccatggttttcttcagagtcttccaataggaagccaaatctttgagtaaaaagatgtgctttctatgtaactccagcaaaaggcatatatagatttggagctggtgtttttctttgaccttatcaattccatttaaaatattagctataataaaataaatttattactaattattacaaatttatattgcatacttagataggtgccattctcatttgtgatactagaccactctgccacgacaaacatggcagtaaccaaattaagaaccagagctcaagataccagctgtcaatggaaccaccaccacttgctactatctcttatttttttctttcgtaacattcagaaaaagtcatttaaccttctcacactgatttcttctctacgaaattgggaataacacccccttaatatggttattataagtataatatgaaattataagagtacgttaagtattctttgcattaatctcttagtttatgaamtaatgtgaaagctttggaaagaaattcttaaacatctttgattcccaaggtttttaaggtcttaaagca

SEQ ID NO: 827135 - DNA, 382 bp, Homo sapiens
taaaatgagcatgtaggtggggasatatacaagattctttccaactgtaaatttgttttattttatttgaatttaagcatgattttagaaatgcaaactacattgcagttgcctgatggctatggatgctttcctcatcaatgttcagacttacagagcttgctccccactctctgctactttttgatttgccatcagcctttctctgcctggccacaccttccgcctgtccatctttgctcattcatcatttctctccccacatacttcccagtgaggagttagaggctggggtggatagataccacaccttctcagaattgtatctacctaggtggtttggtgacattgtgtcatttaacactgctgagaatgaaaatgg

SEQ ID NO: 827136 - DNA, 382 bp, Homo sapiens
taaaatgagcatgtaggtggggagatayacaagattctttccaactgtaaatttgttttattttatttgaatttaagcatgattttagaaatgcaaactacattgcagttgcctgatggctatggatgctttcctcatcaatgttcagacttacagagcttgctccccactctctgctactttttgatttgccatcagcctttctctgcctggccacaccttccgcctgtccatctttgctcattcatcatttctctccccacatacttcccagtgaggagttagaggctggggtggatagataccacaccttctcagaattgtatctacctaggtggtttggtgacattgtgtcatttaacactgctgagaatgaaaatgg

SEQ ID NO: 827137 - DNA, 575 bp, Homo sapiens
gaaccttggagaatatcaggtttagctctctccttattacagagaaatagatgtccagaaaggttatcacatttgctaattagtgatagtgttagcakcggcctcaattctttcctcctcagaagaaagaatttgaccaagggacataaggcagcagagtgagagacgaaggcaagttttagagcaggagtgaaagttgattaaaaaactttagagctggaacaaaaggaagtaaaatacacttagaacagggccaagtgggttacttgagagatcaagtgcagtgtttgacctttgacttggggttttatatgttggtatgcttccggggtcttgcgtccttctccccggattcctcccttggagtgggctatcagcatgtgcagtggcctgccagcacttgggaggggctgcatgtacagtgtgtttattggagttgtacacgtgctcacttgaggcatttttccctaaccagtcaagcgtttctagaggaaggtcatataccagctaaaaactctgctgttttgcctcttcatgcccatgcttgagcccactcacccaactcctgagatctt

SEQ ID NO: 827138 - DNA, 613 bp, Homo sapiens
tcatgacataaaaatgtgaaaacattttggaaacaagtagacaaaaaattgatacattactgctttatcaatatttatttgtttaccaacaaggttgarcatttgttcatatatttataggacatagaaacttgatgactgtgacttcctatttctgtgacatctgttaccacagtaactaatgcagtcagtgggaatatgtgaatttcatgagcctggccctccagcttgccagtcgtgagagccagagggaatggagcagcctgaggctgtatcacctgatggctggatgcatctggctgcttattcagctgtggctcctttatttgggacagctgtgaacgcggctccaggagttgccttcatgaaatgaagcatatgatgacaactggaagaagaggacgagtacatattgctaaaggtttaatggggatagtaatggccaagtggaaaaaaacctgtgggtggggatgaattggtgctgactggtcatgccacgaggtctgtatttcaggaaaccactaattggggcagctcctctggagaggactgggcctgagtcagatctgccctgtggattgcaagtcctctgtgaagtttgtgctctcaggtg

SEQ ID NO: 827139 - DNA, 588 bp, Homo sapiens
gtggctcctttatttgggacagctgtgaacgcggctccaggagttgccttcatgaaatgaagcatatgatgacaactggaagaagaggacgagtacatattgctaarggtttaatggggatagtaatggccaagtggaaaaaaacctgtgggtggggatgaattggtgctgactggtcatgccacgaggtctgtatttcaggaaaccactaattggggcagctcctctggagaggactgggcctgagtcagatctgccctgtggattgcaagtcctctgtgaagtttgtgctctcaggtgcatcagaagcagaccctctccacagtgctggctcctcctgatggtagaaagcttaggcttgtgtatcatgatggttttttgtcttcctcgatggacatttattgagtttggatagtatgctgtggacattaagagtatatagattctggagttaggcttcctgggttcgaatcctggctgtatttcttattacctgtgtaagcttgggcaaccatttaagctgtttgtgccttgatcttttttacttctaacacggatgtggtaataataataataataattcccaca

SEQ ID NO: 827140 - DNA, 315 bp, Homo sapiens
cgggttcatgccattctcctgcctcagcctcctgagtagctgggactacaggcacccgccaccaggcctggctaattttttgtatttttytggtagagatggggtttcatcgtgttagccaggatggtctcgatctcctgacatcgtgatccacctgtctcggcctcccaaagtgctgggattataggcatgagcgacggcacttggccagcttaatactttcaagattgatctgtgccatgcatggagaggaatttcatttatttttaaggagatgaataatatttcataatatatatacaccacattttgttt

SEQ ID NO: 827141 - DNA, 315 bp, Homo sapiens
cgggttcatgccattctcctgcctcagcctcctgagtagctgggactacaggcacccgccaccaggcctggctaattttttgtatttttctggtagagatggggtttcatcgtgttagccaggatggtctcgatctcctgacatcgtgatccacctgtctcggcctcccaaagtgctgggattataggcatgagcgacggcacytggccagcttaatactttcaagattgatctgtgccatgcatggagaggaatttcatttatttttaaggagatgaataatatttcataatatatatacaccacattttgttt

SEQ ID NO: 827142 - DNA, 558 bp, Homo sapiens
tatttgtggggtacatgtgatattttctcacatgcataaaatgggtaatgatcaagtcagggtrtttaggttgttcgtcaccttgagtatttatcatttctacgtgttgcaaccatttcaagtcctctctcctagctattttgaaatatatattactgttaactatagtcatccgactcagctatcaaacattagaaattattctttctatctatctgtgtgtttgtacccattaaccaatctgtcttcatcactgtcctccctgtagccttcccagcctttggtatacctatgattctactctctacctttatgaagtccacgtttttagctcccacatatgagtaacaacatgcaatatttgcctttctgtgcctggattatttcacttaacataatgacagtttcagtcatgctgctgctaatgacaggattttattattttttaaggtttaatagtattccattgtgtatttgtatcacattctctttattcttttgtccattggtggacacttaagttgattccatatctttgcgatagtgaatagtgctatg

SEQ ID NO: 827143 - DNA, 512 bp, Homo sapiens
gatggacttggccaattaagctttgctagaacactcctctctgatacattttgagtttctttatggagtgttttcaagtttttaatatttataattttaattaggatagtttcagacccacagtcctgcataaaattagtaaaattagctatgtagaagataatagagtcccatttagtaaatggttaaattctaacaccattttatctttattccataaatacctctattaaaatggcatcatactgtggcataaagatagtagttctgcaatagctaagaatttttttttgaaaaagtcaacattttcagactaggtatttaaggaatatgttattgactagtttaatgctagttgaataagtgaaatgacaacatgagagagaaatagtagcaytgtagaagttcacattttttttttcaatccagacatatttattcaaggtatttgtttgctttatattcagacaaccttcatattcattatgctaggtgtctttctataatttgaa

SEQ ID NO: 827144 - DNA, 590 bp, Homo sapiens
ggatcctagaggattttctacctagataaccgtgtcatcttgaataaagacaacttcacatcttcttttaaaatctagatgcctttcattattttygtcggtttatcaagcctccagtacattgttacttgttctttatcttagagaaaaaacattcagtcttttactattaagtgtgatgttagctgttacttgtaggctttttgtaaatgcctttattaggttcaggatgttcctttctctcccttgtttgccgtgactttttttttttaaggaaatggatattgtatttctcaaaacttcttctgcatctatgcagaaaataatgatttttttaaagtctattattgtgataaattacatttgattttcatgtgcaaactaactctgcattccttgaatagacactacttcatcatagtgtattattcattttatacattattggatgctacttgcaaatattttgttagaaataattatatctatgttcatgagagacatgcgtccgtaggatggagcccaaaaatgccctcccagttccagcctctactgcaggttaaaccactgccatttacaaggagagatgg

SEQ ID NO: 827145 - DNA, 618 bp, Homo sapiens
taaagattttaactctttgtccaaggttaaaattatctttgtcttgtacaattkcactattaacaaaagcagaatcactattttattttattttattttttgagatggagtcttccactgtcgcccaggctagagtgcaacggcgcaatctcagctcactgcaacctccaccacccaggtccaaattattctcctgcctcagcctcctgagtagctgagattacaggagcccaccaccatgcctggttaattttgtatttttagtagagacagggtttcaccatgttggtcaggctggtctcaaactcctgacctcaggtgatctgtccgactcggcctcccgaagtcctgggattacaggtgtgagccactgcacccagcccagaaccactattttaaaacaacaaatactgtttctttttagtttatggaaagttattcagttaaattttcttttagattagggtttcttcatggaaaataaattttctaaaattaaggctaaagtagattaaataattttagaagaaccaattgccacttatgaaatccttcaaggaatataatgactattcttctaataattggattcagtttgacttatttatttaatattca

SEQ ID NO: 827146 - DNA, 627 bp, Homo sapiens
ggatctatggactacaagtaataggataaattcattgtttatttgagattctaacctgtaccttccaaatcctatttsaatgaattttatattaaatcagcctaaaatattttttcactcaggttcttttttacctttggaaagattaaaaaaacaatgctaatgttgaataaatcatccagctacattttaaaatgaatatgtattccatctctattttctttgattcttttcaagtctattttctgctattatccacagatggagaaagctattatctacagctgatttcacttgtgatactgcaacctatttacctttccatctttctgtaagccccaagattatatttttcaaataccctcaagtacttgttcattttcatgagcattatatctgtacctaagtgcacaatagcaccattttcaaacaatcagaactagacatctgaatggcagtgatctaagaagagatagatcacattaagaagcactccaaatgttctgtttctcaggttattacactaagtaggtcagtggttttcaacatatttggtgaacaagaatcacttaggagcttatgaaagatgcagatccccgggtataatcctaaacctaccaagtcagg

SEQ ID NO: 827147 - DNA, 655 bp, Homo sapiens
tttggagtgtttaatcacaaaccacccaccctgtctctctccctcactctatcagctagctgagaactagattttgctccctgttcattgaatacctagtgtttgtttacaaagtgcttagaatacaagcagacaattttcttccttaggaaagacaaagaaaaataataataatagcaataatattttacatttatacattcttgaagtttacacacatatgatctaatttgctaattacatgttggggatttctatttttactagtaagtaaactgatgcctggaaagctttcgtagcctgctcagtatcatcagacaggtttgtagctgagcttaaaataaactgaaggattcctcagttttactcaagtcatctttccatcacccctttctaccactgtgaacaatttagtaatgatgacttgtcatgaatctacctaacagactttgatacaactttgattgtgccatattatgttttgaataaagcagtattaatagatttaccttgaaaaaactatatatagaatgtcaagataaatagatgtcactcttamtttctcccaatttatagtagctaaatcccatatagaaataagaacgtcgtattaggattccataaagactgaagtttcgtaggaaaaactctaaac

SEQ ID NO: 827148 - DNA, 530 bp, Homo sapiens
agtggactttctagctaggtatggtggtacatgcttgtagttctagctacttggtagggtgaggtgggaggattacttgagcccgggaggttgaggctgcagtgagctatgattgcaacactgcactccagcytaggcaacagagtgagaccctgtcttaaaacaagaaaaaaaagaaagaaagaaaaaagaaatgaaggttttcactgggccaatatttgtggagataaacaactgtgagtagattctatgtgtgtttttagagtttcactgacatattttgcaatgtttgcatgtcatggttgaggggcaatgataccacaattgcatatagtttttgtcttaatcagtgggatgagtcttaaggtaatttattgagaacagagaagggaggataggttgacaaacaaacattttcaagtgttgtattttggaaactttattaaatgcctactcaatatcagtatgtgaattttacccacacaaatgaacctattcaatagaaattttcttaattactcaatgtaata

SEQ ID NO: 827149 - DNA, 612 bp, Homo sapiens
ttagacatttagaaaaaaattgattcattgagttatccagatcttgcaaatgttcaccatttttttaaatagaacatcacaaaattacatttgctagtakcaccactgatctcaacagaaaagtcttttagtattgggaagctgtcaaacttagagtagtgaatacaagtttcccaaaattctaatttttacttggtagcttgaattttatcactggcagcaaatattgtcattgtttcccttgaaataacaggctcacttccgttattttcaagagaacctctactatacaaccaagtccaaataaccataattttgtttgtcaattattctttcaagtaaaaatgactccccttgaaaaagtggctagttcagctcataactcaatcacacaagtgcttttgttactgagtcaaccatcatatttcaatatgcagcagaattgcttcatgtgaatatccatttcatcatacagaataataaaaatgtgtcttctatttaaagatttaataaaattgataatttctacaactttatcaatgatattcttaaataaaattgggttttaaaaaagtggtgctgaaaaatgcaatgacactcatagaaattagt

SEQ ID NO: 827150 - DNA, 606 bp, Homo sapiens
atatttacgttgctgggacccaggttttaccaggcagatggggacaatgcattaggggatgactgagcaacaagataggaggaacatgattctcctgtagagaagagttgccctggctggactgctatgagtaagagaaaggcatctctgtcttatttaatacccactttatgtgtgtgatattgttccacttttaaccctaaacataacgatcatacctgtctctaaatatttcactacatgtaacagaagtatcattctgcccaccttagtaaggatatccaattctgagaactcagatgctccacttctgttttttaccattttcttcttttcctttcccttccccctccttttccacttcctcgtccttcacgctgtactgagacatcatttagttcatcttattaaaatgtacaattaaactattaatagtaagtttacagagttatatggccatcaccaaaatccatttgtagaacttttccatcacccaacaagctctctcaagtccaatcaattgacagttccatactaccttcaagccaaccacgaattgtttctatagattagcmtcttctgggcatttcattaaatggaattaga

SEQ ID NO: 827151 - DNA, 586 bp, Homo sapiens
ccattgccctctttagtatctacatgccatgttaccttgggcttactgtacaatcagcacctcagttccctcttgttaaataagactaatactagtacatacaagggayaaaattatatatataaaatattaaataatatataaaatacatatatgtataatatataatatataaaataaaattttatatatatagcacttaacagtaggtaaatgttagctattcttccaattgactcattaatgaatcatgagaatcttttatgtgataatgaaattcgagagtactaagtgaaataattgcacagtgcttataaatagggaaataagagtgaaagataatacaaattaattgaaatatgtaatataaggaaaaacagatgagaactcttgtaaataaaagattaatgaaatttagaatctattgaaagggatatttgttatttttaataacaaatttatttttaatattaaaaattttaatatttgtctttgaaaatttaatatttgtctttgaaatatctaatatccaaattctcaatatttcatatgatagtttttgttctatttgttcagtttttataaa

SEQ ID NO: 827152 - DNA, 620 bp, Homo sapiens
cccgcgtagctgggactacaggcgcctgccacctcgcccggctaattttttgtatttgtagcagagacggggtttcactgtgttaacaaggatggtctccatctcctgacctcgtgattcacccacctcggyctcccaaagtgctgggattacaggcgtgagccaccgcgcccagcctgaaatgtatgtttttgttaactatactatgaaattcaaatgatgcctcatccgcatccataaaatattccttaaacccgtgtcttccctggtctagacttccatatttgtacctagtaggtgcttactcattttgagtaaattaatgaataagtgaacaagtggaaataaattaacggaaaaactaagggaaaggagaattaggttttaaaatgcctactatgcacatttccccctatgatttaggcaatcttctcaagacaaatctcttgtgtccattgtacccctaggatagtcttagaatatatgagatattttaggtgtctggtagtagaagtttcagcatggttaaagatgagaattgtgagcaatcaatgataccaatgtttctcaacctatgacctagccaaatgacaaggagagacctatgaatgcatacattg

SEQ ID NO: 827153 - DNA, 521 bp, Homo sapiens
taaatctggtaaatgttaaagcatttacacacagtaaggttgctcactactgattttattttgttcaacccttctatctgtaatgtatgtgtctttttttttttttttttgagatggagtctcgctctgtcgcccaggctggagtgcagtggcacagtctctgctcactgcaagctccacctcccgggttcacgccattctcctgcctctcagcctcccgcgtagctgggactacaggcgcctgccacctcgcccggctaattttttgtatttgtagcagagacggggtttcactgtgttaacaaggatggtctccatctcctgacctcgtgattcacccacctcggtctcccaaagtgctgggattacaggcgtgagccaccgcgcccagcytgaaatgtatgtttttgttaactatactatgaaattcaaatgatgcctcatccgcatccataaaatattccttaaacccgtgtcttccctggtctagacttccatatttgtacctagtaggtgcttac

SEQ ID NO: 827154 - DNA, 613 bp, Homo sapiens
cacctagcctattaactagaatatttttaaaggaaggaagatgctggagaatgtaacagaaccaatttgttatttttcatatcagttttgatgcctgtggctacaagcataagatgccacaattaatagtggcytaatcaatgagatcatttattaacttactagtaatttaccagatacagacagttttaagtttactaaattttagtgacataaggatgtcctcaataacccaggtgccttccaagttttcattccaccatatgcaacatatcggctattatgtttatgtttcctccccaaggtgaagagtgtgtgtgtgtgtgtgtgtgtgtgtgtgtgtgccctgcgattttaatatctcatccacatatgaccaatccaaaagcagaaaaggctgattgcccctgggtgtctcttctcagaaagaaatcgttcaccaataacaaacagcaatcttcccagtttttttccttggctgggtttgaatggtatactcatgtgtaatcacaaagatatgaaatggaagtatactttcaggcttagaccagtagttctcaaagcttactgtagatcaaaatcgcatcaaaggctttttaaaaacacagatctc

SEQ ID NO: 827155 - DNA, 631 bp, Homo sapiens
agagattaaagactaaaacattcacagcacctgaaaatacgggaaaattagaaagttttcaggaatgcccasggagaaatgcaggctcagaaaagatctgaaaaaaaaaaaaaaaaaaaacaacccttaagtttacacatcagcctaatccttggcatagagatagcctacagcattccaaacaaaacaaaccaaatcaaaataaaagcagcatatccaggtgaaggagtgaaatatgagttccaaatttgccatattattggattaaaatatacagttttcaacacaaaaatcacaaggcatacgaagaaacagtaaagtatgttccattcagtggaaggtaataaaccaacagaaattgtccttgagaaagtcctgatagtagatctactagaaaatgactttaaaacaactgtcttcaagatgctcaaagaactgaaggaaggcacaggggaagtaagaaatatatatgtatgaacaaaatgaaaatataaatagagtattttaaaaataactaaaaggaaggtctggaacagggaagtataataactgaaatgaaaaatgcattatactgtttgaaaggtagttttgaataggcagaaaaagaatcagtgcatttggatataggaca

SEQ ID NO: 827156 - DNA, 392 bp, Homo sapiens
aaggaggttctataggtagcctcttttttctccatatgctccctaaacatttcaaaatacatattctttatttttacagaataacaggtttataaatattaacatgtattgatgctgttaaataaaacctatttttttccactgaagcagccaattttttttttttttttttgagatggagtctcactctgtcacccaggctggagtgcagtggcacgatctcggctcactgcaagctccgcctcctgggttcacaccattctcctgcctcagcctcccragtagctaggactacaggcacccgccaccacgcccggctaattttttgtatttttagtagagacagggtttcaccgcgttagccagcatggtcttgctctcctgacctcgtg

SEQ ID NO: 827157 - DNA, 598 bp, Homo sapiens
tcccctacatccaccatcaccctcrccacagttttaagcactggcagtactgttttgtttcctttcatttattctctgccttccagcctttgctcatggcatccccactgtctgttaattttatcctccaccttttcctcactttcttctcctctgctaagtttgtccattcttcctctttgataccttcaggaagcatttttttgacccagtatctaagcaagcagcaccgtagaaggtgatacattctgtgatgactgcatacagggttctgtaggaaagttatttaaaccactcttggccctaggtatcaggagtaaatagtgcccaagctaagggattaaataaaagttcttttaaatagttgcatggtatacattgtctagatatacatactgtgatttatttaaagatttctttattgatgaacaattaaatggattaaaattgttggatgttataggcaatactatagtgaactgccttctgcaaatctttatttctgtaaaacagattactggaattgggattgctggatcataggatacactgtgtgtgtgtgtgtgtgcgcgcaattaaaaggtactagtttgtcagt

SEQ ID NO: 827158 - DNA, 598 bp, Homo sapiens
tcccctacatccaccatcaccctcaccacagttttaagcactggcagtactgttttgtttcctttcatttattctctgccttccagcctttgctcatggcatccccactgyctgttaattttatcctccaccttttcctcactttcttctcctctgctaagtttgtccattcttcctctttgataccttcaggaagcatttttttgacccagtatctaagcaagcagcaccgtagaaggtgatacattctgtgatgactgcatacagggttctgtaggaaagttatttaaaccactcttggccctaggtatcaggagtaaatagtgcccaagctaagggattaaataaaagttcttttaaatagttgcatggtatacattgtctagatatacatactgtgatttatttaaagatttctttattgatgaacaattaaatggattaaaattgttggatgttataggcaatactatagtgaactgccttctgcaaatctttatttctgtaaaacagattactggaattgggattgctggatcataggatacactgtgtgtgtgtgtgtgtgcgcgcaattaaaaggtactagtttgtcagt

SEQ ID NO: 827159 - DNA, 613 bp, Homo sapiens
caaatctttatttctgtaaaacagattactggaattgggattgctggatcataggatacactgtgtgtgtgtgtgtgygcgcgcaattaaaaggtactagtttgtcagttcctcaaaatgttaaccatagtgttaccatatgacctagcagttccacttgtaggtgtcctggggtagttatgggttatgcagagtgactgcaagtgagtacaagatttcttcccggaatgatgaaaaggttctgaaattagattatggtgatgattacacaactttgttcatatactaaaaaatattaaattatgtactttagatagtgaactttatggtatataaattacatctcaataaaacctaaaaaaattctgccaaattgccaatctaaaagacttagagttttttggttgcaagcagtagaaactgattgtagccaagtcaagcaagaagggaagtttttgaaagaacattaaataggtaactcatagaattaagtatgagaggtctttttctctgagctgtctcatttctccacaaccaaaatttctgtttttctgcctgggcagtatgctggctgtgagtattttgtgcccagaggtggggtaatagggtgttc

SEQ ID NO: 827160 - DNA, 594 bp, Homo sapiens
ccgaaagcacattctatttgaaaaaaaaatgacaaactggactccatcaaattaataactttgctttttgaataacactattaagagaacaaaaagataagtataaactgagaaaatattgggaaattgtatatcagataaagcatttacattcaaaacacaaaaaaaacccacaaaactcaataacaagaaaacaaataacttaattttttaaataagcaaagaatttgaacaagcataccaccaaataaaatatacagatgacaaataatcacctgagaataggcttaccatcattagtaattagaaaaatgtcaattaaagctacaatttggtattacaatatatatattagaatttctaaaattaaaaagactgaccataccaagtgctgatgaggacgcagagcaactgaactctcatacactgctagtggggatattagatgatgcaattactttcaacaacagtttgacagtttcttaaaaagttaaacatacagstatcatatgatcttctcactctaccactgggtatttacccacgagaaatggaagaagtgtatgtccatatgaagacttgtacataaatgtt

SEQ ID NO: 827161 - DNA, 623 bp, Homo sapiens
gaggagagattgaaatgtaggattgagtgatagaggtggttgctgtttctcagtaaagatggttgcctttactcattaaatcctggctattaaaacacttcactcacactcctgtatcttatgggagcagatgtttctagcatgctcttaagttgctcaagcctgatccttctctgtttcccagggtgaaaagcctgcagcccaattctcactgtcaatccctcccttgctcccttcctatgtccagaataaaagtagtctgatgtacttaatttgtacttaacttttgttttggagggcttcaaccatttagaaaaagaatcccaggacaaagcaatggagaatttattaacacatgctgtgacagagcacaatcctaaacacacatttgctcttactaagccactaactttgcaaacttaggaaaatcacttaacgctctgatcctctctctccctactgtaaaataatggcccctaagaagtagagaaatataataaaggtaaagatggatgcctggagaaaaggaagaaaaggaggaatagagggaaggaggagggayagaaggaagagacagaagaaagaaagaaaagtggttgaaattaggaaatccaagaagatcc

SEQ ID NO: 827162 - DNA, 561 bp, Homo sapiens
ttttacatttcttgtgttaaatttacttctgtgtatttaattctttttgatgctatttgcaaattgaacattgttaattttgagttattcattgctagtgtctagaaatacaattgttatttgtatattgatcttgtactctgcgaatgtactgagcttttccattggttctaataattcccagtagtttccttaggatttcctatatgtaaattcatgccatctgcaaatagatatagtttactttttcaaatacggctgactttaatttcattatcttgcctaattggtttggtgagaacctctagtgcatcttgctcttttcttgacattttaaatcctgtatcagtggtcagtctatccccccttcaatctacctgctttgatactcttagccagattgacacttgggaattatgaaaacaactgacttaaaagttggggaatcagctactgggcaatagtgttagaggatattgttctatgcctgtgttgtccttctcagactcactggatttttaatcttctcatctwtagaattggaggatccagctagatagt

SEQ ID NO: 827163 - DNA, 619 bp, Homo sapiens
tatgccacattcactctgcctgtgctttataaatggaacaatgaagcctggttgatagcacatttatttacagcatggtttagtgaatattttaagcctgttgttgagacctgctcaggaaaaaaaaaaactcttaaaatattactgctaattgacaaatcacctgatcacccaagacctctgatgcaaatatacaaggagattaatgtatttttcatgcctgctaacacagtattcattctggagcccatgactcaaggagtaattttgacttttaagtcgtgctatgtaaggaatacattttttgaggctatagttggcatagtgattcctctgatgaatgtgagtaaagtaaattgaaaacatcctggaaaggaatcaccattctggatgccattaagacattcctgattcaggggaagaggtcaaaatagcaacattaacaggagtctggaagaagttgattctaaaccttatagatgttcaagacatcagtggaggaagtcactgcagatgtrgtagaaatagcaagagaactagaattagaagtagagcctgaagatgtgactgaattgctacaatcgttgatgaaacttgaatggatgaagagttgcttctt

SEQ ID NO: 827164 - DNA, 609 bp, Homo sapiens
tttaaattaaggtatgtaaattgtttttctagacaaaatgctgttgcacacttaatagactccagtctagtgtaaacaaaacttttgtatccactgggaaaccaaaagtggtrtggagttgctttattgtaatacttgccttattgtggtggtctacaactaaacctgcactatctcagaggtatgcctgtgctaccacaccttgaactacaggtttacttattatttaattgtaatttttcccactagattataatatcagaagaaaataaactgtttggcatcccggtttaagtaaccagagcttttctggttttaagagacagaaacccaaatcaaactaaatgtaacacaaaggaaaattatttgcaaagccacaggtgtagctcacagaactgaaggaaaagttacagaatatttagctgctctagaaattctgatgacttcagggacttgaatgtcatcagcaccctctgtctctatctttctcacctctcactaacagttttgttctcataaacactttcatgttttggcagctatggtaaacagcagtttagggattgtgtcctttcaacatcaaggctttaactggcctggcctaagaca

SEQ ID NO: 827165 - DNA, 414 bp, Homo sapiens
cagcagtggtcataggagaacctaccgtttcagggaacaaacttccaaaaccactattttagagttatttttgtaaactaaatattttaaagttttcatttgctaaaatatgtgtataattcagatgtcaaacagactgtatttcttctcctcagtgaggtgaagttatgctattaaagttatgctgaaaatgttaaaatacaactgccatttcttcataccaatttgatgtttgatgaaaaagaaaatcaaatattttgattctttaagtctcctgaatgtgttctattgctggagaatgatatttgaagatgtaaaaattatgtgttttttcctctgcagtgccacaactaaaatmaatttactaatatgtattaggctggtgaaaaagtaactgtggtttttgcaactact

SEQ ID NO: 827166 - DNA, 539 bp, Homo sapiens
actttagcaaaaattaaccacaaagcaggcaagtcagcaatttcctttttttttttttttttttttttttttttggagacagagacttgctcttttgcccaggctggagtrcagtggtgcgatcttggctcactgcaacctctgcttcccagattcaagtgattctcatgcctcagcctcctgagtagctgggattatgggcgtgtgccactacctcctggctaatttttgtatttttagtagagatggggtttcaccatgttggccaggctggtctcaaactcctgacctcaggtgatccacctgcctcagcctcctagagtgctgggattacaggcatgagccactgtgctcggcctaagtcagcagatttctgactgatgcaattaactacatacatgatgcaattaagttaggaaccaagaacaaacaactgaaaaatagaaatacgtttgaagactaaaactcacttctgaataatctatggtccaaagaagaaatcaaaggtagaaagtaaaatacgcttagaactgagtgat

SEQ ID NO: 827167 - DNA, 634 bp, Homo sapiens
tactatagcagatcagttatgttgtggttttgcacctcattcctggcaggtcaaaacagaatctatctcttccatcctttcaataatatgtgagctatttatgccacttaataawtcccttcagcttgaggaagctagagtatattgctttttgtaactagtatccctaactgatattgcaaacttcacataaaaacatcctgttgaagatgaagaactagaagtagaagattctttttccccagggacatatgatatttaaaaaaagctacaggtagctggtctttactgtgtacattatcaatctcttacccaaaatactatagtggtattcactgctataactatttacagtatatacagctgttttcttacggtcttagcaaaaccatcttctcctctgttgtgacttgcatgtgcccccccaaatttcatgtgttggaaactaaattcccaaattcatatgttgaagatatttggaggtggggcctttggaggaagtaatcaagattagataaggtcattaaagttgttctcccatgttgagactggcagctttagaagaaaagaaagagagatgtgagctgacttgcatactcttgccctctcactatgcgatgccctctcaccatgc

SEQ ID NO: 827168 - DNA, 618 bp, Homo sapiens
aacactcccaacgctcatggaaacacagtctggcagcttctgaggctgcacggttctgcccgaagccccttctgggacagagaaggcctggggaagacaggcgggctgtacctagaaatcacagtgggggggcaagtttcaaaaagactcacccctacaccgtaaggtaggcctgaccctcctgcagagccctttggatctttaggaatttcacagtttattcctggggctccccttgatgtttcttcaggctggctgacccctgccctctcgtaggattgtgggactatcccgtggatcccccagagaaggcaagctacagtccaacgctgacgcaggtccatagaggtctccttctacttcaagccacagggacttgtcaccaggcagcggtggcattcactgtgccgtcagccgctggtcaccgctggcacctagtgttctgagactggcgcatgcattcgcgacacacacctggctgtcaggrcagtcagcctgcctaagcagaggaaaatggtacaggcagagcaggcctggtctcaggaaaaaggctgccagaaacgattcattgcgggaccctataagtctcaaccatagtgcctccttgggccgtctcca

SEQ ID NO: 827169 - DNA, 583 bp, Homo sapiens
ttaggtctgtgatacatctgaattaatttttgaatattttatgagataagaatcaaaatctattgttttgcctatggatatccagttattctagtaccgtttatttaaaagactgtcctttctccactgagttgtctttgcacttttaataaaaaccagttgtccatgtaagtgcaggtctatttctggactctgtttgagtccattgatctatttttttcatgtcaatgttctcagcttccaccttaagattcttaaacaaaaaagaagagtaaattaaatctaaagtaatcagaagaaaggaaatagcaaagattagagtggaaatcaacacactagaaaacagaaaaataatagaaaaaaattcagtggaacaaaaagctctttctttgagaagatcaataagattgaaaacttctagccacactaatcaggaaagaaagggaggataaraattagcaatatcaggaatgagacagccaacatccccacgggctctcagatattagaggatgataagggaattttatgaacaattttatgacaattttttttgagataggatctcactctgtcacccaag

SEQ ID NO: 827170 - DNA, 506 bp, Homo sapiens
ctttcactgagaaatcaggaggcgctcgagtcttgaagattagacacacacaggggaccaagccctcgagctcaatacctgtaatccctgtaaatctaagaagcaaggaaactgatggtgtctttggttctttgcctgtttagggggtctcagcaactccctagtagaaggcaggattttcctgttacatggcagtggtaagatcagggcaatcaataaacatcagatacacaatagattacctgggtttctaggtgtcagaagtagctggttttcagagagctgccaaatactttttcattcagtttttcattctttcaacaaatattgttgaatgtgcctggcactatcctttctagttatacagcaataaacaagcccttttccttcaagaagcttacattctaatggggaaaatgagggaggagaaggaaaaagaaggaacaaccagtagctgctgaccagargtcccaaggtagaccaccacaaagtgcttttcagtccag

SEQ ID NO: 827171 - DNA, 633 bp, Homo sapiens
tagtagaagaaaagaaataataaagatcaaagcagaaacaaatgaaattgagatgaagaaaacaatacaaatggtcaaacaaaaagttgtttttttgaaaatataaaaaaaatcaacaaatctttatccagactaactgaggaaaaaagaaagaagactcaagtaaataaaatcaaggtggaaaaggacacattaccaccaataccacagaaacaaaaggataaacagaagctactctgagcaactatatgccaataaattggaaaacttagaagaaatgcataaattcctagacacatatagcctaccaagactgtaccatgaagaaatccaaaacctgaaaagatcaataacaagtagtgagatcaaagccagccataatgaaaactatcccagcaaagaaaatcctgggacctgatggatttactgctgaatcttaccaaacatttaaagaagaactaatacaaatcctacataaactatttcaaaaaaatgagaagggaatacttttaaattcattctatgaggccagtattactctgataccaaaacyggacaaaaacacatcaagaaaaaaaaaaacaaaactataggcccatatccccagtgaacactgatgaaaaatcctcaaca

SEQ ID NO: 827172 - DNA, 623 bp, Homo sapiens
gctaatttttttttttgttatttttagtagagacggggtttcaccatgctagtcaggatggtctygatctcctgacctggtgatccgcccaccctggactcccaaaatgctgggattacaggcatgagccaccgcgcccggcccatagacatattttattttcctcaaatatattactacatattaaagtatactcataagataaatctcttatctttttgcctgcatattcccatccatctttcactcatttatttattcaacatttgtttattaaacaatatttgaagttctggatatacaataatgggtgacaaatgcaaccgtaagccagtctggtcagattgagataaaagagaaggataaatagggaagaagaaggaataagcacagaggaaggagaaaaaattaatcttcctagtttcctcctggcttctatttcccactggtcaaagttcatgccaaaagaaattacatcttacacatttctctattgtgtcatctgtcccatttggtggctgcttagggatcctggtgtcataatctgtgtgctgagggaatacatcctctagggttatttaggagtgtcaaataattgttttggtatcatgtgaatatgagat

SEQ ID NO: 827173 - DNA, 613 bp, Homo sapiens
cattgggttaaggcttttaaacatatattttaatatgaaaaggttctttcttttccttttccctactcttcagtactaaatatagagacctttgtcagacacattttcataagttatgatcaactctcatgttgcaaatgcaggataagagaaactgttctcttttggtctgatgttagatgcctgccaatgaagagtcccctaagtttcctctgctgtgaataacatataagaaggtgtcaaaagcagtgaaaattttctaatggagtcttccagacaatcacaatggtgattatttacatcgcaaaaaaaatgtgtgctgtttcttgagatcgaataagcagaatagatttatttttgcaattacctacaatttgataaacacagataaatattgcttagaaaacacattaatattcttaatctaatcttcattcttctataaatacatctaataatgccttgtattgcatactcttctgaaataaaatgtctgtctcttaattaggatgtgtataatggcagctctgaagacattatcstgacatagaacattacagaaggatttgaaatataatgtagactgtatatatttcataaacaatgcatattc

SEQ ID NO: 827174 - DNA, 612 bp, Homo sapiens
cctgcactcctcagcccttgggcrgtcaatgggacagggcaccgcggagcagggggcagcactcactggggaggctctggccatgaaggagcccacagtggtggagggggaggctgaggcatggcaggctgcaggtcctgagccctgcaccatggggaggcagctgacgcctggtgagaattccagtgcagtgccagcgggccggcactgccggaggacccggtgcaccctccgcagctgctgaccctggtgctaagcccctcactgcctgggaccactggcgccagccggctgctccaggtgcggggcgcaccaagcccacgcccacctggaactcgcgccagccctcaagcgccacatgcagccctggttcccacccgcacctctccctccacacctccccgcaagctgagggagctggctccggcctcggccagcccagaaaggggctcccacagtgcagcggcaggctgaagggctcctcaagcgtggccagagtgggtgcctaggctgaggaggccccgagagctagtgagggctgccagcacgctgtcacctctcaattagatgttagattttcattttttagttttcttacaggtggaataattc

SEQ ID NO: 827175 - DNA, 660 bp, Homo sapiens
caacaaatggtgttatgaaaactatatttatatgcaaaaagatgaatttggatccttttcttacactatacacaaaatcaactcagtacagatgaaagacaaatgcstaagaccagaaactgtaaaacttttagaacaaaacagagggaaaccttcttgaaagtgcttgttacaatgatttcttggatatgacacaaaaagcacaggaaacaaatgcaaaaataggaagagagactacatcaacctaaaaagcttctgcacagcaaaggaaacaacagagtttaaaggcagcctaaggaataggaataaatatttgcaagccacagacctgataaagggttaatatttaaaccatacaaagaaatcacaaaactcaatagaaaagcaacccaattaaaaaatgcacaaagggattccatagacatttcttcaaaaaagacatacagaaggtcaacagacacatgaaaagattttaaacatcacaattcatcagggaaaagcaaatcaaaaccataatgaagtatcactgcacatgggttaggatggctattataaaataagactataatgatataaatgttgccaagggtgtggagaaactggaatgcttgtataatgttgttgcaaatgtaaaatggtgcagcaactatggaaaatagt

SEQ ID NO: 827176 - DNA, 634 bp, Homo sapiens
ctccagagcctgccgctgctgcaggtaactcttggagaggaagcacactctgtcccctcctgtctactatgaactggaagtggcattgtcttggttaagagcacaggttataaggttgaaatcacagtgctgcctttacagctacataaactaaggttaggagatctggaaccctgggcctcagtttcctcatctgcaaaatggggagaagagagatattttgagaaccaaaacaataatgagatgcggtttggcgagcactgagcagcatacagtgggttcccatatttgctattattcctcttactgccaggtgttgggtggcctgcaaaagagccaggggagtttcgtttccccgggtactcatgatggacacctcctgaggttctgcttggagcaggcctctagtgcatcctcaagaagctgagacctcatgcagactgtggccccctggtccccaccctagagctgcagcattctgggatgcaggagcttccctcaaagccgagctgggcctgcyggctccctgtggttctcatgaggacttggcacctaccctgcccctgccctccctgttgggcagcatcactcaccgtcctcctgggaccatcatcacagccaagtccagtgtgct

SEQ ID NO: 827177 - DNA, 618 bp, Homo sapiens
ttaccaaagtaaagtaaatactgggccattaaagaagtctcaatacatttcaaaggttagaaatattacagaatatgttatcgaattacaacaaggctaattagaaatcagtarcagtaaggttttttaaaaaaaaaaatccctaaatctttagaaatgaagttatatactccataataactcactactaaaatattacttcagaaagtcaactcatgggccaggtacagtggctcacgcctataatcccagcacttttagaggctgaggtgggaggctcacttgaggccaggagtttcagaccaacctgggcaacatggtgaaactccatctctactaaaaatacaaaaattagctgggtgtggtgatgtgcgcctgtaatcccagctattcaacaggctgaggcacaagaatcgcttgaacctgggaggtggaggttgcagtgagccgagattgcaccactgcactccagcctgggcgacagagtgagatactgtctaaaaaaaaaaaaaaaaaaaaagtcaactcataaatattctgaactgtagataatgaaaacacaacatatcaaaatcattggatgcagctaagcaatacttagaggaagtataactttaa

SEQ ID NO: 827178 - DNA, 595 bp, Homo sapiens
acaccccattgtaaaacaatggtatggttcacaacctatcaacattccatctgaatgaacattccatcaggacagagccatacttggccttcttgacattccccattccccactcatcaggataactcactcacagccacatctcaggtgtctcaagtaatgtctcatctccacattgctagaggccacctgtatcagtgttgcctgctgtgcacacaagtaattaacttataatactccactggcgctgacacattccacagcatcaaaaatttcgccagcagatagttaagcatgcgagatgattccttagttaaactcgataaccaaatatcacatgtaaatgtcagtcaatatggaagaccttgttgacatgcaagtcacatattcagggcggaggtatagtagctatggttaaacctccttcttttgaaatctactaatctggattctgtggtaatgcagatggagctagaatagayttgtttttgccatgaaagaaaagtttgctttgagagtcctgaaaacaaaactgcacgggtcagatctgactagatgacaagttcaataaagaaagaaatcatgcatagcacag

SEQ ID NO: 827179 - DNA, 634 bp, Homo sapiens
ccctctccccttcctttgtcctttcattaacagtttataatattaataactaacatttgcatagaattgtgtaattaataaaatatttttatcccttttttttttatatggagtcttgctttgtcacccaggctggagtgcagtggcatgatcttggctcactgcaacctccacctcccaggttcaagcaattcttctgcctcaggcccccgagtagctgggactacaggtgtgcaccaccacacccaggtaatttttgtattttttttagtagagacggagtttcaccatgttggccaggctggtctccaactcctgacctcgtgatccacccacctcggcctcccaaagtgctgggattacaggcatgagccaccgcgcctggccaagtatttttattcttaatcctacacacaatactgagagggggatgtttctcatctttcatagctgaagaaccaggagattgggatttgtccaaagacgcagccagtaaagagaaactttcggcagcaccacattgctctctatataaataaagcactgcaataaatgcttgggtttgggaatagaagtgataatgagatgagtwaaatagattttgacctcaaagaatttttttttttttttgagg

SEQ ID NO: 827180 - DNA, 479 bp, Homo sapiens
agctggtcatttgcagaactttgcccctctatctagaatggaaacttttcacttctgcactcagaggtaggcatcttcccttgatcacagcacactttctctcagagcctggatgagacytcacaacaaaactcacaagtagctgttacagagatgaaagctggtaaaggagatgaaacctccttgctgacctatgtgcaaatggaagtgagcttttttcacatgataggaaacatacaaagtaccttctccttcatgtcacattctttcaataaactgaagagaatgctgtgaggggaacttcaggattgagaaatagaccctccccccgacaaaaaaagataaaaagaccaaaagaaaaagaagaaaagattgcacatttgcaccctgtgcatattatctgtattggcaaatcaacgcagaacagcaagatggtcaaaacagaagttctaagtgctcagtgaaatcaggattgaatc

SEQ ID NO: 827181 - DNA, 582 bp, Homo sapiens
tgctggatgtgttaattaacttgattgtggtaatcatttcataatatacacacatatcaaatcatcacattgtgtacttcatatatatacaattttacttgttagttgtascttgataaagctggaagagtagaagaagaaaaaagaatgaatgacctagtcagctgatgttagccagactgctcatcagcagccccagtacttgcacaatagatgcatgaatggtgtagcctgatgaaggaatggacaatctgcatgggaccaaaagcctgagctctccctcactgaagcttatctagctatttccactgtcaaatgtccagcttgtgaggaatagagtccaacttgtgtgctctttatagtattgtatctcaaggacatccattttagtggcaagttgacaatattggaccccttcttcctcgaaaggggcagcaactcatcttatacatgcattctaagtatggacttgcatttcttgcttgcaggacctcacccaccatcattagctgagagtgcacagagtttgattaccaacacaggatcccacataacatcacattggaccaaggaacactctag

SEQ ID NO: 827182 - DNA, 421 bp, Homo sapiens
tgtagcttgataaagctggaagagtagaagaagaaaaaagaatgaatgacctagtcagctgatgttagccagactgctcatcagcagccccagtacttgcacaatagatgcatgaatggtgtagcctgatgaaggaatggacaatctgcatgggaccaaaagcctgagctctccctcactgaagcttatctagctatttccactgtcaaatgtccagcttgtgaggaatagagtccaacttgtgtgctctttatagtattgtatctcaaggacatccattttagtggcaagttgacaatattggaccccttcttcctcgaaaggggcagcaactcatcttakacatgcattctaagtatggacttgcatttcttgcttgcaggacctcacccaccatcattagctgagagtgcacagagtt

SEQ ID NO: 827183 - DNA, 702 bp, Homo sapiens
ttttcgattcagggggtacacatgcagaatgttacatggatatatcacatgacgctgaggtttcgggtaccattgatcttgtccaccagctggtgagcatagtacccaacagttttccaacccttgcccccctccctgtctctcccctctggtagcccccagtgtctgttgttgctgtctttatgtccatgtgtacccaatgtttacctcctacttataagtgagaacacgtggtatttggttttccgtttctgtgttgattcacttaggataatgacctccaggtacatccatgttgctgttgctgcaaaatacacgatttcactctttttgtagctgggtagtattccacggtgtatatgtaccacattttcttgatttaacccacggtccatgggcacctaggttgattccatgtctttgctgttgtgaatagtgctgtgatgagcatgcaagtgtatgtgatttttggtagaatgatttcttttcctttgggtatataccaagtaatggaattgctgggtcatgtgatagttttgttttaagttctctgagaaatctctaaactgctttccacagtggctgaactaatttgcattcccaccaacagtgtataagtgttcccttctctctgcagcctcaccasgatctgttgtttcctgactttttaataacagccattctgactggtgtgtgatggta

SEQ ID NO: 827184 - DNA, 677 bp, Homo sapiens
ctaaatctgtacttagcctcaaatcatattgttagtaaaatgacatttcttatgactttggctgtcttgaatttcagaataaaagcaatttctagaccattcaggaaataaacctgcaaatggactggagggaaaaagattggattctagatgaatctacatgagctgaattatcccggcagtataccagtctcctgcattattttaactgtatagacattactgaagtctttattcagaattatcaaagcctgtcactactcagttcctgaaaccataacccaccctatcaaagctgactccagtaagcaaatgcttcaaaatgactcttaagattccacattccaaaaagccaagtccctgaagcgacagaataaagtcaacagccctactatatgttttctatttttatttttaaagggagttaataatgaggtttctccctccaggatcaactctgattctgtggccaatattcagtttaagcagatatttttactcatctaataataatagatatatctaagtggaaaaaatagtttcatgatagagagcttaatccattagacagagcacctgagaaagtcatgatgaayggtaacagaagctagaattagactctggctctatcttaggagtgatattttgccaagcaaagtgtgcaagatagggcaaaa

SEQ ID NO: 827185 - DNA, 602 bp, Homo sapiens
gttagctggttattatgttggcttgattgcataattgctttataatgtctgtgggctctgtagttaagtctatttttgtggtgacaggtatcattctttcatttccatgtttaggactcccttaagcatctctggtaaggcaggtctaatggtaacaaattctgttagcatttgcttgaccgaaaataatattttttctttacttatgaagcttagtttggcagaatataaaattcttagttgcaatttcttttctttaaggatggtgaaaataggtccccaatctcttctagcttgtaagctttctgctgaaagatctattgttagactgatggggctccttttgtaagtgacctgccccttctctctagctgcctttaaggtttttttctttcttgtttaccttggagaatctgatgattatgtgtcttgtggatgaccatcttgtatagtatcttgaagggattctttgaattttttgaacttgcatatccacctstctagcaagactgggaaatttttcatggactttatcctcaaagacattttccaagttgcttactctttctcctctttcaggaatgccaatgagtcacaggctt

SEQ ID NO: 827186 - DNA, 592 bp, Homo sapiens
aacagaacagagacaataaatggggtaaaaaagaaatatgcagaataaaataaaatattataaatcatttatatatgaaaaggggttaatttctaaagcacacggggaaatcctacaactcaatagcaaaaaaataataacgatgaaaaattttgcaggaacttggatggaactggaggacattattctaagtgaagtaactcaggaatggaaaaccaaatactgtatgttctcacttatcattgggagctaagccatgaagatacaaagacatacagattgatgtggtggatttaggaggctcagaaggggaaagatggaaggggactgagggataaaaaaactacatattgggtacaatgtacattactcaggtatgtaaaatatcaaaatttatcattatagaattcacccatgtaacgaaaaacaacatctaccccaaaagctattgaaataaaaattaattagttattagtgagtagaatggtggctaccagaagccaggtggttgggagaacagyggagttgaggatgcctggtccatcctggtagaccctggcctaccaacagatgaaaggagtactcagacaca

SEQ ID NO: 827187 - DNA, 391 bp, Homo sapiens
gaagtactcaggtgggggtccttgaaaaaaccctcaggctgagcagtggaggctgtgctgtgcacatattcttgcaggtgtggccaggcaggagtactgggagggactggcgggcagaagggcctacartacagatgtgtcccagctcacaggaaagttggccccgctgtctcttcgctcagaagtcaggtgagttgagagctacttggtggaagaaagagagccttggatgttgggcgcctatggctgcgttctgctgcagctacccaacatgcaaaaccccctgggttcaaggctggctgtagttctatttctgcctactctctgggcagatgcccctgcctgttccaatgtctctgggggtcgtgggttctcttgtaggtaggatccc

SEQ ID NO: 827188 - DNA, 657 bp, Homo sapiens
gccaaagtatactttgtaagtgaagctcatactcatcactgaataagagaagatataatgatatctgaacattcaatgttagaaattgtatggtgatgaattctcaaataatgtaataatttcttatttagagagcttataaaataattaacctaaggacatttaccacgtatttctgtactcttcgtgataaagcagtgatgaaactggagttgaatgagtagaaataatgtacataatgtgtagctactctaaggcatatgtctaaaattgaacatgtaaaacattttatcaagtattttctttatagttttagattagcaaacactttcaagtttttggctgttgctggcccactgtgatgtctatcccatcttggaaatgaatcctttgatctctttggaatgatctattgaaggcctaatgaggtggaaaatcatatttatttattcacaaacttaactaattattatttgctaagaacatgccattctgtcatgtggtaaagagatggcaagtaagcacacaaatattaatagctcattgtgagaagggttacaataaaggcatgctyttggctattaatttgagactaatggaaagtggtgaagtaaggcttctctaagaggatccacattttggaagaggcttcaagaa

SEQ ID NO: 827189 - DNA, 609 bp, Homo sapiens
acagtactcttatatcaaatacaaattcctgccagattcttggctggatactgggtatccaagataagacagtttagtttctcaaggagatgatgatttagttggtaacaggcatgaaaacaaattaaaacaaaaagaggttataaatactaaagaagcacagagtacacggagacaaagaggtagtcatggcctgcacctagcagacacacaataaatagccatccagtgaaatcctttgagcaactactatgtggtaagcgccattcaggaatacagcaatgaagaaaacagatagaacccctgccccagtcgggcatggtggatcacacctataatcccagcactttgggaggccaaggtgggtggatcacgaggtcaggagttcaagaccagcctggccaagacggtgaaaccccgtctctactaaaaatacaaaaactagccgggtgtggtgccacgtgcctgtaatcccagctactcaggaggctgaggcagagaattgcttaaacccaggaggtggaggtggcagtgmgccgacatcatgccactgcactccaacctgggctacagaatgagaccccatctcaaaagaaaaaaaaaaaaaaa

SEQ ID NO: 827190 - DNA, 609 bp, Homo sapiens
acagtactcttatatcaaatacaaattcctgccagattcttggctggatactgggtatccaagataagacagtttagtttctcaaggagatgatgatttagttggtaacaggcatgaaaacaaattaaaacaaaaagaggttataaatactaaagaagcacagagtacacggagacaaagaggtagtcatggcctgcacctagcagacacacaataaatagccatccagtgaaatcctttgagcaactactatgtggtaagcgccattcaggaatacagcaatgaagaaaacagatagaacccctgccccagtcgggcatggtggatcacacctataatcccagcactttgggaggccaaggtgggtggatcacgaggtcaggagttcaagaccagcctggccaagacggtgaaaccccgtctctactaaaaatacaaaaactagccgggtgtggtgccacgtgcctgtaatcccagctactcaggaggctgaggcagagaattgcttaaacccaggaggtggaggtggcagtgagccgasatcatgccactgcactccaacctgggctacagaatgagaccccatctcaaaagaaaaaaaaaaaaaaa

SEQ ID NO: 827191 - DNA, 609 bp, Homo sapiens
atgtcttgtctacatgtcaggttgcagacctttcaaattctgacaccaggagacaaatccatctgcactctggtccatctaatgcctggtgaggartctgctccaagccagaggtttctgggtgataaaacagtattcctggcctcccagagctcctcacactcccatggtcagagctcaatgccccaacattgtcctagttccccacatcacgccctggtcatcacccagggcggggatctcaaccctcctgcacgttcaactctccagggagctttcaagagaaactcccagtacctgggcccaaccacacctccggggactgggcttcctgggcaattctgatgcatgtcgagggctgagatccactgtcccggagaatctcgggctccagcccccttctccctctcagatagagcccatctgccaggtcccccgtggcctgctgcccacttacccacgaatcagtctacactaggctctggcacaggctctagggtgatggctcctcccagggaacccttgttctttaacaggggcctcctctagaaaatggatgagcagccaaaaagtgacaccttgagcctctctcctcccacctcaggctaa

SEQ ID NO: 827192 - DNA, 603 bp, Homo sapiens
cttatgcaattgagccacagctgctactaccaacacctcatctcctaacaccaccagctgtcccagccttcactaggatgagatcccagccctggcaaggcctccattgttcttgctgaagccrgagtcgcagcaggtctggccacaagccttggcggatcagacccacgaacctctgggcattcccaccaccccctaaggcgggcgaagcaccaccacacaggatctgggtccctctgtggctgcctggagaagctgatgatacagcctggaagtggaatgagtgcatcctgggaaggactttgagccatgagagacataagacaggaaagagataaactcttctccctaatgaaactactccagtgctcagtggttccagatgtcttgcatttttggatgaggttatggtcagcctagttagtgcgccatctttcatttgcttccccacctttcctgcctcacctcccttttcctctcacttttgctgccctgggattgtaccttcctccaataaagtgttagtaaatgcactttacacagtccgttttctaaggaacccaagctaagacaatctcctttcctactcttattctgcactaa

SEQ ID NO: 827193 - DNA, 541 bp, Homo sapiens
ttcacttcttttggatatatacccagcaatgaggttgctggatcatatttttaattttctggggaacctccatgctgtttttttataacgactktacccatttacattcccaccaatagtgaacaagtgttttcttttctccacgtctccaccaacacttattatcttttgcttttttgataaaatacactctaatacgtatgaggtgatatctcattgcggttttaatttacatttccctgatggttagtgatgttgagaattttttcatatctgcattggccatttgtatgtcttcttttaagaaatatctaagtcttttgtccatttttaattctgttatttattttcttgctattgatttgtttaagttccttatagattttggatattaacccctaccagatgtagcaaactgaattcaatggcacattaaaaggatggttcactatgatcaggtgggattcaagaatggatcaccatatgcaaatcaataaatgtgatacaccccattaacagaatgaagaacaaaaaccatatg

SEQ ID NO: 827194 - DNA, 613 bp, Homo sapiens
aacttgaagataagtctttagaaattacccagtcagaaaaaaattaaataaagaagaatgaagaaagcctacattgcatrtgaaacaccataaatcagccaagtatttgaattttgtgagttccagaaaaagagaagatgggaaagccatagaaaacatatttaacaaaataatatctgaaaacttaccaagtcttgcaagcgatatagacatgaagatacaggaagctcagtgatcctcaaataaatgcaacccagaaaggttctacacagcacattatagtcaagctatcaaaagtcaaagataaagcaagaattctaaaaacagcaagagcaaatcatcaagtcacatatccaaaaacccccatcgggcccatcagactaacagtagatttctcagtagaaatcttacaggccaggagagaatggaatgatatattcgaagcattgaaagaaaaaaaccctgctacccaagaatactataaacagtaaacccttcttcaaaaataatagaaaaataaaatattttccaggccagcaaaaactgagagttcatcaccactggcctagccctacaagaaatgattaaggaaatcctatatttgggtgtgaaa

SEQ ID NO: 827195 - DNA, 627 bp, Homo sapiens
aattttaaaatatttcttagagtaatggctttaaaatgagtcttcagtgaattcagttggcccttagtacaaaatacgttcttataaatattgatcagaaaataatctgtaataatatgtactactgtctctcccaaaaagctcttaaagataaaacaaatttccacttaaaataaaactttcttgatttcattctgcatttattttggaaaaggtgagaatctcataatcaacagtgggagaggagtttgggagaggaggttcttcataatgtcagaaaagatatcaaaggcacattctgttgatttttttccttgctaaaatgttttataatgtcatccaggcaaggttatcatgataattttttagaatgaatgaaaagatattctagaagttgctctgttttgttctccaaccctttggatagaaaaggcaacaaaataagtgcaattttgttccttttttgccaacttgaaatcttactttgacctctagattcaccagccttatgtttctgggcaaccccccacatttccttgggagcctctcaaactgctatcatttacccarcaacaaggacagttctaggcctagacaaatggcatttgcagtacctgagaactagcc

SEQ ID NO: 827196 - DNA, 306 bp, Homo sapiens
ttgtctgtgtacataaaaattctatgtaattctcaaagtttttaaagccgggtgtggtggcacactcctgtagtcccagctacttgggaggctgaggctggaggatcacttgagcccaggagttctaggctgcactgtgctctgattgcacctgtgaatagccaaggaatgtcagctttggcaacatatcaagaccttgtctctataaaaaggaaagaaaagaaaaagaaaaakaattcactattagtgaatttaggcaagttcacatgataaaggattaatattcatgtattaatcgtagttcat

SEQ ID NO: 827197 - DNA, 558 bp, Homo sapiens
acttattttgcccaagataaaataattaaaatgatatgtatatgattctttttgttatctcttgtccaaatgattagattctttctaccttggacactaccaatgtgtactgataaattgtgttttcattcctttttaaaatatatgtcctgaaaaattactactccttaacaccacatttttccacattatttgttgttaacatctccaaatagtgagataccttgcatacataaagagtgtactaaatatatatttgtgatcaataaaataatagttaaataatcttgtaactaacatgcagagtaagaaataaacattgcacatgccacacacagaagacctatgcctgtctccttatcacatccctctccttaactcctagaaaactactgtcctgacatgagacaattatttatttgactttttaaaaatttwaacaaatctgtacttactgctatacaaaatgttttagtgttcaaacttttttttttttcagatggagttttgctcttgtctcccaggctgcagtgcaatggcgcaatcttggctcactgt

SEQ ID NO: 827198 - DNA, 705 bp, Homo sapiens
gtattgcattgcattgcattgtattgtattgtwttgtattgtattgtattgtattgtattgtattgtattgtctaacagtaatttttcctattaattgttttcctcatttttttctgttataaattgtgggaacaggagagattgtgaaattttaagtgttttttgtataaatgatgatagatgtgaataaattcatacacaataagtttagaagtcataggtacctattacttcacatcattccttaggtgtaggtttcttttgaggttctcagctattatatttcttaaagaagaaataaattcttgtttaagaataaataacctatttttagttttaaagtcatcaatttatggttttttcattttctcttattttgtctaatgaatagaaaatataattgtagtatattttgaaatttggtttttattttcttcattaaaaacctttttttctgagaatgtccaatataatatggccattaagaagcaaattcattcctaggtgttcacaactaacagttaaacaaatcggtattcataacgacaactccattgctgctatcaagtgattttcattgttatgaaaccatatgatctcagaattttagaaaacctcagagaacagagaccccagctctcctgagagccccagcatagcccatcaacatcaacaattggtagtcaccaagctctgtcaatgac

SEQ ID NO: 827199 - DNA, 621 bp, Homo sapiens
agtggcttcactccatcttagacacagaaaggattttacagagaaaatgaagacagccaatattctctcatgtctgctttggaagtagtcactaatttcagtagttaatgttagcaggaatatcttaatggctggtaaccattattggttatagcacagaatattgttagtgttataattgcttttttagagcagaggtgtgggttgatttccagtcttaagaattagcaatacacttttctgacaatatctgcaactaccaacccaacagagattccagttattaatagttatggtgtgctcattttcactggacttctggcatgtgataacacttatattttatgcctgtttggaaaaggatagtaacactttttaaattattcttgttgtattagtttcctgtggctattataacaagttatcacagacttggtgagttaaaataacaaaaatttattctctcacagttttggaggctggaagtctgaagtgaakgtgttggcagggccatgccccctccagaggctttaggggaggatcctgtcttgtatcttccagtttctgggggctgctggcattccttggattgtggccacatcactccaatctctgtttcca

SEQ ID NO: 827200 - DNA, 560 bp, Homo sapiens
taaacaattttaaatgatgctatagatctacrcactaaatgttgaataaaataaaaggcagcaacaattaaagatgagttcaggccatttcatcaactgatgtattgttcatcaagattatattgaacaaagacaataaatgcagtcatggtgacatacactgttccaatctttttagcatttaaatcaggagaaaatacgtcttgatcaagcaacactatctaattggtggggatcctagcatgtcattgcctggatttttgatgcaaaaagagacagactccaaggattaagaattagactagggaatgcaacttggtcatttttttgatttgtggtgattttattatggatacagagcatattcttcttacattgaacactttattgaagctaaggggtgccgcacattgcttgaaaaggttagcctatcccaatgagcaaataggcatgtactatgtcaagaggaggacttgaactttctgacagcctttccagcatgagaaggaagagcttcaagatgtctcacctagaaatccagacgcataccctattattta

SEQ ID NO: 827201 - DNA, 589 bp, Homo sapiens
gtcacctttaatggctctttccagccattaaatgttgtaattctctgaggctcaattttagactttgttcttttccttcatacttacttccatatgtaagccaagtgcttctaaatgtgcttctctagcctagaactttgttttaagcatcaggtccatttattgagaaacttattcaaaggaacctcaagttcaacaagtcccaaactaaatttgagatttagcctcccatatagtcatcttaagtatttcctaacttaggaaacagcacaatcacttaccactctcactgttatttgtgtttacttctacatttacttctacatttaccttctacatttacttaatattatgcccatgctgtgactttatatttgtttatttatttgctagtaacatctttctgtctcctagggagaagtccataaattcagtgagggtggaggccatgtatattttactcactgttctcwggaagtccgttacaaaagcaatgctgaatggatatctaataagagtgcatgaatagatgagatgaaaactgtaaacatttcatcacatgggataggatataacttctaacatcctg

SEQ ID NO: 827202 - DNA, 564 bp, Homo sapiens
tccctgcaggtggagccctagccagggatccacctctctctacctagcacttccctgtccccctcccatatcagtgaggaggctaagaatgctaacatagtttctcagatctctctcttcttataaagcccccaattccacttccaggacaatccattaattcattaatccatgaattcgttaatccttgaatggatgaatccatttatgaggtcagagtcctcatgatccagtcagttcttaaaggcctcacctttcaatactgccacatcagggattaagttttcaacacatgaaatttgggggacaaattcaaaccataggcaatgatcatatggttattgacattcattctgttaatgtggtatattacattaatttatttacatatgttgaacgaaccttgcatctctaagatgaatcctgcttgatcatggwgaatgatcttttaaatgtgctgatgaattcagtttgcttgtattttgttgaggatattagcatctaggctcatcagggataatgatgtgtagtattatttttttgttgtgtcttgtaggaccttgg

SEQ ID NO: 827203 - DNA, 505 bp, Homo sapiens
tgcaaatgagatacactgatagatttccctttgtgtgtcaaaagaaagcctctcagatacttactgaacacatttaatgtggctttaaaattaaagtagaaaaaataaatattttaacttcaagatagatacttcaaatatttatcctaggaaactaagccttgtaaaattagatgtgttattatcttggcagtaagcattagcaaacactttagattccactagaatcaaccatctttcaatatattaaaattgtgttgggtcctaaatgtctttgtcctaaaaagtataataagcacattaagtcaattttgaatttaattgaattcttgctacttattaaaataccacaaataataagtacttttgtggatttctaaatatgcatatgctactgatgtcataaaaattgtraaggaaaaatatacaatattctggtaaaaggaagacagatgaatcttataattaatttaattgattaatgtatttataaacagaacttatc

SEQ ID NO: 827204 - DNA, 505 bp, Homo sapiens
tgcaaatgagatacactgatagatttccctttgtgtgtcaaaagaaagcctctcagatacttactgaacacatttaatgtggctttaaaattaaagtagaaaaaataaatattttaacttcaagatagatacttcaaatatttatcctaggaaactaagccttgtaaaattagatgtgttattatcttggcagtaagcattagcaaacactttagattccactagaatcaaccatctttcaatatattaaaattgtgttgggtcctaaatgtctttgtcctaaaaagtataataagcacattaagtcaattttgaatttaattgaattcttgctacttattaaaataccacaaataataagtacttttgtggatttctaaatatgcatatgctactgatgtcataaaaattgtaaaggaaaaatatacaatattctggtraaaggaagacagatgaatcttataattaatttaattgattaatgtatttataaacagaacttatc

SEQ ID NO: 827205 - DNA, 512 bp, Homo sapiens
gcattaatttctagaagtgttttggagatctgttttcaataacttatatgagatgtagatagataccagatttgttatgtgtttcttaatatttctggggtctyatatcccatcttcaagatatcttattttgccaaatgaccctgcaaccctttctgtgtttacccatttttttgaataaatagtaaatggttctaacatgattgtatattaagattgggacacatttgatgacctttgagagagttgtaagcatggaaatacggagattctatggactgtggtgaggagtcgtcactttgaaccagaagaaattccagttgtagctgaacccaccaaaccttagagtgagagaagcatgtagctattgtttgaatgtatataggaaattcctttttgtagtaggggatatctgagtttttttttatcctaaaaggtaatagcaaagagtaagaatgtcaggatagttgataaataaatcaaaatatagaggggaaagggagtaaataaaa

SEQ ID NO: 827206 - DNA, 560 bp, Homo sapiens
tctttccatttcacagttgaagaggctgagtcacagatgtgtaaagtaatttttygaagaatacccaatagagaaatttgaggtccatgagctttgagttctgtgatgtctgttgttctaatgtatatttaagtttgtcaattacagtgatagtaaaaacaagaatttggaaacacacaaaatggcccacactgtaagaatttaattgccataaagggagacatgtgctatcattaccatgcctttttttttttttttgagatggagtcttgctctgttactcaggctggagtgcagcggcctgatctcggctcactaccatgacattttaaaaggatagttttaacacagtaaatgcacataatgtgttaagtaaaatctaatattaaaatcaggaaacaatgtactttcttttgctcagtatatataggttgtcataaatgtttgctaaatgacattttaactgtagataaatatatactacatatgtggatatgacagaatttaaaaagatttaaaagacatggttgtgtataacattttaagtatttcatacgacg

SEQ ID NO: 827207 - DNA, 560 bp, Homo sapiens
tctttccatttcacagttgaagaggctgagtcacagatgtgtaaagtaatttttcgaagaatacccaatagagaaatttgaggtccatgagctttgagttctgtgatgtctgttgytctaatgtatatttaagtttgtcaattacagtgatagtaaaaacaagaatttggaaacacacaaaatggcccacactgtaagaatttaattgccataaagggagacatgtgctatcattaccatgcctttttttttttttttgagatggagtcttgctctgttactcaggctggagtgcagcggcctgatctcggctcactaccatgacattttaaaaggatagttttaacacagtaaatgcacataatgtgttaagtaaaatctaatattaaaatcaggaaacaatgtactttcttttgctcagtatatataggttgtcataaatgtttgctaaatgacattttaactgtagataaatatatactacatatgtggatatgacagaatttaaaaagatttaaaagacatggttgtgtataacattttaagtatttcatacgacg

SEQ ID NO: 827208 - DNA, 646 bp, Homo sapiens
cttcctgttcactgtaaacaaggtacctgcttctgcttcaccttccaccataattktaagtttcctgaggcttcctcagccacaaggaactgtgagtcaattaaacctcttttctttataaattatccagtctcaggtatttctttatagcagcgtgagaatggaataatacacttctgatggtcaattttagagtaaaacattactataatagcatctgcaatagtagcaagtaagtcctccctctcttctcttcaattagtcatagtcattattctttcttatgtttaaatagtcccccattgtggtcaataagaggattgtcatattgccttgaatattcttttgacacatccccatcagtctttgagcatttccctgactttcttgcccaacaagatgtcccatttcacttagcatttttactgcccccaggctagaatcagccacttcttcgggagccctgaagaatcagtatttcttatatttctaaaacaaaaatataatgaaatgtcccaaaagcaacccctaccaactagtatctttaatgaggtatagtaaattaattgattaatttactagttaattaattaaggtcttggttggatttttactatcaagaataaatgtttaaagtaatagattt

SEQ ID NO: 827209 - DNA, 634 bp, Homo sapiens
gttaacttggaccattttaatgggcaaatggrtggagctgtcatgttgtgggagggaagttggagagggtatttgaggtagggaaacatgactactaatttatgctttaaagttaaaattaacatttatgtgtttatgtataaagattttttaaaaattgcatgtgatggcattaattagtatagctcctgtggaaagtgatgcagtaaaccctgtcaagcagtgttcatactctttgagctaatcattctatatctgggagttcatattaaggtattaaattaaaagaagaaaaatgttaatgtgtgaagtcatcattgtgctattaactatgtaatatggaatattatatgctaggaaatataataaagtgtatccaacataaactcatgctgaaacttcctctttttggactttacatccagaaaaattgttgtcatattgatgggatgtaacacacaggtaaataatacaattatgaagggtacaatgataaaggctgttacttagaactatagactatataataaatgaaaaagaacttataattgcatgtagaattaaaatatatatgtatttatttgagtactagaaggagataagataaaatgaaaacagtgtggggggattatag

SEQ ID NO: 827210 - DNA, 624 bp, Homo sapiens
taagccaccgtgactggcttctttcctccttttttgttggccatgtgcctttaaaatcctttctgccaatttcatgggtaccatctcggctcaggcagtcattaattcctcattttagttattttatgtcttctatctggtttgtttgtttttctagtcttggccccgtctctcctacccaataatccttcctctatactgctgctgaagtaattcttctccaaccttgcttaactaattcagcaatttcccattaccttcaggatacagttcaaactccttaacacagtttacaaaactcttcatcatcttacatctacatttcccatttctcctgctgcatacctgcataccacaatgtttgcttctatggtatgcttacctgcaaaatatacttacctccacagttcatagacaaggaaatatatacaaaggtatatgttcctttttctggagcatactcatgtctttccttagcttggtcaattccaatagattcttcargactaatcctgagctttgatacattctatgagaagtacttcctgtttaacctaggctgagtgaggtgttctttctccaccttttagcaataacctttatttcagtgtttattatcactgt

SEQ ID NO: 827211 - DNA, 384 bp, Homo sapiens
agaatcactatgattaaaaaaagaacaaactgctaggccaggcacagtggctcacccctgtaatcccagcactttgggaggccgaagtggtcagatcccttaagctcacaagtttgggaccagcctgggcgacatggcaaaaccctgttcctacaaaaaaatacaaaaattagccgggcatggtggtatgcacctgtagtcctagctactcgagaggctgaggtgggaggatggcttgagcataggaggtgcagttttcagtgagctaaaatcatgccactgtattccagcctgggcaatagagccagaccttgtctcaaaaaaaaaaaaaaaaaaaaaaaaawatatatatatatatatatatatataaattaataaataagt

SEQ ID NO: 827212 - DNA, 612 bp, Homo sapiens
ggtgcatctcatctctagtttttatcatattttcaaagaagtcccttaaaaaaaatctaggaacctctagtgaaggaataacataatttaggaaagggcagaacttacagtggggtccagatatacagctctgatacttgctggttgtgctatatattcttaccactgtcctagatttagcaagattagaagaattgattactcactctagctgatttataataatctgaggtatattaaccggaataaaattaactaatttaaatagcactacatcaagtcagtagataggataattttagggcagaacattttcctatttgcctgttctctccatttaagcaaattacagaagtcagattatcaacacatttgttgctaagaaaccagtcttcacaagagatactgctgttacatggactccatagttcagttggtctggaaaataccttttcccttggatcatgtttgaataggcaagaccataactgcctcccatctmccttcctctttctcttcctcttctccatctcttccccttctctttcttctctatttctgaggctgaccaatacttattctggaaaattcagtgtatagactacagccaag

SEQ ID NO: 827213 - DNA, 643 bp, Homo sapiens
gaagatgtgagaaagttccgagagactcgttaaatggttttgaccaaaatgctgayagtgatatggacaataaagtctaggctgaggtggtctcagatggagatgaagaacttattgggaactgtagcaaaggttactcttgctatactttagtaacgagactgagagcatttgcccctgccctagagatctgtggaactttgaacttgagaaagatgatttagggtatctgacagaagaaatttctaaggagcaaagcattccagatatgacgtggctttttctgaaagtaagatatgaaattggaacttatgtttaaaaggaaaacagagcataaaattgtggaaaatttgcaacctgactttgtggtagaaaagaaaaacccattttctaaggagggctgcataaatttgcataagtaatgaggagccaaatgttaatagccaagacaatggggaaaatgtttccagggcattttagagatcttcacagcagctcctcttatcacaggcctagaagcctaggagggaaaaatgtttttttgggcggggcccactgctctgttcagcttcaggacatgatatcttgtgtcccagcagctccagctccagccatggcttaaagaggccaaggtacagcttgg

SEQ ID NO: 827214 - DNA, 562 bp, Homo sapiens
tgttctactttttccaaaagcaaaatatttaatgagggaaattgaagaatgcctaaataaatgaagataaaccatatccatgggttagaagatgttgtctctctctctctctgtttatatatatcagacaaatatacatgcatatatagtcaatgtaatcccaatcaaaatctcaaggtttttttttttaaactgacaagctgtttctaaaatttatagtgaaattcaaagaagcaaaaacagccaaaatgacttaaaaaacaagacaaaacaaactttgagaactaacactacctgattttaaaacttattataaagccatagtaatcaaaaatagttggtattggtataaatataaataaataggtcaatggaatatattagatggtgtagaaatagacccatacatgccacttattttggcaatggttaagaggtaattcagtgcagaaagaatggtgttttagacaactattgctgaaataattggatatttatatgcaaaaaaactgtacttcaatctcgaccttrcccatataaaaattggcacacaatggatcat

SEQ ID NO: 827215 - DNA, 469 bp, Homo sapiens
ctgtattattttcatttgcattattttgaaaatgcatttatagttcatgcataacgaatgagtgactaataatacacagatatattcctaagtgctttcattcttgattatttatgacatttattttttattcwtctggcagggtaaagagctctagggagcaagatgaccttttcatacatgaccaataagagatgaaaatgcattttatgtgagtaatctctctattgatcaggaaagtatcaaggattatttcaaatacatcattgttattcagccagtatatatcagtatggcacagtggccagcatcaattttcattggtcagtaccctgataaatagttataataatcagaatggacatacatatacacacatgacagttatttagctcacattatattgtgccttttcattttttaaaataaactcattttcaagaacaatttgaaagtaagattcatatta

SEQ ID NO: 827216 - DNA, 618 bp, Homo sapiens
gaggatcctgggggctgagaccttttcctggctctgggtctccttatctttgctctctgcgaggtcataagccatgttcatagtgagcagaaggggattcttcttcaagccatggacccaagagcggacagcccaaggggatcttcacccctcccaacttctgggagagccgctggaacagagcgagccaaacattcacacagccatgtccagatgccctgtcctgggtccttaatgcatctccgagtccactgtatccattcgtcccttgggctcagtcacgtgcacttgggcttcctcaacagacaatagactgctggggtgggagggtgaggaggagacctggagcctccctgtgggcccgaggtccctttagccgataatagggagggattcctaaggggggtacaggatgtagcgcccagataagacttctgcggaacaataggaggaactgaagaagggagacccaccctcactgcaccccaccccccgggctttggggtcgtggactgggrgaccagaggatcatggggaggggtgccgaagattcctgtgaatgggggtggaggatcatggcaaacagcaggattctggagttagaacctttatatttct

SEQ ID NO: 827217 - DNA, 618 bp, Homo sapiens
gaggatcctgggggctgagaccttttcctggctctgggtctccttatctttgctctctgcgaggtcataagccatgttcatagtgagcagaaggggattcttcttcaagccatggacccaagagcggacagcccaaggggatcttcacccctcccaacttctgggagagccgctggaacagagcgagccaaacattcacacagccatgtccagatgccctgtcctgggtccttaatgcatctccgagtccactgtatccattcgtcccttgggctcagtcacgtgcacttgggcttcctcaacagacaatagactgctggggtgggagggtgaggaggagacctggagcctccctgtgggcccgaggtccctttagccgataatagggagggattcctaaggggggtacaggatgtagcgcccagataagacttctgcggaacaataggaggaactgaagaagggagacccaccctcactgcaccccaccccccgggctttggggtcgtggactgggggaccagaggatcatggggaggggtgccgaagattcytgtgaatgggggtggaggatcatggcaaacagcaggattctggagttagaacctttatatttct

SEQ ID NO: 827218 - DNA, 582 bp, Homo sapiens
ttttattttttttttttattttttggcatgtggatgcccagttgttcgagtaccatttgttgacaaggttatcttttctccattgtactggcttcyctcctcttctttgtcaaagatcagttgactgcatttatgtgggtctatttctgggttccattgatccatttgtctattactttgccaatacctcactgtcttgattattgtagctttatactaagtcttgaaattaggtactatcagtcttccaactttggtctcctatatcattgtgttggctacttcagatcttttgcctctccatagtaactttagaatcagtttgtagatatccacaaaacaacttgctaggatttttattgagattgcattgaatgtatcagtcaaatagggcagaattgacattttgacaatatcaagtcttcctttccatgaacacggaatatctctccttttatttagttctttgatttcttccatcagagtttataattttcctcgtatagatcttgtacatattttgttacatttaaacctaagtagtttatttttggggagtattgtgtttttaatttcaaattc

SEQ ID NO: 827219 - DNA, 638 bp, Homo sapiens
atctcttcccaacagtcccccaaagtcttaactcattccaacatcaagtttaaagtcctaagtctcatctgagacttgtctccttctacctatgagactacaaaatcaaaacaagttatttacttcccagatacaatggtggtacaggcattgggtaaacattcccattcccaaagggaaaagttgcctaaaagaaagtgccaatagccccatgcaagtctgaaacccagcagggcagtcattaaattttaaagctccaaaataatctcctttgactccatgtcctccatccagggcacactgtataatgggtggactcctaaggccttgggcagctctgcctccatggctttgccgggtgcagcccctgcagctgccttcatgggttggagttgagtgcttgtggcttttctaggcacagagggcaagctgccagtagctctaccattctggggtctagagggcatcagcccccttcccacagctccaccaggcagtgcttcagttggaactctgtgtcagggctccracttcatatttccccttggtgttgccctagtagaggttcttgtggaagctcctcccatgtggcaggcttctacctgagttaggggttaggcagaagcctaggaggcttt

SEQ ID NO: 827220 - DNA, 623 bp, Homo sapiens
ttattgtacactcttaaatttcctgctagtctcctcaaaacattatgactgcacagtttccatagtaaccatgaacaaaacrgaacagtctacacgatttggccaacacctgattcaaagataacacttaatggtgcaaagtggcaaaaaatgttattgacagttttctgaaaatgtacaagtctgctccggagtgtccaaaaatgaggaaataatgtcaacggtgtggcccagcaactagaaaatatttatgttgcagtataaccagaaagtatacgtaaagttgttttgttgagcaatggatatcttctcagaggcttgagactagaatatgattttcttccatcttggaaatactagctatattttattagaagtactttgtaaaccattttaaccattttagtgtacaattcagtggcattaagtacattcacaatgttgtgcaaccatcatctctatccatttcctgaatatttctcatcatccccaacagagactctatacccattaaataatagctttccattctcccctttccagcacagcccctagtaaactctgttatactttccatctctatacattttttattcagataagtgaaattacataatatttat

SEQ ID NO: 827221 - DNA, 605 bp, Homo sapiens
gagaagaaggtatcaaatcaatgacctcaaatttcaccttaaaaaattaggggagaaaaaaaaagcaaataaagcccaaagtaggggaggagccaagatggccaaataggaacagctccagtctacagctcccagcctgagcgacgcagaagacgggtgatttctgcatttccatctgaggtaccaggttcatctcactagggagtgccagacagtgggcgcaggtcagtgggtgcacgcaccgtgcgcgagccgaagcagggcgaggcattgcctcactcgggaagcacaaggggtcagggagttccctttcctaatcaaagaaaggggtgacagacggcacctggaaaatcgggtcactcccacccgaatactgcgcttttctgacgggcttaaaaaacggcgaaccacgagattatatcccacacctggctcggagggtcctaccccatggagtctccctgattgctagcacagcagtgtgagatcaaactgcaaggcagcagcgaggctkggggaggggcgcccaccattgcccaggcttgcttaggtaaacaaagcagcctggaagctcgaactgggtggagcctaccacagctcaagga

SEQ ID NO: 827222 - DNA, 513 bp, Homo sapiens
ggtgatcagtgcagaaatatgtcacaatatccccataggcagatccaacacaagagttacatcatctgggtgatcattgtagagatatttcacaatgcccgcataggcagagcctaaacaaaactcccatcacctgggtgatcagtgcacagatatgtcacaagccccctgtaggcagagcctagaaaagagttatatcacctgggtgatcagtgcagtgatatgtcacaatgccgtgtagccatagccaagaataaagcaatagcacctgggagatcagtgcagagatacgtcacaatgttcccagtgggcagagaccagacaagagttagaacacttcgggatcagcgcagagatatatctcaatcccacagtgggcacagcctagacaagagttacatcacctcggttaacagtgcagagatatgtcaaaawgcccctgtaagcagagcctacacaagtgttacatcacttaggtgatcagtgcagagatatgtcacaataccccctgta

SEQ ID NO: 827223 - DNA, 575 bp, Homo sapiens
atcgaatggaatcgaagacaatcatcgaatggactcgaatggaatcatctaatgaaatagaatggaataatccatggactcgaatgcaatcatcatcaaatggaatcgaatggaatcgtcgaatggactcgagtggaataaacattcaacggaatcgaatggaatcgtcaccggatggaaacgaatggaatcatcatcgaatggaatcgaatggaatcatcaaatggaatcagatggaatcatcatcaaatggaatcgaatagaattatggaatgaaatccaatgtgatcatcatcgaatggactcgaacggaatcatcatccaatggaaactaatggaatcaacatcgaatggaatcgaatggaaacgccatcgaaaggaaaagaatggaattatcatgaaattgaaatggatggactcatcatcgaatggattcgaatggaatcaccgaatgaaattgatagaaatcatcatcraatggaatcgaatggaatcattgaatggaatcgaatggaatcatcatcagatggaaatgaatggaatcatcactgaatggaatcgaatggattcattga

SEQ ID NO: 827224 - DNA, 487 bp, Homo sapiens
atcaaatggaatcgaatggaatcatcatcaaatggaatctaatggaatcattgaacggaattgaatggaatcgtcatcgaatgaattgagtgcaatcatcgaatggtctcgaaaggaataatcttcaaatggaaaggaatggaatcatctcatagaatcgaatggaattatcaacgaatggactcgaatggaatcaacatcaaacggaatcaaacggaattatcgaatggaatcgaagagaatcatcgaatggccacgaatggaatcatctaatggaatggaatggaataatccatggacccgaatgcaatcatcatcgaatagaatcgaatgcaatcatcgaatggactcgaatggaataatcattgaacggaatcgaatggaatcttcgtcgaatggaaacgcatggaatcatcawcgaatggaaatgaaaggagtcatcatctaatggaatcgcacggaatcatcatcaaatggaatcgaatgg

SEQ ID NO: 827225 - DNA, 635 bp, Homo sapiens
taatgaaatagaatggaataatccatggactcgaatgcaatcatcatcaaatggaatcgaatggaatcgtcgaatggactcgagtggaatwaacattcaacggaatcgaatggaatcgtcaccggatggaaacgaatggaatcatcatcgaatggaatcgaatggaatcatcaaatggaatcagatggaatcatcatcaaatggaatcaaatagaattatggaatgaaatccaatgtgatcatcatcgaatggactccaacggaatcatcatccaatggaaactaatggaatcaacatcgaatggaatcgaatggaaacgccatcgaattgaaacgaatggaattatcatgaaattgaaatggatggactcatcatcgaatggattcgaatggaatcaccgaatgaaattgatagaaatcatcatcaaatggaatcgaatggaatcattgaatggaatcgaatggaatcatcatcagatggaaatgaatggaatcatcattgaatggaatcgaatggattctttgaatggaatctgatggaatcatcgaatggtcttgaatggaatcattgaatggactcgaatggaatctttattgaatggaattgaatggaatcatcgaatggtcacgaatgg

SEQ ID NO: 827226 - DNA, 586 bp, Homo sapiens
ggaatagaattgaattgaatggmatgaactggaattaaacggaattgaattgaatgtaatggaatttactcgaatgtaatggatgggaataaaatggcctcgaatgagatggactcgaatggaatggagttgaaagaagttgaatccataggaatggactccggtggaatgcaatcaaatggagtggactggaatggaagggattcaaaaggagttgcctggaatagaacggtctcgaatggaatggaatcgaatggagtgaaatggaaaggaatggaatggaatgaaatggaatagaatggaatggaatggaaaacacgaacgtaatggattggaacggaatggaatccactggaataaaatcgaatggaatagaatcgaaaggaaaggaatcaaatcaaatgcacatgaattgaatggacaagaatgaaactttctcgagtggaatggtattgaatggaatggaattgaatggaatggaatagagtggaatggaatgggatggaatggaatacaatggaatggaatggaatcaaaaggaatgaagcggaatggaaacgaatggaaaggaatggaatggaataga

SEQ ID NO: 827227 - DNA, 509 bp, Homo sapiens
ttccattcaagtccattgcattccataccattcgagtccattccattcttaaccattccattcgagtccattccattcatgtccgtttcattccagtccattccattcgatttcattcccttcgacacctttccatttcagttcattccattagtgtccttttgatttgattccattccattagattccattcctttcgattccgttccattccagtccattacattcaagtccattccactccagtccattatattcgagtccattctataccattgcagaccattccgttcaactttattctattccattcaatttgattccactcctttcgattgtattccattctagtccattccattggagaccattccwttcgagtccattgcattccataccattcgagtccattccattcttaaccattccattctactccattccattcgaatgcattccattcatgtccgttccattccagtccgttccattcgattccattccattcc

SEQ ID NO: 827228 - DNA, 509 bp, Homo sapiens
ttccattcaagtccattgcattccataccattcgagtccattccattcttaaccattccattcgagtccattccattcatgtccgtttcattccagtccattccattcgatttcattcccttcgacacctttccatttcagttcattccattagtgtccttttgatttgattccattccattagattccattcctttcgattccgttccattccagtccattacattcaagtccattccactccagtccattatattcgagtccattctataccattgcagaccattccgttcaactttattctattccattcaatttgattccactcctttcgattgtattccattctagtccattccattggagaccattccattcgagtccattgcattccataccattcgagtccattccattcttaaccattccattctastccattccattcgaatgcattccattcatgtccgttccattccagtccgttccattcgattccattccattcc

SEQ ID NO: 827229 - DNA, 573 bp, Homo sapiens
gaattctcgcatatctctgcactgatcacccgggtgatgtaaatcctgtctaggttcagcctacaggagctttttgacatatctctgcactgatcacccaggtgatgtaacccttttcaaagctctgcctacaggggcattgtgacagttctctccactgctcacccaggtgatgtaacaattgtctgggctttgcctacagggagctttgtgatatacatttccactgatcaaacaggtgatgtaacccttgtcaaggttgtgcttacaggggctttgtgacatatctctgcactgatcaccccactgaggaaacacttgactacactctgcctacaggaggctttatgacttatccctgcactgatcactaggtgatgtaacacttttctaggctcggtctacacgagaattttcacatatctctacactgatcacctaagtgttgtaacccttgtctwggttcagcctactggggatttctcacacacctatgcagtgatcaccgaagcgatgtaaatcatttccaggctttttgtacaggggacatttcgatatatctctgcactgatc

SEQ ID NO: 827230 - DNA, 618 bp, Homo sapiens
cgccagggcctcatcgaggtaggcagagagggttaaataacccacacaaggaataagcagggaccagtgcrggagctatgggggaatggaggacattgaagtgaggagagggtcctgagccacctaagttgtgggaattgctggttgggggttgaggctcagaagacagaatcagaatccgcacttctaagcagaagagtatttattttgggggcactcaatggcttacagaggcactggaggagctaaagaagtagaattcacactgagcttttagaaacagttcccacagccttgccccagaactgggtcccaaggaagcagctgcctcttcctcactcaggagcctggtgcattaggggctgtcaccccagaactgggtccccaggaggctgatgctgcagctttcaactttggaattacacagcctcatgcagccaatgcctgggccccagaacctcctctgtgtccttggggactgttcttgcagcagcctgtatcccatcccaccttgcaagtctggcacaggtgcctctgatggagagaacgtaaatgctacctgcaatcacagctgccgagtcatatgggagatgtgactttagctttcaatctctgttc

SEQ ID NO: 827231 - DNA, 618 bp, Homo sapiens
cgccagggcctcatcgaggtaggcagagagggttaaataacccacacaaggaataagcagggaccagtgcaggagctatgggggaatggaggacattgaagtgagragagggtcctgagccacctaagttgtgggaattgctggttgggggttgaggctcagaagacagaatcagaatccgcacttctaagcagaagagtatttattttgggggcactcaatggcttacagaggcactggaggagctaaagaagtagaattcacactgagcttttagaaacagttcccacagccttgccccagaactgggtcccaaggaagcagctgcctcttcctcactcaggagcctggtgcattaggggctgtcaccccagaactgggtccccaggaggctgatgctgcagctttcaactttggaattacacagcctcatgcagccaatgcctgggccccagaacctcctctgtgtccttggggactgttcttgcagcagcctgtatcccatcccaccttgcaagtctggcacaggtgcctctgatggagagaacgtaaatgctacctgcaatcacagctgccgagtcatatgggagatgtgactttagctttcaatctctgttc

SEQ ID NO: 827232 - DNA, 622 bp, Homo sapiens
aatcagctggcccaaaatgtcaatagttctgggttgttaactctgctaagggctgagagtaacgcaccctgtgagaactgctggccagaacaaatcctaygtgaagttaactccataagtcactgtgagtaactcacatgagtccatgtgagttaactccatggcgtcctggagatgtggtgctctccccaaggctgtgaaatttccccatagaccctgcctgtggattgcatcctgcagacttccagggaggaagcatgtgcaccacgagagagccaccagacccacaccaggcaagatcaacaatccagagatgttcccatgtcttctaggaaaggacacaacccagagggcagagctgcattcgtaactggttgttatcagccagctgaggccctggcagccttgaagtagccaagcatataatgatgtggatgtgaaagcccatactgaaggccctgaaggtccagaaccatggggttctcacctcccaaagcccttcctagtcatcaggagagaccctgtttgcaaaatatttactcaaggcttaattactaataaatccctgtgtggagccattccatggagagactgcaccacagtgtggtctggtaatcaatgc

SEQ ID NO: 827233 - DNA, 513 bp, Homo sapiens
atgtcagatttcatgtaaatctcactgtccttgaaccactctcagtctgccttccttcatggcactaagctggtgaactagtgagtaagtcttctcttcgagagggagcattcttctctttaccatgctcctttcccagctttcataatccatttatgaacctatctggcccttttagacatttgagttttgacccttgttatatatgatgcaatgtacctagaagacaatattttatggagtcattgttttttacaccatattaccttatgctcatttatatgaacacctcatttcagctgtcatgaactatgagcatttaatgtaagaaagttgaacatttacataacaagaaaaataaaattataatgataaggaattcatcttgtaaaaatatgtatttctttttacattggggtcagaaacatggcaactactyatggaatagatacattcacatttataattgatcaaatctgtcaagaaaacattacttgtttaccatgttctatg

SEQ ID NO: 827234 - DNA, 525 bp, Homo sapiens
gggacctttcaacccattcaatctgccagatcactgcacttacatgtacaatctcakgccaggctagcaggagggctgcccagatgatcctagcctaaataactaaatcacagaattgtgagcaaataaatgttttaaaacactaagattgggaggtgaggttgttatgcaatagatgactgatacagttgttcaactgtcttatgcttccataagttcattttgttcataaatccccctcaaattatctgatttcatgtctaccacctggaccctggctgatacctccaccatgacagtctgataattaatcgaagacttatttgaaaaaggattaccataggatccatctccccatgctcctgaatccatagacgtgtttctctaggaaatcttaattaatagttatatataatagttacttggtgtctggtgtgttgcttacattatcactgcaaaactggaattaagtattattatcatcctattttacttacaaaaaagcagaaatttggagataaaata

SEQ ID NO: 827235 - DNA, 612 bp, Homo sapiens
atataaaaaaggtaagttcttatggcatatttctgatcacaaacatatcaccaaacatcaaaatgaatayccaaaacacttctaacattaaacattgaaataaatgtgagctacacatatatttaagaaagattaaaggccaggcatgatggcctatgcctgtaatcccagcactttgggaggccaaggcaggaggatcacttgaggccaggagttcgaaatcagcctggacaacctaatagtccacttctctgcaaaaataaaaataaaaaacaaattacccaggcatggtggtgtgcacctatagtcccagctactcaggaatccaaggcagaagaattgcttaagcccaggaggtcaagacagcagtgagctatgatcatgccactgcactctagcctgggcaacagagcaagactctgtctcagttaataattaattaatcagtaaggtcattatttacccacttattcataacagttcatggtctcgggtggtcatagcctatcacagcagctcagggaaccagatgggaaccaaccctgaacaggaccctggacagcatgccatcccattggagggtacactcacacacacccgcactcactcaga

SEQ ID NO: 827236 - DNA, 609 bp, Homo sapiens
atataatagacaaagatataatcaagggatgaaccagaacacaaaggtatctgtaaactggaaatcaataataaagtacctttctstatactgataaagcaaatgttagcttacatagcaattttacaaacattcacttatagaattcttaatcttaagaagtagaaatcttaagattaatattaagaggtagaaacaatgttcagtgatactataggcaaaaatatcttaagttaattgtgcaggatctcacagatagtgattgtcagattcaagatcagaaccttgaaatgtcttctgaaactgccatagcatttcaacatggtggtctaagctcattgtactatatctcaccacaaccaaattagccatttaattagcctgaaatggtccttgtaggggaataatggatacttagtcaataacataatcattatgtttcttagtcacatattaattcacattctgaagtgctttcaaaagaaaagaggattactgactcagttacctcagagttgaataataactgagaaattcaagaaaagaatctctcagtctgttatattgctgtgtttaagttataattcagaaccaagtaatattgtatat

SEQ ID NO: 827237 - DNA, 554 bp, Homo sapiens
accttcctgtccagctgaccccaactcccctttagctgatggctggacttcccgaaaagcatgccccccaggaaaggtgatttagggaatttggaccctgggagagagatacatgacaaatgaggtttgtggctggctcacacaggcaatgctgtcctgtgagggttgttgagtgaccagctgctatatcctattagtcacccagtttcactgtgagcacctttaacattcactgcaaagctagaacatagccatgtgccctggaggagggaacacctaattcagaggggtggcgagtaagtgcacagaggtaatgtcataaaggagatgatagcactttgggaggctgaggcggggggatgcacccaagcagccgaggcaacatagtgagacctaaaaaaaaacaaaaaccaaaaacaaaaaaattagctgggcgtggtggcacaggcctgtkgtcccagctactcaggaagctgagtgtgggagaatcacttgagcctggtggaagctgagtgctgcagtgagccatgcttgctgccactgcactccagcct

SEQ ID NO: 827238 - DNA, 582 bp, Homo sapiens
tagatagattggatggatggatggatggatggatggattgggatggactgggatggactgggatggatggagtaaatactcatagtagataccttttcacgaatgctcagtaaactgtagctgtggttaaggacttggccttagtcatttgtccgagagcctgtaggctctgtcatggcactaggcagctgcgtaaaaggccaggcctccatcccgacctgtgtattcttgcctgggttgagccagctcggtttgtgtgagtattcttgtacccccttccagaaaggactagctaaaagacacctgctctgagttggccatcagcagggcatcgggggagttgggagccggtaggaactgcagctctgggtgctgtgaagagggccctgagccgcatccaactaaggaagtgaaatgttgctgagctcccaccctcctaggcagaggtctgagccgctgggatgtggacaggtgacctctgaagcgttgttcagctccgccaccatccagtttgagggttgcttggtcccatgttctctccagtcctgtagtgggagagcaragggggtggagcttggatcc

SEQ ID NO: 827239 - DNA, 640 bp, Homo sapiens
agccactgagtctgctgggctgatgcttctgaatacaaactatggcacctggaaggcactgcagagaaaggggggacctcagggctcccattccatcactcttgagtctaggtcataccctccacaatccccaagaggcccgtactgtctcttctgatgggactcctgggttctgtgttgcccaccctgcaaatctgcatgccagcaagtatgggtgacccggctggctgctgggtcaccttcatttgggtgctagccttgctgccttcctttggtgctgttgagattgtccttgccgtgttcactcccagcgcaggcatgcactggccccaggctgtggctccgattcactcttactgccatgctttgttctcattttttgcttccacagtaagtctgcacaaaatactgtcctcacagctgagcttacctggtgatctattcttttttctcggtcactacttgtccagcttttttttttagacttttggagacagtgattgacaacagaacctagcagccagkgctgcgctagtcccctagccccctccagagcctgtgtcaggcatatgactgactgcatcctctcccctctctctcctctctgccccagatcagtggaccatcccctgcccggatc

SEQ ID NO: 827240 - DNA, 586 bp, Homo sapiens
gattaatctgaaaagcttgccatggtctcatgttgacaggcaggttgcaaggttgacaagtagaaggtaaggcattagtccccaaattaatttttattcatggtagatgctgacttgtggcaaaatatattgtactgaatatatcaaagtagaaatttttctctctcaagctttctaaaaattaaattcttaaaaagctgaatctcacctaacattaaaaacagcatatcgaccataagagttcacactttttgtttctttcctggacccttttagtgtactggtgaaacctatgaatgctttttcaggatagtattttctagtgcataaaataacatacacagaattacaaagacaacaatttatactgaagaacaattttaaaagtatttttaaattttgtaataaaatatatgtttctagtggtgaatgtaatagctactgaaatttcaaagtagtgaatggcataaacratattttgagatatatatgaagaaatcaatcagttacttctggtagtggtaaagccactgtagctgatcaaaattccgtgattatctcattaataattgaagaaacagctaaa

SEQ ID NO: 827241 - DNA, 607 bp, Homo sapiens
tgcctgctttagcctttgtattttgtaaaactgtttctaatggccttgyatggaacttcttcacctaggaattctaatcatatactacttacatgatatgagtcttgaacttcaaatctggatttttctatttaaaccagaaagtaaataaatgtaataaaaatagaaacataccaacacaactccccaaaactatgtgcagcaactctggctacactctcagagagaccccaacatttttggttacttggacatcctgtaactgatcattttattttgccacacgcttcccctagcacactctttcaagtacagtatatagcttgcttaaatttcacattgaaagttttggaaagccatatgaaattattccagatagctgcaggttgctaataaaaccatagttagggatcaccaacttagtaaaaattgaaactagagaaacagtcttcataatctttagccgaggcagtcccttctttccatattatcatcactttctgttcaaagcacatacttttcatgcttctgtgtatagttaaacatgtttctatactccgaaaagttgtcatatcccagagccattcacatcataattacagtagag

SEQ ID NO: 827242 - DNA, 588 bp, Homo sapiens
tgcaccccacctaggtggaagatccacagctactcacctgttatccttgatcctcattagtcccaaggttgacatatgaatctcttctccctacaccatgcccagtttctaaaattccaatgagagattaaggtgggttgacatgtatgcatttaaagtacaactaccaacaggtttaaagtgatctctttctctttttgtggggcgagaatgaagatagggggcatggaggttgtatatgacaaacttttattatctgtattttacactttggattatttcttaaaatttacagaaaaatcacattacttttataatcagaaaaacacccaactctgtcatagcaacgatagttcagtattttcacttgtggtgaaaagacctgaatctatatatcttgtattttctgtcactttcctttctgaattaacatgaaaaaggataaatcttcttcttttgcatacattttccrgcaacttttaaattttttttttctttttatatatttgtctgtatagagacagggtcttactatgttgccaagctggcctcaaactcctggcctcaagggatcctccaccttggcct

SEQ ID NO: 827243 - DNA, 613 bp, Homo sapiens
tatagaagaaaaatcaagaggcttctgtgtagaaaaccaatttgtaatttaaggatcggggaccaaaaatktttaaagactaaatgtgttcacattactatagatatgtctataaggtgaagattcttttcttaggtatacaaatgtgatgttgtatataaatgggcttcccacccacaaatgcttattagcctaaaatggcctgaaagctctagtaattaaattatttctctgcgtcctaattttttgtctttgaaacagattatttagaaaatcatgtacttcgcttaagtttctaacttttacttgctttttccagagttatttataccaaatcctacaggggattgtgttttgtcactctagaagagttcttcacagagacttaaaacctcaaaatctcttgattgatgacaaaggaacaattaaactggctgattttggccttgccagagcttttggaatacctatcagagtatatacacatgaggcaagtggaatagtggtttttgatggcttttgaatgtgtgtgattgctagattattttctgtatttgtgaaagtcaagaaataactcaataaaagatatctactctgtggcagtatcaattta

SEQ ID NO: 827244 - DNA, 570 bp, Homo sapiens
attgcatataccattagttcattcctttttatttctgagcagtattccgatatatggacacatcacagtttgtttatgtatttacctgctgatggactttcaggttgtttccagtttttggcaattacagtaaagctgctatgaacatttgtgtacaagtctttgtatggacacgtgctttcttttctcttcagtgcgtagctagctgtggactggctggatcataactgtaggtacacattaaacttgataagaaatagtcaaactgtttttcagtattttacttcccagcggcagtgtatgagagtttcagtccccatattctcaccaacacctggcatggtcagtctttttcattttagccactcgaataggatgtatagtgatatctcattgtgatttcagtttgcatttccctaatgactaatgatgttgagcatcttttcatgtgcttattaaccatttgartatattctatagtaaaatgtgcattacaatcttctgtttgcttttaattaggtggtcttatttttattgtaagctgcttttatattacagatgcaagttcat

SEQ ID NO: 827245 - DNA, 569 bp, Homo sapiens
ttttgccatatatttaataactttattgaatgaagaaaaagatcacaccaaaaatggaggaatacatcaaccctggtggtcttagtagaccgagccaaattaaactatatgataaagcaatttytcttttttcatccaccactaaatgagagttcatttttatctaaagaaggctcatcttagcaaatattgccatgacaataagactgttaggcaaaccaataaatttaggttctggcctgggttaagatgactgtatttagtgtcctttctcaagttctacttgaaggaatttctgtttaatcaaaaaaagctcccccaaccactaccaccccaccttggcacttaaatgtttatttgactaatatttattgcacctacaatattgtcagggattgttttcaaacttcagatatattagtagacaagtatccataaggcctaatctggaattcatacaactaagaaaaaaagaaacaaagtcccacattctcatgtgttcctgctgatgggctgtggatgggtaagttatggaaaggctgggaggagcaacaaggaagatagaggcc

SEQ ID NO: 827246 - DNA, 482 bp, Homo sapiens
aagcaagtttcaactgctttagttaatagattctgagttgtatcattgtccagtgtttctggaattttattaggatcctgaatgtaccttgattggaaaaaaagtaaaaaatgtgaagcaatgaacttygaaattttacttgccataaagtcagagacacaattaatttgaaaatgcagcatgaaccttttatagaggaaaaaaagtgactttaagagccaggcagtttgttctctctagtttctcatagcacagaaaaatcaacaaaaccaattgatcaagtgggagtaaagtagttacctgcctaaccatcaggcccggcatgattataaggaaaaataaaagtggcagtgggaatagtggtggcatctctagctcttcacttgaaagcaggaaaaagtcatcccttttctctgataagcctggttgtggtccctttattgtctcaagcacaaaaatgtggacatagatttcttgcatgt

SEQ ID NO: 827247 - DNA, 482 bp, Homo sapiens
aagcaagtttcaactgctttagttaatagattctgagttgtatcattgtccagtgtttctggaattttattaggatcctgaatgtaccttgattggaaaaaaagtaaaaaatgtgaagcaatgaactttgaaattttacttgccataaagtcagagacacaattaatttgaaaatgcagcatgaaccttttatagaggaaaaaaagtgactttaagagccaggcagtttgttctctctagtttctcatagcacagaaaaatcaacaaaaccaattgatcaagtgggagtaaagtagttacctgcctaaccatcaggcccggcatgattataaggaaaaataaaagtggcagtgggaatagtggtggcatctctagctcttcacttgaaagcaggaaaaagtcatcccttttctctgataagcctggttgtggtccctttattgtctcaagcacaaaaaygtggacatagatttcttgcatgt

SEQ ID NO: 827248 - DNA, 606 bp, Homo sapiens
caatatagaaataactttaacaattcccaataataattagctgacaaggctattaatcacagagcaaaaaccattctattaaccactcacaggagtattttacagattacataataggatcatttatttaactacatcaacaagtattgctaaataaaccaaaacagagaataaatttgtaaatatgtcttttttttttttttttgagatggagtctcactctgccgcccaggctggagtgcaatggaacaatctaggctcactacaacctttgcctcctgggttgaagcgattctcctgcctcagcaaccgaagtagctgggattacaggctcccgctaccacgcctggctaatttttgtattttcagtagagatggtggtttcgtcatgttggtcaggctggtctcgaactcccaacctcagatgaactatccacctcggcctctcaaagtgctgggattacaagtgtgagccaccgcacccaggtaatggcattttttaaacctttgcagttgagtagttgatagcttccaattaggtgggaatattcrtaagtatctagtaaaactaccaagatgaactttttaatctgtgagaatcctcta

SEQ ID NO: 827249 - DNA, 597 bp, Homo sapiens
ataaactacaaaacaaacataaattttatctttaccacacccctgggtggtttcttgagcatgyttcttgagtgctatgttcttgagcattccatttttctttcccaggtttacagcaataaaacaacagaagttactaatgaaaagaggcccacaatgaaaaaaatgtagactcttaaaaaattaatagaatttcctttcttttagatctattttccacccaagacttggattgaattagtctttctctaggggaagaagtgtaaaacccattaccacagtcactccatgtctgaaagcctataaaaaattggatgcttcttggaatatattggaaggataatttgtgactcataaagaaataaaatatttaagcaatctgctatctgcacatcatgtatttgcctgcaattgcccataacaaactgtgtatatatatgcacatatgtgagtgcatatatataggtgtgtgtgtgtgtgtgtgtgtgtgtatacatatatatatcttacaacatgatccaaatgtttccattttaccttcctacatgactgaaaacaaaccatgctgttacaaatatttaaatatagaataaatat

SEQ ID NO: 827250 - DNA, 634 bp, Homo sapiens
aatacaatctaacattttatcattataggttcccacaaaataatatattctatgatacaaacacattcttcacccaagtaaagtactagaaattaaacacatttaatgtgcttgaaaaaaatcttcctaatgttgaccattgtttatattagtcatatgttatgtattaggaactaaaagaatgttttctcagtgcatatgaataagttagctttactttttacaaagataatttgtactatttgaacattttgaagagcataatagacctgttgaattttgttactgtttaaggctgagtgcaatctcatttccttatgcccttagagagaactacctgaaagcaaatatctaaaaaacaatttaatttgctacttaaaatgatatgctatcaagttgaaatcactctaaagataaggaaactaaaaagactacaggaataatgtatgaacagttaaaattggctcattataaagaataccaaccctctttcaatggtatttcaggtagacaagcattgaataactcttaattacttactcaaggaacattacygcatttgtttagtgccacccttttttccatagcaagtcctcaaataagtattcccaaagctgtattttatcttccaaat

SEQ ID NO: 827251 - DNA, 521 bp, Homo sapiens
aaaagtctcaacaaatttgaaaaaattaaaatcatagcaagtaccttctcaggctgcatgtgataaaactagaaatyaataataaaaggtactttggaaactgaacaaataatatgaaaatcaaaacagcatatttctgagtgatgattaggtcagtgaagaaattaagaagaaaatgaaaaaatttcttgaatctaataaaaatggaaattcagacacaacttaccaaaacctatgtaatatggcaaaaacagtgctaagagggaagtttatagcaataagcacatacatcagaaaagtagaaggatttcaaacaaacaaccttatgatgcacctcaagcgactagaaaggaagaacaaaccaaactcaacattagtagaaggaaataaatagtaaagatcagaccagaaataaacaaaatggagacgtaaaaaagatacaaaaaaaaaagagacaaaaagttggttattttgaacaataaacaaaattgataaactgctagctacactaatcaagaaag

SEQ ID NO: 827252 - DNA, 434 bp, Homo sapiens
aaacaaagtaacatggaactggtacagaaaaaaacaagattatgccctttatagcaacatgaagctggagaccattattcttggaaaaccaatgcggaggccaaaygcagtggctcacgcctgtaatcccagcactttgggaggccaaggcaggcaaatcacctgaggtcaggagttggagaccagcctggccattatggtgaaacgccatctctactaaaaaatacaaaaattagccaggcatggtggtgggcacctgtaatcccaagctacttgggaggctggggatggagaattgcttgaacccaggaggtggaggttgcagtgaccaaagatcacgccattgcactccagcctggtgacaagagtgaaaccatcttttaaaaaaaaagaaagaaagaaaacaaatgcgtaaatggaaaaccaaatgcatg

SEQ ID NO: 827253 - DNA, 434 bp, Homo sapiens
aaacaaagtaacatggaactggtacagaaaaaaacaagattatgccctttatagcaacatgaagctggagaccattattcttggaaaaccaatgcggaggccaaatgcagtggctcacgcctgtaatcccagcactttgggaggccaaggcaggcaaatcacctgaggtcaggagttggagaccagcctggccattatggtgaaacgccatctctactaaaaaatacaaaaattagccaggcatggtggtgggcacctgtaatcccaagctacttgggaggctggggatggagaattgcttgaacccaggaggtggaggttgcagtgaccaaagatcacgccattgcactccagcctggtgacaagagtgaaaccatcttttaaaaaaaaagaaagaaagaaaacraatgcgtaaatggaaaaccaaatgcatg

SEQ ID NO: 827254 - DNA, 573 bp, Homo sapiens
cacacgaaaatcagatgggcatggtggtgtgcgcctgtaattcgttactcgggaggctaaggcatgagaatcactggaacccaggaggcggaggttgcagtgagccaagatcacgccactrcactccagcctgggccacacagtgagactctgtctcaaaaacgaaaattaaattaaattaaaataaataaaataaaatgtggtatttccatacaatgaagtattatttcacctaaaaaggaatgaaatcctgtaacatactaaaacatgaatgagccttgaaaacatcacactaagcagaagaagccagtcacataaaaccacaagctgcatgattcccatttatatgaaatatgaagaacaggcaaatttataacacaaagaagtagattaagtggttccctaggctggggaattggggggaaatgtggagcaactgctatttggaacgatgaaaatgttctaaaactgactgtaatgatggttgcacaactctgtgaatatactaaaaactactgaattgtatacccttttcagtgcgtgaattacacggactgtaaattatagcttaat

SEQ ID NO: 827255 - DNA, 627 bp, Homo sapiens
attttgaagcgctaatttttagggatcccctcccatccaaaacagggatgaatagktgaggaacaccggagcggggccctggcccttctcggaacgttgagcagacctaacatgacgctggtccgttcaaacgtcgcagttgtggcccacacagagcccagtctgttccaggggcgcgcccctgcacccctctgcctgcccgaggtcttccctcccctccgctccccagaaacgcacccactgagacatgtgcggggagggggcacgcttactcccacatcccgcccgagacccgcggagcagccaagacccggccaaaaaggggagggcgtggcaggcaagggccgggggcgggagcgcgggcggccgcggactcacgtactggctgttgcggcgccgcgggaacccggccgccagcgggacaaaagcgcggaccgcacggccggaagaacccggcgccggccctggggcacttccgcgccctctctgggacgctggaggactgactcgatggtccgggccgacggcgccggcgggagggagggaggggagcgcctcctcggctatttattgaggaccagctgcagggcgcgcgctccaggcgcggcaaggagtccgtgggcgggt

SEQ ID NO: 827256 - DNA, 601 bp, Homo sapiens
cgttcaaacgtcgcagttgtggcccacacagagcccagtctgttccaggggcgcgcccctgcacccctctgcctgcccgaggtcttccctcccctccgctccccagaaacgcacccactgagacatgtgcggggagggggcacgcttactcccacatcccgcccgagacccgcggagcagccaagacccggccaaaaaggggagggcgtggcaggcaagggccgggggcgggagcgcgggcggccgcggactcacgtactggctgttgcggcgccgcgggaacccggccgccagcgggacaaaagcgcggaccgcacggccggaagaacccggcgccggccctggggcacttccgcgccctctctgggacgctggaggactgactcgatggtccgggccgacggcgccggcgggagggagggaggggagcgcctcctcggctatttattgaggaccagctgcagggcgcgcgctccaggcgcggcaaggagtccgtgggcgggtcttyctgtttccgtgcccattagcttctggggtagtctgggggaggggcacaggtaataaagtaaatacctgcctacctggttcctgaacacgtgat

SEQ ID NO: 827257 - DNA, 623 bp, Homo sapiens
ggtctaacctagaattctattcccacaaaaaaccatttttaagaatgaagttatttttaggcaaataaaaattgtgaagttttacctctaacaggacagagtattctaaagaaagttttctagagagaaggaaaatgtccccaaataaaaaattgcagaggtggagaagaatgaaaggaaatgaaaaggttgggcatggtggctcatgcctgtaatcctagcaatttgggaggccaaggcaggtggatcacctgaggtcaggagttcaagaccagcctggccaacacagtgaaacccccgtctctactaaaaatacaacaattagccgggcatggtggtgtgtgcctatagtcccagctactggggaggctgaggtaggagaattgcttgaatctgggaggtagccattgcagtgagccgagattttgccactgcactccagcctgggtgacaaagcaagactgtctccaaaaaaaaaaaataaataaataaattwaaaaaaaaagaaaagtaattaaacgtttggtatagaaaataataacatattttaatatatatgtacatttatatgtatatataattaaaattaaccaaaacaacagcatataggatggaaggtaaga

SEQ ID NO: 827258 - DNA, 607 bp, Homo sapiens
tggttgaggtttaaggattattctgctgtgaaactctttttctggagttttattcactttcarcaaggagggagagttttcctgcttccatgataatggggtgcaggcaactcctttgtggaatttcagcccacttccaacagggaaagcaagtttgagttttttcctacttctaggatagtagtgtagcaggaccagccgcagacaaaactcctcagacaccgagttaaagaaggaaggggtttattcagccaggagcattggcaagactcctgtctgaagagctgagctcccctagtgagcaattcttgtcccttttaagggctcacaactctaagggggtccacgtgagagggtcgtgatcgattgtgcaaccagcgggtacacgactgggggctgcatgcaccggtaatcagattggaacagaacaggacaagggttttcacagtgcttttccatacaatgtctggaatctacagataacataatcgagtaggccggggctcgatctttaactaccaggcccggggtgtggcgccgggctgtctgcttgtggatttcatttctgccttttcatttttacttcttctttctttggaggcagaaa

SEQ ID NO: 827259 - DNA, 432 bp, Homo sapiens
attcttttgggctgggtgtggtggctcacgcctgtaatcccagcactttgggaggccgaggctggcagaccacctgaggtcaggagatcgagaccaccctggccaacatggaggaaccccgtctctataaaaaatacaaaaattaaccaggcatggtgacctgtgcctgtaatcccagctactcaggagggtgaggcaggagaatagcttgaacctggaaggcagaggttgcagtaagcccagactgtgccacttgcactccagcctggccgacagagtgagactccatctcaaaaaaaaaagaaaaaaaaaaaaagaaattcttttgagcgctctcctattgatacaccacacagtcacrtatggtttactatcatatttatgatgacttttttttataccttctttgacaggagctatggtcctgataat

SEQ ID NO: 827260 - DNA, 610 bp, Homo sapiens
ttccatatgagggtatagcaagaaggtgtctatatcccagccaggaacttggtctttaccaggaatcatattgcctggcagctagattttagatatctcatgctggagaaatgtttaaaaaataaaaaataatgtcgctgtttgagaagctcagcccatggcatttcattagcacaacctgagctaagtcaccccaatggcctcattttcctatgttaaccatacaccattgtaggactgcagcatatgaatctacctgaaatggtctcgttatcttccacttttgcttaacacactgcatctttgcatgttattgagacttctgttttggacatagatcaggaaggaagagtgtaacactcaaaagtgtagttaagtgagagaaattattatttaaaatacagaaccaatagcattacagggagcctgtgatatacccacaagaggagcagtccaccaacagcagggagcaaagcacatcactaggcctgaggcagagacaagacagagctgttatgagaccccaggaacaccctgagctttagtagagggcsattcagcaggagcagaggaaaggatgactgccaacctctcaggacagcagggtggc

SEQ ID NO: 827261 - DNA, 610 bp, Homo sapiens
gtcagggaaaaaacaagtaataagcccaggtcatgcattggcaaatggacagtttgtatgatctcatacttacctttcccagtggctatttggttgtggggtcattascagaaaagcgctttaggttttacattattaatatgaatgtctgaattggacagagaaaatagatttctcaaaattgcttaaaattgatgataaaaatctttctggaaagtaagaaatcatatattattcatttttgtgtggtgaaattctgtgagagcagggacaggagctctctcatttgtcacggtattgcaagcaccaagcatagtgcctggcaaatagaagacgttcagcaaatattagcattacttctacttttactataccttactaaaaagtgacacacccacaaacaaatgtcaactatcagaagtgacaattaaagttaatgttttccattatttctcttatttttctgtatgttttctttttccccgagtccagaaagcctgaatttaaggcgattaggttttctttgtgattttgtccacaggaaaaatcaaaaggatttaatttagtccactgtgaaatgttactgtaagaaaacaaagtatcaaagata

SEQ ID NO: 827262 - DNA, 645 bp, Homo sapiens
tacatttaatgaatttctcctttctatgacagataattctactttttttaactaaaaaagtaaaaaaagtaaccattataaccttaragaataaagtatttttttcctgtctgatctattttatctgcctcacttctgtcttggacctttacaatattttattctgtatctattttctctgttccagcatgaagacaacaatctctggggacctgaatgccacaatgtgaatttgatgcagttgcaagataaaagaattgacttatcagggctactattctagggacacttgtgtcaacttaaatgaaaaaaatcttgaagaaatttatttgaaaaaacatcttggtaaacgtgagaaatatattacagaaatgtaatgtacacatttacctttgatgcaaaagatataaagtgttttgtgacttctttgcctaccactaactttaagatgtaaaaagaaagagacataaacacaaacaacacaaaaacaaagaactgttatgatatattaaaagggttagaataccatataggtgcacacacatatacacacaaatgaagatggctacagaccagactagagtagaacaaaagttgattattatcagcaagaatttataggtacagaaatataaatatatgaat

SEQ ID NO: 827263 - DNA, 467 bp, Homo sapiens
tgagtggggtgaggggcgtctgccattactgaggctttagtaggtgattttccccttacagtgctaaggaggctgggaggtatgagctgggtgcagcaaagtggctgtggccagcctgcttctctagattcctcctcagtgggcagggcatctctgaaggaaaggtaacagccccagtcagggccttatagaaaaaaaccccatcttcctggaacagagcacctgggggaaggggcagttgtgggctcagcttcaccggatttaattattcctccctgctggctctgaagagagcagctgatcctgacaggagggattctcccatcacagtgtaccagctctaaggaacagactgcctcctcagctgggtccctgacacccatgccacctgactgggtgaaacctcccaacaggggtcgacagagacctcatacgggagagytctggctggcatctggcaggtgccc

SEQ ID NO: 827264 - DNA, 549 bp, Homo sapiens
tcaccccctcacctccccaaattagcctcctgcctctgctccggaagcttcctaatggtctgtgtgcaactgtgcaattacagcagcctgtgttaacaaagctgcgtgatcaccagctttgggcaaaggcttgtgattggagcggtgtgaggtgttgtctcacccctttcacaggcagtttctcgtttttcacatgcgcccacttataaatgtctgtcacagggtttcaggccattcaccacttacacatttgctaattgttccccattcttctgtgtttcttagcctcagacttttcgtatccatctgttctaactaaaatctctctcatcaaattgaaagcccctccaaatgatttcttaccattttctcctaattgccactctagagacctggctatccatttgaaatacctttttgaagtcttgatatctgtaggaaatatttttttctgacatgatagaagtaaccagttttggtgctatttgggttgcttaagtaactacaggctggaaayaggagattctctttccttttttccttctattt

SEQ ID NO: 827265 - DNA, 489 bp, Homo sapiens
atgcatgataggaaaattactaaggaagataaaaattaggaaaagagatagtataataaatattttaagctagattatttaagataaggtgctatagctatggtgttcagattaactttataatagttccacctttactagttcaatagttcccccgagaatgtccctcaagttttaatgtttattttcttaaattctttttttttttggagacagagtttcactctttttgcccaggctggagtgcaatggcacaatctcagctcactgcaacctctgcctcccaggttcaagcgatcctcctgcctcagcctcccaagtagctggaattacaggcatgcaccaccatgcctggctaattttttgttkgtttttttgagacagtctcgctctgtcacccaggctggagtgcagtggcacgatcttggctcattgcatgcaacctctgcgtgctgggttcaagcgagtctcctgcctcagcctcctggg

SEQ ID NO: 827266 - DNA, 608 bp, Homo sapiens
acttccttgcttgcttactaatggaaaatgattgttaaatgtaggtttctgagacttttggaagacattattgatttattaagagcagaatatggggttgggtttttttgtactttttttyactattgtgataaagtggtagattcagcaattcacacttatttaccagggatcccttaagataatcaccatcacccatttacaagatggctagctcaaaagtgatgtaaaattggggttttccttcatgtaaactttagaagcctgagcaggctccctggcattgaatgaactagccaacagtcagcagctaagaaagcagccttcaaatagcatgtttgtgatccactaatacatgtaaaatttttcttctattaatgaaagaatcagattcaacattctaacacacttcacttatttaagtaaagaggttaatgattttagcgtaactataacttctacaaggcatgttacaattttgcttctgtcagtatgaataaaagagttgatatattagaaccaccacgtgttggcaaaaaaaaaaaaaacctgttcaatttttccattatgatatatatgtaatttataatatatatgcaagtgtagaa

SEQ ID NO: 827267 - DNA, 522 bp, Homo sapiens
tcatcaaatctaagacatcaattgtaagacactcttattttatttaccattaaggaaaacataytgccaattacaattgaaacacacaattatatgatgtgtccaaattttagagatgtcaaaatagaaaaaaatatgcttcttagaatcatgaactctaagaattaccatatttattgatctttatctttataacatggcacttgccagtctaatgaatctctgattatctctggcaggttttaagtgctaaagaaatgcttgttgaatgaataagtgaatgcataagcaaacatttaagtgttcaagggctctgtgaaatagattgattaatgatggcaatgtaaccccatattttccttttatcataattaatgtaaatatactaccacaaaaaatagaaacttaaaaatttaaaacccagaatccctaccacacaaaaataaatttctatattttttcatattcctgtccaattcttatccatatacttcaggttttttctttaacttaaaaccaagt

SEQ ID NO: 827268 - DNA, 586 bp, Homo sapiens
gcatctctaaggactcttttacatcacayctaagttaacatttacttccttaatgtcatcaaatacccagtcaatgatcaaatttagctgatcgtaattttttaaacagttagaaggatccaaataaggcttctatagtacacttggttgatttatctctaatatctcttttattctaatgatttttttctccatctgtttttccttgcaatttatttgttgaaaaaaaaattcacctgtcttgtcgagttctcacagtctgggttttttttcctgtgctgttatccaacatgcacctctgtcctctgtattttttgttaattgatagttaaatctagagactaaataagatccatatctgactttttggtaagaccaccccaaaggcagattgtatactccatcaggaaatataatttctggctatcttgtgtgtgtatgtgtatatgttatgatttaggccatctaaattcattatttcatttgaaggggttcagagcacataaccccaaactatgccactctgacataatgattattttcagcttaaggcaactgagaaaatgcaggcacagaatgagctctg

SEQ ID NO: 827269 - DNA, 586 bp, Homo sapiens
gcatctctaaggactcttttacatcacacctaagttaacatttacttccttaatgtcatcaaatacycagtcaatgatcaaatttagctgatcgtaattttttaaacagttagaaggatccaaataaggcttctatagtacacttggttgatttatctctaatatctcttttattctaatgatttttttctccatctgtttttccttgcaatttatttgttgaaaaaaaaattcacctgtcttgtcgagttctcacagtctgggttttttttcctgtgctgttatccaacatgcacctctgtcctctgtattttttgttaattgatagttaaatctagagactaaataagatccatatctgactttttggtaagaccaccccaaaggcagattgtatactccatcaggaaatataatttctggctatcttgtgtgtgtatgtgtatatgttatgatttaggccatctaaattcattatttcatttgaaggggttcagagcacataaccccaaactatgccactctgacataatgattattttcagcttaaggcaactgagaaaatgcaggcacagaatgagctctg

SEQ ID NO: 827270 - DNA, 351 bp, Homo sapiens
cttgcaaaggacactattagaaaagtactgtcagtatgcagtatttagtcaaactggaatatgaaatcyatgttacacagtcatcaatgttgcatttcctgaatttgacaatagtatcatggttatttaaaagaatgtctttgtttctaagagacccatgctgaaatatttatgggtaaggggtcacgatggtctgcaacttactcacaaatggtttagcaaaaagctgtaattctgtgtgcgtgtgtgtgtatgtgtctgtgtagggaggacatgcatgtaaatgtggcaaaatgttaaaaattagtgattctaggtgaaaagtatactactcttgcactactcttacat

SEQ ID NO: 827271 - DNA, 528 bp, Homo sapiens
tggaaggtcagagatattttcacttgtgggttcccagctgcgggcatacaacaggaactgaatgtatctgcgctgaaaacgggactgataggttgaaggttacctatggagtttgccgccttctgcatatcyacccatgatactcagaactcttgtctgtgggaatcatctcagaagatcttccttccccaaatattctgcctcagccggtgtgggtggggtgtgataaaggacatgtttagtaagattcacaaactcaacactgggatacaccacatggatcacaaagggctagttcctgttcaccctgtgctctgtttgttgtgtttgtttttctcctcagccctgcagtcagggagcaggacatggcctctgcaggaaagcatggtgttgtggggtgtccaccacatatccaaaggactgctaggacaccatctgactttaagtggagtttgttattactgacatttccttactctcaagcaagttgaccttagacaccaaaattttctgatggcaaatagataa

SEQ ID NO: 827272 - DNA, 612 bp, Homo sapiens
cagggaaagcctatgggtggggatctaagatctgtgcctgcaggtgaccttgcacctggacaatgaatgggagaatcaaagggagcatgcctgcaagagaccctgggaagggacagggaggctcgatgagggacaggagcaaagcttaggagacccccaagtgaagatgatgcacaggataccatttggaattctgaccattgaaaattcactttgtgaaactatttttaagacagaatagccttttctaattaatttgtaagagcatgttatggtctgaatgtttatgtcttttccaaattcatatgttgaagttgtggccttcaaggtaatggtattaggaggtggggtctttgggaatagcattagtgcccttataaaagagagccctgaaaactgtcttgcccttccagcaggtgagaacactgctagaagatgggcatctatgaaccagaaagtggccctcaccagatacggaatatagtatcytgatcttggacttcccagtctccagaaccatgaggaataaatgtgctgtttataagccaccagtttagggtattttattttagcagcccaaataaactaagacagagctcattaatattaaaa

SEQ ID NO: 827273 - DNA, 559 bp, Homo sapiens
tttagaagtacataaaaacttgtaaataagcaacattagttatgtttaaaataatccttttgtccaggcactgtggcttagrcttgtaatcccagtactttgggaagctgaggtcagtggatcacttaaggccaggaattcaagaccagcctggccaacatggtgaaaccccaactctactaaaaatacaaaaattagctggttgtgatggcgcacacctgtaatcccagctacttgggaggctagggcatgagaatcacttgaacccgggaggtggaggttgcagtgagccaaggtctcgacactgcactctagcctgggtgacagagcaagactctgtctcaaaaataaataaataaatacataataataatccttttatccttttgtataatccatgtgctatcccctgctttttttctttttttcaagcttgtgggaagtggtatgattatggacaggctatcaaacttctaaaaatgagttttcaaacaacctttgtagctggaattagatagtttggtaccgatcatgccttggctactattaaaatttctaa

SEQ ID NO: 827274 - DNA, 570 bp, Homo sapiens
tttttagtagagatggggtttatccatgttggtcaggctggtcttgaactcccgacctcaagtgatctgcccacctcggcctcccaaagtgctgggattacaggcatgagccaccatggctggcctccacttctaattctcgttctcttgctttttccacatctgcagtcacttccttcactgaagtcttgaacccctcaaagtcatttgtgggagttggatcaacttcttccaaactcctgttaatgttgatattttgacctcctcccatgaatcacatattttttaagagatagggtctcactaggtttcccaggctggagtacggcggctattcacaggcacaatcatggcacactgcagccttgaactcctggcttaaactaatcctcctgctttagcctcctgagtagctaggtgcatgccaccggatctgacttatgaatgttcctaatggcatctagaatggtgaatcccttccagaaggttttctatttacttgtccaaatctgtcagaggaatcaccatctacggcagctattgccttawgaaatgtatttcttaaataag

SEQ ID NO: 827275 - DNA, 627 bp, Homo sapiens
aaaagaaaggttttatctttcaatcaacaggagattttttaatagggggaggacacacaggaagcaagcattctgggaaacagctatgagggatttgggctctgaaaggaaagaaactggggtggaggtggggactgaggtctgcttgctggcccctgctaaatttaggttgagggtgagggcagagccaggtaactgagaagtgagcatcctcactgtctacaaagtactttcacaacttttgtttaagcccaaggcagatgccatgggagccggttggaatggaggtaaaagcactggggtcagacccagggctgaaggtccggcagttctacccactgagctgtgtgaccttgggcaagtgactggccctctctgagcctcagtgttctcagctatgaaatagggacaatagcagtacatatgctgcaccttcaataattatttcacttctaaactagaaaatggactgtcactttgtggaagggttttttactttataaaggaaattgccacagcacccatgaasttgaccttccatttgtaataatacctgcagtttctcaagagattagttattgcatggacccacaaagagacctcccacacctagagagggctttcatc

SEQ ID NO: 827276 - DNA, 661 bp, Homo sapiens
taaatttgcctgctaaatcaaacctatgatgaaaagaaccaggcaaataacactgtcttgcagtgtgcaagtcccgtggctgtattatagagtgctcagctcagtgtttcacagtggagaagaacgtacgttgatatgctttctgggtttgagagctcttccttcttcatccagaagacagagctgggtagagaaaaggataaccagcaagacaaaggctttatcccaatattatatgtttaaaactcaaagagatatggtgaaaatgggactttattaaatttgcctgattggaaacaaacatgcaaattgtacaagattcctaaatgtgccaaaatggcaaggagagagccctgacgagcatggagaatagtgagtaatgcttatgtcctaacagtgccccttgccttcattgacctttggaaatattgtgaaaaagtcaaccttttctattctgtctgtatagtcttacagtgtttcctctctttttctccctctagggagttatccaaagcccccttcacaagaaatgctagctttcaggaataatcaatcaagcacacctttgagcaaatgtaagatttatgttcattctatttagatatttgattttgacattgtatcctttattttggaamaaaatgaatgtcacctacatgca

SEQ ID NO: 827277 - DNA, 630 bp, Homo sapiens
cccctcctggctaacacggtgaaaccccgtctctactaaaaatacaaaaaattagctgggcgtgttggcgggcgcctgtagtcccagctactcaggacrctgaggaaggagaatggcgtgaatgtgggaggcggagcttgcagtgagccgagatcgtgccactgcactccagcctgggggacacagcgagacactgtctcaaaaaaaaaaaaaaaaattaaacagatttcaacaagaaaaaataataaaaatttaacctacggaaacagtattttttaaacttatttgcagttgaaagccactggcaaaggagattaccagagatgttagttgattacattaccaaatagtatattcttactatcatttacctacacctttgagtaaatgggataggtttcagttagtggcataataatgcttcattgaatgcacaatagtattaacatgttaaaaatgtataatgaaacaagttcacacatcatctgaaaatttaaaaatgtactgcattttattacataaaagtacaaatagtaaaataacgtactaattttttaattttaacaaaacttaaatgttcttactataatgcaaaagaatattactctaaacacctacctcatgcaccac

SEQ ID NO: 827278 - DNA, 584 bp, Homo sapiens
ttagcttctttccaggtaatgctgtatctgcgtttgagaccagaggcattagcatgggttaaattgtgaaaatgtctagcattagatattgcattagcaactaggcaatcagctatctgattccctttagtcaaaggtcctggaagaggtgtatgagcgagccctaatgtgagtgatgtaaaaaggatgcagtctattcctaactgctgtttgcaattgggtaaataaaatcatcaggtgttaatctgtatgaaatcataactgagcattttcaattaactgtgtggaatgaaccacgtatgaagaatcagaaatcacattaataggcatatcaaaagcagtcaatacctcaattacagctacaagctctgcttttgagctgaagtatagggcatctggaaaactttacttttcgagccagaataaggagctttacaattactagacctatctgtaaaaacattctcagcaccttcaattkgtttaaatttagttatttcagggagaatccaattagttaatttcaaaaactgaaacagctccattttaggaaaatgattattgagaatacccacgaagtcagc

SEQ ID NO: 827279 - DNA, 500 bp, Homo sapiens
tttatctttaattgtgtttacatgatgagtaacatttattaattgtatgttgaaccaaccttttatttcagagatacagccaagttgatcatagtgcattagctttttgatgttctcctggatttggtttgccagtattttgttgatattttcatcaatgttcattaaaaatattggcctcaagttttctattttttgttttatatttgccagattttggtatcagaataatgctatttttatagaataagttggaaagaagtccccttttctcaatcttttgaaataatattagtagaagtggtaccaactctaatttttacatctggtggaattcagctgtaaatttttctgattctttgttgtttttggtgggtaggctatttattwctaattcaattttggagctcgttattggtatattcagggattcaatttcttatttgttcagtctttggaggatgtatctttgctccaagtttacaatcctcaagcttggc

SEQ ID NO: 827280 - DNA, 500 bp, Homo sapiens
tttatctttaattgtgtttacatgatgagtaacatttattaattgtatgttgaaccaaccttttatttcagagatacagccaagttgatcatagtgcattagctttttgatgttctcctggatttggtttgccagtattttgttgatattttcatcaatgttcattaaaaatattggcctcaagttttctattttttgttttatatttgccagattttggtatcagaataatgctatttttatagaataagttggaaagaagtccccttttctcaatcttttgaaataatattagtagaagtggtaccaactctaatttttacatctggtggaattcagctgtaaatttttctgattctttgttgtttttggtgggtaggctatttatttctaattcaattttggagctcgttattggtatattcagggattcaatttcttatttgttcagtctttggaggatgtatctttgctccaagkttacaatcctcaagcttggc

SEQ ID NO: 827281 - DNA, 686 bp, Homo sapiens
caccaggcaagagatgataaaaatccccaaccaaggcagttaaggggagtgggtttccagggacatttccagtggaaaatggatagattggtgtaaataatcccaagaatgattaaagatatgctctaaatakcttaagaacgttagtaggaatttcaattcatggcttttaaaatgattttatacattcgactggcagtgcggttgtttcatcagacctctcattcaaatcctcattctttcttgaaaggataacttcaggacacatacagctgctgtgtacccggagaaggtggggaggctgctccatctttcccgtttcaagtatcagatgctaaatgctggaaataaagtaattttttcatgtgtaatgttttttcatgacaataaatatggaaggcaacagacatgtagtcaatcaaggagacccctttccaggcattaggatagtgggctggaagcagattggcactgcagtagctaccctgcaaatcatctaccaggtggcagcctaacttcagtaaatatgcttccacagagccagtgaagtatattgtgtgaggtctcctgaactcacgtagtatgcattaagacttgtactctgctccaatattgaaagcaaaaatatcatttttaattttccctgagaacatatggcaatggaagtgaatacaggatcctgatga

SEQ ID NO: 827282 - DNA, 514 bp, Homo sapiens
attgaacacttttcttcttttaaaaattataaacataagctcaataataaaatggcctgatgagcagtttttatatcaactctgttcggggcaagtgaaattatacattrcaaaattgtagagagttgtaagaaaaattctaaaatatcatgagtgtatttggtactaatgctgtgacacacatttcagtaacaaaaagtaattaccaaatatgatccccatataatttttaaatgttgcctaacatcaaaactatcattctttaaaaaaaatcaatgtaatgataatacattatgttttcagctctttagataacaaaagtagattcttctaaatccaaaactctgtctttctgcaactatgaatatcctctatatagtttatatctttttgtgaaagatactaagacatcaacaaataagtatgctccttctgcatgattatattcaaattatgtgtaaactcagcatataaaagcaaaagtatagtttgacaattttatggataatagagc

SEQ ID NO: 827283 - DNA, 514 bp, Homo sapiens
attgaacacttttcttcttttaaaaattataaacataagctcaataataaaatggcctgatgagcagtttttatatcaactctgttcggggcaagtgaaattatacattacaaaattgtagagagttgtaagaaaaattctaaaatatcatgagtgtatttggtactaatgctgtgacacacatttcagtaacaaaaagtaattaccaaatatgatccccatataatttttaaatgttgcctaacatcaaaactatcattctttaaaaaaaatcaatgtaatgataatacattatgttttcagctctttagataacaaaagtagattcttctaaatccaaaactctgtctttctgcaactatgaatatcctctatatagtttatatctytttgtgaaagatactaagacatcaacaaataagtatgctccttctgcatgattatattcaaattatgtgtaaactcagcatataaaagcaaaagtatagtttgacaattttatggataatagagc

SEQ ID NO: 827284 - DNA, 608 bp, Homo sapiens
caaaatacactttagtcttctcaatttctgaatacaaggctactatttyccagtatttctcatttggggattctttatagtcaatctattcttacccaataatcgtacctaagaatttggagatacattttatttgcctggagtttttcagaagaattccaatattctcaaggtaaattgcctgtcttattaaaatagttttctaaaactcacacaccaggatcatagcatatcacaagtataaagccctctacagccagtagactaggaaagtccacgttgaacttgaggagaattaaagcatcataatttattttgagtttaagataaggtgaaacatggatcacagagaattttgatgcccatgagcgagttcacacatcagctagacactgtttagtatacattaaagttaatgagagaataggtggagatgaaaaggaatatgttagttggacaaattttatcatctgaatatttttattagaatattaagaatgagatcttctgggttagaagtgtgttaattacagggaggggacctatgtctgattttctcagaactgtcctggcttctgcaagttgtacctgcataactattggcagaa

SEQ ID NO: 827285 - DNA, 608 bp, Homo sapiens
caaaatacactttagtcttctcaatttctgaatacaaggctactattttccagtatttctcatttggggattctttatagtcaatctattcttacccaataatcrtacctaagaatttggagatacattttatttgcctggagtttttcagaagaattccaatattctcaaggtaaattgcctgtcttattaaaatagttttctaaaactcacacaccaggatcatagcatatcacaagtataaagccctctacagccagtagactaggaaagtccacgttgaacttgaggagaattaaagcatcataatttattttgagtttaagataaggtgaaacatggatcacagagaattttgatgcccatgagcgagttcacacatcagctagacactgtttagtatacattaaagttaatgagagaataggtggagatgaaaaggaatatgttagttggacaaattttatcatctgaatatttttattagaatattaagaatgagatcttctgggttagaagtgtgttaattacagggaggggacctatgtctgattttctcagaactgtcctggcttctgcaagttgtacctgcataactattggcagaa

SEQ ID NO: 827286 - DNA, 674 bp, Homo sapiens
catcagacctacccaggaccccaggcacagctgtcgggacctgagatggacagcaggcctaggaatccacagaccaaccagcaacccgagatgtgtcaggaagggatgagctgggctaatcctattcctccttggggagtttccagtgagaaccgaaatggaaaggatatcacatgctggagtcagggctgtggtggaccatctgctcgtggagatttgagggagcagaactcatgagaaggcagaggccccagttaatgaaactggaacagagtgcacaagagcagagagaaacagaactgccacagagacacatagagcctccggctccagggctgtctcagttcctgcctgaaccccaattccagttcccatcaagggagttccttcagtgagtctccctttccaggaggtaactaacagttacttgcatcaaaaagagccaaactgaagcagtctccaaaccaaagttacataccaaaaaagtgtttgagcttgtggtgggagggtggggatgacaatctcctacgaacacgaaaatatgaaacaatttttttctagcacaatttgtgsggcaatcagtatattttaagcatatcagtcatgactcttcccattacaggagacagcactggcttcaggaactgatggatccaggtgctcacgtgtgtctt

SEQ ID NO: 827287 - DNA, 674 bp, Homo sapiens
catcagacctacccaggaccccaggcacagctgtcgggacctgagatggacagcaggcctaggaatccacagaccaaccagcaacccgagatgtgtcaggaagggatgagctgggctaatcctattcctccttggggagtttccagtgagaaccgaaatggaaaggatatcacatgctggagtcagggctgtggtggaccatctgctcgtggagatttgagggagcagaactcatgagaaggcagaggccccagttaatgaaactggaacagagtgcacaagagcagagagaaacagaactgccacagagacacatagagcctccggctccagggctgtctcagttcctgcctgaaccccaattccagttcccatcaagggagttccttcagtgagtctccctttccaggaggtaactaacagttacttgcatcaaaaagagccaaactgaagcagtctccaaaccaaagttacataccaaaaaagtgtttgagcttgtggtgggagggtggggatgacaatctcctacgaacacgaaaatatgaaacaatttttttctagcacaatttgtggkgcaatcagtatattttaagcatatcagtcatgactcttcccattacaggagacagcactggcttcaggaactgatggatccaggtgctcacgtgtgtctt

SEQ ID NO: 827288 - DNA, 603 bp, Homo sapiens
atagtaagcccttaataaatgtttgtaggtttgaactgatttactgtaggatgtactagttacatctatcaagttttggctctctgtaagattaaagccagacacattttaaaaaatctttttatttaggtgcgtcttacatacagtaaagcatatgatcttaagtggctcaatggtcttttaatgtataccctgggtaaccaatacccaggtcaagacatagaatttgtcccgtaccctagaagacttcctcatgccttgacacatttttgagcatatatacataataacagattttacaattttattatatgttttcttttataaacaaccattaatgtcccagaataaaaaagggaggtgcacaagaaaggtcaagcacaaagctgaactaaggacataaaaatcttcaatgctagttgacagttggtattaaattgtttgactgttcagaatcaggaatcttctacttaactgaagagatgtgacccaggaaattctgcygtcaggtgaatttctgtcaaaaataatcttttcccatcaattcctaccatgaaattggaaacattctctggggatccaaatactggcctctggctgtag

SEQ ID NO: 827289 - DNA, 603 bp, Homo sapiens
atagtaagcccttaataaatgtttgtaggtttgaactgatttactgtaggatgtactagttacatctatcaagttttggctctctgtaagattaaagccagacacattttaaaaaatctttttatttaggtgcgtcttacatacagtaaagcatatgatcttaagtggctcaatggtcttttaatgtataccctgggtaaccaatacccaggtcaagacatagaatttgtcccgtaccctagaagacttcctcatgccttgacacatttttgagcatatatacataataacagattttacaattttattatatgttttcttttataaacaaccattaatgtcccagaataaaaaagggaggtgcacaagaaaggtcaagcacaaagctgaactaaggacataaaaatcttcaatgctagttgacagttggtattaaattgtttgactgttcagaatcaggaatcttctacttaactgaagagatgtgacccaggaaattctgccgtcaggtgaatttctgtmaaaaataatcttttcccatcaattcctaccatgaaattggaaacattctctggggatccaaatactggcctctggctgtag

SEQ ID NO: 827290 - DNA, 657 bp, Homo sapiens
ttttccagacaaacaaaagctcaaagaatccaccaccaccaaatccagcttataataaatgataaagggagttctttaatctgaaagaaaaaaacactaatatgcaaaaagaaaatatgtgtgaaggcccaaaaccaacaagcaaaattaagtataaggaaaaacccagaaaactctaacactaaaattgtggtgtgcaatacaatcatagctctagcataaaatccaaaaagcaaatctatgaaaaacaaaagtagtaatgcctacagcaacctgttaaaaaaataggctatattaaaatatgtaaattgagagaacataaagtcaaaatgtaaggagggatagagttaaagtgtagacgctttttttttttttaattgttttttgagagacttgttgcccagactggagtgcaatggcactatctcagctcactgcaacctccacctcccgggttcaagtgattctcctgcctcagcctcctgagtagctgggattgcaggcatgcacaaccatgcccagctaatttctgtattttwgaagagagggggtttcgccatgttggccaggctggtctcaaactccttacctcaggtgatcctcctgcctcggcctcccaaagtgctgggattacaggcatgagccactgtgcccagc

SEQ ID NO: 827291 - DNA, 658 bp, Homo sapiens
agtgaaaagaagctacatagattactcctgtaagcacaagtgagaattctcagatattttattggaagggaacattggagaaaaatcaaatctggacttctgtgagataatcaagtgagaacctggcttgttgagatttggaattacagtttactgatatgttttcaatgttatcttccaactcttccattgaattttctatttttactactatatttttaattttctgaagctctttctgttctgtgacttttcatttttaaaatatcctactcaaagtttattagtataatataatctcttctctctctgaagatagtaactacaatggggttatgaaagctttcttctctttgaaattgtctttgtttcctgtgaagttcttttttcatacttgttgattttcatacttgttgatttcccatgctcagaagaacccagagctttgtttagtgctctgctggcactatcttgaaattctttaatgttagatgctttttacaaatatggacctttgacagtccatttttgagagagttattaaaaggcccactagaagctctatgtgcttggaaaggacttgatgactactggcattcactgtgtggtgattaggcagggaccatatactttcatkgcaaattcccccaaatgtcag

SEQ ID NO: 827292 - DNA, 592 bp, Homo sapiens
ctgtggcttccctatagaatgcatgatccagaagggcasaattatttgtatgttttgttcattgtcatatcctatctctagtaccagactgcacatagtaagcaataccttttgaatgaatacaaggtgttgaagagattaatcacagtgcctactatacacacaatcctctttcaatggacaaagcatcattcatagtcattcctaagataaacctttttttttccttcagcagttgcatgttctgtactacagaactctgtggtttcacccttgtatgactttaccatagatgattgaaccaagagcagatacatgacaaaagggcaatcagcccatagactgctcagtgatctggatgaaaaaactgtaacctaacaagggggaagtgattagctacattgattagagtctctctcctaggaatctgggccagaaaataagagaagaattactcagatggaggtgagaaggaatgaaaagagagagagagagagaaaaattagctagctcccaagaatgtcaatgcccaagggttaaggacaaggaacacttgctactgaaggaataatacagctgtaaggagtttctg

SEQ ID NO: 827293 - DNA, 497 bp, Homo sapiens
cacacagacacacacacacacacatacacatggaatacatctwaccaatgaggtgaaagatctctacaaggagaactacaaaacattgctgaacatatagtacatgtttcttttcggtataataatctatattcctttgggtatatacctggtaatgggattgctgagtcaaatgctaagttctttgataaatctccaaaatgctttccacagtggctgaactaatttacattcccaccaacagtgcataaatgttccctttattcctcaacctcaccagcatctgttgtttttgcctttctaatagtagccattctaactgatgtgagacggtatctcaattgtggttttgatttgcatttctctggtgattagtagtgatgggcattttttcatgtttgttgtctgcatgcatgtcttcttgggagaagtgtctgatcatgtcatttgcccattttttaatggggctgtttgttttttgtttcttgaattaagtt

SEQ ID NO: 827294 - DNA, 472 bp, Homo sapiens
catggtggtgtgtgcctgtagttccagctacttgggaggctgagatgggaggatcacccgagctcagggacatcaaggttgcagtgagccataatcattccactgcagtccactccagcytgggcaacagagtgagatcccgtctcaaaaaaaaaaaaaaaagaagaaagaaaagaaatttgaaatttgatcctcaatgttggaggatcaaacagagggcctaaggccctctgtgtcgggggcagagcaagtgagttctcattctgttagtgcctgtgagacctggttgctaaaaacagcctgacacctcccctctcactcgctcttgcttcctctctcaccacgtgatttctgcagacaccaactcccctttgctttccactatgaatggaagcagcctgaggacttcatcagatgcgtggtcttcctgccagcagaatcagtcatgagccaaataaaccttttttttata

SEQ ID NO: 827295 - DNA, 618 bp, Homo sapiens
gatgacagggcaatagtttactcacatattgattaatgttctgtttgcttataaaattgtaattgaaaacattactctcagtttaagagatttgaagtgcatcagtaaaatytaaattggcatatctagactgattagaataatatatatgtcctgcataaatcataatgttgtttaacaagggtagcatagtcttaggaatctacttgagttttatttatgcatgaataccatccacaccctttgtggatacatgatgaccagggtaccatatgatgtaatgagtccctattccaaaatgcatcatgtattatagtctgcatgttcactccccacaaatatgatgttgaaatgtgatccccagtgttggagttgggacctggtgggaggtgtttaggtcatgggggcgaatctctcatgaatggctggattccctctcttcagtaatgactgcattcttgctctattgctcacatgacaggtttttttttttttttttttttttttttttttttttttttttttttttttttgagatggagtctcgctctgtcgcccaggctggagtgcagttgcgagatctcagctcattgcagcttccacctcctgggttcatgc

SEQ ID NO: 827296 - DNA, 657 bp, Homo sapiens
ggttctggaagagaactctggcagaggaggaggggtgcagccagctgcagagggcaaggtgaaagcatgcggttcactcatcaccaaaggtcttccttgctcagattttctcaaggatgctgaagtttccatattaatattaggaggtttggaggccgtgcatggtggctcatgcctgtaatcccagcactttgagaggccaaggagagctgatcatttgaggtcagtagttcgagaccagcctggccaacatggtgaaaccctgtctctactaaaaatataaaaattagctgctgtggtcacaggtgcctatagtcccagctactcaggaggctgaggcatgagaatcgtttgaacctgggaggtggaggttgcagtgagccaagatcacaccactgcactccagcctgggcaacagagcgagactccatctcaaaaacaacaacaaccaaaacaggaggcttagacttaggccttcttcccattgcctttctgaggagagctctgtttgctggtttctgggcatgtgatgtaaggctgtgccccatgagtctctccttccagcagcactgccacctcctgagcagatttgcttatcagatttggcaagaagcygtcccttcttcaatgagccaggtacatgctggtgcctccgcc

SEQ ID NO: 827297 - DNA, 607 bp, Homo sapiens
ttttttttctcctgcctttacaggttatatttcttttaacactttaaactgtcaaataaaattcctcttggacaagctcttttcaaaagacttgcttttgctgttcctgcttcttctgtaagagtaacagcatttccccttactcacctgcctctggtgctggctgcacagagtggacacagacagtggcaaaggtttgatggagaagctcagcacgagaaggtctggctaaattgcttcctcactgatctttccagttggcctttgcagcatctttatcctttggtttgtgaggctgagcaatgcttttgtgctgctgtaaagcctgcttttgtgacatgcaaaaaccacacagccgagatatccttgggaaattctcagaaaggaagagggatatgaggttctttgtcagatattacaccagacccaaggagatttctgttattggaaattacaattagatttcttccccttcacaatggaaaagatactgtcgtagctctcatatagtctagtactgattataaagacacttctttccagatcagcctgaactaactgtagaccatgaaaaatcttcattaygatgtatatttattgatatttc

SEQ ID NO: 827298 - DNA, 542 bp, Homo sapiens
tagtttctggctgtaaaaatcattctycttatcactataaacacacacacacactttcatatattataatatcataacttataatggaggtcacttatatgccagttcatatataaggttatctaaaccaacaaatgcagttacaaatctgttctagaagttgcctaataaggtgggatgtttcttattcaaagccctctttcaggcctatagaaaatgctccagttgttatacacagaattctgtaccatggataaatgtttttatttatttttctctcctaggaaacattgcaaaatttaagcaagtgtattgactgctttttgcttcaatttctattcacttagacaaataattcaataaggtgtttcataaaaacacctgctctttcaaaatatgaagacagtggccgggcgtggtggctcacgcctataatcccagcaaaagtgcaaaagtggcctctcaaaggggaggccaaggcaggcagatcacgaggtcaaaagatcaagaccattctgcccaacatggtgaaaccccgtctg

SEQ ID NO: 827299 - DNA, 639 bp, Homo sapiens
tgcccccctgtagccatgggccgtcggaggagagggcggatgatgggcatccctttgtgccccaggcatgaagggtctgaggctgaattttcgaggctctcrgttgtctttttcctctccttcacctttgggtctccccacggctcattagggattctattggaagagacgcaaggaactcaaattccacaatttggtttctgtggagaaggtttaattaggagggtgtattaacttaattggctatcatcaggcttccagcttctttgtgtattttaagtaattttctctccttttttcttacagccagtagagcatgcctttaaaagattaagtcttttctttggtctccttgagtaaaaaaagctctggttcagaagtcagagagcctgaattttgattgtgactctttctggaaagatctgtgtatacttagatcagatactcactcacttctcctggcctcatttccacactggctagataagtaggttaaattacaggaccacgaaagtcccttccggtgcttgcaatgcataacctaagtgtttctgtgaaatgacatgaaactcctcctagaacaacatttggtgtgtttcaaaagtcaataaaaataccaatctacatatgttatacaac

SEQ ID NO: 827300 - DNA, 649 bp, Homo sapiens
caactgatattcattgttttatgctcttgacctgggactcgtccttggatcctcttttttggctattctagggagagctcarctatctcgaggcattgcctaccatttatgcacttctgccttccaaatttatgtccatagccttgatttctctgctgtgttccagactcatgtgccccactgcccccttaccattccagtgggggcgttatagggatctctaacctaacacaacaaaatgcaatccttgatatgtctctttcaagctagttctttccttctcctcctcccgtctcagtaaatggcaccaccatccacccaaaggctcattcccaaaactagaaaccactcttcattctcttttcccgacactctgtatccaaatccaggaataagtcctgttggccccacctccagcctccaccttgttctcccgcctccacagcagccgcccttgttaaaatcactgccatctcacccctggacccatgctgcagtcatcttctaaccgggccacctgaggacacccttgaccccagtccttttcctccgagcagccagaggggtcttttatttttttaagactttttttttttttaatatagcaattttaggttcacagccaaattgagaagaaattacagagatt

SEQ ID NO: 827301 - DNA, 632 bp, Homo sapiens
agctttttttgaatctttagaaaggtcaagcagtatatatactgtgttacgtaacatatccagtggggtctagtgtagcacytcgcaaataaattaatatctcagcagccaaaagtggaactattacaagagtaggataaataaagatgataaatggcctcagggtggttgagatcaggcaaagttttgctgtcagatgtcttacaaaagaaaaaaaaaactcagttgtcaaagctttttggatctggagttgcagatagaaactgtggacctatgaaagtaaaggccctggtgagactaaccaagtcctctgaggagttcttaaagagataaatagggctggtccacttcttttcagattggcttccactgaattagttgacccaggctttacagtctccagctgtaagcacgaagagcaaaccagcaccttggcttcttattgctccttatcattctttccccctctgtggcaaaacccacggggtcaggtgctgagcttccaacccattgtcctacgaggtgactcagggtaggtgacggatatggtgcaggctgcacacacacgtgagcacatgtgcacacacacatatctgggtcctggggtgctgaggggattgctcaccaggctg

SEQ ID NO: 827302 - DNA, 540 bp, Homo sapiens
gtaagtacactggcatttctctttaatcrcagtgactaaagacaagcatcaggagaagatttgaacctattgaatttgtctttccctgcaaacaggcatcagtgatggaaataggtttgtagccactaggttggctcagtaagtttttccaggaaagtttgcctggattggacataagggtggccagctagggctgaagcagaactgtgggtcaggtacccccagaggctggttctgattgaggttgtcaggcaaccagggctgatgcatgagtgattcctaatgctgtatctgtgggttccgcttgtgtctcggcttccacagtccttgttgtttgaatgatcatgtagatgcttctatcaatattctggtagatggatgggggatgtttaaagactccagaaagggaaatagtgtcattgaggaggtaggagaaacttttggaggtgttatgggaatgggaacaggtgatcaagcatccctgttatgcaacctcataccgtccaaggaaaggttttgtttctttgtgttgctggagag

SEQ ID NO: 827303 - DNA, 452 bp, Homo sapiens
actggattacatgtgattaggtagctagaatatgtacatttcttaaaaaatattgcctgaaagatatgattactagaatatgagttcaaaacatatatcactattaattatggtaggygatttttttcaaaatcattaagagttcatggtttatttttacctacatatcattttgaaaacattaatgaaagtaaatatctacaatttcaatgtaaattaagctattatctttcaataaagtttacccagttttagatcttcatacatattatagttatacagtaaaattttaccttcattcaataaaaaaactgttgagtatgtctattatttacatgaatgaataatcagacatcttgcctttagagctggttccttctactgtacttggtgttcaaatacattaatatttggggtattatatatacatggactatccttaaatgacaatc

SEQ ID NO: 827304 - DNA, 593 bp, Homo sapiens
ctgggcactctatactgtttcattggtctgtatttctgttcttatgccaagactatgcagttttgattatgatagctttgtagtatagtttgaaagaaaatagtgtgatgccccagctttgtttttgtagttgttgttcaaaaatattttgggtatttggggtcctttgtggtttaatatgaatattagaactgctttttgcatttgtgtcaaaagtgccgtaggaatttttggtgagggttaccctgaatatgtagttccctttgggtaatatagacatttttacaatattatttcttctgagccgtaagtataaatttatttatttctttggcagtttctttaatgaaatgttttatggtttttagcatacagatctttctctcattggttaaatttatccctaagtattttattttattgattctattataaataagattgtattttaaatttcttaaaagtttcttagtacatagaagagctacttatttttgtatgcttattttgcctagtgcaacttcactraacttgtcatttgcaaaaaaagataattttacttattcctagcctatttggaagttttaaatttg

SEQ ID NO: 827305 - DNA, 606 bp, Homo sapiens
tttcttgggccttcaacttgcggtgacatattatgtgacttctcagcctccatagtcacatgaaataatttctaaaataagtcccctctaatatatccataggtatcatattgtctctgtttytctgaagaatcctgactaatttatacaggaaaaatattagaagagaaaggaggttagtacaagatagtagaattttaaaatattttattctagcattggcaactttttaaaatcagaaatgatgtaagatgaataaaatatattaactaatgtcaaataaaaatgagaattaaaattatgttcactcgtacaattcattatatatcctttatgtaaaagcattgtactgtttaaatatacattgatagatccagcagccttaaagcattaacatctatacatagttacatcaatatcagatgtgtagaaaattttaataaagtttaaatcatgcaaaatgtatctaataaaatgtgactattttactctaatattatgaatgtgtttattctttcaatacaggaatgtaaatataaatcacttaaaaacaaccaacaatgaaactgaaatattcattggacaaccttttgtctgtattctgaa

SEQ ID NO: 827306 - DNA, 516 bp, Homo sapiens
gaggtcaaaaagcaaattgaaaacattcagggaaygacctgtgacatactataaagaggataattctcaagacacatagttttcaggttatccaagatcaatgtgaaagaaaacatgttaaagacagctgtagagaaggggcaagtcacctgtgaaaggaatcctatcaggccaacagtcgaccttttaacaaaaactttccaaaatataagattggaggcctatttcaatatccttaaagaaaagaaattccaaccaggaattttatatctaggcaaactaagcttcataagcaaatgagaaataaaatccattcagacaaacaaatgctaaaataatttgttatcaccatatctgtcttttaagagggtcttaaaggagtgttaaacatggaaacaaacaagcaaacaaagaaaaacattaccagccatcataaaaacaaacaagtatatagactattgacagtataaagcaactacacaatcaaatatatataaccatcagctaacaacacaa

SEQ ID NO: 827307 - DNA, 516 bp, Homo sapiens
gaggtcaaaaagcaaattgaaaacattcagggaacgacctgtgacatactataaagaggataattctcaagacacatagttttcaggttatccaagatcaatgtgaaagaaaacatgttaaagacagctgtasagaaggggcaagtcacctgtgaaaggaatcctatcaggccaacagtcgaccttttaacaaaaactttccaaaatataagattggaggcctatttcaatatccttaaagaaaagaaattccaaccaggaattttatatctaggcaaactaagcttcataagcaaatgagaaataaaatccattcagacaaacaaatgctaaaataatttgttatcaccatatctgtcttttaagagggtcttaaaggagtgttaaacatggaaacaaacaagcaaacaaagaaaaacattaccagccatcataaaaacaaacaagtatatagactattgacagtataaagcaactacacaatcaaatatatataaccatcagctaacaacacaa

SEQ ID NO: 827308 - DNA, 161 bp, Homo sapiens
ttctctgggatcctggaatttccatgctgcctgcaggtgagtggtgccttgtaatatggcctccaccgtgtctgtgagaaagctgctacctctgcttcttgcattataattgcttagggaagaatttcaccttcatattkaatatatttagtcagaaaaga

SEQ ID NO: 827309 - DNA, 614 bp, Homo sapiens
ttgaccttgccaggggctttaattgggacttcagagtgagataaccaggagcttcataggcagaggaggaacttktttttttttttttttttttgctgaggttgtggttatccttcttgtattttgtcaaagaacatttttaaattcaaatatagaatcctggaacaaatatgtaatgttcctacggtgcaaaaaggggtaaaataatgatgacccaaaagtaaagttaaaaagagatcatgctacacaatggagagtctattttgcattgatgttagtaatacaagaagtgaggtggaagtagaagaaaagagagactgacatggcagaaatagaatcttcaaagagcagaaaagaaaaaaaaaatgtgggggaaaagagagcaaaggatatagagaacttatataaattttctcagtgagtacaacaaagttttaatagaattagtaattcttacacattggtttgtttcagagggaggcattgcagagagacccctttcaaagcacacaggaagtggctgaagtcaataaagaaacagaagaacaatttgaatgaagatggatcaaaaagaagacagacatttctaaaaagccatctttaaatataccatt

SEQ ID NO: 827310 - DNA, 636 bp, Homo sapiens
gacaggagcgaaaattagtagttaaaatttggacatgttacttttgacatgtttattcaagtagaaatttagaatarttggatatatgttcggattattagatagaggtgaaagtgggaggcataaaatcagaaaatttcaatctatatcttagatacagatatagatatagacgtgtatagtaacatggaaaattgctaagaataccgaggacctgaatttaactagaaaagaaaaaagcctggacaactctaaaacagagagcaagaaaagaagagaaagaaccagtaaagaagactgggtaaagttaaagaacaaccaacagaataaagaatcctggaggctaattatgatacttgtgccaaactgaaaggaatgatcaatatccaccactgactaaggtgaggtattattacttttttcttgtttgtttgcttgcttttattgttaattctattttattttctttactaaatttggtatttaagtcattgaaatagattcaatgtgcctgagagcaaaattgaatggaataatatctccactgtgtattaaaatgtaaatagtgtagacaggttattcatactgaaagaaattcagatataaatacagacatattctaaaaattattgaact

SEQ ID NO: 827311 - DNA, 644 bp, Homo sapiens
aaaatgtacgaaagtacatttaaaatattattgtcagtgctatgtcactatcttatgaaaagcaaactctcttaactatagaaatgcattaactacgtccagctattaccataaagactcaaaataacaataaagtgctttaataactttgcaaatataaatttctaaattagaagcaattttaactacaataataaaaaattactccacatttaggcaatgagctgggaaagtgaaaaataagaaattagtgctttccatattgctcaaggaacaaaggtggctgactgcagaacagaagaggaaaccttctaggatttctgcatagaaaaaaatagtatcaaattaatttgacaatgttaaaatatctaaactgatttggggggatgctttcagttccctatgtgtgcatgactgtctttgtgtgtatgtgcattacattaatatagaaattttaaaaatgatctaacaataaacatatttacatgttgttctaaattaggaaagtggaacttcctgagcraataaaacaacgtgaaatcagtagcacttagctaaaaggctaagccaaatttttatctccataggaatataaaaatattttacagaggagttgaactctctagcagtaggtggggattgaa

SEQ ID NO: 827312 - DNA, 293 bp, Homo sapiens
atttttaataaagtgcttttgaaagtgcacaatgcacaatttttaataaacttttctccttagaaaattggaatataagaaaataattatataggatctaatatttttgctcaaccttctgttcctacatagcaataacaaatctaacttttagtaataatttaaatcataaaaagttggtcttttagttatatatgacatttgaagtcttgaaattattagatgagctttgtataagyatattttatgaggatatacatatacttaaaatctattttatttttaactttgtt

SEQ ID NO: 827313 - DNA, 615 bp, Homo sapiens
tttttagttgattttgtgtaagtcaattatgtctgagactctcaaaatgtatatagaaaatagagttaattataaaggtatcaaatgccaattatatctgttttggtttatgatgatagcaattkttcattgtggatatttcagcccatcgagaacattttttataacttattgaaaagttgtaaaattagcaccaaatgaatacataagtgagtaaataaaataatagccaccattgaccttctttcaaaaggttccgagatagagaaacttgggagattttacttcattattttgtatacttttcctagaaaaatgagcacaaattcaaatggacccttaccatataatctgcgaacattagtgcacattggtgattatgcctttggccttctttaaaaaaaaagatacatcatttcaatggatattatgatgtaattcccagagattaggaaactggatgaatgttaattgaatcacaaaataagggggaaaatgtatctttaattggaatgtataggttaatagaaagaaataacactgatatggagtttgaaaagctttcacaagactactatgatcttagaaaaaacaattaatctatgtttctaactt

SEQ ID NO: 827314 - DNA, 561 bp, Homo sapiens
aaatgaaccaattcattaaatgccatcatctaccactgttacatcaagagaactagtctatataggcttacagagaaaatgaattaacaattaatatccttaaaaaagtgaaagcaccagcccagatggctgcaatggtgaattctatccaacatttaagaaagaattgctacaaattctctaaaatctgtttcagaaagtagaagcagaagagcacatcttaaccataggaagccataattactctaatacaaaaataaagatactgaaaaaaaaaaaacacagaccagtgtctctcatgaacatggatgtaaaaattatcaaaataaattatcagatataatccaatagtgtatacaaataattacaacatgaccaattgggggttattccaggtatgcaagactgattgaacactcagaagtgaattaggtaatctgtcatatcaagaggctaaaaaaagtcatatgatcatacaaatagatttagaaaaagtacttaacagtttccaaaasatattcatgataaaaagccagtaagagcaagctaaaaataaaggag

SEQ ID NO: 827315 - DNA, 514 bp, Homo sapiens
ttgttgatttttttgtctagatgatctttccaatgctgacagtggtgtgttgaagtctstagctattattgtattaagatctgtttttccctttagctctaataatgtttgctttgtatatataggtgtgctaaggttttatatataggttgctcaatttacaattgttatatcttcttgctgaattgactcctttattataatatagtaataattttctttgtctctttttatatttccgtcttggtatctattttgtctaaatatagctactcctgctttttgttgttgttgttgtttttactggcatagaatacgtttttccatccctttattttctgtcaatgtgtgtcttcatagatgtagtgtttcctgaatacaatagattgctttgtctttctttttttcatccattcaaccagattgttgggtcttgttttttttttgtgtttttttttttttttttaattcatgtaactacactatgtcttagataggagggtttaaaccattt

SEQ ID NO: 827316 - DNA, 604 bp, Homo sapiens
atatttttgtagcacaatagagaaatatttaatagaataatagttacattttcaatccactaaataataattaaatcaaaatyagagtataatctgtatgtgtcaaatggttggctcattaggttttctaaagaagagtgtttgatatattgctaaatatgaactttaatattttacaatacaagatagagaaaaatgttccagaatgataaaaccttcagtaggatacgctgaagttaatgtgaagaaactacagcaggcagcgtgctttatgctgctactgcgtagaatatcaattatataacatcctccctaattatgaaattctttaattttcttactgttttaaaattgactcacttttcaactttgactgtattctctttaaactttttttttttttttttttttggaatagaaacatttttggtttaactcagtgaaaattattcttataaccagcaagattcccagcccgagctcaggtctctcttccttttcttataaagcctccagtatcaatcccatgatacaccatttgtccattaacccattaatccattaatccatgagtggattcatctattcatgaggactacttttc

SEQ ID NO: 827317 - DNA, 579 bp, Homo sapiens
  misc_feature 562, 563, 564, 565, 566, 567, 568, 569, 570, 571, 572, 573,574, 575, 576, 577, 578, 579: n = A,T,C or G
agttttatacttgtacatatattgctaaatttatacctaagtattttacttttttggcattaatgtagataattttgtctttttaattacaatctcaagtggtaattgctatagaaatatactgaattttgtatattttaaaaatttttatttaaatggcttgcggatacaggcggttttggctacaagcataagttctttagtggcgatttctgagattttggtgtacccatcactctagcagtgtacactgtacccaatatgtacacttttttctctcacccccccactcttccccaccaaatcctcaaagtccattatatcattctcacgccttcacatccttatagcttagcccctacttatgaatgaaaatgtatgatatttggttttccatcccattatttggcctttccataatagtctccagctgcatccaagttgctgtgaaagacattatttcattccttgtcatggctgagtagtagtcatggtatatatatatgccactttattcayttgttgattgataggcacttaggttggttccatagttttgcannnnnnnnnnnnnnnnnn

SEQ ID NO: 827318 - DNA, 447 bp, Homo sapiens
ttctttctttgtgtttgtcagcaccagtggttgtaaatgccagaaacccaactcaaactagcttaagcaaaagggaaaaaggtttgactcatccaggagcttgtttctgcctggaacaagttgctcagacatcaggaatcagcctatcttctctcagctctggtttctctgttctggctttatatacaagcatgttttccttcagctgactcagggttggcccccgcagcaccactggatcagtgcagcatactcagagctcagagtgagcctcttttctcaagcagaagatccagagcaaatccatatggccarttctggccaggtgcccagccctgaaccaatcacagggattctcactgcccagtcctggctcacatgccccacccaaacgacatgaacggagcagggaaaggatggagaagggagacgctgttatgagaacag

SEQ ID NO: 827319 - DNA, 447 bp, Homo sapiens
ttctttctttgtgtttgtcagcaccagtggttgtaaatgccagaaacccaactcaaactagcttaagcaaaagggaaaaaggtttgactcatccaggagcttgtttctgcctggaacaagttgctcagacatcaggaatcagcctatcttctctcagctctggtttctctgttctggctttatatacaagcatgttttccttcagctgactcagggttggcccccgcagcaccactggatcagtgcagcatactcagagctcagagtgagcctcttttctcaagcagaagatccagagcaaatccatatggccagttctggccaggtgcccagccctgaaccaatcacagggattctcactgcccagtcctggctcacatgccccacccaaacgacatgaacrgagcagggaaaggatggagaagggagacgctgttatgagaacag

SEQ ID NO: 827320 - DNA, 510 bp, Homo sapiens
ttttgatgactgacagttttaaggagtacaggtcagggatttggtagggtctccatctattgcactgtgtctgatggttttctcgtgataagccwaccagccttttgacacactctggtgtctaagaaatgagttgcagtgaccttcttaacctgggggtaaaaggcaggctcacttcgatcaagcgtcagataaaccagtccaggtggtgaggggaggttgacagcccacggactctctggcactggagctgggtccggaaggccggggttgtgttccctccttgtatctgcttctgtaactcactctcctccttccccggctggaggcagactgaatggagagtctctctggtatcaaggttgtcatccggtattgcctttcttcctaactcatcaaattcaccttttctggtcccttttctgatagtgcatccaacaaggaaaggtggaatttccgtgggcttgggcagtgctgctcaaagtgtggtctgcaggctgagctcatctg

SEQ ID NO: 827321 - DNA, 366 bp, Homo sapiens
agttttctataatttcaaacatataaatgaaagaatataaataagatttaagtagttatggttattatctattattctacatataggaaaattaaaattttaaattattagcataattatcattcatcattatgaaaaatgtcagttttagatgcaaatataaaagcatttaatatacagactcaccaaaattatataatttatattttgtagctcatatatacatacatattttattctcaccacaatagtggatattctgcacaaaataaattcatctgtttacattttacttcttaaygcatgtgtattctatgaaaaccttctaccggtgactcactgtggagtaggaaaagggtgaaagga

SEQ ID NO: 827322 - DNA, 626 bp, Homo sapiens
acatttgagctgagagtgtcactactggtacctttgctagtgagaagtagggaaggtgaggggaagacctgaagaaagaaactctaaatctcatcttgtatctgtagcagttcattcgttcattcattcattcattcattcattcgtttgacattcattgaatgcctgccacactgttgatgctggggtggaaaaataaataagactgaacgtgtgttcgaggcacatgcagtgttatgagaacagaggtggcgacctgcgttctcatcacagctgcccaatagagaagtgaatataggaaatcattattgtctacaccagcagtccccagccattttggcaccagggaccagttttgtgaaaaacaatttctccacggaccggggaggcacatggttttgggatgattcaagcacgttacatttgttgtgtactgtatttctattattatttcattgtaatatataactaaataattatataattcaccataatatagaatcagtgggagccctgagtttgttttccagcaacyagacagtcccatctggggatgatgggagacagtaacagatcatcaggcattagattctcataaggagcgcacagtctagatccctcacatg

SEQ ID NO: 827323 - DNA, 646 bp, Homo sapiens
accccagctctcaccttggttctccagccgccagcctgccctgcagagtcggacttgccagcccccataaagtagctcgttctggagtgaaggtgacttcagagcccttattaccaattccccarcgttctcaggttcattgtaagtacagatcactttcattagacattgttgaaggaaattgcttgacgaaggaaatttctcgccagtaccccttgccaaatgtttgtccctagcaacttgttaccctgggaacagcctctctctctctctctctctctctttctccctccctcctctactgcatctttctgttattctctctgtccactgcctctgggttctgcattggccatgctatggctgtagaagggtctcattgtgagcactcatttggtggaagcctatcttccaaatcaactctaaattgaaaacagatctgtcattgtccagaaacatgcattgaagcagcaccatttaactccgcaactgagtgagttgcacagtttcatcaccactactttgaattaaaatagataacatttaccaaatacttaccatgggcaggcattgttcaaagcactctattcaaacatcagttaatcctcaccagattctttggaggctggtacttcagttaaggcca

SEQ ID NO: 827324 - DNA, 581 bp, Homo sapiens
gcacagctctcaagctctgctaagggacagactgcctcctcaagtgggtccctgaccccccatgcctcctgattgggagacagctcccagcatgggtcracagacatctcatacaggagagctctggctgtcatctggtgggtgcccctctgggatgaagcttccagaggaaggaacaggcagcaatctttgctgttctgcagcctccgctggtgacacccaggcaaacagagtctggagtggatctccagcaaactccaggatacctgcagcagagggtcctgagtgttggaaggaaaactaacaaacagaaaggaatagcatcaacatcaacaaaaaggatgtccacacaccccaccctaaggtcaccagcatcaaagaacaaaggtagataaagccacaaagatgagaaaaaaccagcgcaaaaaggctgaaaattccaaaaactgaacgcctcttctcctccaaaggatcacaacttcttgccagcaagggaacaaaactgggcggagaatgagtttgatgaattgacagaagtaggcttcggaagatgggtaataacaaactccaccaagctaaag

SEQ ID NO: 827325 - DNA, 563 bp, Homo sapiens
aggcccatggcgagtaatgcctgggtattactgctgattattcagagcccaggattggtccttggtgccttactgaactcatttggggagatcatggctctttagtcagcaagtgatgagtcctgctaggactgggtccttttttttttttttttcaaggcagcaggttaccttctggcctaagatatgtataaaaatgtcatctgggagctagggcctggaatggggaactcaggactctgcccagtgcattatcctactgtggctgagctggtgtccaagttgccaaagtcctctctactctgtcctttccatcactcaagtggaaggaaggagtgtctctcccagagccgtgagctgcactgcctggggttgggggaggggtagtgcaagcactcccttggccatcccagctggtatcttgctagttcacakgcaccccaagtccactggtgccaagcccagcccagcaccaggacttgcctagtagttggaatcctcgtggcctagactgcctttcaagttcattcagaactcaagaacactttagcccatggtggcac

SEQ ID NO: 827326 - DNA, 535 bp, Homo sapiens
caatggcgagtgcccctcccccagccttgctgccaccttgcagtttgatctcagactgctgtgctagcaatcagrgagactccgtgggcgtaggaccctctgagccaggtgtgggatataatctcctggtgtgccgttttttaagcctgtcggaaaaacacagtattcgggtgggagtgacccgattttccaggtgctgtctgtcacccctttctttgactaggaaagggaactccctgaccccttgcgcttcccgagtgaggcaatgcctcgccctgcttcagctcacgcacggtgcgtgcacccactgacctgcgcgcactgtctggcactccctagtgagatgaacctggtacctcagaaggaaatgcagaaattacccgtcttctgcgttgctcacgctgggagctgtagaccagagctgttcctattcggccatcttggctcctccaacttaaacttaactttaaaaattgatattcaattcagtcactggaagacataagtatgtgtgaaactactcggatatatgaat

SEQ ID NO: 827327 - DNA, 630 bp, Homo sapiens
ccagtggtgtcctcattccgtatctccatcttcagagaatgcttgtgtgccttcaaatttatgacattttcctctcaccccttagtggtgaagaaactgaaatattgaccccatccccaaaaattaataagttaagtgtaagtggtacctgtggtccatttgaaagggaatatctgaatggaatgggaggacagccacctattctcagcaggcagaaagggtacttgtcaacaggtaatatgggaaagctaagaaagattaagactttatttttccctatagtctgcctttctgtgttcccaattctttacactgctgtgtaatgttatggaatatgattctcagttaggaaacttgaacgaagacaaaaaaaatggtaagagactatcttctaaatatatccttagttcttcaggcagcaatttaatttcagttaaaagaaagaacaaaggcatgtcaatgttttggactgaggctagccgaggactttcactggcactctttttagagctagaccattggggaagttgcartgttacataatgctatgcttctcattgccatagagaagcagcagctgctttgagactttagaaaatcagcagcgacttgaactctgtgttgcttgtg

SEQ ID NO: 827328 - DNA, 299 bp, Homo sapiens
gtgattttctaatcaatgttactcttgatttcttaagcataacaagattaaaatgagtgtgaatataaaagatcatgataaaagataaaggatgatgacctgagatcttctttattttttattactaatttgtttgaagaatagtccatcatttccagtaactttktgaccaaaaaaatggctatgtggttgttgccatcaaggccagtaatagagaagagggacaaagagagaggtgctccattggtatcctcaacctgtgtgtagtacataggcatcactgggtgggctggagctag

SEQ ID NO: 827329 - DNA, 537 bp, Homo sapiens
tttttacaacaactcattaaacaggtactattactatccttattktacaggcgaggaagcacgtgagaattggctaaagccatatagttagtaagccatagagttaggatttaaacttgggtccaaatcctgtatgcttaaccattactgcaccagagaggtcctccaggcttcccttgagtaatctgaggaatgaggtgtgtgttatcttttttttttttttcctcaatcaattgaggttttattgagctagagcttgagggtgtgcccaagataaacaagagtcacagaaatcctctgtggcttatgttctccctgaagaggttttcaggaggctcagttttatacatttccttgggggaaaaatgtgtgtaggaagagttggggggtaggcagaagaatgattgctctcatattgtctttgttccatacctgagaaaataaggattattagtgtgaagtataataggcatatccttgttttgtgggagaatatacaccttttttaaggtattaagattatttttttctgtaagt

SEQ ID NO: 827330 - DNA, 623 bp, Homo sapiens
tcttactcctgttattgccatgtgatgtgactgctcacctatgcctctcatcataattggaagcttcctgaggactccccagaagcagatggcattaagcttcctgtactgcctgcagaaccatgagccaattgtatctcttttcttataaattgcctagtctcaagtttttttttttatagcagtgcaagaatgacctgataaacttacttgttcacttttgcttatttttcttgaatgtttgaagtattattttaaaaacttttgctcacttgtcatttaaggcatttaagatatgatttcttttagtattgtcagtttgggattttacatttaactctttaagtcagttttcaaatatgttcagaaatagaggtttagttttattcttatgaatgtggatatccaatttttgaatcatttattgaagagactgtatttccttcagtatatgttcttggaatctttgtaaaaaataatttcactgtaggtatgtgatttttatttctggtctctcttttgttccatggtccatgtgtccaattttatgttggtactatgctgtttggattattatacctttgtagtatagtratgtgatgtcaccagcttttttgttgttg

SEQ ID NO: 827331 - DNA, 622 bp, Homo sapiens
ttttataagtttggacaaatgcatagtgacataaattcaccatttaactatcatacacagtattatcactgccctaaaatttttctgtgctgcatctrttcatcagtccctcccccaagcccctgacaaccactcatccttttactgtcttcacagttttgtgttttccacagtgtcatttagttggaatcatatagtatgtagccttttcaaactggcttctttcacttagtaatatgcatccaatgttcctccatgtcttttcatcgcttgacagctcatttctttgaagtgctgaataatattccactgtctggatgcatcatagtttatttattcattcatctactgacagacatcttagttacttccaagttttagcttttataaataaatctactataaaaatctatgtgcaggttttcttgtggacataagtttcaattcctttggataaattaccaggaagtgtgaatggtggatcatatggttaagagtatatttagatttgtaagaaactgacaaactgtcttccaaaatggctatgccatttcacactcccacaggaaatggatgagggtttgtgttactccatatatttgccagcatttggtgttgtcag

SEQ ID NO: 827332 - DNA, 269 bp, Homo sapiens
ctggacatccagacatttccatacatcctctgaattataggcggaggttctcaaacttcaattcttgatttctgtgtgccaacaggcccaacaccacatgaaagccaccaaggcttggggcttrcaccctctgaaacaacagtcagagctatatgttggccccttttatccacagctggagtagcctgaggcacggggcaccaaatcccaagctgcacacagcaggggggaccctggacctggtgcatgaatccattttttcctcctag

SEQ ID NO: 827333 - DNA, 658 bp, Homo sapiens
tatataaggacacacacattaaacagcaatgatttttttgggaaataatcccaaggctagtgtcccttttagcacattttgggagtgctggattagaaaagtcatctcagattccaggtaaataaattacttcttttctttatggcagacttgctgtaatgagaagaaataaacattactaaactcatcaaggttcgggtaaaatttcagtgctgtcactcatcagccatgttgactgggacgtattatttagtagtatcagtactatgttatctcatctgcaagaaggtggtaacaatctcgaaagaataaaacttttgttgaggactgagaaaaatggaaagcacttagcgtagtacttggcaggcagttggcattcagtcagtgatgataacttttctttcccccacaacttgatctgagtctttgctttccattcctggactactgaagacaatttctaaagataacacttgtcaatggccctcatccaagagaatatcacacaaatatgatctgcagagcacagggtataacagktctcacacattgtggaaatgtcaaggtttattatgcccctgtgacatattgccatggcttaatttacatttccatttgctttatgagaagtttcttactctggaacatctgacctctc

SEQ ID NO: 827334 - DNA, 611 bp, Homo sapiens
ttggagtatctaacatgacttgagtttccactgagcatgaaagtcatttttacatcttttcaagtattaaagcatgtttttaacactcactagcctaccgaattccccttctagcctttcctatcttcatggcacccaacagctattttagagcaactgttctactcgaggcacccggtaactgcaggagatttatggagaaacaagtcatagcccttgctcacaagcggctgaactgactaaccacagggatgatacaaggaaacaaatgcctatcatgtccaaagactaaataatatgtagtggaaatgcactggaggaaggcttcttgtctcttttgaattaaaactctgaagaaatattaaaggtggagtagatagtaaagacatgggactagtagatgagcagaagcatcctggagaaggaataatcagggcgaattttaaaatgaaaactgcgtggaacatgttcagagcacagcaatactccagttcagctagaygggagaatgcgtgaaggggagaactgagagggacatcatgcgacagctaaatgggatgaaagcattcaggcctgggatacccagatacgatatttgggtttatttcaga

SEQ ID NO: 827335 - DNA, 532 bp, Homo sapiens
taccagagcaagaacaaatattaagggtgtagagcttattgataatgaaagtgatggagtccagattcctcattctctgttcatcaggcttaaatcaagaataggttttagaaaactgttagaattcatagtttatgtgttttttaaacaattctcttgaatgaacctttattccttacaaaggtgtgtggggctactacaagtagtcataggccccagtgagaaatgttttgttaacacccctttggggaggctgagccacttaacaagaatatcttctcaagaattatttgtgaggccactgggggtgggtcagattctacatagaaagacgttaacaagcattaacgagttcatttaatattggactcatcttgaatgtttttattgagttgttggtttcatagtggaaccatgaatttyttaaagtcaagaaccataggctattattcctgtggatccatcatctaaaccaagccctggcacttagtggctctcattaaatattgattgagtgatgaagtgaataaat

SEQ ID NO: 827336 - DNA, 643 bp, Homo sapiens
cactgtgttattgccccattcagagccacccacagagtcttccttaggccccctggctgctcaggaagccatgactcagctggggaagccaactgagtggcgaggtcttttaagggtaatttagctgaatgtagaagcactgatttattctttttcctcccccagataatgaacactatgcctaagtgctcctgagctagtgacagaactgtgagtatcctgcgccttctctacccttgcctcccagactgcctcctgaaacacatctgcacatagctgatgaacattgttttcagaggtccctatttccctcttcctgattcccctctaggcttgctccggtatcctgtgagaaccaccagtaccagatggagcctgaatagtcacaggtcaagtttagattggaagaagggaatgagctggaataataactgcctagcacagagtaggagatatcattagttgctgggcacgtgtgtgtgtgtgtgtgtgtgtgtgtgtatgtgtgtgagagayaagtggtgaagtcaagcagatgaaggtgtggcagggccactgcatatagctgtgcaggccctatcctgcacaactccaggaggcaccatccacataaactatggtaaaaatgacaccctccaggcta

SEQ ID NO: 827337 - DNA, 573 bp, Homo sapiens
aaattagatttaaaaaagtaaaaagaataaatcaatcccagagttggctctattttcatttatttattttgcaaagacagagttttgctctgtcactcaggctagagtgcagcggtgcaatcacagcttactgcagccttgacctcctggattcaagaggtaatcctgtctcagcctcccaagtagctgggactacatggcatgccaccacatctggctaattttttttatttttatttttttagagacaggatattgctatgttgcccaagctggtcttgaactcctcctgccttggcctctcaaagcactgggattacaggtgtgagccaccatgcccagcttggttctatctttagaaccagatcaactaccgacaaatctaacttggaaagaaaatctaccatacaaatataacacacacgtatatattcagcagtgcgcataaaaaaacagcgactaaacatagatgatgtagatgaagtctttacttattgaaattgactcaaacgagatagagatctaagtascatttctcaatcctggctgcacattagaattatggaagtagga

SEQ ID NO: 827338 - DNA, 654 bp, Homo sapiens
actttaacttgcccattcagcttttgtatttcattcatgaagcaaccttggcagaaattgcatgatatwgcagaatgttggtgccactactaaactggtactatagtaaataatacatgtaactcatcatttagttcgctgtcttcaaacaaaacgactgctgatttttttcaaaaggaggaaaaaaattgctgtggtcacactgggtgagtgatgctgttattgaataatgctaagagagtggttttcaaagtatggttccccagaacagcagcattcatttcacctgggaaccagttagaagtgcaaaatcctaagtcccttttcagacttaataaatcagggtctctgggagcagggggtcagaaatctatggtttaacaaaccctccgggtgatgcaggtacacactcaagttggagagccactgccctaatttgttcagcacctcacacttgattttgatggctgtcacctgcagataagtaggcactttaaatctaaagccagctgagccctatcacatgtcagatgataggcaacctttatcaaggcagcccctatgatatgccagtcagttgacatgtatttagtacactgctgcatgcgagagtcacgttaaatcaaaacaacatttggctgatcttgtaaataa

SEQ ID NO: 827339 - DNA, 654 bp, Homo sapiens
actttaacttgcccattcagcttttgtatttcattcatgaagcaaccttggcagaaattgcatgatattgcagaatgttggtgccactactaaactggtactatagtaaataatacatgtaactcatcatttagttcgctgtcttcaaacaaaacgactgctgatttttttcaaaaggaggaaaaaaattgctgtggtcacactgggtgagtgatgctgttattgaataatgctaagagagtggttttcaaagtatggttccccagaacagcagcattcatttcacctgggaaccagttagaagtgcaaaatcctaagtcccttttcagacttaataaatcagggtctctgggagcagggggtcagaaatctatggtttaacaaaccctccgggtgatgcaggtacacactcaagttggagagccactgccctaatttgttcagcacctcacacttgattttgatggctgtcacctgcagataagtaggcactttaaatctaaagccagctgagccctatcacatgtcagatgatargcaacctttatcaaggcagcccctatgatatgccagtcagttgacatgtatttagtacactgctgcatgcgagagtcacgttaaatcaaaacaacatttggctgatcttgtaaataa

SEQ ID NO: 827340 - DNA, 543 bp, Homo sapiens
ggcctcccaaggagcttgtattcttcctcctgggggaccacgckccagggcgtctcctcactggcattcttagaaagggggctggcacttgctgggccagaaaccctctccacgcacagctgcttacctactagctggccaaggacaagctgacacaggaggggaacaagccacagtgcccttgccatgacagtcagccgtgttcatctgctgcgtgtcagagaggcacacgtgcacactttccctgatcgtactgatccctgggatggatggacagtgtccttatcacccctcacctcccctcccctcccagaaactgctggctaggattcgtgctggagaaaccttgctgtgtaaatggagacactgtctgggggtagggagaaggtgacactcagagtatgggcagcagccccagcctagagcaatcagtctgattatttgtctctcctggaaccagtcatgagacaggagacaggatctcttctgccttgagagagcatttaagaaagcaggcatgaaatatttagaaagaaaaatatg

SEQ ID NO: 827341 - DNA, 518 bp, Homo sapiens
caaaagttattcactaaggttaatttattattcaagaaagaaaaatatgtttagcacatttagtgtagcctaaatgtgcagtgtttacaaagtccacagtagtgggcagcagtgtcctggggtttcatattcactcaccactcactcacccagagtaactttcagtcttgcaggctgcattcatggtaagtgccctgtacaggtttaccactttaaaaaaatcttttacaccatatttttactgagccttttctatgtttaggtatgttaagatacacacgtagttactattttattataatttctttcctacagtattcaatacagtaatttgctgtacagatttgttgcctgtgaacaacaggctacaccatatagcctaggtgtgtagtagtctgtaccacctaggtttgtgtaaaagtccactttatgatatttgctcaacaatgaaatttctaatgacaattttcttcraatgtatccctatcgttaagtgacacttgactctctcaatgtat

SEQ ID NO: 827342 - DNA, 615 bp, Homo sapiens
tttagctttctacttttgaagattttaagtgtttcatctgaagtgggagggtttaaactcaatgttctgttacaatatggatttatttctacattcagccctaaagtgatattctggacrtgattacctcttgatgtgattggcacttttcctttcctgtcttattatacttaaagtgactagagatgatcccatgtagagagggactttaaaaacttcatccactcagccctctggcagtgtggtcagtgttgactgtctgccaactgtgtactagagaggacagtgtgcagctgagagcagatgataccataatctgtctggagggacctcaccaatctgaaggagaggctttataagagccagctatttcctcaaacctggaggcagagacttggccaggtgttcgctccaggaagaccgccttcatgttttgagttcagtgtttctcaaaagaaccctataatcatctgcagtgagatgattcttggtagtatacgactgatctgcttagggcaagatatttagcaccttgactcttgcccagtgaatgccattagcaattccccatcactgcgatgagcaaaaacagtcaaacaaaacatccccctcact

SEQ ID NO: 827343 - DNA, 611 bp, Homo sapiens
aacacctggggaaagtcgccatgttctttgtgctcacacagaatgcacacaggcagaggcgggagacccagaatccagactctggattagggaatgtataaaatgttgactctgggaatgaagaagcaatggctttggatggaggtggatttttgtgtcagtttagagctcttagaatgcaaaggaaactaaatgcttaggtcacccttagataacagtttatcactgaactgagggcaagtaaggaaggtgaggacagctgcatagatggaccttacagagatttgagtgatttgtggaataataatagctttagtggtgatgccaatagatctggtggctgagcagggattctagaattatctctgcaccattattttggctgcccgatgactccctctctctacttcatgtgttgaagatgctgcaggctattgcttactcataactcataaactgcttcatttctgtgtactgccttctcttggtgtgtctttaagcttctgcctccctcttatattctcatattttctctctttctttctctctctctctctctctctctctctctctgctatctttrattcttaaattccccagaaagagttggt

SEQ ID NO: 827344 - DNA, 577 bp, Homo sapiens
tttccagacaaaactctctcactgacctgtgtaattcggtrtgacattttccaaaagtgccctctataactttactcgctttagacatctcttttaagagtgaaaggtcgactttttggatgtgaaatattttatatctgaccttttatccatcattgctaagattaataccaactgtttgccctgaagaataactgaaaaaaagcaatcaaataagattatctattacatagaaaaaaataaaacgtcattaaagcaattgtgtatgtagctcttggcaaacaggtcagtatcattaaaacaatgctggaaagaagacagaatacaaagagacaagactaacccacagaaacagacgcacacatgcacatatacacatgcgctgaatgagccagggttaattcttgagggaaaaacagaatcattagaattgaagctaggcttactggtacccaatcaaaatctgatgctcaactgtgcactaaagcaacaaatgctcttattcctcttcacaacatagtcattaccctgtactccagaaggacaataacaggtagaataaccctaaacactcaca

SEQ ID NO: 827345 - DNA, 448 bp, Homo sapiens
  misc_feature 348: n = A,T,C or G
gttggctgaaggttaaataaattctctcggctgtttgcatgattatatccaagcggaaggattccagtttgaagcgggcttcttgcaagtactycttggaaatgtttccagagtcagaaaagttaagaaattcagttttggaggcccaagtgcacttgaaatggaaataaagtcagacatcgtaagaaccttgacattttaaaaaatgggtttttctgtatttcagattttcctcagagtaatttagaaccccaaaagcccacagtattaattattagcaggagaaattctcaatacactaaagtgctattttggatattgtttttgttctttatttgagatggagtntcactcttgttgcccaggctagagtgtattggcgcgatctcggctcactgcaaccttctcctcccaggttcaagcaattctcttgccacctcagcctcca

SEQ ID NO: 827346 - DNA, 448 bp, Homo sapiens
  misc_feature 348: n = A,T,C or G
gttggctgaaggttaaataaattctctcggctgtttgcatgattatatccaagcggaaggattccagtttgaagcgggcttcttgcaagtactcyttggaaatgtttccagagtcagaaaagttaagaaattcagttttggaggcccaagtgcacttgaaatggaaataaagtcagacatcgtaagaaccttgacattttaaaaaatgggtttttctgtatttcagattttcctcagagtaatttagaaccccaaaagcccacagtattaattattagcaggagaaattctcaatacactaaagtgctattttggatattgtttttgttctttatttgagatggagtntcactcttgttgcccaggctagagtgtattggcgcgatctcggctcactgcaaccttctcctcccaggttcaagcaattctcttgccacctcagcctcca

SEQ ID NO: 827347 - DNA, 459 bp, Homo sapiens
aaagatgccgtcttcagaacataaaaatkcaagatggagcagtaagtgctaatgtagaagctccagcaagttatccagaagatctagctaagatcattggtggagaagcctacactcaacagattttccttgtagaccaaacattcttccattggaagatgccttctaggacttttgtaactacagaggacaagtcaatgcctggcttcaaagcacaggctgactctcttgttaggggctaatgcagcgagtgactttaagttgaagccagtgttcatttaccatgctgaaaatcctaggacccttaagaattaagcctggatgacagcacatctgctcatagcatggataactaaacattttaaacccactgttgagaacaactgctcaggaaaaaaaaaaaaattaatgcttgttgaaaacatacctagtcactcaagctctgatagagacatacaa

SEQ ID NO: 827348 - DNA, 280 bp, Homo sapiens
agccaagacaatcctaagcaaaaggaacaaaggtggagggatcacactactggacttcaaactatactacaaggctacagtaaccaaaacatgatagtactggtacaaaaacagacacatagaccaatggaayggaatagagaactcagaaatataactgtacatctacaaccatctgatcttcaataaacctgacaaaaacaagcaatggggaaaggaaatatggaattatgtaaagagactgaatcagtgactcactggtctccctgaaagagatggg

SEQ ID NO: 827349 - DNA, 280 bp, Homo sapiens
agccaagacaatcctaagcaaaaggaacaaaggtggagggatcacactactggacttcaaactatactacaaggctacagtaaccaaaacatgatagtactggtacaaaaacagacacatagaccaatggaacggaatagagaactcagaaatataactgtacatctacaaccatctgatcttcaayaaacctgacaaaaacaagcaatggggaaaggaaatatggaattatgtaaagagactgaatcagtgactcactggtctccctgaaagagatggg

SEQ ID NO: 827350 - DNA, 626 bp, Homo sapiens
gtggttgtaaaaagaattttttttaccatttaactttaccaccttctgaagaatacacagaataagagactcttttctgatgtctctcttaaccacagattaagaataatgcattttatatgtgggagtaaataaataagttaatgaaactcattttggcttccaaatggtaatttttcatcttttctgttttgctagttgtactagttgtgtgtatgtgtgtgtgtgtgtgtgtgtgtgtgtgtgtgtgtgtgtgtttaagacacggtcttgctcctgctggagtacagtgatgtgatctcggttcaccacaacttccacctcccgtgctcaagtgatcttcctacctcagcgttccaaatagctgggaacacagatgcacaacaccacacctggctaatttttgtattttttgtagagggggtttcgccatgttgcccaggctgatcttgaactcctgggctcaagtgatctgcctgcctcagcctcctgaagtgctgggattacaggtgtgagccactgtgcccggacttactagttaygttttataaaaattgggttgtttttaagataacatttactgtcaacattttaagatttttaaaattttggttaaattgaatttt

SEQ ID NO: 827351 - DNA, 600 bp, Homo sapiens
cacaaagcagtctctcagaaagtttctttatagtttttatcagaagatgattttatttcaccwtagtcctcaatgctctccaaaatatccctttgaagattctacgaaaacactctttccaaactactgaatccaaagaaaggttttactctgtgagatgaatgcacatatcacaaagcagtttctcagaaaatttctttgtagtttttatgtgtagatgttttctttttcaccataggcctcaaggctcaccgaaatatcttttttcagattctacatatccgtgtttccaaactactgaaagaaaagagaggtttaactctgtgagatgaatgcacacatctcaaagcagtttctcacaatgtttctttatagtttgtacctgaagatgttacctttttcaccacaggcctcaatcttctctgaaatatccctttgcgaattctaaaaaaagagtgtttaaaaactgctgaaagaaaagaaagttttaactctgtgagatgaatgcacacatcacatagcagtttcctggaaagcttctttctagttttcatcctggaacatttgctttttcgccaatgacctcaatgacctcccaaa

SEQ ID NO: 827352 - DNA, 283 bp, Homo sapiens
agaagctttataagaaacagctttgtgatgtgtgaattactctgagttaaaactttcttttcattcagctcttcagaaacaatgtttatctgaaatctgcaaatggacatttgggagctcattgaggcctaaggtgaaaaataaaacatcttcaaataaaaactagaaagaaacttcctgacaaactgctttctgttatggrcattcatctcacagatttgaatcttttgattcagcagtttggagacactgtttttgtaatatctgtgaaaggacaattggg

SEQ ID NO: 827353 - DNA, 456 bp, Homo sapiens
actagaaagaagctatttttgaaactgctttgtgatgtgtggattcatgtcacagggtttaacatttattttgattcagcagattggaaccactctttctggagaatctgcaaatggacatttgggagccccttgaggcctatgagtaaaaaccgaatatccccatataaaaactagaaagaaactatctgtgaaactgctttgtgatatgtggattcatcttacagagttaaaactttcttttgattcagaaagttagaaacattcttttggtagaatctgcaaagggacttttgggagttgtttgaggcctatatggaaaggctgaatattctgagatcaaaactagaacataggtcttcatgaaactcccttgtgagktgtgtgaggtgtgggttcatctctcagaattaaaactttattttgattaagcagggttagaaacactcatttagg

SEQ ID NO: 827354 - DNA, 645 bp, Homo sapiens
ttggttttaccccttagacatctacgaattcccaaatatttatttgaagatgctccaaaaagagtgtttccaacctgcygaatcaaaaagaaagattcaactctgtgagatgaatgtacacatgacaaagcattttcacagagagcttctttctactctttatctgggaatattcagtttttcccaataggcctaaaagcgctccctaatgtcccttcacagattttccaaaaatagtgtttcccacctgcttaatcaaaagaaaggtttaaccctgtgggaggaattgacacatgacacagaagttttacaggaagcttctttctagcttttatctgggaatatttcgttttttcccattcacctcaatggacttccaaatgtcaccttgcagattctgcaaaaagaatgtttccaacctgctgaatccaaagaaaagtttaaatctgtgagatgattccattgatcacaaagcagtttcttagatagcttctatctagatttttttctggggatattcagtttttccccataggcctgtttgagtacccaaatttccattcacagattctacaaacagattgttttaaacctgctgaatcaaaaaaaagtttgaactctctgggatgaatccacacattgaaa

SEQ ID NO: 827355 - DNA, 645 bp, Homo sapiens
ttggttttaccccttagacatctacgaattcccaaatatttatttgaagatgctccaaaaagagtgtttccaacctgctgaatcaaaaagaaagattcaactctgtgagatgaatgtacayatgacaaagcattttcacagagagcttctttctactctttatctgggaatattcagtttttcccaataggcctaaaagcgctccctaatgtcccttcacagattttccaaaaatagtgtttcccacctgcttaatcaaaagaaaggtttaaccctgtgggaggaattgacacatgacacagaagttttacaggaagcttctttctagcttttatctgggaatatttcgttttttcccattcacctcaatggacttccaaatgtcaccttgcagattctgcaaaaagaatgtttccaacctgctgaatccaaagaaaagtttaaatctgtgagatgattccattgatcacaaagcagtttcttagatagcttctatctagatttttttctggggatattcagtttttccccataggcctgtttgagtacccaaatttccattcacagattctacaaacagattgttttaaacctgctgaatcaaaaaaaagtttgaactctctgggatgaatccacacattgaaa

SEQ ID NO: 827356 - DNA, 412 bp, Homo sapiens
gaatatttcgttttttcccattcacctcaatggacttccaaatgtcaccttgcagattctgcmaaaagaatgtttccaacctgctgaatccaaagaaaagtttaaatctgtgagatgattccattgatcacaaagcagtttcttagatagcttctatctagatttttttctggggatattcagtttttccccataggcctgtttgagtacccaaatttccattcacagattctacaaacagattgttttaaacctgctgaatcaaaaaaaagtttgaactctctgggatgaatccacacattgaaaagctgtttcacagatagcttctttctagtttatatctgggatatttggttttccccctaaacctctctgggctcccaaatatcccttcgcaaattgtacaaaaaga

SEQ ID NO: 827357 - DNA, 423 bp, Homo sapiens
caaataaatcaagataaaaattagaaagaagccctctgtgaaactgctttgtgatgtgtggattgatcccacagagttaaacttttcttttgatccagcagrttgaaagcacaccttttgtagaatctgcaaatgaacatttggctgcctgttgaggcctatgagaagaaagtaaatatcctcagatgaaaacaggaaggaagctctctgtgaaacaactgatatgtgtggattcatctcacagagttaaactttgttttgattcagcaggttgggaacaatgtttttggtgaacctgcgaatggaaatttcagagcccactgaggcctataattaaaaatctaatctctcgagataaaagctagaatgaaggtatccatgaaactgatttttgatctggggatccctgttacagagataaaa

SEQ ID NO: 827358 - DNA, 423 bp, Homo sapiens
caaataaatcaagataaaaattagaaagaagccctctgtgaaactgctttgtgatgtgtggattgatcccacagagttaaacttttcttttgatccagcaggttgaaagcacaccttttgtagaatctgcaaatgaacatttggctgcctgttgaggcctatgagaagaaagtaaatatcctcagatgaaaacaggaaggaagctctctgtgaaacaactgatatgtgtggattcatctcacagagttaaactttgttttgattcagcaggttgggaacaatgtttttggtgaacctgcgaatggaaatttcagagyccactgaggcctataattaaaaatctaatctctcgagataaaagctagaatgaaggtatccatgaaactgatttttgatctggggatccctgttacagagataaaa

SEQ ID NO: 827359 - DNA, 590 bp, Homo sapiens
ccacatctcctggtattaaatcgttacgtggtcttctcacacagaatctgggctaacctcatgattcactcatccagtagaacgtggcagacatgacattatactagttctaggcctaagcctaaagaaagcttctgtttttgtacttttaaaaaccctgaagcggccgggagcagtggctcatgcttgtaatcccagcactttggaaggctgaggtgggtgaatcacctgagttcaggaggtcaagaccagcctggccaatatagtgaaaccccgtctctactgaaaatacaaaaattagctaggcttggtggtgtgcccctgtaattccagctactcaggaggctgagtcaggagaatagcttgaacccaggaggcagaggttgcagtgagctgagatcacaccattgcactccagcctgggtgacagagtgagactccctctcaaaaaaacaaaracaaaaaccaaaccctgaagcagcatggaagacatcaggctaccctaccaaagagaccacatagaaagagaggtcagtcacatggagagaggtcccagcccccagtcatccttgccaaggctgcagacatat

SEQ ID NO: 827360 - DNA, 630 bp, Homo sapiens
aacattctttgtgtcataggcatggactcccattttayagaagatccaaagagaggttctgtgcacttccaaggcaagtgtcatggagtccaacaatctggcattgtgtatgactgtggcaataggtccaaacacagcccagctgagtcaagatgcagattattgagtgccatgtaaggatgtgagtgccaagaagccctggacctctttcctttcccaaactgtttggaaggccttgagttagcacctatgccacaacagttttaaagtgttgcttcttataaacctgattactattgacattttcaaacatatcaacgtagagagaatagtgtagtgaactttatatatccatcacttggtaaagcactgcttttttttttaattcaaaaactagctgagtcacatgggaaggtccacgaaaaaagaggaaaagacacaaagtgcacgactggtttgtagtcctaactgtgctgtgaatgaactgtaatgcactgagtcatttatggttccactctgggactcagtttcctagttaactgagatgggatttctggggactttccaggccttgcatcctacactttggttctcattcactccacatacactcatgaagccaccattatc

SEQ ID NO: 827361 - DNA, 630 bp, Homo sapiens
aacattctttgtgtcataggcatggactcccattttatagaagatccaaagagaggttctgtgcacttccaaggcaagtgtcatggagtccaacaatctggcattgtgtatgactgtggcaataggtccaaacacagcccagctgagtcaagatgcagattattgagtgccatgtaaggatgtgagtgccaagaagccctggacctctttcctttcccaaactgtttggaaggccttgagttagcacctatgccacaacagttttaaagtgttgcttcttataaacctgattactattgacattttcaaacatatcaacgtagagagaatagtgtagtgaactttatatatccatcacttggtaaagcactgcttttttttttaattcaaaaactagctgagtcacatgggaaggtccacgaaaaaagaggaaaagacacaaagtgcacgactggtttgtagtcctaactgtgctgtgaatgaactgtaatgcactgagtcatttayggttccactctgggactcagtttcctagttaactgagatgggatttctggggactttccaggccttgcatcctacactttggttctcattcactccacatacactcatgaagccaccattatc

SEQ ID NO: 827362 - DNA, 289 bp, Homo sapiens
ccccaaagacaagagaatcttggaaattcttttccaataagacaattgcaagcttttaagaaacatcagtcctgctatacttatagagtcctgaaaatacagcatttacatttttaaaaagccaccagsacatttaattgtattgtgcttcactttactgtgatttgcagatattgcttttttaaaaaaattgaaggtttgaggccatcttgctttgagcatgtctatctgcaccatttttccaatagcatgtgctcactgtgtgtctctgtgtcacattttggtaatt

SEQ ID NO: 827363 - DNA, 572 bp, Homo sapiens
atccttatgctctctatatgcatgagttcaattgatttgatttttagagtccacaaataagtgagaacatgtgatgtttgtcttttggtgcctagcttatttcacttaacatgatgatttccagttccaaccacattgttgcaaataactgtatctcaccctttttatggctgaatattgctccattgtgtacatataccacttttttttatccattcacctgctaattgacacttaggttgcttccaaattttatagttactgtaaataatgctgcaacaaatatatgaggcccagcctgcaaaaccatttttcctcctaggcatctgggcctgtgatgggaggggctgccacaaaggtctcttacatgccctggagatattttctttattgtcttgacaattaacacttggcttctcattacttgtgcaaatttctgcagcctgcttgaatttctcctcagaaaatgggtttttcttttctattgcatcatcgggctacaaatgtttcagatttctatgctgtttyccttttaaaacagaatgcttttaacaccacccaaatcacttatt

SEQ ID NO: 827364 - DNA, 627 bp, Homo sapiens
tatgcatgagttcaattgatttgatttttagagtccacaaataagtgagaacatgtgatgtttgtcttttggtgcctagcttatttcacttaacatgatgatttccagttccaaccacattgttgcaaataactgtatctcaccctttttatggctgaatattgctccattgtgtacatataccacttttttttatccattcacctgctaattgacacttaggttgcttccaaattttatagttactgtaaataatgctgcaacaaatatatgaggcccagcctgcaaaaccatttttcctcctaggcatctgggcctgtgatgggaggggctgccacaaaggtctcttacatgccctggagatattttctttattgtcttgacaattaacacttggcttctcattacttgtgcaaatttctgcagcctgcttgaatttctcctcagaaaatgggtttttcttttctattgcatcatcgggctacaaatgtttcagatttctatgctgttttccttttaaaacagaatgcttttaacaccacccaaatcacttattgtatgcttcattgcttagaaatttcttctgccagatactctaaatcrtttctcttaagttcaaagttccac

SEQ ID NO: 827365 - DNA, 659 bp, Homo sapiens
  misc_feature 619, 620, 621, 622, 623, 624, 625, 626, 627, 628, 629, 630,631, 632, 633, 634, 635, 636, 637, 638, 639, 640, 641, 642,643, 644, 645, 646, 647, 648, 649, 650, 651, 652, 653, 654,655, 656, 657, 658, 659: n = A,T,C or G
gctttgaccatatacaaaagtaactcgagatgttttatttgttcaccctcatgattattcttctgttccttagggtcatgagttcttmagcatgagctaaacaaaactgtggatatttattagtctcactttttaattctttgctttatcatattaataatctatttaggatagattatacagaagtttttaacatgctttctgaacagcagggatactgaaggctgaaggtgcctggaaagttcaaataagatgccctaggagttctttactaaatttcaccaagttgatcataaaatatcagtatgattcagaggaaaaacataagagacaaatcatcacagttttgtgtgaaattgtgagagttgtttaacctctttcatcttcaattcctcatgagtaaaaatattatcaataatacctaccatgcaagtttgccatgaggacaaaacctagagttagtctcaggtacaccaagatggtagcaaaaaggccttttctcatgacacaaggtagcggacattttccccttaatttctcatccacatgcaactgttctaccttttattctttttagagtgaccacatgtcttttaggaaatatcaagaatatagtttnnnnnnnnnnnnnnnnnnnnnnnnnnnnnnnnnnnnnnnnn

SEQ ID NO: 827366 - DNA, 484 bp, Homo sapiens
aaaaatctttattattccactattgtaatattcagcagcagtgaatgagtgattctgcaaaaagcattcactacagcaaaattatctaataaattgtatttgttttccaacgagtcagctagtaagagcattagtgtggacatgaatttaattttctcatgagtccgtggcttcatcttgtcccagctgtttcattttcttctcatcaccaaatcattttattataataactctccatgccttacttttctatagccctgtataaatgcaagtactttggagacactttcatgctgagtagtggtttggaagtttacatttaaatctcaccttaaatgtacatttgtcagaggaaagaagatagaaaaaaaawtttgaaaaatatcattttacttaactatattatgtgacaagtaatttacaagggttgcaatgggggaaaatcatctttataaaagcagtcataatatctgtttagttctac

SEQ ID NO: 827367 - DNA, 536 bp, Homo sapiens
ttcatggaattatttgtttttatcttactgatttgttttagtttcttgtagatcctggatattagttctttgttggattcatagttttcaaatatttcctcccattctatgggttgtctgtttactytgctaaattttgttttgcagaagcttcttagtttaattgggtccaatttatttgtttttgttgagtttgtttttggggtcttagtcataaattctttacctaggccaatgtccagaagagtttctcctaggttttcttctaggatttttatggtttcagatttaagtctttaatctatcttgagttcatttttgtatatggtgagagagagggatccaggttcattcttctacctgtggctatccagttttcttagcaccatttattgagtagcgtgtcctttccccaatttatgtttttgtaatttttgtcaaagatcagttggttgttaagtatttgactttatttctgttttcctatttcattctatctgtgtatgtatctacatttataccagtaccatgctatt

SEQ ID NO: 827368 - DNA, 553 bp, Homo sapiens
attctgataattataaagttgctcagccaagtaacttttcgtatagctggtttacactgtgargccatttttttaaggtgtaaaaacaaactaattattatcattaaaaatatgtatttaaaagtcctctttcatacagattaaataacgtcagaccttagaagtgaccagaaattaactaggaaatttggaatgttgcgagggaacaatgaagaagttgtccaatttgactataaattaaactattttgcaattttcctccaaaacaaaaacagaaacaacccccccaaaatactttccaccctgaacaacttcagtaatgctatttttctttgcaccctgactgtccttggtccacattcccagctgctttttatgttccaaatgtctgtttacttccagaagaaacaaacaaaaggaaacactgaagggcacctctttcaacattgaccttcagtgaacatgttggctcatttaattcctcctctccttagaaccaactggatactcaaactctgtaaagggctgtggaggaggcaacaggagcgagaat

SEQ ID NO: 827369 - DNA, 596 bp, Homo sapiens
ccttgagccagaaccagagggtttcycttggacttctctccattcatgcagacgcccatgtccaggttccacactaccttacacctagtctgggcaacactgaagcgaaaaatacagtagactcaccacccattcagaggtactttaaagtctggtcttcctttctggtctatctgctactagatgctcacagtatccaagtcattgtgccgtgcattctgtccaggtttatcgcttcatccggtggggggatagggtcataactacatgactcaaaactcagccccatcttacctgaaacctgggctgagttttgaatcatgtagttaatctaattaatactgattaatggatacttgggctattcttcctgccttttaaattgtcgtgtttctggaatctgttttaatattcttatcttatcccttcataacactggttctcaccttgggttttcattagaatcacctacacagattaaaaaaaaaaagttgatgtccaggctacatcccagccaaattaaaccagaatctctgggaataggatccaggaattaatacttatatttaaaaaaaatatttcacaccacttacccc

SEQ ID NO: 827370 - DNA, 618 bp, Homo sapiens
aggagtagctttcctttgtatatcaaaaacttggaagagagaggaatgtacattggctacccctgcccctccaggggtcacagtctatagccccatgagacctaggaataccagaaataaatgagcaataggattaattctggtaggaattgggtggcaataagactagtggcaccctggcagctttgcttaccacgagtcaaccctaaagaacttaactcaggccgggcgcggtggctcacgcctgtaatctcagcactttgggaggctgaggcgggcggatcacaaggtcaggagatcgagaccatcctggctaacatggtgaaaccctgtctctgttaaaaatacaaaaaaattagccgggcgtggtggtgggcgcctgtagtcccagctacacgggaggctgaggcaggagaatggcgtgaacctgggaggaggagcttgcagtgagccaagattgcgccaccgcactccagcctgggcgacagagcgagaccctgtctcaaaaaaaaaaaaaaaaaaagaacttgactcaaactctagaatccccagttaccaacacaggtgaggcattaaagggaartcaagagtccctaggctctttggcaaatgtagttc

SEQ ID NO: 827371 - DNA, 645 bp, Homo sapiens
ttccggcccaggcaccaaaaaccctcaatccccagcacagcccctamcccacccacctgggtggattgctgtccccctgggcaggctcttcctccagctcccccatggtagagctgcgcttctccacgatctcgccctggtcaaacatggcatgaagccgataattgacagtcttgatagtagcaaagatgacagccaccacgaggcagtacacgccggccaccatcaagctgggaggcaggacctgaagatgaaagtaagccaggtcccttttcacaaagcctcgcccccacaggatgtacctgccatcaacatcatagctgggattcacagactcacaagaaaatttcatcacctctccacacaaccagtacacagacctcgacaaagggctctgtattctgcttagctggatgagattaagtgtagggttcaaggtcactcgatccaagaaaggaagactttggcccctcttccacacagacccaaactctgcagtgattcctctctctccacgtcccagagcccagggactgccctgaatccctgccaggctgccctccctctcccggctggagttacaggtggccgtggcgtctcaccatgtacagtaagaagggaaagatgagcaggaagatccagaca

SEQ ID NO: 827372 - DNA, 535 bp, Homo sapiens
aagttagggagtacagaaaaaagtttaaaaaccactaaacctgagggacaaaaaaaaaaaaaaaaaatcaggaaaatttaaggaagaggctgmagaagctaaggtaccaattaaagtagtcagtttctcttaagaatcattcataaagacaaagaaagcaaacagaactgcttctctggaattaattttgaggaagacagaagtgaacaaagagtgacaatgtcaccttagagctcatacgagtaaaagaaaaatactaagtatggtttagatacatagacgctggactttttatttttttatctgataagaaattccagttttatttatttagagcactacatcccccatataccatatagtaacaatttataaagtataaacttttttcaaaaactttcaactttttagatacaggaggtacatgtgtaggtttgttaaatgggaatactgcatgatgctgaggtttagagtatggattccatcacctgatagtgaccatagtatccaaaggtagtttttcttttacccccac

SEQ ID NO: 827373 - DNA, 554 bp, Homo sapiens
ttgcacttatagcctattttattcagtgaagaaactgaggccccagggaggttgtgttttaagcaactgcattttagtttgatccaggatttaagctaagtttttttgattcaacactttctgtccatactaccttgtagaatttcttattgggaaataagaaacatctagtgtataagatatttttaggtgggaagaagatttctttaggtgggaagttgtgatttatgagtgtggggattgttggtggattcctgtgtagatgtttgtctgtgtttactgagttgggcctaccttccccggagtgctgctctataaaaggtagtgttcacgctgataattgaggcacaggaggatggctctttgggaaagaagcaagccctctgcatgttgtagctagaatattttcttatatttgcatatgtgrggattgtaaagttggtaaccagagggggagaagatacacagttgatgctaagtatatatttgctaaagaaatatgaatgtattttgagggaactagactgaatttgttagcaattggagatttcttg

SEQ ID NO: 827374 - DNA, 623 bp, Homo sapiens
agcagtgatcaccaatcccaaagtcatctagattttctcttatactatcttttaggagttttgtagttttgcattttacatttaggtctctgatccattttgagttaatttttgtgagaagtgtaaggcctatatctggcttcgattttttttttcttgtggaagtccagttattccagcaccatttgttaaaaggattatcctttgtccattaattgcctttgctcctttgtcaaagagaggtaagactttttagcaacaccttgaggtgttattttcttatcagttctttttgctgataaactgactacagctcagtgtttaagggaattgtctctggagtcagacgatctgtttttttatctaaacattttcagctgcaatctgtgagatcatgggcaagttacttaacctctctcagcctcagtatactcaactgtacaatgggtttgatgataataacatgattaataataattgtaaggttatcaggagacagattagataatataggtaaaatatctggcacatagtatacccccaaaaartgttgagtaagggctgctactattggagtattccaaatttaacttgctttctgccttggggctcactattgaaat

SEQ ID NO: 827375 - DNA, 370 bp, Homo sapiens
ttataccaatccaaactaccaatcaaatgtgaaggtagtaacaataataacaacaacaaaaaaaccactttcagacatsaatgtttcaaaagatttacttccaacgtgctttctcaggaaggttctagaggatatatactccaccaaaatgaagaaataaacgaagaggaagacatggaatatagaaaataaaagattcaactcaagggaagtaaagggaatctaagatagtactatacaacagatatggggacaaccagtccagactggatcaagttagaaggctctagaagacagctcaggaaaataaaactgacaaaatgttggctgaaaagaactgtcttgagatgagaaaacaatttaggggtaa

SEQ ID NO: 827376 - DNA, 573 bp, Homo sapiens
tgacagacttaaaacaagaaaagtctatgaagaaataaacaactggagaacaagaaatcttgaaaattaaaaatatgatcactgaaaaatttactgtatgggtgaaattaaaattcgatgctgtataggaccaagcttttattttattattgtttatttgagaaaggttctaactctgtcgcccaggctgcagtacagtggcatgaacacagctcactgcagcctcaaccttcctgtgctcagatgatcctcccacctcagcctgctgggaagctgggactacaggcatgcctggctaattttttattttttgtatctttagtagagatggggttccaccatgttgcccaggctggtcacaacacctgggctcaagtgatccaccagcctcagcctcccaaagcacttggattacaagcgtgagccactgtgccctgccctagaccaagtttttaaacctggaagataaattcaaagaaatctctgagaacagcaatgagaaagaccaagaaatgtaaagtacaaacaaatagatttaaaacacggagrccatgtcctaacagttgaaagctg

SEQ ID NO: 827377 - DNA, 457 bp, Homo sapiens
ctgtgtggtctgatcctacacctctctccagtctcctctccttctgcacaacacaggatcccatgtcaccatgacaacaatttatccttgccatcyctaacacacggcatgtacttttgaaaaataatagctttattaagatataagtgacatagcataaaattcatccttttagagggtatacaatcagctctccgtatctgcaaccgcagattcaatcaactgtggatcgaaaatattcaataaaaataaaaaacaatacaaaataatataaatgttaaaaataatacagtataggaactctttacatagcatttacattacactaggtattctaagtaacctggagatgatttaaagtatcgaggaggatgtgcacaggttatatgcaaatatcccactttatatcagggatgtgatcatctgcagattttcatactggggggtcctgaaacca

SEQ ID NO: 827378 - DNA, 604 bp, Homo sapiens
aaggctgtgggcaatgtagcaatgtaagagtcagtggtatrcaactgattttcaagacaacagtagacatatgtcaaaccttatgcatgattatttctaacttctccatcaggcaatgtattaaaaagcaacatgaataagctagatttatcattttcaaaaattttctaaaggactatgttctggatataagggaaagtgaaaaacatcctttaaaattataataacagcataaaaacattaacggtgctgaaattttaaaagatcaataagatatgtcattagaataacagagatatcataggtaattttttcaatatattacatatttataatgttaaacaaatttggaaatcaagtaatcatatgcatgctgaagtatttagtaatgaagtatactaacatctgcaaactattttgaaatacgtacaaaaagaagatgccttgatgacagatgaaaagatggataaatgaaaaaaagcaagaatatgaaatgtaaaaaagtgttaatggtaggatttagatggcatatacacgattgctaccttcacaattcttcaacttttctgcatatattaaacattccataataaaatgtaaaaaa

SEQ ID NO: 827379 - DNA, 553 bp, Homo sapiens
acacagtcacggcagcccacatcaagaagttcaccttcgtctgcatggctctgtcactcacggtaaggacagaggckctctctgcctcttctctctgtttggtttttgtaaaggggcaagttgctattttaaagggggaaatcttattttccacaatgtaatgtgatgctggattaattagcaatctcttcaatacactttcttcttcaaatgtgaacgattgttattcaaggaggcccttgagtctaggaataaaggacccacttcaggcatttcttgggacttctcaaatgctgcagaaaggaagaggttgcctttaattggaataatacacttgtcttgctgaaaaatttctagcccactttttaaacatcgaaagtcaactttacaaccatccctgtctcttttccaaatttaatccgcgttacttcagttttccccagtaaaatttcctttccagttatgtttgtgctgacatagcttacttacgtggccatcacgtgcccataggcattgagcccctgcgggatcccaggcccatctgtctgctgag

SEQ ID NO: 827380 - DNA, 553 bp, Homo sapiens
acacagtcacggcagcccacatcaagaagttcaccttcgtctgcatggctctgtcactcacggtaaggacagaggcgctctctgcctcttctctctgtttggtttttgtaaaggggcaagttgctattttaaagggggaaatcttattttccacaatgtaatgtgatgctggattaattagcaatctcttcaatacactttcttcttcaaatgtgaacgattgttattcaaggaggcccttgagtctaggaataaaggacccacttcaggcatttcttgggacttctcaaatgctgcagaaaggaagaggttgcctttaattggaataatacacttgtcttgctgaaaaatttctagcccactttttaaacatcgaaagtcaactttacaaccatccctgtctcttttccaaatttaatccgcgttacttcagtkttccccagtaaaatttcctttccagttatgtttgtgctgacatagcttacttacgtggccatcacgtgcccataggcattgagcccctgcgggatcccaggcccatctgtctgctgag

SEQ ID NO: 827381 - DNA, 640 bp, Homo sapiens
aaagacaaaggaccaactcctgaggatccagagtgttgccattcctttcccatgtctcattctgcccttagcctagaggctggcactgacagcatgttgggaagataggagctrgttcttcggaccgcccatccccatttaggggctggtcccaagtgggttgggatggtgacaggctatcaggtgctcccagcccctggggcgctgccacaaggtccttgtaggaatagtcagggcacatcgaggttgtgtggcccactcagctgcccaggcagcccccggggtccccatcttccccgtctggctcactcctgccctttcaagaggcactcggtttttgcgatttgtgacattgggctcctctgcctgtgccctgcacatgtgtgctggctgcccctctcccttccctgagtctccttcagtgctttcacaggatctgctgatctttaccctcaagggcacccattctgggctccctgtgcccatcacctggcgagagccactgggtggacttgggcttctgtgctgaagcctgacgccttgttacctttgcccacctccaccagccccagcagcacctgggatgtaagcagtgggggctgcttctgtgtccccatgaaagacacctgggcagagatgg

SEQ ID NO: 827382 - DNA, 640 bp, Homo sapiens
aaagacaaaggaccaactcctgaggatccagagtgttgccattcctttcccatgtctcattctgcccttagcctagaggctggcactgacagcatgttgggaagataggagctagttcttcggaccrcccatccccatttaggggctggtcccaagtgggttgggatggtgacaggctatcaggtgctcccagcccctggggcgctgccacaaggtccttgtaggaatagtcagggcacatcgaggttgtgtggcccactcagctgcccaggcagcccccggggtccccatcttccccgtctggctcactcctgccctttcaagaggcactcggtttttgcgatttgtgacattgggctcctctgcctgtgccctgcacatgtgtgctggctgcccctctcccttccctgagtctccttcagtgctttcacaggatctgctgatctttaccctcaagggcacccattctgggctccctgtgcccatcacctggcgagagccactgggtggacttgggcttctgtgctgaagcctgacgccttgttacctttgcccacctccaccagccccagcagcacctgggatgtaagcagtgggggctgcttctgtgtccccatgaaagacacctgggcagagatgg

SEQ ID NO: 827383 - DNA, 613 bp, Homo sapiens
tcattcttttgaattccagtaaagaaaatgagctgctttcattaaagcctttctttgaggtcgctgggtgaaaggtgggggcttaggccaggtgtggtagctcacgcctgtaatcccagcactttgggaggccgaggcaggtggatcacttggggtcaggagttcaagaccagcctggccaacatggcaaaaacccgtctctaccaaaaatacaaaaattagccaggcatggtggactacaagctggtagtagtcccagctactagggaggctgaggcaggagaatcacttgaacctgggaggcagaggttgcagtgagctgagattgcaccactgcactccaggctgggcaacagagtgagactccaactcaaaaataaagcaaaacaaaaagaaagatgggggccttaggatcagctaactctttttagcaatgtgacttcagacaagttaacctgtcagagcttcggtttacttgtctgcaaaaatagagagaataaaactarctgtctctctagtggttctgagggttaaagaaataatttcacaaagtacctagtccagtgtctagtatacccttaaggataagtaaaagtacatttccttttctttc

SEQ ID NO: 827384 - DNA, 630 bp, Homo sapiens
aactaagacagaaacagaaagtcacataccacatgttttcccttataagtaggggcttaataataaaaacmcatggacccatagagggaaacagcagacactgaggcctactggaaaatggagggtgggaggagggagaggatcaggaaaaataatgggtactaggcttagtacctgggtgatgaaataatctgtccaacaaactcctattacatgaattgacctaaataacaaacctacacatgtacccctgaacttaaagtaaaagttagaaaaaaaaaaaaacagaagaaaaaaagtgtaataaaaaaattgttttttttttttttttgagatggagtttcactttcgttgcctaggctggagagtaatggcgccatctcggctcactgcaacctccgcctcagcctcccaaagtgctggaattacaggcatgacccaccatgcccagctaaaaattttaaaaacataaaaatgaaaaaatctaataaacgagttataggaaaagtgctataggcattcagaggataaaagatatttctgtctggagaggtggggatctacaaaggcttcatagagaaagaaaaacctgacttgtacttgggccgttgagacaacatataaatatac

SEQ ID NO: 827385 - DNA, 637 bp, Homo sapiens
acccatggccctcttattcttattatttttctaatagcctcttcagaacttttcctcttgctcagctgtaggagatcataagttccctacgcttgagtgttcaaactgagagcagatggtcactcaacagtgggtgagcaaggtgccaggttgccagggatcagtgtggaatcttagcttacctaccctcagctgagtaagagcttactcagcttggggccgggtgcagtggctcatgcctgtaatcccagcactttgggaggccgaggagggcagatcacgtggtcaggagatcgaaccatcctggctaacctggtgaaacccccgtctctactaaaaatacaaaaaaaaaaaaaaaaaaaattagccgggcgtggtggcgaatgcctgtagtcccagctactcaggaggctgaggcaggagaatggtgtgaacccaggaggtggagcttgaagtgagcagagatcacgtcactgcactccagcctgggcgacagagcaagactccacctcaaaaaaagaaaaaaaaaaaaaaaaatgagcttactcagctctyaacacagagctagtacttaaactccctgggctttagggctttagtttcttcatggataaaataaaaaaataataatgccaac

SEQ ID NO: 827386 - DNA, 590 bp, Homo sapiens
  misc_feature 424: n = A,T,C or G
agaaaagaaacctgaatcacacaaggggaataatgcccarttggttaaaaccctggctgcaaatcacaaaaacctaactcaaagtttaagcaaatcaactaacttactgactcacaggactctgaggcccagtgaggtatttctagttttagtagtggctgagtcttggtaatcaagtcatatttgtctagaatatgtctttctcttcttttgtatctcttcttctagtttggctttattcttaggcagatgctcccaagagtgttgagatggccattgctataatttggatgttttgtctgctccaaatctcacattgaaatgtgatctccaaagttggaggtgaggcctggggaggtgttttggtcatgggggctgataccttatgaatgtctgggtgtcatcctcatggcaatgagagggntctcactccatgagttcatgcaagatctgattgtctaaaaaaaaacctcgaacttcctcctcctcctccctctcctcctcttcctcctccttcttcctccctctagcccccaatcatgtgacacacctgctcccccttcatcttctgccatgactataagcttcct

SEQ ID NO: 827387 - DNA, 484 bp, Homo sapiens
ggaaatttaatgttgatataacattgccaaatctgcagtttatatttaaatttgtcagttgttctggtaatgtcctttttagttatttctcccatgtccagaatccartctagactcatatactgcatttagttttcatgttgagtcttttattgtgaaacaattcttaaacctttctttgtctttcttgtttggacatctgtgaagagtacaagccagttacagttactctgagggatgttcttcaattttttttctgatattagattttttaaaagcatatttttacttagctacttactgtacgctctggcacgttatgtctaggaaatgtatctgtcttgctcatttgtgtttccccatcattagtactgtgcctgggtacacagtaagtactcaataattgatttttgagtagacacataccaatatgtggcattcatttgatgcatattatttaatttttaatccttgctacaacttc

SEQ ID NO: 827388 - DNA, 607 bp, Homo sapiens
tctatttttataaaagttgtgtaattttgaattatgcrtttaaatccatgtttcattttgagctaatttttgtataaggtgttagatttatattgaagctaaacatgtttttgtgtatacctgcctatttgtttcagcaattgttcttcaatgaattttgcatctttgttaaaaattggttaggcatgtttgtgtgggtctatctctggattcagcttcattgatctgtgtggccatccttctgccaataccaaacaaccttggttgtcatagctatatagaaagtcttgaaattgagtaaacctgttcctcccactttttctttttcaaaattattttagctattctacctactttgccttccatatatatttcaaaataattgtatgtatacctataaaagtcttgctaagattttcttagcaattggattaaatctgtatatcaattttggcagaattggcatccttactgtgttcttccaaaccatgaacatggtatgtacctccacttatttttctctttttttatcattgttttgcagtttttagttttagtagtcaagtcctgtatatgtcttgttagaattagctggcttcctctgaca

SEQ ID NO: 827389 - DNA, 621 bp, Homo sapiens
aaaatgctcaattgaaaccacagaaaacacaaaaagaaggaacgataaacagaacraatgcaacaaatagaaaagttacaaatatggtagctaataatccaactatatcaataattacttcagatgtgagtgatctaaatacaaaaattaaaagacagagactgacagaatagattcttttaaagaaacaattttatattgtttccaaggaagacttcaaatataaagacatatagattaaaaataaagagataaaggaaaataaaccttagtaacactgatcaaacaaaactttttattgcttcatagaaagcagacttcaaaacaaagaaaattgtcagtggtaaatatgagagttacataatgatatcagggtcaattctccaagaagacatgatgatctttaatgtgtatatgcctaagaacacaccatcaaaatacatgaggcaaaatcagatagaactggaaggaaaaagagatcagtctgtcattataattcagacttcaacacatctcaatcagtaattgacaaaaccaccaggcagaaaatcagtaaaaatgtagttgaaccaaagagcactatcaatcaacttgatttaattgatgtttatagaacacttc

SEQ ID NO: 827390 - DNA, 597 bp, Homo sapiens
taaaaatgactgctcagcattgtagacaggtgggtctcagaagccacaatcccattagcaacaggtggctctccaggagatgacagggaaacaggatgtcatctgtctgtccctctgggccacaccacatcctrcccttctccagggctctgtacctgaagctgacctgcagcactgcatcaacagattcccttgccctctcttgttggcatatggatggttttagccaagtaggggacagcagcaggagaatggaatgaggaagaaaataaggtcaagcatttgtgcccctggctcccaccctctcagtttgcagcagacacactgacttctctacttgtggctgaagctccttgggcaaccctctccttagagttccctgttccattttcagccatcactccccgccactgcccttcaagttcagagatagaaatgggcaccccacaattcctagcctgaggggactgcagaggttgtttccctaaaacttgcccacactgttattaggctcttttcaaatcattcactgtgaaggtcctgttgccatccaaggaagagaagaagaaaagtgcaatgtccaaatgaggaagagac

SEQ ID NO: 827391 - DNA, 470 bp, Homo sapiens
acgttgaatggtgccagactgaagccagatctcaaagtgtcctaggatacaacaaaacaagtggctcacaagactgagtgttaccaggcccctgcacatacactggaatgtktctgaagctgtctatgaagagcaagatgggaaggagattatttagagccctctcatgttttatcacatattttgtttttattcttccagattttggattttcactttctccttcagcatttgctcatcgtgcccatgttaacatgccttgcagcctaatatcatgggcagaagggtattctctcctgcttcagagaaaatctgtattttctgtcctgccttccatgctttgcgttgatttattaaattacttaaatttgtaaaatcctcttgttttagacaaagctctccttcaatactagctgctgaatccgattttgagtgtcaacagctgatcactaacattctttctctgtaca

SEQ ID NO: 827392 - DNA, 576 bp, Homo sapiens
cacttaaaaataagtggacctatttctttatccaggacttaaattgtgctttaaggggatggggccactgatttaaattacaacatgtgagtagataatgcttgttgttagaaaataagatgcttatctttaaagttctaagtgaacatttgtgggaaattattaaaataggaaattaatgtgtttttaattctaggaaagggccattttcaatgtcagcatacaattcagaatttagacagttagtgacactaaaaataaagtaccaagaatagtaaagtaacaaacagctttatcttatttgccttagcttgctttctttctgaaggtgctgctgagagcttggcactctgaaacccattctgtaccagacagaaccagcagtaaagcaaaaggagacatagagcaaaggaaggtacctgcctacagtggggttttcctacgtggctggcttgggtctgactrtttcatgggacagaagaagaaaagcaatagggccatgtggaggagtcccagttgacttatcactgatgtgcacttattgccttcacatctaaaaaagggcccagaatcctt

SEQ ID NO: 827393 - DNA, 576 bp, Homo sapiens
cacttaaaaataagtggacctatttctttatccaggacttaaattgtgctttaaggggatggggccactgatttaaattacaacatgtgagtagataatgcttgttgttagaaaataagatgcttatctttaaagttctaagtgaacatttgtgggaaattattaaaataggaaattaatgtgtttttaattctaggaaagggccattttcaatgtcagcatacaattcagaatttagacagttagtgacactaaaaataaagtaccaagaatagtaaagtaacaaacagctttatcttatttgccttagcttgctttctttctgaaggtgctgctgagagcttggcactctgaaacccattctgtaccagacagaaccagcagtaaagcaaaaggagacatagagcaaaggaaggtacctgcctacagtggggttttcctacgtggctggcttgggtctgactatttcatgggacagaagaagaaaagcaatagggccatgtggaggagtcccagttgacttatcactgatgtgcacttattrccttcacatctaaaaaagggcccagaatcctt

SEQ ID NO: 827394 - DNA, 599 bp, Homo sapiens
tagtgtgcgggtggttttgagaggatcctgtacggtatggtcctcaggtgcttggcaaaatgggtccaccccctcccgggtaaccctggctctaggccctcttccatgtcctggccttccccagcagtcccctggagccctctggcgaccaaaactccacagtgaagcgccgcctggagtggtggccggtgaagggttcccagttcgggacacgttattcctcttctgtaaaaactgcaccactttcagctagactctcaggcaaaggcacagaaaattacctgattagattcatgatcttttagaggtttcctatcgctgaggtcatctgagccagcagttttcaaaatgagttgacagcttcatatcctaaaatgttgcatttaaattccagttaaaaatagtttaactactgtatttttccattctaagacagatttttttcatgctttgctttttctggagttagcatgcatcttataattratacacttcatttaatatgatgggatctcttctgttcttctaaaaaattatcaatacatttgtgatgaatattggtttaatagcatctcagaatgtaaaacatccaggttgca

SEQ ID NO: 827395 - DNA, 612 bp, Homo sapiens
atactttcagtaagtcttatcactggcttgctgtcaataaatacrtgggtaaatctctgtttgaggcttttggctctgaaggctgtgagacccctgatttcccactccacactctatatttctgtgtgtgtgtctttacttcctctagtgccactgggttagggtttccatgacccagctggtcttggcagtaaatattgaaaaggaatagatacagtttccattatttacagatataatttccaaaaaatttccagagaataaatggaaaaactaacagaaacaaaacaagaatgtagtaaggtatgtggataagagatttgtatgtaaaaatcagtagctttgcaatgtgccagcagtaatctgctcagacatcagtaaatatctcattcgcatttcaaacaaaaaatttaaaatgccttgaaataatgtaaccagaaatacgaaaagatgatacgaaaacgtcgctgctgaaggacatgaaagaatgtaatactagattctgagatgcaatttttttcatttgttcttcctgaaaaaccgttaggttgatgtgcattacagtgttacgattatgtatgagtctaaggaaaatcagatgaaatgtccaaa

SEQ ID NO: 827396 - DNA, 658 bp, Homo sapiens
gaatatctccaaaggttagtaattttaccttgaccataactatgttttagcacagaataagttgcaattagattcatcatccagaacactcaactctcacttcaaactgtcgcaggaaggatgaagggtagataccaagtgtgattgcctagtttttggctttccaaagcattgtctcataagtggtaaaatagaacatccagtactacccagagacaggggtgaattagttggatttgagccttgtaaagctgtaaaatatctcttttgggagtgtataaaattctttatttggcttttattttagtgactattactcatccatcaggtgtcagattaaatgtatctcctcaaagaactactttggctggcccctaatacaagattaggtcctcagttacatgctttgtagcaaaccctgcaatttttgttattaacacttataaaacttgtaattagatacttattggtataattatttatttaatgtttggcttccctactttcctttaaggcccaggagggcaggaatcttgcatgctttcttgtttcggaatcctcccagcacctagcatagtgcctgacacatggccagcaccsagcaaacatctgttaagagataggccaacggcaggggtcctctgtagaaccagaaatg

SEQ ID NO: 827397 - DNA, 563 bp, Homo sapiens
atataaaagttttgtttacattatactgtagtctattaagtgtgygatactattctgtctaaaaagtgtacattaatttaaaaatactttattactagaaagtgctgttgatcctctgagccttcagtgaataatgtttttgctggtggagagtgttgcctccatattgttggctgctgactgatcagagtagtggttgctgaaggttggcttggctgtggcaatttccaaagataagataacaatgaagtttgacacattgattgactcttcctttcacaaaagatttctttgtagtatgtgatgctgtttgatagcattttacccacagtagaacttattacaaaattggactcaatcctcttcaaccctgccactgctttatccactaggtttatgtaatattctacatcttttgttgtcatttcaacaatgttcgtagcatcttcaccaggagtagaatctatttcaagaaaccactttcttctctcatccataaaaagcaacaattcatccattcaagtttgatcatgagatggccccatcttcaggctccactctta

SEQ ID NO: 827398 - DNA, 572 bp, Homo sapiens
cttcaaaatatgcgttgaaattcatcttttgtttgcatttggatatccggttttcccagcatcatcgaaggaaaagactgtcttttcttcactaagttgcctttgcagcactgtggaaagctggctcatccatccatgggtctgtttctaaacttgctctctgtggcactgacccactgtctacctcaaggctagtgccacactctcgttagtctagctttataacaagtcaggtggtgtaagtcctccaactctattttttcaaaggggttttggctattctaggtcctttgtagttcctatgcattttagaatcagcctgtcaatttctaaaacaaaaaaaagtggtacaatttgcattcagatttaatctatgcgtcgatttggtagaactgatggcctaacagtattgccttctgattcataagcacagcagacctctccgtctactttactgctttactttcagcaatggtttgcagyttttactgtacaggtcttacatgtcctttgtcagatctatctctaagtatgtcatattttaaaatgctactgcaggcaggcacagagaa

SEQ ID NO: 827399 - DNA, 595 bp, Homo sapiens
ttattggagactaggcctcttytctggatccacaaccgtgtccagcccagaatcaggacccccaaacgtgtctgggaccctgtccctttcattctggtctagacaagtccccacacgtggccaaaggacagcacccagactctgcccctgaccagtcaatgtgcagcaaacccacttcagtaggcagaagagtctacccctagggagaaggcgccaggagcaggcaggtgggagggaaagtgttcggcagggcagaaaccctgcctggctgtatccaactgtcactcccactggaggcgctgtgtatgcagggcccggcagtaagcccagctgcctacagccaaggcccagcgacagacatcctccttcggtagcagcagcagcctgtcctcctccagccggctcaggaggcctgccacacccagcatcgcccccccccacatcccataagtgttggccgtgaagacagctacaatgaggatggtcactgcgaccaccaacagcattgcctgaccagccacagagcggccctcagggccgaggtggccgccagccactgccagcaccatgcctcctcccaggagcaggttggcag

SEQ ID NO: 827400 - DNA, 470 bp, Homo sapiens
  misc_feature 119: n = A,T,C or G
gacaccagaggggctccctgagctacctggacaacgattaagtatccccttcagccccagggtccacaggacagcccagctcctggaagccgaattccccttcagagacaacccaattnctctcttttttttttttttttttttccgagacagaattttgttcttgttgcccaggctggggcacaatggcgtgattctggctcactgcaaccgccttctctcaggttcaagtgattctcctgcctcagcctcttgagtagctgggattacagatgcccaccaccacgcccagctaatttttgtatttttgtagagacagggtttcaccatgttggttaggctggtctcgaactcccaacctcaggtcatccacccgcctcagcctcccaaagtgctgggatcacaggcgtgagscaccatgcccggctgacaacccaatttctctgtgcctgtttccccagtaaccagac

SEQ ID NO: 827401 - DNA, 497 bp, Homo sapiens
cttgccttaaagcaacatgagaggagtgtctcagaagcctgaatctgatcttttaagcactagagtgtcctgctcttagagttgcccaggggaggyagaggggatggaagcactctttacctttaataaataagcatatgccttcttctacaattatgatttcagtatgattaaatagttgcatagaactatacttctcaagactcctttgacggaaagtcatagaaactcaaagtaacttatgtaaaaaagaggatttatagtcccataacctggatactgcatctaggaactcaacagtgtcatcaagacagtaatgccctccctcaatcactgacatgttctctctctctttctctctgtcccccttctgtgtctatcagcaattctaggatgtacattcttaacagaagaagagcttctttttctgaagagttatatcaaaagtcccaggtgaccacttatgtttagttttatcagtatttatcagttccatg

SEQ ID NO: 827402 - DNA, 557 bp, Homo sapiens
tctttgctttgactctcaaatctcaactgtcagcccaaatttgctccctcatttaaaactcccttcccctggcgggggayggtggctcatacctgtaatgccagcactttgggaggccgaggtgggcagatcacttgaggtcaggagttcaagaccagtctggccaacatggtgaaaccctgtgtctactaaaaacacaaaaattagccaggcgtggtggtgcacacctgtaatcccagctactcaggaggctgaggcaggagaatcacttgaacccaagaggcggaggttgcagtgagcagagatcccaccagtgcactctagcctggatgacagagcaagactctgtcgaaatgaaatgaaatgaaatggaacaaaacgaaacgaaacgaaacaaaactaccttctctcatccttgagtccaacatctgtgggcagccttcatgaccatctccaactagatttgaactgtatcaagctccatttcctccccagtaggacacacgttcctcttccatgagctcactacatcatcaccctctttcttaagctcacct

SEQ ID NO: 827403 - DNA, 646 bp, Homo sapiens
ttatggtcattaggattctaagccagcccttaaaatcccatggactgccagtgtatctaaagcactctccaaacagtacattgaggctgcaatagtacaagtgtagckccagtcccactctatcttactggaatgatatttccattcgtgtagcctatggttgcatttctttttatcatccaggtcatattcttgactcatagttagcttgtggtaaaaagaaatctccaaagttttttctacatcaaaggctccaaagttaagtctacacctccccacttgcttaggcctgtgcatattaataatgttttacatattaagacaagtgtgtccctgttacattccattcttttggattttgtcttactgttcaagttgagtgctttattaatcttcattaagtcacttcttaacacattaattcagttgtgtcacattcatattgggttgagtttatttctgtctatataaactgtagatagaactattgggcatggcaactttaagagctttggttttcagagcattttcataggaaaacatgatctcatttgagcctccctcagaccttaggaggtggagtgagcctgttaatgatcttaatgaattccatttctatggatggcaaattagaggcaggaagatt

SEQ ID NO: 827404 - DNA, 622 bp, Homo sapiens
ctgtcgcaggcttccacagcattgtgccacactgaagcatgcagggagtcggcgtacaggagggagaagcctcagggcctggggayagggaaacgagctgacagcggagctagagtattcatgttcctctaaacttagctggcatctaggtctcgcctacccattgggtggcccgccttcttcatggcacttgtcagcccttggcgccagtttccagggcacttggatccccgtctctcagtctgtttactgtgaactgacagagtttggtaaaggacaaggtgattggtttaaaacaggccctaccgaatcggtgattcttggggaggagctttcagatagaaacccttgtggtaaaggacccctccctggtagaactcctccaaaaagaggggagaggagcagagaatcccaagataactcttcatcattccagcagcaagatttctttttcaaacacattttttcatcaaaggagaaatccacttgctatgttttttttttttcctttcctgatagagactaaaacagatacaaattatccatgtcattttaaagataaaaattttaggctgggcacagtggctcacacctgtaatctcagcattttgggaggctgagg

SEQ ID NO: 827405 - DNA, 613 bp, Homo sapiens
atctttaaggaattattgcacaacaaaatatacttaaaactgcattcartatggtcttaggtttcaaaggtatctcagaatcatcgtgaactgacccatattacaactaaaatgacctcttcaatggtgctttttgctgtctggaatctgaagaatattagtgttccttttattcgtatttaaatgactgtcttcatacttttgtcctcattctagaaggaagttaattgttctctgtacttgtaaggatcttagattttgaacaaaagatgaaaagcaggacataaaatagtttctgagtagccttttgcctgacagtgttctgtgtacacctgcttgccacctggttcaagtccttatcctgaggtgcttgtgggtctatgcagacaacagtagttggtagttgaacagtgtgtgtctggcctccaccactgagtgtgtgaggtttgaatcagtctcggagtcctggggccttgtctggctttcagaatccaactgttgtcttacttctgttctatagggcggaaggctccctttatatcatttcccacatcctacttctaaagattaattcatggagataggtctgccctatctgccttatctgggcgct

SEQ ID NO: 827406 - DNA, 584 bp, Homo sapiens
tggaccctcggctttctccctgcagggggatctgcctccctggcctcgcttcttgtgatcttctatgcatgytcactccttactcactctgagccttctgactctgaccagcctgtgttcctggcattcttttgatgatgtaagtgtttcacaccctatctgcaaccaagcaggaggacggagaggacttctgcagcaaagagtacctctagaaattgcttttgtgaggttctttgaggtgctaatcacctaacttttatttgaattgctctgacttatcatttaataactccggaggactttttacttccttggcaggaggaggaaggtgattcctcagataaaaccaaaacctagagctgcacttctgaaggaaattgctgctcaggtagggctggatgtgtaggtgttctccatgggcccatgccgtgcctgtaccagcgtcctgaattgacggcagcagaggggtatctttcttcattcttcattatttattgcctgaggcagaatgaatacttgtacacttgggatttcagccatgccttttaagggctgtgaacagacttatcaaagagccatcttga

SEQ ID NO: 827407 - DNA, 602 bp, Homo sapiens
cacacagtgtttcattgaattcccatggcaaccccaggagttagactttattattattgttactaatctgttttacagatgaaggtgctaagactcagaaagaktaagtagctcttttcagatcatagagtaattgacatagctggactttggccaccaagcacatgtttttaaccatgctgctaccctacttcccaatttacttgcttttcttcattgcctgccaatttacaaatgcctgttcatagctgccatcctggaatcagatggtctgggatctggtcttggctctattgcttactggctctttggccaaattgtgtaacctcttcaaacctcagttttctcatctgaaaagaagaagacaatacctacctgctatggtctgaatatttatgtcctccccagattcacatgttgaaatcttcacttccaaggtgaccgtattgggggtgaggcctttaggagatgattaggtcatgaatgtggagctctcatgaatgggaatagtgcctttgtaaaaaaaaggcctgagagataccctttaatctttctgtcatgtgaagttagagtgagaagatagctgtctatgaggaagtggg

SEQ ID NO: 827408 - DNA, 602 bp, Homo sapiens
cacacagtgtttcattgaattcccatggcaaccccaggagttagactttattattattgttactaatctgttttacagatgaaggtgctaagactcagaaagattaagtagctcttttcagatcatagagtaattgacatagctggactttggccaccaagcacatgtttttaaccatgctgctaccctacttcccaatttacttgcttttcttcattgcctgccaatttacaaatgcctgttcatagctgccatcctggaatcagatggtctgggatctggtcttggctctattgcttactggctctttggccaaattgtgtaacctcttcaaacctcagttttctcatctgaaaagaagaagacaatacctacctgctatggtctgaatatttatgtcctccccagattcacatgttgaaatcttcacttccaaggtgaccgtattgggggtgaggcctttaggagatgattaggtcatgaatgtggagctctcatgaatgggaatagtgcctttgtaaaraaaaggcctgagagataccctttaatctttctgtcatgtgaagttagagtgagaagatagctgtctatgaggaagtggg

SEQ ID NO: 827409 - DNA, 562 bp, Homo sapiens
cacttcaaaggcttcctgttgcctttagtgtccaaactgctccacaggattggttctgcttatgtcttcagcttcctagccccaccccgaccccccataatattacgcttgtgccaaatggaatttccctcaattcttcaaacaagctgcaccttctcaggttcactctgcttggaaacctcgcgacctttcttgggtctattctttctctcttttactctgtttccttgtctgtgttcatctgttttttcatacattttctctttgattcagcatttagatagtatttcccctaaaaaacttttcctgactgtccttccccttttctctaccaaatctgagtttggaggtcctcttgtgtgcttcaaaaacccatacatttctcttgtcatgtagctcatcatgcagtattttagtgcttctttgtgacggcatctttctaacctcagtgcttagcccagtgcytggctcatggcacacagctcaataaagagtggtcaaagagaatttagattgaccattatttatattttaaaaatattttctttattaaaatttgttt

SEQ ID NO: 827410 - DNA, 567 bp, Homo sapiens
cccaaccatctaatctaaagcattttccctccaatccactcctcccgcatgttatgtatcacacttccctacaattttatataaaaacctgaaattcccttaattattgagtgacttgcttactgtttctctccacagttaagggactttggttcagggctatatccctagtgttcccagaccaaactgagggtcaggctgctatttctctcggccaataacgagatgcagataaactagggagaaagagagtttttatttctataaccagttacgggaagaaggcctgcaaattatcaccagacgaaccccaaattacaaagtttttcagagcttatataccttctaagctatatgtctacgtgtaagtgtgcattcatctaaggatataagtgattaacttcttttaatctataactaaggtctgagtcctgaagaccttcttctggagcatcagtaaatttacttaatctaaatgggtctaggtgctgggctgattayccttatcttgtctcctgctgaatcatggaggtttgaggagttccttcagaccgccaataaatttgt

SEQ ID NO: 827411 - DNA, 641 bp, Homo sapiens
gtaggtagtcctaagtctgatgcagcggtctatgatgacataaaaaacacagactttttcaagctttcttaaagaatgactcttatccttatgcctgtatgctcacagtctcaaatgactaccaaattgccatgaacatgtctatatttaatgcagaaagaagagaaaatcaatggactaaagttttatgccaaatgaaaatttttaatgttcttgtctgtattttaataagcattgtagttcaccatagatgcaaaaacatttcatcttcttcttaggaattttattttgtaaaactgttaattttaaatgagagagttttgaataagaaaacgtacataatcaatatttgtaagtgaagatcagaaagaagataaaagaaacgtgagggaaccaagtagcacaaaataaaatgatatatataaaatgatagttatacaataagtaattatgttggatatgggaaagtgatcttataaaagaaaaatatccagataacttttttaaagaaaaagaataaatgaaattttacttgatactattcacagtgtactcattaacaacataattatatataataaaggataaaataaraagtcaaaaaccttttgactttggcaaaatttaattaaaaattcata

SEQ ID NO: 827412 - DNA, 564 bp, Homo sapiens
tttgcaatgtatatcactgttgatgatagggtatcttaatcctcctcttatatattggaaatttctagtggctttcattgtatctatctatatatatgtttaataagggttggcaggtattgcaatttacatacattttacatagaactgatcaactatgttttgttttgtttcttgagatggagtctcgctctgtccctcctactggagtgcagtggcgtgatctcggctcactgccacctctgcctcctggattcaagcaattctcctgcctcagcctcccaagaagcaggaccacaggtgttcaccaccatgcctggctaattttttgtactttttttagtagagacagggttttgccatgttggccaggctggtcttgaactcctgacctcaggtgatttgccccgctcagcctcccaaagtgctgggattacaggagtgagccaccacgcctggccagaactaatcaaytatgtttttgttgcatctttgcctgtctctcccactgggctataagctccttgagaccgggaattgtggctttgtcttatatacttctgc

SEQ ID NO: 827413 - DNA, 461 bp, Homo sapiens
tcaatttgggtgactaggatgtattctgaaaaacatttgtggtatccgttgttctcaccaaaattcatcaatcattttaattatctgatgactctgtctggcacattagcmatactatgtcttgatctattttggaaacaaacatatgaacatcttgtagcaagagtgtaagtattcaagtactgatccctagtacaatagataaagtgtataagtacctttgtgtccattgagatcaggcttttcaaccatatgtgtcaagattaggtctggttttattaccaaataactttccccaaaaaacttggttttcagagcttattggattttggaattgcagaggtgggagtgcagaccattagctccctcttatttctctttcagtgtcttctcctctgagaactttctgtgaccactttctctgaccacctacactaggactacatttaaagagcctccaa

SEQ ID NO: 827414 - DNA, 509 bp, Homo sapiens
atctaccattctggggtctggaggacagtgaccctcttctcacagctccactaggcagtgccacagtaggtactctgtgtgggggctcccaccctacatctcccttccacatgccctagcagaggttctccatgagggccctgcccctgcagcaaacttctgcctggacatctccaggtgtttccatacatctcctgaaatctagacacaggttcccaaacctcaattcttgacttttgtgcactcgcaggctgaacaccacgtggaagccacaaaggcttgaggcttgcaccctctgaagccatagcctgagctctacattggcccctttcagccatggctgggacacagggcaccaaatccctaggctgcacacagcatggggaccctgggacmagcccacgaaaccactttttcctcctaggcctccaggcctgtgatgggaggggctgctgtgaagacctctgacatgccctggagatattttccccattgtcttgatgattaac

SEQ ID NO: 827415 - DNA, 631 bp, Homo sapiens
gtaaccccagcactttgggagactgaggcgggaggatcacttgggcccatgagtttgagacaagcctgagcaacatggcraaaccccatctctactaaaaatacaaaaattagctgggcgtggtggtgtgcacctttaatcccagctacttgggaggctgaggcaggaggattacttgaactcaggaggttgaggctgcagtgagcccagatcataccactgccagggcgacagagtgagaccctgtctaaaaataataataataaataaatacgtaaataaaatattcatagcagagtgaggaggttggactagatcagtgttgacactgcaggaaatcctggacaaggatttggatcccaggttcatgaaagggtccaagcaatcagcttgtaaggaatgttctagaacctaccctactttaattttttgtttttacttttgattttcactgaagtgtaacacacatacagaaatgtgcacaaatcgtgttacttctcactgaagtttcaaaaactgaacacacctgtgtaaccaaccagctgtccccaacccaaagcctccccatgcccttccaatcactaaccctccaaggctaacccccatctcagcttccgtcaccacagatcag

SEQ ID NO: 827416 - DNA, 642 bp, Homo sapiens
gcagccaagggcctcctcaccaggggaaggaccagggttacttgtgtgacaaggtgcccacccatggcatacacttgggtccctcacagggcacggctatgcagagacttctcctccgacctccccagacaaaatccaccagaccacagcccacacagtcgctcggtcaatgagagagcacgatcctggggagaggacacggtgtggccgctctcgtcactcggtcaacgagacaacatgaccctggggaaaggacgcagcgtggccgctctcgtcactcggtcaacgagacaacacgaccctggggaaaggacacagggtggccgccctcgtcactcggtcaacgagagagcacaaccctggggaaaggacgcagtgtggccgctctcatcactcattcaacgagagagcacgaccctggggaaaggatgcagtgtggccgctctcgtcactcggtcaacgagagagcacaaccctggggaaaggacgcagtgtggccgctctcatcactcggtcaacgagagagcacgaccctggggaaaggaygcagtgtggccgctctcgtcactcagtcaacgagagagcacgaccctggggaaaggacgcagtgtggccgctctcgtcactcagtcaacgagagag

SEQ ID NO: 827417 - DNA, 612 bp, Homo sapiens
ccttagcaaatttttattgagtgtctactatgtgccatgtattgctcaatgttcttgggatacatcagtgagcaaaaagtcacaaagatccctgctcttaggtgtttatgttttagtggggagaggggatatagccaataagcaactgatagagcagataagtaaatgatgcagtagattaaagagaataagtgctatgggagaaggaaaaaagcaaggaaaatgggatcaggagtgtcaggaggaggacatcttgtaattttgcatatggtgatcaaggtgggccttactgagaaggtggcacttgaacaaagatttgaaggaggtgaggaaatgggctgtgggtgtctggggaagagtgttccaggcagagggaatggccagtgcaaagaccctgaggactctgcatgactgagaaataacaggaaagccagctgggtgaaagcagaatgagtaaggggtgggatgggggagcaggtacaggaatatgaagtcagagagtaattgttgactcagaaagagtgagttgatcatataaggccttgtataccatcgtgaggactttggtttttaaagmtaagtaaaattggaagtcacaaggtcactttcatt

SEQ ID NO: 827418 - DNA, 469 bp, Homo sapiens
tgaatgagcagcatctaagtatgagcttaaaattttacacattatctctaattcatgcagcaactcttcaaggttgcttgaatcaattactcactacctctgtgacttcagtaaataattctatcaatctcagtttagaagttggcctatcagggccaggcgcagtggctcacgcctgtaatcttagcaatttgagaggcttaagtgggcagatcacttgaggtcaggagtttgaaaccagcctggtcaacaaggtgaaactccatctctactaaaaatacaaaaaaaaaaaaataattagccaggcgtggtggtgcgtgcctgtagtcccagctagtcaggaagctgaggcaggagaaytgcttgaacccaggaggtggaggttgcagtgagccaagatagcgccactgcactacagcctgggtagctcggttgaagaagaggaagaggaggaagaaggagaggaaga

SEQ ID NO: 827419 - DNA, 641 bp, Homo sapiens
atccttactcaacaaccaagctaaccaaatagagacttcagttgccacaagtaacaaagagtacagactttgtagaattagttcaaaaaaattattaaatatacaaarcagctaaaaaattgcagcaccaacaatatactctggggagggagataatgattttaagaggtgtcacaatgtattattttaagtagtcatcaacagaaattacaaggcatgtaaagaaacaaagtatggctctataataggaaattaagcaactaatagaaacggttccgagaaagtacagactttagtcttactagaaaatactttaaaattggttattttaaatgtgctccaagagctaacagaatgtgtgtctaaacaactgcagtaaattatgaaaacaatgtctcaccaaatgcaaatattcacaaagggatcgaaattacatatttttgaaaaatttatagaaattctggagttaaaaagtacaactaaaatgaaaatttcactataggagctgagcacaaaatttgaagaagcagaagagagtatagcaaacttgaagataggtcaattgatattatctagtttgaagaacaagaagaaagaaaatgaacacagctttggaggcctttgggacatcagcaacaaag

SEQ ID NO: 827420 - DNA, 614 bp, Homo sapiens
gctagagggtctttaaggctctcttttgcttggagactatttgtagcattacagtcgtgtgccaaatagtgatgtttccatcaacgacagactacatttacaatggtggtcccacaagatttaatactgtatgctatgcttagatacacaaataccacgagttacaattgcccatagtatttagtgcagtaacatgctctacaggtttgtagcctaggagcaataggtcataccatacatcccaggtgtgtagtaggctctaccacctagctttgtgtaagtgcactctataatatttgcacaacagtgaaatcactgaaggccacattttccagaatgtatccccgttgttaagtgatgtgtggttgcttttagtaattcctccaaccactacagtacagccactctctgcatatcaaactgacatttttctttacttctttttgtgatcttaattgtgtgatcttcatattggctagttctttaagagcagcrgttaaaatccctattttcatgagccccagtgatgagagatttatatttgaaaccaatctctcttttcactaaccaaaaagtgtcagttatccccatataaaaataccgatgagtcggat

SEQ ID NO: 827421 - DNA, 671 bp, Homo sapiens
ctgcttagaaatcttcattagaaaaaaratgttgttagatatttctaacgtctttgtcatctcaatgttagcatttattgattgctctttttcatttggttcaagatacttctaattattgacataaaaagcaatttttattgaaacctgggtatttcacattatgttctgaaatgatttcatttaaattttctgctttatatggctctctttgacaccactctgtcaagggaagggttactgccaccttgttactgctaggtaggagtagaagtccaggttctccactttgtctccatgacactcaaggcagagagggctcctcactcctgacaagtggaaatagaagttctgtctctccccagggtcttcactgacattgtgttgggtgagagctcatttccagtgagaatgaaggtcctggcttgctattcggccttttctgatgccaccatggtgaggctgttgggcaatctaattacagcctcatgagagtgaaagtctaagctccccatccagactttgctggagtggttaaaagtaaagccattgtttttgcttggtgtttgggtggggtagagtgtttgttgcccaaaacatttttgtcttgctaggtcgccctgtttctggtcctttggttaaaaacagaaaccttttcttggaactatttt

SEQ ID NO: 827422 - DNA, 542 bp, Homo sapiens
ttgcattacaaatggtttcatgtctcagacaaacttgggcccaggatcctgaataaggcaaactggcatgtgagcgctatcaggtcagaygtcagtcagactgaaacaaccctcaagccaaggcagaggggaagaatccaggtatggcccaccagggataatccaggagactagaaaaaagagaaggcaggaaatagggtctggaatgcccagcctggacaattccctgaactgaccagaaaataggtcacagtaggtcttttatgggattgctgtggccttgagcctgggtataagcaggaacaaaggctggccattctagagacacactcaattggctcttctgatttctcacttataaccagaagcctctttgctaacctcaataacatattgcttattttttaatgattgctctttttgtttcgttttgtttttaaatcaataaacgtaatccatcatataaacagagccaaagacaaaaaccacatgattatctcaatagatacagaaaaggcctttgacaaaattcaacaaccctt

SEQ ID NO: 827423 - DNA, 620 bp, Homo sapiens
gttgaaaaagatgttttcaactatggattctgaaggcatctatctaataggtctaaagaaaagaaaaagtgggtctatagtggatctgcctttgagtaatggagcaggatgatgagccctgataccagggagaaagcatgaaggagaagaatgggacaagagattcattaaaggggcagactctctaacgggaatatatgagagtatagaatgcagtgccatttaccagagctccaaactaactatgagggctgtgctaggacatcccagagatattggaagggtgcttaagagaaggtgagactgaagtctcctccttgacaggatttttgctgagctacagaaaacttttaggtccatcacgcaagatagagaatgagataatagtggaagtggtcttgggaaatcttgacatgtatttccctagagtgtagggacattagaaactagcgcttgcctcttctctggagaattctaaagcagcctttaataacagggcaaggaagaagtgcaggaatacatggttatcttagaccagtgattttcaaccagcggtaatttttttacctctgggagwcatttcacaaagtctggaaacatttttacttgtcacaactgag

SEQ ID NO: 827424 - DNA, 635 bp, Homo sapiens
ttctttgaaaatgatccatgggctgagtagaatgtgcatcctgcaaccattggatgaaatgttctgtaaatatctattaggtccatttggtctattgtgcagattaattccaatgtttctttgttgattttctgtctggatgatctgtccagtgctgaaagtggagtattgaagtctccaactattggattgtggtctatctctctctttagcttgaataatatttgctttatatatctgggcccttcagggttgggtgcatttatatttatatgcaccttgctgaattgacccttcttatcctcttgctgaattgacccttttatcattatgtaatgactttctttgtctttttatggtttttgtcatgaaatctaatttgtgtgatataaatagagctattcttgctcttttttggtttccatttgcatggaatatctttttccacccttttagtttcagtctatgtgtgcctttataggtgaagtgtgtttcttattgggagcagattgttgagtctttttttttaatctrttcagccactttatgtcctattggagagtttggtccatttacattcagtgttatcattcataagtaaggacttatgcttgccatttttaaaatttgttttc

SEQ ID NO: 827425 - DNA, 573 bp, Homo sapiens
atataggtacatttttcaagtgagtggcaaatacatacctacatgcaggcatacaaacattaagaccaggaagatttaaatcaatatcagtttaacagaagtcaggaaaagggaaaaaagaaagcaaaaaaaaaaaaaaaaactttctacctacatacttacaatcatgcatacataatatggtaaataaaacataaaaagattgaggtttctccaataaatggaaacatattcagctcacctattaaaagagatatctagtttgacttttacattttacaaatgaaaaaactgaagcccatggagtctaagtgacttgtggttgtccttaaagcgaatcagatcaagggtccaggctgaaacccagaccttctcattcccatgcttgcacaccataaataaaacacttttttacctgagaaatgacctactcctccaaatacatccccttaracttgctggcatgctttgtgatatcctcaaatcataaaagaagtggaatgtgcctgaaaactgaattacatttttctccagagtaaaggcttttctgtattacaaaagtcatttattttt

SEQ ID NO: 827426 - DNA, 642 bp, Homo sapiens
tttttttttttttttttttttttttttgagacagagtctcactttgttgctcaggctggagctcagtggtgtgatctcggctcactgcaacctccacctcccaggttcaagygattctcctgtcccaacctctggagtagctgggattacaggcatgcaccaccatgcccagctattgtttgtatttttagtagagatggggtttcattctgttggccagtttggtttcgaactcttggcctcaagtgatccacctgtctctgcctccgaaagtgctgggattacaggtgtgagccaccctgcctggcctactgctgactttaaaatcacatcacagaggagggacatttaattggtaagcctcaaactaaaggtggagaattgaagacagtcatttttttggccaaatcaacacttttaaaaagggtctttgaaaggttttgaggcttggttgggatctggatatttggtggatttatacagattcacaaattgcagagttagggtcatttcatacatacacacatgcatacacatatttgaaaatgtgattaatacatagtaatttcaactgaaaacatgactagctgatacagttaaagtgagttcatacaataatgattttctgggcctaaggatcct

SEQ ID NO: 827427 - DNA, 594 bp, Homo sapiens
aaagtgctgggattacaggtgtgagccaccctgcctggcctactgctgactttaaaatcacatcacagaggagggacatttaattggtaagcctcaaactaaaggtggagaattgaagacagtcatttttttggccaaatcaacacttttaaaaagggtctttgaaaggttttgaggcttggttgggatctggatatttggtggatttatacagattcacaaattgcagagttagggtcatttcatacatacacacatgcatacacatatttgaaaatgtgattaatacatagtaatttcaactgaaaacatgactagctgatacagttaaagtgagttcatacaataatgattttctgggcctaaggatccttcaggtaatttagattaacatggggaaaggtgaataatatatactgaacctaattttgaacattcataatgttccaagatactacctatgttatctaattaaatttagaaacttataagacattattgttactaattctctyttaattccattttagagctaaaaaaaaagacaaaagacaaaatgaagacattgagaagttaagtaccttctagctgaac

SEQ ID NO: 827428 - DNA, 614 bp, Homo sapiens
gattactaatgaaatgtatacttatttttaaaaaaattacctgtagctgaatcttatcatattcagatacagcaataacacacagtactcatagatgtaaactatactgtcacatagaatacttaaagcatcccttattaaatgtcttaggtgttcaaattctttgaagcttttgctaggctgttttcacaaggatatatctgattctgcctatggatctgacacactttaaaagtagacaaagcagtataaaggaaagcatggataatgaatgaccaactaagaaataatcacagataagagaagaagagcatgacatttaaacgaaaatgctttctagcaaactacagattttttctaacttcttactgtgttttctctgcattccatcaaggtggtccagcagtaaaagtagacttcttcacatcactttgtgttataggactaatgatttcttgagttattggtaggaaactggaagcttttatttggtcccttccaacagaaccaaatgrcacggacaagctaactgaaggaatgaaattaggttgtttttaagcacggttcatttccttttagtattgtatactgtctcgcttatttcgattatacat

SEQ ID NO: 827429 - DNA, 575 bp, Homo sapiens
aaagatctgaataaaacaaaaatcaaagatcttttagagttctagttcaaagaaaggcaaatttgatactgaactcaaagaaagggattgcaccttgatgggaaggaatttcttttcagacatgcaacagggaatctgatcattctaggtttctacaatcatatttacaggtataaatataatatacagtcacttgccaatatatgcttatcagtcttttcttattctctgatcctttgttaatgtagccattacatacaaaattgtggcaaaatatatatgtttaaatttttgtcttgaaaaaatgtggaggcaaattttcttttaaaaatgtgtaggctattttaagttataaaagaactctattatcctatactagatactaacagtttttattaatcatcttgaacaatgaaaatgtttttctaaaatctttcatatgtggacagattactctcctttaaaaaattatcgtagcaaattgctaaaccattttgtggaatgatagcatggccagacctttacaatgcagcaggaygcttggaatccaaaagtcatttccccatagtaactcc

SEQ ID NO: 827430 - DNA, 614 bp, Homo sapiens
tgcagggtggatcagatatgcagaaacaagtattaggatattcctagaaagcttggacccattctccccagagtgccctggaaatacctgtcgcagaaattcaacctcgaggaggacttcacagtgacataagtttgactggcatcatgttataccacttcttggagattcactatgtgaattaacacattaaaattcctgagaaactttgctgttaaaaaacaaaacaaaaaaaactcacggaaaacaaagtgagagactctgccagattaaaggagactgaggaaacacgacaactaaataaaacttgtgaccctagaccaaaaaacagacattaatgagacaactgttgaaagttgtataaggtctgtggattagataacagtattgtgtcaatgttaatttcctggtttttataatcatactgtggctgtataagatgctaacatttgaggaatatgggtgaaggatatacaaaaattcattgcattattttttcaaatttttggtaagtctgaaattacttcaaaattaaactttaaaaatatttttataattaaaagtataactgcatttccaatcaatyatctaagataaacacttttggaaatact

SEQ ID NO: 827431 - DNA, 602 bp, Homo sapiens
aacttttacaaagtcttgagtcacattgaaaggatgtaggagccactctgaaggctctatcattgcccaaagttgtaataatttgagcatcaaaaggaatgattgaagcctactaaaacacactgaatcagtgaaaatctatgattccataatacttaaaaataaacgcagaaaatctcaattgttaatagttaaaacagctattaaaataacaccttacttgaaaaatgagtaattaaagggaaagaagaatttattttgcttttgcagtaagaaattgtatatcaagataactgagttgatgaggtaaaagtcttcattattgaacatgtgaggcaataaatataaaaagaaaggaagaaattttttaaaaacacaatctcgcaaattcaaatgaaattctttaattcttacaaagattagtgagcagtttttaaaataattaagtaaatggttaattcatatagcaccaaagtacataatacagatttctttttcatggcaagtaatacttatagaaataatacattaaatgacatttargaaaaatatatagcatttaatatttataatagaaaagaagaaaggctgaaattaatgag

SEQ ID NO: 827432 - DNA, 579 bp, Homo sapiens
agtgtggtgacctgtgcctgtagttccagctacctgggaggctgaggtgggaagatcacttgaggacaggagrcagagattacagtgacccaagatcatgccactgcactccagcctgggtcacagaaagagactatcccctcaacacgccctaaaaaagatttacatcttaagggcaggacatttccagagacgatcggctgaagggggcaaataataggctgtgagcccatacaagtccagtgcttgaatttgagcaaaataaataatcttgtgtgagtatcaggctaaatttcttactgcagaataggaagcctggagttgtttcttcaaagggcaggaaaggtacttggtactcaggctatggaggaaagggaagtggagtgttgggcctctgcttcatctgcattcctgcacataattgcatgaatttccacttttgctgctgtgaaaaatggggctgatgtttttccttctaattggttctggtgagagtgaggctgtgagagtcagctgggatagggactaagcaggacaagtgctaactgctggatccataattgatttaaatctctattt

SEQ ID NO: 827433 - DNA, 483 bp, Homo sapiens
tttttctaccaacagttaggaagctaatgtggctggatagaaagaaaagtaaaatcagatcagatagacaatgaggtgcagaacacgcacattctggtgggctgtggtggagaatttaccttttactctgagacaggaagacacgagaggattttgagtagaggagtgacatgcaaagacttaccttttaacacagttactgtgactgaggtgttatgaatactcttgagagacaagagcggaagtcgggagcttattttaaaaaatgaagagagggaacactgggctgggatcagagtggtgcctgttgggttagtgaggggtgttagaattgtgaatttaagatagagcttacaggacttgctgatggaataagtggggcttttgaagggaaagagggagccaaaggtggctacgaagttcttagcatcagaaatagaaaaaaytgaattgccattattaagagatggacagtagagagta

SEQ ID NO: 827434 - DNA, 518 bp, Homo sapiens
actatgtactaatgctttttaactttgaactcagtttgtaaaagatggattcgcaaaaattgtgttcaagtatacctggtatgtatagacatgtgtcaattaaggacaaagatacgttctgagaaatgcattgctagtcaatttcacggctgtgtgaacatcatagagtgcatttacacaaacctagatggtctagcctactgctgctaggcaacaaacccaccccaggctgtgtggtctagcctattgctcctaggattcacacctatatagcatgttatactgtgctgaatcctgtaggcagttggaacacaatggcaagtatgtgtgtttctaacatatctacacatagagaaatgcagtaaaaatatggtataaaagatacgaagttctgcacctrtacagggcaattggataaatgaaacttgcaggactggaagttgctctgggtgagtcagtgagtgagcggtgagtgaatgtgaaacactgtagactttataaacattgcacacttaagc

SEQ ID NO: 827435 - DNA, 518 bp, Homo sapiens
actatgtactaatgctttttaactttgaactcagtttgtaaaagatggattcgcaaaaattgtgttcaagtatacctggtatgtatagacatgtgtcaattaaggacaaagatacgttctgagaaatgcattgctagtcaatttcacggctgtgtgaacatcatagagtgcatttacacaaacctagatggtctagcctactgctgctaggcaacaaacccaccccaggctgtgtggtctagcctattgctcctaggattcacacctatatagcatgttatactgtgctgaatcctgtaggcagttggaacacaatggcaagtatgtgtgtttctaacatatctacacatagagaaatgcagtaaaaatatggtataaaagatacgaagttctgcacctatacagggcaattggataaatgaaacttgcaggactggaagttgctctgggtgagtcagtgagtgagcrgtgagtgaatgtgaaacactgtagactttataaacattgcacacttaagc

SEQ ID NO: 827436 - DNA, 613 bp, Homo sapiens
taataccatatatatttgccaattatataatatataatataaatatatgtataattatatgtaatttatattatgttaatatattatatattatattagttggcaaatatattatatattatatattttatatatcatagaattggcaatatataatattaaatatatttatattattatataatatataattatatatatatatatggcacaggcatagtacaaaagtgagtgattaactcttttggggaagtgggtaatcaaggtaggaatacagaaatgatgacaatgaatcagggttttgaaaatgagcagaatctggggtaaggtcattccaggatggaaaatatcatgttaaaaagcatgaaggtatgaacaatatggaactgagagcagttttaatttttcataaagacaacatttatttttcaccttaacatttatttttaatatgccttacttaggttaagagaaaacaaagatttawaaagccaagtgtcccttttattattatactttcttttcacataaccttttcagcctagattcacgtaacttcctgtctctcccattaaaggagaggggtcctgcacattacaacaggcaaaaaagg

SEQ ID NO: 827437 - DNA, 637 bp, Homo sapiens
tagctcatctctcaactacagacccatatatgcactgcstaacaacacccctgcttagaattctaatatggtgcaaacctagaggtcttcttttcctcgccttttctcatccactacatccaatctctcatccaatcctgttgctttgttttcaaacactatgtagaaactgagggcttcttgtcacttccttgctagcatcctgtccaagccccatcatccctttcaccgtgacatttctttttttttttttttgagacaaggtcttgctctcttgctcaggctggagtgcagccgtgtgatcacatcactgcaaccttgacctcccgggttcaagtgattcttccacctcagcctcctgagtagctgggtctacgggtgcatgccaccatgcccagttacttattttatttttttctagagatgcagtcttgctatgttgcccaggctgatctcaaactctttaacctcaagcaatctacccacctcagcctcccaaatttttggcattacacacatgagctattgagcatggcctcaccttgttgattttaatagctccctgactttcacgcttacattcttgaattaattctccacacacttcccagaagaatcctcttaaaaagtaaggcag

SEQ ID NO: 827438 - DNA, 569 bp, Homo sapiens
aaagaataccaatattcttttgttctaaaaatctcttatgggattacatgttatatttttggtttctctctactgatcaacagactacattttcacaactcttctttcctttacgttttaacacacagacccaagattcatactattaagattctagtagaactctagatggtatgcctctgtgtatctcagcatttttattcccactcttgtataatgaacatgttaacacctacctcacagggttgttgtgaggatcaagtaagatattgtgtgtgtgaagatgctctgtgaaatcataaagtcctttaaagatgtaaggtatgcttcgcagtgatctctctgaactggaatagcttttccccgctggtataatgcagacatttttaatctgtaatcagaataggagtgaaagcaaaatgaaaatgcaagaagctgaataaatgtcatggcaaaaagagagatgctcgagaaaaagaaaagattttatattagatagagcaatgcaagtgtrgccagattgcaaatcaatgagtttgtctgagtcgagcagaagagcattagttata

SEQ ID NO: 827439 - DNA, 569 bp, Homo sapiens
aaagaataccaatattcttttgttctaaaaatctcttatgggattacatgttatatttttggtttctctctactgatcaacagactacattttcacaactcttctttcctttacgttttaacacacagacccaagattcatactattaagattctagtagaactctagatggtatgcctctgtgtatctcagcatttttattcccactcttgtataatgaacatgttaacacctacctcacagggttgttgtgaggatcaagtaagatattgtgtgtgtgaagatgctctgtgaaatcataaagtcctttaaagatgtaaggtatgcttcgcagtgatctctctgaactggaatagcttttccccgctggtataatgcagacatttttaatctgtaatcagaataggagtgaaagcaaaatgaaaatgcaagaagctgaataaatgtcatggcaaaaagagagatgctcgagaaaaagaaaagattttatattagatagagcaatgcaagtgtarccagattgcaaatcaatgagtttgtctgagtcgagcagaagagcattagttata

SEQ ID NO: 827440 - DNA, 621 bp, Homo sapiens
acccaatttaatttattgggttctaggagaactgctgtgttctcaccctaacttggaagagtgatgtttcagtcaagcaaagaatttcctaccatacaatataacacttgtgtgaggctctgtcctaaatatctcaattaccaatatgtggtttggtagtatttctcgccatgctttgctcatgcgcaatgagactaccactagggtgtaaattttaagtatcccatctaaaactcatacaatgataggaaaaatccatttgtttttcatttgatttttactgaggaatcagctcaatcttcaatgaatactggtctctttccaaagcatttttgatcaaagtaaagactgagtcaagggctttttttttttctttttcttgttttaagagacagagccttgctctattgcacaggctggactacacgcattcaactagagtctagaacacaatttaatttattgggttctaggagaactgtcatgagtattgataatatgaragttctttatattcaaacattattctcaaccagagatagggatgtcatagaagaaaatccattcattcaatcattaattcattaattcacatgtccattatgtacctccatgagctgg

SEQ ID NO: 827441 - DNA, 614 bp, Homo sapiens
taaggtactggttagccatctattacagtgccatttataaagcattcattcttttccccagtgattttatgtgtctcrtatcatataccaaattcttcctcaaatagtttctagatttctgttttaaaccattgtatttcttgtctatttctgagcaaataatatcaagtaagtaaagtcttttctcattttttattttaagagtacttttgaatagtttatagttacgctagataactgtatgataatgtcataaaggcttaatgaaaacaaaacacgcaaaacgtctcatttctaatctgattagaaaaacattacatgtattggcatcttgggaatatttaatctcatttaagcacatgggatacatctctaataatgcaatctctacttgaagagttttatcttcccatattttttccaaaatatttcttgcaagtttagcattaatttttaaattgtttaattatcttactatcatgaatagaatcattaggcttatcgtttctaactcatcactttggcttatgtatttggctgtattttttttagaaaatgagaagaacaatagcacagagctggtttttgtagaactggagagagacgttgtgatg

SEQ ID NO: 827442 - DNA, 565 bp, Homo sapiens
tatttaaagaaataataacaaaaaacttttcaaaagagaaatatataaataggtaggggaagcccaaagaccaccaagtagatacaactcaaacaagactatcttaaggcatataataaactctcaaatgtcaaaaacaaagggaggatcctgaaagcagcaagagaaaagaagaaaacaacagataaaggagctccaatatgtctggcagcaggttacacagcaaaaaccttatagtccagaagggagtgaaatgatatattcaaaatgatttagaaaagcccaacaactgagaatactatatctggcaaagctatccttaaaacatgagagagatgtagactttctcagacaaacaaaagtttaaagacctcattactaccagacctgacttataataaatactaaggtgggatcttcaatctgaaggaaaaagacacatgtgcaacaagacacatgtgcaacaagaaaacatctgaagaaataaaatccactgacaaaagtatatactgtaaccacccatatctttagtrtaagtaccaaaagataaaactactaaaaataa

SEQ ID NO: 827443 - DNA, 359 bp, Homo sapiens
ctgcaaacactgattgagcacttattccgtggcaggaacgttcacacgcattaactcagccctgggtgactcgggaatggcagggggagcaccatcactgctgtcatttaaaatgagaaacttgaggctcagacrggttatgcttcctgcccaacatcacacagcaaacatgtggcagagctgggactgggttccaggattctagctcccaaagccagatgtgttttcatcacattcaagggtaccctatgtgtgagcagcattgtttaacagctttattgagatttaattcacacaccctgcagttcactcatgtatactatttcatagttctccctatcttcagatatgtgcagcca

SEQ ID NO: 827444 - DNA, 600 bp, Homo sapiens
aaaatactaaaaaaaaaaaaaaaaaggaaaccctgaagagcagctgcaggccattcattcagaaaaacaaacaaaaaaaaaaaccaaaaaaaaaacaacaaaaaaacacccacgctattttaaagcagttgtgcatgacaaaaagctttaaggtgaactttcaaagagaaaaactcattttcttttctgtcagtagatgcatggataacattctcttttatgatattaaagaaaacacaggtaatgaaagggaagccaaattaatgccacttatgagaaaatatgcattttatattcaaggcactctctctatttattaatatttattccctgagaacttaaaaaaatgaattgaggtgggaagaaataagagcacaaataaaaagtcatgaaaaacagagaagggagcatatcgagaatacagagaagggcagctgtaacaactaaacaaactgtgaaaactagatttgagtattataaatttgaaaaggtaactaaaaacaacaagscttcaaaaataaacaaagcaccattgtattttttacctaattattctatctaacttccattttagttatttagccattttgtttactggct

SEQ ID NO: 827445 - DNA, 617 bp, Homo sapiens
agggcttaatggaagaagtagaaaacatgcaagaaaagatagacgatgtaaaaagagcaatggaaattctaggttttaaaaaatttctagtgataaraaagactaacagaaatgacaaatgtttttatggactcactggtagactggatactgatgagaaaataatctctgagtttgagaatatgacaatagaaacttccaaaactgagaagcaagagagaaaagatggaaaaaaaaaaaaaagcagaatgttcaagaaccatgggacaactaagaatgccataacatttgcataacgagcacaccagaggagcagaaaaagagaaaggagcagaagcaatatttgaagcaacaatgactgtgaatttccccaaaactaatgtaagacactaaaccacagatacaggaagctcataaaacttcaacagataaacgtcaaacaaacaaacaaaacctacaactggttatatcatattcaaactacagaaaatcaaagattaaaaaaaaaaacctaaataaagccagaggaaatgaaagctcctctgcagaggagcaaagaattacatctgacttctcagaaaacatgaaagtaaaaaagagagagtagagttagatat

SEQ ID NO: 827446 - DNA, 218 bp, Homo sapiens
atttatgcttactctctagtggaaatcaggattgttatgaagacttaaggctcaatattttttaacacaatactcatctaggatgtaacagtgaagccgagtaaactacaactgttgagcaagttccagcttttctcaagttagttatattatagggtgtacttagtaagcrtatttaggtgaaagaagttgaattatgttaaatgttgccctttgcc

SEQ ID NO: 827447 - DNA, 589 bp, Homo sapiens
gtgagaaaggctgggatcctcgcctcgagttacaggaggaagcaggcctggctccagctctagccaggggtgccccaggagcactgggggagcatgtgaagtgcttaccagggttacttgsctgagtaaggtgagagcaagcctgtaactgagctcttccagcccagtctctacaggggatctcccactctgcagcagcacctgtggctctggagcaccaccccgggagggaacccagcaggacgggaaaagccagggaagcctatgtctcctcccaggggcctcggctttgagaatgagctacccctgaactctcatctgttgtcaagatgtgtgttttatttccacagtggcaggtggtcctttccctaaaatctgttccctaattttaagagtaatacgttcattatagaacatttagaaaatgcaaaatagtattttctaactcccatttccatattggttatttccttccattttctttcctacatatatgcacaggtttaacataattcgtaccttaccctacatacagtttggcattcttgatgttttccagttcacgttatatatgagaatgtgccaatcc

SEQ ID NO: 827448 - DNA, 505 bp, Homo sapiens
gttctggcccatggtatcatgaagttacagtcaagattgaacaggggctgcagtcagctggagctggagaaaccacttccaagttctctctttgtggccgttggcaggatgcctcagtttcttcccatgtgggtctctgcgtagggcagcatgagtgtcctcacaccatgacacctggcttctccctgagcagctgattccagagatcatggggcagggccaggagaaagctgcagtgccttttaagacatagtcttggaaaggacacaccgtcacttcttatcctagttgttagaagcaagccactaagttcagcctgcactcaaggagagaggaattacacatacctctaccccaatggagcagtagcaaagaatttatggacatatcttaaaagcaccacaccccaactggggatgaaagtaggtcaacagggaggtaggtttaatctakataagctgaaagatagattgctatcaaaaacagttctccaagatgtgcatag

SEQ ID NO: 827449 - DNA, 606 bp, Homo sapiens
acacatgtatgcttccatgtatatggtattctggaaagacaaaactataaggaaagatccacggttgcgaggatagggtggagaaaaggtttyactatgtggggcaatatctgggagctatttgaggtgatgagactgttctgtttcttgattgtggtggtagtcgtgtgactctacacatgaattaaaacccatagaactgtaggccaaaaaaagagacttttacttcatgtgaattgaaataataataataaactacaggctaatcccaaattaccaacacccagttttccaacaccctgcccatgttgctgctgtcatatgcaaagtgagattgtttttagtcctcagagtagctaaggtgctcaggagtgtttcttgtgcttgggcgtaatttattcaaatcaactgagcaaatacttattgaccttttattattttccaggcactattcaggcactctggatacatctgtaaactaaacaaactaaaatccatgacctgggtgtgaggggaagggtgtagacataaagataaacacaataaataagtaaattaaaattaataattattgtgtataatataacatattaatatataacataa

SEQ ID NO: 827450 - DNA, 625 bp, Homo sapiens
ccttcccaaggccttttttctgaggctccaactctctcttccttcatccacctaagcccagcccctgcttctcttctcaaaacaraaaagtaacatccaccctcttgccttgaatatctcatctcccaaaacttggattattttatgtggtaactgcattatttcaatttagggtgagagttgggatgcagtctgtatgaaccaaaaggcaaaaataacatcacaatgtattattcaaaagaattaaaaagaaatgtctatgatttccagtttttattaccagcacttcacttattgctttggggacttctgggtttgttctggtttgttttggttttgcttctttccccccaacatagcaggaatacttaaaatctaaatatgcaaaaaagaaaaactgaaagttttcaaaagggagaaatgctgatcttgtctaatgatgccacaagtttactccaaaattgctcaataccccgtaatggaggagagaaaattgatcgtcctcattatcactgcagctctgtcaataccaatattgccttgttttgaataaaatgcgctgtttttttcaacgttagttccagtaaaatggggttttagtgaagatagcagtagcaggaaacca

SEQ ID NO: 827451 - DNA, 607 bp, Homo sapiens
tgtctgtttgcttttttagtttttagtttttaggttttttttgagacaaggtctcactctgtcacccaggctggagttcaatggcacratcatggctcactcactgcagcatcaacctcctgggctcaagcaatcctcctgtttcactcttccaagtagctgggactacaggtgcacaccaccatgcctggctgattttttaaaattttttgtacagatggagtttgctgttgtctaagctggtttcaaacttctggcttctaacaatcctcctgccttggactcccaaagtgctgaaattacaggcatgagtcaccataactggccctatttgctctttttaagagactaccatgagaagtcacctggattttgaccagaacctgagattttccactgaggaataacagaaatactttgtgtaaggggctcagtgggaaagagcataggaaacagattttgaatgtatttgggatgtccaatgtgttataatttaacaaagcaagagtcctactttaccaatttccttgttggtggaaatggctcttttcaaatagcctgcccttatgcaatgctatccagggctattagtgctgtcaatatttta

SEQ ID NO: 827452 - DNA, 607 bp, Homo sapiens
tgtctgtttgcttttttagtttttagtttttaggttttttttgagacaaggtctcactctgtcacccaggctggagttcaatggcacaatcrtggctcactcactgcagcatcaacctcctgggctcaagcaatcctcctgtttcactcttccaagtagctgggactacaggtgcacaccaccatgcctggctgattttttaaaattttttgtacagatggagtttgctgttgtctaagctggtttcaaacttctggcttctaacaatcctcctgccttggactcccaaagtgctgaaattacaggcatgagtcaccataactggccctatttgctctttttaagagactaccatgagaagtcacctggattttgaccagaacctgagattttccactgaggaataacagaaatactttgtgtaaggggctcagtgggaaagagcataggaaacagattttgaatgtatttgggatgtccaatgtgttataatttaacaaagcaagagtcctactttaccaatttccttgttggtggaaatggctcttttcaaatagcctgcccttatgcaatgctatccagggctattagtgctgtcaatatttta

SEQ ID NO: 827453 - DNA, 610 bp, Homo sapiens
tcttttccagaagcatacccatggcggcagcctccatctcctgaaactggtgctttaraaaacctgaattgccacctgatgaaggtggtgtctgagaggggaagctgagattcagagaggcaaagtggcactcaccagtttcctccaggctcactgagggtcacaaaacccatctcccagattgattgcaagaatgaaatgtactgaacttcatgcgattaacaagagacggagccaaagtttaaatctcactcttaccccaaagccttgtccttttcattacagtcagtttaaaataaaattaaatggccaaataaactttaaaagtagttttaataaaaagactaaatataaagaccagaagtttcacaaaaagataacatagttttgaaatagtttgatgaattcatatcaagtaacttactaaaaaagtaagataaaaaagcaaacaagagtgaaggaatgcagcgttgtttgcaggagagaggtgggataggacccacagccagaggcgcaggcagcctggccagggagagatcaagggcgagcctacaggctccccctcgacacttccctgggcaggttttctgcaggggtccagcggcctaac

SEQ ID NO: 827454 - DNA, 624 bp, Homo sapiens
tactcaccagggaaggacccaggaatgctgaagctgcccaccaggcacagcttatacccaagctcatcttcctattcaatgagccgagcctcatcccctccaagatcyccaccatcattggcatcctggcctgtcagctgaggggccacttcagcacccaggacttgctcaggtaccacaccaagctgcccagggggaagagcagggccccagggctgtttaaaaagggaggacagaccccagctctctccccattgtgctcaaccctgaatcacttggaaccttctaggaatttttgctcagggctgagagttggggaaaggatggtttgctgaagtcaggatgggacaggccggtttccccagcagggctgtgtgtttactgttcccactgctcaggctcccccactgtggccaaatattcaggaatttccataagcactgccatccttggcagccaatgacccacatgcctggctcctgcagactcctgaagagcagtcccagccaccagtgtgtttccccttctctttcctgtcactatctgattgatcaggtagagccagagttagcgtctctggtgaatcctgactgattttagaagtctctggaaatacacagcatg

SEQ ID NO: 827455 - DNA, 583 bp, Homo sapiens
tgagaaggcatggtgcctgcaattttaaaggatttgtcttttgctataccagtgtggatttttttttaagtagtcattcttcatgtactcatgacaattgaatttaataaaaacatcacagttcgaaaaagacaaattagaaaccaccgttcatctcagaaattaatatgtgagtgaatttaacaagagatgaattgcactgtggtggtctggtccctcttcacccgctcggagcgccagttgtttgtcattatagctggaaatatgattattactctggtattacttgacatttgttaaggatccaggggctgcatctccatagcagagaaaagtgcaattacctgggcactcagagaaaagagccttttctggcctgagtcatccaaatacacgtcccccaaagacccctgagccccgaccatagcttgctgtggagcccaggctgtccsgtcactcagtacacactgtgccttcttcctcaagggcagccagcattttctgggctcacataaggatagtatacacatgatttaccaacaaacagggacagcatttcatctcctggtgttctcattaattg

SEQ ID NO: 827456 - DNA, 642 bp, Homo sapiens
ttcaaagccaagccttaaaatcaagagggacagaagtgctcagcaaaccacctgcaatttaactgagttcaaggagttaaaaggtcttaaaattaaccatgaaaygtgaaaaatatatgaatggtcttcaaaaacaacatttgggaaactttatgtcagaaataccaacactgtggttgccaagagtgaggcattttgcgatgactaacaaattaaggcatcttaatgtgaaaactgattatataatgcataatcaagcagagtaaggaggaaacagaggtatgctttctcattaattctggcttagaactacattgcgtaacatcaccagatttatgaatatagagcaactttaaaaatccacggatgttccctgaatcaaatcatttttatagctcaaagaggctgtcatttcaaatacacacatttattcaaaatatttttattgtctctatttactataaaatctcaaaactatagtagtcaggatggtcagcaaggggtaattggtccagaaaaacaattcagaaaagagaaatcagagaaaaatggctcattttcagtgatgctgcctctagttcatgttggggatttttttctttatgtatgtagctacacagggttctgctatacaaataagtt

SEQ ID NO: 827457 - DNA, 642 bp, Homo sapiens
ttcaaagccaagccttaaaatcaagagggacagaagtgctcagcaaaccacctgcaatttaactgagttcaaggagttaaaaggtcttaaaattaaccatgaaatgtgaaaaatatatgaatggtcttcaaaaacaacatttgggaaactttatgtcagaaataccaacactgtggttgccaagagtgaggcattttgcgatgactaacaaattaaggcatcttaatgtgaaaactgattatataatgcataatcaagcagagtaaggaggaaacagaggtatgctttctcattaattctggcttagaactacattgcgtaacatcaccagatttatgaatatagagcaactttaaaaatccacggatgttccctgaatcaaatcatttttatagctcaaagaggctgtcatttcaaatacacacatttattcaaaatatttttattgtctctatttactataaaatctcaaaactatagtagtcaggatggtcagcaaggggtaattggtccagaaaaacaattcagaaaagagaaatcagagaaaaatggctcattttyagtgatgctgcctctagttcatgttggggatttttttctttatgtatgtagctacacagggttctgctatacaaataagtt

SEQ ID NO: 827458 - DNA, 704 bp, Homo sapiens
acaatattatgcatccattgtatttgtattttttaattaattctatggggcaatgtgtgatatataaaatacaaagagaaagtaaactatataaaattatatatggttgatacatttgccgatgaaatgacataatgattgccatttgcttcaaaataatatgtgaggggaatgaagtgggtgtgacagagatgaaacaagatggatcgtgaattgataattactgaagttgggtgttagggacacaaaggttcattacattattttttctacttttgataatgttacaaatattctataataaaggtttaagaagcctatatatacattgtggttctaattataaatctatatatacacatatatatattataatataactagtgttttataacatatgttcatcttgaagaagacatcaccaaaatgttaaggctggcccaaagtggttgatcattccttattcattaatacttttctaatcaaacttctaagtttataggcatcccaggtcttccaagatactactttaaaatgttaccttttttctaattcatgctttcaagtggcaattcatataattaagaagaatatgctgatcatcactctactttattgtktcaaattatcttgaactcttaaactcataatcctacataagatgactatttctaccatggcaatccctgtggttatttgttcaa

SEQ ID NO: 827459 - DNA, 587 bp, Homo sapiens
ctactttattgtttcaaattatcttgaactcttaaactcataatcctacataagatgactatttctaccatggcaatccctgtggttatttgttcaatgcccactgccttctgatgcaactggctcccagtacaccagaaaggtcctttattggctgagcacattgatgggtggttgtatgcagtttgaataaagataggagattattaggtaaaatagagggaaaagaaacctaaagttggataatgataacctagaggaaaggtagtcagaagctggggaaggtgaatgcttcttagtcctgagaagactaaagtgtaaagaatctccttggcagcatggtagtgtcagaggcctttgaaccagagcaacttcatcttaaataggggctgggtaaaataaggctgagacctactaggctgcattcccaggagattaggcattcctagtcacaggatgagatgggaagtcggcacaagatacaggtcacaaagactttgctgataaaacagattggggtaaagaagccggccaaaacctaccaaaatgaagatggyatcaaaagtgacctctggttgtcctcactt

SEQ ID NO: 827460 - DNA, 584 bp, Homo sapiens
agagaagataagcactaattattcaatcaccaatccccatgtttatrgttgcaaagtgcaatcaagaattaatttttaagctagtctcaaaacacctaagagaagatagattaaagatgcagaaagaaacattctaacttctttacacactgaattctatgtatctctagaaggagcctctggaattcccatgtcatcagttctttgatggaagcatttatgtgattctactcttcattcctacttatgacttaaacagcccgtatcttcagtcaggattctgcatgattaagtgccatcctagaccaatgggacgggtctcaacaggcagatcagcggcacccagagggaaagaaatccacatcagatcccaacacagaccataatcttttgaccataccatgtagatttcttattacattcatgagactggtttcagagccctcttcttaccttatcctaaactttctctctagatgatctcaaatgctgtcataactttaaatatcatctctaagctgaaactccaaattttaaatctcgagtccacacctctcctcttaaattcaaactcacatatacaa

SEQ ID NO: 827461 - DNA, 584 bp, Homo sapiens
agagaagataagcactaattattcaatcaccaatccccatgtttatagttgcaaagtgcaatcaagaattaatttttaagctagtctcaaarcacctaagagaagatagattaaagatgcagaaagaaacattctaacttctttacacactgaattctatgtatctctagaaggagcctctggaattcccatgtcatcagttctttgatggaagcatttatgtgattctactcttcattcctacttatgacttaaacagcccgtatcttcagtcaggattctgcatgattaagtgccatcctagaccaatgggacgggtctcaacaggcagatcagcggcacccagagggaaagaaatccacatcagatcccaacacagaccataatcttttgaccataccatgtagatttcttattacattcatgagactggtttcagagccctcttcttaccttatcctaaactttctctctagatgatctcaaatgctgtcataactttaaatatcatctctaagctgaaactccaaattttaaatctcgagtccacacctctcctcttaaattcaaactcacatatacaa

SEQ ID NO: 827462 - DNA, 448 bp, Homo sapiens
ctgcagataacatcactattacagagcgagcctaagattggccttttgagatatcttttcaggtttttacatttctgaggacagtctacccctgcccatctgtcatgtggccccacccaaactgactccttgtcccaccaaactatccttgaaaaaccctagcctctgaattttcaaggagattaatttggtaataactccatctctcacatggcatagctgaccttgtgtctattaaaatctttattgcaatgctgtggtcttagtgaattggctttgtgcagtgggcaggaagaacccattgggtcgtttccggactgtcatgtcagtttgattaatcagtagatcaacatactttgttttagatcycataaattcagctttcttattagtagctgtattagtctgttcttgcactgctatgaatacctgcgactgggaaatttat

SEQ ID NO: 827463 - DNA, 644 bp, Homo sapiens
aaaatatttgctccagttaaaaaaataaaagttatacatgacaatacaygtagaatattgactttagcaaaaatgaccgcgttattttaagggaaaattctcttctctgatatgttttgttatcttcaaattactcatcctacctccctagttcactgagtgtaaaaagaagagaagagattagtagcagattcagtagcatttcagagctcaagaggacaaagtaaactggtgctaatgctgaaaatttcacccatctgtgattgctcctatgtccaggaaatgcctttaacaatttggcttagaaatgccattggctgagatacatgagggcagatgctgcaccctgcttaggtgctatttgattaggcccattttgctttatggcaaaggtctagcaagaatccactttctaacacagtggataagagctgtttctataaacactccaaatgtattttcttgttgaaagcatggtgtgcacttcaaaaagattgctcacaattgagcaaggcatcctttcataaagctctttaagatataatgccagacttacttcatggggggctgctgctgaatgctgaaatgaattacaggaagtgttatgaggagcatgctgagactttagaaaacgcagacctcta

SEQ ID NO: 827464 - DNA, 550 bp, Homo sapiens
cagattaaaataagccaaggagagaagttcatgggacatactcccagaatatcaccggttcttgtcattgggattgcctcaacgaaagatttttaaacyttactaatacactgggctctcttcctcaggtgagagaaagtttgaagctggtacctgaatttcctacttaaagcatctatgagaaagagtaaagccagatgctttgtaataagtgtcatgagagtagatggaaatagcccaatacagtatgcagacaaaccaaagggcacgtgttaagacatttaacacttgtagttgtgacatttcaggatacagagagtatttatggaagataccatgacattcagatgaggaattaagagctgtatccttgagtgagaagatactgctgtgaggtcgtgagtcagtctcagctagacagtctcataacatccttactagctaataaggtgaagcacagatgttactgccacagctgttgatttaatttgtctcaatgtctttaatccatttgatgatcggtgagtaaggagggaattcactgactccc

SEQ ID NO: 827465 - DNA, 643 bp, Homo sapiens
aaacgtcgagtcacttggctgagaycatacgcatcttccgtactgcttgtattaggatgcaagattgaatgtgtcttttttttaaaaatgcagccttgtgttgcactctgaaataagtgatttaaaaagaaaaacatgatacagagatcccatcctgaccttggaggcttggataaagctgtggggagacagcctcatggtccagccaggctagtccgcctgcttcaggactctcaagatctccccaagactttcaggatcagctgctgttaatcaaacaagtgcttataaaatggaaattgggacaaaggaaatgttaaatttcctccctgcaaccaggcagatgagaaatatggaaataaggaaaagggaaaatgaagatatgacaaagttgatgaaaaggttgaaatagtgatttatacatgatgggcaatcaagtgccccttttgccctgttttttggagagggtgtatcattgcctcaatggtgcgtctgcctgcactgagggcattacacatggctgactcgacctccctgcctctcacactctgtgtattttgtgaagctccacaaacggggtcacgtcatccaggtgaggccaccaccggtacagaaacctctcggcaatggttcttagccaggg

SEQ ID NO: 827466 - DNA, 626 bp, Homo sapiens
gctcagatgtgtgcatggacttcaaacagctggctgagggtggctgagtgcacctggctcagatgygtgcagggacttcaaacagagctggctgagggtggctgagtgcacacggctcagatgtgtgcagggacttcaagtagggctggctgagggtggctgagtgcacgcggctcagatgtgtgcatggacttcaaacagctggctgagggtggctgagtgcacctggctcagatgcgtgcagggacttcaaacagagctggctgagggtggctgagtgcacacggctcagatgtgtgcagggacttcaagtagggctggctgagggtggctgagtgcacgcggctcagatgtgtgcagggacttcaaacagagctggttgagggtggctgagtgcacgcggctcagatgcgtgcagggacttcaaacagagctggctgagggtggctgagtgcacgcagcgcagatgctgataagaggctgccaggcgaccctcacatgccacccgggccctggctctgcagtggccatgcacacagcatggtcaccaccatcttttccaaacgtcagctgacgctttaggcagccacccctccccatgctgcccgctctgcgtatcatgctgg

SEQ ID NO: 827467 - DNA, 626 bp, Homo sapiens
gctcagatgtgtgcatggacttcaaacagctggctgagggtggctgagtgcacctggctcagatgcgtgcagggacttcaaacagagctggctgagggtggctgagtgcacrcggctcagatgtgtgcagggacttcaagtagggctggctgagggtggctgagtgcacgcggctcagatgtgtgcatggacttcaaacagctggctgagggtggctgagtgcacctggctcagatgcgtgcagggacttcaaacagagctggctgagggtggctgagtgcacacggctcagatgtgtgcagggacttcaagtagggctggctgagggtggctgagtgcacgcggctcagatgtgtgcagggacttcaaacagagctggttgagggtggctgagtgcacgcggctcagatgcgtgcagggacttcaaacagagctggctgagggtggctgagtgcacgcagcgcagatgctgataagaggctgccaggcgaccctcacatgccacccgggccctggctctgcagtggccatgcacacagcatggtcaccaccatcttttccaaacgtcagctgacgctttaggcagccacccctccccatgctgcccgctctgcgtatcatgctgg

SEQ ID NO: 827468 - DNA, 626 bp, Homo sapiens
gctcagatgtgtgcatggacttcaaacagctggctgagggtggctgagtgcacctggctcagatgcgtgcagggacttcaaacagagctggctgagggtggctgagtgcacayggctcagatgtgtgcagggacttcaagtagggctggctgagggtggctgagtgcacgcggctcagatgtgtgcatggacttcaaacagctggctgagggtggctgagtgcacctggctcagatgcgtgcagggacttcaaacagagctggctgagggtggctgagtgcacacggctcagatgtgtgcagggacttcaagtagggctggctgagggtggctgagtgcacgcggctcagatgtgtgcagggacttcaaacagagctggttgagggtggctgagtgcacgcggctcagatgcgtgcagggacttcaaacagagctggctgagggtggctgagtgcacgcagcgcagatgctgataagaggctgccaggcgaccctcacatgccacccgggccctggctctgcagtggccatgcacacagcatggtcaccaccatcttttccaaacgtcagctgacgctttaggcagccacccctccccatgctgcccgctctgcgtatcatgctgg

SEQ ID NO: 827469 - DNA, 578 bp, Homo sapiens
ttttttatacaatgacattttttcctttgggtagatacccagtagtggattaaatggtattctatttttagttatttaaggaatctccatagtgttttccacagtgattatactagtttacattcccactagcagtgtaaaagtattccctttttaccacatccatgccaacatttaataatatttttaatttttttaaattgttgccactcttacagaagtaaggtggtatctcattgtggttttaatttgcatttccctgataattagtgatgttgaggattttttcatatgtttgttggctatttgtatatcttcttttgagaattgttcattcatgccctttgcccactttttgataggattgttttttccttgctgatttctttgagttccttgaagattctgtgttgtaggaagtcagggaccccgaatggaaggaccrgctgaagccatggcagaagaacgtggatggtgaagatttcaaggacatttattagttccccaaattaatacttttataatgtcttacgcctgtctttactgaatctctgaacataaattgtgaagatttcatg

SEQ ID NO: 827470 - DNA, 578 bp, Homo sapiens
ttttttatacaatgacattttttcctttgggtagatacccagtagtggattaaatggtattctatttttagttatttaaggaatctccatagtgttttccacagtgattatactagtttacattcccactagcagtgtaaaagtattccctttttaccacatccatgccaacatttaataatatttttaatttttttaaattgttgccactcttacagaagtaaggtggtatctcattgtggttttaatttgcatttccctgataattagtgatgttgaggattttttcatatgtttgttggctatttgtatatcttcttttgagaattgttcattcatgccctttgcccactttttgataggattgttttttccttgctgatttctttgagttccttgaagattctgtgttgtaggaagtcagggaccccgaatggaaggaccggctgaagccatggcagaagaacgtggatggtgaagatttcamggacatttattagttccccaaattaatacttttataatgtcttacgcctgtctttactgaatctctgaacataaattgtgaagatttcatg

SEQ ID NO: 827471 - DNA, 524 bp, Homo sapiens
tttctcccactctgtgtgttgtctgacgattatttcttttactgagcagaagctttttattttaattaggtcccawtcatttatgtttgcatttgcttttgggttcttggtcatgaattctttgactacaccaattagaagagttttcccgatgttatcttccagaatttttagggtttcaggccttagatttaagtctttgaaccatcttgagttgatttttatataaggtgagagatgaggaccagtttcattcttctacatgtggcttgctgttatcccagcaccatatgttgaataaggtgtcttttttccactttatgtttctgtagtaaaccagcttagtatatgaaattatctgatagaaataaaccgtcaaagaagagcagaaagattcagatataaagatatattttgcagaaatatttaacatagtaaaaactgaaagacacctaatatttttacttatgtagtaacttattatattttatatgacactatataaactgtgttttcaaagaata

SEQ ID NO: 827472 - DNA, 181 bp, Homo sapiens
tattgtgaatagtgctgcgatgaacatatgagtgcacatgtctttttggtaggatttattttcctttgggcatgtacccaataataggattgctgggtcaaattatagttctatttttagttctctgaggaatctccaatygagtttccatattggctgtactaatttacatcctcttcaa

SEQ ID NO: 827473 - DNA, 551 bp, Homo sapiens
cacacaggagtaacacttgrgtcaaagaaatttcctaaagaagataatgtctaagctaagtcctcaaaaactaaaagtgaacagtcattggaagaaaggcacttcaggcagaggaaccagcatgtgcaaagctctaacagcaatagaaagtctggtgcactgtgcaagcagttcaatctggctggagatgaagttcaagttaggggtaatggggaattttatgtgtcatcttgactgggctaagggatgcccagatagctgggtaaaaacaaaacacacacacacacacacacacacacacacacacacacacacacacacacactttacttctgggtgtgtctgtgaggctatttttagaaaagattggcatttgaatctgagtaaagaagatctaccctcatcaatgccagtgagcatcattcaatccattgaagtttcaaatacaacaaaaaagttggaggaagcatgaattctctctctcttttcttgatctaagacatccatctgctcccattctcagacatcagagcccctggttcttgagcctt

SEQ ID NO: 827474 - DNA, 583 bp, Homo sapiens
actgttgaatttttaaagttcttcatatattatcgacattagtcctttgtaagatagtttgcaaacttctttttaaakcttaataggttctttcagagagcaaatatttttgttcttttaaattttgatgaagcacattatatcaaaaattatttttaatgtattacacttttgatactaagtctaggagctctttgccagcccttgatttaaaagattttcttttatgtcttttgcaaaagtatagtagttttacattttacattcaagtccttgatctattttgagtttgtataaaatgtgtgagatttaggttgagggtatttatttatttattgcttgtgaaggcaattgctccagcatcacatgtttaaaatgctgtctttccttcattgaattacttttgcatcatcataaaaaagtcatttggggtgtagcttgtatgggtccattttctgagttctctatttcagttccattgatctacctatttattcctctgctactatcacgaagtcttgaattctgtactatataataaattttgaaattggatggtgacatccaatttctgatttaggca

SEQ ID NO: 827475 - DNA, 628 bp, Homo sapiens
tttagtagagatgggtttttgccatgttggtcaggcttgtctcaaactcctgacctcaggtgatcygcctgcctcagcctcccaaagtgctaggattacaggtgtgagccaccatgcccagcccatatgttgaatttttaaacactgagtactgcagaacccaggaattatttggacatagggtctttacatgggagttaaaatgaggttgttgtgaagggaccctaatccaatttgactaatatccttgtaaaaagggaaatttggagacagacacacgtagagggaagatgatgtgaagagatcaaagaagaagacaggtgtctacaaaaccaggaaagaggcctggaatagatgctttgttcatagccttcagaaggagccaaccctgctggcaccttagtgttagacttctatcctccagaactgtcagacaaaaaatgcccattgtttaagtcacccagtgtgtggcactttgttatgatgtctctagcaaactaatataccttgtgaccttggcagttctgtcttcctgcctctgtaaaatgcaaatattactgatatattacctcctagggcttctgtgaagaggcgatgagttaatacatgcaaagtgctacaacagtgc

SEQ ID NO: 827476 - DNA, 628 bp, Homo sapiens
tttagtagagatgggtttttgccatgttggtcaggcttgtctcaaactcctgacctcaggtgatccgcctgcctcagcctcccaaagtgctaggattacagrtgtgagccaccatgcccagcccatatgttgaatttttaaacactgagtactgcagaacccaggaattatttggacatagggtctttacatgggagttaaaatgaggttgttgtgaagggaccctaatccaatttgactaatatccttgtaaaaagggaaatttggagacagacacacgtagagggaagatgatgtgaagagatcaaagaagaagacaggtgtctacaaaaccaggaaagaggcctggaatagatgctttgttcatagccttcagaaggagccaaccctgctggcaccttagtgttagacttctatcctccagaactgtcagacaaaaaatgcccattgtttaagtcacccagtgtgtggcactttgttatgatgtctctagcaaactaatataccttgtgaccttggcagttctgtcttcctgcctctgtaaaatgcaaatattactgatatattacctcctagggcttctgtgaagaggcgatgagttaatacatgcaaagtgctacaacagtgc

SEQ ID NO: 827477 - DNA, 628 bp, Homo sapiens
tttagtagagatgggtttttgccatgttggtcaggcttgtctcaaactcctgacctcaggtgatccgcctgcctcagcctcccaaagtgctaggattacaggtgtgagccaccatgcccagcccatatgttgaatttttaaacactgagtactgcagaacccaggaattatttggacatagggtctttacatgggagttaaaatgaggttgttgtgaagggaccctaatccaatttgactaatatccttgtaaaaagggaaatttggagacagacacacgtagagggaagatgatgtgaagagatcaaagaagaagacaggtgtctacaaaaccaggaaagaggcctggaatagatgctttgttcatagccttcagaaggagccaaccctgctggcaccttagtgttagacttctatcctccagaactgtcagacaaaaaatgcccattgtttaagtcacccagtgtgtggcactttgttatgatgtctctagcaaactaatataccttgtgaccttggcagttstgtcttcctgcctctgtaaaatgcaaatattactgatatattacctcctagggcttctgtgaagaggcgatgagttaatacatgcaaagtgctacaacagtgc

SEQ ID NO: 827478 - DNA, 629 bp, Homo sapiens
cacaggaagtaggagcacatgtccaatggcatttaattagtagacacttttgaaaactgagagaatatacaaccacccaacagtcagaatacccctccctcttctacatagagaggcgggagagactgataccaggtacctccaggtgattgaagagctaatatttagtgagcaatgagtgtatgattttgaaatagacatcttgtcacttttcagtgttttctacagatagaatagaaccaagagaaatgaagaagtgtggtggtgagggaacaggcttagatacagaatgccaaatatctcactgatggcttaggctacccgcaaattggatacaaatgctaaaatcacatccctgtggtagtgagagagagcaataatcttaggtttatggtaaggaagagatttctatgggaattctatggaggggttactcaacgttttactggtgttcaacttcagtatattgcctaacccatttaaagacttgtctttgtgtagtatttgatagattaatatatattttaatacatttttctacccaattttccttawtaaattaaaaaactgtggttcagagtgataaagggtattgaagttggtaccattagaatataaataacactttt

SEQ ID NO: 827479 - DNA, 618 bp, Homo sapiens
atacacaatgtcataaaatgcacgaatacccatatattaaccagaytttttcttaaatggtctcactctgttgcgtaagctggagtgcagcagtgtcatcatggctcactgcagccttgacttcctgggcttgagagatcctcctaccccagcctcccaagtagctgggactacaggcacacacaaccaggcccaggtaattttttttttcatggaaacagggtcttgctacattgcccaggctggtctcaaactcctgggctcaagcaatcctccctcctcagcctcagaaatattttggttgcaaacagctgtaaccacattcaagctaaaggaattggttttttcacacattgagatttaggaacaatgccacatctctcagcactgtttgcatttgcttagcttcattctcaagcaggccttttccctatggtgccaagatggcctctgccatctccatcgatcacttgttccaagtaaaagcaagagagacctatcttgccccaatattggaatattataatctcgtagagggtctatgatcctaatacgattccatgcctacccttggactcacaactagagtaaggaatataaggagccatggttgatgag

SEQ ID NO: 827480 - DNA, 269 bp, Homo sapiens
agaaaaaacaaacaaataaccccattaaaaaatgggcaaaggacatggacagatacttctcaaaagaaggcatacaagtggccaacaaacatatgaaaaaatgtccaacatcactatcatcagagcaaygcaaatcaaaactacaataagataccacctcaccccagtcagaatggctattatgaaaaggtcaaaaaacaacagatgctggtgaggctgtgtgtgcataaaagggaatgcttataaactgttgaggggaatgtaaactg

SEQ ID NO: 827481 - DNA, 600 bp, Homo sapiens
tctattttctgaaattgtttcatttacagagttcactcctgatgggaacatccagagacatcttcagagagctttgctttgacccccaccccccaacattttaaggcatggatctggaaataatgtagttggtttgcaaaggtaagtcttattttacaattgcatattctacaaaggcatttcactttcaaagctcctccaagacaattacctccagattgagacacaccctgctcctgaattcatgcctgcataccagccattcttaatcaccttcctttttaatccagttggaaaataaaatgtttccttgttctctgaatgtacagtactcagatgtacaatgaaaatgattgatgctccaaccgcctataaattctttgattccatcagcttttctctttctattggccatttcccattagtgtttaaacttaagactcacacatctcccatcaaataaacccccttcaccctactttacygatttcaatattttagcttctcctctccttatttacttcccatttgtctttcagtccatcctgctctattttcacttctacaattgcacagaaatgtctctgataaaagttccca

SEQ ID NO: 827482 - DNA, 519 bp, Homo sapiens
ggcctcccaaagagctgggattacaggcgtgaagccactgtgcctggccaagaatcaacttactgataaacacaacaagacagctgaatcgcaaataatagtatgctgagggaaagaagcttttaacraatgcctacctgcctgccctccttccttttcttcttttatgtttttaacctggcttaattttcttggtttcattattttaagcaatttttgcagtgttgaaaaatttgcaagtaagttttcagaaacagttaacttcaaaatcctacacatgctatacatgaagacagtaaaaacatggatggaaagaaataatcagtttatttacattttctgtttatatgataagtagtaatttagctgaggttgacaattcatttaaatgagataaaagtcatttacattgtctctgtggctgttttcacgatacaaagggatgcaaaggtagggtgttactgagcaaacaatgggcttgctgcctaatgtacatggaggccaagaccacggcactgg

SEQ ID NO: 827483 - DNA, 404 bp, Homo sapiens
ttgcttttgcctgctgtattcctttagtttttaaaatagtccaaattcctcacccttccctgaaaatgttgctcttacgttgacataatatgtctagtttcattcagyagttaatattataatatagtactcagattagagtttgcagctgttgtcgttaaatttaggtcattctaaatttacaagttagttgggaagaaaacaaccgcaaattctcaaccctcatcaccatttctgctctcagtgctcatatgaagtcactacagaaaaagacggaatgcagcaattaaacaagctcatctgtaacacgattaatttttaactctttaattcacttgtttcgcataggaaactacattaacatgacaggtttttgtttttttttttttttttttgagacggag

SEQ ID NO: 827484 - DNA, 404 bp, Homo sapiens
ttgcttttgcctgctgtattcctttagtttttaaaatagtccaaattcctcacccttccctgaaaatgttgctcttacgttgacataatatgtctagtttcattcagcrgttaatattataatatagtactcagattagagtttgcagctgttgtcgttaaatttaggtcattctaaatttacaagttagttgggaagaaaacaaccgcaaattctcaaccctcatcaccatttctgctctcagtgctcatatgaagtcactacagaaaaagacggaatgcagcaattaaacaagctcatctgtaacacgattaatttttaactctttaattcacttgtttcgcataggaaactacattaacatgacaggtttttgtttttttttttttttttttgagacggag

SEQ ID NO: 827485 - DNA, 608 bp, Homo sapiens
aaatccagcaaacagagtcgcatcttctattaccaccrtttccccgatggattcttccagggaatggaggcacaagtcagcttcatgcctggctgcatatggaagaaagcaattttcataaatcctcagctccatacaatgggaaaagctcatttagtttctgaggtaaattaatattttttgtctcacacttttttctattttcttttgtttttataattatcatacagtaaaattgacctttttgtggtgcacatttctataaattctaagacatatatataacgatcaccacaataagatacatttctatcaccctaaaaaaattcccacatgctgcctctttatcaaagcctcccttatgccaccaagcactggcaatcaccgatctattttctatccctatagttttatcttttgagaatgtcatataatggaatcaatacagtatgaactttttgaatgactttgttcactcaccataacgccactgagatttatccaagttgttgcatgagtcgatagtttcaagaaaatgtctactattttcctgccaagggacaggtttccttgggcacatcctagactcaaagaaatcattaaaaaat

SEQ ID NO: 827486 - DNA, 404 bp, Homo sapiens
ttgcttttgcctgctgtattcctttagtttttaaaatagtccaaattcctcacccttccctgaaaatgttgctcttacgttgacataatatgtctagtttcattcagcagttaatattataatatagtactcagattagagtttgcagctgttgtcgttaaatttaggtcattctaaatttacaagttagttgggaagaaaacaaccgcaaattctcaaccctcatcaccatttctgctctcagtgctcatatgaagtcactacagaaaaagacggaatgcagcaattaaacaagctcatctgtaacacgattaatttttaactctttaattcacttgtttckcataggaaactacattaacatgacaggtttttgtttttttttttttttttttgagacggag

SEQ ID NO: 827487 - DNA, 629 bp, Homo sapiens
tgctcagtcacccaggctggagtgcagtggtgtgatcgtggctcactgcaagctccgcctcctgggttcacgscattctcctgcctcagcctccggagtagctgggactacaggcacctgccaccacgcccggctaatttttctttttttttttttttttgtatttttagtagagacggggtttcaccgtgttagtcaggatggtctcaatctcctgacctcgtgatccacccacctcggcctcccaaagtgctgggattacaggcgtgaaccactgcacccagccgaccctatttcaatctttttagctttcactgaatgtttctctacctgtccgtgaatgaatggtctccctttattttccatttgtctttcacatattccaacttaacatttatttccacaactgacatttatttgataaaggtcctttgaatacattttagctctaatatgcctactctgtctttaatgtgtgacaatttcactaatggaaatacaatcatatgtgccctgtaaatctcccaagttgtctcaattctccaaagaattacatcatgtctgtccacacccaccaaacagaaaactgaaaagtgaccagttcagcttcaggctagtgttttttcatt

SEQ ID NO: 827488 - DNA, 597 bp, Homo sapiens
tttgaatattttcagatagcagagcctttgacaagtaaaagaaacaagactattgtaaacactgagcttattcgaaaagcattttttwaaaatttccaagcttatcagattatgtctatataaaactaacatttttgtgaatttccaagtatgtatttggctcattcattgtttctttttgtccacagatgtacacatttttataatgattacaacaaaataatttaaaccatccagtaggtgaagcattccccttttcccaagacagttggataaaattgaatcaaaatttaattccatgtctgaaggaagtttaacaccctcctcggaagtcttgaagcctcccaggtacgactgagtaaagcagattgctctccacattgtaggtggacctcatatcgttccttgaaggcctgaatggaatgaaagtttgagtaataaataattgtttctctatgatagtctttgaacaggatatcagtgtccttctgcctttggactcagactgggactggaacttacaccatcagctttcctggtattcaggcctttggaattggggtggacctacattaccaacttccctgggtctctagc

SEQ ID NO: 827489 - DNA, 629 bp, Homo sapiens
agctactgaacataatagatctccaagtcaaaaaggctatttttaatacattttttacatgactgttcaygtaaaaagaaacagactttcactttgagacacttattttttccttcaagcctgtcttgcagattccatcagtacaaatgtcttatttattaaaagtacaaagacagactttgaagcagaaatttaaaatgcccacctgggaaaaaccagatgaaatcttcacgatccagttctgtgacaggtgagccagcagcaggctccccatgtctcctaagatacgggcttccaccagagaaaagagaatatctaaagtgctttaatgcaacctgtccaaaagtaaactttttctttctctggtgaagaagacaaaaggaaaactttaaatctactcgaagtttgtaaaagaagcatgacaactcttgcctagtagggctgtggctagggctggttcctagagtggccatgatgatgggaggagcatgctaggattggttcctcagctaggcctccagacaagtatgggggcaccaactttgtgtaactaccttcccactcattttgagagccacagagtttgcaccctgcacttgctgtctggtggctttcaactcccattgtca

SEQ ID NO: 827490 - DNA, 663 bp, Homo sapiens
cacagattcagcactgggcacatgcgcatgatgcacataagcaaagaactaggagatggccaaggcaggacagttggtttcaggctggggaggagggagcgtgcaaggtgggcttgaaaaaaggatggtgaagggagggcattcgaggctgaagaaatggtgcctgtaatcccagagctttgggagatcaagggaggaggatcacttgagctcaggagtttaagagcagcctgggcaacatagcgacgtcccatctctacaaaaaaaaatgtttaaatagccgtgcatagggccgggcacggtggctcacacctgtaatcccagcactttgggaggccaaggcaggtggatcacttgaggtcaggagttccagaccagcctggccaacatggtaaaacctcctctctactaaaaatacaaaaattagccaggcaaagtggctaatgcctgtaatcccagctacttgggaggctgaggcaggagaatcgcttaaacccaggaggtggaggttgcagtgagccaagatcgtgccactgcactctagcctgggtgacagagtgagactccatctcaaaaaaaaaaaagccawgcatagtggtgcgcatctgtagtcccagctactcaggaggctatgatgggaggatcccttgagcccaggagttg

SEQ ID NO: 827491 - DNA, 573 bp, Homo sapiens
caatgtggcataaagtatgcaccagcagattccatttagtgtggatttcagagcatcctggaaaaatcattatccatctctcctaggttacagctaccatttcrcaactttgctcctggtaacttgcagatgttgcctatatttgcaacacaaggcctcatttgtttgagccccaattatgccaaattatgaaattctgatggggcagatctgacggttatctgttacgtttttaaacacaacagtttatcaaggtataatccccacaccgtacaatatgcccatttaaagtatacaattcaatggtttttagtatattcaaagacttgtatacccaacactataaccaattttccaattttagaatattttcatcacaccaaaaataaatcccatacctctgccagcccccagaaaaccactaatccacttttttttttttttttgagacaaggttttactcctgtcactcaggctggattgcagtggtgcaatcttggctcactgcaaccttcgccacctgggctcaagtgattcctttgcctcagcttcctgagtagctgggattacagg

SEQ ID NO: 827492 - DNA, 458 bp, Homo sapiens
ccgagagagttttaaaaaagaaagtccttgtgttttcatcagtaactttgttgtgtatcagtgttttcccttcatgtaacttaaatgtccactaatgcaagtgaaggcaatctatgcctaatttcttcactaaatattctactaataaatgatttactgacaaaatgaaattatataactgaaaaggtttaaaaatgataagaaatatcccaatggaagctgttttttaaataatgttattactgtcagtaacaaaattatgatgacacaggtccaacaccttttaaaagagaggaggtaaaaaggagagttggatatgaagaatctcagactgcagtgcagctctgagaaagtctcagccaggtacatgggtgcccgggagcagagattgcctgtyagaagggccccatgagggcagaagtgacctggctctcgtgtccctgccatgatcagtcatt

SEQ ID NO: 827493 - DNA, 611 bp, Homo sapiens
agtccatgccacctcacgtatctcagcactttctgcctcttctcccatgccacatattttgtacttgatattccagtaaaatcttaytttaaaaatagtttctacaattctatttctttatattagctctgtccatttatattcttttgggtatgaagggaaaaatacattgattttgtgcagagaattttaaagcatatatattttttatgtaaagacatttgatgacaccattgaagtaggtacatttggatgaatgtttgtataagttttaaaaaatatccctttccacattttaccattttgcagttccctcaaaattcagcctctttcgtcacaataacaacccataattcatgacaaatattattaggagagatgggaggagcaagcctgccaatctttgcgtacatttttttaaattagattatatttatttagatcattcagcatatgttggatacagagcctcctcatgaaccactaacatttctaattagggcctaggattttttgatatcttggcacaaaggctatctctgggatcttttttatcttttcatgctaatttggtgaacaagcaccacaattacacaaatcctacaaaggta

SEQ ID NO: 827494 - DNA, 568 bp, Homo sapiens
ccatccctatctaatttgcttatttgggctctatagaagtgggatggatcttggagaacgactgtggaatrtcatacatttattcaggtattggcttcagtttcagcttttgctcaagaatggtgccttaatgaagcaaatcaacgttgaccctggcatctggtatgcagctaccaacctggaaaatgcttgttttctatattgatttgcaagaaccacaaaagtggatggtttgtatgttaggaccaagaatacgctttcatgatcctacttgagggctatgtcaatatgtaagaaaaaattgtgctttttcttacaatatcttccacagggatctcagtcaccttgactttttatttacttatttatttatttttgagatggaatttcactctttttgcccaggctggagtgcaatggcatggtgtgttctctgaagaactctaacgcagttagtgaccaagattagtggtaacctgacctaaaaaatgcctcagaaaggttgaacttgggcaaatgggcactggtgatcctcagccctcagttgaagactggattcttctagaac

SEQ ID NO: 827495 - DNA, 568 bp, Homo sapiens
ccatccctatctaatttgcttatttgggctctatagaagtgggatggatcttggagaacgactgtggaatgtcatacatttattcaggtattgrcttcagtttcagcttttgctcaagaatggtgccttaatgaagcaaatcaacgttgaccctggcatctggtatgcagctaccaacctggaaaatgcttgttttctatattgatttgcaagaaccacaaaagtggatggtttgtatgttaggaccaagaatacgctttcatgatcctacttgagggctatgtcaatatgtaagaaaaaattgtgctttttcttacaatatcttccacagggatctcagtcaccttgactttttatttacttatttatttatttttgagatggaatttcactctttttgcccaggctggagtgcaatggcatggtgtgttctctgaagaactctaacgcagttagtgaccaagattagtggtaacctgacctaaaaaatgcctcagaaaggttgaacttgggcaaatgggcactggtgatcctcagccctcagttgaagactggattcttctagaac

SEQ ID NO: 827496 - DNA, 423 bp, Homo sapiens
aagcaggacctgtagtcttgcctagagcattcttttttctcacccatatccacttgaactcagtttgcttctctcactttctactctcacattaatggagttaaacaggacctcagagatcctgtatttaacaatcattgattttacagggacatgagactcatcatgggttagtgacttgctctatgtcctgcagctaaatactgacaaaatcgatgagttattggactcagagtcttgaaatactccaggtagcatttctttcacttccagtaatatcagtttattcaactcctactctggaccaggcacagatctaggtgctggggtaaacacggyaagtgaaacaaaggccttgccctcataggtcatacattctggtggaggaaacaaacaataaacaagtatctaatatgtcctgtg

SEQ ID NO: 827497 - DNA, 542 bp, Homo sapiens
gcctcaaaaataaaacaaaaacaaaaaaaaccacttaggttaaatggaacaaaaccatgggtagagagtgttaaataaaagaggaagcaaagatctcttacaacccctactgaagacattgagatttatctttcttgggagagaaagtcaaaaaaaaaaaaaaaaaaaaccgcaacaaaaaaacaaccaacctgtaggccagggaatagaatcttcagatttgcatcacaaaaatccatctgatgaaaacatgaaagaagagagactggcaaaaagagttcagccaggtggcttgtgaagtagtaaaacaataaattaagagggcctgaactacgacagtgaccacagcaaagattggatagtgggtatacttaaggctatacagaagactaaatttaaaagaaaagccttatgcacaaatactgcatggagtataacaatcccttgaatgcacagaatagctcacgagaaaggagaaggctcctacaactcagcaaaagtaaaggtgggggatggggggagrgagagcatcaagataaata

SEQ ID NO: 827498 - DNA, 541 bp, Homo sapiens
tctctattgctttttgtcccaaatttttaatcttaattgagtttgtctgtgtgcatttgcatgaggaactaaactgttgttttgatatgttaatgagagactgagttttcttagccctgaagagaaggggcattttgctccttccagctgaaaggcttccctgggtgaccgggggccccatgggagtgtctgggaggttgaccaccccatgacgtgcagcagccctgcaagggaatccccaacaaaaattaattttataaatggctcatctaggtaacacatgtaagggctaatcatctggtgttttgagccctctctgaggtcacagacctctggagggagaaactgagacatataaaagggttgaaactactcagtggtgacacactgtggagtcctgcccacaagyagcacatgttgatccaccacacaaaaaccatggaccatagctcagttcctcccttaaaaaaaaaaaaaaagaaagaaaaaaaatgggaaacaatctaagaatgatgagaaaacaaggagaatgacccccttt

SEQ ID NO: 827499 - DNA, 617 bp, Homo sapiens
atataaaataaaataaaataaaatagtgtgggctctagaatctgaattctctaagtttgaatcttggttccaccccttactaaactgtttaatttctctgggcctcagttaccttgtccataaaatggagatgcaaacagtgataacctcatagagctgtgagaaaagcctgatttaggcccggtgcggtggctcatgcctgtaatcccagcactttgggaggccgaggtggggtggatcacaaggtcaggagatcgagaccatcctggccaacacggtgaaaccccgtctctactaaaaaaaaatacaaaaaattagccgggtgtggtggcaggcgcctgtagtcccagctacttgggaggctgaggcaggagaatggcgtgaacccgggaggtggagcttgcagtgagccgagatcgcgccactgcactccagcctgggcaacagagcgagactctgtctcaaacaaaaaagagaaaagcgtgatttggtgtatgtaaaacttctagcacaatgctggcrtgggataatcattaactcattatttgcttctattattattattgttgtatagcaaagcagacagacattaaatatgtcaatataaagaattacat

SEQ ID NO: 827500 - DNA, 653 bp, Homo sapiens
aggcaaggttatggggataccaacttttaagtggcaggcagaggaagagggaatcagccaaagagacagagatagagaagtgtattatatatatgtatgcatgtttatatatatacacatatatatatttaaatttctgtacatcatgtttttttgttatataccactaagagttatatattatgatgttttgatgtcttaaaaaagggcccagccaagagcatgcctgtgatacacaaaccaaccaatcaagagccataccccctctatatggtccatacaccccacaagacaatattcctgtctcagtcaccccagggccaggtaccaggcaactagggaccatccctatagttcagagccctctgaaattattcaaactagccaatcctaaaatgtttaccctgacctgccttttctttcctaatgaaactccaataaaggctccggcctaacgctttccccttgctcctgtgttctgcctctgaccaccctggtgtctttcccatgtggctctgcgtggcgtgttgtgcttcctrtctccaggacctgtgagtgtaatgaactttgtttttcggagcctctcctgtatctccttttgtggccacccctgactgaccatcacataaaataatacagaacaataagaaaac

SEQ ID NO: 827501 - DNA, 560 bp, Homo sapiens
tggaaagatgtttcctggccaggcttaatccactcttctctatcacatcacccagtttatttccttcaagacacatcacaacttgcaatggttaattatttgctcacttattgtctctggaagttaagtctctgcgggtacggtcctgccaccttttttcacagatatagccagagcacttaacacagtgcctagcatattgtacacaataaaaatgaagaaataaatgactgaatatgtgaatgaacatgtggaaatagtttcattgaggctagattgcagagtctgaggcaagaactggcaagacaggaagctgacgtgggaaatgtgggctagaacattcaggatcctgtagccagatccaggagctgggacttgttgtgtaagcaatggagattggggtagagtgagatggggttttttgacaaaggaaagtgcataggggcttgaacttggcatctagcaatgggctagcaatcggcaagcatcccaagatctgggtagaaacagattytgaaagacctggaaattcatacctaaaacatgcattgcttaaagca

SEQ ID NO: 827502 - DNA, 552 bp, Homo sapiens
gctgacgtgggaaatgtgggctagaacattcaggatcctgtagccagatccaggagctgggacttgttgtgtaagcaatggagattggggtagagtgagatggggttttttgacaaaggaaagtgcataggggcttgaacttggcatctagcaatgggctagcaatcggcaagcatcccaagatctgggtagaaacagattctgaaagacctggaaattcatacctaaaacatgcattgcttaaagcaggtgctcagtaaatatggagttgagtgagtgggtgagtgagtgagtgagtgagtgagtgcgtgcgtacgtgcatgaaggagcctcttactaaaagccattgaagttttacatgaagagggcacagaattcctgctttctgggaaaccctgtatccctgaagtgttcttctmcaaattttgggaagcaagtcccattactaggaaccctcactgctttttcttttttttccctcttgcactctcctgaaccaaggagaggcagatctgtgcactcctgggagaagactgccccaccaaatggcca

SEQ ID NO: 827503 - DNA, 598 bp, Homo sapiens
catgtagagtcagtcttagccaaacagtggtgtgggtgacacatccgggtgctttctggctttctgccgtggtggcaggcggggctgtctgaaccacacactgtttttatgaaacagctttctcttttcaagggctcttacgtttgcttccattgctggtcttggaacaactctcaggttggtatcatttcatccatttacagttgagcaaactgaggagtggcattggtaggtgagttgcaagagatgacactattcctatactggggacctgaagatgagctcctgccatctcacaccaagccctgtgcctgtcctgtgaggccctgcaaactgggcccaggctatgtgagcagggtgggggacactaggccagtccaagccaccataccagtgctcaaatgtggaggtggtgaagccaggtaggacaaggagaaacatccccagggtgcaggagcacagtaaaacatgcatrtcggaaccctcatgcttcctaaaagccaggcttttagggccagggccaggctcaagagtagcctgatctttggtgtctctggaaatcaggttgtcagagagataggatcctttgtggaataag

SEQ ID NO: 827504 - DNA, 598 bp, Homo sapiens
catgtagagtcagtcttagccaaacagtggtgtgggtgacacatccgggtgctttctggctttctgccgtggtggcaggcggggctgtctgaaccacacactgtttttatgaaacagctttctcttttcaagggctcttacgtttgcttccattgctggtcttggaacaactctcaggttggtatcatttcatccatttacagttgagcaaactgaggagtggcattggtaggtgagttgcaagagatgacactattcctatactggggacctgaagatgagctcctgccatctcacaccaagccctgtgcctgtcctgtgaggccctgcaaactgggcccaggctatgtgagcagggtgggggacactaggccagtccaagccaccataccagtgctcaaatgtggaggtggtgaagccaggtaggacaaggagaaacatccccagggtgcaggagcacagtaaaacatgcatgtcggaaccctcatgcttcctaaaagccaggcttttagggccagggccaggctcaagagwagcctgatctttggtgtctctggaaatcaggttgtcagagagataggatcctttgtggaataag

SEQ ID NO: 827505 - DNA, 627 bp, Homo sapiens
tatatatcatttgtatcttaataaagcaaatatatgtaatatataataacgtaaatatatatatgtgtgtatgatatgagccaaaaaaagacataagaaagaaaacctcagactctaagtagactcaatgaaaacacgatttccttagcactcaccacaccccatccagaggaaactgtggttagaatgtgagtgtgtaggccaggcgcggtggctcacacctgtaatcccagcattttggggggccaaggtgggcggatcacgtgaagtcagaagttcgagaccagcctggcaaacacggtgaaaccccgtctgtactaaaaatacaaaaaattagcctggcgtggtggtgcatggctgtagtcccagctactcggaaggctgagacacgagaatcgctcgaacccaggaggtggaggttgaacccgggaggcagaggttgcagtgagccgaaattgcgctactgctctccagcctgggcgacagagtgagactctgtctcaaaaacaaacaaacaaacaaacaaacaaacaaacaaacaaaaacaatgtgagtgtgtattgctttggagcttcttctttgaatgtgcatgtgtgtgtgtgtgtcctrgatgggatcctactgcta

SEQ ID NO: 827506 - DNA, 578 bp, Homo sapiens
gtatccttctagagatatttcatgcatctgcaagcaaatacatataactattctttttcctcttgttaagtatgtagtagcytgctatacagactgtttttctttttctttttttttttttgcttaagaatctttgtgtggtgattttatagatacgtctgccaaattctttgatacttgtcctctcaagaggtgcagctaaactccctttcctttgactgtgggctggaattagtgatgtgcttctagcagatagaatacagaggacttgatgggctaacacttctgagattaggttacaaacaaactgcatcttccgtcttgggtatgttctttctttctctccatctatctcatgaatcacttatctaggaagccagctgccatgtcctcaggacactcaggcagcctggggaggggcccagctagcaagggactgagggtcccacagctgagagtgtagaagccgatcttctgagacctgccaacagtgacatgagcagtctcggaagcagacccgagtcctccccaaaaggccttgagagggctgcagtccctgcccacagcttgatgccaac

SEQ ID NO: 827507 - DNA, 608 bp, Homo sapiens
ctgcgaggtcctctcaggtcctggggaaaggcgaggacacacgatagaagcttgctcggggtgtggagagctggcagacaaagctgcactcytcagcccgggtgctaagctcacaccaccctctgtctccttgttcaccccagaggcatcaagctctatgttttcagctttttttcatgaaaatgaatcctgttgttctatcctgaatacaagctttctgaagacagggggcctcttttgtaccttgcaaagtagcttgtacttagcaggtgctcattaaatatttgttgctgacaagcgtttgaggaaagtgatgaagatgggctaattcgcatgatccctttaatgatttgatctgatggcctacagttttatcttttaggttgctgtcctcctctctctctccccgtttggtgggaacatctcaaggtagcaagattgaaaggcagttgccacagaagacgttaaaacatactttaagagatgaatgtgtcacttctcccaggagcagttgcttttaaagagaagatagaagaaagccactggtgctggctccccaccccctctgcccccagcctctctttctctctctttgttattctgagaca

SEQ ID NO: 827508 - DNA, 392 bp, Homo sapiens
gaacatattcaggtgcagacctcrgccctctgcatgcagtagaggtgaaataagtcatcgtggaaggaatgagtgaatggagagaatctgcgctcagaatcccaacgatggaattggaggaatgtggaccctggagtctggataatttggtattatgttctggctcgaactcatactagctgtatgattttaggtacatttctcaaccttctgaatctccattttctcatttgcaaacagaggttggataggaacactcactgtacaggtttatggagcggcatttagggaaactatgggcagcccctggcctggtgctagggcctgtgttaaaagtcgctttccgtttatagtcctggagtcacccttattaactggattctacggttact

SEQ ID NO: 827509 - DNA, 645 bp, Homo sapiens
ttgggcctgaattaacattcataaagcctgggagatgttattagtcttgctactttctatttggctatgcaatatatagaagggaagaatagggagaaaaaacctacccaaattctgccacatgctgaacagttcataggccatcattacacgcatgtccccatacctaagaatagtaacacaggagccaaccgttagtgggagaaggttcaggaggatagggctgcaaacccatgaggccaggacttcagcactgtttgtttctaatgcttcccaatgcgctaagcctttgggctctcgactgaactcccacacttgggcccctgggaaaccacccagctgagaaccttgtggacctctgaaagaactctcaacgaaacatagccctatttggccaagtggtaaggagatgaatataagacgtttatcttacttatctagaatcttcttccttttggctgaggtgataatttctagctgaaggcttggctgatttatgaatagaactgccaggctaaagtaagaattccacacctagacagacagagaaagakaaaatgtgacagtctaagaacttaatcttgtagggagcgttactaaatacatgcatgtagcatagaacccattttacaatcttaagatcct

SEQ ID NO: 827510 - DNA, 617 bp, Homo sapiens
atggctcctggctatcctcccctgcctgattgttacccatagtatcagtcctttctaccactggctaaagtatagtaactccttctaagccaatgttggtggcaacrttgattgaattaggatcctctaatagtattctcttttttggtagttactaagcatagattttttgaactgttttaagtaaaaagagctgagtggatgcactgtatgtgggtttgttcagaagaagggaatcttaaaactgtggccttaggaagaacctgtggtcttccatggtcgtgaccattgtcagcatccctgcttggacaggttccctgacaaggcagccctttgtattgctgggtagctccaattgacaggggactgttctcattttgagttaactccactgtctggtaacttcttttcatgactactgttctgctgttaaaacaaacaaacaaacaaacaaaaaacagttttgctttatttctgtcctcttttaatatcacatcacctgcaacaagtactggacctgtgtttttgtccttttccacatgtttaacaggtaacagaatgttttctcaagcattatcagactgaaggggcaaaatcaaatcatagatttgcattta

SEQ ID NO: 827511 - DNA, 371 bp, Homo sapiens
atatggtcaaaacctgccccccaaggtgatggtattaggaggtgggatcttcaggaaatgattaggtcatgagggctcagccttcatgaatgggattaatgtccttacaaatgaggtcccagagcactgccttctcccttctgccactacagtgacaaggtgctatctataaaccaagaagctggccctcaccagacacggagcctcctcgcatcttaatcttggactttccagcatccagacaccaagaaataaatgtctgatgtttataagccactccattcatggtattttgttatagcagcttaaacaaactaagacacacagatccggcmgctaggacacattggtgccagaacccagagctcctc

SEQ ID NO: 827512 - DNA, 591 bp, Homo sapiens
atatcaaaaagtctttgaccagaccaaggttgtggaacatttcctctaagttttcttcttatagtttacaattctgagtcttccatttaagtctttaatccattttgagttgattcttgtatgtggtgtgaaataagggtcctatttcatttttctgcagaacatccagttttcccaccaccctttattgaagagactatcctttctccattatatgttcttgacactttagtcaaaaattaattgaccataaatgtgtgggtttatttctcggctctgtattccgttgcattggtcaatgtgtctgtttttatgcccacaccgtgctgttttgattactatggcttttagtaggttttgaagtaagggagtgtgatgcttccagctttcttctttctgctcaaggttcctttggctattcggggtcttttgtggtaacatatgaataccaaagtttttttktttggtttggtttttttgtttgtttgtttagttccatgaaacatgacattggcattctaacagggactgtagatcatgttgggtagtatgaacattttaacataattaattcttccaatctatgataat

SEQ ID NO: 827513 - DNA, 477 bp, Homo sapiens
atctgggctgtgtgttagcttctttgctggttcccaccaacttctggcctaagggtagctcatgcttcctggtctaggctactataaagtctaaaccttggactctactctcagagctgctgcgtgggaggtatctgctgctccttgctgtgacttctcccagaagctcagccatcttcccctgatgagtggaccctccgtctctgctcttgcttcctttatgaactctctgacattcctgcattgttcatctgactggattctttgggcttttccatcctgtagcctcctctacagagggcccttgccccatgctccttgaacacggagtccagtctctcacttctcactaccttccttgtcccaaacagggtcacctccgaacttggagattccttccatgtcacccaccrtctttgaggaaaattggaggtgaccttgtagataccctttttagcctcaactgaactccacttt

SEQ ID NO: 827514 - DNA, 574 bp, Homo sapiens
ttttaggcctttggactaggactaaactaagccactggctttcytgggtctccagcttgtagacagcagattgtgggacttagccttcatgagttcatgagccaatgccttgtaataaatctcattttacacacacatgcacacacacacacacacacacacacacacacacatccttattggttcattttctctggagaagccaaatttaaaaaataacatcagacagtattaagtggggacagaaatccaaataaagtgacagacaggtcatcatgtgaaatctggagggaaagtattcccagctgaagaaacaccaagtacaaaggccctgaggtacaggcaagagtggcatgtctactgttttgctaccttggtaaaacaaaataagaaaaaacaacaaaaacaaaatcacacacacacacacacacacacacacacacacacactacaataatttggaatggaagagaaaatattagacaccatgaaggtaactttctactctagccaaacccaaggctgtccagctacaatttaccatactctagaaccattaagaggagagaagaaa

SEQ ID NO: 827515 - DNA, 574 bp, Homo sapiens
ttttaggcctttggactaggactaaactaagccactggctttcctgggtctccagcttgtagacagcagattgtgggacttagccttcatgarttcatgagccaatgccttgtaataaatctcattttacacacacatgcacacacacacacacacacacacacacacacacatccttattggttcattttctctggagaagccaaatttaaaaaataacatcagacagtattaagtggggacagaaatccaaataaagtgacagacaggtcatcatgtgaaatctggagggaaagtattcccagctgaagaaacaccaagtacaaaggccctgaggtacaggcaagagtggcatgtctactgttttgctaccttggtaaaacaaaataagaaaaaacaacaaaaacaaaatcacacacacacacacacacacacacacacacacacactacaataatttggaatggaagagaaaatattagacaccatgaaggtaactttctactctagccaaacccaaggctgtccagctacaatttaccatactctagaaccattaagaggagagaagaaa

SEQ ID NO: 827516 - DNA, 629 bp, Homo sapiens
ttagggaagtctctcctggagaaaagcatccccagatgaacgtacttcctctgtaatgggtgatgggcagaacagaaacacctgagcaccggactggaggtgaaaagtcctatgtgggactgattagatttggaatcttggaagttacaagtcatttatgaagtctcagattaccatatgtaaaatgaagggtttttaatgaatggctgcaatctagagtttctattcacaagtgttcttaaatgtgctgattctaattggggttagaaagatgagcccctgacttcctccccgagcccctgatttttgctagcctgttgcttttctctgtactaatttcctcttccacagtttttataacaacagtgttaaaaaggctaattggctggagaagtatggcagatagcgcaaattccaatagaagagccaataagaagacactttacagaggagttgactgatgagcacagggaccttgggagctctaagcatgccaaaagtttaggttgtaagaaggaaggtttagcaaacagaagatttcaagggctttgtggtctgtgttaagggttttggggtttrtcctgtggagccacagggatgaaatggaaaccattacactccctctgcct

SEQ ID NO: 827517 - DNA, 495 bp, Homo sapiens
tcctggaaagcccctgataaaagcactgcattttcttaatcagtttccttttctgtagaataaatttctgttatgcttcttaatcagcaaaatgacaaacaaattaagaaataacctcaaacttaacaaaacagaacaaagtcttccctgaaggtcttggagaaccacgtgagatcagatcacaacccaaggtctgccctgagaaatggggaaagccagggacctgccacacctcccttcctcttgtctaactggagatgagaaactaacttaattttcatgatcttactatgttagcctcatacgtaatcatcttctcttttgtctaaatggttccctattttcaccttatacttaactatcatatatagggcatatgaatayatttatctcagatcccattcagaagttgcaaaggaatacattattaataaatcaaatatttctacattacatggaagaaagtgtggaacagttaagaggatgggtactggt

SEQ ID NO: 827518 - DNA, 685 bp, Homo sapiens
cccccttccttcctatttccccaccrggaacaggccaatatagttgctgcttattaaaagtttgtgggaagaaaaataaacgcagacggtagtttccctaaatcctaaatgtttctacagactctctttgaattatcaatttgggaagagcgtttagaagctggacctggaactttccaggaagctggcttaaaccatccttacctgtctgtccactactagagcagcctccagaacatctgcttcagaggccaggagcgctctgcgcagcggtgcaatcttcaggttgttggcccaggaaatcttccaggactcgccattcccattcttcaaacgccttcaggcagtggctgcatattgttcccactcaacttgccctcctatcttggaaatatattttcattttcttatgcttttatttaattgtctgtgttcacgctgttttacctcagtacgtagctgcaaaccttgtagaacgataccatataaaatagttaacatcctcttggcagcactctcaacctctccatctcactgagaaacaagttgacataccaggttggagatcaacacaaactaaccaagaagctacactgttctaaattaaatgttcatcacactttaaccgagattgctacctaagtaactctaattgctgaagttgccttcatggaaagccctcagg

SEQ ID NO: 827519 - DNA, 591 bp, Homo sapiens
tacagattgctgggccccagttctagagttcctaattcagtaggtctcaggggagcctgagaatttacatttataacaaatycccgtgtggtgctatcactgctcattcaggaaccgcacgttaaaaaccagtagagaaaagtgtggtgctgcatttgttgctgccgtatgtaaaacctgtgaggtagcaagtgaggtggtcatcaccacacataatgaaaacagtttcataaaactcactaatgaatgggtccagttctgttaccccttaggtctaacttttatggaagaaacacagaccttgccttctgatgaattggctgactgctgaactaactcactgagtctttcatttacttggaaaatcatgattgaacttcattgatcagatgggcattctacttaacacagggtggacaaaagtttggaaaaataaacaagtgtttaatatatttcacatattaagttgcaataacactcattgttgatgagctaagggacaccacctggagtgcttcccgcagaagatataccacccgttccttcaagggagggaggaaccagatggttggtaatttccaaaactgagat

SEQ ID NO: 827520 - DNA, 651 bp, Homo sapiens
acttcctacctggtaatttgaaagagataaatttgtgactaaaaagagtacttcacatcatacacaaataattaatgcaactgattgacccaagctagtgtgtgtgatattgtgatataataggaagtatatatttggtttctgaccctggttcctgcccttcagctcctaaaactcttggaatctccagagtgataagagtgtcttttgcatgctaatgaggtgactggtggctggggctggtcaccagaaagaccaaggcaggattagagggttgggattttcagcccattcacaatctctggggagaagggaggggctgaaggttgagttgactgccaatggccaatggtttaatcaactcaccatgctgacataacaaagcctccattaaaacccaaaagggcagagtttggagagtttccagatagcagaacacggaaagatgcctggaggataggctcttgaagaaggtgtggaagctccgcactctttcccccatactttgtcctatgtgttttgtttttctttatcaatctgttmgtctgtatcctttgtcttatcctatgtaataaaccagtgtatgtaagtaagtgtttccctgaattctttgggctgctctagcaaattaattgaacctgaggaaaggtt

SEQ ID NO: 827521 - DNA, 583 bp, Homo sapiens
ctctgctagggcaatgctgagaggaactgtggggttggaactgctacagggagtcctccccagggaaatatctagtggtgctgtgacagtgggactgccaccaagactccaaaactgtagagctaccagcatgcagtcccagcttcgaaaacccaaggcacctgactccaacccatgagaacagccatattgggctgcaaccagcaaagccatgagggcagggttgcctgaggtcttgggggcccaacttctgcccctgtgtgctcaggatgaggaacatggagtcaaaagacattatttccagctttaaaatttaatgtctttccctgttgagtttcagacttccttgaggcctgttacttctttcttctggcccatttctcctgtcccagcattgtatcttggaggtagataattggctttagtatctcaggctcacagataaggactttggacttttggacttttgagttggtactagagaaagttaagactttggggctctggrgataaaatgaatgtatttgaatgtgagaagaatatgagttttgaggctgcaggggtgaaatgctatggtttgaaa

SEQ ID NO: 827522 - DNA, 593 bp, Homo sapiens
tttttttcttcttctttcttttttgagacggagtctcgctttgtcatgctggctggagtgcagtggcgcgatcttggctcactgcaacctcccacctcccgggttcaagtgattctcctgcctcagcctcccaagtagctgagattacaggcatctgccaccatgcctggctaattttttttttttgtacttttagtagagacagggtttcaccatgttggccaggcctgtttcaaactcctgaccccaagtgatctgcctgcctcagcatccccaaatgctaggattacaggcatgagccaccgcgcccggccacaaacgcatatctaattgttccccttcccccgttttgtctatgtcatcttatgtaaaaaaaatgcagattaactgagccagacaaaggcatgaatgactatttttccttaccctcctcttacatgaaaattgtgtacttctcaatatccctaycctttccccttaaatttagagccctcaaaattatcttcggagaaaggtatagacctgtctcctgggtgcttattcttaactttggcaaataaacctcctaaaatgattgagacttgccatttttc

SEQ ID NO: 827523 - DNA, 506 bp, Homo sapiens
ggtctcgaactcctgacctcaatgatctgcctgcctcggcctcccaaagtgctgggattacaggcgtgagccaccacgcccagcctggattatgcttttgatgtcaagcctacgaattctttgcctggccctacatctcaaagattttctcctatttttctaaaattttaatagttttacacttcacatttactctgtaatccatcttttttgtttctttatctatttttagagatggggtcttgctctgttgctcaggctggagtgaagtgacgtgatcacagctcactgcagtatgtaaccttttgggactggcatttttcactcagtataactctctggagattcatccaggttgttgtgtgtatcagtcattcttttttattgctgagtattatttcatggtataagtgtacaayagttggtttaaccatttacctgttaaaggatatctgggttatctttggctacaatgagtaggcagttagacaaacatttgcatacaa

SEQ ID NO: 827524 - DNA, 606 bp, Homo sapiens
tctggccgggcacggtgcctcaggcctgtaatcccaccactttgggaggccgaggcagggggaatcacttgaggccaggagtttgagaccagcctggccaacatggcgaaaccrtgtctctactaaaaatacaaaattagctgggcatggtggcgcatgcctgtaatatcccagctactcgggagactgaggcaggagaatcgcttgaacctgggagacagaggttgtggtaagccgagatcgcaccattgcacactagcctgggcaacaagagcaaaaactccgtctcaaaaaaataataataataataatagtttttctagctctgtgaagtatctcaatggtagtttaataagaagagtattgaatctataaattgttttgggcagtatggccattttaatgatattgattcctcttatccatgagcatgagatgtttttccatttgtttgtgtcatctctgatttctttgaacggtggtttgtagttctccttgtagatatctttcacctccccagttagctatattcctaggtattttattttttttgtgacaattgtgaacgggagttcattcctgatttggctctcagcttgactgttg

SEQ ID NO: 827525 - DNA, 614 bp, Homo sapiens
atgcccagggtcttacactcgtagccaggactgatgtgttgtcatagccattccaagggtctcttttcaaggtgtccaatggggtggcaagcagggattctgattcatctatgctccagggacaggagagaaaggaacttggagattcatgaggtaggcatgaagcttggatagtgggaggggaggaagatagatgtgtgttgagcatttattgtgcactctattgagcccttgctgggtacaccttgagggctaatttacttcacagaatccaggaggaatgccttcaggggtactttcaggaaagtatccatagatttttaggaggctgtgtggtgaagctatgttcatactactagataatatttaccttataggcttcatgatgtataaatctgcctttcctctaatttataatagaagcatccatatgatttatgaattctttcagattagctcttttaggccatcctagctaaatactgagggtgtttagtatcctcagggtgctttgctgcagctgtccccagctggtctcgttttttcctrttttctaattggtctctacccccattcctccctcagtctgtcttgacagatggcagatgcatctt

SEQ ID NO: 827526 - DNA, 639 bp, Homo sapiens
cagacattcaaagaagaatcggtaccaatttttttgacactattccacaagatagataaagaaggaaacctccctaattcattttatgaagccagcatcaccttaataccaaaaccagaaaggacataaccacaaaagaaaactacagcctgatatccttgatgaacatagatgctaaaatccttaacaaaataccatctaaccaaatagaacaacatatcaaaaagatgatccaccatgactgagtgggtttcataccagggatgcagggacagtttaacatatgcaagtcaacaaatgtgatacaccatataaacagaattaaaaacaaaaatcacatgatcatctcaatagatgcagtgaaagtatttgacaaaatttggcatccctgtatggttaaaactctcagcaaaatcagcataaaagggacataccccagtgtaataaaagccatctatgacagaccaatggccaacataatactgaatggggaagagttgaaagcattccctctgaaaactggaacaagataaggatgcccattctcaccactcctcttcaacmtagtactggaaatcctagccagagcaatcaaacaagagaaagaaataaagggcatccaaatcgataaaaaggaag

SEQ ID NO: 827527 - DNA, 639 bp, Homo sapiens
cagacattcaaagaagaatcggtaccaatttttttgacactattccacaagatagataaagaaggaaacctccctaattcattttatgaagccagcatcaccttaataccaaaaccagaaaggacataaccacaaaagaaaactacagcctgatatccttgatgaacatagatgctaaaatccttaacaaaataccatctaaccaaatagaacaacatatcaaaaagatgatccaccatgactgagtgggtttcataccagggatgcagggacagtttaacatatgcaagtcaacaaatgtgatacaccatataaacagaattaaaaacaaaaatcacatgatcatctcaatagatgcagtgaaagtatttgacaaaatttggcatccctgtatggttaaaactctcagcaaaatcagcataaaagggacataccccagtgtaataaaagccatctatgacagaccaatggccaacataatactgaatggggaagagttgaaagcattccctctgaaaactggaacaagataaggatgcccattctcaccactcctcttcaacatagtactggaartcctagccagagcaatcaaacaagagaaagaaataaagggcatccaaatcgataaaaaggaag

SEQ ID NO: 827528 - DNA, 571 bp, Homo sapiens
tagattctcctaggagtgcaaacgctgcagtgaactgtgcatgtgagggatgtaggctgagcactccttatgagaatcgaactaatgcctgatgatctgaggtggaacagtttcatccaggaaccaacccccaccacatcggtcaaaaaactgtcttccatgcaactagtccctggagccaaaaagactggggactgctgctgcagaggataaatacatgcttgtaaatggatttaaaaagtttattggatactgctacacatcaattggcaaagaaagaaattaaaaggatggttccttctctgtgaaaacttacagtgtaattctaagtcaatttacaatgccatatgacagtgatgtgtgatatgtaccggaaacaaaatggacaatgtttgacaaacattatatttatctgggggagtcagagaaaataacctgagtgatgccccacttcrgaggatgcttctttgagtaatctctgaggcattttccatggccaaaatgtaaagcactgatagagagaaatcatttctgcctgtctggaagacacaagtggctttgtcttactgca

SEQ ID NO: 827529 - DNA, 573 bp, Homo sapiens
atgtaaatgccacatatttttcttacactgtatacaaaaattaacttaatatagacttatgtaagatcggacactctaaaactgttaggaagaagtctagtagaaaagttctacgacactggtctgggcaataattttttgtgttctaacctcaaaagcaaaaatagacaaatgggattacaccaaactaaaaagcttcttcacagcaaaggtaacagtgaacagaatgaagagacaacctccaccacaagagaaaatatgtgcaaaccatacatataatgagggggtcatattcaaaatctataaggatctcacagaactcagtagcaagaaaacaaataacacaattaaaaattgagcaaggaacctgaaaagagaattctcaaaagaagacatacgaatagccaacaggtatatgaaaaattgatcaacattactaatcatcagggaagtgcaaattaaaaccacaatgaggtttcacctagcagcttttaaatggttactataaaaaaaagataaaggttggtgaggatrtgaaggaaagtgaactctttcacactattggtaggcatg

SEQ ID NO: 827530 - DNA, 495 bp, Homo sapiens
gtattttaatacatgcatacaatgtgtagtgatcaaaycagtgtaattaggatatacatcaccttaaacacttatttctttgtgttgaaaacatttcaaatcttctcttttagctattttgaattatacaataaattattattaatggtagtcaccctattgagctaacactaaaacttctcccttctatctaactgaatgtttttacattaaccagcctcacttcattcctcatcctccatttccagcctccaatatccatcatgagatcaacttttttagccacacatttccatgagatcaacttttttagctacacatttgaataagtacatgtgtctttctgtgatgacatgacaagaacatgtgtctgtctgtcgttctgtgactggattatttcacttaacataatgatttccagttcagtctatgttgctgcaaatgacaggatttcattcttttttaaaagtgaatagtattctattgtgtatatct

SEQ ID NO: 827531 - DNA, 495 bp, Homo sapiens
gtattttaatacatgcatacaatgtgtagtgatcaaaccagtgtaattaggatatacatcaccttaaacacttatttctttgtgttgaaaacatttcaaatcttctcttttagctattttgaattatacaataaattattattaatggtagtcaccctattgagctaacactaaaacttctcccttctatctaactgaatgtttttacattaaccagcctcacttcattcctcatcctccatttccagcctccaatatccatcatgagatcaacttttttagccacacatttccatgagatcaacttttttagctacacatttgaataagtacatgtgtctttctgtgatgacatgacaagaacrtgtgtctgtctgtcgttctgtgactggattatttcacttaacataatgatttccagttcagtctatgttgctgcaaatgacaggatttcattcttttttaaaagtgaatagtattctattgtgtatatct

SEQ ID NO: 827532 - DNA, 495 bp, Homo sapiens
gtattttaatacatgcatacaatgtgtagtgatcaaaccagtgtaattaggatatacatcaccttaaacacttatttctttgtgttgaaaacatttcaaatcttctcttttagctattttgaattatacaataaattattattaatggtagtcaccctattgagctaacactaaaacttctcccttctatctaactgaatgtttttacattaaccagcctcacttcattcctcatcctccatttccagcctccaatatccatcatgagatcaacttttttagccacacatttccatgagatcaacttttttagctacacatttgaataagtacatgtgtctttctgtgatgacatgacaagaacatgtgtctgtctgtckttctgtgactggattatttcacttaacataatgatttccagttcagtctatgttgctgcaaatgacaggatttcattcttttttaaaagtgaatagtattctattgtgtatatct

SEQ ID NO: 827533 - DNA, 626 bp, Homo sapiens
tgtatctttatattagaatgatttatatttctttggatatatacccagtaatgggattgctcagtcaaatggtatgtctgcttctaggtctcagagaaatcaccacactggcttccacagtggttgaactaacttacactcccaccaacagtgtaaatgtgttcctttttctccacaacctcaccagcaactgtttcttgactttttaataatcaccattctgactggcatgagttggtatcttgttgtggttttgatttgcatttttgtaatgttaagtgatcttgagctttttttcacatgtttttggcctcatgaatgttttattttgagaagggtctgttcatgtcctttgcccactttttaatggagttgtttgtttgttttttttcttgtaagtatgtttaagttccttttagatcctggatattagacctttgtcagatggatggattgcacaaattttctcccattctgtaggttgtctgttcactctgatgatagtttcttttgctgtgtagaagctgtttagtttaatttgatcccatttgtcaatttttgcttttgttgcaattrtttttgacatttgcatcatgaagtctttgcctatgagtatgtcctgcatg

SEQ ID NO: 827534 - DNA, 612 bp, Homo sapiens
aactgacatgttcctcactcttattttttaatgaccgtatcctccatgtgaggctcacctctccagtaactcatgcttcttacttttacaattcacctaaacgtgattttcttgtgaggctttcctaggctaagccaactcaatcatatgtaatgtagcacaaaacttttggtagcgagagaaacatgaagcagagataatcacatttgaaagaactgctgcaattggaaacttttgagaaatccattattaccatttgaaatcataaattcaagatttgttgccatttaggaaatcttttaatttgttattcttacttttatcattttgttgaatttactattgaatttgccattcaagatctcttggttgtgctacaaataaaatgtgggatttggaacaaaacaagggaaaaagtctttagtaaatctcatacttagatgtttttcatttttgcacttatatttcaaaaaagaaaactttttatgcatgaggtctagaatggatactttttgttaacctgtaagtcaagatctggaaggctttctcagccttagacaaccaaaatamcccaaaccatcttctaaaatataacaagtgtatttacttaca

SEQ ID NO: 827535 - DNA, 636 bp, Homo sapiens
gactcaatgattaaaatgagggaaaaacttgcaatggaaatatctcatcttaggctttaaagaaaagacccacaacatacacacatgtaaaattaaaatgatagcacaacacmaaaagcaaactccacaatttgattctaaatgataagggtctaaataaagaatacggataaagatgcataaggaataattttgaaaggaaaaccatttattcacgtagttttactgtcttccaagaatatgtgctccagggtaggtaatttatattaagttgagatggccagtgtctttcctttggagagcacatatacccacactgaaatcagcaaaaagcactatgaagcatccccagggagatgcaatttgatgttcttgatatgagctgcaaactcttcctgaaatagttacattaggctggacgtggacaggattcgtatgtccagccatactctgagctaatggaaaaacaattttaaatcaaaggcacatatttcgatagcagcccatgtggaagaaacaagcttcaatcacttctctaggtacctcattttgcaaatctcattggctgaaaaaatggcaagattgcatcagatattatatcttggcaggtagttacaggaaataagggtcctttta

SEQ ID NO: 827536 - DNA, 602 bp, Homo sapiens
cccacatttctattttacatgtgttttggggactataacaagagtcaccttaaccagtttgtaatcaagcacctaaatattgcaatcttatctcaacctttattcttttactgtaactgcttcctcagtgattattatctagttaagaaattcatcagtttatcaaggctcattttgtttgacctctaggagctttaaaaactggtactgctccttatttcaaggaaagctctcttctctgtgatcacattctggatatacttcatctgtttcttttttttttttttttggagacgcagtctcgctctgtcgcccaggctagagtgcagtggctcgatctccgctcactgcaagctccgcctcccggattcacgccattctcctgtctcagcctcccgagtagctgggactccaggtgcccgccaccacgcccggctaatttttgtatttttagcagagatggggtttcaccatattagccaggatggtctccatctcctgacctcgtgatccacccgcctcggcctccyaaagtgctgggattacaggcgtgagccaccgtgcccagcccatctgtttcttacatatcagtattccttgag

SEQ ID NO: 827537 - DNA, 574 bp, Homo sapiens
taggtgttggtgttgttcatgtcaagctgcctaatttgtttagtaggtgttcgaatggggcatacaattctctagacatgtrgcaagcacacgggagaagccaccatccaggtgattcgcagcagtaaggctgatcagaaatttgatcctggctcaggggggttccggcagtaatcaaactctattcaccttgggtgagatttcgttatacctattcagccctgcttcagtgaaatctcactcaggaaaatagattctgtctccaactggaatctcccaaagccatgactatgtttctgatcagcactacagctcagatgaagcgttcagttacctgccagccagtcagcatttccccagactgcaaccagtgttggaaccaatctgcaggagtgggtggattggtagtgaaactggttctggtgaaaaaacttcaaaaaattttcacagaaaaatgattgactcccacttaattcaatgaagcaggattactctctgggacccaagaagaggatgccaggtttcagctgtggtggaggggattctaggtccctgttcttagtcctcataccct

SEQ ID NO: 827538 - DNA, 590 bp, Homo sapiens
taatttggtgattgccaagaatttgagtgaggaagaatagctggtgggaaggcgccttctttttcagtcttccaggcctcctgcattgtcccggtgaggcagaggcatgaatgcctgggttattagcyggaagagaccctgagattcattcattgaatgtcataacaataataataaacatttattaagtgcttcctctttgtgagtaggctctgtactcagcatttcacatgaattattttatttatttcttatcctaactctgagagaggccatactatattaccctgtttttaagaagagaaaacgaaggctgatgaaatagacaggataatgggaatagatagataatagattatctatctatctagatagataatagaagataatcagagatgtccacatcttaacccccccaaatttgtgaatacgttatcttgacaaaagggactttgtggatgtgattaggttaaggatcttgaaatggagagattaacctgagttatcctggtgggcccaatgcaattattggagttctcataaagtgttgagagaggattcgaagatggaggcaggacccacaaaccgag

SEQ ID NO: 827539 - DNA, 684 bp, Homo sapiens
tgataagaacgtgggacaatcatatcccttttaattgctgaaaacacggagattcttccttttatttgtaatctgggtgatgtgtttgaaggggaagaggaaacttcttctgtgggaacattttccttggcccctatcgcaagcagtggaaatggcttttattgactcattaggactacaaatacagtaacaaattctttcaacatctgtaatgcttttctcactactcattttagattgctttagcttcctgtgaggagtcaaaacacatatatgatgtgtgaccaatgctatggtttgaatgtttgtcccttctaaaactcatgttgaaacttaaccccctgtgaggcagtgttgagaggtggggcttttaagaggtgattggtcatgtgggctctgccctcatgaatggattaatccatgagtaatcacaggagtgaggtggccttataagaaggggaagacagacctgagttagcatgctcagcctccttactatgtgtgccctgcaccatcttgagactctgcagagagtcccactagtaagcagactctcaccagaggcagccccttgacttggacttctgaaccaccataactgtaagaaataaattccttttctttataarttgcaaagtttcaagtattctgttataagccacagaaaatgaaaataagacaacc

SEQ ID NO: 827540 - DNA, 584 bp, Homo sapiens
tctccatccagtctctaagagaggatccttggctcatgtgcaggaggaaacgcaagcctagtcgcagagtgtagtgagaagagagtttattgaaagctgctcctttacagagtgggggcgtctgtccacagaaagcaagccaaggaatgcaccgcctgtgttttcagtttttcttatataggggtcttatctttgtaaacactagggccaggcacggtggctcatgcctataatcccaacacttttggaggctgaggtgggcggatcacctgaggtcaggagtttgagaccaggctggccaacatggcaaaaccccgtctctactaaaaatacaaaaattagacaggcatggtggtgcatgcctgtaaccccagctactcagaggctgagacaggagaatcgcttgaattgggaggcagagtttgcagtgagccaagatcatgccactgcactccagcctgggcaacagagctagactccatctcaaaaaaaagaaagactaaattaagctgtgcctatgtgcggatgggctgataacatgataamgtttattactttattgatttaaagaaagctatccccga

SEQ ID NO: 827541 - DNA, 549 bp, Homo sapiens
agatcttatcatgaatcaataatgaagtttacaaaatactttttctgcaactattgcaatgattctatgttttttcttctttaatgtgtgaacatggtaaatcatattgattggcttttcaaatattaaaccmtccttgctgagccccactgaatcacagcatgttaactttttaacatattgctggattaaaattgtcaatatttttgagaatttttgcgtctctgtgtattacaaatattggtctgtagtttttttttttcttgtaatgtctttgtcttactttgacattagaataatgctggcctcaaaaaatgagttggggagtattttctctttttctatattctggaagaaattgtgtagaattggtattatttattccttaaatgttacgacaatttaccggtaaaatcatttgggctgtaggttttattttaagggatactttaaactattaattcaatttttcgatttgatataggactgttctagttatctattattcttgagtaagtttaatactttttcaacttccaagaaattggt

SEQ ID NO: 827542 - DNA, 549 bp, Homo sapiens
agatcttatcatgaatcaataatgaagtttacaaaatactttttctgcaactattgcaatgattctatgttttttcttctttaatgtgtgaacatggtaaatcatattgattggcttttcaaatattaaaccatccttgctgagccccactgaatcacagcatgttaactttttaacatattgctggattaaaattgtcaatatttttgagaatttttgcgtctctgtgtattacaaatattggtctgtagtttttttttttcttgtaatgtctttgtcttactttgacattagaataatgctggcctcaaaaaatgagttggggagtattttctctttttctatattctggaagaaattgtgtagaattggtattatttattccttaaatgttacgacaatttaccggtaaaatcatttgggctgtaggttttattttaagggatactttaaactattaattcaatttttcgatttgatataggactgttctagttatctattattcttgagtaagtttaatamtttttcaacttccaagaaattggt

SEQ ID NO: 827543 - DNA, 610 bp, Homo sapiens
ccttgtagccaagagccatccgggacataaacagatggtgacagagccactgcttgctgaacaattaacttgtgctgggccctaagctgagctctttgcagcaggaattttccccttccttgctttatggagagtgcactgctcttgcttcattttacagttgaagaaactgaggcagagatggaggagaattgctggctctaggttactgggccaggagtggctgaggctgcctcaaacccaggatccttgggattcagagctgggatctgcccccagctccctcgttacagctgccctctcctcctctggggtctccctcagccccaaatatccatctgcagagatagccgctcagagaggtctgaagtttcacctgcttggttccagggtgcaatttgagaacaaagctaaaaaaaaacctaaaggctattaaatgcactagtgaaggtcattggtttaagagaaaaggcaaaaggaaatgagacacatcaatttcaayggtctttccggctagcattttgttagcagcgacccagcggatttaacaacaacaacaacaaaaatggagaatatctgataattctgtaccaagcctgctacttaggaa

SEQ ID NO: 827544 - DNA, 508 bp, Homo sapiens
ctttttaacatggtattatcaactgggccaggaggtagtttctcatgacggcttttgtcagtrtggcttttagtactgaagccaaatgaaactcaaaaccatctctcttccagctgcttcagggaggtagtttcaaaggccacatacctctctgagactggcagatcgctcactgttgtgaatcaccaaaggagctatggagagaattaaaactcaacattactgttaactgtgcgttaaataagcaaataaacagtggctcataaaaataaaagtcgcattccatatctttggatgggccttttagaaacctcattggccagctcataaaatggaagcaattgctcatgttggccaaacatggtgcaccgagtgatttccatctctggtaaagttacacttttatttcctgtatgttgtacaatcaaaacacactactacctcttaagtcccagtatacctcatttttcatactgaaaaaaaaagcttgtggccaatggaacagtaa

SEQ ID NO: 827545 - DNA, 633 bp, Homo sapiens
gggagacattgcataataataaagggatcaattctccaggaagacataacaatcattaatttaaatgcacctaacaacaaascatcatgttatacgaggaaaaaactgctagaattgcaaggaaaagcaggtgaatcaccacaatagtttaaaacttcagcatcattttgccagatatggacagaatgagcagtcaaaaagtcagggcactgctgaactcaaaaataccatcaatcaactaaataaaatgaacatctataaacaacattatcaaacaatagcagaatactaattcttttctagttcacatggaacattcaccaagatagaccacattctgggcaaataaaacacacttcaacaaatcataaaataagaggaatcatataatgtttactcacagaccacaatggaattaaacttgaaatcagtaacagatggatagctggaaaatcccaaaatatttagaggttaaataacacacttctaaataacacataagtcatagaagatatttcatgagaatttttttaatattttgaactaaattaaaataacacaatttacaaaagtttgtaggatgtagcaaaaacagtgtttagacggtaatttacagaataaagcacatatttg

SEQ ID NO: 827546 - DNA, 564 bp, Homo sapiens
attttgtatatatctatacttagtttattcttactgcgatttaatttataacagaataaactggaaatgctataaatttgatgagtgtttttagaagcactctctatatagcattcaaaacagacatgaagtataaaagcctaaggtgaagggatttagtagtataagaagtaattagctgcctagagaatcctgtaagtaatgtgtggtcatcattatattgacatctatgtattagttttggattcatatggtaatatcttattttaaataagcattaaaatgaatccattttctattacttaaaataaccacttgttaatgggcacaaataacacaggaagtggagaactgctctatttcagctctaccatctcctagccatgtgagcctttatgtatctaggtaaatgcctttacttttctgctcttcattttctttatctactaattagaactatacataactaccctttataactcatagattattacaaggatcaaaccaacacattgcaattattttgyattatatacagtataagtacatcatattatcatagaa

SEQ ID NO: 827547 - DNA, 635 bp, Homo sapiens
ctggagatagtaatacgttattaaggtcaggtgataaaaaaatgagaaaatacacaaggccttgccacaaaatacttttcacagactgaaaatttgtgttcccccaatactgatatgttgaaaccccacctttaatgtaatggtattgggaggtggggcttttgagaggtgatcaggtcataatggtgaagttctcatgaatggggttagtgcccttacaaaacagtgtgcttctcttggccatgtgagggcagaaaaagaagatagtcatctacaagccaagaagccagccagacaccagacttgctgggactttgatcctggagttcgtagcctgcagagttatgagaaataaatgtctgttgtttataagccacccagttcatggtattttgttattgcagcctgatctggctaaaacaatactataaaccaacattaggtccacttacgtgctaataatagtaccataactagaatcaatagtagtaataacagtaatggtagaagttgtaaatttctaaaagtaaagaaggcagatagaaacactacatcattgcttctcctttccagtattccataaaaagataaaaatgsaaagtataaaatggcgttaacccttaacagagcataga

SEQ ID NO: 827548 - DNA, 652 bp, Homo sapiens
cctaaaccacacacaaatccactggygaagcgtggaagccttagtggttaaaggtgtttaagtacatttgaccaatcattggctgaccacatatgctaacccacaggcaaccactagaggaagctagagttgaaaataacaacaacaacaacaataataaaaaccccaaactgaacagatacatcagtggctgcacactgaggttgagactgattctacaggatttgttcagtgaagtcactaaaacaaaaatacagcaacagtcccttgggggtaaggggaaggagcagaatccagagttgctacaatattacataaagtgtccagttttaaaaattatgagacatgcaaagaaacaggaaagtgtgatccctatttgggtggtaagtcgggaggaagctgggaggaagctatcaatagacactgtctgatggggcccagatgtttgaatttagtagacaaagatttcaaagcagctatgataaaatgtttaaagacctaaaagaaaccgtttcttttaatttgatgtgacttttttttttttcttggagtgacacagtctcactctgtcacccaggctagagtgcagtggcacgatctcggctcactgcaacctctgcctcctggattcaagcgattctcgtgcctcagc

SEQ ID NO: 827549 - DNA, 580 bp, Homo sapiens
tgaatgaggaacatagatacttaatgtttttagatgtcctccacatgcaccttaccagtaggtcaggaggttacaaaaggtcatggctggttaagagtatgggctcctggctgggtgcagtggctcacgcctgtaatcctaacactttgggaggtggaggcggatggatcacttgagatcagaagttcaaaaccagtctggccaacatggtgaaaacctctactaaaaatacaaaaaatttagccaggcgtggtggcacacacctgtagtcccagctacttaggaggctgaggcaggagaattgcctgaacccagggggtggaggttgcagtgaaccaagatcgcaccactgcactccagcctgggcgacagagggagactcttgtctcaaaaaaaaaaaaaaaaaaaagcatgggctcagaggtcggatgaccagcagctaaattgaggctcacctcactctagctgtgaccctgggcaaactgcttactgtcactcaacctcagttyttagtaaaacagggatgatgacaatacctaccaaccatacacgactgttagctttattattttaccaacat

SEQ ID NO: 827550 - DNA, 615 bp, Homo sapiens
aataaacagccacaggtatataaaaatttaaattttaatttctggcttactattggtttgtttgtttctttttctttaataacatggtatagtccaaatgaagtgaccttctggactatcccttttagaatycaacagataatcatttcatatttaattttaaaacattttaaccagttataaaatttaaaaaattcttacagtctgtagtaactcatagctatctttacccttggaattgaggccagaaatttccagaagtctctttgctcttttatttttataaccttcttcatgataaagaaggtaacatcaaaaattgagttgtgctactaagcaagagaaattacgaacaatttaacagtgatggccactgaattcaactcatgttaaaggactcatcattgccagtggcccaaactttgcagttttatgttgccagtcactagtggctgaggttaaagacttctgttttttggtctctggttgcctccagtgtctatgttcagggagagaattgggtcataaaatcaacccaactgcctattaagagaatcatgccttccagaatgggacctttggtattaggatacaaacaaaaactttcttatttta

SEQ ID NO: 827551 - DNA, 624 bp, Homo sapiens
cccccttttctcccactacccttcccagcttctggtaaccattcttttactttccatctcaatgagttcaattgyttccatttttagttcccacaaataagtaggaacatatgaagtttgtctttctgtgcctggtttatttcacttaacataaggacctccagttccatccatattgttgcaaatgacaggatttcattctttcctttggctgaattctattctgtacctgtaccacatttctttatccacttgtctgttgatggacatttaggttgtttcttaatcttggatattgtgaaacatgctgcaatatacatgggcatgcagatacctctccgatagactgatttccattctttggggtatatgctcagcagtgggattgctggatcatatggcagtcctatttttctcttttgaggaacctccaaactgttctccatagtggctgtactaatttacattcccaccagcagtgtatgagggtgtccttttcttcacatcctcaccagcatttgttattgcctgttttgggataaaagccattttaactggggtgaagtcatatctctttgtagttttgatttgcctttctctgatgatcgatgatgttgagcactt

SEQ ID NO: 827552 - DNA, 632 bp, Homo sapiens
attaaggatccatacatgtccagactgggcttacatgactggcaaagagctactttcactggctgtctctcagaatgcatcaccacaggtgtggactggtcagtctagagggagggtgcatcaccgcggggagaggacgtttcgtgagacttccagcaattcccggctggcttttattttgacatgtgggactgtaacccaaagtgcacaaggattagagatattattttatgtctattttgagacaggatacaacaaaaacccagagtagctatagcatcgtttgcctgacgtgacacttagaagggaagatgccccagtcacatcaaacaatcgccatttcaggtaggttttactttgtccactcaagctgacagcagttcttactgggaatttcacaagcgcaaaacgtatttcttgcaagagaacaattatttctcacaaatgggtaaatgctgcttgaatggatgagcgtaacttagaaactactggaataccagaaaaagaaagccaagaggattagaatggataacaccaccagctcaaatccagtttccaaatggttacacctatctagyatttaatgggttatgctagaaagtaggcagtgaatttaatttttcaaagaccga

SEQ ID NO: 827553 - DNA, 680 bp, Homo sapiens
catatgcaattgcattttctgatggatccttaactattgaagtataagtttacattcgaggygtgtatacctcccacaacaaactcagatggtttgtatgtcatgtttgaaaattatatcatgttttatactatcagaaaattagtcctgtagctgtatcctttgagatttgtaattgctacaatgtgcctagtgtgttgtgcagggataaaagattcaagaaatctgattgatgtgttcatggttgttcgagaaaaaaacaggcattagagaaaccgttcaagtgaggattaaagccaaaaaaaagctaagctctttcaaaacggatacttttcagagtctgcctaaaagataatgtctcccaaggtactaaaagctattgtgttatctggggagggatgctcatggctgtgtgaccttgggcaagtcccttagttttctatttataaaatcaggcactcaaaccagatatcttttccagctctaaaattctatacctgaatctgagaatgaatgccttcttgcagatgacgtttaattctggctttttattatgatacagtgcggttcaaatataacccaaacaaaaccatgtcccccactgcacaaaaagcaacatccagagcaagcttgatttacatgggaattagatccaacctcagatttcagcattatgatgg

SEQ ID NO: 827554 - DNA, 605 bp, Homo sapiens
tataaatttcaatggggtaaaggaaataacacttattggaagcttattgtctgtccaatcctatgacatgaagtttatatattctttcttagtcatttgaacaccaagacaagtattcmaggccaggtgaaatgagaggtctgaaaattttttaagttcttaattgccaagcttttattttggaaacttatcactgaggttctagctgactacaaatgccatcaggattgtaataaacttcttctacctcttccaacattctgacctcattctcagtggtaggagagaacctcattcctatttgtcttccataatgactagtgataaaacttgagttaattggaagtagcttaaagagagccaaggtgcctagagactctggctttataactggaaatatttataggtaactgtactccccaaaaggatctatataataatcatttctggtaaaaaaggagagaaagaaataattccccctgtgtaagctcttgtaaaatacctctaaaatctttatgttatctctgcccttgcgagtatagaaatagcccattttaattcatttaaaaataatttaatattaattaatggagttttggtctctt

SEQ ID NO: 827555 - DNA, 589 bp, Homo sapiens
accgatttctgtacttaattttgtatcctgaatctttgctgaattcatttaccagttctaggaactttttagataagtctttaaggttttctaggtatacaatcaatcatgtcatcagcaaacagtgacagtttgacttcctctttattgataatgaaagaaatgaaaattaagaagacaatatcaacttgacttttcaatagcaaaataaagcagactggccatatcaagtgttggatggagtgtgtatccaggattttcttttactttgatggtagaaatataaactggtacaactgcgttggaaaacaatatacagctgacatttgcattctttaaaatctagcaattctactccaagttcaattcaaggaaaagcttagtacatgtgtcccccaaaacatgtacacaatagcactgatcataaaggaacaaaatggaaataatacaaaaacatatagacagaaaatatataaattatggtatcttttcacaatagagtatrtttagctacatgcaacaacatggataaacattagtatcattttgctgaatcaataaagtaagtctcaaaagacaacatacagtt

SEQ ID NO: 827556 - DNA, 614 bp, Homo sapiens
aaggagccctcattttacttaataatggcaccaaagcacaagaatagtgatgctggcttattgttagaattgttctatgttattagtagctattgttgttaatctcttaccgtgcctaatttataaactttattataaatatatatgtaaaggaaacacaatatgtatggtgtcctgtactactgaagatttcaggtgtccactgaggatcttggaaggaatcccctgtggataagggtgcaccactgtaaatatgttcagctttgagggcaacatagtctctgtcacaactgctctacctgcaacagcgccagacaaatctggctaaactttaatccaacaaagttatgagttggtctgagccctcaggctgaaggtcatgtaaactgagcatgcccagatgaaccaagtatgcaaccacaaggggaacagaagtgcccagaccaaggagaagaccaaagagcagggactgaattaagaagcagaygcagtatggaaggatccaggatccaatcaaattgagctctggcatcagcccattgtggaatcgaatcagatcatgcctcctggcatcatctcattgcagaattcaatcagatcacacctcattaccc

SEQ ID NO: 827557 - DNA, 401 bp, Homo sapiens
ttttttttcctcaaaagccagtgccatggtcttggcctccatgtacattaggcagcaagcccattgtttgctcagtaacaccctacmtttgcatccctttgtatcgtgaaaacagccacagagacaatgtaaatgacttttatctcatttaaatgaattgtcaacctcagctaaattactacttatcatataaacagaaaatgtaaataaactgattatttctttccatccatgtttttactgtcttcatgtatagcatgtgtaggattttgaagttaactgtttctgaaaacttacttgcaaatttttcaacactgcaaaaattgcttaaaataatgaagccaagaaaattaagccaggttaaaaacataaaagaagaaaaggaaggagggcaggcaggt

SEQ ID NO: 827558 - DNA, 537 bp, Homo sapiens
gtattttgatagctttgggtcttacatttaagtctttaatacatcttaagttgatttttgcatatggtgagagataaaggtctgtgtccagatttggttcctgccagtgggttggtggtctcactgacttcaagaatgaagtcacagactttcacggtgagtgttacagcttttaaaggtggcacggacccaaagagtgagcagcagcaagattcactgtgaaaagcgaaagaacacagcttccacgcatagaaggtaacccaagcagattgccactgccagctgaggtggccagcttttattcccttatttgtccctgcccatgtttggtttttgtcctatcagagtgcccttttttcaatcctccctgtgattggctacttttagctactgctgattggtgcgttttacagagcactgattggtgcattttacagagcgttgattggtgcattttacaatcctcttgctagctacagagcrctgatttacgatcctcttttaagacagaaaagttctccaaatccccactcgacc

SEQ ID NO: 827559 - DNA, 664 bp, Homo sapiens
ccagggaactttcacactgtggtcatgtcattgaagccacatctgcaatctgacccatgcaggtggatctcctgctgctgcgcttctgtctgggtctctggtggctgcagaaacaatggctacaagctgagcagataaagaaactcagagagttcattctaaacaagtgaacaacctcttcttcctgatctaaggcaaaaagcatttaacctttcatcatttatttctccacaagtgtggcatgtcatcattgccactcactgacccacacactcatggttcatagcctgagaaatagtttgcaaaggcatatttaccttcattgaaaccttagaaaacatatataaaggcagttcaaaaatcaaccttaaaatatgccataaaaagacagagagaggtaagaagatactcatgaaatcagtcattgtctcaaacaagaataattttagagaaagtggattgggtccttctttccctggttctcttgcttttttctattctcttctgcgagcaataatccttttgtctggcttcttcattatttcaaaggagaaagtacaatatsagcatgcattcacctatactgtcaattccagaaaaaaatagcagagttaaatataaatggaccttagtcatatttaaccattgctctccttgacaatcc

SEQ ID NO: 827560 - DNA, 267 bp, Homo sapiens
gtttacattcccctcaacagtttataagcattcccttttatgcacacacagcctcaccagcatctgttgttttttgaccttttcataatagccattctgactggggtgaggtggtatcttattgtagttttgatttgcrttgctctgatgatagtgatgttggacattttttcatatgtttgttggccacttgtatgccttcttttgagaagtatctgtccatgtcctttgcccattttttaatggggttatttgtttgttttttct

SEQ ID NO: 827561 - DNA, 293 bp, Homo sapiens
  misc_feature 1, 2, 3, 4, 5, 6, 7, 8, 9, 10, 11, 12, 13, 14, 15, 16, 17,18, 19, 20, 21, 22, 23, 24, 25, 26, 27, 28, 29, 30: n = A,T,C or G
nnnnnnnnnnnnnnnnnnnnnnnnnnnnnngaattcaacaaatgagtgtgagcaggggcctggagtacttaaaaagaataaacaaaatgcctttaaatcagaaagacaaaattgctagtaatttcagttaattgcactttactccatgtagctacaattgtagatatctagaaaaaatatctatgctaaaagtctgccatctggaaaagtcaaaagaatgatgagctggtattaaatctmagtaaccctggcatatggagtatctctgccatgttaagagcagaccttggtat

SEQ ID NO: 827562 - DNA, 588 bp, Homo sapiens
tatttaaggcaagtaaagaaatgtataggtcagtttccttcaaataattttatttcttactcttaaaaatcttttatttcagattcaggggctacatgtgcgggtttgttacatgggtgtattgcatggtgctaaggtttgggcttctattgattcccttacccaatactaaacatagtacctaattggtagtattcaaaccctgctgccttttctcccaccctatttttggagtccccggtgtctactgttcctatctatattttccagtgtttagctcccacttataagtgagaatatgcagtgtttgtttttctgtttctgctttaatttgcttaggaagtggtccccagctgcattcatgttgctgcaaaggacatgattttgttctttttatggctgtgcagtattccaccgtatatatgtaccacattttctttatccagtccattgttgatgggmacctaggttgattccatgtctttgccattgtgaatagtattttgataaacatatgagtgcaggtgtctttttggaagaataatttatttttctttgggtagctacctagtaatgggattgctgggt

SEQ ID NO: 827563 - DNA, 603 bp, Homo sapiens
aaagtacacaggtcccagaacagagcagtttttcctcaagacaggaaattccggtctacctgagtcagtgcaaaaaggaacttttctctgctttaacccttacaacaaattaacctggattaaccctgatcttaaccaatcagctttttgtctattgttttgtttaattgttctcattttacaggagctactgttcttccattgtctgtgaaagctctcatactattttgtagaatgcaggctgccctgattcatgacttacaaatagaagccaattacatctataactaaatttgttctaattttgtcttttaaaaagttatcgtcataggccaggcacagtggctcacacctaaaatcccagcactttggaaggtcaaggcaggcagattgcttgaacccaggagtttgagaccagcctgggcaacatggtgaaacacagtttctacaaaaaataaccagatatggtggcatgygcctgtaatcccagctactccaaagactgaggtggaagaatcacttgagcccaggaggtcaaggctgcagtgagccatgatcactacagcctgggcaacagggcaagactctgtctcaataaaacaa

SEQ ID NO: 827564 - DNA, 536 bp, Homo sapiens
acaaaattatctccaattattgattggggatcttcttttaaaaatacaaacatttactgccacagttttggtgtgttgtgttttcattttcacctgctttaaaatactgttaaatagtgatttcttgactcatcaagttgttcaagagtatattgcttaatttccacatctttgtgaattttctagttcagagttttctagtccagatttctagtttcatgattattagaaaatatagttggttttctttcagtttttttttgaattgttaaaacttgttttgtgtcctaatatgtgttctgtcttggagactgttttatgtgcacctgagaagaatgtgtatattaacatagggtggaatattgtttatatatctattagagtcaattcacttttagtattgwtcaagtcctttatttccttattatttttctttctggttgatctatttattattgaaaaagagtattgtaatctcctcctattatttttttaatctaattcttcctccagttctatcaatgtttgcttcatgt

SEQ ID NO: 827565 - DNA, 614 bp, Homo sapiens
tcaaccatggctccttatattccttactctagttgtgagtccaagggtaggcatggaatcgtattaggatcatagaccctctacgagattatactattccaatattggggcaagataggtctctcttgcttttacttggaacaagtgatcgatggagatggcagaggccatcttggcaccatagggaaaaggcctgcttgagaatgaagctaagcaaatgcaaacagtgctgagagatgtggcattgttcctaaatctcaatgtgtgaaaaaaccaattcctttagcttgaatgtggttacagctgtttgcaaccaaaatatttctgaggctgaggagggaggattgcttgagcccaggagtttgagaccagcctgggcaatgtagcaagaccctgtttccatgaaaaaaaaaattacctgggcctggttgtgtgtgcctgtagtcccagctacttgggaggctggggtaggaggatctctcaagcccaggaagtcaaggctgcagtgagccatgatgacactgctgcactccagcttacgcaacagagtgagaccatttaagaaaaartctggttaatatatgggtattcgtgcattttatgacattgtgtat

SEQ ID NO: 827566 - DNA, 568 bp, Homo sapiens
gagccaattaaacctctttgctttataaattacccagtctcagttatttctttatagcaatatgagaatggactaatacaaggacctacagtatggacacaccrgacaaagagatgattcacatcgcaggagggatggagtaggacaggcggagatttcatcacgatactcagaatggcacacaatttaaaacttatgcaatgtttatttctggaattttccatgcaatgttttctgacctcagttgactgaaggtaattgaaaccatggaaagagaaactgtggctaaggagaactactgtatcaattacctatgactgcatgtcaaacaattacacagaattagggattcctttctccacttgtctctctttgggtatttcctccatgttctctctggcttccaagagtcccttttcccaactcctctgtccagaaggacaggttttctctcaggtgactgtgtcaccataccactgcagggcagctcccagacagggaatggcttcagggaaacggagggagagaaaaaaaggaatcagcagtttccaccactttctctagcttg

SEQ ID NO: 827567 - DNA, 630 bp, Homo sapiens
agtaaacatttattgagtagccttgaataattatcctgtgaggtatgtttctgagttgttgtccatgttgcatrcaatgttttatgaaataattggtagctggtataatgcctcattgaaataactgcctgtttagtgcaatattttcacccagcaattgtttatgtttttgcagagtttccatttgctctgaatcttctttagtataatatttcattagagattttctcttctacataatgggaagatgagctgttggagcttttaactactgggcacagctgaatcactaagtaatggtaacaaaaaagaattgtattaagcacacaagttactctttgttttattgaatagcaaatataggctcgatgttattaatactgttaagtgttgttaagtaaatatccattcctggtattaatgttatcaaagtaaaaattagagaactacagactgcatttttctactgtgttgcagattaaattttctggaagcacagtgcttggggtgcaagatgtttatttgggatcattatctgtgaaagaaaggggaagaagacaggtgtgggaagaagaaggagatgaacggtgatgcagaccaattatatctcagccaccccggcagggatcc

SEQ ID NO: 827568 - DNA, 560 bp, Homo sapiens
aaataaataaaaatttaaaaataacagcaatgctagataagtggtggaagaaagtaaaaacttttttgaaaatataacagtaatgcccgataagtgacggaaaaaagtaaaaacttccttgaaaatatataagcacaagttcgccctcaatgggtctgaaaaaaacttgagaatttagcctagaatgttcctggctagttgtgcacccaggggactggcagaaacaaggaatttagtttccatctaggcctcaaccacattctatctacagacataattccaaggaagatatttgcagtcaaaaatcaacacccaaggatgtcataagtaagaaagcaatagaccccaaaaccataaacattgggattctcaggcagaatatacaaccatatttaatgtgattaaagaaataaaagagaaccttgaaaacacaggtaaygtggattttaaaaataactactagaaatagaacttttagaaactattaataattaaaattcaaaactctgtgggaagattaaccagaagactatatgtggcagaagacagaactggtgaag

SEQ ID NO: 827569 - DNA, 640 bp, Homo sapiens
ttataatgtagaatataatgtattataatatataatgtattataatacacatatatattttaaatatataaatgtataaaaattatccttggacagtatataaaaaatttacctgttataaatattaaatgaaagcatcctgtctttagtattatgaagaaataattattctattaggtgtcttaaaatagtgatcatataattttataatttcccctctatgtgttagctggaatttttctttgtaagagaaatttactggccaggtgcagtggctcatgcctgtaatcccagcactctgggaggccaaggcgggcagatcacaaggtcaagaggttgagaccatcctggccaacatggtgaaaccccatctctactaaaaatacaaaaattagctgggtgcggcggcgcacgcctgtagtcccaactgctcgggaggctgaggcaggagaatctcttgtacccagaaggcagaggttgcagtgagccaagatcgtgccactgcactccagcctggcaacagagcgagactccgtctcaaaaaaacaaaaacaaaaacaaacaaacaaacaaamaaaaaaaaacagagaaatttcctttgctaactgggactatctagttacttagaaataccactcat

SEQ ID NO: 827570 - DNA, 632 bp, Homo sapiens
caatatatgtgataagtctgtgtcacatgtggtcatggtattctctgcaattttttatgtttcacttttcacaaaagaaaaaaaaaaaacttggtatgaraaagctaaccagagctctgcatttgtgactaaggcatgtgaactggcagctttgctgttggatgaccaggcaaaggtcagtgcagaaagaccgccatctttccatctgcagacattcagctttcagccctgcagctcttgtgagccccaagcctgtccctttcagcatgtcttgagtagggacagatacagttttgtggaacctgatgcttttacaatgagagatcattttagatgaaagagcacaaaatcatgaatctgaattcagaatttatttacaatgggaaaataagttacaaccaatagcacatttagcaaagccgacaaattcctcaaatgtcacaaaatctaggaaaatgacactttttattcactctatcgtgctttttatgctttttggtttttgttttgttttgttttgttttttgctacagactctttgtctctttatattacaatcttataatatcatttactttacagaggccaggaaaataattcagtttttcctctagctttattagattttttta

SEQ ID NO: 827571 - DNA, 553 bp, Homo sapiens
cacagatcttgatctgagaattgaaatctcctcctaggcctctgggtctgagatggcaggggctgctgcaaagggcagtacagaaggaaaatgtggggtgcacacccccgcacagagtccccactggggcgctgcctagtggagctgtgagaagagggccaacgtccttcagaccctagaaattgaaatttattttttaaatattttgtttcattttaagttccgggttacatgtgcaggacgtgcaggtttgttatataggtaaatgtgtgccatggtggtttcctgcacctgtcaacccatcacgtaggtattaagcccagcatgcattagctatttatcctgatgctctccatcctcccaccccatgacggacaggccccagtatctgtttttcccctccaatgtgtccacgtgttttcattgtttagctcccacttgtaagtgagaacatgtggtgtttggctttctgttcccgtgttagtttgcygaggataatggcttccagctccatccatgtccctgcaaaggacatgatctcatttatttttat

SEQ ID NO: 827572 - DNA, 593 bp, Homo sapiens
atacacttcagatgatgaagagaattttcatattcacagacattttgtagaggacagttaaacccagccagcaatgataattgagtaacatcggttgctcatgtttttacttattcacaagtcactgtttaccaaaattattcaatggccctcccatcctggaccagacaaaaatcactctttgtcctagctaaaggaaagatccactccaggattttaaaaacaatacaccattttactccagagattacgagttacgttttaatggcaaaggaagcactttatgtgactatttgaacagtaccacctgttgaaacttgtaatgttattgcctgagactcttcagaattcaagatttaaactttcctctagtcgtgtgagagctgatgtgagcactgccaaagatacaccaatgagatcctctgtcctcaaaactcagatatttcgagccctgcttcggggaggaacagctctggacactggcagcttcccgacaccagcagctgaggcacgttatgtcaacaagawggaacctgcctgatctcactttgccaggtacactggaacccaaaccacagcaggatgaccatttg

SEQ ID NO: 827573 - DNA, 534 bp, Homo sapiens
ttaggtgtagaactgggcctgcttcacaagaatcgcttgaacccaggaggcggaggttgcagtgagctgagattgcgccactgcactccagcctggctggcagagagagactctgtctcaaaacaaacaaacaaacaaaaaacttgacccacctagagacctatatgctcctttctcattaagaagtgttggaggctccacaaggttcttttctaatgaaacgttcttagagatataaactaacaagtcattttatctgtctttcatttaaaactgttgtcatttttacctcttaataacttttggtaaattatttaaatgttgaaacaacaaaaagaatattgaaaagtacaggggatggtttagagagtatttataagtaatctccttatatagtttccttgaactctaagtaggaaatgtaaaaaagtgatgacatccaaagtcrgcttcttttagctactgcgtaagagtgaaaggatacactgctgattttcaacattagagtttaccctaactccattttgactttaa

SEQ ID NO: 827574 - DNA, 616 bp, Homo sapiens
aggcttctctttccatcattctggtacacagctctgtgccactcatctcctctctccatggcttttctggagcaaatgtgtatatatygtacagatgccaccagggctctgttcctacatcctcagaccttaccattatgtgcatgtagacccagctcctgatcccagctctcatctctttgcctaagatagataggtaggtaggtagatagatagacagacagacagacagacagacagttattcccatggaagagcagctccatctgttttttgtagtcctcggtgtaatcaacctactagcctgaaaggcaggattcttacacacttctctccatacctattttaacctaggttcccctagaagcagatcctgattttgaaggattcagtgctaatagtttatttggaaggtgaacctagaactcatagaagagacagggaagggtggggagtgaagaaagtatgcaatatcaagttgcccctttaggtgactggagtggaatcttgctaggctttctggtagtcggtgtagaacacacgttagaattattttaccaatggttgagcacttggttgaggcacttactggttgagggctgctccttggtggtgg

SEQ ID NO: 827575 - DNA, 493 bp, Homo sapiens
aaaaggataaagcaatgtaaatatataaacacccaacaccaaagcacctaaaatatttaaagcatatgttaatggatctaatgggagagatatattgcagtacaataatagtagaaatctttgacaccccactttcagtaatagacaaatcatccagacagagaaacagcaaagcaacatttgagtaaaactgcacaaaatcaacgtaactttagctagactgagaaaaaatgagagaagatctaaataaaatccgagataaagaaggagatattacagctgataccaaagaaatacaatgatcataggagattattatgaacaattacatgccaacaatttagaacacataaagaaaatggataartatttggacacatacaacccaacaaggttgaactatgaagaaacagaaaacttgaacagatctgtaaccaataaccagaaataagatgaaactggtaataaaaagtcccccataaaacaaaacaaa

SEQ ID NO: 827576 - DNA, 493 bp, Homo sapiens
aaaaggataaagcaatgtaaatatataaacacccaacaccaaagcacctaaaatatttaaagcatatgttaatggatctaatgggagagatatattgcagtacaataatagtagaaatctttgacaccccactttcagtaatagacaaatcatccagacagagaaacagcaaagcaacatttgagtaaaactgcacaaaatcaacgtaactttagctagactgagaaaaaatgagagaagatctaaataaaatccgagataaagaaggagatattacagctgataccaaagaaatacaatgatcataggagattattatgaacaattacatgccaacaatttagaacacataaagaaaatggataagtatttggacacatacaacccaacaagrttgaactatgaagaaacagaaaacttgaacagatctgtaaccaataaccagaaataagatgaaactggtaataaaaagtcccccataaaacaaaacaaa

SEQ ID NO: 827577 - DNA, 493 bp, Homo sapiens
aaaaggataaagcaatgtaaatatataaacacccaacaccaaagcacctaaaatatttaaagcatatgttaatggatctaatgggagagatatattgcagtacaataatagtagaaatctttgacaccccactttcagtaatagacaaatcatccagacagagaaacagcaaagcaacatttgagtaaaactgcacaaaatcaacgtaactttagctagactgagaaaaaatgagagaagatctaaataaaatccgagataaagaaggagatattacagctgataccaaagaaatacaatgatcataggagattattatgaacaattacatgccaacaatttagaacacataaagaaaatggataagtatttggacacatacaacccaacaaggttgaactatgaagaaayagaaaacttgaacagatctgtaaccaataaccagaaataagatgaaactggtaataaaaagtcccccataaaacaaaacaaa

SEQ ID NO: 827578 - DNA, 624 bp, Homo sapiens
tgccagggctagctgcaggttggggatcccagcaaagctcaggactaggaaaggccgttcctgtgtggagagggattttgcactgcatagcatttctccctgtaagcagacctaattattaccatccctcaaatgaattccttctgagattgagcaacctggccatgaggattgagcatttctgtgaaccaattcaataagcacaccagggcacagaaggcagggccacccctttttgttttgttctgttttgttttgcttagtttaagcatctacacccccaaagcaattctttttcaggtttttccatacaaatcatcggcttcagccctgccttggctcacgctgctcctggagcacagcccactccgtctctccagccttccactgccagcggaatcctggtcccccatcgagcgctggctctccaccttagctgggcatttgaaccacctagggggctttttaaaagtcctgaagcccacgccctgccccaggccaatcaaaacagcacctctgggcgggacccaggcatcgggacttctaaagctctgcrggtgattccagagtatgaccggggtgggaaccactgaattccaagcctagcccaaatgctgctgttct

SEQ ID NO: 827579 - DNA, 619 bp, Homo sapiens
tatcatgaccgtggtggccatgatgttcctcttgtccatgacttatgaagtcccctccacatgaatgggacagccctttgatgttacagagtggggcttgacactcatcgtgtggctctggaaaagccacttaacctctccaagccacagtcaactcatttggaaaacgcggaggatggaccaaaaattgtattccccctgcagccctaaaatgcctctaattctatgaaaggaccattcaagcacattagcatgccaaaaacatctattcatacagaacttaactaaaatataatactaagtcacaatggagtttattctggatgcaaagtctagttgctttttggatcacctagtctcaacagagcatttaagtaatccaggcaattcacattgtgaagtttagctaagaatctataccatgaggccattcggttcaactcataatgaagtcattgcttattttgggtatactttcctgggccaggatgaagggaacacatactgaagttgacagcagggtaggtatgtgaagggrccatggtggatttttcccagaaatcagaataatccatcttggaacactcctctgaaagaagtttaggatgttgagagtaaa

SEQ ID NO: 827580 - DNA, 614 bp, Homo sapiens
ccacccttcccagcctctggcatcctctgctctactttttacttctatgagatcaactttttaaagcatccacatatgagtgagtacatgtgctgtttaactttctgttcctggcttrtttcacataacataatgtcctccggtcttatccatgtttacatgaatgacaggatttcattctttgttttggctgaatagtattctatgatgtatgtataccatatattctttatccatacatctgtcgttggacaactaggttgatttcgtatcttcgctgttacttgttggaactctggaaaaaaatcaaaggcttacagcaaccaatagaatgctgatctaaggaaaaaaagcaacttaaaaatgttaggaaagctgtgtgataggaaactccatctccttcccagtatggcagtggtgatgaagtggcagcagcatgtatttccagtgtgagatcctggtctctgattccaaagaaagaacatatcttattaacaaattattgtgtatgtctgttctaccatgactggagatacctaaaataccagtgcaaggtgcttgtctctgttttgcctaactcagaactcaggccagaaaagtggtgggcatcgctc

SEQ ID NO: 827581 - DNA, 603 bp, Homo sapiens
tttttcagtttctaactctgtctttaggattggtctaacataaatgaaagactgaatatatatatatatatatatatatatatatatatatatatatatatatatggacaatgaccagatcatatatggtaaaatatgaaaaaagacagaaaagagtcttagtaaaaaccactggtttggatttgattgttttgtgtgtgctgtatgtcttctgctctttgtcattaaagactaaagcctaattagattgaagagtaaactgaaggctgggcatggtggctcatgcctgtaatcccaccactttgggaggccgaggcaggtggatcacgagttcaggagatcgagaccatcctggctaacacagtgaaaccccgtctctactaaaaatacaaaaaattagccaggcatggtggcgggcacctgtagtcccagctactcgggaggctgaggcaggagaatcacgtggacccaggaggcggagcttgcagtgagccaagatcgtgccactgcactccagcctgggcaacagagcragactccatcccgcaccccccccaaaaaaaatacgaaaagtaaactgaacacactaccactaccactaat

SEQ ID NO: 827582 - DNA, 563 bp, Homo sapiens
tttatagaaaatactggttggggatgaccaagatcacctaatgttcctctcagcttaactaaactttaaagtttttttgggaaaatttttgtttgtaaattctttctcttctcctttgagatgtaaatctatcaaaaagtttgctagttttacaatccagaaatgtctttctcaagggcttaggaaccatctttttgaaaagtagtaatcaagggataaaacccccctaactcccagtctctgcggaagggtaggagcctgatttgaacgtgaaccaattagcaagcacagataacctcatcacaggggaaaatatttgtaaagttaggagtaacacaatgttgtgggcacatcctactgatgaaactctccctaacctccttcagtactttttcatagctcaccccactgctttaaacctttctgctctttgtttcagcagagttgcatttagacaattctagcctctctcctctgttgcaatagccttaaataaagtcttctttgtttractttatctagtgcaattttttctttgacaaaaatcagctaacagcagggga

SEQ ID NO: 827583 - DNA, 563 bp, Homo sapiens
tttatagaaaatactggttggggatgaccaagatcacctaatgttcctctcagcttaactaaactttaaagtttttttgggaaaatttttgtttgtaaattctttctcttctcctttgagatgtaaatctatcaaaaagtttgctagttttacaatccagaaatgtctttctcaagggcttaggaaccatctttttgaaaagtagtaatcaagggataaaacccccctaactcccagtctctgcggaagggtaggagcctgatttgaacgtgaaccaattagcaagcacagataacctcatcacaggggaaaatatttgtaaagttaggagtaacacaatgttgtgggcacatcctactgatgaaactctccctaacctccttcagtactttttcatagctcaccccactgctttaaacctttctgctctttgtttcagcagagttgcatttagacaattctagcctctctcctctgttgcaatagccttaaataaagtcttctttgtttgactttatctagtgcaatttttyctttgacaaaaatcagctaacagcagggga

SEQ ID NO: 827584 - DNA, 513 bp, Homo sapiens
atgtgcctttcaaaacttgagtgttgacatcacagtgattgtccagaaataccccaaacacattatttgaatgtctgtcaagatatttcttatctcagctgaaattatatgaatcactctaaggccacattagtgacgtctgctgccaattttgaatgtagagtcagtttaacagtctagtaggaaatgtacggctcatatgtaaagtaatttgggcttctgtcctaccttctcccatctccccctttcctctgtggaactcaaaaatcacaacagatggcagaggcagaggaaacaatgggtgctccctgatggcagtgagtgaccaaaatcagtttgttatttaggctgcattatgcttgcaaaggcataattcaagggcaggctataggtggaccaggtctggagtggttcarttttacacatgttgtatttagacatctatcagagattcaggtgaaggtgctaagtagaaataaatggatataaaatccagagcttgagggagaagac

SEQ ID NO: 827585 - DNA, 632 bp, Homo sapiens
taagatggattcaaactttgtgcctccacctgtaatgattcattttaggaattactccttttatcatctttatatccaaaccagtatatttactgactacagtgctttgagttaagttctttcataaataattgaatagccggagaaattttgcagtatcgcagtcatgttttgaaaatattgttcttggttcttgtctctaatctttgagaaagcacacaggatatagtgtgttggctttcagatcactaataattaagaccagagttctgtggccccgtgtgtcgctttaagggatcctgtagggcccacacgagaaatttcaccaactgcactatctttaaattccaacatacacgggtggtcctgccctggataaaactcaggaagcaaaatcaaccttcgagagaggtgaggtaggaagtctgagcattgccgacgggccggagcaaatcgctcccgggctagaccctgcctacaccgcggcggggacaggtggakgtttcaacccctgtttggcaacctcgggcgcagccaggccccgcccagaaatttccgggacacgccccggaagtactgagagggacttccgccccgaggcgaggcctcggagctggttgctgctcacaggc

SEQ ID NO: 827586 - DNA, 564 bp, Homo sapiens
cctggaactaaattcaagtaaacatattgcttgaatccctatgtaaaatatattaaataatagatattgtcttcaactatagttttaaaaagaraaaaaatgggtcatagtgaaccctaaaacaatcccacaaaatcttgtgttctattaaattacaacacacctacaatatacaaatcataagcatataattttatcacttaaactaagtgaacacacttgtgtagcccacacccaggtcaagaaataatattttcagccttccagaagcctttatccccatgattccttgtaacaccatgatgagttacgcgtgtttttgaactttgtgtataccatgtaactcttttgtggctggcttgtttcttttgacattgtgaggtggatccatgctattgaatatagttttagttcattctcccatgaaaattttaacttattgaagcatttctacatgatgctaagagagtatgttcagggatttgctttatataatcttgcttttgataatcaaaagggttcgacttcaagaatctaaatggatggaaagttaaatgattatcg

SEQ ID NO: 827587 - DNA, 533 bp, Homo sapiens
ccctccccacaagcatgttgctctggttcactagttaaagacttcagagtcatctctgtctcacttcacyctccctcactcctatctccccacgaacagcccgagtcctattgatttgtgcctctacaatatctgtgagatatatccttcttctcccctttccagtgccattgcccgaatttaaacctgcactgtcttgcaccttgatttttagagtgacccccttcctgctttccaagcctcctcccatccatccaaactttaaacaacacaacttttaaaaaatacaagtgtgattatgccctatccctgggtcaagactgtaaaggctccctgtgtccataggatgaaattcagatcctaacccagcacaccaggcctttgacacctgctcaatcttcatcacctggtcacaccaggcattctcatgctccttggcttttacacgtgctgttctttctgcccggaattccttccccatccattgtttttactggactcttgctcatctttcaagtcccaacataaaattg

SEQ ID NO: 827588 - DNA, 645 bp, Homo sapiens
tgagagcctaatgtgtgctaagacctttgccagagctagaaatacattgaggagaaaaaactgtcatagcctggaatgtcacttcccacatcttaccttatgtcctgcatggagagacagaaatgtgtgaatttttaaaatgtccccctagctactgctgagtgatgcgtgctcacctcatcccccaccacacacacacacacacacacacaaacacacacatacacacacgtacaccgattattggtccagctgaacattttctcccatggtgagatgctggtcttaccatgcaaacaggtctttccttatcatccccactaagttcttttaagatcttctaaaattctaggcacataattggcataatataaaacatattaaaatttgcccacatcatacaataaatacatagtatagtaactttgtataagttgggctaagcttcagtgaagccagaattattttttgaagtctcacacctcattgtagctcttgaaatcttgtacgcccttgacactttgcctayacgccattacctttgcccactcacctcatcaccatttcaattctccttctgctctgacttagttttctggaaaggggaaaaaaagaaatgggtagataagttgctcataggaaaat

SEQ ID NO: 827589 - DNA, 280 bp, Homo sapiens
ggtcatcaattttcaggtttttatctttaaatatataatttgcaggctataaaatttgcaaatatataatttatatatttaatattttatattaattatatttaatataattatatttaatattttatatattatatattatatttaatattttatattaaaataaaatttgcaaattatataaartatataatttgcaggctataaaatggctgtaacgccataccacaaattttatatattcttttttggttatattttgcttcaaaatattttttat

SEQ ID NO: 827590 - DNA, 280 bp, Homo sapiens
ggtcatcaattttcaggtttttatctttaaatatataatttgcaggctataaaatttgcaaatatataatttatatatttaatattttatattaattatatttaatataattatatttaatattttatatattatatattatatttaatattttatattaaaataaaatttgcaaattatataaaatatataatttgcaggctataaaatggctgtaaygccataccacaaattttatatattcttttttggttatattttgcttcaaaatattttttat

SEQ ID NO: 827591 - DNA, 619 bp, Homo sapiens
aatattactctgaaatacagaatacttaaaactttgaaaaatttagtgtttattctatgaccaagtcactttctcacatccaatgaacctattctctctctctcttccataaaaatttctctggtrctttcattagtccttttcggaacttttaaaaatttagtgtagctagtattctagttctcaatcaaatgcatgttacacatcaagctaccataatgtactggtttttttttttttattgtgttttgtttgtctaaggcaggtcttcaaaagcatgataattttcatcaaggataattatgatcctaaatgaaaacctcgtggttttcttgggtcctttatcaatagcagggcggttttgacggaaacacagaaaatagcttctctcaggccaattgtctttatgcaaatgtgctttagaggaatctacagttcaatttttccagcttaatctactcagtagttgtgcatgtcctccaaaagtttcttttatcaatagagcagcaccatgaggtaccacacaacagtgaaatcgaagtacatagagcacatgcaaggatgcacgcccctcatccccacatattcacacccgctttcctctgatgtctgaagtaat

SEQ ID NO: 827592 - DNA, 599 bp, Homo sapiens
agccatcctatctctccaaaaggggaaaaaaatgagaggcattgstgaaggtctcagtccaagagcacaagctcaccaaaagactagatcctaacataagactacagaatacttccccttcccccacatattgctactgcattataaaggtctatttgcaacaattccttttacattatgtctgcctttcaacaaaaattaaaaggcatactaaaatgaaaaaagaaagttttttgaaaaaactgaacaagcatcagaatcagaattaggtatggcagaaatgtttgaattattagaccagtatttttttaaaaaagaattatgactactgtgctaaggactttaatgaaaaaagtagacaacttgcaagtacgtaaataatgtaagaagagatatgaaaattcacagtactagagatcagagacactgttacagaaataaagaatgctttaatgggcttattggtagactggatatggctgaggaaagaatctctgggcttgaggatatggcaaaaactttcaaaactgaaaagcaaagagaaaaataaattaaaaatccaaaaacagaatatccaagaatggaacaacaacagaata

SEQ ID NO: 827593 - DNA, 503 bp, Homo sapiens
tcatttacataaggtatatctcctaacgctatccctcccccctccccccgccccacaacaggtcctggtgtgtgatgttccccttcctgtgtccatgtgttctcattgttcaattcccatctatcatggaaataatttattctttttaatcactattgaattgcagcttctttatctaggaatgaaacttttcagtttaacagaaatttttttgacttgataaggagtacatgttattaactttgatatatacatttttcatgtcaaaatatactggctttaaaacatgttgcaactatctttgtatattttatttataatatgaattatatatttaagtttataaaaaatacaaactttgaaagctagctaactaacctttgrttctttattataaatataaagtatataaaatgattttcttcacttttactaatttaacatatttatgccctttgtaaattatttcagtttttttacacttcatttctaccttcattatc

SEQ ID NO: 827594 - DNA, 582 bp, Homo sapiens
attatatataaatgattatatatatatgtagttatccttattcaagggaacacaatgatatggtttccttttatcatcttaaatatatataggggaaygcttcatctttttttttatagcagatggcaagggaaggcacataccaaagtggtagccagtcagagatcacctctcctttgccatctggagattgttatctgcttttcaaagatactatttttaccaatgccaagcttggtaaaattcttaagatgtaattcagtctaatcatagatatcgctagacaagactggtcctatgcagtttataacagaaatgtggccattattttagtaaggatggttgagataacgctgcattataaaattaatgctagagttctagtagattaaaaacaatttgtttgtttgtttatttgtttttctagttcatgcttcatttttcattgacattggcttaagggcctcattctgcactagcactcgggaactcaggatcatggagacttccacaatattgtagctgtactatctggaatatgtgacctcttttgtttgtggatcagaagagataagctttttc

SEQ ID NO: 827595 - DNA, 571 bp, Homo sapiens
aatacctagtctggccatgaaatttctgaatcctgagtatacagcagtgaacacacctgaaaatactcctgtccttacaaatcttatactgtaatgggaaaaagatggctattaagagcttaagcaaaatatatgccatgtttgatggtaatgagctctacggaggaaagtcaaggagtaagagggcatatggagtgcagtgggatagagacagagaggtcccagtttagaagagtcagggcaggcctcgctgagagagtgacatttgagtacaatttgacagaattgagggagccagggagatggaagagcaacggcgagtattgtcttagtatcattaatttggaaagttgtatttttatcaaaaatttatttcttccagtctagtgtcttttggatcctgtattataattgttaatttttaagtttcacgtacttctaaatatatccttttttactgactgactttccccactcgtttttttttttttttttcttggagttattttctatattccttccacccaaatgaggcwtgtgctgttaggaacacatagttcacaagcaggaa

SEQ ID NO: 827596 - DNA, 524 bp, Homo sapiens
aaatggagggggatggtcagaacaagtagtcacagaaaagagtatttgttagaagtcagaaaattccccaggctagagtatatgtaatcacaagtctcagaaaacagtgatatgctaggcaacttatgctcacatcttataaaatagttgcaataaaataaggcccagagagacctagactcaacctaaagtctcatattgtcgataacatagcaagtgacagaaaagctcttgtgtttaaaatagatgggtcatgaatttaaagcaaagacagatggttttctttcatttttattgtgtgttttaatatagttgagcatcagcagcatgatattacagcaataggtggggtaattccacttttaggtaatagatatagaaattcttaaataggtctgtgtcagaccaaaatttttcattagttggttacttttttataaaaccagaaacctagctttacaaattctttttttttttttttttttgctgkgaaagcttataaatgcaaataatgtctttttcta

SEQ ID NO: 827597 - DNA, 544 bp, Homo sapiens
tcagctgaagtaactttctggtaacacaacctgacagttgatgtttcraatttggtagctgccatctttactggacaacaatgtttctatagttgttttaacatatgattttgcatatacatacttatacgtacttaaattttatttatattatataaaacaaagaggaaataggaaactaaatgctgactagtagttataaacatagtcctcaaatataattataaatctaaaatagacatgtagaaagttaattttaatttcaattgaatatagaatactcaatccatgtgtttcaattgggtaggaaaagaataaaagaacttatgtgaaattgtggggaaatactgctaaatactatgtttaaacagcaaagtatgattaaactatatattttagccttcttggaatggaagttcttgtcttgttatatgtaaatctgtttttcatttgaaaacataagggatagtctacttcactacaccataatactttgtttctaagaataaaaaagctaaaaacttacaaatgtagttcaatctct

SEQ ID NO: 827598 - DNA, 388 bp, Homo sapiens
tgagtgctagattgacatatgtctcatctgggatagtatggaagaattcatggcacactgattcagctgagaataacataactttttatgttstgcaattaaaatttattgttacagcaacctgttgcctgtaaagtgctaagggattactgccatcatagcaatataagggccttcagatagcttgcttgctgctttctatgctatttacgtagttcacaattacatttactccttcttcatcaggaggaatatgttaacttattactttccaaaccacactaatcaatcctattcatccctctcctcctaaaaacaagcaaacaaaacaaacagttggcttcatggcttataagggaatgccatttaccttttcttgaactctttc

SEQ ID NO: 827599 - DNA, 541 bp, Homo sapiens
cactcactaccctccaagtaggacagcaagccattcctgaaggatccacccccatgacccaaacacctcccactagactccaccttcaacaagagggatcacatttcagcatgagacttggaggggacaaacatccaaaccatatcaaataatagtttaaaaaatcagtttatggattcaagcctagatttgagttctggctttaaaactttagttacttttcagtagatacattttttaacctttcccacaatttagttgcctcatcagtaagtgggagtaataattattcccatatgagagaatttttatataggattcgataatgcatgaaaatgacagtttcccaggcaaatagtcaacagagggcagacacctgtattgcaactgctatgctcccattcactgcacacgtacagtgaggcctgatccacagtggaccttggttgagctttctcagcatgcccyttaactttttgtaaatttttaaaagacctatttttctagttgttaggcacctaaattgcataccataggtcca

SEQ ID NO: 827600 - DNA, 552 bp, Homo sapiens; identical to SEQ ID NO: 826394

SEQ ID NO: 827601 - DNA, 420 bp, Homo sapiens
aacccaagaacttttgagagcattccaaaactgcgttattttgtattcatgggcgtggggagaggggggatacttcttggcaatttatttcccctgaagaacagcactccctatccaggttcaccataaaaactgtgtgtcctccagagtctagggaagcatcgtcctgccagctctcccttctccccacaggcccccgcacataacagtggcgaaacagatggtcctccccctccccttctcctcgtcccttccgcagtcccacagtgtcctcccacccttccctgacaccttcaccagcgcttagtggccgaggccgcccgtcagggctcccaacaagtgcaaacttcggggaccttctctctgcycctctgcccccatctcatctgggttctgctgcagaactctcccacgacccca

SEQ ID NO: 827602 - DNA, 599 bp, Homo sapiens
tcctacagaagagtttcactgccccaaaattcccatgttccacctattcatctctgcctccccatccaccggaaaccactgatcttttattgtctmtctagttttgccttttccagaatgtaatatagtttgaatcatagagtgcatagccttctcagatgggtgtttttacttagtaatatgcatttaaagtcccactaagtcttttgtggcttgacagctcatttctttttattgctgaataatattacattggatttacatgttatctgttcaccttttgaaggacatctaggttgctttcaagtttgggcaattctgaataaaacctccataatcattttttatgcagggttttgtgtggacataaattatcaactcatttaagtaaatatccaggagtgcaattgatggatcccatggtaagacaatgcttggctttgtaagaaactgccaactatttttcaaagtgcctgaaccattttgcatctccacagcaatgaatgacagtatctgtttctccacatccttaccagcatacagtatggtcagttttttagccatcctaacagaattttattcatagctattctaataga

SEQ ID NO: 827603 - DNA, 599 bp, Homo sapiens
tcctacagaagagtttcactgccccaaaattcccatgttccacctattcatctctgcctccccatccaccggaaaccactgatcttttattgtctctctagttttgccttttccagaatgtaatatagtttgaatcatagagtgcatagccttctcagatgggtgtttttacttagtaatatgcatttaaagtcccactaagtcttttgtggcttgacagctcatttctttttattgctgaataatattacattggatttacatgttatctgttcaccttttgaaggacatctaggttgctttcaagtttgggcaattctgaataaaacctccataatcattttttatgcagggttttgtgtggacataaattatcaactcatttaagtaaatatccaggagtgcaattgatggatcccatggtaagacaatgcttggctttgtaagaaactgccaactatttttcaaagtgcctgaaccattttgcatctccacagcaatgaatgasagtatctgtttctccacatccttaccagcatacagtatggtcagttttttagccatcctaacagaattttattcatagctattctaataga

SEQ ID NO: 827604 - DNA, 635 bp, Homo sapiens
agggcaggagtttatattgtttaatctatagcttcctcttccmtctctttcttttcctcactgttgacttgtagggtttcctggagtttggattttgctgactgcacactcacagtactattcaacatgatcatcttccctgtagtttctacaatttggcagctggatccacctgaatcctttggcaaggccaaacgtggtgtctcaggaagaacacattgaagtctctgttttttaaatatcattatgaccttgatacatttttgttactcatttttatgtgaaaattgtttcctaacctgtttaaagtcatggttcagagtagcttttcaaagctcccagagcttccttgtctattgtttctgtacagtgttgaaggatatggaagcgtgctttctcaagttccctggctcgattgccctccccttctctgtcatttctctctgttgtcccaactcagttccatatgggctcccctctcagtagtctctcttgagtgatggcccgtctcaaggggcagttactggtcactggagcacagctgctccagccctgttaggccttacccatttcagctgctcttctcaaaccatttccctgtgatttccagtggcaatttgagggttctcttctgc

SEQ ID NO: 827605 - DNA, 575 bp, Homo sapiens
gcacaccatactcactctgttgatagccaaagatgatacaaaaatcttaaaagcagtcagagaaaaaagaaacattacacggaagaaaaaaatgataaaaattatgtctratttctcttcagaaacaattactccaaaacaatggaatgacatctttaaagagctgaaagtgaaacatgttagtctggaattctgtataggattctaaatagattctacataaaattgtagcatagtcctatatcctacaaaaatgaaaaataaagacattttcatacccttctccccaaatcagattttttttccaggagacctacacaagaaatgctaaaagaaattcttcagggccgggcgcggtggctcacgcctgtaatcccagcactttgggaggctgaggcaggcggatcacaaggtcaggatttcgagaccatcctggctaacatggtgaaaccccatctctactaaaaatacaaaaaattagccaggcctggtggcaggcgcctgtagtcccagctactcgggaggctgaggcaggagaatggcatgaacccaggaggtggagtgtgcagtgagcc

SEQ ID NO: 827606 - DNA, 671 bp, Homo sapiens
gaaaacaattctggtaaaatatatttttgtatcactttattaataattctttttaaaattctgtattttctttatagyaagacaagtagaacactaaaccatgaaaattctctatgtgattatgaccatagtgggttttaggccttaaaatattcagatcaggagttaccaattgtttaatataggacatatataaacaatcaaacttattgtaacttaaccttccccaagacacacttgacataaaatgtgccctatgtagcagagcatattgagtttgggtacatgagagcagtggagatatggaaactaaaaaattaagtctttccagtgaaaagtgatagtctcaaatgttcatatataaatgccttagaaactatctctggcaagtcctcatgtatgacctggccactgggaaataaaataaattttaaactaaaagctttcattcagctcaggttgaatgtttaaaaatgtatacacaacacagtggcatttgatgggtccaagggtccccaaggtgtccatggatagaattgagtggatctctgatagttgtattagataatcaatatttgttgtaatcctctgtgttttgttttttaaaaaaatgggtctgtaggcttcactagactgccagaggcgtccatggtacaaaaaaggctaagaat

SEQ ID NO: 827607 - DNA, 671 bp, Homo sapiens
gaaaacaattctggtaaaatatatttttgtatcactttattaataattctttttaaaattctgtattttctttatagcaagacaagtagaacactaaaccatgaaaattctctatgtgattatgaccatagtgggttttaggccttaaaatattcagatcaggagttaccaattgtttaatataggacatatataaacaatcaaacttattgtaacttaaccttccccaagacacacttgacataaaatgtgccctatgtagcagagcatattgagtttgggtacatgagagcagtggagatatggaaactaaaaaattaagtctttccagtgaaaagtgatagtctcaaatgttcatatataaatgccttagaaactatctctggcaagtcctcatgtatgacctggccactgggaaataaaataaattttaaactaaaagctttcattcagctcaggttgaatgtttaaaaatgtatacacaacacagtggcatttgatgggtccaagggtccccaaggtgtccatggatagaattgagtggatctctgatagttgtattagataatcaatatttgttgtaatcctctgtgttttgttttttaaaaaaatgggtctgtaggcttcactagactgccagaggcrtccatggtacaaaaaaggctaagaat

SEQ ID NO: 827608 - DNA, 630 bp, Homo sapiens
atcatctaggtattaagctcagcatccwttagctattcttcctgatgctctccctccccacaacccctgctccgacaggccccagtgtgtgttgttcccctcccatcccagtgtccatgtattctcattgttcagctcccatttataagtgagaacatgcagtgttgggttttctgttcctgtgttagtttgctgaggataatggcttccagctccatccatgtccctgcaaaggacgtgatatcattcctttttatggctgcatagtgttccatggtgtatatgtaccacattttctttatccagtctatcattgatgggcatttaggtggattccacatctttgctattgtgaatagtgttgcaatgaacatacgtgtgcatgtatctttataatagaatgatttctattcctttgggtatatacctagaaataggattgctgggtaaaatggtgtttctgcctctaggtctttgaggaattgctacactgtcttccacaaaggttgaactaatttacactcccatcaacagtgtaaaagtgtctctttttctctacaaattcaccagcatttgttgttttttgactttttaataatggccattctgcctgaagtgagatagtatctc

SEQ ID NO: 827609 - DNA, 630 bp, Homo sapiens
atcatctaggtattaagctcagcatcctttagctattcttcctgatgctctccctccccacaacccctgctccgacaggccccagtgtgtgttgttcccctcccatcccagtgtccatgtattctcattgttcagctcccatttataagtgagaacatgcagtgttgggttttctgttcctgtgttagtttgctgaggataatggcttccagctccatccatgtccctgcaaaggacgtgatatcattcctttttatggctgcatagtgttccatggtgtatatgtaccacattttctttatccagtctatcattgatgggcatttaggtggattccacatctttgctattgtgaatagtgttgcaatgaacatacgtgtgcatgtatctttataatagaatgatttctattcctttgggtatatacctagaaataggattgctgggtaaaatggtgtttctgcctctaggtctttgaggaattgctacactgtcttccacaaaggttgaactaatttacactcccatcaacagtgtaaaagtgtcyctttttctctacaaattcaccagcatttgttgttttttgactttttaataatggccattctgcctgaagtgagatagtatctc

SEQ ID NO: 827610 - DNA, 513 bp, Homo sapiens
aacaaagaatgttttttgacaggcaagcttcagctcagaagatggataaatagctcttcccctcccctatgcttcactttgaacttccctctctacctaatctctggctcatctttcctcttttggagggcccagggtgattgagcctgtcgagatgaatagctggtgaaatctgactggttcctgggtgggccactgttcatcaggctcacctggtccagctgggactcagcttttccttccacagtgtggccacagctagcgctgagtacaggccttcggaaacctgcaggtatagatgggtaaagcagaattaacaacatgcccagaaatagcaatttcgttattactattccacggtatttacaaagacactgttttgtgyttgcatagctttctttatgcttctgggcaaatgtgtaaaacatttttagctcttatgtggctccggcaagtcaatatgtcacctccagtgatagcatctagttgtctggcacacatgtgaaacattta

SEQ ID NO: 827611 - DNA, 587 bp, Homo sapiens
tcacttaaaaatatattttgaacatctactartagcaagtccctctgctaagtgctatgagacagtacaaaaagacccagacaattattgtggactaatggacttcacagtaaaagaggaatcataccatatgtatacaactaatcatggtacaattcaaaatagaaaaggaggcatcttacagactgagagatcatggcagtgatcagggaaaaaaagtgttatgatggtgtgcacttgtagtcctagctacttgggatatttgagtggcaggattgcttcagcccaggaattcaaggatgcagtaagctatgattgtgccactgcactccaaagtgagattctgtctcttaaagagaaagtgttatggaaaagatggcacttgaatggatgtgtgctgcaagctggctgctggtaccataaactgtttactggtcagttatgagtgaaggccataaaatcactttttgtcattatgtacacacactatttatttcagcttctttttaactattgattcattcatttactcattcacttattcagtagcaagactttcttgttgacaaaggcaatgtgttctggtg

SEQ ID NO: 827612 - DNA, 511 bp, Homo sapiens
gatccaagtcagtgatttcatcctttcagttgcctctgaaagtaagcacaataggtgatcagtatgattgttttttattaaaaagtactatttaaaatgtctcaacacttggatataatgtaatacaaatatcctactatagcatttttagggaatttgcctaatgttattttgaattcagtattactgtggggcaatattagtaggcttataaaatttgacttcaaaatagtggaagtagtttttatttttgacttgtaaactgatcctggggataatgccaaagagttgttcatacattgctctgagcaatagaagcttttatgactaaggtttttcccttagaagtaactactttaaaatgtatacttattttcatttgaacattttgatattttaaaaatagtagrtacattatagatttctatggatgggtttgagatattaacattttaactagatcttatgttacaaattttattgcttggaagagcttaaaaataaggaaaaa

SEQ ID NO: 827613 - DNA, 597 bp, Homo sapiens
gatcatatgccataaaacaagtyttagaaaatttaagaagattgaaattatataaagtatctttcccagccacaatggtatgaaactaaatgagaaatcaataacaggaggaattttggaaaattcacaaatacatgaaaattaaacatcatgctatgggacaaccaatgaaataatcaagaaattaaaaaaaatcttgagacaaacaaaaataaaaacacaacataccaaaacgtatgggttgtagaaaaagttttaagaggaacatttatagcaataaatgcctatatcaataaaaaagaggacttcaagtaaaaaacttaactcctcaaggaactagaaaaagaaaaaactaagcccaaaattagaataagaaaaaaataataaagatcagagcagaaataaatgaaatagagaatccaaaagatctctattgcaaaggatcaatgaaactgagttggttttttaataagataaaatagacaaaactttatctagattaacttagaaaagaaagaagactcatatacataaaattagaaataaaagatgagacattacaatgaataccatagaaataaaaagatcataagagat

SEQ ID NO: 827614 - DNA, 587 bp, Homo sapiens
cattgctaagtagagaagacagtctgaaaaggctacacactgtatgattccaattatatgattatataacattctaggataacacagctacagagagagtaaaaatatacatggttgccggggtttggtgtggaggagggttgcactggtgaaacacattttatctaatccactgtttatgggcacctaggttgattccatgtctttgctattgtaaatagtgctgtaataaacatatgagcgcgtgtatctttctggtagaacaatttattttcttttgtatatatacccagtaatgggattgctgggtcgaatggtagttctgttttaagttcttttagaaatctcctgttttccggataggtagctccctccatacagctaaactagtttacattcacatcaatagtgtataagtattcccttttctccatgggagactatgcagccataaaaaaagaataaaatcaggtcctttgcagcaacataaatggagctggagtccattatcctcagagaatyaacacaggaacaaaaaaccaaacatcacgtgctctcccttaataaatgaaagctaaacgttggat

SEQ ID NO: 827615 - DNA, 623 bp, Homo sapiens
attatccaggagaacttccccaacctagcaagacaggacaacattaaaattcaggaaatacagagaacaccactgagatactccacgagaagatcaaccctaagrcacataatcatcagattctccaaggtcaaaatgaaggaaaaaatgcccagagagaaaggacaggttacctacaaagggaagcccatcagactaacagcagacctctcagcagaaatcctacaagccagaagagcgtgagggccaatattcaacattcttaaagaaaagaattttcaacccagaatttcataaccagccaaactaagcttcataagtgaaggagaaataggatcctttccagacaagcaaatgctgagggattgtgtcaccaccaggcctgtcttttgagagctcctgaaggaagcactaagaatggaaaggaaaaaccagtaccagccactgcaaaaacaaaccaaaatataaagaccaatgagactacaaagaaactgcatcaactggtgtgcaaaataaccagctagtatcatgatgacaggatcaaatttacatgtaacaatattaaccataaatgtaaatggactaaatgccccaattaaaagacacagactggcaaatgggat

SEQ ID NO: 827616 - DNA, 449 bp, Homo sapiens
cagttgggaatcagtcacactaaatccaattctctgggttctcatgactaaggtktttaatttgggggaaaacaaagcaaaagcattggtggtgttttaatataattagtagagaatatatctaaggggttcaagtatcactgcagcaagcagctcattctgcagtaaaagggggattctgacactaggattgagttagggtggttcatggctgcaccgttttatcaatgtctcttcaagattccatggaatgtggaatgggaaagactgaaatagtgcaagtcttggctaagcttctatcaagaggtgttaggagctgataaataacctagtctttacagacatcccacgctgtaggtctctaagctacagattctcagatttttctatttcataaaccagtaaaaatattttttttaatttgagaaccaacataaagttgctatttt

SEQ ID NO: 827617 - DNA, 610 bp, Homo sapiens
taaaccatgatcctgtcactgcactccatccagggcaacagagaaagactctgtctctaaagaagaatatgatatactgttaagaactctttagtttacatctataaaatggaggcaacagtagtgtgtacttcatagggttgttatgagcattaaatgagttaatataaagtgttaacagcagttcctagtacataaaagagctcagtaagcattaattagttaatattactattgcccactgcactgccactgtaaggcaaaaaataataattagaaaaaaactgccaggccaggtgcagtggctcacacctgtaatcccagcatgtctggaggtccaggcgggaggatggcttaagcccaggactttgagaccagcttgggcaacatagagaaagagaccccatctctacaaaaaattaaaaatgagtcaggcatgctggtgcacacctgtatccccagctactgggcacagcctgaggtaggaggattcctygagcccagtagttcaagactgcagtgagctatgatcatgccactgcattccagcctagatgacagactgagaccctgtctaaaaaaaataccaactccccagttggggtgtcca

SEQ ID NO: 827618 - DNA, 595 bp, Homo sapiens
atcatatatttctccattctcttactgatggacatttgtgttgttttcagttataggaaattatgaagagagctgctatgaacattattacacaagcattttcctgcagatatgggaatgtgatattgctttgttataggagagttccgtgtttacatatgtaaagatttggcaaattgcttttcaaaatggttgtaccattgtacattcaccctaataatgtatgaaagttctaattcctccacatttagtgatgttagcccttttaattagctattctagtagaataaaaatatatctccttgtgattttatctttctctcatgaataatgatttctttttttttcctctttttttaaactgttgttttaggttcaagggtacatgtgcaggtttttatacagataaactcgtgtcatgggagtttgttgtacagattattttgttacacaggtactatgcctagtactcaatagttattttctctgatcctctccmttttcctatcctccaccctcaagcaggccccagtgtcttttgttcccctctttgtgtccttgtcttctcatcatttagctcccacttataagtgag

SEQ ID NO: 827619 - DNA, 611 bp, Homo sapiens
ttgggacaagattctataaactcaaatttgaattctcctacagctgtctggcttcaaactctgtttcatcctattaaaaagggggcagtaatrtcagtcccatatttgtcccagggggatcccacgtgctgatgagaagggacttgcaataaggaaatgtaagaagtgctggcttaggccgggtgcagtggctcatgcctctaatcccagcattttgggaggccagggcaggtggatcatgaggtcaggagttcaagaccagcctggccaacatggtaaaaccctatctctactaaaaatacaaaaattatctggatgcggtggcggcaggccccggtaatcccagctacttgggaggctgaggcaggaggattgcttgaaacttttagtgagccactgtactccaggctgggtgacagagcaagactccgtctcaaaaaaaaaaaaaaagagtgctggcttagcacctttggccctaacggaaatagggttctcctaaaacagatgactcagagaacatccttgacatcaatgccgtattcagaatgaagatcttgaaaagcagacatgtaatgttaaaaagagaatagtagctgtttttttttttaaca

SEQ ID NO: 827620 - DNA, 610 bp, Homo sapiens
ttctgtatgccttttatttctttttcttgactgattgcctttgtcagtatttatggtaatatgctaaatagtagtaaaagtgggcacccttgccttgtaccagatcttagtggagaaactttcagtttttcccygctgatgttagctgtgggagttaaaataaatgccctttattttgttgaggagctttccttctgtacttaacttattgagagtttttaatcaagaaagaatgttggactttgttgaatgctttttccatgtcaattgagatgatcatgtggttatctttcattctactaatgtgatgtatcaccttgattgattgtgtatgttaagccagacttgcatgccagagataaatcccacttggtcatgatatataatctttctgatatgttgttgaattcagtgttcatattttatcaaggatttttgcatcaatgttcatcagagaaattggcatatagttttcttttcttgtgatatctttgtctggcttaggtaccaaggtgattttggcctcatgaaatgtgttaggaagtatttcctctagctgtagttttggaagaatttatgaagtattagtagtaactctttttttgaatat

SEQ ID NO: 827621 - DNA, 637 bp, Homo sapiens
tgcatccactctgccattacagaaatccactgccctgaaaatcccctgtgctccacccattcatcccctcttccccctcagccctgacaaccactgatattttgctgtctctgtagttttaccttttccagaatgtatgtggctgggatcatttagtaggtagccgtttcatattggcctctttcactcaataatgtgtatctaagattcctccacgtcttctcatggcttggtagctcatttctttttagcactgaaaaatattcaattttctagatgtgccgtgatttacccatttacctaccaaaggacatttcaattgctttcaagttttggcaattatgaataaagctgctataaacatccatgttcaggttttgtgtggacatgttttcagctcctttggataaataccaaagagcacaattgctaaatcatatatatggtaagagtatgtttagttttataagaaatcaccactctgtcttccaaaatggttataccattttgcattccaccagcaacaaatgagagatcctggttgctccacatcctccccatarcttagtgttgtcagtgttctggatttttcccagtctaataggtgtgtagtgggatctcattgttgttttaattt

SEQ ID NO: 827622 - DNA, 631 bp, Homo sapiens
catcttttaacacgcttatttgaaaataaaaaaatctttggtgaggtgtatggacaccaaaggttttggccccttttttcatttgattttttgtgttcttacggttcaattttttttgtaacggagtcttgctctgtcgcccaggctcacctcccgggttcacgccattctcctatctcagcctcccgagtagctgggactacaggcagccgccaccacgcccagctaatttttttgtatttttaatagagacagagtttcaccatgttaaccaggatggtctcgatctcctgatctcgtgatccacctgcatcagcctcccaaagtgctgggattacaggtgtgagccaccgtgctcagcccatatggttgaattttaagagttctttgtatattttggataacaaatctttatctgctatttgctttgcagatgttttctcatagcctgtgacttatctttttattctcttgacaatgtatttcacagagcagacatttttaattttaatgaagtccatyttatcaattattttcacgggtcatacttttggtgttgcgtctaaaaagttatcaccaaacccaaggtcatctagattttctccaatgttatcttccaggagttttatag

SEQ ID NO: 827623 - DNA, 633 bp, Homo sapiens
acgtgaattacaagcatgtttgtgtgtgtggttcagcaaggcctgcccctgtctgcatgcaaagctcttgggagaagggagccaatttgcacaatgtgtatggatgcctcctgggagagcttatatcaagacacctatcccttctttgcaaaattcagagttaaagaaactggttgtgtgaactcagttactgctggcccagagctgtggaagtacaaagcagcccctgaaataaaactgccatgagggaagagggatttctgaacagatgcactgctgctggccctaagttagcaggagcgatggggatgtgagctggagtctgggaagactgggagccaaatatttgtcttcttgctcaagctagtttgaattggatttctgtggctcacatcaggaaggattctgaccaaagtattatgaatatcatctctcttgaaaaaataccagggagtgaaaggtatcataaattatttcatggatgcataaactaagttacagaaagcaatgaagtgtcccacaaaacatactgcaagtyctgcctcaaatagagaactgctttgaccccatgctctttacttcaaaagtctcctgtgtgctgctggctagactgctttttctcccaacttccaa

SEQ ID NO: 827624 - DNA, 424 bp, Homo sapiens
gttctatatcttctctcctggtacattattctgattgaggacatccttcagtagcttactctaaaaagctaaatagaaaagaaaatgcagggctgggcacagtggctcttgcctataataccagcacttcaggaggccgaggtgggtggatcgcgaggtcaagagatcaagaccatcctggccaacagggtgaaaccctgtctctactaaaaatacaaaaaaataattagctgggcatggtggcatgcgcctgtagtcccagctactagggaggctgaggcaggagaattgcttgaactcgggaggcrgaggttgcagtgagccaagatggtgccactgcactccagcctggcgacagagcaagactctgtctcaaaaaagaaaataaaaggaaatgcaaacaaaaccacaatgagatatcact

SEQ ID NO: 827625 - DNA, 504 bp, Homo sapiens
ggcaacagaattaatgcagaaagcaccaaaaaaaacttcaaagaaaatgtaattaatatcctcagagaaataacgggagatgttataatccataaaacaagaaaaatgcattcattaaaaaatacatttagataacaagtgagagttcttggaaattaaaaatatgatgactcaattttaaaaaaaattcaaaataactgcataacaataaagtcaagaaattttccctgaaaggagaataaaaagataagcaataacaatagaagaggaaagatgagaaaattagacgatcaatccaggaggttgaacatcttactaataaaaattttcaaagagatcagagaaaataaaggggaggacatttttgcagaaaaaaaatgccagartatttcctagaatggaggtacacaagttttctctgagtaataagtaaaaaaagaaattttaaaagttcaaagccccaaagcaaagtacacatatcactgtgaaattcagaacaaaaga

SEQ ID NO: 827626 - DNA, 609 bp, Homo sapiens
gtgggaggatggcttgggcccaccagttggagaccagcctgggcaacatagtgagatgccatctctacaaaatactttaaaaattagccaggcatggtggcacatgcctgtagttccagctactcgggaagctgaggctggaggatcgcttgagcccaggagtttgagtctagcctgggcaacttggtgagacctgcctctaaaacaaacaaacaaacaaaaaggagagagagaaatgtttgtttttctgcagagtaagagtacccaaagagtcataagtgactcaaagatgtaaaggaacctttgcctcataaaaatgcttgtaacattcaagaaaattctggaggaattgaaaataacctgaatgaatgtcagagctggtagaaacttgaagatgacttactccactggtttgttttcactgtattaattttgtgattgtactctatttgtgacaagggatagatttccacttacggtagtactaytaaattctttttgttaatatgtttatttaagttgaataaatgcccccttaaagaaaaatcctttagtaaataacagtgcaggaataacacagatatggcaaaaatagtgatggcaatatgg

SEQ ID NO: 827627 - DNA, 652 bp, Homo sapiens
aatatgaagaaagctgccatggatcccgagagctttgtctttcccaagttcatcattcttagccttttcagcagtcttcatgcactgttgtttttagatcccttcccaacctcctgtgcttttcagaacccactctcatttgtcaatctcccttttaactgtggtccagcccagtggtgagccccagggcagtgtgggttactttgctttgagaaggcacatgtggcaaagtgatgtgggccaacatagctggcacatcacactcatgacaggcacagacttctccacgtggaccactgtcagtgctggctatgaccacagaagaaactgtggaccatgtgagggggaatggcttcacagtatttgagtaaaaagagaagagtgttgggctcctgacagaagcttggagatttagaggaagagggggaatcaaaagaggaagatggtaagggagtaaagtagtggagagagggaggagtaagacccaggaaagcttattgttccagagaccaaaggaggaaggagtttaaggaggcaaggaggcaagcagcagatggattcaaatctcacagaaagacaaggaaaawccatgaggaaaaagaaaagcctactttgattaacaagaaaggctttttcagtgaattttagagta

SEQ ID NO: 827628 - DNA, 609 bp, Homo sapiens
gaagggcaagatgtagtagttaaggggaaaacgtttcttatttcactgacaattgggtttctagagttgaagactctgtttcatgttttctcaggactttaagacttcatttccagcctgcagacgccagagaaaaaaagaaagtcatgaagaagcaacattctccgtcctgtgtatgcagctttttccttcattcagaagttaattagctttttcctacttgctggatcacctgcccaaaattatatactgagtgttttttgtttgagatggagtcttgctctgtcacccaggctggagtgcagtggcacaatctcggctcactgcaacctccgcctcctgggttcaagtgattctcctgcctcagcctcccgagtagctgagattacaggcacccgccactacgcccacctaaattttttgtatttttagtagggatggggtttcaccatgttggccaggctggtctccaactcctgacctcgtgattcacctgcctgggcctcccacagcatggcyctctcactacttgttttgtggttattttactttcctattagcaggtgggcaaacccatcgaaaagaaaagggtccataattcaaagaagt

SEQ ID NO: 827629 - DNA, 667 bp, Homo sapiens
tctctaagtatcttcttccttcccttcaatcttttggtggctygcctttcctgtgaagtccagaggcccacttttagccaaatctgaatattggaagcttttctcttgaggagaaaaataagtgacaatctagctccttgaagatccagttaactaccttgtaaagcaggagtggactgcatgaaatacatgaacaatttctctctccagaacctttgccagacttggcacaggctggtctattagaaatacataattgaatattcttaacaattcaattcttcaacctcactttgatcaatagttcattacctaagttagatctgccaaatgggcaaactcttcagcccatttatcccatatttgcatgaatattatgctgtgaatgttacgctcctttgaacttcaaaagagtttcctggcctcattgactacaactttaacaacagagcataatggagttatacacaaggaccttttcccagctaaagaactcaaaccttgctgatgctaaacagtaacaaacttttatgtaagcaacaaatggctcattcatccattgcaatgcactatcagtattttcgggtttcctgagcctgtcttctctcttataagagaaattgtaactatggctaattagctaccagcaagtggcagcacccatctt

SEQ ID NO: 827630 - DNA, 459 bp, Homo sapiens
actttccaccagatctcattcttgctcatgggactcagcaagtggctggcagatggacttgtgtctggttataccatcttcgttacatatggaaatttttatagtactgatgtttcctacaaaakgggacatttagatatagtttctcaattaagtatatgtacaggattgtctgtatggagaaatatattactaagtgacaaactaagacaattgaataggcctgagtttggaaaatacatttttatcaggtgctttcctttttaaaattatctgtggaggacatggtggctaaaaagtagtgctgagggcaggtgatattacatgatgaaagacagaagttttattcttctcattgtgttctgagaaatcactttcagaccaatgacagggtatgcaccattgttaacagagtaaacagattttctgaactgtgattcctatatctattgaaaaagc

SEQ ID NO: 827631 - DNA, 677 bp, Homo sapiens
cttgtccaaactggttaattggatcctcttctattattagaaaccttattaagtttccataactgagggttggaagtgacagtgaagcactcgaaggggtgcagtgggtgagctccatgtgttatgcaatttacttgtgtcttccaaacctactgaggcctggtcttgcacatatgatttccattaataatgacatactgctgcatgcaaataaccttattattttatggatcaaaaaatattacatgagcagctgaggttgccaggtgacttgatgtcttgtgattaggagtgcagtagtggtctaggagcattttttccaatagataatagtgacaggccagagagatcatcagttttgcatcagtatcttagggatctccactgtgattctacccaggggctacacatgcctgcactatctgccatagacacttcaaatactgctggatgctcaacaataggtccagatgtcaaggcagcttgcagtagagcatggactttttgttaagtcgtctcttgatctggatttcgtgccaaacttgtagcctcataagtgatccaataaatgtgtaaaaacagctcactcaatctgttrtatattgtcttcaatatccaaatagttacaccaaacatattgcctctttcttcatggcaggccatggaagggacagcta

SEQ ID NO: 827632 - DNA, 342 bp, Homo sapiens
tttttctccttcaaactctatgattcaaacatcaagtaaaactcaatatacacaggcatattggttgtattttatcctatgatttatacagactactgtaacttctggagctttctcagaggagaaaagaagatgaatgttttatgaggaaggggcatacactgtaaccattttatatatttagtgccctcatacatttctctccaaaaaaaaawacactttgtaacccaagaacagaaaaccaaacactgtatgttctcactcataagtaggagttgaacaatgggagcacgtggacacggggaggggaacatcacatactgggccctgtcagcagttggg

SEQ ID NO: 827633 - DNA, 342 bp, Homo sapiens
tttttctccttcaaactctatgattcaaacatcaagtaaaactcaatatacacaggcatattggttgtattttatcctatgatttatacagactactgtaacttctggagctttctcagaggagaaaagaagatgaatgttttatgaggaaggggcatacactgtaaccattttatatatttagtgccctcatacatttctctccaaaaaaaaatacactttgtaacccaagaacagaaaaccaaacactgyatgttctcactcataagtaggagttgaacaatgggagcacgtggacacggggaggggaacatcacatactgggccctgtcagcagttggg

SEQ ID NO: 827634 - DNA, 514 bp, Homo sapiens
caaaatacaaacagctcatttgatgcatcgaactcccacctattaaatctgtttcttatagaggattcaagttcaaccaattttctctatcgagtttcaacttcmtggtccaatacttttcctcagcattaccaattaaaaattaaggaaactgaaggttattgagtattccaggcttaggtgatccaatgttatcataaaatacaaccaactagtgctggaataccttggtctattgtgacatcccgaaaggtgagaatatgacatctatagctttacttgcaaagtgaagttacttcaaattaacttcatattagcaatgatatgcaggatatgtaaaatatgaaaagaaacccactatatatttgacagtttattccaccattgagttaaacttcagttaagcaatctccttaatggtaatttccaacaatgctgggtaacgtcggcgttattttttttctttgctgtaacttagtaataatttctgtttaattttattacggtttggaag

SEQ ID NO: 827635 - DNA, 613 bp, Homo sapiens
tgttttgagacacagtcttactccattgcccaggctggaatgcagtggtgtgattgtagctcactataacctcgaactgctggattcaagtgatcctccccactcagtctcccaaagcactgggattacaggccygagcgccatgcctagcctgaaggacttttatttttgcttacctacccttaccataaataataaaatatttaaactcagtgactaatattttctgttacataaaacttaatagtttttagtgagtttcagtggccagtactgataagccatgaaaaataggcattatagagataggaaaaaggaggaggaatgaacaaggaataaaccattgagaaaagtctgtccttttatttccaaattttatattgaatgaaacttaagattttggaagaaattggtaaataatgaaaattaagttttgagagatgttgaatgtgacacggaaaaacgttttcagaatctgctgtgttgatgtcttatactgtttgcttagatttgtttccagtctgaaacttcacaggggacatttaataacatatcctgtgatacaggccctgacgctggtcactctttctgaatggataaagggcctatgtaa

SEQ ID NO: 827636 - DNA, 588 bp, Homo sapiens
ttatttgaatagataaacataattgacaagtcattagctrgacttaaaaaaaaagagaagactcaaaatcagaaatgaaagaggggacattacaactgatattgcagaaatacaaaggatcataggagacttgcaatgaacaattatacatcaacaaattggataacctaggagaaatgaataaatttagttttgaaacatgcaacccactaagactgaatcatgaaattgaaaatctgagaagactgataataggtaaggagattgaatcagtactgaaagatctcccaaagataaatgcagaaactgatggcttcatggctgaattataccaaacatttgaagaagaaccaatatcagtttttctcaaactttttaatacaaattgaagaggagggaatactcccaaactcattttacaagccaccattaccctgaaattaaagccagaaaagggcactgtaagaaaaggaaattatagaccaatatattcctaattaacacagaagcaaaagacctaaataaaatattagcaaaccagatttaacagcatagtaaaaggatcatacaccataatgaagtgggatt

SEQ ID NO: 827637 - DNA, 612 bp, Homo sapiens
aagatagcaatgggatcccaattatcaaaagtcattaaaatataaacatcttaagcaaggagaaaaaaattgcctgaaagggtgaacattgtggctaaatagtaactaaggagactagaactcacattattttccagttcttagattctgtgcctgcattttatttacttttttgttgtataagaataattttatttgactcattcttcatgtcattaaaacccccttgatgccgatttcaatgagtctaagaaaacatttatgttagatatatcattactgggtatatcactaagaaatgattctgccaataaaaaaatatggcccatgctttcctattacctaggagtagaactttaagcttacaggagctcttttaaattcacttagacttagtttccatatgtcactcatagttcacccattaaaaaaaataagctaatctcatcacttcctattctgcatatgacacttatcacttcatgactccttatgatacctgtccttttccgctccataccatgcttcagttcatcaytaatggtgatgcaactttaaaaaaaaaaactgataaactaatgtctctagaattttctttcaggcctccaagaa

SEQ ID NO: 827638 - DNA, 661 bp, Homo sapiens
ttatggtcatggaagaaagggaagcaaatacatctttcctcacagggtggcaggaagaagaatgagagccaagcaaagagggaagccccttataaaaccatcaggtctcgtgagaacttactcactatcatgagaatagcatggaggaaactgccccatgattttatgtcccacggggtccctcccaccacatgtggagattatgggaattacaaatcaagatgagatttgggtggggacacgcaaaaccatatcatcaggagagattgggggcctgttttcagcattctttaaaaaagaaattccaactaagaattttgtatcctgccaaactaagtgtcataagtgaagaaaaagtaaattttttttccagacaagcaagcatcaagggaatgtattacaactagcgagccttacaaaggatctttaagggagttctaaagatggaaacaaaataatgatacctgctaccactaaaagacacacatacgtaaatagcctaccctataaagcaatcacatgataaaaactacaaagtaaccagataacaacttcatgataggatcaaaacctaacatatragtattaaccttgactgtaaatgacctaaataccccacttaaaagacacagagtgacaagttgaataaaaagtataactc

SEQ ID NO: 827639 - DNA, 585 bp, Homo sapiens
catgcataatatgtattaatataaaagcattttctttacatttttggaagtatgttttaaataataaggggaaaaaatccttgattccatactgaagagtcatgctcttatttacccaactcaattcccttgcctgaaatgtaaagggggttcctgctattactgcttaatgcaaagacattgaaacaacaaataaatcatgtatcttttattgggacttgcttgttttcctatttataccaccctaagctatcatcataggaatttacacctccatccccaagcttatgacttcatcaacttcaccacaaatcttccaaaataagtgctgacctttccctttgctgaagtatcttgaaattttagtacaatgagatagtaaggattgtaagaaacactagaaaaacaagtagaagagactaccaatggaaatacagcacagactctgaaagatgtgaattaatgaataattactgtgtagcagactctttttccagggctctgtaggtattacttcatttatcctcacatgaaatctacaarttagttttgttaataaatccaacttcaaataaagaaattgaa

SEQ ID NO: 827640 - DNA, 609 bp, Homo sapiens
atgatgagaatgaggactggatcccttttttaaaacaygctacaacctgagtcattacagagtcttcaagcaaggaagaaatggcttcaatgttggggaagaaaatttgcctcttctgccagggaagtcgtggtagatgtgtagtgtcagggtattgtgtggattatagcttccaatatttccctattccaatgccattattccctaccaatactttaacttctctaaagagaccaggtgaattcattggacattggacaacagaccaggtgaattcattggacattataactatttcaggaaactgtagggtgaaaagctgagtttgatttcttttaaaactatcttagccctgcagctgtaacagataaaagattattttaatacagctttagagagttcctgattttttttttttgcctgtgccttgaatcaagattctaatattttgagcttgacatactatttctttaagtttccaacactcttaaaagcatcctctctacccccactcccaaatcaacagtcgtttagtttctcaagctctggggtaaaagagtggagcgagatggccaaatagaaccctccaccagtcatcctccctgcagg

SEQ ID NO: 827641 - DNA, 628 bp, Homo sapiens
gatggttgaactagtttacagtcccaccgacagtgtaaaagtgttcctatttctccacatcctctccagcacctgttgtttcctgactttttcatgatcgccattctaactggtgtgagatggtatctcattgtggttttgatttgcatttctctgatggccagtgatgatgggcattttttcatgtgtctgttggctgcataaatgtcttcttttgagtgggggccaatttcctgtttttcttctttagactatcatgaagtattgtgggaaaatcaaaggtgaattctcactgcttgtcctcaaattgtgtataatccaaagacagcagagaaagagacaccagaatgtattgaatatgtgtcaggcactattgggatgttacacatattatcttatgtaagcccctcaatagctttattggaaagttgttacctccatttgataagaagtggagcctcaaaggggttaataaacttgcccaaggtcatgcaagaaggaaagagaaaagcccagtttatgcccagaactggatcatgcttagaggaaggaacaaaacctcagagctagaagaaccaggagtggaaaactaacaygggatttgagaatttggtcccaagtcgagaga

SEQ ID NO: 827642 - DNA, 509 bp, Homo sapiens
acattagatgggagacactggaaggaagattttttaaaaggcaaggaacttggaattacaaaagaaaaagtcaaatgagaaaatactatgtatttatgataccttaattggctctgcagtcaataaaaattatgtgtcatactgaaacatttttataataaccaaaaatgataaaactacgttaggaggatggagccagagaaggtgtattgtgtaagagatgtaaagtgacatctttttgtagtaaggcaaagagaatgtttaaaattggtaaaccagccgggagcagtggctcatgcctgtaatcccagcactttgggaggctgagtcgggcagatcacttgagatcaggaattcaagaccagcctggccaacayggcaaaaccccgtctctgctaaaaatacaaaaattagccaggcatagtggtgcgtgcctgtaatcgcagctagtcaggaggctgacgcaggagaatcacttgaacctgggaggtggaggttgcagtgattat

SEQ ID NO: 827643 - DNA, 608 bp, Homo sapiens
agacacatagacaaaaatagatataaataataatataaaaatacaaaatatgtattatatgccatgttatatatttatattgtagataataaatatagctacaaaagagctaagaataaggacaacatggatgctagttagaagacaaagcactacttctaaattctgagaaactgatttttcagtttagaattttatacccagccaaagtggcaggatgctacaatacatattttcatacatgcaaggactcagaaagtttactttaccaatgccctttcttaagtagttaattgagaatgtgctgcaacaaaataaggaagtgagaaagaagtaggggatccaaaagatagtggaatctaagaaagcaatgaagaaaagttctatgatgacactagtgtagcaggcatagggctaaatagtgtagcttggaagaagaaaggttggagaacctcagtttggacctctgcaaacagaagcagaaggggaactcaacaggatgcctaatataatggagtttggggagaggaggaaacaagaacatgaggctatactagagcaaagagttcaaggaaaamaattcagaaacatcaggaaaaatgaaaagt

SEQ ID NO: 827644 - DNA, 552 bp, Homo sapiens
acccttcactcggtcatcagccaacctgcacctgcagcctgaagacgacatctcccctcagcttcccagggaataragctgggctgggacagcagacaggtgccagccactccccttggtttcccgggaaacaaagctgggccgggatagcaggtgggtgctggccactttcctcggcttcccagggagacagagctgggttgggacagcaggcgggtgccagccactcccctcagcttcctgggaaacagagctgggctgggatagcagtagcaggcgcgtgccagcgaactctccttggcttcctgggagacaaagctgggccaggatagcagtagcaggcgggtgccagccactcccctcagcttccggggaaacaaagctgggccgggatagcagtagcaggcgggtgccgggccactctcctgggcttcccaggggaacagagctgggttgggttggaacagcaggcgggtgttggccacgcccctcggcttcccagggggaacagagctggaccgggacagcaggcagggtgccggccactctgct

SEQ ID NO: 827645 - DNA, 555 bp, Homo sapiens
ataatcatttattagatgccaaaaatcattcaataaaatttaatatccttttatgataaaaactctctcttatcttccattccctaggcagagagtcagagcaagagagagcaagagagagagagaaagatgacaaaaaaaaagttcaccaaattagatgtagaaagcatatatctctttgaggataaccctgagtgcaaattttttaaaaagaaatgtaactcagcacaataaaagtcatttatgagaagcccacagctaacattacactcaaggcccttcgtgtaagatctgcaacaagacaaggatttctactgttttagtctgtttgtgttgctcaacaaaatacctgagcccaggtaatttataaagcaatgaggtttatttggcttatgtttctgcaggctgtacaagcttctggtaagggcctcaggaagcttccacacayggtggaagatgaaggggagccagaatgtgcagattacatggtgagagagtggaagcaagagagaggggcaggaggggccaggatcttttcaacaatcagctcatgga

SEQ ID NO: 827646 - DNA, 631 bp, Homo sapiens
gtgtttctaccatatacatcttaggattgttttttctatttctgtgaagtatatcattgatattttgatagggattgcattgatgctgtagattgctttgggttgtacacatataaactatggattcttccaatccatgaacatggaatatctttcctgttttggtatctttaatttctttcatcagtgttttacagttttcatagtagaactctttcacttctttggttaagttaattcttgggtgtttaattttatttgtagcttttgtaagtaaaattactttatttattttttatactgtttactattggcgtataggaatgctattaattttgtgtattgattttgtgtcctgcaattttactgaatttatcagttctagtagtattttggtggagtctttaggtgtttccaaatataagataatatcatttgtgaacaaggataattcaactctttaatttccaatttggatgccctttatttctttctcttgtctgattgttctagctggkacttccagtacaatgttgaataaacagtagttattcaaaagtggacattcttgttatattctagattttggaagaaaggctttccatttttccctttttggtataatactagc

SEQ ID NO: 827647 - DNA, 636 bp, Homo sapiens
gtgtctttgtttgtttggtaaggttatattttcttggacagtcttgatgctagtaaatgttcactgttgtctggcattgaagagttaggtatttattacaatcgtcacaatctggtctcgtttgtatctgtccttgttgcgagtctttccaggtttgtgaagggacttgagtgttgtgatctaagtttttggtcactgcagccatatcttcatgggttgggggggatatctcaagcccagtaatgctgtagttcttcctgaatcatagaggtgtcaccttggtggtcttggataagatccaaaagaattctccaggttactatgcagagacagttgttcttttccctcactttctcccaaacaaatggagtctctctctctgtggtgagctgcctggagctggggaaagggtgacacaagcacctctgtggccaccactgctgggactgcactagatcagccctgaagacagcacaggactgggcctttcccaagtctctctgtaaccactacctggctactgtccaygtttgcttaaggccctaggactctacactcagcaggtggttaagccagccaggcttttgcccttcccttagggacagtgtgtccccttgggcccctgatgagtccaga

SEQ ID NO: 827648 - DNA, 606 bp, Homo sapiens
agagacacacaaagaatgccaaacattgtcagcaagccaccagaagctgasagagaggcctggaacagattctccctcacagtgctcaggagaaaccaaccctgtcgacaccctgatttggacttccagcctccaggactgtacgacaataacttctggttgttgaagccgcctggttgggggtcctttgttatggcagccccaggaaactaaggaaccggacgacacaaggaccagatgctcctcgcggaacttacatgcagactaagggaaagcagggcagacatgaagtcatgaggaacaaaacacggactggaagggagtaaagaaatacaaattaggtgggttcgtagaagaataaagaaagctacctttcctacacacttgagtatagactctgattggtgaacatcatgtgattaacttcctgagtggttatcgagcttccttttacgcttcagtttcctcgcctttccagtagctgatttctccagttttacatctgcctaacccgcacacaacaattaccttcacctctgacagtgaggaggcggagaggagatatgatgtgatatgatgtaagagaactggatccagaagcaagtg

SEQ ID NO: 827649 - DNA, 628 bp, Homo sapiens
gctgtccctctgtcgagctgcacctgctctcccccatgggctgtccctctgtcgaactgcacctgctctccatgggctgtccctctgtcragctgcacctgctctcccccatggctgtccctctgtcgagctgcacattgctcctttccaagggctccttccatgaacttgcctgaggtgtctcaggagggaaggagttggcagagggcaggagagaatgggacaggggaaccatttcattaaaaatgacccctccttcctgcccccaaagagctaaaccaacatcctctttgctgatgtccaaatcaaactggtgcagagttcagccatacacagggtggtccctctgatgtggtgtggctctgtgtccccacccaaatctcatctcaaattgtaatccccatgtgtcagggagggaccgggtgggaagtgattggatcatgggaacagtttcccccacgccgttcttgggacagtgagttagttctcatgagagctgatggttttaggagtgtttggtagttcttcccctcccccctctctcctgctgcactgtgaagaaggtgtctgcttccctttccccttcagccatgattataagtttcctgaggcctccccagccatgcag

SEQ ID NO: 827650 - DNA, 555 bp, Homo sapiens
ggctccagtggtctgtaatgakccacctgggcacggcacatctgtgaaatctctagtcacgcgctgagcctgaaatccaatcttcgggtttgaatgatgcggagaccctcccatgatcctttttccttccctagtcttacccccatcctgctgatgatactatctaaagttcacaagtagagagctcagaagcattcaagaggttagaaatgaaccactcaagacttttctgctgttgcaatttactctgaaatatgtataaattatatgatcttgttctgacaagaaggggaatgttagtatactctgggacctgcccgcaatcttttactatctggaaaataccagcatgggtttagattatgtagttataactgtattaaaaatgtgtgtgtgcacgctcacatgtgtatgtgtgaggagtgtcttacgaaataatggataacccacaaaatgttggggtccaacagctggctgatgttcatcatcgatatagttttgtagttgagcagtgatgatagttttggctggcgttcacggagtgctgactcgggg

SEQ ID NO: 827651 - DNA, 555 bp, Homo sapiens
ggctccagtggtctgtaatgatccacctgggcayggcacatctgtgaaatctctagtcacgcgctgagcctgaaatccaatcttcgggtttgaatgatgcggagaccctcccatgatcctttttccttccctagtcttacccccatcctgctgatgatactatctaaagttcacaagtagagagctcagaagcattcaagaggttagaaatgaaccactcaagacttttctgctgttgcaatttactctgaaatatgtataaattatatgatcttgttctgacaagaaggggaatgttagtatactctgggacctgcccgcaatcttttactatctggaaaataccagcatgggtttagattatgtagttataactgtattaaaaatgtgtgtgtgcacgctcacatgtgtatgtgtgaggagtgtcttacgaaataatggataacccacaaaatgttggggtccaacagctggctgatgttcatcatcgatatagttttgtagttgagcagtgatgatagttttggctggcgttcacggagtgctgactcgggg

SEQ ID NO: 827652 - DNA, 555 bp, Homo sapiens
ggctccagtggtctgtaatgatccacctgggcacggcacatctgtgaaatctctagtcacgcgctgagcctgaaatccaatcttcgggtttgaatgatgckgagaccctcccatgatcctttttccttccctagtcttacccccatcctgctgatgatactatctaaagttcacaagtagagagctcagaagcattcaagaggttagaaatgaaccactcaagacttttctgctgttgcaatttactctgaaatatgtataaattatatgatcttgttctgacaagaaggggaatgttagtatactctgggacctgcccgcaatcttttactatctggaaaataccagcatgggtttagattatgtagttataactgtattaaaaatgtgtgtgtgcacgctcacatgtgtatgtgtgaggagtgtcttacgaaataatggataacccacaaaatgttggggtccaacagctggctgatgttcatcatcgatatagttttgtagttgagcagtgatgatagttttggctggcgttcacggagtgctgactcgggg

SEQ ID NO: 827653 - DNA, 630 bp, Homo sapiens
tgcaccatatcaatgggatgaaggatgaaaaccacatggtaatttcaattgctgctgtaaaagcccttgataaaattcaacatccctttatgagaaaaaccttccaaaacyagaggtagaaagaacatacctcaacacaataaaagctatacatgacagacacccagctagcatcatactgagtggggaaaaactgaaagcctttcctgtaagatctggaacaaggcaaagatgcccactttcgctactgttcttcgacatagtattggaactcttagcaagagcagttagacaagagaaataaataaagggtatccaaactggaaaagatttcaaattatccttgtttgctgcagatgatatgatcttatattttgaaaaacgtaaagactctatcaaaagactattagaactgataaacaaattcagtaaagttgcagtagacaaaatcaacatacaaaaatcacttgaatttctagatgccaacagtgaacaatctgaaaaagaaatcagtaaactaatcccatttataattgctacaaataaaataaaatacctaggaataacattaaccaaagaagtgaaagatctctgaaatggaagtataaaacattgatgaaaaaaattgaa

SEQ ID NO: 827654 - DNA, 638 bp, Homo sapiens
cacagtaaagaattgagggttataaaactattttctattatactgaattggtgaatacatgacatttagcatttattaaaacccatagaaatttaaaacaattaatgttaatgtatgaaaggttttaaaaaatgtaaatcaggatatctgttaattccaagatcattaatgcaagatgtgaggaaagaagctacatgtattacaaatgtatgaaacaacctccctgaagcaggtgggagaataaggtactgacctaagtaattttggaaatgaatcatatccctaaaactgaaggaaaaagaactgtacttaagcactgtactctagtcgatatattagctccccatggaggtacaggttgataattttgaaggcactaatatcctgtgaatgaaaaaatacacaaatggatggcagatggtagaaaccagggattttacttttaaagtgagagtttacagataagtcatagaatgtggctaagatgattcatgtcagagagctggtaacatcaatatgaatctaggttttgcttaaaatagacacatacaattacatataggaatatttgtagatatgagcatacsatacaggttagcttacatacgtgtatcaccctgcttgattagactagaggg

SEQ ID NO: 827655 - DNA, 523 bp, Homo sapiens
cctggctcctcttatgaagattcttgtcattatattggacacactggggtgatccaggataatcccctcatctcaaagtccttaccttaaccacatctrtaatgtcccttttgccatgtaagataccatattcacaggtgatggggattaaggcatgagcattttggaggagcattattctgtttatcttactgataatattttttgtcgggaagaggcctccccaaatctggccataaactggcccctaaactggccataaacaaaatctctgcagcaatgtgacatgttcatgatggccataacacccaccctggaaggctgtggatttaccggaaagagggcaaggaacacctggcgcacccagggtggaaaaccacttaaagatcttcttaaaccacaaacaatagcatgagtgatttgtgccttaggaacatgctcctgctgcagataactagcccaacccatccctttatttcagccaatccctttgtttcccataagggatacttttagttaatct

SEQ ID NO: 827656 - DNA, 530 bp, Homo sapiens
agaggttcatccctacccttctagacgccctcattattattttgaagaaaaagaccctccagatctttcttttctggaggacactgggcgaaaastagttaccccggtgactgttcaagcagtgccttgagcgaccactcttaggtttattcaggcaggaattcagcaagctagatgagagggtgatttagaggctcagcagttccctattagaatacaccccccagatcaacagggaaatattatagctacatttcagtcttttattttaaattactcaaaaaatttaaataagctataaatcagtatggaccaggttctccttttctaatgggactgttaaagaatgttgccatttccagtcggatgattcctactgactgggatgctcttactcaagcttgtctaactcctgctcagttcttacaatttaaaacttgatgggcagatgaagcttccattcaagctgctctcaatgcccaggcccaacctcaaattaatataactgcagactaacttttagggggttg

SEQ ID NO: 827657 - DNA, 527 bp, Homo sapiens
tatacacacactcacatatgtatatakagagagataagatacatatatatatagagagaagatatatacattcttagatgtgtttctattgtatcttctctttactccattttctttgcctatttctctagatcattttttagagtaagtgttaactgctttggagggcaagaagcaataacaatctatcttgtattaaattgttagaatgttattataaatataattatttgatagctatcaactattgacatttaacacactgttgtgttgcagtttgctttaaagtttgattccacacaggaatagaatgtgttggcaagcatattaaaataagaattagatgaattggaccctggaactttaacatttcaagatgcaaggttctttttcaatttgtaataacatgtacggcttaaattctcttataaattcacaattcttctgtacttgcttccttttcacagtctcagaattgcacatcacatgatattctaacagcaacttccttcagagatctgaatgac

SEQ ID NO: 827658 - DNA, 670 bp, Homo sapiens
atatgtactcaatgtttagctcccacttataagtgaaaacatatggtatttggttttctgttcctatgttagatggcttaggataactccatccatgtttctggaaaggacatgatcttgttaatttttacagctgtgtagtattccagggtatatgtttaccacattttctttgtcctgtctactattaatggacatttaagttgatgtgtttgctattatggatagtgctgtgatgaatcacacttgcatgtgtctttatggtagaataatttacattcctttgggcatatacccaagaagaagattgctgggtcaaatggtaattctgttttaagttctttgaggaatcaccacactgctttccatgatggctgaaataatttacattcccaccagcagtgtataagcattcccttttctccacaatcttgccagcatctgttattttttgacttcttaggaagagccaatatgactggtgtgaaatggtatctcaatgtggttttgatttgcattcctgtaatgattggtgatgctgagcattttttttcatatgyttgttagccttatgaatgtcttcttttaaaaaatgtctgtttatgtcatatgccaactttttaatggcgttagttgttttttgcttgtgaatttgtttcacttccgtata

SEQ ID NO: 827659 - DNA, 564 bp, Homo sapiens
tagatttatttcagtgctctctattttattacattggtctatgggtctgattttatgctaatacgttactgttttgattactttagttttttttttttcttttttttagacggagtctcgctctgtcgcccaggctggagtgcagtggcgcgatcttggctcactgcaagctccgcctcctgggttcacgccattctcctgcatcagcctcccgagtagctgggaatacaggcgcccgccaccacgcctggctaattttgtttttgtatttttagtagagacagggttttgccatgttagccaagaaggtctcaatctcctgatctcgtgatctgcccgcttcggcttcccaaagtgctgggattacaggtgtgagccaccgtacttcagcttttgaatatactgtgaaatcaggaagtgtgataatttcagctttgttctttctccakattgattggctatttgtattttttacagttcttgtggattttaaattcttttctactttcttttttttttttttttttttgagatggagtttcgctcttattgcctaggctagag

SEQ ID NO: 827660 - DNA, 620 bp, Homo sapiens
tcatcttcttacttaagtttattttgaggtattttagctcatttgattgtaaattaarttgttatcctaatttccttttcaggtcattgttagtgtgtagaaatacaactcattattttatgttatttttctatcttgcaaccttattgaatcatttattagtcctaaattcaagccacatactaattccattctgtgaaactctcatactgctccaattatttccttattggtgaaaaatgctacaacaaatattatacatataatttcacacatgtgtataaaaaacattcacacatatctatgagaaacattcctaaaagttgaattagtaggttcaaaggcatgcacattttacatttaaatatgctattttaaaatgaaaaacacgtcatattaacaaaagttatcatttaactatgtaaaacaaaataaatacaaattattatttttgcttgttcatatttatttttattttattttcctaataaatatatttctggtataaagttctctagcaatattaaatcctattaaatttacttatacaatacttgtttaaaatttcaaatcccaaactcttattaattttacaagctgttctggaaagaaaagtttat

SEQ ID NO: 827661 - DNA, 622 bp, Homo sapiens
ctataatttttcctgattcagctgtgatataatgtcctctcagatgctgtctttatatttctgggccagctttagtgatgcttctaagtgtttgcaaaataatttgtgcataattctgtcatacaacatgtcttccttgaccacaaaagtctaattgtttgtctgtagtttccactagaaggtaagttaccaatttactgtattagtctgttctcctgctgctaataaagtcatacctgagactggacaatttataaagaaaagaaatttaattgactcagagttccatatggctggggaggcctcacaatcatggctgaaggtgaatgaggagtgaagtcacatcttacagggcagcaggcaagagagcttgtgtaggggaactcccctttataaaaccatcagatattgtgaggcttaatcactatcaagagaacagcatgggaaagaaccactcccatgatttagttacctcccactgggtccctctcaccacatgtgggaattattggagctacaattgaagatgagatttgggtgsggacacagccaaaccatatcacaactccattaaaaagtggacaaaggatataaacacacaatttttcaaaagaagatatat

SEQ ID NO: 827662 - DNA, 557 bp, Homo sapiens
aggtaaaagactcccactgcctttgcttcattaacttcctcattctctgcaaacacttgatcaggtctcctgggycatatccttttattctcatacaatgttggcaaatggtacacttgatgctcttctgacaacttagatgcttgtttattataattggaacacttactagttaaaaaataatgagtttcccaagagtttttgttgttgtcattgttgtattttgattgtgttttgttttacagtcaaattaagcatttaaatcatttttctattcaggtcctcatagggatgacagaagaagtatgctttagaattgtgtacctcttttgtctctcctcctcatatctcttcaaggagtgctgatcactttctctctccttctgaaactctttcctacttgggctgtttaaaacaccgtttcttgctgatcctcttccagtttctctgaccatttgctgcttgcctttttctacttcttcctccaacagttatttgaacactggtgttcatgaaagtttccatacccggcccattattcttctcctgccatatat

SEQ ID NO: 827663 - DNA, 654 bp, Homo sapiens
gcatattgaaagtgcttatcttttcctgacatggtatggtggttctaatttgggtataaaccaactggattgtgtgctattggggtgtagaagcagggaagttgcattttgttgactctactggcaaccataaaaaagtattggaatttcagcttggtccttctcatattatatgagctgaaatgagtctaaaaatgaaaatatcccacggcaatctaatatacatgtctttctcattttatatagttcattaaagcctctatatttcttatataattatattattaaagtatatttctaaaattcagtaaaattaaaaaatacagccattaggtggtaaaatagtttataggcattatcctggattaaataaacaataatgtgttacaatattcgataaaatatatctaaatagttatgaaacatgtcctgaaagaggtaatagtaaggtgattaaccatcatttgagagacattggagacaacagagtcacaaaagagaggaagaaaaaagaggggaaagtgctaaaacacaaaaaygtaaattaacattgcaataccaaggacagtgacagcacatgagtttgggttggaatggcatattcatttattcatttactaaacaaaaatgcagaatgcctgttatatttcaggc

SEQ ID NO: 827664 - DNA, 595 bp, Homo sapiens
acacatatgtgtagatgtgtacgtatgtatgtatgtatacattcctccatacatatatgtatgtttctgtgtatatatacacrtacatacacacatacatatagtattttttccttttttccatttgtttcagataagtgtataagtcaggaccttgtttctttagccagaagcagagatcatgatttgtataattttattttccaagaggtgtaagctcttacaagccaatataaagaactttcgccacagaaattttatatgtgaacttctaagagagagagacacagaaaaatagagattctctatgaaaaactactttttgtagtatacaaactaggactacttaaaacaggaggaaaaagttaaatgataaaattaaggcagctggcctgtaatcccagcacttcatgagggtgatgcaggcagatcacctgagatttttgaggacttattactacaaaaactggttggctttatattaaaatgatcatattttacatatattggggtaaataaaatagattaaataaaatatatttttaaaaataatttcactggtttctttttaatctttaaattttaatttgtatgt

SEQ ID NO: 827665 - DNA, 454 bp, Homo sapiens
tgctactgcaatcgccatcttgccctggggaagaactgaatccaagcagtgggaaccaaggcraactgcattcacgctcttggctcagggactctgcgctaagcaagttcccaccaccctcttcaaagcctatggttttcttttcccatctgcccaagggagtggataaaacagactgcatttcaggtccatggattcctgaagctggatacatgatcacagaatctctgttggacaacctcttcaaggtctcctagacctgtctggttctcaagtccactacagctcccagccatagctaacttctgcttaagcataaatactggtaggaagtttgttacctctttgagagttccattaaaaagtttttttcaactttgatcaatgcaaagtttgtcctacaaataagttagttacaactctttattcctataacttccatcccttagcctgc

SEQ ID NO: 827666 - DNA, 479 bp, Homo sapiens
agcttgagcttggtggggggaggggcatccaccattactgaggcttgagtaggccctcacagtgtaaacaaagcctctgggaaattcgaactgggtagagccgaccacagcttggcaaagccactgtagccagactgcctctctagattcctcctctctatgcagggcatctctgaaagaaaggcagcagccccagtcaggggtatatagataaaactcccacctccctgggacagagcagctgaggtaaggggaggctgtgggcacagcttcagcagacttaaacgttcctgcctgctggctttgaagacagcagtgaatctcccagcacagcgctagagctctgctaagggacagattgcctcctcaaatgggtccttgacccctgtgcctcctgattgggagacacctcccagcaggggtcgacagacacttcatacaggagagcyccagctggcatctggcgggtgcccctctgg

SEQ ID NO: 827667 - DNA, 467 bp, Homo sapiens
aacacaagctttaattttcaaatttcctcccatgtttcatgtgaaggagttaaggtcatgctgccccaaaatatgctgctttggcatgttaaytattttgagctgaaggcacttgagaaagagctgacgcaggaagggctctctgacctccccttttctatttaagaataggccataaaacttcccatgaggaaggtgccctccttataccagaaagacaagaaatccttatcaccagagactgggaatcgacattgaaatggatctgcataaacaaacttaataaataatccttatatcttactagttttacccccattcatatatctcccagtcatttccccacaatttattacctccagtccaaacccctttatcttgttatttcttcataaatgtataatttctttgtcaaaaatgtttagaaagatttctgctctagtcacttctttagagcgtcatgtgaa

SEQ ID NO: 827668 - DNA, 629 bp, Homo sapiens
aattacgtgtgtccaattatgttacgaatgtagcatggtgcctgatatactttaagtgttcaaaatatgtcaatttattatgtttgaaatacctttcttaataattatataaaaccattgtatggggggaaataggggacagatcaacatgggagaagtgtgctcattttgatcccttgaaataaaacatcacacacctagaaagaggaagtggctatgctaggaaactccctctagagttccagagccttcagattcaggtggtgtgtaaggacccacattattttgtgattaaagaggattagataaaatgtggatcctaccatctctggggttagtgttctaatgcactaagaattaaatgacccccttcttatttacaagaatataagaaaaaggtttctaattagagacgacacatggtaatactaaagatatacatttattccgtgaaaacaaaaataaactttcatttcagataaaaagaatgctctctggactctttaggaaatactgagagaaagtgcaaaattggaggcagcataaacataatgaacctagacaaactatggcagcttctgtagmggaaggatttggttgggccctggggacattctttgcagaaactc

SEQ ID NO: 827669 - DNA, 623 bp, Homo sapiens
accatgggccaccaagttaccatgtgacctgagctgcctatcatgaactgggtgctatctgacccactaagccatgaagttggatgtgcacagcagyactccatcatcaaatggaaatggtatataggtggtcaggctcaagcaagtcctgaagaacaagtaaattacatgaggaagtggcccaaatgcccataattcctacttctgcttcactgcctcctctctcccagcctgcacctatgaccttgttgggaatacccaatgatcagttcacagaagaagagatcaggcctggtaatagttctgcacaatgtgcaggcaccacccaaaagtggacagctgcatcataacagcccctttctgggacatccctaaagcagtagtccccaatcattttagcagcagggaccagttttgtgaaagacaatttttccatggaaggacgaaggtaggggtggagggatggtttcgggatgaaactgttccacctcagatcatcaggcattagactctcataaggagcacacaacctagatccctcgcctacacagttcacaatagggttcatgctcctatgagaatctaatgccactgctgatttgacaagaggtggacctcacccg

SEQ ID NO: 827670 - DNA, 604 bp, Homo sapiens
atctgctaagtgccacgtattacagcattttcctcatagggctgctgtgagctttaaatgcgtttatgagttaactgcttagaacagtgccagctatgtaataaacactacgtaagtggcagctacaccatgcataaacaaacgcaaactgtgtgcatctgaggaataattctagttaacattaaagtgtgtttttgtgtacagagttggtgtctgttgtctgtgcattcactttttaaaaatcgggaaatagcagatgttaggaacctatttattttgcttgctcttccttctactttctgcttgctacctactctattctagttccagacttgatctgtttctctgtgcagggttgctcctatgtacaaccaatgcagaactgaccccatcaaatttacaaagtgtattagtctgttttcacgctgttgataaagatataccttagactggacaatttacaaaagaaagaggtttattggacatacagttccacgtggctggggagacctcacaatcacggtggatggtgaaaggcacatctcacgtggcagacaagaggagaggakcaagtcacatcttacatggatggtggcaggcaaag

SEQ ID NO: 827671 - DNA, 500 bp, Homo sapiens
gtaataaaaaggtcccaagtggtcctctccaggtctttaattttccttttgaagataaagctccttctttcactttcatggttcaagatttttgraccttgcaagtgattgctattgaagtgtgccagatgtgagcagttgtgagcatagtactttaaaagaaggtgaaggagtgactttttcttccttattgtctcccctactaccatctgtagtttctacacatgtaacttttccaaaacagcaaggcatgggaagggataccagccagggccgccacagtccaggcatgggacttctgaagtgaggagatagagatgaaagcggcctgtattgataaatgacagatgatgaaaccaaggcctgctggaccaagattcaatgacttacccaaagctacacagcttgttggtggcagagttagctcccaatccccagctttgtgagcaagggaggtttccatccccactatgatgttttcttggtgttctggggtcact

SEQ ID NO: 827672 - DNA, 500 bp, Homo sapiens
gtaataaaaaggtcccaagtggtcctctccaggtctttaattttccttttgaagataaagctccttctttcactttcatggttcaagatttttggaccttgcaagtgattgctattgaagtgtgccagatgtgagcagttgtgagcatagtactttaaaagaaggtgaaggagtgactttttcttccttattgtctcccctactaccatctgtagtttctacacatgtaacttttccaaaacagcaaggcatgggaagggataccagccagggccgccacagtccaggcatgggacttctgaagtgaggagatagagatgaaagcggcctgtattgataaatgacagatgatgaaaccaaggcctgctggaccaagaytcaatgacttacccaaagctacacagcttgttggtggcagagttagctcccaatccccagctttgtgagcaagggaggtttccatccccactatgatgttttcttggtgttctggggtcact

SEQ ID NO: 827673 - DNA, 648 bp, Homo sapiens
catctccaaatattatcacattagaggttggagcttctgcgtatgaattttggtgggacacaaacattcagtttatataagcaatataaacatcaggtggctccttcaggcctctgctcaagtgtcaactaatccaagagctgcccacgactacatgatatagaacagcataactttataccccccagcataactttatctacctcaccttgccttatttttctttatagcactataccacctgacaaattatatattttgtttgtttattatctgtgatctccaaataaaatataagatctctcagatccaagagagtagggactttctcatttgttcactactgtatctccagtgtttaggacattccttaaaaacaataaatgttcaataaatgtttattttaattgaatcagtgaatgaataaatgaacggatctgataaaacagactttacagccaaaagcaatttttttttttttttgagacagaatcttgttctgccgcccagctggagtgcagtggcatgatctccgcttactgcaacctccgcctcccrggctcaagtaattcttgtgcctcagcctctcgagtagctgggactacaggcatgtgccaccaggctcaactggttttttgtatttttagt

SEQ ID NO: 827674 - DNA, 477 bp, Homo sapiens
agagcgggcctctggctgactccagcgtggatcgcaggcctggcgtcctgtcagacttccacggtcaaatggtaaccacactgcctctagttacctcgctccrtttcttggggggctcagggacagccgccatttccccatcagtgtccacgaccagcgtccttctgccaggaggcgggctggaaggtccctcgcagctatggccaagccctggctgcggctgcagaagtctcacttgtttcactcggccaacacttaatttctttatgtatctgagggagtggggaattagtgtcttccaggaaattcaggctctgagttttctgtcctagactacaacaggcaaatggagaacgggttgtggggatcggagctgaggaatgaacttcagctgataaaatgcaagacaaggagggaacaggaaagcaaaggacaaagtgaaggagaaaaaaataaagggaattttggcagggaaaa

SEQ ID NO: 827675 - DNA, 625 bp, Homo sapiens
aaaagtatatcttttctcatgtgctttgactcagactctgaaagcaattctgagggaaggtctcaagatatttggagtggggatgattttgttgtttattcattcaacaaatatttattgagcatttactctgtcacccacggtgctcacttggaaggacaagatatatttgggttcattccttgtggtatggttgttgaaaaatgaaaaacaaaagccttatcacattagggtcacacctcatttcagcacatgccagtgcacgtataaccaaaatgttgaccagtcctgggtggctgggcccaaagaccccctcaggcaagacccctgtgcctaggatgtcccctcctggccagtatctactcaattctctgaaagcatattggctgcaaatgtacaaaagcggagaaatctcagcagaatctctataacctaaaaacccttctttgcattgagtggtcaaccctctagcagagcagatgagtctctggccttatcaatctgttcctgggtttaggcgaacctcctggaacttggggtgagcgagggtaccgccaccgggcagaactccctcaggtgatgagygtcaggtgccaactgcgagttacacaacacgacctctcca

SEQ ID NO: 827676 - DNA, 539 bp, Homo sapiens
aagaggcaaacagttgcattcctttgagtcttttgatcagtgaagccacttttttcacgtgaaaggagggaggagaggaatagtcaattatgcatttatcttgtgctcagttaatctccatttttacataaggtaaaataaacataggaagtagaggaagcagttagatatgcattcctctcagttgaacagagggatgatggcttttagttcttggtttttgttctctttctgtagaagattagcttctaatttattaatacattgtagggtgaaattcaacagaactgtcttagggtaaagatattggggctcacaagagatttccttgtgaggaaattgtgagggaagaatgtagccttttatcttgtagctatctatttaggaacaaagtggaaggcaggtttgcctgaccgagttcccagcttaatgtttccctttggcttagcgagtttggggtccagagattttattttccwttcagatgccataggaaatgtaacaactgtagaaacgagatttcagagctgggcctctca

SEQ ID NO: 827677 - DNA, 520 bp, Homo sapiens
catgcataaatgattcccatgctttacctttggttaagtgcacatgtgcacatactgttctatccattttgctctctccattktctttttgagacagggtcttgctctgttgcccaggcttgagtgcagtggtgcaatcacagcttaccgtagcgttgaactcctgggctcaagcaatcctgtcacctcagcctcctgagtagctgggactagagttgtgcaccactatgcctggctaattttttctttcttttctttttttttgtagagatggggtcttactatattgcccgggctggtcttcaattcctgggctcaaaagatctgcccacctcggcctcccaaagtgttgagattacagtatgagccaccgcacccagcctgctcgctccgtttcttaagtgtgttatagaggatgagtctagcctcatcctgctcattctgtttcttaagtgtattgtagaggatgagtctaggtaggcaagtcaaagtttaggtatcatgagccactgaagcctga

SEQ ID NO: 827678 - DNA, 520 bp, Homo sapiens
catgcataaatgattcccatgctttacctttggttaagtgcacatgtgcacatactgttctatccattttgctctctccattttctttttgagacagggtcttgctctgttgcccaggcttgagtgcrgtggtgcaatcacagcttaccgtagcgttgaactcctgggctcaagcaatcctgtcacctcagcctcctgagtagctgggactagagttgtgcaccactatgcctggctaattttttctttcttttctttttttttgtagagatggggtcttactatattgcccgggctggtcttcaattcctgggctcaaaagatctgcccacctcggcctcccaaagtgttgagattacagtatgagccaccgcacccagcctgctcgctccgtttcttaagtgtgttatagaggatgagtctagcctcatcctgctcattctgtttcttaagtgtattgtagaggatgagtctaggtaggcaagtcaaagtttaggtatcatgagccactgaagcctga

SEQ ID NO: 827679 - DNA, 335 bp, Homo sapiens
taaagaaccagtaaattccagggaacaggaacaggtcaaagccacctcctcccaaggatttggaggctccatcacagagttgccaatcttaggctttggaattaggcaaacttgggttggagtcccatccatgccattcacataatgtgaccttgaacaagttatttaactttctgagactcagttttctcttctgtaaatgggcttaataaatggccccttttcataaggttggtatgaagattaagaggattctttcttaattaaccgtaargcacacggtccagtgcatggctggtggccttggaagacctgtccatactcacaatcgccag

SEQ ID NO: 827680 - DNA, 574 bp, Homo sapiens
gccggttctactcgccagagcctctcaggagctccagacctgctgggcttgaggctgcggttcctgctggcaggagatggccagggggctgctggctctggctggcttggcccctggcatgggagctggcatgtttggggctttgtcctgccctctgaccccctatctgcgggagggtgttcctggcaatggctcctgggcttttcttcactggggtctgctcctgaatcctgcaggaggtgcatctgctgccaggggtgggtgtcatatgactgctgggtacagaggcctgcagggcattttacagatggaaaaactgagacccaagtgagggctagagggaagagtgaggccttcagtgccagaaagatgtggcttaagttcctgcgactcccttaatgtggagctcagacacttgccatggggagagccaaactgccttcacagcactagatgctccataagggaccacttccttcctgccccctccaccaacgacatggtttgcacaactctaaattcctgaggtctctgcactgggctgmggtttgggatccttaaggccaagtgctgg

SEQ ID NO: 827681 - DNA, 634 bp, Homo sapiens
gtgcagtggtacaatcacagctcactgcagccttgacttcccttattcaatgtttagcctttaatgcaaatatcacaagtgggtcattgattatttttaaggggaaaggtaactttttggcaagcgactcatgtccacacacaccccatatttgaatttcatttgtcagtgattcttacctggacttgagctgctcaagagctgggagcccacccactgcatgccacgtagtaggtcttcgcccgtgtgccaatcattagagacactggagccctgaaagctgccgatgttgccctgttgccattggctttcactctttcttgtgctcttgccacatgccaggcattgttgcaggtgctgaggaggcagcagggaacaaatcctacaaaacacgagcccacccctcccaccaaacaacacttacaaactcttaccagaagctgggccccatagactcacccattttaaagaagagaaagagagaaaggaaggaaagcctgcactgcaggactytggaacaagtgtggattaggacccagaagtcttcagtttattttgagctttctggctgtgtgactttgggaaatctacttgacctgtcactacctcaatttccttattcataaaataggaa

SEQ ID NO: 827682 - DNA, 470 bp, Homo sapiens
gaccagactgcctactggacattgcattgtcaagtcccccaaattacataaaacttaacacatcccacagggaatgacctttttctgcatgtgtgcttctcctcstggtgccccctttaagaagcggcaacttcatccatctcatcacccaagccagaaacctggaagcatttgtcaccggtcacattcagcgagtgaccaagtcttgacaactgtacttccttaacatttctcagatctttactctcctttctagtcaaatatattactaaattcacagtcttatcacttctgtctagaaaactgttccctgctttgaaactcttcagtagcggcattgcataaagaatgtaggccctatatgatctgacctcattgggcataccattccatcaccactcacactctacatttttgaggcttgtaactcatttttaacaaggtcactttgaaaatgtctgaatcagagg

SEQ ID NO: 827683 - DNA, 599 bp, Homo sapiens
ccccaaattacataaaacttaacacatcccacagggaatgacctttttctgcatgtgtgcttctcctcctggtgccccctttaagaagcggcaacttcatccatctcatcacccaagccagaaacctggaagcrtttgtcaccggtcacattcagcgagtgaccaagtcttgacaactgtacttccttaacatttctcagatctttactctcctttctagtcaaatatattactaaattcacagtcttatcacttctgtctagaaaactgttccctgctttgaaactcttcagtagcggcattgcataaagaatgtaggccctatatgatctgacctcattgggcataccattccatcaccactcacactctacatttttgaggcttgtaactcatttttaacaaggtcactttgaaaatgtctgaatcagaggccctaaattggcatatgggaatccaccaaagctacctttgacatatagaatggaaaacatgtcctgtatttgttgcctgaatgtgaattcctacctaaagtggactcctctttttttttttttagtgtacttctcttaaaagcaaagacatcaaacaaaatatat

SEQ ID NO: 827684 - DNA, 610 bp, Homo sapiens
ctgactatatctcacagggaccctcagggaaggcagccagtggaattacagaggggtcacagggtgaaagaagcttccaactgaaatttgtaataattttgactggacatgaattttcttgagcagaatccaaggagtgaatgggaactgctacagatacgagtgaaggagctgcctctgacattggggcagatggggaggggcaagacctgaaagctgcgcttcctttctcagcagggaagtttacagcatgggacaaggtctgacaggggtaatgtgggagcgagactggcctagccaactgcctgggagttaggtggggccttttgctacctgctatcccccactttcctggtgagctatatggtacagcagaggcagccataatcccctctggaacataaccccattggcctgagaaccactacccatccccaacagtggccgtgggaagcccctcccaaggacagtctgagctcagactcacctatycttgcccccatctgatggtatttctctacctgccctggtagccaaacacaaaagatataaactcttgggagctttttatggccctggacatcacctgagaaaccagaatacttaccca

SEQ ID NO: 827685 - DNA, 682 bp, Homo sapiens
tttggtaattatgagagttaaatggatgagaacatgtaaagcatctagaacagccctcagtacacagtgtcaataaacacaagctgtttttatttttaattaataatttttgttttttagagacagggtcttactctgtcaccaagactggtatacagtgctgccatcgtagctcactgcagcctccaattcctaggctcaagcgatcttcccactgcctcctgagtcgctgggaatacaggtgtgaagaagcttttttttttttcttttgagatggagtctcactctgttgcccaggctggagtgcagtggtgcgatctcggctcactgcaacctccacctcccgagttcaagcgattctcctgcctcagcctccctagcagctgggactacagtcacgcaccaccacacccggctaatttttgtatttttagtagagacggagtttcatcatgttggtcaggctggtctcaaactcttgaccttgtgatccgcccgcctcggcctcccaaagtgctgggattacaggcaagagccacggcaagccataggtttagcagttatatgccactcccctgccttatgttccgctctcccaataccatattgacaggtaaatckctagtgagtgaatatattattatcatctaaaactatttatgaataacaagctctgagactc

SEQ ID NO: 827686 - DNA, 641 bp, Homo sapiens
caaagaacactttttttgctaggtgtcttctttttcatgcctaagtgaaaattgtgtgtgtgctacagttttcttctgtgggcagtagtagaccctattggcaccccacctccatattccacaacccacctycacattcacctgtgaccatgtaggcagtttccagaagtttgagaacttctcaccccaagcacctacatttcttttcctcctctgcctgaggttttcttcagtaccattttcttcaggaactcgctttctacctagtggtacagcccaaaagtgtatagtgagggggctaacgccctagggagaaatccccaattaatggggatgagaattgccaggttaaataaggcagcctccacaccctctgctgggacaattcagaggtgtgcttcttccttcaggtttcctggagggtctacactgggattgaaacccaggggcctgcagagctcaacccacacaataatactccctttcatggcttttctcctgccctgaatcattgccatcactgtcttatttatgcttccagggactatttcacaaataaactacctgcatgcaagccttatcttgaggtcttcttttggaaaataaacaaactaaccaatctgcaataagtaagaaggaca

SEQ ID NO: 827687 - DNA, 641 bp, Homo sapiens
caaagaacactttttttgctaggtgtcttctttttcatgcctaagtgaaaattgtgtgtgtgctacagttttcttctgtgggcagtagtagaccctattggcaccccacctccatattccacaacccaccttcacattcacctgtgaccatgtaggcagtttccagaagtttgagaacttctcaccccaagcacctacatttcttttcctcctctgcctgaggttttcttcagtaccattttcttcaggaactcgctttctacctagtggtacagcccaaaagtgtatagtgagggggctaacgccctagggagaaatccccaattaatggggatgagaattgccaggttaaataaggcagcctccacaccctctgctgggacaattcagaggtgtgcttcttccttcaggtttcctggagggtctacactgggattgaaacccaggggcctgcagagctcaacccacacaataatactccctttcatggcttttctcctgccctgaatcattgccatcactgtcttatttatgcttccagggactatytcacaaataaactacctgcatgcaagccttatcttgaggtcttcttttggaaaataaacaaactaaccaatctgcaataagtaagaaggaca

SEQ ID NO: 827688 - DNA, 635 bp, Homo sapiens
ctaattcttacaactccagtaaggcaattaagtagatatcactacttttccaatgaagccattgtcacacgtttatacagctaagaagtagtgaaatcacaattygaccaaactcagttcatcactgatatctatgcctttaatcattttctatgtccaagctatatgtttccattacattttaaaaaaatctccagacataaaagaggtaactaaggaatagaagaagcatgcaagttgtatgtgcataaaagcaagagttatcaatggctatttatattggaatatcacagcatcattatgtcagcaactatgtctcctctaaaagttgcttgcactttctgcactcaccacatagttcttctgagttaacttctttacagatagtgactattaatgcttcggctttccttatgcctatcctccactatcagctctgcaaagtgttggaaaaatgtgccttccttatccactggagaggtcacaggctttggctctacattgcaaactgtgttttcagcttaagaattatacaatttgaattctaaaaacgcaataaggttaacattttgctatcaatcttcgaattgattattacaaatacatggacaccaaaggtctacaaagttcccctc

SEQ ID NO: 827689 - DNA, 640 bp, Homo sapiens
atagtctagagattcaatctctattcaaaatacctatgacatgyttcacagaaatacaaatacaatcctaaaatttatatggaaatgcaaaagacccaggatagtcaaagttatcctaagcaaaaagaacaaaactagaggaatcatgtgacctggctttaaattatgctacagagctacagtaaccaaaactgtcataaaaacagacatatagaccaatgaaacagaaatgaatcatttttttgcttttattttacctactaacaaaaaccctggtacaaagtgcagatgagaatggagttttctggaaagaatagcaaaagagctacaataaatgtctatacgtcatttctgcaaacagctaacaagttgacttcatcaaggggtcaggtttttcagcacactctcagtccagtagccaataactatgtagaaaaagactatataacttaaaatccaaaaaacaagatcaattcccaaaaataatgaactaatttaattataactttttaatgtcttaaattaacatagttaaaattggtttccaacttcaacagacaccttaaaactcagaaaaaatgacatccctgaaaaggtctaaatatgtatataaagctaaacactttttataaagcctaga

SEQ ID NO: 827690 - DNA, 614 bp, Homo sapiens
tttggcctggactaaggtagtatgacctattccttggtatttttgctagcgcaattacaatgacaaaaaaaggtatgcaagcaaaattagggaaaacattctagtaaatattgctccaggttacatgtggttaaaaacttctgcaccagttcattcttaggaaatgtgtcctttgatttggaaaaattaattttaattaaaaacatttctcagatcatttagggagaaatatgaactgcttagacacacgatggagacaatttctctggacatactccagagcctgtgtagagttaccgagtgagaagcaatctagcaggaatgcagtatgtgtgtatgtatttacatatatatatatatatatacacacacactcattaatatatttttggctaattgaatatataatgcttctcctgtcaagtgtctgtatgatatgactgggagtttcttccacagccacagactatgttttactcaagcagagataggaatggggggaaaatgcagagtggaccttttctttcctattctcttttgaggattaaaaaaaaagyaaagcaaatctctgtgttgtgtatggcaaacactcagcatgtgacaagtcatttcat

SEQ ID NO: 827691 - DNA, 589 bp, Homo sapiens
accatatgtaggtcacaaagcaaggttaaataattcaagaaagttgaaaacatatcaagtaacttcttgtaccacactggaataaaattagaaattagtaacaragaattttggaaattatgcaaacacatggatattaatcattatgttcttgaatgaccagtgagtcaatgaaaaaagtaagaataaaatttaaattcttcttgatagtatgaaaatagaaacacaacatatcaaaatttacaggatacagcaaaagcacaactaagagcaaagtttccagctataaagtgcctccaatttaaaaagtatataaacttcaaataaacaacctaacaatgcattttaaagaattagaaaagcaagagcacacagaacccaaaattagtagagagaaaaaataataaagagcagaacagaaataaatgaaattgaaatgaagaaaacaacccaaaagatcaacaaaatgaaaagttggctttttgaaaagataaaatcgacaaattgttagtcaaactaataaaaaaaagagaagtcccaaataaataaaatcagcaatgaaaaagagacattaaaaccggtgcttcag

SEQ ID NO: 827692 - DNA, 620 bp, Homo sapiens
gattgtcagttctaaacacagaagtgcagaccaagagactttggctattatctttgtacctccctcactgttgcaagcccctcctccttgggctgaattgacttccaagaaatttaaagaacgggtgacctttcttccctcttcacatccccttcatctttttctttttccactttggggtgcaggatattaatgattaggacattcaaaagaaagtaaatatatggggaaaattagaaagtgactaaaatgtatggtcaggtaaaggtacaagcatagataagacctgaaaaaaaaacttaagtttagaatgtaggctgattcttggcacagagattacctacaaaaatctttaaaaaccgaaaagaataaaaacaatttaaaaaagcaaaccatgggaaagaagaagaacgtgattttgttttagcacattattatatataaatgtccagttttcaacaacaacaaaaaatcaacaaggcatacaaagaaatgggaaagtaygggcaattcaaagggtaaaaatatcaacagaaactcttcttgaaaaagacctgatagcagttccactggacagaaaaacaactaaaagatattcaaaaaggctgggcgcagtggct

SEQ ID NO: 827693 - DNA, 597 bp, Homo sapiens
acaaaagcatacgtgtgataaaatggactttgaagtaggggaaggttgcgagggaagtgagggataaaagagcacatatctggtacaatctacaattctcaggtgacagacacactaaaatctcagaaatcaccactaaagattggcatttggattgatttcatatcttagctattgtgaatagtgttgcaataagcacagaagtgcagacatggctttgacatactgattttatttgctgtggatatatgcccaagagtaagtttgtagatcttatggtacttttgtctttaatgttttgagaaatcttcctaatatttttcacaatggctgtactaacatattgtctcaccaacagtgtgtaagggttctcttttctctacatactccccaaccgtgttatgttataattgttgatagtagttattctgactggagtgatttgatatctcattgtagttttgatcttcattttcatgatgattactaatggcamgcatttttttccacatatcttttggccatatttgtgtctcattttgagaaaggtctattcagtttttttgcctactttttaaataggttattttgttgttg

SEQ ID NO: 827694 - DNA, 495 bp, Homo sapiens
aaaagtaatcactgacatttgtaagtagttatacaagtgcctaagtaccttcacacgtatatcttctagtagtcatgacaacattgtacttcaaattatcaacaccattaacccattttataaatgagaaaaatgtcactaaaaaaggctaagggatttacccaccatcatttactccaattcacttgcactgacttggcactcatgctctttctcccatactatgttactgcttaatagacaaagcaagtttttgtaaataggtgatatatgaagtagggggcacttgctttactcaattaaaatgtctttcttccaaagatgcttctgtggtttgatgctgtggttttaacccccaaagcaacagtgttgagaggtgggaccttcaagaggtgattacatcatgagggctttgccctcatgaagggattaatgctattatcragagagtgggtttctgataaaaggatgagtttggccccctctctctccctc

SEQ ID NO: 827695 - DNA, 645 bp, Homo sapiens
aggggaattgtgtgggcatttgtattcagaatcgytaaagaagtagacattatacttagagttaactaatgtatatttgagccattcgtatttgctcaatctagaagtaaacaacacaaaatatagaattctgtcctagtatccaagggaactagaattgagtggcgtattttcctttatcattcaaatctgaacgtcttacttgaattaacgtatttatgaaagaattgtgcctcctctcttgtcaccactttatctctagcagatatttaacaatatcgaaattcttttaaaagatatttttccttcagtggtgacagagtagtattagaaattgctggctggctctgccttataagttgaagttattaagatacttagcaatatatgtgaaaaaatggcacactgctgaaccagtctttgaatctgagcaaagcactcctcaacaagtgcagtatttttttcaaattcatgagacttttcatatttagtttccaaagtctcattagaatgtctccttctggcaaccaaattgcttaacaataaacaattcatcaacctcaagagggtaaaaaaagtttgaaaggtgttctggtttaacaaaagtgtaatgatttagtttatacaatgtatgagggaattaaa

SEQ ID NO: 827696 - DNA, 546 bp, Homo sapiens
tagcattttggcttatatccttccagtcccaattctataattgcatacaattttgtattgtgtatatgtgaatatatacatcttttcagaatcacttacaataaatagaattatagccamcctttgtaacttctttattcaaaaatatgacttgataatatttctatgtctgcaaatacttataactacttaattttttaaccagagcatgattgttcataattaacctaattcattcctataggattggattattttctatttttgactgttataaataatgccacataagcatccttgctaattgttttgcagatagagaaatacttctgtagaatagatggttagagatgaaatttctagggcaaaggggttattcatttcaaaacttgaaagaagctaccaaattgtccactaaaaaagtagacaaaaatatataccttccaactgtgtatgtatttgtttcaaaacatactaacacataacactatcaatccaatttttattttaattttaaaatttttaatcaagaatattcaaagataa

SEQ ID NO: 827697 - DNA, 581 bp, Homo sapiens
cgcaagcactgtcccaggacttacagggacctgattaaaggcccagaggggtcagtgactggggagctgggtccaggtaacaaataragctaacactcgtttgctgctgctgcagtgtggaaatggacatttcctggagtgccacattttcacttgatctccactgtctcttgggggggtgggcagagggttgcctctcaaatgtcagttaggattagctttctctgtctgtaatagaaaaatcccaaatgatactggctataaaacatacacccatggtccatttgactgcttgacctccaacccaccatgtttgcatttcaggcagtaggatgaagaaaagaggaaaggtgcacttgctttattttgtgaagacttcctgcaagtaccgtataacactttctcttacattgcactgactgagatgtagctgcaagagaggctgggaagtttaaggaggaagaaaaaatgggtactgggataggcagctaacagttttgctacatgttctatttaatacagtaagattaattccaggacctgttagagcattgactgaggtaaaaagagacttgatttct

SEQ ID NO: 827698 - DNA, 580 bp, Homo sapiens
gcagaattgcttgaacccaggaagcagaggttgcagtgagttgagatcacgctgctgcactccagyctgggtgacagagcgagactccatctcaaaacaaaacaaaaaaactgattaaatgtattaggagaagaaattttttaaatgatttttttggaatacttattttcaattattctaaaacttaaccctttaacttaaaagttctcaaaacccaaaggcttcattttatgggaactctttatctttagctcatgcaagaaaatggaacctgtctacattctactgaaaccagagatacaaaatttcctggagctaagagaattaatcattaccaaaataaactcatatcatcagtacattaaaatgcttcagaagacactttagaagtggattcttggtgggggaaaaaaaaaaaatcacatgattctgcagcatccacaagtgcctgactgaattcaccagaggtctagtcaagctttctaattctattaaactctgaaactacaaagctagctacgttggcttatatcatcttttgcttttcaacatagcaatatcaacaaagggccatgtaggg

SEQ ID NO: 827699 - DNA, 504 bp, Homo sapiens
gagagaacaaagacaggatctaagggaaacaggcagccagtggcagagggaacccagtcccacccccccaccgccaagtccgggcccggccgcgtcctcacctgtagaaggtttgcatgtgacgatacttgggcggcacggccatgcagcgtagatccgcctcgttgcgcaccgcctggaagtcgccgcagcacagcaagaggtcgacaggccccgggccgcgccgctctgccagcgccagcgtctcatagatcttatccagctcgccgtggcagcagccagccacagccacccgcattctgccggcctgaggaggtgagcgctgcctgcaacgccctacaccacagccagcccaggaccgactgatcgctcagctcccgccaactttaataagtatagccacckcctgggtgtagactcctgcaaaataattcacttccggtttccagatctcgcgagagagggaccgggaaggtcaaacctaattctgggatcccagggaac

SEQ ID NO: 827700 - DNA, 566 bp, Homo sapiens
atctcatctcactgcaacctccacctcctgggttcaagtgattctcatgcctcagcctcccaagtagctgggattacaggcgtgcaacaccaccacgcccgactattttttgtatttttaatagagacggggtttcaccatgttggctaggttggtctcaaactcctgaactcaatgatacacttgcctcggtctcccaaagtgctgagattacaggcgtgagccccggcgcccggcctgattagttctttatagtctctaagtattcttatttacaaatttatgtctactgcctttgtacctaatgtactttatacttggtttgaacgttaaaactctctgagatgacaattccatcactcatcccctcttcaaatctccagctgctatttggtctcctctctgctaatgacgtagctgcatccatgactaagaaaagagcctcacctttccaccacamgttccaccaacttgcatttatctctacctatttttctaatattaaaatgaaaaataaatgtgtattccttttgaagcccacatattcacttttgtcctcccatatg

SEQ ID NO: 827701 - DNA, 594 bp, Homo sapiens
taatcctatcttcaaggaccttatactctaaagcagtcagagctaaaagactaagtatcaaaactattgaagtcaggttctgatcaatgttgcacctaattgggtaacagaggttaataaacatgtcgtagtagcttgaggatatactcatcacagcatgtcatagtttaagtcattctctgaaagcatcaatccctctgtagtgagtaagttcactacatgcaggagactgttccatgtcagctgagttagaggctttcttttcaattagaaggaactattgttcagctaaagcatctatgcataaactttggaatcatgagaaataaattgggtggggcatggtggatcaaatctggaatcccagcactttgggaggctgaaatgggaggatcacttgaggccaggagtttgagaccagccttgtcaacatagcaagaccccatctctaaaaaataaaaataaataaataaaaaggaaaatgaaaaaaakaaaaataaattggatattcatttcatacaatcattcttctattgtcaaagacatcaaatgcagattttttttttgagaggcgatgaccatgataccatggta

SEQ ID NO: 827702 - DNA, 495 bp, Homo sapiens
ggaaggaaagcacagtggaatataagggaaaagaagtacatgggggaaaagtatgtacagaaatgcccagtaagcaaaaagataaggtgtcccaggattgcatccttggaagtaagatatttaaaatgtaggaatataaaaacatccagcaaaagagaaggcaggaaagaagagactgccaaaattaaaaaaacaaaacaaaacagaggagaaaaagatgtctgaaaattgattcatagtttctcctctcccactatactttccccagactaacaatattaatacaaaaataatttccctgaagggatataatataggttgttcacttaacttctaatctcatgtgtcactttgtagtcacttccaaagtagtggaagatgactctcagaacatttttttgatcctccttacttagtagaagaatacggagacccagaaatmcattcatttattccccaaacacttatgaagcttcactcatgcatgagaaattg

SEQ ID NO: 827703 - DNA, 542 bp, Homo sapiens
tatgaaaatggacaggacctagagtaactaaaacaatttttgttttgtttttgaaaccagggtctcgctctgttgctcgagctggagtgtggtagcaccatcgtggctcactgcagccttgacctcccctggatcaagcgatcctcctacctcagcctcccaagtggctgggaccaataggtaagtaccacctcatccggctaattttttctattttatatacatatgtaattatatgtgagatatatatagatatagatatatagatatatatagatatagatatatatagatatagatatatagatatatatagatatgtaacgtatatatacacaaaattagccaggtgtggtggtgtgcagctgtagtcccagctgctaggatagggaggctgggaggtgggggaggatcgcttgagcctgggggttgaggctgcagtgagccatgatcaygccactgcactccagtctaggtgacagagcaagtctcactctcaaaaaaaaaaaattatgtactgtataattgtgttcatacaaaat

SEQ ID NO: 827704 - DNA, 598 bp, Homo sapiens
gaataaaaaccttttgtcttaactcgtggcttctaatcgtctgtgcggaggcattgctaacctgcatttattgagcatttggtaagtgccaaagaattgtaggagaaaggaattctcagcctaaatctggcttccttcaacattgggatttctaggatagtcatcttcctgaaacgaatgtatggtcaaggggtaggaccagtattgtcaaaatttgggcaatatctggcatgggaggcctaataaaataaccttttccagattacaattttaaagctatgcaaataggatagatgtgacaattttcaagtgttcaatagccatttatggctagtggccacctcatataaaacatcattgcagaaagttctattggatggggctgatctagagataacaaatacatacctattaccaaactaacccttgaagcttttatcagttgtctgccactgatagtaaaacattttgagcrtgtccccttggtacacgtgaagtttattgaaaaactattgcctctattactctcggttcctgattcaagtttccttcacctttagtgtgaggtttagtttcttttcgagactgagtctctgtc

SEQ ID NO: 827705 - DNA, 628 bp, Homo sapiens
cttacaatcatggtggaaggkgaaggggaagcaaggcacgtcttacatgttcacaggcaagagagagtgaaggaagaacttccaaacacttataaaatcatcagatcttgtgagaactcactatcatgagaacagcatggggaaactgcccacatgatccaaacacctacctccctcaacacatgggaattacaatttgagatgagttttgggtggggacatagagccaaaccatatcattcctccactcaccctttccaaatctgatgtctttttacatttcaaaaacattcatcccttcccaacagtttcccaaactccatttcagcattaattcaaaaatacacagtctgaagtctcatctgagacaaggcgagtcccttccacttatgagcctctaaaatcaaaagcaagttagttacttcctagatagaatggcagtacaagcattgggtaaatgctcccattccaaatagcagcaatttgccaaaacaaagggcctacaggtcccatgcaagtccagaatccactggggtggtcattacatcttaaagctctgaaataatctcctttgattccatgtctcacatctggggcacactgttgagtaggctcccactgccttggg

SEQ ID NO: 827706 - DNA, 645 bp, Homo sapiens
ggggccattatattcttctgcacacactgcagaaaggaaacaacaacaacaaaaacaaaaaaacaacaaaaaacccagccagtttcaygtaagaatgtcctgaaaaaagtagtataaaattactaattttatgtaatcttgagtacatgctttaaaaatattctgtgtggtgaaatgggacgtacacattaagtacttccgctacataccaaggacaatgatggtcctggggaaaagtacttgtaagattgagttgcaagctgtgcttgctgctacttttcatggaacaccatttttactttaaaaacatgactgacagacaaactaggtattcagatgtggtttgtcactgtaagggaaacaactgataaaattaaaactttcaagcaaaaattagaatattgcagaactcatatcaaccactgaacttgacagtttctcagcactaaaagactttttctgataaaattagtggcgactttagcaaatgtgactttttagtattgtacgattaatatgacaacatttggaagatctgcttaactgagtgaaacagtatttttccaatgaccaatgtgtgatgttacaaaatcattcatggtaaaatgtccattcacagtgcagaacagaccagtggattttaat

SEQ ID NO: 827707 - DNA, 653 bp, Homo sapiens
gctttcaaattgctaatgcagttgagaatgtaatatttagaaatttcgtgaaaaaccttacaaatgaaaatctgtaagcttgatgaraaattgatgaatagagacgtgattgttttttactcatcattttattgggaataatgtgctgcttggaatgctctaagatcattccaaaacaaagccaagcaatgtggtatgactgcaactgagaggaaaaacacagtacctggcagccaagtttgacaggatgtccatggctctaaggtgcagaagaagggagcagtgacagattcttccagacacttggctacagacatttaccaaaggaccaaatttcgaatggattcggtatacagagatttataggttctattctggtcattccaggcatctaaatgaaaggcagcacactgcagaataacagcctgaataatgaagtaaaactcacttgtttgaatcctggctatatcagttacgactatgtgaccatgcacatattactcaacctctctgagcttcagtttcctttatctgtgaaatggggatacctattcgatgagtattaaatgacataatatgtgaaaaaaacatttatgtagcacagtgattaacacattttaagagtttagtaaatggcaggtattaataataca

SEQ ID NO: 827708 - DNA, 612 bp, Homo sapiens
actccatctcaaaaaaaaagaagaagttatgaagagagaaatcctaacagaagtacaaattttaataagcaaatctctagagatataggtcccatttactgtttccttggttaccactwaagattggtgaaagacatttggaataggaaagacgtgacaagacaagattgaatttacctcagatacagttatgcagacactgtcaatttcatggtcctgcccttcccaatttatatatttcaccaatgcacaaatgacttaaaagaaaggtgcataaaaattggcttccatattgcaccaccaaaaatactagatagctacaaattaatacagattatcatctcatctggtttcctaatatttccctcccaaggcactttagaggatcaatgatttttcaattccttaaatcatttctactagcactgttgtttaagacaacttgctagaagcttaaatctgccatgttcctttccttgatgaaaatgcaaatttttcccaacatattgattttatcattgtaaaagcagagcatactgcctggcattctgtacagctctaagtcacactgtgtggtgggaattttaaagagagatgccaccactttgccca

SEQ ID NO: 827709 - DNA, 612 bp, Homo sapiens
actccatctcaaaaaaaaagaagaagttatgaagagagaaatcctaacagaagtacaaattttaataagcaaatctctagagatataggtcccatttactgtttccttggttaccactaaagattggtgaaagacatttggaataggaaagacgtgacaagacaagattgaatttacctcagatacagttatgcagacactgtcaatttcatggtcctgcccttcccaatttatatatttcaccaatgcacaaatgacttaaaagaaaggtgcataaaaattggcttccatattgcaccaccaaaaatactagatagctacaaattaatacagattatcatctcatctggtttcctaatatttccctcccaaggcactttagaggatcaatgatttttcaattccttaaatcatttctactagcactgttgtttaagacaacttgctagaagcttaaatctgccatgttcctttccttgatgaaaatgcaaatttttcccaacatattgaytttatcattgtaaaagcagagcatactgcctggcattctgtacagctctaagtcacactgtgtggtgggaattttaaagagagatgccaccactttgccca

SEQ ID NO: 827710 - DNA, 496 bp, Homo sapiens
gattatgatcatgaagaatatggagtccagaactgactgaaatagggcctcttgtcaacactccaatcaatgagaacttgcagtacatataagaaggtaacttctgctggaaaggaagtaccatgctcttttttctgttgcatggtatgttaaatgttacttttatctccccaccatagatatatggtataacaaaagggttggtaaattcattgacagaacaaaatgaaaaccaaatttatgcagataatggcttaagagtaataacctatttcaggagatagatttgaatcacaatattgatgaaatagctatccattggacagaaaaaaaggtgacttcagtctttagaaaatcaaaaaagatacccaagtaaatgtttccttcaaaatatcttaaaaagttgatctcatagaattaaagagtagaatggtggttaccagargctgaggttattaggggagaggaagagatgggagaatattggccaaaggat

SEQ ID NO: 827711 - DNA, 595 bp, Homo sapiens
ctgggctgagaaaggctgtaggcttcgggaaacagtgcctcacgtaggtgcttgcctcggccccagaccctggtgctggtaggctgtttcaccgtcttctggacygtttactacatgctggaagtatatttgagccagaggaatgtggcttccaatcaagtttgtaggagtggaccctgccactggccccatcggagccggaaagccaaggaggaagggacagagctagaatcagtgccactttgcagcagcaaggatccagacgaagtggaaacagagagcaggggccctcccaccacctctgacctccttgccccagacctgctggagcaaggggactggagcctgtcccagaacaagagcgccctggactgccctcatcagcacctagacgtaccgcacgggaaggaggagcagatctgctgacctcggggcctgacagtgtgggacaggctcttctttcccaaaattagggagctcttgacagaaagcagttctgatgcttacatctggaatctgaggcatcctctgactccactcaaagagggtgagggccttcttaagatacaaatggcggaggattgctgccagagaa

SEQ ID NO: 827712 - DNA, 624 bp, Homo sapiens
ctttagagtcctctgatgaagcctcccgagtcctgccttcgagccagtggggagggggagaggaggatgattacagggcggcccccccaggggcatctcaagacactcccaggacagcatggacaggcatggaccctcctgccctgtggctcctgccaggacccctcccctgagctgcccagtgggtgaaagtgggcagtggagaaagaaagtccagggtcaaacgggaaggtggcaccccctaccagcagaagcccagaaacacgagcagagccaggggcccctgcagggctgctgtgccccttctctcttcccaaataggagtgagcacacctggacctctgagagggcaggagggtggctcctctccactccacggacaaacaggagtggcctggctacataaatgtgtgccatcctcactgctacctttggaatagcaacttcgaaagggaaccaccctttgggaaagaccaagggtcccaggcctgccccgcctatcactccaaagctcctccttggcagtacccgccccccacccctctgctacagtgggggtgacckcccactgtcagacagtggaaggggctgcttgtcagaaggacaggccttccgtctccactc

SEQ ID NO: 827713 - DNA, 664 bp, Homo sapiens
cccggggagaattgaagtgcagcgccggcgggccggcactgctgggggacctggcgcaccctccwccgctgctggcccgagtgctaagcccctcactgcccggggcgggaggcgccggccggctgctctgagtgcgggcccaccaagcccacgcccaccagaactcaagctggcccacaagtacggcaggcagccccggttcccgctagtacctctccatccacacctccctgcaagctgagggagccagctccggcctcggcctgcccagaaaggggctcccacagtgcggtggcgggctgaagggctcctcaagtgtggccagagtgggcgctgaggccaaggaggctcggagagcgagcgagggctgtcagaacactgtcacctctcaatagcatttgagccatgtggtgtgggcctcccacccaattctaaatcccctacacagtagagccaatttctaccaaagctggatgtggaaaccagagtagttatagatattcttcccttacagttcataccaactttagaaacagttttgagttccctaagattttttttctgataacttccaagcacgggctgggcatggtggttcacgcctgtattcccagcactttgggaggtctaggcggacagatcacttgagttcaggagttcaaga

SEQ ID NO: 827714 - DNA, 287 bp, Homo sapiens
tcccactgacgtatgcctcagcttcaaggaggaaacaggaaggtggacaggtcaaaaccttccaccacctcccatcatggcacccaaaggccttcatgtcctcctccacccagctcaatctctcacccttctcccctcaaatgtaaggccctgcctagccagtatgaacaactggcagttcctctaatacaccaaactctgacacactcctatttttgctcatgttgctccctgggctagaactttctcttctacttytttttttttttttttttttttgagacggg

SEQ ID NO: 827715 - DNA, 287 bp, Homo sapiens
tcccactgacgtatgcctcagcttcaaggaggaaacaggaaggtggacaggtcaaaaccttccaccacctcccatcatggcacccaaaggccttcatgtcctcctccacccagctcaatctctcacccttctcccctcaaatgtaaggccctgcctagccagtatgaacaactggcagttcctctaatacaccaaactctgacacactcctatttttgctcatgttgctccctgggctagaactttctcttctacttttytttttttttttttttttttgagacggg

SEQ ID NO: 827716 - DNA, 559 bp, Homo sapiens
ggtacagagctggagcccttgaccctgaccggccagccaggaaggccgtaggaggccagctccctggcgtgaggtgcgcagggcctctggcattgccctaggtgagggctccaggactcggacactggctctcagtggggcaggtgtggcccggcagggggcgctttgtgggtgcacagtggccccagggtggtgcagatggtgggcagacctaccccagggctgtttctgagacagaggtccctggaggagaaccaggtgctgggcctcaggtgtctgtcctgaactggagcagccttggaacaaggaaccacaggaagtccctgtggcatggggtgcagcccctcaggtctggcagggctagcccagggagtgcagggccccaggagccctgccacaggttcctcagctcgggagctcacggcctcctcactgcagggtcctttcaggagggccmgggtggccttcacacatctgcttcttcctcagagacacaggtgtgggcacgtactggccagtatagataagcattgagcagcattgatgggtatcgatgatc

SEQ ID NO: 827717 - DNA, 518 bp, Homo sapiens
ggtaattttctcttgtgatataatttagttttagggttttttttttgcttttcatcatatatatgatatatatatataataaacatatacatatatcatatatatgtatgttttccaattgaggttrccatgaagcttgcaaattctcttataacttattattttaatctgataaataaccacttattgtgtgcgtaaacaaacaaaaaaagaaaactgataaaaactcgatgccttaacatgtccttttgctttttaactttttgttgtttctgtttatatcttattgtactgtttatgccttgaaaagttattttttattagttcgtcatttagtctttctacttaagagtagtttatatctcacagttacagtgttataataatctgtgattttgtatgtagttactatttccagtgagtttttttttattattatacttaaagttttagggtacatgtgcacaatgtgcaggttagttacatatgtatacatgtgccaggctggtgtgctgcac

SEQ ID NO: 827718 - DNA, 440 bp, Homo sapiens
atgtagaggaagggatccaaaggcttagggagattgggatggtggagtggactagtcactttagacctactcatcccagctgggagggtccagattatatacccttgaccaatgscttgtgaaatagttttgtgagggcagaggtttgtcctcactggaatagacactccagatatgggtttgcctgtcttacattcaatacttctgccaaaaataccatccatggaatcagaataccttatccaccatcacgttattccacataacattgcctctgacaaaggcactcactttatgactaaagaagtgtggcagtggtctcatcctcatagaattcactggtcttaccatgttccccatcatcctgaagcagctggattgatagattgttggaacagccttttgaagtcacaattacaatgccaactaggtggcaaatt

SEQ ID NO: 827719 - DNA, 440 bp, Homo sapiens
atgtagaggaagggatccaaaggcttagggagattgggatggtggagtggactagtcactttagacctactcatcccagctgggagggtccagattatatacccttgaccaatgccttgtgaaatagktttgtgagggcagaggtttgtcctcactggaatagacactccagatatgggtttgcctgtcttacattcaatacttctgccaaaaataccatccatggaatcagaataccttatccaccatcacgttattccacataacattgcctctgacaaaggcactcactttatgactaaagaagtgtggcagtggtctcatcctcatagaattcactggtcttaccatgttccccatcatcctgaagcagctggattgatagattgttggaacagccttttgaagtcacaattacaatgccaactaggtggcaaatt

SEQ ID NO: 827720 - DNA, 567 bp, Homo sapiens
tccccatcatcctgaagcagctggattgatagattgttggaacagccttttgaagtcacaattacaatgccaactaggtggcaaattttgcagggctggggcaaagttctccagaaggccatgtatgctctgaatcagtgtccaatatatgagactgtttctttcacagctaggattcacaggtccagaaatcaaggggtgaaagtggaagtggcaccactcaccatcttccctagtgatccactagcaaaatttttgcttccttttaccgtgacattttgttctgctggcctagaggtcttagttccagagagaggaatgctgccaccaggagacacaacaaaaattccattaaactggaaattcagagtgccacttggccactttgggctcctcctacctttaaatcaacaggctaagaagggagttacagtgttsgctggggtgattaacccagactatcaagatgaaatcagtgtactactccacaatggaggtaaggaagagtatgcatggaatacaggagatcccttagcgtgcctcttagtattaccatgacctgtgatt

SEQ ID NO: 827721 - DNA, 537 bp, Homo sapiens
tgtgtcatattcaagataaaattgtctacaccaaggtcatgaaaagttaattttcttctataagttttatagttttatcacttacatctgggtctatgatccattttgagttaatctgtaaattgtttaaggtaggcctccagcttcattcttttacatgtaaatatccagttatcccagtaatatcttttaaaaggaatattatttctcctttttaaagtcattatacctttgttgaaaataactgaccttgtattctagggtttatttctagactctcaattctattccattgatctacctgtctatccttatgtcagtacctctctgtcttcattattgcatcattgaaactagttttaaaagtggaaaatatgagtcccccaaagtttcattttttttttctttttttttttttatgttattttggctaacttggatcctttgcatttttatatacatttaaatttaatttgtcaattactgcacaaaawgtatttggtattttgacatgaattgtgttaaatctgcagatca

SEQ ID NO: 827722 - DNA, 510 bp, Homo sapiens
ccattccattctactccaactgattccattccattctattcctttccattccatttcattccattccattccatttcattccattccattccattcgcttccattccgttcgtgtccattccactccagtccattccattcgtgtccattccattccagtccattccatttgtgtccactgcattccattccactccattccatattattccattacactccattccattctattactttcatttccattcaattccattccatttgattccattccactcggtttcattccatttgagtccattccattccattccattccattccattccattccattccattccattcagttccattccattctgttccattccattccattcmgtaccattccatattgttccattcgattccattcgaatccattccattccagtccattccattcgattccattccattcctttcaattccattccattccattccattccacttcattccact

SEQ ID NO: 827723 - DNA, 510 bp, Homo sapiens
ccattccattctactccaactgattccattccattctattcctttccattccatttcattccattccattccatttcattccattccattccattcgcttccattccgttcgtgtccattccactccagtccattccattcgtgtccattccattccagtccattccatttgtgtccactgcattccattccactccattccatattattccattacactccattccattctattactttcatttccattcaattccattccatttgattccattccactcggtttcattccatttgagtccattccattccattccattccattccattccattccattccattccattcagttccattccattctgttccattccattccattcagtwccattccatattgttccattcgattccattcgaatccattccattccagtccattccattcgattccattccattcctttcaattccattccattccattccattccacttcattccact

SEQ ID NO: 827724 - DNA, 531 bp, Homo sapiens
gaatggactcaaaagcaatggtctcgaattagtttatagatatagaatggaatccaatggaatgcaactgtatggaatggaatmaaatggaatggaccagaatgcagtggactggaataaaacggactcaatagtaatggattgcaatgtaattgattcgatttcgaatggaatcgcatggaatgtaatcgaatgcaatggaatggaatgcaatagaattgaatagcatggaatgcaatgaaatggaacgaagtggaatcgagtggaatggaatggaatggaatcgagtcgaatggagtgaaatggaatggaatggacgcgaaaggaatggactggaaaaaaatgaaatggaacggtaggaatcgtacagaacggaaagaaatggaacggaatggaatgcactcgaatggaaaggagtccaatggaagggtatcgaatggaatgaaatagaatggaatggaattgaatggaatcgaaaggaatagaatggaatggatcgttatggaaagatatcgagtggaatggaattga

SEQ ID NO: 827725 - DNA, 588 bp, Homo sapiens
tgcagtggtactacaaaacaataaatttggaactattatagactaggcccctcgaggccaattatattatgactctatgggccagaccyactcatgttcacaggctccatctgcctggcccactaatccggcctatgatagtgatttaactaaaaggctagactaggtttatagaaggtgagaatcaccctatccatggaaatggggtgaaaagaggatttcatcaccccgaccaaagttagttagtcctgttgttggtcctgaacacccagaattatggaagctcactgtggcctcgtaccacattagaattttgtctggaaatcaagttatgggaacaagaaaccataagccatattatactattaacctaaattacaatctgaaaattcctttgcaaagttgtgtaaaacccccttatatgctagttgtaggaaacatagctattaaaccagattcccaaactacaagcagtgaaaattgtagattgtttacttgcattgattcaacttttgattggtagaatggtattctgttagtaagggcaagagaaggcgtgtggatccctttgtccatggatcgaccatg

SEQ ID NO: 827726 - DNA, 653 bp, Homo sapiens
aaaatgagggttaattttcacattattaggtttgtatcatttaaaaagaggtcacaatgacttagaggtgtagctgttattagctataaagttcacatgcacaaactggccaagagagtcttaattacactgttcattattctaggtggaacattacttagattcagtatacccattttaattagagagaatgtaattaaagttaacccatgccttctacgtcacaggctgtaaaacacgtttaactaaaataaaaaagtataaacccaaaggcatccatctcagcatttctatcagctactgggagctcagcatcttgtggaaagtacaggacttctgcctatccaatgaagtctccacacacatatgaaagaaagtacagagtataaaatacatctagtacatggtcaaggaaaatttcaatgtgtctagtacgtggtcaaagaaaatctcaaaatctcactggagtagaaagagttaaagagatattcgttgatctgtgggaaaaaaagaaggaaatacagagaraaaaaggaggtaatcatataaaacttaaaaataatattttcatttcaatttgtcctttgtgtagctaaaagtatattaaaagttttcaatatacacttttttttaagtaaaagtggggcactata

SEQ ID NO: 827727 - DNA, 675 bp, Homo sapiens
cttctgtctttggcattccataagtggttgggttattctcaactatagctcctgtcagatgcctctttccagcagttcctgatctcaacttgattctagwaacatcatttcttccctttaccatttcaggtctaaggacagtaatggcttcctactgttgacagtctctgggtttcccagcactctttgttgacttttttaaccctttctacatttctgtaggtagtttcctcaaaattccaattgagcattccatctgcttcctaacaggactctgactaaagcatgcatgtgctgatgactcacaaattcatatttgacctcctctctcagctctagctgaggatatttaattgctaacttaatatctccacttgaatgtcataatcttgctcacaaaatttaggcctcctataatatttgctttttcagtgacgggcagacatcacaaggtattaagttggaaacttgtgcaagttagaaatttggaagttacccttgatatctctctctctccctcatgtctcccaatcaaatatcaagtcctactaaagccacctcctaaatagtacctaaatccatccacttctttccatttacacttcaccagtctagttcaaaccgtgaacacctatagcctggagtactgcaaaagtagtcttattagtcttctgc

SEQ ID NO: 827728 - DNA, 491 bp, Homo sapiens
cttgttctgaagtctgctttctctgaaatataaatatttccagctttcctttgaatagcgttagcatggtatactttccttcatatttcacatggatttcttgaagacaacatacaattgggttttgctttcctattcactttggcaatctcttatttcttaagtggtatacttaaaccattgacatttaagtgactatgatatcattgagttagtatatatcaactgtggactgcgttagttttcatttgttgtctttattctttattgcttcttcttctttcgtcttcttcttcttctttttaatgtttttggcttctcattttattttattttaatttttatgtctatttcttttttgagatagagtctcactctgtcatccaggctggagtgtagtggcatgatctcggtgcactgcaaactctgcctccygggttcaagagattctcccacttcagccccctgagtagctgggactacaggagagt

SEQ ID NO: 827729 - DNA, 594 bp, Homo sapiens
ttcttacagcctgtcgtaaagcttattttgtcttagaagtcaaagcagacatatacagtaacccatgggataacttctataaccaatatcagcgkgaaatttaaagatgttgataaagctaagctttcagttaattagcttactcttgctttaaacagagagagtaccaagctttcctagagttcttctgccagccttaaactcttaactagcaactttaggctttattacctttaattaatataactgcattacttacaccttcaggttgttttttaaactaaatgtggttatcatcactgtgggcacagaacttctctttcttcattccctgtgttgtcttgacttataaaatgaaataataaagtaaaagtatttttctaagtaatgggtttttttaaggaagcattcttttttattgatacgtatttgtacgtatttatggggtgggtgtgatattttgttacatgcatagaatgaatagtaagcaagtcagggtatttagggtatttcattcattacctttagcatttatcatttctatgtgctgggaacatttcaagtccactcttctggttattttgaaatatacaa

SEQ ID NO: 827730 - DNA, 588 bp, Homo sapiens
ttcatttttgaatcctcaaaacctattacacgatacatgcactctacattgttgaataaggtaacataattttgaacttgaagcaaataaggaatttctatgagagtactgacamgtatacataaatcatgtatacttctggtgtatgctggcctcaattttaagcaaagttgagagctttgagtcagacacaagagtaggaaataaatggtagaattagctacatacagagggaagttttagaatctcttttcctataacaagtcaaaggcagtggctcttttggagtgtttctgtttgtgttattggtcttgaggtaggacagaccagctcatcctataaggttcttctagatttctgttgctaacaaattcggtaagaaagaatgaatgagacaagatccattgcaagtggtcattcagtctctgcagcatgtttttctgtctgagagcatggcctacattcagaagcctgattctgctgctgctcttcttctgggaaaggccttgactgcagaaagcagggatggaaggttctcttacttacatcaagtccttttttttttttttttttttttttttgccgggg

SEQ ID NO: 827731 - DNA, 545 bp, Homo sapiens
gatcccatccacctctcctagcygaagtgcttcccaggccagctccatcctgttcttgggctcccaacgcccaagaaggcattgtggcatggtagaaagaacctgagaattagaatcggacaggcctgggtttaaagcccaactcaccacttacagccgtgtgatcttgggcaaatcacatggtctctttagccgtccatttcttcatctataaaatacctacttcttttctatagcagattcacatattttttccctggggcaagttctgaagtaaccaagtaagcaaaaaacaaagataagtaagcgtgtccttaataaatccatttgaggggtacacttggaacccccatatatgtcaggcaactttctctactggggtggcagatgtgattgaggcaggcaaggtccctgctcttatagagcctggcatctggtgcagggttccagtcagcacacatcagtgggtattaagcactattcaaagacctacatggtaataggaaatgacaaggaaagtcttctcccaggaggtgacatttcag

SEQ ID NO: 827732 - DNA, 625 bp, Homo sapiens
taattgatattatctatatatataaaatattactgagaatattgcctacggagacaacagccaggttktatcacaggatgaaattgtgagtgcagacaaagctgccaagacacattttttcttagagacattaccctacaaatatgaaacaagactggaagataaggggactcagctctcaggaggtcaaaaaacagaggattgctattgcctgatccctcatcagataacctcaaatcctacagttggataaagctacatatcagctctggatactgaaagcggaaaagtcgtacaagaagtcctggttaaagctagagaacgtcgcgcctgcagcgtgatcactcatcacctcaccacctgtccaccattcagagcacagacttaatagtggtattttaggatggaaaagtcaaggagcacggcatgcatcaacagctcctggtacagaaaagcatctgcttttcaatggtcagtgtccagactgggacacagaacttatgaacagaacatatatatgtgatacacggtatatgtgatatatcacatatatatgtgtgatatgtatgatgtatgtgatatatcatatatctcatatattggaatatagatattccaattaatt

SEQ ID NO: 827733 - DNA, 464 bp, Homo sapiens
ctctctctcctgtcaccatgtaagacttgccttgcttccccttcacctcctgccatgattttaagtttcctgaagcctycccagccatgtggaactgtgactcaattaaacctcttttctttataaatcacccagtctcaggtagttctttatagcagtgtgaaaatggactgatacacaagatcttccctcagagaaagtatttgatagttaattatttgaaaaaacctgctggggttttatcaaagcctaacggacctggaagaagggaaatacccaacttcagcccactccagttctcctgtcccacctaaggggagaaaacactgagaagcacttgtgaagttcataatccagaggcagaggctcactgaaagactgagacttactcacaagactatagataaaacatttccccacctccctcaccttaccaccatgttactaaaggacaatgaatgtca

SEQ ID NO: 827734 - DNA, 630 bp, Homo sapiens
actgctgtgaccttcaggatactatacattgttgtgtgagaaaagctaggtagaagaaagcrtgcactagagctacttttatctaagaaaaagatggcacgtgtgttcttgtgtgtgtgtatattggtctgtttttacaatgctcataaagacatacccgacactgggtaatttataaagaaaaagaagtttaatggactcacagttccacatggctggggcggcctcacaatcatggtggaaggtgaaaggcacatcttacatggtggcaggcaaaaggaaaatcagaaccaagagaaaggggtttccccttataaaaccatcagatctcatgaaacttattcactaccacaagaacagtatgggggaaaccgaccccatgactgaattatctcccactgggtccctcccacaacacatgagaattatgggagctataattcaagataagatttgggtggggacacagccaaaccataacagtgtgtatacacaaatacgtacatatttccttatacaaaaaaaatttaaaaataaaataaaataaacagcatcctaggtacctgaggatgaaaacatccatctaagcctgaatctctccaacaagacctccaaaaaaacatgcagaag

SEQ ID NO: 827735 - DNA, 630 bp, Homo sapiens
actgctgtgaccttcaggatactatacattgttgtgtgagaaaagctaggtagaagaaagcatgcactagagctacttttatctaagaaaragatggcacgtgtgttcttgtgtgtgtgtatattggtctgtttttacaatgctcataaagacatacccgacactgggtaatttataaagaaaaagaagtttaatggactcacagttccacatggctggggcggcctcacaatcatggtggaaggtgaaaggcacatcttacatggtggcaggcaaaaggaaaatcagaaccaagagaaaggggtttccccttataaaaccatcagatctcatgaaacttattcactaccacaagaacagtatgggggaaaccgaccccatgactgaattatctcccactgggtccctcccacaacacatgagaattatgggagctataattcaagataagatttgggtggggacacagccaaaccataacagtgtgtatacacaaatacgtacatatttccttatacaaaaaaaatttaaaaataaaataaaataaacagcatcctaggtacctgaggatgaaaacatccatctaagcctgaatctctccaacaagacctccaaaaaaacatgcagaag

SEQ ID NO: 827736 - DNA, 630 bp, Homo sapiens
actgctgtgaccttcaggatactatacattgttgtgtgagaaaagctaggtagaagaaagcatgcactagagctacttttatctaagaaaaagatggcacgtgtgttcttgtgtgtgtgtatattggtctgtttttacaatgctcataaagacatacccgacactgggtaatttataaagaaaaagaagtttaatggactcacagttccacatggctggggcggcctcacaatcatggtggaaggtgaaaggcacatcttacatggtggcaggcaaaaggaaaatcagaaccaagagaaaggggtttccccttataaaaccatcagatctcatgaaacttattcactaccacaagaacagtatgggggaaaccgaccccatgactgaattatctcccactgggtccctcccacaacacatgagaattatgggagctataattcaagataagatttgggtggggacacagccaaaccataacagtgtgtatacacamatacgtacatatttccttatacaaaaaaaatttaaaaataaaataaaataaacagcatcctaggtacctgaggatgaaaacatccatctaagcctgaatctctccaacaagacctccaaaaaaacatgcagaag

SEQ ID NO: 827737 - DNA, 551 bp, Homo sapiens
cgatcataaatatcttgggctttgtgaactatgtggtctctgtcacagccactcaactctgccactgtagcacaaaaacagccacaggtaatacacaaatgaatggtgttccaataaaactttatttacaaaaatagcctgcaggccagatttggtctgtatgccataattagctgattctgccttaagccattacaaatatttcagaaaacccacatagaatatacctttacagttatgataagaccactcctaggctaatgaattccaaccaaacatctctggctgagcaactcaggctgcaaggggccactcatggtggtctagagcttgattggcagcttcataaaaaagggaaagttgctgccaggaaaaaagacattcttaatctgggaccacaaagaggttatgtcagaatgctttyagctccaagcgatagataccaaagcaaacaaccataagaaaaataaggaattttttagttcatgtaagtggaccagtttcaggcacggctggatctaggggctgaaacagtcagggtctgtgtctgt

SEQ ID NO: 827738 - DNA, 573 bp, Homo sapiens
tgtgaaaaatggtattggtmttttaataggaatcacattgaatctgtagattgctttgggcagtatcacaatattgattcttctaatccatgagcatgagatgtgtttccatttgtttgtgtcatctgtgatttctttcagcagttgttttctagttctccttgtagagatctttcacctctttggttcagtttattcctaagtgttttatttgtttagcagctgttataaaatgaattgggttcttaatttgattctcaccttggtggttgttggtatatagcaatgctactgatttatgtacatgaattttttacctgacactttactgaattcatttatcaatctcggagtcttttggaggaatcttatcgttttctagatatataatcctatcatcagcaaacagcaatagtttaacttctactttttcaattcggatgctttttatttttttctcttgcctgattgctctggctaagacttccagtactatgttgaatagaagtagcaaagttgagcatccttatcttgttccagttctcagggggagggctttaatcttttccccac

SEQ ID NO: 827739 - DNA, 500 bp, Homo sapiens
gagcagctgggactacaggcacacaagaacacacctggctaatttttgtatttttttgtagagatgggagtctcaccatgttgcctaggctggtcttgaactcttgggctcaagcaatccacctgccttggcctcccaaagtgctgggattacaggtgtgagccactgcgcccagcttatcattgactttttattattgtttgcagaggtactttgtcttctcaaagtgaacagtaagaatttcaatttttctttcacttgttcaatatgtttctctaatttctcctttgaaaagcaaagaaagacctggacacttaagatttgttgttgctattgttgttttatttgagaggcaatagttttcagttttcattttatggtgttgtctaaatagacatatagggcagaaatatgattctgcctttctggattcaaatcttggctgcaccacaatgakctgtatgatggctcaagttaagttaagatgccatttaagattg

SEQ ID NO: 827740 - DNA, 690 bp, Homo sapiens
ttaatgcctttgctggctatcaacttttcttacaactgtgtgcttccaaatgatttttaaatttcaatgtgtttttggcagaggatagatttcctttccatgaatataaggtagtgagagcaaaggcacyaagtagaaacagtctgaaagtcaaaggaatactgttaaagatccctctccttttccttttcctgtaaaagatagggtaggaagtggcatgtggctagaggatttacagccacatgatggaggacgggagagctgtcacctgctttgctacgcagggtgcccagcttaacccatctttctttggcaactgtgccccagtgagaaaagctagcagtccatatgttgagtaggcaccatgccattttgacaggcgtgagtgtcggcaagaaagggaccatgtatgagcatcaaatgtgtttgttgtgggaaggattctaggccaggaatattaaaataactgtctgtccttagctctagcacatatggttaaggagatatgctatgatgactcacattaacgttggaaaaaatatatatagaatacgcaaccatgctaagtaagtttctgatgttgataaattgggcctgtaatcttcacaaagaaaggttgtagagaaacatacatagcaataatagactctcttttatgtattaaatagaatttactaaagactaaattca

SEQ ID NO: 827741 - DNA, 612 bp, Homo sapiens
ctcacagtgcgatttactaagagaggattgatacrggcctcatgttcttgctcctgtactcttttcccctgtaccctgaaggtcatcctggcagttaattttatatttgcagaattctttaacagtggattatttcctgtcacatagcagtttaattatcctttatttggatatgatctaaataaaatcaacataatcttagatgataagataaatgtatcccaaacaagtacactgatacctgatatgcataatgaattaaccttcttgatgcctaggataacagctaatggtgcatctcctctcagttagtgaattagaaagccaggcgttcatccaaatatgcagatgtttagccttgtgtagtcaaaacctctgaatgactgacacaagtttcactttgaattatattctttggtgccagacagtggcagagtatcaggcaaataaatgcatgactttaaaaagaattctttcaatcttgaccagtagcagccccagttgagtggagaaaatatatgttttgtggttttacttattaatcttatattggacttatgtaaattttaattagcctttttgactttcctagttttcttctactgaacagtg

SEQ ID NO: 827742 - DNA, 607 bp, Homo sapiens
gccaaaactatgctttattcaaaaaaatgaatttgaagtgagtgttttcttagcttcgaattgaggatttgttttcttagttgagcagaaagctattgttctgtgaagaagtacagatgctaaggaatgcaagrgaacactcatttattccatggtttccaaagcaagagaaagcaaggagttatttagctgtatttaatacattctttccaatgcctatttcctgaatcttctgtctattatttcagccattattgctgtaaattacttgagctagtgactgagggtatggggaaggacttagccatgggctacatggcaatgacctctaatcagagctctccacgtggctctgttcgactcactggaagcatttccacctctttgcctgctctgtctgttgcatggtgttatgatatggcttagtgcaaatcaacacctgaggcttgagatgaccagtgtgcagggcccataccagctagcttttctaaaacagaggacaggacactggagagaacttggataaggagtgtcaggtgcaaggagtggtggtttgatgattacactgctcaccactctgcttttgcagttcattgacaaaatttca

SEQ ID NO: 827743 - DNA, 516 bp, Homo sapiens
cacaggccgcaaatcgctctaaatgaacactgcagattctacaaaaaggatgtttcaaaactgctctatgaaaagaaaggtttaactctgtgagttgaatgcacacaacacaaagccatttctgtgaattcttctgtctagttcttatgagatgataatcccttttttaaggacggcctcaaaatgttacaaatgaacacttgcagattctacaaaaagactgtttcaaaactccaccagcaaaagaaaggttcaactctgtcagttgaatgcacacatcacagagaagtttctgggaaagcttctgtctagtttttatgtgaagatatttcttttccaatgtaggcctcaaagccctccaaatgaacacttgcgtattctacaaaaagagtgtttcaaaactgctctatcaaaagaaaggttcaactctgtgasttgaatgcttacatcacaaagaagtttctgagaatgcttctgtctagattttatgtgaagatatcccgattccaacaaatt

SEQ ID NO: 827744 - DNA, 516 bp, Homo sapiens
cacaggccgcaaatcgctctaaatgaacactgcagattctacaaaaaggatgtttcaaaactgctctatgaaaagaaaggtttaactctgtgagttgaatgcacacaacacaaagccatttctgtgaattcttctgtctagttcttatgagatgataatcccttttttaaggacggcctcaaaatgttacaaatgaacacttgcagattctacaaaaagactgtttcaaaactccaccagcaaaagaaaggttcaactctgtcagttgaatgcacacatcacagagaagtttctgggaaagcttctgtctagtttttatgtgaagatatttcttttccaatgtaggcctcaaagccctccaaatgaacacttgcgtattctacaaaaagagtgtttcaaaactgctctatcaaaagaaaggttcaactctgtgacttsaatgcttacatcacaaagaagtttctgagaatgcttctgtctagattttatgtgaagatatcccgattccaacaaatt

SEQ ID NO: 827745 - DNA, 516 bp, Homo sapiens
cacaggccgcaaatcgctctaaatgaacactgcagattctacaaaaaggatgtttcaaaactgctctatgaaaagaaaggtttaactctgtgagttgaatgcacacaacacaaagccatttctgtgaattcttctgtctagttcttatgagatgataatcccttttttaaggacggcctcaaaatgttacaaatgaacacttgcagattctacaaaaagactgtttcaaaactccaccagcaaaagaaaggttcaactctgtcagttgaatgcacacatcacagagaagtttctgggaaagcttctgtctagtttttatgtgaagatatttcttttccaatgtaggcctcaaagccctccaaatgaacacttgcgtattctacaaaaagagtgtttcaaaactgctctatcaaaagaaaggttcaactctgtgacttgaatgcwtacatcacaaagaagtttctgagaatgcttctgtctagattttatgtgaagatatcccgattccaacaaatt

SEQ ID NO: 827746 - DNA, 609 bp, Homo sapiens
aagactttttcaatggaaaagaactgaataagagcatcagccctaatgaagctgttgcttatggtgcagctgtccaagcagccattctgtctggcaacaaatctgaaaatgctcaagatttgttgctyttgtatgtcattcttccttcccatggtattgaaaccgatggtgtagtcatgactgttctcattaagcataatactaccattccttccaagcagacagaccttcactacctactctgacaggcagcctgatgtgcttattcaggtttatgaaggtgagcatgtcatgaccaaggatagcaacctgcttggcaagtttcaactcacaggcatacctttggcactccaaggtgttcctcacattgaagtcacatttgatattgatgccaatggcatcttcagtgtctctgctgtgcacaagagtacaggaaaaagaacaagattactgtcactaatgacaagggccattttagcaagaaaaacattaaatgtgtggtccaggaggctgaatagtacaaagctgaagatgagaagcagagacaggtgtcatcaaagaattcccttgaatcctatgaattcaacatggaagcaactgttgaagatg

SEQ ID NO: 827747 - DNA, 609 bp, Homo sapiens
aagactttttcaatggaaaagaactgaataagagcatcagccctaatgaagctgttgcttatggtgcagctgtccaagcagccattctgtctggcaacaaatctgaaaatgctcaagatttgttgcttttgtatgtcattcttccttcccatggtattgaaaccgatggtgtagtcatgactgttctcattaagcataatactaccattccttccaagcagacagaccttcactacctactctgacaggcagcctgatgtgcttattcaggtttatgaaggtgagcatgtcatgaccaaggatagcaacctgcttggcaagtttcaactcacaggcatacctttggcactccaaggtgttcctcacattgaagtcacatttgatattgatgccaatggcatcttcagtgtctctgctgtgcacaagagtacaggaaaaagaacaagattactgtcactaatgacaagggccattttagcaagaaaracattaaatgtgtggtccaggaggctgaatagtacaaagctgaagatgagaagcagagacaggtgtcatcaaagaattcccttgaatcctatgaattcaacatggaagcaactgttgaagatg

SEQ ID NO: 827748 - DNA, 622 bp, Homo sapiens
taatacaaactctacactttaacttagtcccctgcatcttaacttttcgttgcttctatttataatcttactgcctcttggaaagtattatagttgttatttttgatcagttcttttagtctctctacccaagatatgaataatttatacactgcaattgcagtgttacagtagtgtttttcagtgtacttaccattaccctatggccaccaccctggaactgtgctgagtcagacctctgaacccttagaaccttcttgtgcttgaatattggtatctttttctagatttgggaagttctgtattattaccctttgagtaaactttctacccctatctctctttctgcctgctctttaaggctaataactcttagatactctcttttgaggctattttctagatcttatatgcatgttccattctttttaattcttttttgtctcctatgactgtattttcaaatagtctgtcttcaagctcactaatactttcttttgcttgaacatttctgctggtaagagaccctgatgcattcttcagtatgtcggttgcatttttcaactccrgaatttcagcttgattctttgtacttatttcagtctttttgttaaatttatct

SEQ ID NO: 827749 - DNA, 620 bp, Homo sapiens
attccagaaaaatgaaaatgtatattctcacaaaaacctgtatactaatgtttataacagctctatttgtaatagccaaaaactgaaaacaatcaaaatgtcctacagtaggtgaatggttgaacaaacttcggtacatttgtaccatggaatactcagccacaagaaggaataaactgtagatacatacaatacagagatggattttaagggctttatgttgagttaaaaaaaaaaaaaacctgtcttggccaggcgcggtgactcacgcctgtaatcccagcactttgggaggctgaggcgggcggatcacgaggtcaggaaatcgagaccatcctggccaacatggtgaaaccccatctctattaaaaatacaaaaaaaaaaaaaaaaaaaagcctgtctcaaaaagtcatatattgcatggttccatttatataacattctcaaaaagacaaaattatagaaatggagaaccattagttgccaggagtatgggtggtgggaggacggggatgggtgtggctataactagtgactggaaagaaattgttgtgatgaccagttctgtatcttcgttgtggtggtgcttacaygaacctacatatgtgataaaatgaga

SEQ ID NO: 827750 - DNA, 640 bp, Homo sapiens
aaatctaaataaataaaacaaaagtccaaggtacatctctgaatagtaattactacaataatattatgaaacaaaataaaacaaatcrgtcagaaataaaaggagagaaatcatgcatatggcacaatcaagttaaaaagatgataactaaattactgaataatgtgctaagcacattatataaattataccttttaatccaacaaaaattaaaagttttattaaaaagcaggtaatatttttatttgcatgttagaaaattgaggttttgagattagattacagggcatggtcacaaagctagaaagttgttgactcagagatttaattcagatctgtctcattccgtaacaggtcagagtttagtaatctggaaaaggagatctgcggtttcaatccaagttggggagtgccatttggcatatgtggactatgtaactcactgggaaactgtgtctcttgctgctaaatactagttgtgtataatatatgaattctgtgttatcgaagtgctttgttccagaaggagtcagcttctcattagcaacccagggcagcaagctgaatgtattataactcaaaaccaaaatagaatcttactttcacataggtaaatagaatcttactttcacataggtaa

SEQ ID NO: 827751 - DNA, 655 bp, Homo sapiens
tgaaaaccatcctacatagacatagccttgcatgtctatctcatagtttgttgagaaactgaggaaagcatatttctataatttgctttattctcaccatttataatagggatataagctttaraaaacaaagattccatcaatacagaaggaagtcagagaccaatactatgtagtaaaacaaaaatcaaaccaaaacccatgattctgatataagatctataacaataatttgttttttgttgaatttaatttctatatgtctgagtgttttaattttgtggaaaaaaaaggtaacaataacttttaagccctcaagggatgaaactgtttagctgaaggacatagtgaaccattaagtttgaggtgaactacccaacagaatagctccttaggaataaatcagaaagtggcatattaaaaagctacttgcaagttctgtctgtatatcttaactcccccggagaatgccttgctcttactctataaaacattctttttccttaataactgacattattaggaaaatggggaggtggagcaatatagccaaatagaaacctccaccaatagttctcctacaggaataccaaattgaaaaactatttatacaaaaaacaccttcataagaacaaaaaatcaggtgaacaatcac

SEQ ID NO: 827752 - DNA, 644 bp, Homo sapiens
tgttttttggcgaggagaaggacagagtctcgctcttggtgtccaggctggagtgcaatggcccgatctcggctcactgcaacctcggcctcccgggttcaagcggttttcctgcctcagcctcccgagtagctgggattacaggcgccagccaccacgcctggctaatttttgtatttttagtagagacggggtttcaccacgttaatcatgctggccttgaactcctgacctcagatgatccgtctaccttggcctcccaaagtgctgggattacaggcatgagtcaccgcgcccggcctttaatattactttttaaacagctgtgcctatttcctttccaaggtaattgtgggcttatgttttaagtataatttaccttggattctattcagtacagtgcagataaagtccttccttattactcttttagctacaccaaccgtaagatattgattttagccatgttgttttctgcatggttgaatttcttacattatatttaaagagaaaaagaaaaaagaagagaaatatctttaaatcagattgattcataatcaagtgcttcctacttcttagtaggaaayatattaaaataaacaccttgaaaaattttgtatgccaccttgacacaatggactgtc

SEQ ID NO: 827753 - DNA, 638 bp, Homo sapiens
gcataaaatgtggtgaacactaatgcagatatacagataggatacccaaagggaagcccccacaaaagtaaaattataaccctgtaagaaataggagtgcaagaatcttgcattggtaacatwttatacaaaatttatcctagtcagaggaaatgtgaatttttcttgaggaagtaagatataaaaaagagatatgatgttaattaactgagaaaacatgaaataaattagtaatatggttagaaggatagctaaatctccatgtgcacaagattatggcaaaccaaaaaacctaaatggttctgtgtatgtctgaaaacatagagacaggggaatatcacaagagttgtagctggtgaagtaggaaaatgccaaacctataataaagcaaacattgcagtaaagtgagtaaaaaaaaacttttggattccccagcaaagtgagtaacaaatctgtgggttccccagtgtatataaaagttatgttcacactatactgtagtttattgtgtgcaatatcattatatctaaaaaaagtacacttttattaaaaatgctttcttactaaaaattgcaaatgatcatctcagctttcagcaagtcacaatctttttgctggagaaaggtcttgacttgttg

SEQ ID NO: 827754 - DNA, 629 bp, Homo sapiens
ttcctcaattaacttgaacagatacggcactaaggagaaaatgtatgcatagtgcacagaaaactattttgggagaactgggaaatgcattctttggggaacgcactctgtttcaaacccagtctctgacacttacatccaagtaatctcggccaattccagagtttctctgtgccaaaggtcccttatcttatcttatagaacacaacgttacctacccaccacatagcgttacggagaagattaaataacatatttcatgtaaagtgcagagaactgtatatagcacattatagatgttcaattaacagtagctatcattattactgtggcagttgctgttgtatatgtgaattacagttctacttttagacatcatttggagctatctgtaccttgtaggtatcagaatcatcaaatcattcggattccacaaatactacaccatctaaatcaaaagtaaaaaatcctatgtttttgaaacatattttttcaaggaaaagacttaaaaataataaactttttcagatatttaaatataagatacataaatattctgttattcagcatgaaaatgtgctttctacgtcgyggtttcagttgttttcaaaatatatttgttctcatct

SEQ ID NO: 827755 - DNA, 560 bp, Homo sapiens
acattttcgggtatcttttcagcaatgccccactctactggtaccaatttactgtattaatccattttcatgctgctgataaagacatacccaagaccaggaagaaaaagaggtttaatggactcacagttccacctggctggggaaacctcacaataattgcagaaggcaaggaggagcaagtcacgtcttacatggatgccagcaagtaaagagagtgtgcttgtgaagggaaactcccatttttaaaaccatcagatcttgtgatacttattcactctcatgagaacagcacaggaaaggcccgcccccatgattcaatcacctcccaccgggtccctcccacaatgggtattcaagatgagatttgggtggggacacagcaaaaccatatgaggggttaatatccaaaatatataaggatctccattcaatagcaaaaacaacaacaacaacaacaaataaccatattsaactgggaaaatgacttgaatggagatttcacaaggaaaccatacaaatggacaacaggtatataaaaaaatatcactaatcatgag

SEQ ID NO: 827756 - DNA, 639 bp, Homo sapiens
atgatttttattaactattacagtcaactatctatatctgttggttctgcatttatgaattcaaccgaagataaaaaatatttaaaaatatataaaaaatacagcaataaaataatacaaatttaaaagaatgcagcataaaactgtttacatagcatttacattgcattagatattataagtaatctagagatgatttaaagtatgtgggaggatgtagataggttatacgcaaatactacaccattttatataagggacttcagcattggcagattttggtattcaagggggagtgctggaacaaattttctgtggatatggagggatgactttacttttaaagaggtgaaacttggccactttgcctagaacttagtgagggaagtgaggagagacagaagctagatgtgggtaggggcaatggtgtgctcttcatgcttgatttcttatgcctcagaaggaagaacgttttaaaagctggctacctgtaagaatgaattggraaaccaaagagacaaaaatacacaagaaaacatgaaatgtcaacaagagtaagaggtggtcaaatgtggacatttgttccacttaactgaattgtgggtgaacactggaaactaatttgcaacctttgatgta

SEQ ID NO: 827757 - DNA, 522 bp, Homo sapiens
agggctgctgcttgcccatttttatggttatttcttgattacatgctaaacaagggattgatgatttatgcctcccccttttagaccatatagagtaaatttttgatgttaccatggcatttgtaaactrtcatgttgcggagtgtaacagtgagaacaacaagaggtcactcttgtcggcatcttggttttggttggttttagcctgcttctttacagccaactgttttatcagcaaggtctttatgacctgtagcttgtgctgacctcctatctcatcggtgacttcagaatgccttaactgtctgggaatgcagcccaacaggccttattttacctagcccctattcaagatggagttgctgtggttcaaatgcctctgacaaaactatgtgcgacaaacggtgctgtcaagttctcttacctgagaactaattgtttatcttaggaccacatatataatgggttgaaactgcatggctctataaatgttggtgagactcctttctgtctgcaatctct

SEQ ID NO: 827758 - DNA, 512 bp, Homo sapiens
acacccgagtaatttttgtatttttagtagagacggggttttgccatgttgacaaggctggtcttgaactcctgacttcagatgatctgcctgccttggcctcccagagtgctgggattacaggcatgagccaccgcgcccagtctaactaaaactttttaccctgtaatcaacatctcttaatcctgactccacttgagcccctcacattctctttgattctgtaagtttgactttaaattctacatatcagtgagatcatacagtaattctctctgtctggcttatttcattaagcataatgtactccggatttatctatgacgtagcaaatgacagaattttattctcttttaaggctaaaatttctttgtgtgtgtttgtgcatatatctctttgaaatactgatttmatttcctttggagacatacacagtagtgaaatttctaggtcatatgatagttctatttttaattttctgaggaacatccataatagcttttccataatag

SEQ ID NO: 827759 - DNA, 646 bp, Homo sapiens
atgagttacagctgcagcgacaatattttccaaaactagccatcacagtattttcagtctcatatgcgcaacctcaaccttaccacactcccatttagagtttgagtctatttttcttccccttgaacccaggcaagactttgtgactccctcaatgaatagactataatgaaagtgacgtagggtgattttaaagttcatcaaaaaaggcaacatgacttccacttggctctctctttattggggtatttctcctttgaaacccagctaccatgtttaagaaggcccaggtgatgtggcaaggtcacaaggaagtgttgtaacagacatccctagcttaggttcctgctaatagctagcatctgctagtaatacgagagatttcagatgatttcagcctccattctatttttttttaaaagtttttaaggctacaagagaagcactagggttccactagagaaaagggaagatggggagtatgttgccactgtagatttcacaactgattcaagcctccactctttaagccactacagctagtttaatagaacagagacaagttgctgagtctgcaaaattgcagaattatgagcaaaataaatgttgttaartcactatattttgtagtggtttattacacagc

SEQ ID NO: 827760 - DNA, 638 bp, Homo sapiens
ctccacctgccaccagtgctcagtgctgctgtttctctaccagccagagtctgagcagaccctcagttgaatgcattttgtatgatttcaccaaatagwcatatgaccacaattatctgaaatgtttcatatgctgtgttcattattcattgaacaaatagacattgagttcccactatgtgctcagaactgtgctgggtgctgagaccacagaaaggagaaaatcctggctttgatccacctagtaatgcctgtacacgtaaatcagtctgtaaacagcaagctgtggagaaaactgtcttgtaaatatttttaaaggttgcttttattaattgctcaagaactagtcaaataatttaggagatgagttcagcagtgaatttagcagcttagaagtagcagaactcaataaaatgcaaaacatcacatgatctatagaaaccagggggtgaaaagccgtaggagcaaaatcattcctccattatttgggagggaaaaaagagaatgaaagaaacccgaccttagccggtggaagctggaaagtgacatcttctttactgagtcatttaaataagggatagatgaagctagaagctgttcaggttttgtaattattcatccataatgacagactttag

SEQ ID NO: 827761 - DNA, 600 bp, Homo sapiens
ttagctaagttactagtccatacgaattcagaatcatttgatttttcaggtttactgacacttttattgtcatgctatactgtcttttatttctaataatgttttatatcttgaagtctactttgattttgcacaactatactttcttttgcttagtgctttcaaatgttctctgtctttatagttaaggtatgtctcttataagcaacaaatagctggactgtatttctttggtaattcagtccaacattttcagtcttcaggtatacttactccatactttgatttgattactgatatacttgaatttacattaatattcatatttatctgtttgctgtttgtcctatctgtttactgtgatcttttctctttttttcttgcattctttttttgatcaatagtatatttttatattcaatattaattcctactatctttctagctacatattattttactattgttttagcggttgctgcagggattacagcrcatccttgacttatagttttaccagttccaggaaagcaaaagtgtttgaaacactttaatgtcattggttttgccttatgttctgcattataatttttatacatt

SEQ ID NO: 827762 - DNA, 563 bp, Homo sapiens
tgcctgtggagaagagctacccctccagggtctcctctatgctgatagctcagcagatgatgggactaacagctgtagagaggagctatccactccaaggtctcctctctgttgagagatgaacacttgataggacagcttgtctatagagaggagctacacactccagggtctcgtctctgctgagaaatgtatactcgatgggatgacctgcctctggagaggagctacccattccagggtctccagtctgccgagagctgaatactcacagagataccctggctgtggagaggatctacccactgtgggtctcttctgagctggtctattactcaacaaagctcctctttattcactctcctcttttctacatacctcattcttcctgtacacgggacaagaacttgagacctgccaaatggtggggctgaaagagcagtaaygcaaacagggctgaaacataccccatgcttgccacattgtggatgacaagaagaagagaagagaggagagaagagctgtgcccttttagggatcccagacttaggagctccctgacc

SEQ ID NO: 827763 - DNA, 501 bp, Homo sapiens
ggagcagctgggactacaggcacacaagaacacacctggctaatttttgtatttttttgtagagatgggagtctcaccatgttgcctaggctggtcttgaactcttgggctcaagcaatccacctgccttggcctcccaaagtgctgggattacaggtgtgagccactgcgcccagcttatcattgactttttattattgtttgcagaggtactttgtcttctcaaagtgaacagtaagaatttcaatttttctttcacttgttcaatatgtttctctaatttctcctttgaaaagcaaagaaagacctggacacttaagatttgttgttgctattgttgttttatttgagaggcaatagttttcagttttcattttatggtgttgtctaaatagacatatagggcagaaatatgattctgcctttctggattcaaatcttggctgcaccacaatgakctgtatgatggctcaagttaagttaagatgccatttaagattg

SEQ ID NO: 827764 - DNA, 591 bp, Homo sapiens
ataaaatacctaggaataaatttacctaacgtgaaaaacctgtctatggaaaactatgaaatattaaggaaaaatttaaataaggcacaaataaacagaaaaacatcccatgtttatgaattggaatacttcataatgttaaaatgtttatgtattagtctgttttcacattggtataaagaattacttgagactgggtaatttataaagaaaagagctttaattggctcccagttctgcatggctggggaggcctcaggaaacttataatcatggcggaaggcacaggggaagcaagcaccttcttcacaagttggcaggaaagagagaaagtgcaggggaaactgccacttttaaaccatcagatatcatgagaacatcatgggggaaaccacccccatgaaacaatcacctcccaccaggtccctcccttaacacatgaggattacaattcaagatgagatttgagtgggtacacagagccaaacyatatcagctcataatacttaaagtgacctacagatttagtgcaatctctatcaaaatccaaatggcattttttgtataaagaaaaaaaaattcctaaattca

SEQ ID NO: 827765 - DNA, 564 bp, Homo sapiens
aaattataaaagtcaggtgaacctagtttatgccatttatccctttaaactatatttagatacaatcttartctactgcctttactggggaaaaaagtgtaggtcaaaaactgacaaattatacagtataagaatattccgtttagaaattaacataaatgaaaatgaaaatctggtagaaaaaaaaataggccctcaaacttgaacaggaaacaatttatctaaacacctttatctagagtaggttatcacactagttctttcatgaaaaatatgataaggctcaaaaaaagactggcttattagttaacgcagatcccattcacattccctaaagtttgtattcggatgatatctactgatattgtcgaaactctttttctttcattacagtcagcagggcctgccagtgaacaatttcaggaagtacatgtaaatcttcaaaccatctgtattatagtcctcaacctcgttttcataggagagttttctttttttctttttttttttgacggagtcttgctctgcccccaggctggaagtcagtggcgcgatctcggctca

SEQ ID NO: 827766 - DNA, 523 bp, Homo sapiens
aaatcatcattaaaatttttttatcccttaaaactttaattatatttggaagattgagaagggcctawgtgtcaaatgggacaaaagtgtatagaaatgggtggcattagcttagggtctgatggaaatacaacacacaaggagcagtttttctgaagcgcagaggagtatcctgcaggaatgtttaatgttgagcaaagaactaaataacaaataaaccaagacaagataaacttctcgaacctgtaatcatttcttaatgagaaaaaagacctcaggaaaagaagtgatagaatagaagccttctcatcataagttactatggagtcagttattactgcatttggttattaagggagtgggtgccctttcttgataaaatacagtatattatggcagcttgaaacttctgatgtcacaactagaaaaaaagaaagacagattagttacaaaaaaatatattatgaaaggcatcagggagcattgcataaacaatgggaaacatgatcaaaacttctggagg

SEQ ID NO: 827767 - DNA, 639 bp, Homo sapiens
ggcttcaaggattatgttttactttgtagygtggctggtgggtaagtgagctctcatatttttagtcttcacattctaggcatacactacaaatagtttctgtattatttgtagatactctgtattcagtttgtaataagactatttaaaaaggaaaaattaatattcctctaagcaacaagatatgctctacttggcagttttaattgacatcatgtgaatttataaagaaaacataagtgtgctcttttaatgataggtttgctaaccccaaatttcagcttacaccacaggaaacattgtaaaatatgagacggtattttaagtgcatattcacagttgtgatggcctgaaattcacttttgtaaaaacgatatattaagcaaatatcacacatagttacgtgagatttttttttatcatgtgctggggaaaatctgattaaaataatgcagattactatatcaagataatcattcatgatatagagatcttatactaaattacccaatgaaaatataagaattaactgttaaatgaagatataaatttagaacttatttagctcaacaaaactgcacaattacagcaagtgcaatagttaaaattagagtacataccattaaaatcattttctag

SEQ ID NO: 827768 - DNA, 550 bp, Homo sapiens
agacggtgacctactcagtttcttataaataaacctttaatagggacttacaaacagaggccatgtctgtgtctaggactgcaatgagacaagatggtggatccccatgatctccatgcygatacccccagaccctgggtttatatataatagagaaagggtgattcagaagggatgtgtaagacaactgaaatatgataacatcaagactgccctaacctaagggcaggatttatggtaaatatgtgctcttacataaagaacaacagataaactggaaatcttagaggccgtctcagaactgggcttcctcagaagtcaacatggtggattagcatctgagagggagttgtcttggcttccatgctgtgagtgtgttatgaaaactagggtatgttctaccttgagggcttcattacatacctcccttaggaacctacagaaagagggggactgcatctgtatgtctgaagttcttcagttataggtataggacaatgggaggctattgaagttctgcaagcagcattaaaaaatagaaaacattaac

SEQ ID NO: 827769 - DNA, 676 bp, Homo sapiens
taaccatggaaaaaggctgtgtctatactgagttccgggaagaatgttcaagtcagagtcagcagaagtcaagtggggcgctgaccctctggctctgccctctctaatcagccttccccaacccatttagaattggaatctgaagaattccctttctggcccaggatcaacagattttggtcctgtctacaagcattttcattttcttgcccgaaagcctgtgcttgggcttttctagagactcagctcccccatcaattgtccaaaatgcctaacttcagctcccaactctgtgggtaaataagtcacccaccctcactctttcttcctgggccacccctggtggaaagaagcccactggggctgggacacctacctcccagcacctcgcagtcgctgtccatgctgtcatgcacacctgcaaagatgttggccagagtggacttgcccaccccctgctcccctatgagcaccactcggtagtaggtgttccctgactcagaggagatgactgagtctgtggagtcagaggaccagcttcggcggcagtggtcctcaggggtagcagaatggcggttgcsgtggctgtactggtggggctctttctggaccatcagatgcctgccatcagctgggatgctccagcgctgctgctgtggctgcatgcccacagtgc

SEQ ID NO: 827770 - DNA, 578 bp, Homo sapiens
tctacaaaacaaaacaaagaaacaaaaaaaaaaacmctgatgcctggttcttttaccaagagattctttaaagtgaacacaagccatgttcactttaagtgttgactatttaccaagatagatcatattctaagccataaaacaagtctcgagaaattcaaaagaatttacatcatacaaaacatgttctctgcccacagtataattgaatgagaaaccactaacagaaaacaaattcagaaaattccctaatgtttagaaaccaaatccacacatatataacccatgaaataaaagagaaactagtttaaagtaaaggaaaacaaagacacaatagatcaaaacttgtaagattcaagaaaagcaatactaaaagggaaatgtatggtactgaacacctatactagaaaagaagaaatgcttcaaatcaaagttcctggtttccatctgaaaaaaaaaaaaaaaaaaaaaaaactagaaaaagaagaataaattaaatctaaaaatagtcaaaagaaacaaaacgataaagattagagccgaaatcaacaaaatataaaagaagaaaaaaaatagag

SEQ ID NO: 827771 - DNA, 544 bp, Homo sapiens
gagatactctgatggcttatatgaatacaaagagtatttaaacacattccacgattcctagtagcctagcatctaatggagataaaaagtaatatagattatgtagtctagtgtgaagataaaggacctcaagtgggtaacaaaacagcaaaaacaagcaaaaaccacaggaatgtactatggtaagatctatcaaatccgattagtagttataaaatagaaagggacttgaagataaatggacttgccaattataatgattggcaattggttttaagaattagaacaaaatagttgttaatggaactgcttatgtaacaactccggataaaaactgtgtagaattctaaggttgagagacaatatctttctggagcagggtagaggaaggaaagaaggatcacagtaaagtctattttytcatgccaccttattgaagtaggatccagaaaacggagacagttggaaatggagagaggaggaggaaagagtagcctatagctaccaaggaagagtttacaataacttatccttactggtatca

SEQ ID NO: 827772 - DNA, 522 bp, Homo sapiens
tccctggatcaggaagttgtgatttcttgctgaatgtttctcaatatatttcctttagctcccccgcttttttttttttttttttttttttgagacrgatctcgccctgtggcccatgctggagtgcaatggcatgatcttggctcactgcaacctccgcctcctgggttcaagcgattctcctgcctcagcctcctgagtagctgggattacaggtgcccaccaccacatccagctaattttttgtatctttagtagagacaggtttcactatgttggccaggctggtcttgaactcctgaccacgtgatccacccgcctcagcctcccaaagtgctgagattacaggcatgagccactgcacctggccttagctcccctctttatggatatgtttacatctagatataggtttgttgagagacatagtaaagtgaagagtggagaaagaagacaaagaggaagatgctaggcaaaatatcaatgaaaatagaaagcaaagccctaaaaaacacaccaaat

SEQ ID NO: 827773 - DNA, 614 bp, Homo sapiens
gtttggatttgatacattttttcaaatgaatgacttgaattgagactcaaatgttctrtatatgtttatttataggacaatccatatattttataaagtatagcattaataatatgatttcactttaatatctacagcagaatacattgtctgtatcttataggtatccaatatatatatatttttttctgattccccacgtttaatgggggagagaaacaatagccacagctatccaaattattataaaaaatttgctgagatgcattacaccagacacaatatgctccaaccaatactgctaaaaaattacattcaatattatttagacatacatgtaatgaaactgcaaaaggcatgatgagtatcaacgaaaattactacatatgtaattgggcaaattactcgatgtattacatgtcttggtcatacctaggttagaaagctatttagagcgtgctgcttcagccacagactgtttattcctcacataatgctaatcacagtgattgtgcctgtctctgttacgtctggcaaagcaacgtgtaagaagtcagctctggccaggacagccagttgaacacacatggcaacatgaaaaattctatttagct

SEQ ID NO: 827774 - DNA, 614 bp, Homo sapiens
gtttggatttgatacattttttcaaatgaatgacttgaattgagactcaaatgttctgtatatgyttatttataggacaatccatatattttataaagtatagcattaataatatgatttcactttaatatctacagcagaatacattgtctgtatcttataggtatccaatatatatatatttttttctgattccccacgtttaatgggggagagaaacaatagccacagctatccaaattattataaaaaatttgctgagatgcattacaccagacacaatatgctccaaccaatactgctaaaaaattacattcaatattatttagacatacatgtaatgaaactgcaaaaggcatgatgagtatcaacgaaaattactacatatgtaattgggcaaattactcgatgtattacatgtcttggtcatacctaggttagaaagctatttagagcgtgctgcttcagccacagactgtttattcctcacataatgctaatcacagtgattgtgcctgtctctgttacgtctggcaaagcaacgtgtaagaagtcagctctggccaggacagccagttgaacacacatggcaacatgaaaaattctatttagct

SEQ ID NO: 827775 - DNA, 611 bp, Homo sapiens
ccagattattagtcaatgactcctaattagtaaactcagataaagtaaacaatattaaatcagtaaggtaaaagttactatgtaatacaagaagcttattaatatcaawctaaaagcattaacattgctacctcaccaagccccgaaaaaaatcacattaaaacctctgcagttatataaacattacaaactttaaaattcagtaacctggatatagtttgaaaatcaaatgtgtttttttttgtttttttttattgttgttgtttatttttggttttgtttttgaaacagtctcattctgtcgcccaggctggagtgcagtcgcgcgatctcggctcactgcaacctctgccttcctgcctcaagagatccttccacttcagcctccccagtagctgggactacagacgcctgccaccatgcccagataattttttttattttttgtagagggggtcctcgccatgttgcccaagctggtctcactcctaagctcaagcgatctgcccacctcagcctcccaaagtgctgggaatacaggcgtgagccaccatgctcggccttaataaactacttctttaaatgtaccgttgttgctaatatttaataat

SEQ ID NO: 827776 - DNA, 603 bp, Homo sapiens
agagattggatattcaggagatacagaaccacctaaattataagattcctgcgaaggagaaaggagatggggtctaaagcacatgtgaggaattgatctctttcagaaagaaaaacagctcctctatggaataggcaggaaggaggaccagatgggtacagatgctgttatgttagtgagtttggtagcaggatttgggggtgtggagtggggggagtggccttatgtgacagtgtctattatctctgtgaaatatgaaataaaggcatccgttgatgggtaggaaagttgggcatttaaggaagctagagaagatctggaatggtcattgtggattgctggactatagattgaccagagatatctgaaggattctggcactgtggtgcccattcagaatggatgctcatgaatatatgatggtacaatctgctctgttgtgtttttctccagctgcttaaatacaagaagagagacagcacacagtgtgggttgctctgggaatggtcttcggccagatggggtctgacaaaagcccaaaggggcragggagtttaggattttggcagtactatcgctgaaacaatggaccctgaaatctaa

SEQ ID NO: 827777 - DNA, 563 bp, Homo sapiens
tttcaatattatagttcaacagtattctgtagcatggagaaaggtttaaagatttaattctaagacctgaagcaaaagttgtaaaatacacttcaagtttcgttcacaattattgagaatgcaactgtaacacataaaagatgagttgcttggggcttagtctccatctggtcttaaaacacacacacacacacacacacacacacacacacacacagccagaggtaatcttggcaaagcagtgttgagccagtgctaagagagtcactaataatagagtaacaccttagtaaaatcactttccttttattataccttaaagcatgctaatttatagaccctgagtcatccacaacatgaacgattttatatttctgggtatggtagtagtcattcatttaacaaatatttatagagtgcatgctacatgacaagtccagtcttcgcagagctcacaatgcagacacttgctctcagctgaacaagtcagttggaacatgcaacaaccacrcaacaaccacttttcctccccagacgtggtcatttctaagctgggatcctac

SEQ ID NO: 827778 - DNA, 666 bp, Homo sapiens
agcattacctgagtgtaacaaaggatcctgagagaaacgacagtgctgaagaggcttggcagtgagacgagtttcacttacatccttgggaaggaaggagyttgccctggactctccaaggcccgtgatcctcaggagtgctgacttagattctgctcacctcaaaactcttttgaaccttcctagctgcaccccaaaatcacatgccaaagcctggcaaacacctgtacccaaggaacgatctactggccacccacattggcttgacttatcattttgattgattccaactggctacttggaaagaaggcaggggctgtcccatagctgagttgtgcccactgcccacacctcattcattttagttgccatgaaggaggatttgatactggaggctgacagctgccttcatggtaacagagaatacagattcaaacaccactggaactgatgcattacctgagatggacaattgcatatcaactgcatgactggaacaaagtctcagcctgcactgaatgtgaaagagctgtttcacttctccattgatgcccttgtctaatgcagtagtgagaatgtgttggctgcatctgcctaggtccaaggttaatgtgttatggcccatacatgcctttccacctaccacttccttcactcatgggctca

SEQ ID NO: 827779 - DNA, 625 bp, Homo sapiens
caaagaatcaagagacctgtgtttcagcagctctgacttcatgtcctctccaccacccttcttcccacatctctggacctcggttcctccatctgcaaagtcgaggaggaggctctgggatctccaagggcttttcaagttctaacatcttatcctcttgccctgttcctccaaagagtacacaaatacctgagtggatgaccaggagcatgtgccactctataaccccccggagattcccatatggttggcaccaactagttgatgggctaaagtttacttacagagctgatgaaagcacattcaaggactttcaaatgaaggtaatgttacaggtctgacttatgaaaaggcagcacttgggttgtggctacacagtgctccagctcagcccattcaaactccccagttcaggaaaaaaatctaatgttcttatttaattccaaagaaattccatcagtcaatactgtggtttcgtttagtgaattcacatgggctgtgggggatggggaattagtgaacgagtcatttgatgmaatagagatcaagtagctggttggtttgatgcaattgtcttctcttattgtagatattcataatggcatcatgaatattccaaacccag

SEQ ID NO: 827780 - DNA, 542 bp, Homo sapiens
atccttcctatacttacttcttttctttttattttattttattttattttattttattttattttattttattttattttatttttgagacagagtctctctttgtcacccaggctggagtgcaawggcgtgagctcagctcactgcaacctctgcctcccaggttcaagccattctcctgcctcagcctcccaagaagctgggtctacaggtgcgtgccaccatgcccggctaatttttttgtatttttaatagagacagggtttcactatgttggctgggctggtctcgatctcctgacctcgtgatccacctgccttggcctcccaaagtgctgggattacaggcatgagccaccgcgcctggcctacttattttcttccttagggctattcacccagccctcactataccaggatcagtattaccatatcagcattccctacccacagtcaacatcactggattcaaagagtaaaggacttgtccaaagtcaaatggcatcaccctgcaggggacactgagtggaacatcttgccaga

SEQ ID NO: 827781 - DNA, 674 bp, Homo sapiens
acatatctcaggtattgaaattttgagatttgtatggaaaaaagttaggaagaagtggaaatcawgcagaaactaaagagattatcattggaaaattgtttgtattaattttgtgttacagaaaccaatacattattgtttgtagaacaataatggaaagaaaatagagaatgttaatagttctttttgacaactgaggaagagtagctgaagttggaaaaggaataatgaggatgatggcctctaattattaaaaatctactatgtgtacatatgaacagacatttctcaaaagatgacatttatgcagccaacagacacatgaataaatgctcatcatcactggccatcagagagatgaaaatcaaaaccacaatgatataccatctcacaccagttagaatggcgatcattcaaaagtcaggaaacaacaggtgctggagaggatgtggagaaataggaccacttttacactgttggtgggactgtaaactgttcaaacattgtggaagacagtgtggcgattcctcaaggatctagaactagaaataccatttgactcagccatcctattactgagtatctacccaaaggattataaatcatgctgctataaagacacatgcacacgtatatttattgtggcactattcacaatagcaaagacttggaac

SEQ ID NO: 827782 - DNA, 544 bp, Homo sapiens
tcctcacgcaaatggaaaatggactcaaatcaayatttttttgttaagagttaatgtttaatttttccattatacataactatatattaaagatgatacaaacagtatattttaaacacaagtagacgggctgtaattgtcaaaatacttctatgtatgaatttaggtactattagataacaacaacaaaaatcattgtaccttcatgttaagaaaatactttattttatctaaaaattcctgtagtgatgaaaggtgaagccagctagacttcctgggtggagtggggacttggataatttttctgtctagctaaaggattgtaaatgcaccaatcagcactctgtaaaaatgcaccaatcagcgctctgtgtctagctaaaggattgtaaatgcaccaattaggactctgtaaaaatgcaccaatcagcactttgtgtctagctaaaggattgtaaatgcaccaatcagcattctgtaaaatggaacaatcagtgctctgtgaaatagaccaatcagcaggacgtgggtggggacaaataat

SEQ ID NO: 827783 - DNA, 639 bp, Homo sapiens
aagctgatatgaaaatttttacacaagttatatatgttttattcccatttgtyttttttacctagaataaaatttttaactattagagcgtgtgtatatttatctttaaaagaaactaaacagtccaaagaattgcagcatttttgcactcccactagcaatgtatagcagttctagttgctccaggtctcttacaaaaaacaatatatgtctagaaaaggttagtgaaaagtaacaaaaaaaggtcatacacacacacagtaagttaaaataagttagatattatctgatcatattctcttataataatttgaaagaaacaaaattataagaaaaataaacattttttcttagaaattacataatggtgttctatgtaatctcttaatcgaaaactataattataaattttctacacttatatcacatgataataattaccaaaaagcttgttgacagaagttgaaactagtaccagaaggtaattgatagaattcattttttcattcattcattctttttttagtgctattgttataaaagatactgaagatccctgggcttaaatcattttaagaggctagagaagaacccattcccaaaccaaaacaaatctagagaaagaaattattatgatga
